United States Patent Application Publication US 2025/0215492 A1 - sequence listing, part 3

SEQ ID NO: 30490 - DNA, 120 bp, synthetic construct
  source 1..120: mol_type = other DNA
ttgttgcggtgtgtccattgtagtgggaagagctctgctcttagagtgttatacagcctatagggtttggattcttcacatttggttggttgactttgagtctcagcactttcaattgta

SEQ ID NO: 30491 - DNA, 120 bp, synthetic construct
  source 1..120: mol_type = other DNA
aaagtcattgaacaagcaaacagtttactttccccaataaaacaaaacctaaagtatttggtctttaataaatgttcaaaaattattttctcagtgtgtgttcgagatataaatatccct

SEQ ID NO: 30492 - DNA, 120 bp, synthetic construct
  source 1..120: mol_type = other DNA
ggataggatgtaggagatgcaggtgagcagacgggtagcagagacacataccgtgtttctgagcgaggactgtagcatggccagaaggctgttctgatgtagagagggattttccgctca

SEQ ID NO: 30493 - DNA, 120 bp, synthetic construct
  source 1..120: mol_type = other DNA
aactggctgtctgtgtcaggtcgtcatcttatcttagaacacatccattgatacatacactgtttcttcttccctattacctctgattctgcttctctaaaataaaagctgaccgactgg

SEQ ID NO: 30494 - DNA, 120 bp, synthetic construct
  source 1..120: mol_type = other DNA
gatgctagcatacaggtagatgaatgtgaagggagtatagatggtgagaaagggagggatgtggagttcattttaagacaaagagggaaaggcttctgcaatttgcttcaaggttatatc

SEQ ID NO: 30495 - DNA, 120 bp, synthetic construct
  source 1..120: mol_type = other DNA
aattgagaaatttgcatgtaaagctaaggaaggacacagctttagaaacaatggactcatttctctccagacctatgtgaaagttggtttgacagtaattaccttatgggagcccaaagt

SEQ ID NO: 30496 - DNA, 120 bp, synthetic construct
  source 1..120: mol_type = other DNA
tgaactcccgcagaccgaattgccttcaacgatcctcaaagacttttgtgtttgaccaatatcaattaattacatcagtaaataactgcctgagccttgtacttctgtcctcccaagatc

SEQ ID NO: 30497 - DNA, 120 bp, synthetic construct
  source 1..120: mol_type = other DNA
tcactatgattacctggggacagatgtgctgtctgctcacagggcttacctgggaatgaagttccactcctccacttgcttagttcttgtttatttgtctctcccaccatttcaagtctt

SEQ ID NO: 30498 - DNA, 120 bp, synthetic construct
  source 1..120: mol_type = other DNA
gatgacccctgtggctagaggcgagggtgaagataatgggttcacattgcacagattaaagcagagactctattgtgttcagaagaacctagagttaatgggccacaaacagatcatctt

SEQ ID NO: 30499 - DNA, 120 bp, synthetic construct
  source 1..120: mol_type = other DNA
ctctgtcttgtcaccttcctttgctgcatgcttcagtctctgcttgaatttgcacctggaaatggggttgaaatacatttggtgcagaacgatagcatttcaaacctgtctaaacagttt

SEQ ID NO: 30500 - DNA, 120 bp, synthetic construct
  source 1..120: mol_type = other DNA
gcatgacttgccacatccctgaaatacgaattgcatgaattttatgctggaacaagctgcagagtgatcagtcacatttgcagccctgtggactatggctattggaccgtacaattaaaa

SEQ ID NO: 30501 - DNA, 120 bp, synthetic construct
  source 1..120: mol_type = other DNA
aagctggtcaggaacttaatgaacatttcctgcaatacactcattgtggctagtgtcaccaactttaacaagtgacattaacaagaggcttatctagctagcctgagtcagttttgtgcc

SEQ ID NO: 30502 - DNA, 120 bp, synthetic construct
  source 1..120: mol_type = other DNA
aagaattagagtttcatgtcagaggccctcattgctaaagaagtagaggctcagtgtgattgggaaggcccacgtggaactaggtcatccccttcagctgcttcccaaccactgctctgt

SEQ ID NO: 30503 - DNA, 120 bp, synthetic construct
  source 1..120: mol_type = other DNA
ttatccctctcttcttcctcctcacttcccatgacgacacctctgcttcaggtcctcatttcggttcagtagtctcgaaagatctctcttcccattctttcttcaaatgcatcgtgtcct

SEQ ID NO: 30504 - DNA, 120 bp, synthetic construct
  source 1..120: mol_type = other DNA
tggagagaggggataaatgaggaagtgctttgaaagtggacacaggatgacattagttaggcatgaggcataatactgctgggagaatacaggaaagtcattctccttcgacttcctcac

SEQ ID NO: 30505 - DNA, 120 bp, synthetic construct
  source 1..120: mol_type = other DNA
cctgtggtacagggctgcccacagggaaggaagaagacatggcggggacatggcctgactcccgatgtgctccttcctgtagggtcttccacatggctgggctccctcccgtcccagcac

SEQ ID NO: 30506 - DNA, 120 bp, synthetic construct
  source 1..120: mol_type = other DNA
tatctgtgcacttcctttgagcatacacctcctatctatgcacttcctaagagagcatgcttcccgtgagcccacatttcctatctgtgtacttcctgtgagcatacacttcctatctgt

SEQ ID NO: 30507 - DNA, 120 bp, synthetic construct
  source 1..120: mol_type = other DNA
ttattttatgagtgaagtccctgctggaaaccagccctcttcccagtcaaaatccatctgtttctccactgcctgtacatgcctttctctttacaatacagttagaccatttgagtcacc

SEQ ID NO: 30508 - DNA, 120 bp, synthetic construct
  source 1..120: mol_type = other DNA
tttatgtaaagtagacacttaattcaactgaatggaaatagcaaattagagaatgcttgattatggcattgaagatgctttctgggatgaagacattatttggaaaatctccagatgctc

SEQ ID NO: 30509 - DNA, 120 bp, synthetic construct
  source 1..120: mol_type = other DNA
atgcaggccatctgcaagctatagaatgggggaagctggcagtgtggctcagttcaactctggaagcctcagaaccagggaacctgaaggtgtaactttcagtccaaggccaaagtccta

SEQ ID NO: 30510 - DNA, 120 bp, synthetic construct
  source 1..120: mol_type = other DNA
atgatatcttgggactcctgcttctatccagcccctacatcgctctttcatgattttaaatgtgcactcaaggagctcactccaaatccaagcctacatgtatgcctaacctactccaac

SEQ ID NO: 30511 - DNA, 120 bp, synthetic construct
  source 1..120: mol_type = other DNA
gatttaatgatcaatttgcttatgttaaaaatacatttgaatatgatttactgcccttcagttaatgctagttccttgcttgcagcaggaccaatcaaaaggagctaaaccttaaaaccc

SEQ ID NO: 30512 - DNA, 120 bp, synthetic construct
  source 1..120: mol_type = other DNA
aaaaacagagttgtctctaaaaaggatctgctctcggcatggtagcatcagagcatctactcaattgtcagccataaatgaagttcagaattggacacaccttcacagtcttccatatgc

SEQ ID NO: 30513 - DNA, 120 bp, synthetic construct
  source 1..120: mol_type = other DNA
aacctgctgctttgcatagaaataaatgatgagcatgttttatgtctctaactacacatttatcttgtcttaatggctgcttggcattcatttcttgggctatagcttcacagatttagc

SEQ ID NO: 30514 - DNA, 120 bp, synthetic construct
  source 1..120: mol_type = other DNA
ctcaccagaaaacaacccctccagcaccttgaccttggatttccaggccccagaactgtgagaagttaaatttctgttaagactcccagttatggcagccaagcagactaatccacttag

SEQ ID NO: 30515 - DNA, 120 bp, synthetic construct
  source 1..120: mol_type = other DNA
acaggttacagaatcctccttgaacattttttctttcagagaagtcaagtgtgtaggtatttggagctaggctaggtgataagagggacgtaaggaatgtggtgtctgtcttacatgtga

SEQ ID NO: 30516 - DNA, 120 bp, synthetic construct
  source 1..120: mol_type = other DNA
ctgtctgattgtgcttgggcagatttctcttgtctccacctagctggggtgattcaagtaggaaaaaagaaaaccctcctgcacagattgtgcgatcatttcatttccttgcctttgttt

SEQ ID NO: 30517 - DNA, 120 bp, synthetic construct
  source 1..120: mol_type = other DNA
tatttgattttttttacagcacatgaaatagttttgatgtttaaatgaaggaaacaaaagcagtgctttcgatagcccaagcttatctttcctaaatgaacccaaacctcacagttattc

SEQ ID NO: 30518 - DNA, 120 bp, synthetic construct
  source 1..120: mol_type = other DNA
catgtattagctgttctcacgcctgctgagaatgccctgtgactgaagcaggggctgcttctgggggacagtgcagccaccatgtgggtcaatataaggaaatcaggatgatacaagtga

SEQ ID NO: 30519 - DNA, 120 bp, synthetic construct
  source 1..120: mol_type = other DNA
tgggatgaagagaagacggagcaatggctgccactgactcagtgatgtgtaggacatggggaagccgggattgtggacactccccaccgtggtaccccccgctccagtggtaccctcccc

SEQ ID NO: 30520 - DNA, 120 bp, synthetic construct
  source 1..120: mol_type = other DNA
ttctccacagaaaccacactgttggactcttttatgccttggtgcatcctagatgtcacattacagtagtttggagagacttttcttaggtgtaagtgagataaaggggttgctggaggt

SEQ ID NO: 30521 - DNA, 120 bp, synthetic construct
  source 1..120: mol_type = other DNA
aagtacctgcccaaatgtccacccaacagataaactccctgttacgtacataattacaagcattctttacctgacagtcccatggctggacaagccaagctaagttttcagtgtacataa

SEQ ID NO: 30522 - DNA, 120 bp, synthetic construct
  source 1..120: mol_type = other DNA
tgtagcctgaagtggagctcagaagcaggggctccagccgtgggtggcaaactctcaaacccaatgacaccaacagtatctttggttagagcatttagagttttagccatagttcaatta

SEQ ID NO: 30523 - DNA, 120 bp, synthetic construct
  source 1..120: mol_type = other DNA
cagtgtccttgggtatttacaatccctcgatccttgcctgattggttttccataggcagggcttcgtccaagttcctagggtcgcaataccattctcattagaaggttcctcttgagaga

SEQ ID NO: 30524 - DNA, 120 bp, synthetic construct
  source 1..120: mol_type = other DNA
gtcatccttagacctaaggggccccaggcctggcagtgccttccttcagagttctaagctccaatgcctgtgtgtggcctggctcacagagccatctgagcaggacccctgagcccagcc

SEQ ID NO: 30525 - DNA, 120 bp, synthetic construct
  source 1..120: mol_type = other DNA
tgtacagcattacattgtttccctggtggggaagaacaggttagctttataattttgggagagcaatttaatttaaaagatataccctcactgggataattaaatcctgatgtgtgaggt

SEQ ID NO: 30526 - DNA, 120 bp, synthetic construct
  source 1..120: mol_type = other DNA
gatcagatgacttaaatcaaaaggtaatatttatgagacacaaagaattactctctcctctcaacaaaaataaagcctccgcctctaacatcatccagtctgcctcccagacatgaactt

SEQ ID NO: 30527 - DNA, 120 bp, synthetic construct
  source 1..120: mol_type = other DNA
atgctgaggagggggtgggaaaagttatagaagccagtagccaaacccggtatacccaaatgtttagcttagattgaagctttggtgtttctaatatgtacattcggctcacttccagaa

SEQ ID NO: 30528 - DNA, 120 bp, synthetic construct
  source 1..120: mol_type = other DNA
gagaacagccctcttctgctgtgtgacatttcagaagatggaggctcagaagcttcaagtcttattttgctaccaggacagaaacagaagccaaatctttaggcttcagatttacctttt

SEQ ID NO: 30529 - DNA, 120 bp, synthetic construct
  source 1..120: mol_type = other DNA
ttgctccaagagcctggcacactctggagcttttgcttcacccagcaggtacggagtcaaactcgacacctggaatctgtatgttgctagtgttgagtggaactcaacacctggaatctg

SEQ ID NO: 30530 - DNA, 120 bp, synthetic construct
  source 1..120: mol_type = other DNA
ttttagccctcaaattttttcaaaactaatttgcaagatgtatacgcactgtagttcaaatgtaaatcatcagtgtcctgattactgaggcagatgtatcaataagatcgccagatttgc

SEQ ID NO: 30531 - DNA, 120 bp, synthetic construct
  source 1..120: mol_type = other DNA
cctagccttcagcagcctctactctgctttctgtctctgtggatttgcctactctggccgtgtcatataaatggagtcatttggacttttgtgaatggcttctttcatggaggatactgt

SEQ ID NO: 30532 - DNA, 120 bp, synthetic construct
  source 1..120: mol_type = other DNA
atcccttataaacacatatacacacatgtacacacacatatgtgcacatacatatatatgtgcatgtatatatcccttacatatacacacatatacatgcacacatatatgcacacatac

SEQ ID NO: 30533 - DNA, 120 bp, synthetic construct
  source 1..120: mol_type = other DNA
cattcagaccacagtgacagcctacaatcaagttctaaattgtgtagttcaaactaggagaactgtgaggagatggttttggggaaagtgacttctgcatttgcctcaatgattttccct

SEQ ID NO: 30534 - DNA, 120 bp, synthetic construct
  source 1..120: mol_type = other DNA
gagccagatattttgatgttcattttgatgcagtctgccatgcctggaacaccaggtcatatggtacatatgacttggttaaagaagagattaaccaataagagaactttggcaggtaag

SEQ ID NO: 30535 - DNA, 120 bp, synthetic construct
  source 1..120: mol_type = other DNA
taaaaataaaactctgggatccaaaagacagactcagtgatagtttcccaatactgttattgggaaagcaataaggctgaataaaaggaaagacccttaaataaagtagaaaagatttgc

SEQ ID NO: 30536 - DNA, 120 bp, synthetic construct
  source 1..120: mol_type = other DNA
ccccccaccaaaaaaaaagtccaagttgtaatccttggatcctgttaatgttttcttttatggccaaaagggggccttttgtggctacattaagcatctgaaatggaggattacccttag

SEQ ID NO: 30537 - DNA, 120 bp, synthetic construct
  source 1..120: mol_type = other DNA
acctgcagcattccagcggatctacaggttttgaggtttcaggatcgattctttcgtgtatagcttttgcagagcatgtgaaatatttatttgtctcatgcagggctacaaaaagaggct

SEQ ID NO: 30538 - DNA, 120 bp, synthetic construct
  source 1..120: mol_type = other DNA
tggcccaggggagcatctctagccgtttcaatcccaagaaagcaccttggggtagagatgatgcaaaaccaacctgtacatcgaaatctattttttattattcaaaaattacaacctggt

SEQ ID NO: 30539 - DNA, 120 bp, synthetic construct
  source 1..120: mol_type = other DNA
gaagacaatgatattttattgcttcatcttggagcaaggagaaaattgtttctcttcttcccacttccccattttttaagagtagtgctcgagtcacacttgcacttccacgctgaagcc

SEQ ID NO: 30540 - DNA, 120 bp, synthetic construct
  source 1..120: mol_type = other DNA
gagaaatcgccacaaactgcgtggcttaaaacaacagaaattgcccctcccagttctgaaggccagagatgtggacacagttgaaatgacagtgacagagaagggtgtggaggagaggag

SEQ ID NO: 30541 - DNA, 120 bp, synthetic construct
  source 1..120: mol_type = other DNA
atgggtgggtggagaggctgtgtgggaggaggtgcccagagatgggtggagaggctgcgtgggaggaggtgcccagagatgagtggagaggctgcgtgggaggaggtgctcatgggtggg

SEQ ID NO: 30542 - DNA, 120 bp, synthetic construct
  source 1..120: mol_type = other DNA
atgatcctgcaatggcaggtgcaagacggatggatttgtcacaactcacagaacacacaggcaaagggtgaaccctaatgtcagctgtgggacttagttaataatgtttcaatattggtt

SEQ ID NO: 30543 - DNA, 120 bp, synthetic construct
  source 1..120: mol_type = other DNA
ttataaattaatagccattgtttctcttgattttcatgaccattctgtaggacgagggtagctattgtccccataggagaaaataagacgcagagagttgctgaaggccgtgtgatccac

SEQ ID NO: 30544 - DNA, 120 bp, synthetic construct
  source 1..120: mol_type = other DNA
gtctttctgatgtcccactctgccctctgtgcttagaaaattccaaataaacacaggtcaagtgaatttgttaggcttgtctctaaactttcaaaaggatctttgctgagagccacctct

SEQ ID NO: 30545 - DNA, 120 bp, synthetic construct
  source 1..120: mol_type = other DNA
tgcatttgggtatttccaggtggctcaagtcaaacttaagagcgcgacccattcggaaaatcaagtgaataaagcaggatggcatggaaagggatgggggctttactgagagagggtgag

SEQ ID NO: 30546 - DNA, 120 bp, synthetic construct
  source 1..120: mol_type = other DNA
tactgagcgagggtgagagagcataggacgggaaagagagggatggaggctttactgagagagggtgagagagcataggacgggaaagagagggatggaggctttactgtgagagtgtga

SEQ ID NO: 30547 - DNA, 120 bp, synthetic construct
  source 1..120: mol_type = other DNA
catgaaaacagcacagaacaatagagttctcatacctaatggcttgagcacccccccccaaaaaaaaccaccaccatcatcagtaccacctcttccccaaccttcaccacctatacaacc

SEQ ID NO: 30548 - DNA, 120 bp, synthetic construct
  source 1..120: mol_type = other DNA
cctcacatttacaatgtcaataacctgtcacatttacaatgacctgacttgcctatggttgcacttttaattagtagtagaaccaggacttgagcacgagtcttccgtcaccagagctat

SEQ ID NO: 30549 - DNA, 120 bp, synthetic construct
  source 1..120: mol_type = other DNA
gtgtcagatcccaagcggagtgaggagaaggtgtctgcaaggagaggtagcagcgatggtgatgaaaatgtcttagactcaggagctagatcaagtaagaacagtaaagaagatgaaaac

SEQ ID NO: 30550 - DNA, 120 bp, synthetic construct
  source 1..120: mol_type = other DNA
tcctgtgatgctggtgcacagacccctgggccctttctgtttgctgttcaagtctcgagactgcctgtgccctcccgcagctgtgctcttgccgctgccgttctcaccacccgatagctc

SEQ ID NO: 30551 - DNA, 120 bp, synthetic construct
  source 1..120: mol_type = other DNA
agattgcctgtctctcatttaaaccagagcaggccgcgtggccctgcaggaaaatgagatttaaagaaaacgaagaatgacaagtaaggacgtgtggagttcactgacaataaatattat

SEQ ID NO: 30552 - DNA, 120 bp, synthetic construct
  source 1..120: mol_type = other DNA
cctgctcacacacacacacatgctcacccatacacatgctcacacacacgctcacattcacacacatgctcacccatacacttgttcacacatacacatgctctcacacatgctcagaca

SEQ ID NO: 30553 - DNA, 120 bp, synthetic construct
  source 1..120: mol_type = other DNA
cacaaattacatacacctgctcatacacacacacatgctcacacgattacatacacatgctcccacatgctcacctatacacatgctcacatacacacgagtacatacacatgctgacac

SEQ ID NO: 30554 - DNA, 120 bp, synthetic construct
  source 1..120: mol_type = other DNA
catatacaagaatcatgttcttcttcaccacatcagaactagtcttcacctcaaaagatcactaggacaatgcaagtggggagaagcagctaatattccggagagaacctctgtatcgtt

SEQ ID NO: 30555 - DNA, 120 bp, synthetic construct
  source 1..120: mol_type = other DNA
gtgtgggccaaccatgtctttcccaggtgttttattacttgaaggaattgctctcaatcttattaatttacttcaactacaacttattttttctaaatattgctgccatatctagacaac

SEQ ID NO: 30556 - DNA, 120 bp, synthetic construct
  source 1..120: mol_type = other DNA
ccttgaagattagttcctactttgtccaaggcactctggcagttactggattgtgacagcgttaacatagagttattccttgccataacagaaagtcacatttggaggtgaatattttgc

SEQ ID NO: 30557 - DNA, 120 bp, synthetic construct
  source 1..120: mol_type = other DNA
ttccagcgcttattgtgtgactgaagtttgtttaatgggcacaatgaggatactactacttacctcttagggaggtgtattaggcagttcttgcactgctataaagaaatacctgagact

SEQ ID NO: 30558 - DNA, 120 bp, synthetic construct
  source 1..120: mol_type = other DNA
gtgacccacagacattttctcagacagggctgtttgccctgaaagaagtgtagtgtcaggaaacacatttcgtagatatcaggaatatgagtttttatggtggtatcatgagttgctctc

SEQ ID NO: 30559 - DNA, 120 bp, synthetic construct
  source 1..120: mol_type = other DNA
cttgtttttgtctggcttctgttatctagcacaactattttgagattagattgaatcgctattggactgcatccattcacctgcaaacaatctatgttgttcccaatttgtggctattaa

SEQ ID NO: 30560 - DNA, 120 bp, synthetic construct
  source 1..120: mol_type = other DNA
aggtgtgagtcaacatgctcggcctgttacacacacacacacacacctggtactacaggtgtgagccaacatgctcggcctgttacacacacacacacacctggtactacaggtgtgcgc

SEQ ID NO: 30561 - DNA, 120 bp, synthetic construct
  source 1..120: mol_type = other DNA
agcctctgcatgtatttagcatccgcctgtacggtatttgagacacaatttattttgtcaggttaattctattttaggaaaggaagatgtgttgttgacaggttggcttcagccatgttt

SEQ ID NO: 30562 - DNA, 120 bp, synthetic construct
  source 1..120: mol_type = other DNA
aataaatgcgaatgtgttggtgcattcttcctgagtgggatctggagcttttttgtgtctgtgtatgatttgtgcctgggcttctagtgtcactttaatagcgtttcgtgctgttcattc

SEQ ID NO: 30563 - DNA, 120 bp, synthetic construct
  source 1..120: mol_type = other DNA
ggtccataatgatgtagcaggaaaatcaactgtctgctgtggacggctcctgcttcttgcatgccaggattaagactaactccttacttcaagtgtggtggagacagaagctttcataga

SEQ ID NO: 30564 - DNA, 120 bp, synthetic construct
  source 1..120: mol_type = other DNA
agaaaatccagatggaaggaaagaaaggaaccttaacgatgtctaccggggacagagcgtggggtccacggagaagtcccaggcgttttccacctaagaagcatcatggtgattcaaaca

SEQ ID NO: 30565 - DNA, 120 bp, synthetic construct
  source 1..120: mol_type = other DNA
agaagtgtatgaatgagtactgtcattttaaagtcaccatccccaatactccaggaggacagggaattgtgcaaaatatcctggtaagtttctatcgactgctggaccatcccataatac

SEQ ID NO: 30566 - DNA, 120 bp, synthetic construct
  source 1..120: mol_type = other DNA
agtaacaatcacaccaaattgtgaatattgaacaggtggaggagaacaggagctgggctcacccagggcaaaccttctcatgctgcctggaacacgcacacaccacttgcaccttttacc

SEQ ID NO: 30567 - DNA, 120 bp, synthetic construct
  source 1..120: mol_type = other DNA
agccactgtggctttgtcatgcagctagtacaactgaagagctgacttgtaaactttatccaattttagtgactctaaggaaccacatgtggctactgtatggaacaaggcggctctgga

SEQ ID NO: 30568 - DNA, 120 bp, synthetic construct
  source 1..120: mol_type = other DNA
tgcagcagatcaggaccacgtgctcccacgtcaccacacacagcagatcaggaccacgtggtcccgcatcaccacacacagcagatcaggaccacgtgctcccacgtcaccacacacagc

SEQ ID NO: 30569 - DNA, 120 bp, synthetic construct
  source 1..120: mol_type = other DNA
tctttctcattgacttggtctttgctgacaggtgaaatacggaagtgctaacccctggcacctgtgaatgtgacctcatttggatacaggatttttcagacttaatcaagttaacattgg

SEQ ID NO: 30570 - DNA, 120 bp, synthetic construct
  source 1..120: mol_type = other DNA
gatcgaaccaaagtcaccaacatggactgaaaatgagccgcaagtgctggatcccgagtgtgaacggctggcaccacgctttggaggaaaactgatactccccagttttacatacttctt

SEQ ID NO: 30571 - DNA, 120 bp, synthetic construct
  source 1..120: mol_type = other DNA
atgagcctctgagtctcacggaccacagagactacaggtcagcatgtgagagcttcatgtaggacccagcacctgctgaacggaggttggatgtgggcatcatcgtggtcgttgagtgtg

SEQ ID NO: 30572 - DNA, 120 bp, synthetic construct
  source 1..120: mol_type = other DNA
gctcataaaaatgaaagaacacatatttgggggcaccccatgccacacaaataagcacattttgggtaatgggttgaggtggatgaaaactccagtggtattaggactccgtgggtattc

SEQ ID NO: 30573 - DNA, 120 bp, synthetic construct
  source 1..120: mol_type = other DNA
gaaaccctaatctgcatgaaaaacttagccacaatttccccaatattccaaacaaagctcattttagaaatgaagcactcagcatgtcaggaccactggactgtgtcctgcagtcctcaa

SEQ ID NO: 30574 - DNA, 120 bp, synthetic construct
  source 1..120: mol_type = other DNA
actatgtacccctccatgtgcaggccttgcctatgccacgcagtcctcaatggtgagaaacagctttcctgcaaaaataggctcctccaaatgtgcgccacaaagccggcatcgtccaga

SEQ ID NO: 30575 - DNA, 120 bp, synthetic construct
  source 1..120: mol_type = other DNA
agtctgtgcctctctgctcctgtaccagggacatgcccaccaggagaccccgcatggctgagagggcacgggaatgcacttgtaaagtgagctcagaggaaggaaaatcagaactgctga

SEQ ID NO: 30576 - DNA, 120 bp, synthetic construct
  source 1..120: mol_type = other DNA
ccaacagggtgtctggagtcaggctttgcagggtttccgccaggtggaggctgagtctgtccttgcggtttaggcattccagcagaagtggtgcttgctgtcagagctgccattacatat

SEQ ID NO: 30577 - DNA, 120 bp, synthetic construct
  source 1..120: mol_type = other DNA
gtgacatttatttacccaaatgacgcttgctggccttgagtgccaaggagacagcagctgcttccgagtcagaggcccaaaacggcagcgcacatggtaggcactaacagacgtgtattc

SEQ ID NO: 30578 - DNA, 120 bp, synthetic construct
  source 1..120: mol_type = other DNA
tatagattcaagaaagcatccactggatcctcctctgtcatcaacgtggaatattctgggataacgccacagtagccttcgttgggtggcttctcattctatcagaatataagccacagg

SEQ ID NO: 30579 - DNA, 120 bp, synthetic construct
  source 1..120: mol_type = other DNA
tttaccaagggcctctggtgagggtaaggggtctctaagaaaagggagagttccagttccttctttcccatacatcttcaggtacttgttagtttatagacagttttaaaatagtgagtg

SEQ ID NO: 30580 - DNA, 120 bp, synthetic construct
  source 1..120: mol_type = other DNA
gtattccagagccattagtgtgttagaaaaaaaaaaaaccccacagtagaaaatgaaatccattattggcaaaaaaagcaagccaagacagagctgagatctgcacggtgtggccgtgta

SEQ ID NO: 30581 - DNA, 120 bp, synthetic construct
  source 1..120: mol_type = other DNA
ccctctcagtaaaactagagtaactaggcatttttaaagaagatggtggcgtcttccactgttgccctaaatggaaatgctccaccgcaaaactcaatgtgatgctagtgcctcacgacc

SEQ ID NO: 30582 - DNA, 120 bp, synthetic construct
  source 1..120: mol_type = other DNA
aggacaatatttggaagagcatcagacactagtgagaagtccttattcatcataaaagaaggtaagtccattgcaacaatagggcagtgaaacaactgcatcttagtagagccctcaccg

SEQ ID NO: 30583 - DNA, 120 bp, synthetic construct
  source 1..120: mol_type = other DNA
actggatcttggcagagccctcaccatctacccatgcatactggatcttggcagagccctcaccatctacacatgcatactgggtcttggcagagccctcaccgtctacacatgcatact

SEQ ID NO: 30584 - DNA, 120 bp, synthetic construct
  source 1..120: mol_type = other DNA
taatagtatcagtctttcaaaaagatggtggtctttattctctattttccatagaatgtggtcacaggcatcgtgtgagcactgccatttctgtgcttctaccacacacactctaagagg

SEQ ID NO: 30585 - DNA, 120 bp, synthetic construct
  source 1..120: mol_type = other DNA
aactatgagaaagcctggtaggtgctggtgtaactgacacgggctctgagtttatgagaaagcctggtcggtgctggtgaacatgggtgtctcccctcagagaagtaagctgaggtgtgt

SEQ ID NO: 30586 - DNA, 120 bp, synthetic construct
  source 1..120: mol_type = other DNA
attcgatccccttggacgaggctttctggaacgtccagaataaagagaatcctcatttctcagcacacggacttctgatgtgagaagacagtgactgtgtgctcattaaaactcactctt

SEQ ID NO: 30587 - DNA, 120 bp, synthetic construct
  source 1..120: mol_type = other DNA
gggttacacgcgagagccccacgcgccagaggttccggggcagccgggttacacgcgagagccccacgcgccggaggttccggggcagccgggttacacgcgagagccccacgcgccgga

SEQ ID NO: 30588 - DNA, 120 bp, synthetic construct
  source 1..120: mol_type = other DNA
caattttgaaaaccctcattgagctcttagagtacaaactgtgtcccctcaagaggatatgttgagtcttaaccccaggacctcagcatgttatgtaacttggaaaaaggaccttcacag

SEQ ID NO: 30589 - DNA, 120 bp, synthetic construct
  source 1..120: mol_type = other DNA
acagctacaccagctctggggttccacgctctgatctgacttagctgttttccaccctaaccccatgtgagacagccactgccccaaaactagggatgggaaccaaaacctttgagaagc

SEQ ID NO: 30590 - DNA, 120 bp, synthetic construct
  source 1..120: mol_type = other DNA
acactgctgttacctctcactgcacggggactcacagacacaaagatggtcattcacagcatcaccaaaatcgatccacgaggctttgagaaaatgcatctctaaaaaaagcacatttgg

SEQ ID NO: 30591 - DNA, 120 bp, synthetic construct
  source 1..120: mol_type = other DNA
agagtacagtttcacaccactgtaaagtgagaaatactaagtccaaccatcctgaggcggggaccatctgtgtattgttgagtctgctttccatgaatcatgcttcttcttacatgataa

SEQ ID NO: 30592 - DNA, 120 bp, synthetic construct
  source 1..120: mol_type = other DNA
cccaggagaactggatatccacacgcagaggacggcggccagaccctcacctcccaggagaactggatatccacacgcagaggagtgagccagaccctcgcctcccaggagaactggata

SEQ ID NO: 30593 - DNA, 120 bp, synthetic construct
  source 1..120: mol_type = other DNA
caccatccagagagcgaaaagacaacccatataaagggggaaaagatttgcgaatcaaattgcagtgggggattaatatccagaacatgtaggaaacttccacaactcaactacaataac

SEQ ID NO: 30594 - DNA, 120 bp, synthetic construct
  source 1..120: mol_type = other DNA
atcgtgtgacaactgcctgctcataatgtgaactctgcggtgactagaaccgtatctggcatatggcagacattcagtacaaaacccatggacagaacaaataagtaagtccagaggtct

SEQ ID NO: 30595 - DNA, 120 bp, synthetic construct
  source 1..120: mol_type = other DNA
agttactcttttccattccatgcacccagcacagtcataggcttccagggtaggtactgtcaatgtttgttccaggaaaacccaattcagcttttcaaacaagatttatacacaccttca

SEQ ID NO: 30596 - DNA, 120 bp, synthetic construct
  source 1..120: mol_type = other DNA
aggcctgcgtccctgagctgtggggtgtccgggtgattctgaggcctgcgtccctgaggtgtggggtgtccgggcgattgtgaggcctgtgtccctgagctgcaggctgttgaggtgatt

SEQ ID NO: 30597 - DNA, 120 bp, synthetic construct
  source 1..120: mol_type = other DNA
ctgcggggtttctcggtaattctgaggcctgtgtccctgagctgtggggtgtctgggtgattctgaggcctgcgtccctgagctgcggagtgtctgggtgattcttaggtctgcgtctct

SEQ ID NO: 30598 - DNA, 120 bp, synthetic construct
  source 1..120: mol_type = other DNA
ttgaggtgattctgaggcgtgcgtccctgagctgtgaactgcccgggtgattctgaggcctgcgtccctgaggtgcggggtgtctgggtgattctgaggcctgcgtccctgagctacagg

SEQ ID NO: 30599 - DNA, 120 bp, synthetic construct
  source 1..120: mol_type = other DNA
cttttgcttgtggcccttctgcttggcatgcatactcaggcctgcaacatagcacgtggtcctgatccttcttcgtaatgtgtattttactggttggttgcttgttgttcataattttta

SEQ ID NO: 30600 - DNA, 120 bp, synthetic construct
  source 1..120: mol_type = other DNA
tggccagaactgtgtttcttgagttgtttgagccgtttctgttcatgacctacagtaacgccgctgtctctgtgatgctatagggatggtcagtgaggagaccgccgcaaaatgcagact

SEQ ID NO: 30601 - DNA, 120 bp, synthetic construct
  source 1..120: mol_type = other DNA
ctctcctcctcctccctctcctcctccatctcctcctccttctccccctcctcctcgctcttctcctcgtccttcctctcctcttcctcttccctctcctcctcctccatcttctccttc

SEQ ID NO: 30602 - DNA, 120 bp, synthetic construct
  source 1..120: mol_type = other DNA
agacaaaaagtagcatcactgtagagagcttctggatgtctgtggcttaggggtgcttgaaaagttacagatgctcttttgtacactgagtcaaggctttggagaagcgcaagtgcttta

SEQ ID NO: 30603 - DNA, 120 bp, synthetic construct
  source 1..120: mol_type = other DNA
cagcgaattcatctgcccaggagcacgacttatcccacaggcaccagaggggtctatactgacccggctcctgcacaggaccctccaaatgtcttcaagttgtcctgcatctccgaccgt

SEQ ID NO: 30604 - DNA, 120 bp, synthetic construct
  source 1..120: mol_type = other DNA
ttggggagggtgtggagatgcagccgttagtatgatgatcttatccgctgcttcaatttccttccagataaatttcaatattttgcatttcttctggtcacaactctcatccatggacat

SEQ ID NO: 30605 - DNA, 120 bp, synthetic construct
  source 1..120: mol_type = other DNA
caattccacccaccaatcagtgagccagaagcactccctgtgatcaatccatcaattgatcagtcgacccacccgctggctaccaggggcacccagcgcagctgcgctcacagggaagtc

SEQ ID NO: 30606 - DNA, 120 bp, synthetic construct
  source 1..120: mol_type = other DNA
tgacagataatatagaagaggtttggcctatgtcatgaccatgtcctggcctggaccatttttaattgctccagagacttccaaattgtgtcaccaaatctacaactgtgtgtccattca

SEQ ID NO: 30607 - DNA, 120 bp, synthetic construct
  source 1..120: mol_type = other DNA
atctcacagccctgctgcccagcataggacacacaagtgactcagtggagtccgacacttgctgagtggatggcaagggagaaagctcctctccaccgtggctactccagttcctctcac

SEQ ID NO: 30608 - DNA, 120 bp, synthetic construct
  source 1..120: mol_type = other DNA
gccgtggctactccagttcctctcgtagtggatggcacgggagaaagctcctctccgccgtggctactccagttcctctcgtagtggatggcacgggagaaagctcctctccactgtggc

SEQ ID NO: 30609 - DNA, 120 bp, synthetic construct
  source 1..120: mol_type = other DNA
aggtaaaaaaacccatctggaaaaccaagagctgcttgattctatgaacctaagaacagtccgtttctccttcagagacgtattgagagaactcggtatcattatgaaatctctcaggcc

SEQ ID NO: 30610 - DNA, 120 bp, synthetic construct
  source 1..120: mol_type = other DNA
cattacatcttctgtgcccgatgtttacagagccctctctgactctatcacgtgtgcccaatgtttacagagccctctctcactccatcaggtgtgcctgatgtctacaaagccctctct

SEQ ID NO: 30611 - DNA, 120 bp, synthetic construct
  source 1..120: mol_type = other DNA
cattacatcgtgtgtgcctgatgtttacagagccctctctcactccctcatgggtgcagtatgtttacagatgtttacagagccctctttcattacatcatatgtgcccaatgtttacag

SEQ ID NO: 30612 - DNA, 120 bp, synthetic construct
  source 1..120: mol_type = other DNA
tttcctcatctgggatgacaaccagatccagctctgaggtccgtgccctgagtagaaaagttcacacagcaaagtttccggagccttccctgacgcgccacgtgtccgtccataactggt

SEQ ID NO: 30613 - DNA, 120 bp, synthetic construct
  source 1..120: mol_type = other DNA
cacactcctgcagggagagccccccagctaccacccacactcctgcagggagagccccccagctaccacccacactcctgcagggagagccccccagccaccacccacactcctgcaggg

SEQ ID NO: 30614 - DNA, 120 bp, synthetic construct
  source 1..120: mol_type = other DNA
actcaaagccgagctgtgtgaggcttttggggctgccagaacaaaggactccagacggatgggcttgaaacagtggatgcctgcagtctcacaggctgggtttggagaccttgcttggag

SEQ ID NO: 30615 - DNA, 120 bp, synthetic construct
  source 1..120: mol_type = other DNA
gttatatacatatataagcacacacatacacatgagcacacacacgtccacatgtacacacatacatacatatgcatgagcacacacacgaccatatgtacacacacgaacatgcacgat

SEQ ID NO: 30616 - DNA, 120 bp, synthetic construct
  source 1..120: mol_type = other DNA
cgcccctgacgctctggatacagggccaccaccctgtccctgacgccctggatacacggccacctggatacacggccaccaccccgcccctgacgctctggatacacggccaccaccctg

SEQ ID NO: 30617 - DNA, 120 bp, synthetic construct
  source 1..120: mol_type = other DNA
atttccctaacacacatatacacatacatacacatatgccttcccacacatatgcacacatacacacacacacacagacccctaaatacctacacacccacacacccacaaaaatgcaca

SEQ ID NO: 30618 - DNA, 120 bp, synthetic construct
  source 1..120: mol_type = other DNA
ggatacccagtgccttcccacgctatgtcctcacagctgtttcccctacccaatgcccatgtaactgtgtcctgacacttggtggcctccttggtttcccggtataactaagcactgaga

SEQ ID NO: 30619 - DNA, 120 bp, synthetic construct
  source 1..120: mol_type = other DNA
catggaaagtgggaactggccacggaacaggggaactgcccctggccgtgtatgtccctcacccgagccctgtctcctaggctctcgcttccattttgcactgagacctctgcctcattc

SEQ ID NO: 30620 - DNA, 120 bp, synthetic construct
  source 1..120: mol_type = other DNA
gcctggcacagctcagtggtggcacgtcacatcacacatcttcagaccaggccttctgcaacgattctctggcctctctgctgctctgcctagctccagccttgtcctgcggaaggtgct

SEQ ID NO: 30621 - DNA, 120 bp, synthetic construct
  source 1..120: mol_type = other DNA
gccaaaatcatcaaaacatcccacgatcagctctgcttgaccggggagaagaggaacaggaaatatgtcaggggtgagattttaaaatgtgtgtgaatataaacattcagctctgtaaca

SEQ ID NO: 30622 - DNA, 120 bp, synthetic construct
  source 1..120: mol_type = other DNA
tctcggattccgtggggctggaagggtcagtgtgataccgtgcacccacacttactcaccgaggagctcttggattctgtgttttcaagcctgcccatgtgtaggaaaagcacagcctcc

SEQ ID NO: 30623 - DNA, 120 bp, synthetic construct
  source 1..120: mol_type = other DNA
gctgaatgcagagctgcctgggctgggctgatgcaaatattttaatgcaatttcatgcagatttccctttcagacgcaaattaggaatatttaccagtaaacaggcttttcttaggactg

SEQ ID NO: 30624 - DNA, 120 bp, synthetic construct
  source 1..120: mol_type = other DNA
cctggttctttaggctgagccggcactagggacaagccgtagcatgagatgtagggttcagtggtccccccaggcttctatccttggtgtgacccagcattaccatcaaacgcactgtta

SEQ ID NO: 30625 - DNA, 120 bp, synthetic construct
  source 1..120: mol_type = other DNA
gctgatatgttcctgctattgatttggccaaagtctgcattcaatgtccaggctcctcttggtaatccccaagcaaccgggtaggagctgtgtacagtagcaaacctctttgcacagaca

SEQ ID NO: 30626 - DNA, 120 bp, synthetic construct
  source 1..120: mol_type = other DNA
atggaagggtttgtctgttttagtcactgctgtagtttcagttcttaaaacctgcctgacgcatataaatacctaggaatgaatgaacgaacagctcactaaactgaggctgagcaggga

SEQ ID NO: 30627 - DNA, 120 bp, synthetic construct
  source 1..120: mol_type = other DNA
gaacttcttatccagaaactctcacatagaaattcacacttcagtatcaccaatccctgctgagggtaagctcacaattctaaaaaaagacttcatcaaccacaaaagaggacccctccc

SEQ ID NO: 30628 - DNA, 120 bp, synthetic construct
  source 1..120: mol_type = other DNA
gtgacgcgcgtcaggattctttaacccattgatcactaaaactccttttagatgccgatgcgagagtgaggctgataaacgagtctgagagagtttgttcaataaatacaagatcatctg

SEQ ID NO: 30629 - DNA, 120 bp, synthetic construct
  source 1..120: mol_type = other DNA
gtgcatgttttaacacaacaaactgctctcctctaattacctgtaatccataagacagtgtgaggacagttctgggagcaggtgagttcgagaagcaccaagacgcatcatttgcctgtc

SEQ ID NO: 30630 - DNA, 120 bp, synthetic construct
  source 1..120: mol_type = other DNA
tcccatgactgagatgcacagttctcaccagctttaggtgatgaaaacacctccactgaagctcaaacaggcaaatgcagttattgaaatgtagtcaggatgcaggcacctgcatttagc

SEQ ID NO: 30631 - DNA, 120 bp, synthetic construct
  source 1..120: mol_type = other DNA
gcaggtgaacccagagctgtgggtcagggtcagtcctagagacgcgtcacagagaaacgacgctgaatcaccagccaccgagacaatcaggaaccagtgacgtgatggtaaacagaggaa

SEQ ID NO: 30632 - DNA, 120 bp, synthetic construct
  source 1..120: mol_type = other DNA
aagggattctggagatcatctaatttattttaatattacctaaatgagaagtggaggcagggagggccttgcccacagctgtgtgttcctgagtaactgggcgggactccctgcatccca

SEQ ID NO: 30633 - DNA, 120 bp, synthetic construct
  source 1..120: mol_type = other DNA
gaagccccagggacccgtctgagagcagaggcctcatgtctgctgggatcactcagtgcacacgggcatgtgtggtgtgtgggaagcaggagggaagcgaggttttattaaagcacaggt

SEQ ID NO: 30634 - DNA, 120 bp, synthetic construct
  source 1..120: mol_type = other DNA
gagtcactcacagttttagaagagggatgagtcactccgatggacagctttagagaagtgactcactttgactgacatttatagagtaagggtgagtcattctgattgacagttttagag

SEQ ID NO: 30635 - DNA, 120 bp, synthetic construct
  source 1..120: mol_type = other DNA
tgacagttttagaggaggggtgagtcactctaaatgacatttttagagcaggggtgagtcactgatttgcatttttaaagtaggggtgagtcactttgcaccatgctccttggctggtat

SEQ ID NO: 30636 - DNA, 120 bp, synthetic construct
  source 1..120: mol_type = other DNA
gtggtgttcagaacttggttataactcagccccggctcctttctgaagcctcagtgcagattcttttctctccccttcctagtgttattattaaattttataaggtctgtgctccttact

SEQ ID NO: 30637 - DNA, 120 bp, synthetic construct
  source 1..120: mol_type = other DNA
cctcccctgtgacactgcaaatctaacaccctctcaatcatgacactgcaaatctaacaccctcccccatgacactgcaaatctaacatcctccccaccatgacactgcaaatataaccc

SEQ ID NO: 30638 - DNA, 120 bp, synthetic construct
  source 1..120: mol_type = other DNA
tggaaaggccgttccaagagcttcaggtgttcaggttcgtatctgaggctgcaacaggcagagccacttccagtttcctgactaaaaagtgaaagttccagaagcattcctagatctgtg

SEQ ID NO: 30639 - DNA, 120 bp, synthetic construct
  source 1..120: mol_type = other DNA
atatcaaggtatggaaaacaccttttaccacttaaggtaaatgttcaatttccagagggcaaatcgtgcgctgcctcattcagcagcagaatttttctccccaatgattggcatttggct

SEQ ID NO: 30640 - DNA, 120 bp, synthetic construct
  source 1..120: mol_type = other DNA
cacgagagcaggcttcagagaccgtaggaattcacaccacgagaacaggacttcagagactgcaggaactccacaccacaagaacaggcttcagagacctcaggaattccacactgtgat

SEQ ID NO: 30641 - DNA, 120 bp, synthetic construct
  source 1..120: mol_type = other DNA
agcaatacttcggaaaggcacaagctatgatgtgaaggctttgagttaatataacaccagttccctatcatatcagcccattcttcaagggctttgcaaagcagcagttctccaaatgca

SEQ ID NO: 30642 - DNA, 120 bp, synthetic construct
  source 1..120: mol_type = other DNA
agagacgaggagggggatgcagagtgcagagtccccccaaaccccgagtcacagagatggaggggaatgcagagtaccgggttcccccctaaaccccgagtcacagagacgaggagggga

SEQ ID NO: 30643 - DNA, 120 bp, synthetic construct
  source 1..120: mol_type = other DNA
gaatccctgtgctgagttgttctcatgtggctgctggcccagggaggagcgttacggacaactgttaagtggaaattgtctggacgtaatgcagttcatcagctcaaaagctgtgggtct

SEQ ID NO: 30644 - DNA, 120 bp, synthetic construct
  source 1..120: mol_type = other DNA
ggtgaggctgttcacttttctccctgactccagctctccccacatgcagctcatccccgacatgggctcttatcccaccaaccgcttctaaagacctgcagaagctccctagtcacagga

SEQ ID NO: 30645 - DNA, 120 bp, synthetic construct
  source 1..120: mol_type = other DNA
tttatcgcaaagtccctgtgtcagtgaccagtgtgttgggtgttgctttgaaacccacagagaagacctaatgtatcacgttgttttcctcctctttaaatattattgacacagcgatac

SEQ ID NO: 30646 - DNA, 120 bp, synthetic construct
  source 1..120: mol_type = other DNA
cctaaaatcaacgccgtgtccccagcttacagctccttgttcctaaaattcaacgccgtgtccccagcttacagctcctttgttcctaaaatcaatgccacgtccccagcttacaactcc

SEQ ID NO: 30647 - DNA, 120 bp, synthetic construct
  source 1..120: mol_type = other DNA
tgaggttcggccacaggtagagagcagagggccttctcccacaggcctgctcttggctgtgcatgtcacagaggggaccacactccacactcacagcaacccagaggtagagttcacgtg

SEQ ID NO: 30648 - DNA, 120 bp, synthetic construct
  source 1..120: mol_type = other DNA
ttcttttcctgcttagccaggcagctccctgcacagacttggcaagtttccaagagagtgttcattaatcagagctattgcaattgctgaatattctccagcaaaccattcatctatata

SEQ ID NO: 30649 - DNA, 120 bp, synthetic construct
  source 1..120: mol_type = other DNA
ctattcacccattcacctgtccatccatccatccctccatccacccatctattcactcatctatgcattcatcaaccagcatccatccacccatccatccctcatccatcattcagcatc

SEQ ID NO: 30650 - DNA, 120 bp, synthetic construct
  source 1..120: mol_type = other DNA
atgcatctataaatcaccaggtcctgctagccacgggcatctcctcttggtcctcatgttacattttcttagacttaagttttcttcatagcaagggaacatgacttgactctgaaaact

SEQ ID NO: 30651 - DNA, 120 bp, synthetic construct
  source 1..120: mol_type = other DNA
tttcggactgaccctcagctgatccttgagctgaagttccttgaggaactcggcccaacattatatttttccatggcaccagcctcacagctgatcccacatggtcctcaaagaatgcaa

SEQ ID NO: 30652 - DNA, 120 bp, synthetic construct
  source 1..120: mol_type = other DNA
agacacacagcaaaagcttcccaaggaacacgggccgtgaaggagttaaagtcctcaggtctacgaatacgacattatctttttttccttgtttcctgctaatctgtttaatgggaaagt

SEQ ID NO: 30653 - DNA, 120 bp, synthetic construct
  source 1..120: mol_type = other DNA
ctccatctgcacacggtgagacatcactgcagccacactccatctgcccacagtgagacaccactgcagccacactccatctgcccacagtgagacatcactgcagccacactccatctg

SEQ ID NO: 30654 - DNA, 120 bp, synthetic construct
  source 1..120: mol_type = other DNA
gcagccacactccatctgcacacggtgagacatcactgcagccacactccatctgcacacggtgacacatcactgcagccacactccatctgcacacggtgagacatcactgcagccaca

SEQ ID NO: 30655 - DNA, 120 bp, synthetic construct
  source 1..120: mol_type = other DNA
accaacaacttataaactgctcagactttacattttgctctcacatcaaattattcccacttcatttgatctgaatgcagcctcgcggagtgtaactattggccctagctgacagagaag

SEQ ID NO: 30656 - DNA, 120 bp, synthetic construct
  source 1..120: mol_type = other DNA
gcccgtggtggtgaaggtgcccgtggtggtggaggtgcccatggtggtatggaggtgcccgtggtggtggtggtgcccatggtggtggaggtgcccatggtagtggaggtgcccatggtg

SEQ ID NO: 30657 - DNA, 120 bp, synthetic construct
  source 1..120: mol_type = other DNA
ctcgtggtgatggaggtgcttgtggtggtggaggtgctcctggtggaggtgctcgtcgtatggaggtgcccgtggtggaggtgctcgtggtggtggaggtgctcgtcatatggaggtgct

SEQ ID NO: 30658 - DNA, 120 bp, synthetic construct
  source 1..120: mol_type = other DNA
gcatcaaaaggggaatttctgtactaatcaggaaataaaaagtaaaacaaagatgcctagagccctgcagagtctcttaggagcaagtactgcacctaatattacagctctcggggagaa

SEQ ID NO: 30659 - DNA, 120 bp, synthetic construct
  source 1..120: mol_type = other DNA
atccacacggatgcccatacactccgacacccatccacacccacgacgcccatccacacccatgacgcccatccacacagatgcccatccacacccatgacgcccatccacacccaccac

SEQ ID NO: 30660 - DNA, 120 bp, synthetic construct
  source 1..120: mol_type = other DNA
cacatctatggtaagaagcgtctgatgcaagagcaggaagagtttctgagtcactgttcctgggagaaccatccaccttttgacagtcaaattcacttaccgtgaaaggtgactcctatt

SEQ ID NO: 30661 - DNA, 120 bp, synthetic construct
  source 1..120: mol_type = other DNA
gaaagagggagtcttcacacacacctgctgcctagagccctcagaggtgtgatactcgaacaatgtgttcacatgggtcctatgaagaatatattaggagaaacaaaagctatttattgc

SEQ ID NO: 30662 - DNA, 120 bp, synthetic construct
  source 1..120: mol_type = other DNA
ctgttttttgtttgtttattttactagcatgctctctgctggcttgacagactgacctgtgctttatctatttgacacctggatttggagtgaagcccataacatgaatagatgggtgcg

SEQ ID NO: 30663 - DNA, 120 bp, synthetic construct
  source 1..120: mol_type = other DNA
tatatgggtggatggctggctggatggatggggaggtagacggatggatggatgaaaaattgataggtgggtggtttggtggatagagatatgtatatatttattgcttatattaattca

SEQ ID NO: 30664 - DNA, 120 bp, synthetic construct
  source 1..120: mol_type = other DNA
caccattttgctgagactctgtgaaggtgaatggggttgcttgggctcggggactggaagaagaaggacgtttatctcgtgaacgcgggacgctccttatgggagaggagtgggagacat

SEQ ID NO: 30665 - DNA, 120 bp, synthetic construct
  source 1..120: mol_type = other DNA
ccaacacatcccggctgcctccccttcctccccccaacacatcccggctgcctccccttcctcccccaacatcccggctgcctccccttcctccccccacatcccggaggcctctccttc

SEQ ID NO: 30666 - DNA, 120 bp, synthetic construct
  source 1..120: mol_type = other DNA
tcggggctataaccccacaccacctgaaatcttcttaaatgataataaatccatcatgctacagatattcttttaagaccacaaagcaaagaggagcaagtgacaaggcagggcatgtcc

SEQ ID NO: 30667 - DNA, 120 bp, synthetic construct
  source 1..120: mol_type = other DNA
agcgggcggcggaacttcctctccgccacaccagcccccggagagcgggcagtggttcctgagcactcggtgggtttcacatttcacatctcacagtgagccgaggaaggggctggggga

SEQ ID NO: 30668 - DNA, 120 bp, synthetic construct
  source 1..120: mol_type = other DNA
acatctaccccacatacacactcatacacatgcacatttgcacaaaccaatacacatctacccgacacacacactcatacacacacgtatatacaaaccaatacacatctacccaacaca

SEQ ID NO: 30669 - DNA, 120 bp, synthetic construct
  source 1..120: mol_type = other DNA
atctacccgacacacacactcatacacacacacgggtacatacaaactgatacacagctacccgacatacacactcatacacacacacgaacatacaaaccaatacacatctacccgaca

SEQ ID NO: 30670 - DNA, 120 bp, synthetic construct
  source 1..120: mol_type = other DNA
cacagacacactaaaatgttttggaggccagagagacttgaccaatggatagaacaagcaaacagtttacagggaaaatacaccattaagatcctgtgaagagactgaatgacaccccat

SEQ ID NO: 30671 - DNA, 120 bp, synthetic construct
  source 1..120: mol_type = other DNA
acgtgtctttccccttcaatgacaccccatctcacgccacgtgtctttccccctcactgacaccccatctcacgccacgtgtctttccccctcaatgacaccccatctcacgccaggtgt

SEQ ID NO: 30672 - DNA, 120 bp, synthetic construct
  source 1..120: mol_type = other DNA
cgccacgtgtctttccccctcaatgacaccccatctcacgccacgtgtctttccccttcaatgacaccccatctcacgccacacatctttccccctcaatgacatcccatctcacgccac

SEQ ID NO: 30673 - DNA, 120 bp, synthetic construct
  source 1..120: mol_type = other DNA
cccagaaacaagtgggcatttctagaaggtcaaggagcatctatatggaaagaccttttctccttaagatctcggtgtcatctcctgcccctctaattccacccttgtgaacataaccca

SEQ ID NO: 30674 - DNA, 120 bp, synthetic construct
  source 1..120: mol_type = other DNA
ctactccaggcgatctgcaggcagcctcttactctgcctgtggtggggtggtggtggtgggtggtatgagccacgccctccccttcagggacagatgagagcttcaggaggtgaaatact

SEQ ID NO: 30675 - DNA, 120 bp, synthetic construct
  source 1..120: mol_type = other DNA
ttaaatgtgtaaagcctggagtaagagatcagctcacatgactctgcattctcaactgccacagccaggcctattgaaattatatgtcattgtagggccttccaaacaaaatggtacaag

SEQ ID NO: 30676 - DNA, 120 bp, synthetic construct
  source 1..120: mol_type = other DNA
tagagcactgagcagcactgggatgcattcaaatatgaatgaatttcttcaaaaacgaaaaggcagcaggtgcttcctttcaagtgaaaatgaccccaaaagtgtgggcatattttctcc

SEQ ID NO: 30677 - DNA, 120 bp, synthetic construct
  source 1..120: mol_type = other DNA
tttctgaatgaatgagtgaacttgggagaatcaggagcccgtgtgattggccgggactttgcaagtgctttctgaatgaatgagtgaacttgggaataaccacgcgaagcgttgcatggc

SEQ ID NO: 30678 - DNA, 120 bp, synthetic construct
  source 1..120: mol_type = other DNA
tcagagtcaattttccaaaacagatatggatgacacaagctgtgggccagacccgtcctgcaagccatgttgcccgccccatccatcagcttcagcagtagaattgtgaaatcataaaat

SEQ ID NO: 30679 - DNA, 120 bp, synthetic construct
  source 1..120: mol_type = other DNA
catcgcctgtgctggaggggtcttcggaatctcccagaggtgaaggccacttctggggggcggctggtgccagcaaaggcctgggcattcttgagggtgcacgcagaaggtactgtggct

SEQ ID NO: 30680 - DNA, 120 bp, synthetic construct
  source 1..120: mol_type = other DNA
gcatctatcttaacaaagaagaaaaatacctaagccaaaatgccaccaagtgctcattttctgaataaccgtttgacagctgtgctaaatgtctgtgtgctggaatgaccacggagctca

SEQ ID NO: 30681 - DNA, 120 bp, synthetic construct
  source 1..120: mol_type = other DNA
tgatggggaaggccgccacgctcgccccctgtactggaaaggccgccacgcccgccccctgtagggggaaggccgccacgctcgccgccttgtatggggaaggccgccacgctcacccgc

SEQ ID NO: 30682 - DNA, 120 bp, synthetic construct
  source 1..120: mol_type = other DNA
gcagtatgttacggcaatgagagggtttatcattatgccgcgtggtgttgtagcaattaacttgcacattgacttttgctctgtcatccagcttgaagtaggtcaaaacttcatacgtat

SEQ ID NO: 30683 - DNA, 120 bp, synthetic construct
  source 1..120: mol_type = other DNA
actgcgtctctttctggctttctctcatggggcttactctgcttaagggacctcatgtgtgggaagagaagaaccagcaggagaaatgagcttgtggttgccactctggtaagcccaaaa

SEQ ID NO: 30684 - DNA, 120 bp, synthetic construct
  source 1..120: mol_type = other DNA
tccgttcgtttgtctcggagaatgtaagagaaaaaaagtctgcctggtaatccacaaaattcttctagattgtatccaagactgccaaggtgatacatctgtgagtctgaaacagccatg

SEQ ID NO: 30685 - DNA, 120 bp, synthetic construct
  source 1..120: mol_type = other DNA
aaaacaaccccatcaaaaagtgggcaaagtcttttcaaatacctggaaagccttcccaagaaggatgaatacaaacaagccgagattttagcgactacaataaatacctaactcagacac

SEQ ID NO: 30686 - DNA, 120 bp, synthetic construct
  source 1..120: mol_type = other DNA
cttacgagaaacacccacaggtgtgtaggggcaacccacccctacactctgccacttcgccgccacccatgctgccattgcactgatgctggcttctcgtttcctgctccccctctttct

SEQ ID NO: 30687 - DNA, 120 bp, synthetic construct
  source 1..120: mol_type = other DNA
ctttaaaaatactctaatggtgaggaaggaaattgagaaaatgattcattagaagagcggaataactctttttaagagcaggctcgcagaagtcgagctgggcaacagattctcgagccg

SEQ ID NO: 30688 - DNA, 120 bp, synthetic construct
  source 1..120: mol_type = other DNA
cccgccctccatctccacgttcaggagcatccctgtaactggacagtggcacagagccaccgctgcacacagcagtaaaaatgtacagccctccctctctgcgttcaggagcagagggca

SEQ ID NO: 30689 - DNA, 120 bp, synthetic construct
  source 1..120: mol_type = other DNA
tctgcacatttctgtttggtcccagactctgggtgaagggatcacctggtgccatcatcagtctatcaccagccctcagagaagtgcctcagcaggaggcctggcagaactgtgtgaggc

SEQ ID NO: 30690 - DNA, 120 bp, synthetic construct
  source 1..120: mol_type = other DNA
gcagtgtgatgtctggcagtgaggctggggacggtgtctgctgcggtgtgatgtctggcagaaagagccggggccagtgtggctgtgagcatcaggcctgaattccgtgaactgaggaac

SEQ ID NO: 30691 - DNA, 120 bp, synthetic construct
  source 1..120: mol_type = other DNA
atttgagcgctcttcaaggcacgagatcctcagcaccgtcaacaagtctgtgtctcacctgcaatcacagctcattgagccgccagctaattagagagcccctaagtgaatcagtgacac

SEQ ID NO: 30692 - DNA, 120 bp, synthetic construct
  source 1..120: mol_type = other DNA
atcgccaaacctcgtctcctcatctatggaaggagaacaaggagacggccctcacctagcagtgtaaccctgaatgccaaggccatgcctggtgcagaaaggcccaaacaccagcctcag

SEQ ID NO: 30693 - DNA, 120 bp, synthetic construct
  source 1..120: mol_type = other DNA
tgcagtgggtgctgctatcacaattgagggctgaacaccccaggggaaactgagtcctttcagggcagtaataagggaaggtttcgaccactgttagctgcagaagggccaaccccttta

SEQ ID NO: 30694 - DNA, 120 bp, synthetic construct
  source 1..120: mol_type = other DNA
ttcactcattcatcatttattgagcatcagggaatatgaaagtggccatgggcctccaaacagctcagaatgtaaaggggaagagctctgtgctgtagctgcaactccagccacaaggaa

SEQ ID NO: 30695 - DNA, 120 bp, synthetic construct
  source 1..120: mol_type = other DNA
cacaggaggagacacacgaggagccgcagacgcaggaggagccgcagacagacgcgggaggagccgcagacacagggggagccgcagacacagggggagctgcagacagacatgggagga

SEQ ID NO: 30696 - DNA, 120 bp, synthetic construct
  source 1..120: mol_type = other DNA
gtggccacacacagggagcctgactgcagctttctggaggagaacgtggttgcatttcacatagaaacacaggtcattttgtttctgaagaattcattccgaatatttatttgctacttg

SEQ ID NO: 30697 - DNA, 120 bp, synthetic construct
  source 1..120: mol_type = other DNA
aacagtgaatttgtatttgcagtaaaacccagattctccagaaaacgtcttgctgtcagcatccccgccgccttacacgtgctatggctgccctctgactctgctgcctgacttttatct

SEQ ID NO: 30698 - DNA, 120 bp, synthetic construct
  source 1..120: mol_type = other DNA
gtaagtttttcatgtaaattaaaggtttactctggcgtcaactattccctcctggcctggaatcacagacgttccatttcttccatctactcatttgggaataagtcacgtaattcccgg

SEQ ID NO: 30699 - DNA, 120 bp, synthetic construct
  source 1..120: mol_type = other DNA
tgaccctgcctgtctgcccagacactgaaccacattgtggttcacccgcctttctgagggtctaggcccatggggcccgctgaccctgcctgcctgcccagacactgcaccactctccat

SEQ ID NO: 30700 - DNA, 120 bp, synthetic construct
  source 1..120: mol_type = other DNA
tgaatttttaaaagtgcttgtgttgagagatcaaaaggaagacaaagcagtatctcttagagaacagctcggccatcatgaatggaatgctgggaggatgcagacagagcattctgtgag

SEQ ID NO: 30701 - DNA, 120 bp, synthetic construct
  source 1..120: mol_type = other DNA
ggatcaactctgtttcaagcgcagttaccaagacagaatcatttctggaatcctgaaaaacctgcatatgaacatgctcacgtgtagacacccacacacatgcacacacacctgcacaca

SEQ ID NO: 30702 - DNA, 120 bp, synthetic construct
  source 1..120: mol_type = other DNA
ctcacatatagatacccacacacacacacctgcacactcattcacgtgctcatgtgtagatacccacacacgcacacacacctgcacactcattcacgtgctcacgtgtagatatcccct

SEQ ID NO: 30703 - DNA, 120 bp, synthetic construct
  source 1..120: mol_type = other DNA
tgtgacacagttgaatatttacacaaccttccttcaatatggctcgctccatgtttgtccctgcgtgggcagcattccgtctgtgtcatctacattgatacccatatctacgtgccctgc

SEQ ID NO: 30704 - DNA, 120 bp, synthetic construct
  source 1..120: mol_type = other DNA
accccttgaaggacagaggtgaacccaggacgccctcaaggacagaggtgaacccaggaccccatgaaggacagaggtgaacccaggactccctgaaggatagaggtgaacccgggacgc

SEQ ID NO: 30705 - DNA, 120 bp, synthetic construct
  source 1..120: mol_type = other DNA
ttctctttgccttagactatccctgtgctgaatgcagtggacacagacaccatccccagtgcattgttaatagactttatttttagagcagtttagattactgcaaacttgagtggaaag

SEQ ID NO: 30706 - DNA, 120 bp, synthetic construct
  source 1..120: mol_type = other DNA
ctcacagggtatttgcagatattaattttccacttttttgggtaaagaccaacacgagtgactgctggctcatatggtaagagtatgcttagttttgtaggaaaccgccaaactgtcctc

SEQ ID NO: 30707 - DNA, 120 bp, synthetic construct
  source 1..120: mol_type = other DNA
ccttcagaactgagaaatcaatgtctgctgtttctaagccccgcaataggtggtactttgagcagccttcatggactaagacactgcgtattattatcccattgacgccatgtggaaatt

SEQ ID NO: 30708 - DNA, 120 bp, synthetic construct
  source 1..120: mol_type = other DNA
caccataagagctgacatctacagacatcactcacacagtcaactcagtcagtccttatgataacccttagtggcataaactgtcatggtccccattccatattcagaaactagagccca

SEQ ID NO: 30709 - DNA, 120 bp, synthetic construct
  source 1..120: mol_type = other DNA
atagttttcagtgtacaggtctcaccgtctgggttaaattaattcctatctattgcagtcacacatttttttagtggcagcactcaccttcttgagtgaaccatggaggttgtggcattt

SEQ ID NO: 30710 - DNA, 120 bp, synthetic construct
  source 1..120: mol_type = other DNA
cagagttttcatgctcagttgtgaggtatggtgatggccacaggcccgaatcctaaccaccacagcacaggacttctcaaagagaccgtcactgtgtctcctgccccaacaaggtgaaca

SEQ ID NO: 30711 - DNA, 120 bp, synthetic construct
  source 1..120: mol_type = other DNA
acatcactgcacccctgggtggcccctgagggcagtgctgaggatggcccacgtcactgtgctccctgggtggtccctgagggccccccgggccacatgaggcccacccccttcctgatg

SEQ ID NO: 30712 - DNA, 120 bp, synthetic construct
  source 1..120: mol_type = other DNA
tcactcaaaactcccatttgtgaaagtaagtggccttttaaagaatgctaaaacattacgggcactttagccccgcgtttcttactacacgaaacatggttacctacgagtgaaatggca

SEQ ID NO: 30713 - DNA, 120 bp, synthetic construct
  source 1..120: mol_type = other DNA
attggggtaggctggtattggtaatcctgagtacaatattgattgacaaaaacgaatcacacctgagcctcaaagctcttagcccttccctgcaaagaaaactctctcttagaattacca

SEQ ID NO: 30714 - DNA, 120 bp, synthetic construct
  source 1..120: mol_type = other DNA
ctgcaccgtgaccatggctatttaaaaacccagcctcagcacagtagctgacaaacattaatgagcagtaatgtacacgtggtgttgtcgatgaacggataatgaaagcaatttatttga

SEQ ID NO: 30715 - DNA, 120 bp, synthetic construct
  source 1..120: mol_type = other DNA
cccaggatgacgcacagaccccacatccaccctcacccaggacgacgcacagaccccgcgtccaccctcacccggggtgacccacagaccctgcatccaccctcacccaggacgacgcac

SEQ ID NO: 30716 - DNA, 120 bp, synthetic construct
  source 1..120: mol_type = other DNA
tctgtgttcccccaacacagataccaacaagggccccaggaaggtcagtgcctggagccaggtgtgggctcaccttcaccacagatggtctggctggggcaggccctcctgagaacctga

SEQ ID NO: 30717 - DNA, 120 bp, synthetic construct
  source 1..120: mol_type = other DNA
ttccctttgtctctcctccctctcttcctacaaaagaaatcacatgacatcgattccctgatattcagatcaatcagctggagtgacaggaaacacgttcgctcccattggaaacagcac

SEQ ID NO: 30718 - DNA, 120 bp, synthetic construct
  source 1..120: mol_type = other DNA
catccctgggagaagctgcagcacatgtgtaagctgccaataccctgcacacggctctgtgactggagataatgaggaatcgccatggcaacccgggaacaagcccacagcgccttgttt

SEQ ID NO: 30719 - DNA, 120 bp, synthetic construct
  source 1..120: mol_type = other DNA
gtaaaatcccccacatttgccatccttcaatttgtccctgtgacctgattcttcctggacgccagataagaacctgggtatcaacagggcactgagctggttaatacttaagccatctgt

SEQ ID NO: 30720 - DNA, 120 bp, synthetic construct
  source 1..120: mol_type = other DNA
cacgtcctgagaggggggtcaggggactcccccacagccctgtcacacgtcctgcatgcggggtcaggggactcccccacagccctgtcacacgtcctgcacgcggggtcaggggactct

SEQ ID NO: 30721 - DNA, 120 bp, synthetic construct
  source 1..120: mol_type = other DNA
aagtttacaaatgctggcatacagaaaagcacaagttcaggcctgctactgatgagctacgtgataccagaaaacggtttcaagtccgtttctaaatttccacagtctccaggaagaaga

SEQ ID NO: 30722 - DNA, 120 bp, synthetic construct
  source 1..120: mol_type = other DNA
cacactgtcgatcatccaaatgcccaaacatttaacctggaaaaaaatggatccttcaatccccaatcttatccaccatcaccaaatgtagatgtacaacctaccagcgatcaagttcag

SEQ ID NO: 30723 - DNA, 120 bp, synthetic construct
  source 1..120: mol_type = other DNA
tgctgacttaaaggcaatggtgctggatggtctcatccaggcggaggctgcagagccagggcgaagtttcctgaaggagatggaatcctgctgtagatggcggcaacatgaagagctgtc

SEQ ID NO: 30724 - DNA, 120 bp, synthetic construct
  source 1..120: mol_type = other DNA
acactggaagggaacaacaaacaaagcctccgcaagcttgctaagaaacggggcatgcacaacactttactgcagcaagagacgatttatccagttatgtggtatcagatatttttaata

SEQ ID NO: 30725 - DNA, 120 bp, synthetic construct
  source 1..120: mol_type = other DNA
gcagtggctcatccgtgagacatgtggctgcacactgagatcccggtggctcatccatgagacatgtggctgcacactgagatcccgcagtggtgcttatctcaggaaggaagagctggt

SEQ ID NO: 30726 - DNA, 120 bp, synthetic construct
  source 1..120: mol_type = other DNA
gtcctgcgtcctgggtcctgggtcctgggtcctgcgtcctgggtcctgcgtcctgggtcctgggtcctgggtcctgggtcctgggtcctgcgtcctgggtcctgggtcctgcgtcctgcg

SEQ ID NO: 30727 - DNA, 120 bp, synthetic construct
  source 1..120: mol_type = other DNA
gtaacacagccagtcagagggcagcatcagaactcactcgctgtccttgtctacactaagcactcaacttcaagttgggaaacctgggtaccaagcagccaaccaacgccaatggaggtg

SEQ ID NO: 30728 - DNA, 120 bp, synthetic construct
  source 1..120: mol_type = other DNA
agggcccatctcagcaccctcctcagcaccagggcccatccagcaccctcctcagcaccagggcccatctcagcaccctcctcagcaccagggcctatctcagcaccctcctcagctcca

SEQ ID NO: 30729 - DNA, 120 bp, synthetic construct
  source 1..120: mol_type = other DNA
actacattgagatgctgtagctctcagtttccctgctgtgttaagtcacagtgcactacaacaagatgctctagctctcagtgtcctgctgtgttaagtcatggtgtactacatcgagat

SEQ ID NO: 30730 - DNA, 120 bp, synthetic construct
  source 1..120: mol_type = other DNA
tgaactacatcaagatgctctagctctcagtgtcccactgtgttgtcatggtgtactacatcgagatgctgtagctctcagtgtcccgctgtgttaagtcatggtgtactacatcgacat

SEQ ID NO: 30731 - DNA, 120 bp, synthetic construct
  source 1..120: mol_type = other DNA
tctgtagttataactaccatccaccatcaggtgactgtcggtaaaggaggggaccctccttcatgtggccatcacttgaggccttaagacaaaaacaatcatgttcattgctgctaagaa

SEQ ID NO: 30732 - DNA, 120 bp, synthetic construct
  source 1..120: mol_type = other DNA
aaggacatggatccctgacttattagtgtaacacgcattatcgcatcctggataatgccaaaacctgagaacactaactcctttaccttctgtgccaccaatattcgtgttgatttacca

SEQ ID NO: 30733 - DNA, 120 bp, synthetic construct
  source 1..120: mol_type = other DNA
ggtgtctttcttcaggtttgaaaaaaatcatagctctcatcgcctcaaacattgcttctaagctgttttccttctcctcttctgggactccacctacacatatagacctttccaacagat

SEQ ID NO: 30734 - DNA, 120 bp, synthetic construct
  source 1..120: mol_type = other DNA
atagtggtgatggcagtggtagtgatggtggtgatagtgatggtgatagcagtggtggcagtggtggtgatagtgatggtgatggtggtggtggtgatggtgatagtaatggtgatggca

SEQ ID NO: 30735 - DNA, 120 bp, synthetic construct
  source 1..120: mol_type = other DNA
gtggtggtgatagtgatggtcatggcagtggtggtgatagtgatggtgatagtgatggtggtgacagtggtggtgatggtgatggcagtggtggcagtggtggtgatggtgatagtgatg

SEQ ID NO: 30736 - DNA, 120 bp, synthetic construct
  source 1..120: mol_type = other DNA
cacaaaggaaaggaagtgaccagaacctttgggaaacacaaagaaaaactatgcaagaagagaaagtcccaacaccacagttagaagtggcacatttggggcggctgttgcaggatgaag

SEQ ID NO: 30737 - DNA, 120 bp, synthetic construct
  source 1..120: mol_type = other DNA
gcccctgggtgagctcaggaaagaggggcaggatctgttgcttcttattttaagccctatattactcggcttttaagtgaaccatatatatgcattactgtcacacaaattaactgagga

SEQ ID NO: 30738 - DNA, 120 bp, synthetic construct
  source 1..120: mol_type = other DNA
cacacaatcaccaatgtcaggattggggatggttgctatggaggacagacaagacacaacacacacaatcactgatgtcaggattggggatggttgctatagacaaagaagagatgaaga

SEQ ID NO: 30739 - DNA, 120 bp, synthetic construct
  source 1..120: mol_type = other DNA
tgcagagaagacaacggcatggacgccatcggccatggccacccatcgctctgcagagaagacaacggcatggacgccatcggccatggccacccattactctgcagagaacataacggc

SEQ ID NO: 30740 - DNA, 120 bp, synthetic construct
  source 1..120: mol_type = other DNA
tgcagagaacgtaacggcacggatgccatcggccacggccccccattgctccacagagaagataatggcacggatgccatcagccacagccacccatcgctctgcagagaagataacagc

SEQ ID NO: 30741 - DNA, 120 bp, synthetic construct
  source 1..120: mol_type = other DNA
attactctatactgagccgcaaacccatgcacgcctcagtccaaatgtcatagcttctctttctcccactaccctgagggccacacacacatgactcggagaaaggccacagcctgtgtg

SEQ ID NO: 30742 - DNA, 120 bp, synthetic construct
  source 1..120: mol_type = other DNA
tccagctccaggatgggactctatctacatgttcctgctacgggggctgtgtgccgtcagcacaggagggtcatccagctgtccggaaatgaaaactcacagtcaccaagcatacgcagt

SEQ ID NO: 30743 - DNA, 120 bp, synthetic construct
  source 1..120: mol_type = other DNA
ctaactccatcttttctcatttctgtcccccaccccaaatcatcaccattgtcaccatcatcatcattactatcatcaccatcaccatcagcatcattactatcatcaccatcaccatca

SEQ ID NO: 30744 - DNA, 120 bp, synthetic construct
  source 1..120: mol_type = other DNA
tcaccatcattgccatgccatttagtaaacaatcacttcatcgtcaccatcatcatccttaccatcaccatcattgccatgccatttagtaaataatccttcatcaccaccgtcatcatc

SEQ ID NO: 30745 - DNA, 120 bp, synthetic construct
  source 1..120: mol_type = other DNA
ttctgattcactggcgccagtttatgtctgggcatcactatttttcaaagcttccaggtgtttccaggtgttaccaccggcatggctgacccccttgttttgcacgtaagaaatccaacg

SEQ ID NO: 30746 - DNA, 120 bp, synthetic construct
  source 1..120: mol_type = other DNA
tgtgggtcgtcacagcataattcagccttgagccacgagacacggagccgacaggtgtgtagctgagccatcctcccccacctgtcagtcaccattcttccacctccctccaaacggaga

SEQ ID NO: 30747 - DNA, 120 bp, synthetic construct
  source 1..120: mol_type = other DNA
ccttgtgtgcccagcacttaaaactggaattccttcacttcaatgtattatccacccttttgcatgaaaacatgtgacattccccaaattctcaaattgctcctctgctgaaccctatag

SEQ ID NO: 30748 - DNA, 120 bp, synthetic construct
  source 1..120: mol_type = other DNA
cttttttcttacccttctcaagatgaaaatggatccagttttgcaaggagtcaggctggatctgcctctcttaccccaatcactcctaagagatgtttatggagagtttgttgttcattg

SEQ ID NO: 30749 - DNA, 120 bp, synthetic construct
  source 1..120: mol_type = other DNA
gggcatctggcttctgtggcccaaggctcaaatgaaagctgtgattgcaatttcaaagacaaaaggaagagggagagagggaggaggaaggctcctcccagatctgtctctgacaagagg

SEQ ID NO: 30750 - DNA, 120 bp, synthetic construct
  source 1..120: mol_type = other DNA
tgctcttccctgcaccccctccccttccctgtgccccctccccctttcctgcaggcctcccccttccctgaagcatcccccttccctgcaccccctccccttctctgcagcctctccctt

SEQ ID NO: 30751 - DNA, 120 bp, synthetic construct
  source 1..120: mol_type = other DNA
aggaccatccaggggacagccccgcactaggcaggaaattgcacaaacagaggtcagtgaggaccatccaggggacagccctgtgctgggcaggaaatcacacacatgaaggtcagtgag

SEQ ID NO: 30752 - DNA, 120 bp, synthetic construct
  source 1..120: mol_type = other DNA
gacatctgagaaggtgtatgtggcacctgtccaagctgattagaacaaggagagtcaggagtgaggaggatgcatggatcatcagggccaggatgacagaggaggaacaggggaagtcag

SEQ ID NO: 30753 - DNA, 120 bp, synthetic construct
  source 1..120: mol_type = other DNA
atttttattgttgtattgttattttatatttttttccccagtactttcaatcctctgttggtcgactcaggcagaacctgagggtatgcagggctggctgtattcttgcccaaagggacc

SEQ ID NO: 30754 - DNA, 120 bp, synthetic construct
  source 1..120: mol_type = other DNA
aaggtccacatcggaatggtagactgtttaggagaaaggtccacgtcagaatggtggactgttttaagaggaaggtccacgtcagaatggactgtccaggatggtgcatgtgcagggtgt

SEQ ID NO: 30755 - DNA, 120 bp, synthetic construct
  source 1..120: mol_type = other DNA
gtggagtcgtctgccctggagtggagtcgtctgccctggagcagagtctgccctggaatggagtcctctgccctggagtggagtcgtctgccctggagtggagtcatctgccctggagca

SEQ ID NO: 30756 - DNA, 120 bp, synthetic construct
  source 1..120: mol_type = other DNA
gaagccagatcgctgaggagtgcgaggaaagctgttggttgttatggtcaagccccagaactcgtagatggatgtccccagcccagtgcctcagaaggtgactgcgtttggaaatcaggt

SEQ ID NO: 30757 - DNA, 120 bp, synthetic construct
  source 1..120: mol_type = other DNA
gtcaatcttccatcaatcgatgaagctctcacctataacggacatcctttcgccaccacacagcatttaccaagctttccagggtgccctgatggacatgctcacaatgcctcggggatt

SEQ ID NO: 30758 - DNA, 120 bp, synthetic construct
  source 1..120: mol_type = other DNA
gtcacacagtggccatctgcccgggcatgtttcacctcggctgtgcagaccctctgaagacgagacattctccatatgtttcttggctccaggcagctcatcgacagataacatcctgct

SEQ ID NO: 30759 - DNA, 120 bp, synthetic construct
  source 1..120: mol_type = other DNA
gatgctgtctcatggtcttgcctcagagccactctcgtgacctcacccaaccctaatcacctctggaaggccccgcctcctaacccatcccatcagggtggggctctaacacatgcattt

SEQ ID NO: 30760 - DNA, 120 bp, synthetic construct
  source 1..120: mol_type = other DNA
acatgcatttgggggccccagctcctaacccatcccatcaggggtggggttctcatgcatgcacttggggggccctgcctaacccattgcatctggagtggggctctaacacatgcattt

SEQ ID NO: 30761 - DNA, 120 bp, synthetic construct
  source 1..120: mol_type = other DNA
agataagttatataaatagatgtttgataggtgaatggagatgattcaaaggtagataggtagaggatagacagaacaaaacctggtctcctcccctcagagaacactgcagctcccgcg

SEQ ID NO: 30762 - DNA, 120 bp, synthetic construct
  source 1..120: mol_type = other DNA
ctggcctacgctttctcatcatgtagctgtatttctgggctcacacctttagaacccactgagatttctaaagctcctcctctagtgagcaacctgggatgtttgtgctcaaagaaaaca

SEQ ID NO: 30763 - DNA, 120 bp, synthetic construct
  source 1..120: mol_type = other DNA
ccgtgtccctgagcgaacgcaccggctttgggttgtaaaccagggagtttggacttaattcccagaactcaatcaccactgagcgacctcgaaaaagatcacgtgggcctcacaggacga

SEQ ID NO: 30764 - DNA, 120 bp, synthetic construct
  source 1..120: mol_type = other DNA
cttggccatgggccctcggtcctcgccctgagcagcgcgccggggtataagggacgccctcagaggcctccaccccacactccaccgcgctctgccaaccgggacaaggtgttttgctga

SEQ ID NO: 30765 - DNA, 120 bp, synthetic construct
  source 1..120: mol_type = other DNA
tgcaagaacgaacatctctgtaaagttctgcttctgacgtcacagtttctctattccacacaactctgcctcaaagccttttttaagcacattccaggcacaagtgtgagccagaaaaag

SEQ ID NO: 30766 - DNA, 120 bp, synthetic construct
  source 1..120: mol_type = other DNA
gatgccacaaacaacatggggcctacacaacactgagggctgcccaccctgcctgatgccacagacagcatggggcctgcacaacactgagggctccccaccctgcctgatgccacaaac

SEQ ID NO: 30767 - DNA, 120 bp, synthetic construct
  source 1..120: mol_type = other DNA
agggttggaggtgttctcttcatctgctagtcctgtattctctagagttctctttaactctcactagccaataacccatcgtgccaactccctataaaaatccctgacacttggctgggc

SEQ ID NO: 30768 - DNA, 120 bp, synthetic construct
  source 1..120: mol_type = other DNA
aacagcataagggataggagaacacaactggagattcctaccatgcaatggacaagcataatttctgaaggtactgagataagttaaacatgcgtgctgagatctctagagaaatcacta

SEQ ID NO: 30769 - DNA, 120 bp, synthetic construct
  source 1..120: mol_type = other DNA
cagctgtcagcaaactttttctgtaaagtaacaaaatagtaaatatttaaatagtatagtaaatattttcacctttgtgggcagagttgcaatggtctctgtcataattactcaactctg

SEQ ID NO: 30770 - DNA, 120 bp, synthetic construct
  source 1..120: mol_type = other DNA
atggacaaatacacctttccttctgagcagaactgtccaaaaacaagaagataaatcagtaacaaaaagagcactgtgtatcatcctaatagagggccaggagcaggcacaccttgtgct

SEQ ID NO: 30771 - DNA, 120 bp, synthetic construct
  source 1..120: mol_type = other DNA
acaccaggtgctaagagtaaccccagacttaaagtggagtaacagtttcagttccatgcagtctcttctttcatcacgtactaacttagggcccattgaaaatcacatccttgagggagg

SEQ ID NO: 30772 - DNA, 120 bp, synthetic construct
  source 1..120: mol_type = other DNA
gagcaaatacctgaatggggggacagcagaggccggcataaaggacattagcatgaataaagggatcttgcagcgatcatcctaaaagcgaaaaaagaaaaacaaaacaaagcatatgta

SEQ ID NO: 30773 - DNA, 120 bp, synthetic construct
  source 1..120: mol_type = other DNA
tactcatgtcattctgtaaccttaactttcaagggaaattagcttgcatgctcgtcacaaacctttccagacacctcacaaccaaatggctgtctgccttgcacttgcaaagataaggac

SEQ ID NO: 30774 - DNA, 120 bp, synthetic construct
  source 1..120: mol_type = other DNA
tgggtccctccgccctccttacctaccctctggccctccaccctcttacccactactgggtccctccgccttccttaccgaccctgggtccctccgcccccccttacccactactgggtc

SEQ ID NO: 30775 - DNA, 120 bp, synthetic construct
  source 1..120: mol_type = other DNA
agtctgggcccccaaactccagcactgcttaagctctactgccttctccatctagtttcaggagaaaggacattttcacaggtttttattaaaagtatatacggtattccaaacacatgt

SEQ ID NO: 30776 - DNA, 120 bp, synthetic construct
  source 1..120: mol_type = other DNA
aaaaagaagaaatccctgttaccttctcaccacctgtgacttcccactccgtccccaaactccttcctcatggacacaacaagaggcaccaaaccagcaacaagagttcaggagactgat

SEQ ID NO: 30777 - DNA, 120 bp, synthetic construct
  source 1..120: mol_type = other DNA
atcacaatagaaatcggaaactctggtttctagaagcctttaggcaagcaacacacccttacttggaagcactcagcatactacaggtttacttaaacagatgtggcctgcgttcaaata

SEQ ID NO: 30778 - DNA, 120 bp, synthetic construct
  source 1..120: mol_type = other DNA
gtgaggcgcgtgacaaacccaaaccgttgagaagggtgaggcgagtgacaaacccaaactgttgagaaaagtgaggcacgtgacaaacccaaactgccgagaaaggtgaggtgtgtgaca

SEQ ID NO: 30779 - DNA, 120 bp, synthetic construct
  source 1..120: mol_type = other DNA
gcagaaccaaatagtcagattggaccaatagatacaatggagtcctgtattctaagctcactctactcagggaacaatgtttctggtgtcagggtcaaaggggtcatcttttgttacatt

SEQ ID NO: 30780 - DNA, 120 bp, synthetic construct
  source 1..120: mol_type = other DNA
cttagctctgggtgtttggtggggagccggacgtccttagctccgggtgttggagggtgttggaggggggagcgggacgtccttagctccgtgtgtgggggtggggagcgggacgtcctt

SEQ ID NO: 30781 - DNA, 120 bp, synthetic construct
  source 1..120: mol_type = other DNA
ctgggcatcatgtggggaggcgaggaggggaggccaggagggctgactgtgagtgctgggcatcatgtggggaggcgaggaggggaagccaggagggccgactgtgagtgccgggtgctg

SEQ ID NO: 30782 - DNA, 120 bp, synthetic construct
  source 1..120: mol_type = other DNA
ggaccatgacatgaatagggtttttccttacacaagggtaacagattaagttttcaggaatatatctgacagtggaattgaggagtgaagggggcagtggtagttctgtaagttttcctc

SEQ ID NO: 30783 - DNA, 120 bp, synthetic construct
  source 1..120: mol_type = other DNA
ttgagtctactgcagcactgaagagtggaacgttgtgaaacctcaacacgctagttgagattaaggatgattgtgaaacctcgacatgctggttgacattaaggatgattgtaaaacctt

SEQ ID NO: 30784 - DNA, 120 bp, synthetic construct
  source 1..120: mol_type = other DNA
cgtcgacacgctggttgacattaaggatgattgtgaaacgtcgacatgctggttgacattaaggatgattgtgaaacgtcgacacgctggttgagattaaggatgattgtgaaacgtcga

SEQ ID NO: 30785 - DNA, 120 bp, synthetic construct
  source 1..120: mol_type = other DNA
tgacatttagggtgattgtgaaacctcgacacggtggttgagattaaggatgattgtgaaacgtctgcacgctggttgacattaaggatgattgtgaaacgtctacacgctggttgacat

SEQ ID NO: 30786 - DNA, 120 bp, synthetic construct
  source 1..120: mol_type = other DNA
ctctcttcctgtcagttctcattaacattttcttccttcttcacacccatcctgtcagtcctcactacacattccctttctcacacgaatcctatcaattctcactcaacatttcctgtc

SEQ ID NO: 30787 - DNA, 120 bp, synthetic construct
  source 1..120: mol_type = other DNA
tacccatgtaataaacatggaagtgacacaattctctgaagcagcaaaagtgcatcttggaggctggttgtgacaccagcaggttgtcttcaggttctgtgaataaaacatcagctctta

SEQ ID NO: 30788 - DNA, 120 bp, synthetic construct
  source 1..120: mol_type = other DNA
gatacagcttccccaacaaacaatatccaggactcggatagtgagatacggcttccccagcaaacaacacacaggatcctgatagtgagatactgcttcccaaacaaacaatacccaagt

SEQ ID NO: 30789 - DNA, 120 bp, synthetic construct
  source 1..120: mol_type = other DNA
cggagtgaaagcagtgagctccggagtccattcagctactctggtcacagcctggaaacgctgctgggagaacaatcccagtgcctcaggcctcggttcctcatctggggaatgggaata

SEQ ID NO: 30790 - DNA, 120 bp, synthetic construct
  source 1..120: mol_type = other DNA
tacatgctttacaactcaggtttctccacttgtaaaacaacaacaacaacaacagcaaaaacctgtcccaatgtcacaaaaagtgcacgggaccctaacaactaatacctcactggctgt

SEQ ID NO: 30791 - DNA, 120 bp, synthetic construct
  source 1..120: mol_type = other DNA
tcttatgaccatcacaatccccagtgccctcagcagagacacactgggatcacgcacaggggccacctcttgtgactatcacaatccccagtgacctcagcacagacatgctgggaccac

SEQ ID NO: 30792 - DNA, 120 bp, synthetic construct
  source 1..120: mol_type = other DNA
cgaggcggttcccctgactgttcctgtggtagtgaacgggtctcacgagatccgacgaggcggttccgaccgttcctgtggtagtgaacgggtctcacgagatccgacgaggccgttccc

SEQ ID NO: 30793 - DNA, 120 bp, synthetic construct
  source 1..120: mol_type = other DNA
ctgtataagatacttcctttcctagggtttaataatttggcggagaaagaactggcttagagttgtgaatcttagagaagtgagcaaaggaggcctctgtaagaaagttgggctcattct

SEQ ID NO: 30794 - DNA, 120 bp, synthetic construct
  source 1..120: mol_type = other DNA
aactcgatcaatgagtttcctcatttccaggaatgccctaattccttccagaaatgacggctccatggaccttcctgaaacacagctcacatgcgaaccccacttctcaggagccttcag

SEQ ID NO: 30795 - DNA, 120 bp, synthetic construct
  source 1..120: mol_type = other DNA
caggtgaccagcttcacactctgttccctcaaactggcctctgggggggacagggtcaggtgaccagcttcacactctgttctctcaaactggcctctgggggggacagggccaggtgac

SEQ ID NO: 30796 - DNA, 120 bp, synthetic construct
  source 1..120: mol_type = other DNA
ccttcattgaaatccatgcctaagtcactgattttggttatcaccagaggtggcttaagcttctcaaagttaaaatggagacaacacctgaaaaattcctgagcagacacaaccagtcag

SEQ ID NO: 30797 - DNA, 120 bp, synthetic construct
  source 1..120: mol_type = other DNA
attatatgttcagaaactacagacccagagcccgtgcctttctggagaaatgggtgcagctcagggggatgactccgagtcacagtggccacagtgggaagtttattccacatgaaatca

SEQ ID NO: 30798 - DNA, 120 bp, synthetic construct
  source 1..120: mol_type = other DNA
ataccgaaatctttaaaatgcaggcatctgggaaatgacgcatcagaagggagaaaaaatgggaacactgtagaaaaaaactggcaaatggaaaatcgtaaagtcctttccatatgtatt

SEQ ID NO: 30799 - DNA, 120 bp, synthetic construct
  source 1..120: mol_type = other DNA
cagtaatcaaaacaacatgacacttgcacaaaaacagacacattgaccaggggaacataataaggaacccagaaataaactcatgcatttatgaccaagaaatttttgacaaaggtgccc

SEQ ID NO: 30800 - DNA, 120 bp, synthetic construct
  source 1..120: mol_type = other DNA
tactacttaaaagcaaaatccacctatgtcctgaacagtatccactttacgagcctcattatatgtacgagataaaattcagaaataaataaatatacatgtatacgtatacaaatatat

SEQ ID NO: 30801 - DNA, 120 bp, synthetic construct
  source 1..120: mol_type = other DNA
tgcggcgtcctccacacccggggtctgctggtctccgcggatgtcacaggctcggcaaccgccctcctgtcggcggggagtcccgcgacgcccggaaatgctccgaagcctgtcgcccag

SEQ ID NO: 30802 - DNA, 120 bp, synthetic construct
  source 1..120: mol_type = other DNA
agaactttgttccaacagattacatgtgttcataatgaatagactgctcaaagatatttccaaagctcaccttttatgtttttcagttccaataattacatctttttaaggtttatattt

SEQ ID NO: 30803 - DNA, 120 bp, synthetic construct
  source 1..120: mol_type = other DNA
ccattctcacccatgacactgtgctcagcaggtactagcagacttcaggctctgtgactaaaaggggtcagaccagttgatatacccacagctgccatgtaaggatgtgtgtggacttca

SEQ ID NO: 30804 - DNA, 120 bp, synthetic construct
  source 1..120: mol_type = other DNA
ggttcctccacttggggcaagttgggggtttgatcgcagagtaaataaatggtgcattttataatgtaatatattctagcaagatgcagcccacaaactgtatagatactcttatgtacc

SEQ ID NO: 30805 - DNA, 120 bp, synthetic construct
  source 1..120: mol_type = other DNA
tattagtattgataattagaattgattccactttttcaagtttacagtcacgtcatctgagaataactacagttgcagctctttgactccatttttgtagtccctctccttttccctctt

SEQ ID NO: 30806 - DNA, 120 bp, synthetic construct
  source 1..120: mol_type = other DNA
tttctattataacctacttcatctccccaaaaataaccacttcccaaactcttatggtaaccatttccctaatctttatagttttatcaccaagtgtatattcctagacactatagttta

SEQ ID NO: 30807 - DNA, 120 bp, synthetic construct
  source 1..120: mol_type = other DNA
cactgtcatgtgccagcagctccacagataaataaagaccaccctgcagctcacctttgcatctgcctctagtcattttggtttccggagcttattctttagtgggtcatccctcagctc

SEQ ID NO: 30808 - DNA, 120 bp, synthetic construct
  source 1..120: mol_type = other DNA
ctgcttgacagaagaggtgcagccaaattgatcgaaaggaaatgtcagaggaggccagggtgggaattatcagcaactgtgtttgaggatttgttccactttgttttggtgttggtgaaa

SEQ ID NO: 30809 - DNA, 120 bp, synthetic construct
  source 1..120: mol_type = other DNA
cttgtttacttctacttggagttgttttgttgattcttctctattctcttctcttccttttcttgaatggaaaggaacttggaaaagtgattccctgtccttgggattgtcagaggaaac

SEQ ID NO: 30810 - DNA, 120 bp, synthetic construct
  source 1..120: mol_type = other DNA
catgttaatgtatagtaggctcccttacctcaggggatagacctccagtggatgcctgaaactgtggatactaccaaaccttatggatactatggttttttttatgtatatacacactta

SEQ ID NO: 30811 - DNA, 120 bp, synthetic construct
  source 1..120: mol_type = other DNA
ggtaatttttattctaggtttttatcgtgaaaaatggatctatgtccataaagaaagcacaaaggaagtaagtattctattataaatatgagagtatcttgtattgtttctgttgaatat

SEQ ID NO: 30812 - DNA, 120 bp, synthetic construct
  source 1..120: mol_type = other DNA
gttatttcagggtaagttaaatattccagaaatgtttgtagatgctctgaaactagtccagcttccaagaaactgaaggattagattctgagaaagaaaacttaatctgtttggttatgg

SEQ ID NO: 30813 - DNA, 120 bp, synthetic construct
  source 1..120: mol_type = other DNA
tagcttatctctacaactttgacatgaaaatctgtagattttaaatatttcaaatatggaggatgaagatggagtttaaaatgacttctgaaacctagtgtgctaatctatacaaaccaa

SEQ ID NO: 30814 - DNA, 120 bp, synthetic construct
  source 1..120: mol_type = other DNA
atccgaaggttcaattatgtggtcaaagtaagtgttctatttcaaaaactactttgatgactcttttgaacaactatattttgaagattgtaagtgtacaacgttgaagatgcttttggc

SEQ ID NO: 30815 - DNA, 120 bp, synthetic construct
  source 1..120: mol_type = other DNA
tatatctaattttggttatttgataaattatctgaagtacttcattctctgcctgtggtggaccaattagatagcacatccagtgtcacatacttccaggggtactgtatttttagttta

SEQ ID NO: 30816 - DNA, 120 bp, synthetic construct
  source 1..120: mol_type = other DNA
ctgttagaaagattagattagttccatcataggaagctcttggaacagtctgtactctgtgttagccactattttgattttcttttgaggaggatttaggcagagggatgacagctgcat

SEQ ID NO: 30817 - DNA, 120 bp, synthetic construct
  source 1..120: mol_type = other DNA
agtgctgtggccttggggccagcttcttcatctctccctgcctcagttttctcatctctagagcagggataatagtaagacctacctcacaggggcattacagcattgaaagggcatcag

SEQ ID NO: 30818 - DNA, 120 bp, synthetic construct
  source 1..120: mol_type = other DNA
gaaactcttctgctcagaaactatttccaagtcctcggaagacaggtacaaatccttatattccattcggccttaacagcatcaggaggaagttgccacacgtttaacagaaagagatat

SEQ ID NO: 30819 - DNA, 120 bp, synthetic construct
  source 1..120: mol_type = other DNA
taaagataagctttcctctcttaaggaaggtctcaaacctacgcttccacacagaatgacatatctgggagatgagaagctaccagaagagagaatcagaacagagctcagcacaaaata

SEQ ID NO: 30820 - DNA, 120 bp, synthetic construct
  source 1..120: mol_type = other DNA
gggctacgaacagcagcaggttaaaccagacaatgaaagcaagctctctatgtccacatcacatcgcttaaaaaaagaatcagactgtggctgtttagaagaaatcaaggagaactgaaa

SEQ ID NO: 30821 - DNA, 120 bp, synthetic construct
  source 1..120: mol_type = other DNA
tgtctgtgctcactggtccccaggctccgacctctgaacgtgccagccccggttctaatgtctgtgctcactgggctccaggctccgacctctgaacctgccggccctggctgtaatgtc

SEQ ID NO: 30822 - DNA, 120 bp, synthetic construct
  source 1..120: mol_type = other DNA
ttcctgaagacaagtggctgcagatgtttccatgataatctccccgtgagggttccaggagttccatctttctatgagctgttttcctgagtagcttcctgatcccttcaacaggtgttt

SEQ ID NO: 30823 - DNA, 120 bp, synthetic construct
  source 1..120: mol_type = other DNA
aaaatctcaaatcaaactgcctcaaaggaagaaatctaaatcggataccggatacctacaagaacccacaggcaaggtcataagtcatgttgaaatgctgaaagccttttctccaacagg

SEQ ID NO: 30824 - DNA, 120 bp, synthetic construct
  source 1..120: mol_type = other DNA
tgtaaacacagaaaatccaagagaatccacagctgccaccccatcaacaggcaagtgtgtcacaaatgcagtggtcaccactcaggagaaaaaggaatgtgccaccaacacacacatcat

SEQ ID NO: 30825 - DNA, 120 bp, synthetic construct
  source 1..120: mol_type = other DNA
ctctccccacagcccttgcccttgcttcaccaggaaaataaagaaatcagagaagactgccacaggtacctgcacaccatgacggctgtgagcaaaacctgcatctgacacagatcctta

SEQ ID NO: 30826 - DNA, 120 bp, synthetic construct
  source 1..120: mol_type = other DNA
ctccactccttcctccccatcagcctgcgctcgctcctctcaccctccactcctctccttcctccccatcagcctgcgctcgctcctcaccctccactcttctccttctccactcctctc

SEQ ID NO: 30827 - DNA, 120 bp, synthetic construct
  source 1..120: mol_type = other DNA
gaaaagcatgcttagtgtaaccccgtatctaggagacgtgaagggaactttttccttctcacttgtcttctatccttgaccagaacggtgtctgtggcactcatcacatcgcaggttaga

SEQ ID NO: 30828 - DNA, 120 bp, synthetic construct
  source 1..120: mol_type = other DNA
gtgctgcacccaggcggcctcttcccgcatctctcggtgggatgtgctgcacccaggcggcctcttccggcatctctcggtgggatgtgctgcacccaggcggcctcttccggcatctct

SEQ ID NO: 30829 - DNA, 120 bp, synthetic construct
  source 1..120: mol_type = other DNA
ctgagtttgtgtactacccacaacgcgtcatacttctgagtcttacgggacttctttacgttttcattcagtaaaaagactgcaagatatcataaagcagacagggaaggagaaacctcc

SEQ ID NO: 30830 - DNA, 120 bp, synthetic construct
  source 1..120: mol_type = other DNA
ggtgggatgagcgggtctgcggtgggatgggcgggtctgcggtgggatggggccggcctctgtggtgggatgggtggactctggtggtggctccgtgggggactccgtggtgggatgggc

SEQ ID NO: 30831 - DNA, 120 bp, synthetic construct
  source 1..120: mol_type = other DNA
attcaaattggctaaatttagtttctgaaaaatgtccagtccaaaaatagacctgttccgaaatatttgtcactgggccccggctcgttttgtctgagaaggtgagttggctgagttgtg

SEQ ID NO: 30832 - DNA, 120 bp, synthetic construct
  source 1..120: mol_type = other DNA
ccttataggaagttcatctgacactttatagtaagtccttatagtaagttcatctgacacttcatagtaagtccttatagtaagttcatctgacacttcatagtaagtccttataggaag

SEQ ID NO: 30833 - DNA, 120 bp, synthetic construct
  source 1..120: mol_type = other DNA
aagactatttttcaaagagttttagatacacagcaaaattgagcagaaggcacagagagttcctatctaaccactaccctccccaacagccttcccattatcaataacccccacaacctt

SEQ ID NO: 30834 - DNA, 120 bp, synthetic construct
  source 1..120: mol_type = other DNA
ctcaaaaaaaaaaaaaaaaaaaaaaaaaaaaaaaggcacgtcctgacacttcagatgcgccggatcctgccatgcttgagccaaagctctgggcgattcccatgtggctcaggctgaaag

SEQ ID NO: 30835 - DNA, 120 bp, synthetic construct
  source 1..120: mol_type = other DNA
ttgcgaaacacccatgcctgagcttagctcagctgggccggcgcaggggcaggaaaagcccgtcctggcaggcgtccttgcccctcttcagtctcggcctctggctcatcagtttcctca

SEQ ID NO: 30836 - DNA, 120 bp, synthetic construct
  source 1..120: mol_type = other DNA
caggttcctgcaagcctctagccagggcaattttgtcaatcaatcagtgcataaccttgttttatttgtgtttctgcttagacacctgatttaatatctactgctgactcatcagtgctg

SEQ ID NO: 30837 - DNA, 120 bp, synthetic construct
  source 1..120: mol_type = other DNA
agtgagagcagctgtccagtgagagcaggcgtccagtgagagcaggtgtccagtgagaacaggtgtccagtgtgagcacagctttgggggttccaggtagagtttagcaagcaggtgaat

SEQ ID NO: 30838 - DNA, 120 bp, synthetic construct
  source 1..120: mol_type = other DNA
cttttgtactttaactgctcccgaggcccctgttgcatcttcaccaggctgtttgcatcagtttcttgtctgtcagctgaaagatctgcaaaggggctggttctctgtcctggcactccc

SEQ ID NO: 30839 - DNA, 120 bp, synthetic construct
  source 1..120: mol_type = other DNA
cactgaaagtaaacgcttgttgagagccttcccacttgatattttccttagaatcttggagtgtttttgtgtgtgtgcatgtcctgacctaggatttcaggtcgctggggacagtatgac

SEQ ID NO: 30840 - DNA, 120 bp, synthetic construct
  source 1..120: mol_type = other DNA
ctgtgatgagtggctgtccttagcccactgtgccttcccactctccagcaatgtgactttcagctcattttgatgagaaataacgttcacaataggctgtttctctcctgggggttcaca

SEQ ID NO: 30841 - DNA, 120 bp, synthetic construct
  source 1..120: mol_type = other DNA
cttttagacaggttttcccttgatcgccgccctgcatggaattttactagcagagacaggttgcatctttctgtaggccgtggtctctcagacggtcacacaccaccataacatctaaga

SEQ ID NO: 30842 - DNA, 120 bp, synthetic construct
  source 1..120: mol_type = other DNA
cacgacatttcatcttctcatcctaaactccgagttcttctctggtgtgatgcaaaggtactcgttctcattcataagttctctctcctctttttcttctcattcatacgttctctctcc

SEQ ID NO: 30843 - DNA, 120 bp, synthetic construct
  source 1..120: mol_type = other DNA
taacctgattcaagtctgtgaaaccggagaaggggcttctgggaaagaggtttcctcccttcttggagacagcttctaggagtgtggattgctccccttcctgggaatgagcaggaacta

SEQ ID NO: 30844 - DNA, 120 bp, synthetic construct
  source 1..120: mol_type = other DNA
gcagcctgcagaagaaggggccgcaccttgtggataaggagtgtgtcattcatctttgtgttccagccacttttcgtggttcctgactcataataaatgtttcattgaatttattaaaca

SEQ ID NO: 30845 - DNA, 120 bp, synthetic construct
  source 1..120: mol_type = other DNA
catgattatgacttcttcatgtttattcaccgtttcatcacccacatgggcattccctgcctctgcagctcagccttcagatctgtctccactgagatgccttttaggtctcttttgatc

SEQ ID NO: 30846 - DNA, 120 bp, synthetic construct
  source 1..120: mol_type = other DNA
tgcatttacacggtgcacgcctgcacgtttccccacactctggattctgcgagcgcgtctacacggtacatgcctgcacgtctccccacactctcgattctgtgaacacgtctacatggg

SEQ ID NO: 30847 - DNA, 120 bp, synthetic construct
  source 1..120: mol_type = other DNA
tcaatagttgatttttataaattgctgagtagtattccagtataggatcgtgtggtgtgtgttccaatatagaaacgtgcggtgcctgttccagtataggatcgtgcggtgcgtgttcca

SEQ ID NO: 30848 - DNA, 120 bp, synthetic construct
  source 1..120: mol_type = other DNA
tatagaatcttgtggtgcatgttccagtataggaatgtgcagtgtctgttctggtataggatcatgtgatgtgtgttccagtataggaacatgccagggtttgttccagtctaggatctt

SEQ ID NO: 30849 - DNA, 120 bp, synthetic construct
  source 1..120: mol_type = other DNA
taatcaatttctgtgcttctaatattctcctcatgcacacactttgtgcatcctgccaccgaggccatgcgtcttctagaatgtagatgtgcttctgtctcacatgagacaccataaatc

SEQ ID NO: 30850 - DNA, 120 bp, synthetic construct
  source 1..120: mol_type = other DNA
tacttgaaatggctccttaatagagaacttaagagaggcgtcagtgatgctccaaatgagacgtgagacccagctgaggcctgagacatgaatgagacatgacggggatttatctaattt

SEQ ID NO: 30851 - DNA, 120 bp, synthetic construct
  source 1..120: mol_type = other DNA
atgatttcctgagcagtgcgtatgtcctgtgatgtcctgtgttgctggaatggagtggattcttctctctcagtgaggaatagctttctgattgtgatctcagtggaagtcacgtgctgt

SEQ ID NO: 30852 - DNA, 120 bp, synthetic construct
  source 1..120: mol_type = other DNA
gtagctagagccacattgcatggggccttcaggccctttaacgatgaaatgtttggggccattgcagtgggttttgagcagaataatgcagtgtgacttagggttcacgaggtttatgag

SEQ ID NO: 30853 - DNA, 120 bp, synthetic construct
  source 1..120: mol_type = other DNA
gatgatgtatttggggaagtcacactaattttggggtacccatccgacatctaaatggtgccatggactgaacatgtccccccaaattcctatgttgaagccttggtccccagtgggatg

SEQ ID NO: 30854 - DNA, 120 bp, synthetic construct
  source 1..120: mol_type = other DNA
ccacgttcatttattcctctcgggctctgatcattcctactggataggagtcctcgctgagcccccatggtatctggcacagagcggacgtgtgttctgggactgtgttttaatttgtga

SEQ ID NO: 30855 - DNA, 120 bp, synthetic construct
  source 1..120: mol_type = other DNA
agttatcttgtcgcctccatgctctttaatctcgttaatgtcaggacgtttttatcctttgctttctggaggcagtcacaggttggttggggccaaagattacaaacaaggatgttttat

SEQ ID NO: 30856 - DNA, 120 bp, synthetic construct
  source 1..120: mol_type = other DNA
tcactgtagacgctccgcactctcttttcctatccaccccagttttcccacccacgtatttgtaggttaccttaaagtctttccagtgtaagacaagctacatatatacatgaaattgat

SEQ ID NO: 30857 - DNA, 120 bp, synthetic construct
  source 1..120: mol_type = other DNA
cttgcaaaggcatctgtgaagggtgggatgcactcagaagacagcataaggtttttgatttagaggaataaaaaaaaataaagcacaggggaagaacttggtgatactggacaggtcctc

SEQ ID NO: 30858 - DNA, 120 bp, synthetic construct
  source 1..120: mol_type = other DNA
gcggtactcaagcagtgtttgcctggctttggttgagagttcccggcaacaatgagggctgcagtctaattatacttagaaggaaatattgatcttggtttccatgatttatagtacaag

SEQ ID NO: 30859 - DNA, 120 bp, synthetic construct
  source 1..120: mol_type = other DNA
atatatggttagggttttttcttctttcctgcaagaatatgtgggaaggaagtgatattttctggagttcctatggactcgtctataagcataccttccgatcctgtccccgtccgttcc

SEQ ID NO: 30860 - DNA, 120 bp, synthetic construct
  source 1..120: mol_type = other DNA
agcctgctgtggagacacctggccgtgggcatgaggggagggtgagggcagagcctgctgtggagacatctggccgtgggcacgaggggagggtgagggcagagcctgctgtggagacac

SEQ ID NO: 30861 - DNA, 120 bp, synthetic construct
  source 1..120: mol_type = other DNA
aatggcagaaactcccaggcctctgccttaagccccgaggaagagtgtgaggatgagaccaaggtatgaggtgaagggcatctgtgctaaggaggctgagcctttctgttcagaaacctc

SEQ ID NO: 30862 - DNA, 120 bp, synthetic construct
  source 1..120: mol_type = other DNA
acacgtacaggctcctgagagcgcacaccaggcccccaactgcccatgagagaatccgggaatagaaggagccgggatctccgtctttaaggtggaaagcttctttggctgctatggagt

SEQ ID NO: 30863 - DNA, 120 bp, synthetic construct
  source 1..120: mol_type = other DNA
ctttggacatttgctctcaagggtgggcaccgcctccacctaccctcccccgagggccacacttcttgctgctctgtgcagattctactggaagcccttccagcgctgccaggctcggat

SEQ ID NO: 30864 - DNA, 120 bp, synthetic construct
  source 1..120: mol_type = other DNA
gcacacggcactgttcaccacacagggctcctgagtctgacccctgcgctgtacacggcactgttcatcacacacgcggctccagagcccgacccccgcatgcacacagcgctgttcacc

SEQ ID NO: 30865 - DNA, 120 bp, synthetic construct
  source 1..120: mol_type = other DNA
gtgaaatataattagaacattttccctgttatagactgttttttaagagagttcatagaattttagtaatgtggggagggcgtcggggatgcagtgaggggctgggttctggtctttggt

SEQ ID NO: 30866 - DNA, 120 bp, synthetic construct
  source 1..120: mol_type = other DNA
tgaggtgctgcgttccggtctttggtgacgtggggagggcgtcggggatgcagtgaggtgctgcgttctggtctttggtgacgtggggagggcgtcggggatgcagtgaggtgctgggtt

SEQ ID NO: 30867 - DNA, 120 bp, synthetic construct
  source 1..120: mol_type = other DNA
aagtgctgggattataggcgtgagtcactgcacccggctggtggtgtggttttaatactcagttgagttcctttcctgtgcaatttcttttttcatctcttttattatctcattttcaag

SEQ ID NO: 30868 - DNA, 120 bp, synthetic construct
  source 1..120: mol_type = other DNA
gagcgagacaccatctcaaaaagaaaagaagaaatctcatgccccaccatcccccaacccctgaaaaagatggacaactgtgctatgcttctggggaggattgtgcctttatcacatcga

SEQ ID NO: 30869 - DNA, 120 bp, synthetic construct
  source 1..120: mol_type = other DNA
tgtctgaagtctcaggatatggtcctttatcacgtcgggtatgccgtgtatatgaagtctcgggatgtggtcctttatcatgtcggggacaccgtgcatctcaagtcttaggatacggtc

SEQ ID NO: 30870 - DNA, 120 bp, synthetic construct
  source 1..120: mol_type = other DNA
agccctggaatgaggtaccttagtctgcacagtgagcccgggcgaagggcctcagtctacacagtgagctctggaatgaggggtcttagtctacacagtgagccctggaatgaggggtct

SEQ ID NO: 30871 - DNA, 120 bp, synthetic construct
  source 1..120: mol_type = other DNA
tatagactttcagcatttgaactacgttattggtgtgaaaagttaagcatttgtgaactaagtgcccaccatgtactgccctgtgcaggatacagtagagctttgagcatctcgtaggtt

SEQ ID NO: 30872 - DNA, 120 bp, synthetic construct
  source 1..120: mol_type = other DNA
tttgtggaaagcgctcactgacccctgcccctacaggccctccgtcctcagcttggccctgctcagtcagctgcattgaccaagactctcacatgacccctgcccctacaggccctccat

SEQ ID NO: 30873 - DNA, 120 bp, synthetic construct
  source 1..120: mol_type = other DNA
tcaagctcattttgaagaaccgagatgtgactccatttcccaactgcagcccttgatccttgtaataaggggaagctgggatagaaccttggcgtggcagagtctggaatgacggacaga

SEQ ID NO: 30874 - DNA, 120 bp, synthetic construct
  source 1..120: mol_type = other DNA
taacaacttgttatgaaacaggattataacaaagttagcatatttgtgaattatgcgttaatccagcacatattagttacacgcccgtggtgctgcaggtgaggtgccgggtgcccatta

SEQ ID NO: 30875 - DNA, 120 bp, synthetic construct
  source 1..120: mol_type = other DNA
cccgttattctccaggtcgggtgtcaggcgcccgttattctccaggtcgggtgtcaggcgcccgttattctccaggtggggtgtcaggcacccgttattctccaggtcgggtgtcaggcg

SEQ ID NO: 30876 - DNA, 120 bp, synthetic construct
  source 1..120: mol_type = other DNA
aatcctcttatacaacttgcttctcttagaaaacacaagagcttcttatctctgtctcaagaagggagaaaaatgggatgaatgaagaataaaggcttagctgggggttgggggtggtgg

SEQ ID NO: 30877 - DNA, 120 bp, synthetic construct
  source 1..120: mol_type = other DNA
gctcatcccgaccccacatgttcacgtgtttaatgaacactgtgctagaaggtcagcagtaaacatgccacagcaccccatctgctgcagtggatgctggcttggggaggacacaagacc

SEQ ID NO: 30878 - DNA, 120 bp, synthetic construct
  source 1..120: mol_type = other DNA
tgtaatttttcggaaacttagttttcagccccactttcctcctttataaaatggaaacaatcacctcattggagcaaactcacctggttggttgcgttgagggagactcataggaagtga

SEQ ID NO: 30879 - DNA, 120 bp, synthetic construct
  source 1..120: mol_type = other DNA
tcggtgtgcatgttcagctcggtgtgcgtggtcggctcattgtgcatggtcggctcggtatgcatggtcagctcggtgtgcgtggtcagctcggtgtgcatggtcggctcagtttccgtg

SEQ ID NO: 30880 - DNA, 120 bp, synthetic construct
  source 1..120: mol_type = other DNA
ggaggagacagagcctgtttcaaagcccaggttttggggtgagggaggatgtggcattttctcctttcctgtatttctgtgcctgtttctcctgtttctgagaaaagtgttctctgagcc

SEQ ID NO: 30881 - DNA, 120 bp, synthetic construct
  source 1..120: mol_type = other DNA
tagtacagaaagcagatctgtggggcttccttaggggtttcaggaaaaacatgttagacgcagaggtggcttaggatttaacatctgaccttgaatctgtcagatcacttgttatcttgt

SEQ ID NO: 30882 - DNA, 120 bp, synthetic construct
  source 1..120: mol_type = other DNA
tgtgtctaccctggggcttctctgtggaaagctccccctggccttcgtaggacaaaggattcttcaggaagcagtaggtggctgagagacccctgtgacagtgttggtgagtgataacga

SEQ ID NO: 30883 - DNA, 120 bp, synthetic construct
  source 1..120: mol_type = other DNA
cagaaagttagtaatcctgagaactgccgttccttcccaaacgctttatcttttcacacgtggatatttttatcttctgctattctgtggcagagtccaggggagtaagttctgatgttt

SEQ ID NO: 30884 - DNA, 120 bp, synthetic construct
  source 1..120: mol_type = other DNA
ggtacatattcaggattcactgtcacagaagggtttgcagcacagaatttctcttcagcctttcagttcacatcatgctcagtctctgcctacagtgtgtccagctaacatcagaataca

SEQ ID NO: 30885 - DNA, 120 bp, synthetic construct
  source 1..120: mol_type = other DNA
tctatggcagttgaccagtaacactgccggaaattcagaaaacagctgaattttagtctttctctgtctgtttttcatgcccttgagatgggataaagctgtcaaatctctgacatgtgg

SEQ ID NO: 30886 - DNA, 120 bp, synthetic construct
  source 1..120: mol_type = other DNA
tgaaagtaacaaatctcttaggcctgcacaggctttctccggacatggtctattggtctgtatatgtcggcctgagtggcaccacaatatgaaaacaaatgtcttactttcccttttgac

SEQ ID NO: 30887 - DNA, 120 bp, synthetic construct
  source 1..120: mol_type = other DNA
gattcatgtggacccaccatgctgaaactttcagggcttctcagagtcgtatggccttggttaacggtgatgactggcagggccttggttaacggtgatgactgacggggacttggttaa

SEQ ID NO: 30888 - DNA, 120 bp, synthetic construct
  source 1..120: mol_type = other DNA
tgagttggcctttggtgaggatgccagtgatggacctggctgtgggaatcttctaacaacaaaccctttctgggcccctgcatcaggtggcatcacaagaacacaaagcgcttgcttgtg

SEQ ID NO: 30889 - DNA, 120 bp, synthetic construct
  source 1..120: mol_type = other DNA
ttgaaaaaatggtcctaatttcagcttgtttttccaaccatgtgaaaggatggactggacgctgcgcagaagtggagatcttaggtaagaagaaaggataggaaggttgatgggaaatga

SEQ ID NO: 30890 - DNA, 120 bp, synthetic construct
  source 1..120: mol_type = other DNA
cacgggtctgtgaggtgtgcatgggtctgtgaggtgtgcacgtgcctgtgatgtgtactgtatctgtgaggtgtgcacgggtctgtgaggtgtgcatgggtctgtgacatgtgctggatc

SEQ ID NO: 30891 - DNA, 120 bp, synthetic construct
  source 1..120: mol_type = other DNA
tgaggtgtgcatgggtctgtgaggtgtgcacgtgcctgtgatgtgtactgtatctgtgaggtgtgcacgggtctgtgaggtgtgcatgggtctgtgacatgtgctggatctgtgaggtgt

SEQ ID NO: 30892 - DNA, 120 bp, synthetic construct
  source 1..120: mol_type = other DNA
cagtgttcagggtttttcttagacgagacgctttccttcatctcctctagtgagactcggtccttaaggctgacgctggcgccgtcttctcttccctgtgctggggacagatttttctgt

SEQ ID NO: 30893 - DNA, 120 bp, synthetic construct
  source 1..120: mol_type = other DNA
gggttttatgcatgtcaaacccatggtgtttctacatgaatgactggaatttcagtgttgcagacccaggggatcttagtcatgaactgcaccctagtttcctttaatcagatgatcata

SEQ ID NO: 30894 - DNA, 120 bp, synthetic construct
  source 1..120: mol_type = other DNA
tcttagtcttctgtgttgcatcaccatggattatctgttgtaatttcacacaagaaccagtgcgtgtggcacacatcgtgtgcaatggcagcacactgtcgagtgtgtgtgggtgtgtga

SEQ ID NO: 30895 - DNA, 120 bp, synthetic construct
  source 1..120: mol_type = other DNA
ttggagatgcatcaatacgttcaaagatgattgtcagttgccaaaatagcactggctacatattgactgcaatttaacaatgggggcaatagtcacaacacctgggacctctgtgacatt

SEQ ID NO: 30896 - DNA, 120 bp, synthetic construct
  source 1..120: mol_type = other DNA
tgacgtttccctcacggaatctcgcacgcccgggacttccgtgacgtttccctcacggaatctcacacgcccgggacctctgtgacgtttccctcacggaatctcagacgcccgggatct

SEQ ID NO: 30897 - DNA, 120 bp, synthetic construct
  source 1..120: mol_type = other DNA
aatgacttgtcactccaaaaagttaaaaaagcacctccaaatatatatgatgccacatcttctcctcacacaggttgccttgtggtgcggcttccaggccggttccgcggttggggttga

SEQ ID NO: 30898 - DNA, 120 bp, synthetic construct
  source 1..120: mol_type = other DNA
acctcatctcaaggaaacaaaagtgaagagtgaccttggggatttcatcagcaaatcaagcaggaagttcagggagccatctcagtcgggatatctctgagcatttagaaatcatgttaa

SEQ ID NO: 30899 - DNA, 120 bp, synthetic construct
  source 1..120: mol_type = other DNA
tggaggaagtgacttatatctgggttttggaggactgttgccagcaaatgacctcaccctgggagtgattaagaaaccttcttatatctttatttttccagtacctttttgccaagacct

SEQ ID NO: 30900 - DNA, 120 bp, synthetic construct
  source 1..120: mol_type = other DNA
actagaacatgcgtttaaaaatgcagtgcaatctcgtttcgggagagcactctgtgctcttgtatctcactgcccacttctgtgtctaagtctcatggaaatagtataagaacacaaaag

SEQ ID NO: 30901 - DNA, 120 bp, synthetic construct
  source 1..120: mol_type = other DNA
gggttcatttgggtgcatcacctggagacgtccaggtacctcgatgggttcattaggcacatcacctggagacgtctaggctcatgcagtgcttgggaggagctttctggtgcatctgtg

SEQ ID NO: 30902 - DNA, 120 bp, synthetic construct
  source 1..120: mol_type = other DNA
tgtctcgttctctctcacgtggcatcgtgtctagttccctcacacatggcgtcgtgtctagttccctctcacatgttgccgtgtctagttctctatcacacatagcgtcatgtctagttc

SEQ ID NO: 30903 - DNA, 120 bp, synthetic construct
  source 1..120: mol_type = other DNA
ccatgtctaattctctcacatggcgccgtgtctagttctgtcacatggaaccatgtctagttctctcacatggctccgtgtctcattctctcacatggagccgtgtctagttctctcaca

SEQ ID NO: 30904 - DNA, 120 bp, synthetic construct
  source 1..120: mol_type = other DNA
ggggagcagcacagagccattggatttgggaattcatcatgctcttctgcctcaggttgaaaaattaaatactgggtttttactgagatgcacaatgcttaagatactactaggaaatcc

SEQ ID NO: 30905 - DNA, 120 bp, synthetic construct
  source 1..120: mol_type = other DNA
ggtccatgttggtggccgggaagacctttgagatcagtgtgggagtaatggcccatgttggtggccggcaagacctttgagatcagtgtgggagtgatggcccacatcggtggccgggaa

SEQ ID NO: 30906 - DNA, 120 bp, synthetic construct
  source 1..120: mol_type = other DNA
gccgggaagacctttgagatcagtgtgggagtgatggtccatgtctgtggccgggaagacctttgagatcagtgtgtgagtctgatagtccacgtcggtggctcggaagacctttgagat

SEQ ID NO: 30907 - DNA, 120 bp, synthetic construct
  source 1..120: mol_type = other DNA
ctgactttttgtttggggaaaatcacgatctatggcctaagacggcttctcgcatctgcattccaaaatagggtttcagagcttcgtgctctcatttaaagcagttttttgtctgtatga

SEQ ID NO: 30908 - DNA, 120 bp, synthetic construct
  source 1..120: mol_type = other DNA
tgcctgggagctgtgtgtctgtcctctcctgcctgggagctgtgtgtgtgtcctttcctgcctgagcactgtatgtgtgtcctctcttgcctgggtgctgtgtgtgtgtgtcctcatcct

SEQ ID NO: 30909 - DNA, 120 bp, synthetic construct
  source 1..120: mol_type = other DNA
cgcctcctgcaatcagatgcccgcgtggggagtctcaccttggaaactgaggggaaactgactgtgggccctctgttcccgagtgagatgccttctccccactttctgcagaatttgtga

SEQ ID NO: 30910 - DNA, 120 bp, synthetic construct
  source 1..120: mol_type = other DNA
agcatgggaactggtttttcctccatcacacccaccctagtcctctgcatttcatagccctgtagttttgaatcaaatacataaagctggcttcatggatgtctgttcttattacaatat

SEQ ID NO: 30911 - DNA, 120 bp, synthetic construct
  source 1..120: mol_type = other DNA
tttgatctgcaacgtttgatttgcgacgtggctccaccacactgggctttgatctgccctggaagagacgttcaaaccacagccagagggtcatgtgatggtgtcagttattgccgatga

SEQ ID NO: 30912 - DNA, 120 bp, synthetic construct
  source 1..120: mol_type = other DNA
gaacccagcgccctgaaccatctggacgtggtgtgacctgaatccagccccctgaaccatacggacatggtgtgacctgagcccagcacgtgaaccatctggacatggtgtgacctgaac

SEQ ID NO: 30913 - DNA, 120 bp, synthetic construct
  source 1..120: mol_type = other DNA
tcaactcctgtggaaggattagagttgttaggccgtatggggaaagtgacttgatttgcacaagtgcattcgaggagaaaaccaattctcagtagaatgagaacgttaaatacaatgagg

SEQ ID NO: 30914 - DNA, 120 bp, synthetic construct
  source 1..120: mol_type = other DNA
ttgttaggaggggaactagtttcggttcagtgtgtgtgtgtacatggttctgttaggttctattacacagtgttcattcctccataggcttcaaatgaattcagttgctcggcttgtttt

SEQ ID NO: 30915 - DNA, 120 bp, synthetic construct
  source 1..120: mol_type = other DNA
aggtagtgagttatccccagtcacctgtgaaaggcatgcatttgtatccacaaacaaatcttaacacatgtaaacgtacgtcagaaaaacatgtctcccctgctgtttaggatgagaatg

SEQ ID NO: 30916 - DNA, 120 bp, synthetic construct
  source 1..120: mol_type = other DNA
tgtgatcttatttcagcatctttataagtgatcaagtaaaagtcatataattgaagttatctaaaccccccatacaccaaatgcgtccgcttcctggtctgtcgtcctgcagcctacaga

SEQ ID NO: 30917 - DNA, 120 bp, synthetic construct
  source 1..120: mol_type = other DNA
cagggaggggggaggaaggacagaagttctaggagagtagtatgcacggccattaaaataatctttggtaattaagtcaggtgtcgtgatgaattactaacaactaggcattctgttctt

SEQ ID NO: 30918 - DNA, 120 bp, synthetic construct
  source 1..120: mol_type = other DNA
ctccgtggcggtggttttctaagtgacgcttttttacaaaagaggttttttcagaagcggcgacaccatagaaccgtatttagtaagtaacattttgagaagagtaaagcttcctggaga

SEQ ID NO: 30919 - DNA, 120 bp, synthetic construct
  source 1..120: mol_type = other DNA
ctcgtcagcgtttaaaaatagagcgtgtgtgagtgcagcgtctctccaacagtctacaaatggctttgctgcttttcatttctttgcaactcttgaagggtcctgtttcaaactttgatt

SEQ ID NO: 30920 - DNA, 120 bp, synthetic construct
  source 1..120: mol_type = other DNA
agccctatcaaactggggctggattttccaccaagtgtctcataccaaacaggcctaggatatttcagaaccttgtcttctagctctgctgaagtgcacaactcattgctgcaagctgca

SEQ ID NO: 30921 - DNA, 120 bp, synthetic construct
  source 1..120: mol_type = other DNA
gagttctgggtgggagcacagcttcacagggactgagttctgggtgggagcatcgcttcacggggactgagttctgtgtgggagcaccacttcatggggactgagttctgggtgggactg

SEQ ID NO: 30922 - DNA, 120 bp, synthetic construct
  source 1..120: mol_type = other DNA
cagtaatgacagtgtgtgacatgatgagaagatagagaggaggaggaggtgaagaagaaatagataatgatgatgatgaggatgataatggtggtgagaatgatggtgatgatggtggtg

SEQ ID NO: 30923 - DNA, 120 bp, synthetic construct
  source 1..120: mol_type = other DNA
tgtgtaggttcatttcccacatagagctacattgcactcatggtagctgtgcggaggttttgttcctacacagagctacattgctgtcttggtaactgtgtggaggttgagttcccatac

SEQ ID NO: 30924 - DNA, 120 bp, synthetic construct
  source 1..120: mol_type = other DNA
gctctcatggtaactgtctggaggctgagttcctatacagagctgcgttgcactcatggtagctgtgtgaaggttgagttcccatacacagctacattgcactcatggtaactgtgtgga

SEQ ID NO: 30925 - DNA, 120 bp, synthetic construct
  source 1..120: mol_type = other DNA
ctttacaaaacacagctgtgtcgtacgctcacattaaatattaaaatgtggtattaatgtagttgagatacttaaactaggtgtttgagggggcactatcacgagcctcccgccgacatc

SEQ ID NO: 30926 - DNA, 120 bp, synthetic construct
  source 1..120: mol_type = other DNA
atgtgtggaacggccgtgcgggtcctgagcgtgcgtggaaaggccgtgcgggtcctgagcgtgcgtggaaaggccgtgcgggtcctgacagtgtgtggaaaggccgcgtgggtcctgact

SEQ ID NO: 30927 - DNA, 120 bp, synthetic construct
  source 1..120: mol_type = other DNA
gtgtgtggaaaggccgtgcgggtcctgagtgtggaacggccgtgcgggtcctgactgtgtgtggaaaggccgtgcgggtcctgagtgtgtgtggataggctgtgcgggtcctgactgtgt

SEQ ID NO: 30928 - DNA, 120 bp, synthetic construct
  source 1..120: mol_type = other DNA
tgcgggtcctgactgtgtgtggaaaggccgtgcgggtcctgactgtgtttggaaaggccgtgtgggtcctgatcgtgtgtggaaaggacgtgcgggtcctgagcgtgtgtgtggaaaggc

SEQ ID NO: 30929 - DNA, 120 bp, synthetic construct
  source 1..120: mol_type = other DNA
ggaaatttaccttaaaggatattctctcagcatgaaccgttaaaaacaacctgctcaccagtgggatgtaatttaagaaaaagaaaatacttacggaggccaggcacggtggctcaaacc

SEQ ID NO: 30930 - DNA, 120 bp, synthetic construct
  source 1..120: mol_type = other DNA
tgacacctgcgtgccagtgtgcacagcacaggcagagagcacctgtgtgttaacaggcagtaacaggggttgtctctgggtggtgagattgtcggagattgtttttgtttttttatctaa

SEQ ID NO: 30931 - DNA, 120 bp, synthetic construct
  source 1..120: mol_type = other DNA
ttggattctgtaattattcatcctttttgactttgttttactttgcattatcaaaatgcataaagtggagactggacggtggaaatcctgcagggcaccgaggcacctaacgtcaaggct

SEQ ID NO: 30932 - DNA, 120 bp, synthetic construct
  source 1..120: mol_type = other DNA
acctcctacatttgggttaacgacatctctccacggcctcagaactgagcccccacctcctacatttgggttaacgacccctctccacggcctcagaactgagcccccacctcctacatt

SEQ ID NO: 30933 - DNA, 120 bp, synthetic construct
  source 1..120: mol_type = other DNA
tacattcatgaaggagacccacaaatgcatgtctggggttttggtgtctgtacttagtgataaaatatgtgaccccaacaagaaaggggttttcgttattcactggctcattcagacgtt

SEQ ID NO: 30934 - DNA, 120 bp, synthetic construct
  source 1..120: mol_type = other DNA
cccggcctatgcccgtcccctgagaacttggtgcacagttaccccggtctgtgcccgtcccctgagaacttggtgcacagttaccccggcctatgcccgtcccctgagaacttggtgcag

SEQ ID NO: 30935 - DNA, 120 bp, synthetic construct
  source 1..120: mol_type = other DNA
cctagccagcagcacccacagtcctaatactggaatcaatgagatctgaagattggagcaattcccaggcaagagctcctaggaattaaatctcttgttacaaaaatatggtttaatctc

SEQ ID NO: 30936 - DNA, 120 bp, synthetic construct
  source 1..120: mol_type = other DNA
agtgtggaagaaataggcactaagttgggtcctgggttttgggttgaggtggttggtgactggtaggggtgaagggtgagaggaaggttcaggtaggaatggcaaccagatttttctcag

SEQ ID NO: 30937 - DNA, 120 bp, synthetic construct
  source 1..120: mol_type = other DNA
atgaggaggcgctggttcaggtgtcagggctgtaagaggcagaggccgtggatgaggaggcgctggttcaggtgtcagggctgtgagaggcagatgccgtggatgaggaggtgctggttc

SEQ ID NO: 30938 - DNA, 120 bp, synthetic construct
  source 1..120: mol_type = other DNA
ctttttttacaactattccccccaaatggagacagatcagttttgctctaaatgtgaatccgaggcctcaggaaggcattcgaggttttcagaacctccttgtcctcctgagtcgtgtat

SEQ ID NO: 30939 - DNA, 120 bp, synthetic construct
  source 1..120: mol_type = other DNA
tgttttttttttgagacggagtctctgtgactctttttttacaactattccccccaaatggagacagatcagttttgctctaaatgtgaatccgaggcctcaggaaggcattcgaggttt

SEQ ID NO: 30940 - DNA, 120 bp, synthetic construct
  source 1..120: mol_type = other DNA
gtctccggattctgttttttcactgcttattttgtctttccttcttcccttttttaggtgactggactttggcaaagtgaatgtatgtgtgttggaatggggcgtgtgtctttgttaaat

SEQ ID NO: 30941 - DNA, 120 bp, synthetic construct
  source 1..120: mol_type = other DNA
tccagagtcgtactaactgagcgctcccaccttgtcctccagagtcgcgtaactcagcgcttactgagcgccacctccttgccctccagagtcgtgtattgagtgcgcactgagcgccac

SEQ ID NO: 30942 - DNA, 120 bp, synthetic construct
  source 1..120: mol_type = other DNA
aggctgctgtgggtttagccactgggattgtcctgtaaaccacaggatcctgagtctagctatttgtatgacataaatttgcttacatcttttaccgtaaacacgagttctgaaagcaag

SEQ ID NO: 30943 - DNA, 120 bp, synthetic construct
  source 1..120: mol_type = other DNA
cttagtccagcccaggcagctgcaggaattctctcagagttgtcttggggctggagcttccagggggactcgagtttgacagagctgggagtagagctcagcgttttgggaagagcagtg

SEQ ID NO: 30944 - DNA, 120 bp, synthetic construct
  source 1..120: mol_type = other DNA
ctccgtggctgaggtggagctctgagggtgaagacgaggtgggcggccctggtgcctcgggcagagctctgagggtgaagaccgaggtgggccgcctcggtggctgaggcggagctgtga

SEQ ID NO: 30945 - DNA, 120 bp, synthetic construct
  source 1..120: mol_type = other DNA
agactttgggttggaatcaagagtaaagaatggtttttactaatcagagaagatactttatgggtaaagactgcaatatacaaacctggagaccagccctactcatctgggtggccagtg

SEQ ID NO: 30946 - DNA, 120 bp, synthetic construct
  source 1..120: mol_type = other DNA
tgcagtcgctgattcagtgaccaggaggagggagaagggtggcattcgggttgggagaagctgctgctgtcacaggactgggtgcagtcgctgatttggtggccaggaggagggagaagg

SEQ ID NO: 30947 - DNA, 120 bp, synthetic construct
  source 1..120: mol_type = other DNA
aaacgattagttcaagaaggaaatgttacttcccagcaaatggctcaaacacatgttgccctcatcccattccatgagaagttggaagtaaaattaaagttcaagtgggccaggcgtagt

SEQ ID NO: 30948 - DNA, 120 bp, synthetic construct
  source 1..120: mol_type = other DNA
gaggaaaaatatcaggcacataacaactgaggaaggagctgaaacctggaagaaaaagaccaaagtatcatgggaaaaaaagggaaatcaacagaattcactgaatgtcgcaacagccgc

SEQ ID NO: 30949 - DNA, 120 bp, synthetic construct
  source 1..120: mol_type = other DNA
tccctcccgccacctgctctcttctgaatactttcacagaatcgtttaaatacaacaaaatccatgggccagtcacacgcagaagcacatattggaatcctattctattctctcttaaat

SEQ ID NO: 30950 - DNA, 120 bp, synthetic construct
  source 1..120: mol_type = other DNA
ctcctctcacctcctgcccacagcccactcatccctgaattaagggatcctcaaacaaccaccccacacacctccctttatgagcatgggaaatgcctcttcaagaccaagaagggttca

SEQ ID NO: 30951 - DNA, 120 bp, synthetic construct
  source 1..120: mol_type = other DNA
tgtctagtgtaagacagtcaatagatgaccatcttccatggacgtaagtgctgtctagtgtaagacagtcaatagatgaccatcttccatggacgtaaggtctgtctagtgtaggacaat

SEQ ID NO: 30952 - DNA, 120 bp, synthetic construct
  source 1..120: mol_type = other DNA
ttcaaagagtgtgaaggctttttcatggcttgggagctcatttcattttagcactgaataatattccactgcctgatgtaacggtttactcacctcctgaaggacatcttccaagtttgg

SEQ ID NO: 30953 - DNA, 120 bp, synthetic construct
  source 1..120: mol_type = other DNA
gatatggggcatctggtttgcacacttgttttaatttggaatactcgggggcagctgatatggggcgtctctggtttgcacacttgttttaatttggaatactcgggcggcaggtgatat

SEQ ID NO: 30954 - DNA, 120 bp, synthetic construct
  source 1..120: mol_type = other DNA
cgcgcctcgttactgggggactgtgtggtgttggggtgtccgcgcctcgttactgggggactgtgtggtgttggggtgtctgcacctcgttactgggggactgtgtggtgttggggtgtc

SEQ ID NO: 30955 - DNA, 120 bp, synthetic construct
  source 1..120: mol_type = other DNA
ctgtgtggtgttggggtgtctgcacctcgttactgggggactgtgtggtgttggggtgtctgcgcctcgttactgggggactgtgtggtgttgggtgtcggcgcctcgttactgggggac

SEQ ID NO: 30956 - DNA, 120 bp, synthetic construct
  source 1..120: mol_type = other DNA
ttcagccagaagacctgccttcaccaccagccacgcagatccctgctggtagtgctgtcgatcggctcacaggcaatatggacactggaaagatggcaggttccttttctgatgatataa

SEQ ID NO: 30957 - DNA, 120 bp, synthetic construct
  source 1..120: mol_type = other DNA
tacgaggctccagtactaacaatgttcaaaggacactctcagaactttacactggcaaaactcacaccatcacccaatgtagttgaaactcttcaaaaaaccagcggaaggatgtgagcc

SEQ ID NO: 30958 - DNA, 120 bp, synthetic construct
  source 1..120: mol_type = other DNA
ctgcccgtggcccccatgccactgtccactcagcagacacaaatccgtctctgcctatggcccccatgccactgtccactcagcagacacaaatccatctctgcctgcggcccccatgcc

SEQ ID NO: 30959 - DNA, 120 bp, synthetic construct
  source 1..120: mol_type = other DNA
tttgtcttagttttaaaattgatttctgagttgaccattcccacctaagctttgagaaggctcagttggatttcacatgttcaccacagtgtaggtgcagacgctgtaatgcccaagagg

SEQ ID NO: 30960 - DNA, 120 bp, synthetic construct
  source 1..120: mol_type = other DNA
ggtgtctgatgagatggagaggagagaggggtgaactgtggggtgtctgatgagatggagaggagaaaggggtgaactggagggttgtcttctgggatggagaggagagaggagtgaact

SEQ ID NO: 30961 - DNA, 120 bp, synthetic construct
  source 1..120: mol_type = other DNA
tgtgggttgtctgatgagatggagaggagagaggggtgaactgtgggggcatctgctggaatagagacgagagaggtgaactgtggggcgtctgatgagatggagaggagagaagggtga

SEQ ID NO: 30962 - DNA, 120 bp, synthetic construct
  source 1..120: mol_type = other DNA
ctgagagaaaagtcctttagacccctgactgccatccgtgggtttcacagcttggggagcatattcttgcttaagttatatttagtcatcaataataacagctcgtttattcgggaagta

SEQ ID NO: 30963 - DNA, 120 bp, synthetic construct
  source 1..120: mol_type = other DNA
aatacaaaaaatcatcacagacgacagagtttcttcctctttaggagtgactagtattccacaccgtatctgctgcattttcatccactcaccctttgatgacagaggttgactctgtga

SEQ ID NO: 30964 - DNA, 120 bp, synthetic construct
  source 1..120: mol_type = other DNA
gatcacatcacagactgaagaacctgagaaaatctcaaagacagatcaacaccagaaacaaaaccccatacacatctacacaccacagtcgaactaccagaagtgaaggatacagacaaa

SEQ ID NO: 30965 - DNA, 120 bp, synthetic construct
  source 1..120: mol_type = other DNA
cacatatacacacaccacagtcaaactaccagaagtgaaggatacagaaaaaaccccacacacatatacacaccacagtcaaactaccagaagtgaaggatacagacaaaactccacaca

SEQ ID NO: 30966 - DNA, 120 bp, synthetic construct
  source 1..120: mol_type = other DNA
aggaggacagataataagcagtaaacatgacaggtgatcagtaataaaaagtgaagtgtgtagcaccctaaaggtgtcgagtgccgcgagggaaaattcaacagaatgagggggtctgta

SEQ ID NO: 30967 - DNA, 120 bp, synthetic construct
  source 1..120: mol_type = other DNA
actgcgcacccagctccatgaggacaagggcgatgccttcataaatgatgcccagaaagtatttgatagatgagtaactcattttctaaattaacatattttgggagagtagtttaacag

SEQ ID NO: 30968 - DNA, 120 bp, synthetic construct
  source 1..120: mol_type = other DNA
tcataaatatgaatctcagaatatttgcatatggcaaagttactcatcaagacacagacattcagttggaaatgtgatgctagcctctgggtgtggattggacggtcgttcccatctctg

SEQ ID NO: 30969 - DNA, 120 bp, synthetic construct
  source 1..120: mol_type = other DNA
aagcgatgtgcctgtgggacacagcctggaccccgctgcgaactacaactccccgaaattccgctcccggaaccagagctacatgagggccgtcagcaccctgagccaggccagctgcgt

SEQ ID NO: 30970 - DNA, 120 bp, synthetic construct
  source 1..120: mol_type = other DNA
gattaagagcctgagccgacctcacattctctctgacttactgtggagtagggattaagatcttgagccgacctcacattctctctgacttactgtggagcagggattaagagcctgagc

SEQ ID NO: 30971 - DNA, 120 bp, synthetic construct
  source 1..120: mol_type = other DNA
ccaggtaatgagatttcaagatgaagctgtcattgaacaagtgaacttgtctagacgaattaatcataatacgaatgaaactagagccacgggttcctgactcatagtccagggctcttg

SEQ ID NO: 30972 - DNA, 120 bp, synthetic construct
  source 1..120: mol_type = other DNA
cctgtgtcaccctcgaccccgctggtcctcacctgtgtcaccctcgaccctgccggcccccacctgtgtcaccctcgaccccgccggccctcacctgtgtcaccctcgaacccgccggcc

SEQ ID NO: 30973 - DNA, 120 bp, synthetic construct
  source 1..120: mol_type = other DNA
cctgaaattctcgcacctccatgcctctacggctgctgctcgtcggcccgcagtttcttccttgagtttctgcctgagtcctagctgtgctttaagccccagctcaggaatcatttcttc

SEQ ID NO: 30974 - DNA, 120 bp, synthetic construct
  source 1..120: mol_type = other DNA
taccagctcatgctttacaagaaaatgccttggcattatgccaaagagaagtcgatggtaagtaaaagattaagttagttaactgtgtgatgatgtgctcaaaggtctcactcctgggtg

SEQ ID NO: 30975 - DNA, 120 bp, synthetic construct
  source 1..120: mol_type = other DNA
aatatggtaagtgaatcctcagtgaacccctgttccctgtaaccaagctaatgggcatcattccacagattctcattgttttcttccttgtcaaagagttcccatcggtatgcggaatat

SEQ ID NO: 30976 - DNA, 120 bp, synthetic construct
  source 1..120: mol_type = other DNA
cactgtgtctttgcaactggatgccccaccagagcatcttagaagaggagaaacaagggaaatttctattacgtctaatgtcacaaatgaagaaaatgatctaaggtgcctggaaataaa

SEQ ID NO: 30977 - DNA, 120 bp, synthetic construct
  source 1..120: mol_type = other DNA
tgcatgagtttgctgggggaaagggaatggcatggcacaaccattgactttttttttttattataaacaccttatcatctctgaatgttcagtggattcagatgcaaccacctccccaac

SEQ ID NO: 30978 - DNA, 120 bp, synthetic construct
  source 1..120: mol_type = other DNA
gcccagccctacagaaagaggggatgttcttaggttggcgaagacttctggaagccaggtaggaaccacccctacagcctctgagcagcctcccctgctgcttgtcacctggcctggcct

SEQ ID NO: 30979 - DNA, 120 bp, synthetic construct
  source 1..120: mol_type = other DNA
tttccttcatgctggggaggagatgttgtgtgcatgtgagaaagcatttgatagcatgccaaaagtttcctccattatgtgcgtgtcaagtgtttgaccaggtcagaactcttgttctat

SEQ ID NO: 30980 - DNA, 120 bp, synthetic construct
  source 1..120: mol_type = other DNA
ctggaagtcacaggacaggaatgacagatcagggaactgcaggaagctgccacctctggggtcagaatatgcccagcctgcgggggctctctatcggggtcttcgagagccagacagcct

SEQ ID NO: 30981 - DNA, 120 bp, synthetic construct
  source 1..120: mol_type = other DNA
cacttggatgtggtcgttattatgttgtggaagagcagtgccttcctcttaaagtgccttcctcccttaaaaccgtggcatgcacacttaacggttttaaggaattacattttgataaac

SEQ ID NO: 30982 - DNA, 120 bp, synthetic construct
  source 1..120: mol_type = other DNA
atagagggacagtgtgacggccatggagggacagtgtgacatccatggagggacagtggcagccgtggagggacagtgtgtgatggctgtggagagacagtgtgacatctgtggagggac

SEQ ID NO: 30983 - DNA, 120 bp, synthetic construct
  source 1..120: mol_type = other DNA
agacaggcagaggcagagacagagacagagggagagagagacagagacaggcagagacagagacagagacagaggcagaggcagagacagagagaggcagaggcagagacagagagagac

SEQ ID NO: 30984 - DNA, 120 bp, synthetic construct
  source 1..120: mol_type = other DNA
agaggcagaggcagagacagaggtagagacagaagcagagacagaggcagagacagaagcagagggagacagagacagaggcagagacagaggcagagagagacagaggcagagacagag

SEQ ID NO: 30985 - DNA, 120 bp, synthetic construct
  source 1..120: mol_type = other DNA
acatccagcttggaagctgtctggcgtggatgccgtccagtgtggttgctgtctggcatggaagctgtctggtgtggggactgtccagcgtggaaggtgtctggagtggaaggtgtttga

SEQ ID NO: 30986 - DNA, 120 bp, synthetic construct
  source 1..120: mol_type = other DNA
gtgtggaagctgtctggtgtggggactgtccggtgtggaatctgtccggtgtggggactgtcctgtgtggaagctgtctggtgtggggactgtccggtgtgcaagctgtccgatatgggg

SEQ ID NO: 30987 - DNA, 120 bp, synthetic construct
  source 1..120: mol_type = other DNA
gctcttttctcagcagtcgtgttaacagatgagacaatcgcagctgctgctcgtggggagccccagtgcgtgttgagctactcgtgtgccatgttggtgaaatgacctgaaacctaggaa

SEQ ID NO: 30988 - DNA, 120 bp, synthetic construct
  source 1..120: mol_type = other DNA
acaagcacgccctctctatccatatgctccaataagggagggcctgctgatgaaagatttatcttcattgtcacctcacctgagttaaattgttgccaaaaagactatgccagggttgcc

SEQ ID NO: 30989 - DNA, 120 bp, synthetic construct
  source 1..120: mol_type = other DNA
tttgtacccttttgctcattaagaaaagagcacttaaaactaacttcaaattagaatagccaaaatccagaacacagatggtaaatgctgagaagggtgtggggcggctgcggggacaca

SEQ ID NO: 30990 - DNA, 120 bp, synthetic construct
  source 1..120: mol_type = other DNA
cggccacgtggacacagagggcaaatgctgaggagggcgtggggcggccacatgggcatggatggcaaatgctaaggagggcgtggggcagtcgcgtggacacagacggcaaatgctgag

SEQ ID NO: 30991 - DNA, 120 bp, synthetic construct
  source 1..120: mol_type = other DNA
tgaggcttaaatggctgctgctgtcggtcagcattaggggtgtcgtgtcaagctgccggtgacccacaagggctggcccctgaatgcagcagagcctgcagttttcctgggaagtgcagc

SEQ ID NO: 30992 - DNA, 120 bp, synthetic construct
  source 1..120: mol_type = other DNA
gtgcagaagtatccagtaaaccacccacagcacggcagcagaaaaacgaggaaattatatgtgtgtatgtttataagaactcagaagcaatggtgagcaaaaagcaaaagcaagaggaga

SEQ ID NO: 30993 - DNA, 120 bp, synthetic construct
  source 1..120: mol_type = other DNA
ggattgattgattagactcttgccaactgctgtgcggaatacagaaaatgcagctccagctctcaaagggctgaaaatctaattgaggtgaaaaaggtaacatgtgtgaaaaccatgtct

SEQ ID NO: 30994 - DNA, 120 bp, synthetic construct
  source 1..120: mol_type = other DNA
gatgactcttggctcttgggcatgtgggtgagctctcaggatgatgcccagccccaaatttcaggcaattgtgcaaggacttgacccattcatccgctgagctgagttgctgagactgct

SEQ ID NO: 30995 - DNA, 120 bp, synthetic construct
  source 1..120: mol_type = other DNA
agctttgttaggaggcactgagtagggtgagggttgttaggagacagtgagtgggatgagggtttatgaggagacactaggtagggtgaatgttttgaggagacacttagtggggtgagg

SEQ ID NO: 30996 - DNA, 120 bp, synthetic construct
  source 1..120: mol_type = other DNA
ggggtgaggtttattaggagacactgaatggggtgagggttgtgaggagacattgagtgggatgagaggtgtgaggagacactgaatgtggtgagggtttgtgaggagatactgcatggg

SEQ ID NO: 30997 - DNA, 120 bp, synthetic construct
  source 1..120: mol_type = other DNA
ttgtgagcagatactgagtggggtgagagttgtgaggatacactgagttgggtgaggagtctgtgaggagacactgaattgggtgagggttgtgagaagacactgaatgggttgaggttg

SEQ ID NO: 30998 - DNA, 120 bp, synthetic construct
  source 1..120: mol_type = other DNA
gctattctgtgggtgataaactgttctgtcgagtgatggagctgttctatgggtgatgagctgttctgtggatgatggagctgttctgtgggtgataaactgttctgtcaagtgacagag

SEQ ID NO: 30999 - DNA, 120 bp, synthetic construct
  source 1..120: mol_type = other DNA
ctttgtacatgcattatttcatttttaacttttgatacaacctttgcggctagtggtaggatggtctcgatcttaccctgaaggaagctgagattcagggtgaatgagtggtttgtctgg

SEQ ID NO: 31000 - DNA, 120 bp, synthetic construct
  source 1..120: mol_type = other DNA
ctgcagtctgagtggctgcatcctgtcttgcaggctcgtggagcatagcagtgtgtagtgtgatttaacatcctaggattctttaaacaattcatattatctgtggtttttcagtgtatt

SEQ ID NO: 31001 - DNA, 120 bp, synthetic construct
  source 1..120: mol_type = other DNA
cctctctgctcacaaccctaggaaatgatgatgctgagttttacgtcaattattcctttggtcctcctctgtagttgtaccaatttgtatcttaaagggtacttttcacctttccggctt

SEQ ID NO: 31002 - DNA, 120 bp, synthetic construct
  source 1..120: mol_type = other DNA
ctctcactgtttctctggatgggtagctaggtgcttcctgaaaggacgtgcactcactgtgtttctttggatggtagctaggtgctacccatttgcattacacatcaagcctctgtatat

SEQ ID NO: 31003 - DNA, 120 bp, synthetic construct
  source 1..120: mol_type = other DNA
cctcttaaacttgtgaccagcaggggtgaatccctgctaatttgtgagggccagctcactagggaacagataacgatgtctcaggtggttttttttttttttttttttttttttgaggcc

SEQ ID NO: 31004 - DNA, 120 bp, synthetic construct
  source 1..120: mol_type = other DNA
ggcgccctgtccgggtagatgctgcggggccttggcgccctgtccgggtagatgctgccgggccttggcgccctgtccgggtagatgctgtggggccttggtgccctcttcttgtcctgc

SEQ ID NO: 31005 - DNA, 120 bp, synthetic construct
  source 1..120: mol_type = other DNA
agtcgactttgtgacatttaattcttccgcagtggcttgtctccgctccggctgctggaacaacacgccatggccggggcagtttacgaacagcaaacacttatcctctctgttctggag

SEQ ID NO: 31006 - DNA, 120 bp, synthetic construct
  source 1..120: mol_type = other DNA
gcacacaccaggaggcttttggacggaaatgtcctttaaatgtgggtgtcaatgtggcttttgtctctaccactgggtcagctccagacagcgaaacaaactgagggactgtagaggact

SEQ ID NO: 31007 - DNA, 120 bp, synthetic construct
  source 1..120: mol_type = other DNA
tcttgcagtctcctgggcatctggctttttgagtcagcctggtattctgtctcatgcatgataaaccctccccatttttcggatgattaaaacatggatatttgaatgactgaaaaatgg

SEQ ID NO: 31008 - DNA, 120 bp, synthetic construct
  source 1..120: mol_type = other DNA
cccacggtgagaaggtgtaacttgctttataaatgtcacttatctgtgatgaaatttgccttctgtaaaggccattgagaagagcactggggaagggaaatcatgtaatggaatgaacct

SEQ ID NO: 31009 - DNA, 120 bp, synthetic construct
  source 1..120: mol_type = other DNA
ttcgggtgagattcctttcctatgaacaggcttatatctgtattggaagcaaaactaactggctgatctttattggtgccttatcctctggttccaaggaagcatctttggggtttgttt

SEQ ID NO: 31010 - DNA, 120 bp, synthetic construct
  source 1..120: mol_type = other DNA
gtggccccctactgtcgtgatctctgcgtggccccccactgttgtgatctctttgtggccccccactgtcgtgatctctgcgtggccccccactgttgtgatctctgcgtggccccactg

SEQ ID NO: 31011 - DNA, 120 bp, synthetic construct
  source 1..120: mol_type = other DNA
tgagtagctggggccacaggttcatgtcaccatgccctgctaacattttctctctgttttcaaaagttctcaagtaccagaccttgatttctttgtctctaacctatcaggaattaagtg

SEQ ID NO: 31012 - DNA, 120 bp, synthetic construct
  source 1..120: mol_type = other DNA
gggaatatggctctgcagtgtgttgacttcacccagttcccaagctctttttcaagttgtgattccttgaagggtgaactcctgtctccgagtagaggaaacagagtcccacctgactgg

SEQ ID NO: 31013 - DNA, 120 bp, synthetic construct
  source 1..120: mol_type = other DNA
tatggttgtgagaataaacgacgtttcctttggaaggaggaaaatgccaggaatggtaaatgcatcacgtcttcactgaaaaggtaggtagagagcaaaaggaaaatggggctttaggta

SEQ ID NO: 31014 - DNA, 120 bp, synthetic construct
  source 1..120: mol_type = other DNA
tgcagtaccctgggtgggacccaggaatttgaacgtctttcctgagttacaaagagtttccgtaccataagctttgaaaatcactagcttttcagtctactctattctgtgtctgatgaa

SEQ ID NO: 31015 - DNA, 120 bp, synthetic construct
  source 1..120: mol_type = other DNA
attttcatagcaaagaaatagagtatgtcgcaagcaaaatgtcaggaagaaggctcgagagggaggaaaggcctaatttcttgattggtcaaggtttccctgcaaactacatttgtgcca

SEQ ID NO: 31016 - DNA, 120 bp, synthetic construct
  source 1..120: mol_type = other DNA
aatgaattgcttacgtttgcctttttttcatttcattaaaagtgtgtccacgctcacagtccgcagtgcttcctctgaactctgggagcaagtctttgcacaaaaaagacacttggctga

SEQ ID NO: 31017 - DNA, 120 bp, synthetic construct
  source 1..120: mol_type = other DNA
caagagtaggtcttttcaaatacattctagctaaaaaaaaaaaaaaaagctaaatgaacatgcagacctccatgaagaataaacagctggcaagagaatgtgtgagcagggaggggctct

SEQ ID NO: 31018 - DNA, 120 bp, synthetic construct
  source 1..120: mol_type = other DNA
tgttgttgtcatttctccttgggtcagtacacacaactgctcaacatatctgtgagtggatgggagaaggtttctagcataatccacaacacaccatatgcaatttgccaaagaaaagca

SEQ ID NO: 31019 - DNA, 120 bp, synthetic construct
  source 1..120: mol_type = other DNA
tttaaaacatgctcttgagtgaagtctgctgatcacatttctgactctgtgacccaagttgacctaacacatagtctctgtccacctggcctcagtggctggacttagacacaagctggc

SEQ ID NO: 31020 - DNA, 120 bp, synthetic construct
  source 1..120: mol_type = other DNA
cccagactgccctccaatcagtcatcacgccttaactggcgtgcattctaaatattttcccaaattatttcacttaattcatattattttcacaacaatcaccccagtgcaggcagcctt

SEQ ID NO: 31021 - DNA, 120 bp, synthetic construct
  source 1..120: mol_type = other DNA
gggggtatgtctgtgtgtgtgtgtatatgtgtgtgtggggggttatgtctgtgtgaatgtgtgggtatgtcttaattttcccccagttatcttatttactttggcttcacttttgctgag

SEQ ID NO: 31022 - DNA, 120 bp, synthetic construct
  source 1..120: mol_type = other DNA
tatagcatttcagtactaagagttttcaaaaacaacgttgtgtttacagaagaaacacatgacctgggatatgacagatgaagcagcaggtaagtagcagagccaagaggcccacatcca

SEQ ID NO: 31023 - DNA, 120 bp, synthetic construct
  source 1..120: mol_type = other DNA
ttccttccccccacctttcatcattgttaaaataggcccacaccccaccccagagacccagtagagtgagtttccttcaccccacttttcgtcactgttaaaataggcccacatctaacc

SEQ ID NO: 31024 - DNA, 120 bp, synthetic construct
  source 1..120: mol_type = other DNA
acaaaagcctcaaaaaaatgacttcaacctttgagccacacaattcagaaaggccttctggagtgaatgctgtttacagtagctcacattgccttgtagcaccgctgcaaatataagtca

SEQ ID NO: 31025 - DNA, 120 bp, synthetic construct
  source 1..120: mol_type = other DNA
ttttagtaacctaactacttcctttccttttctttatttccataggttttggggggaacccaagcagtatatgctgcgttcattttgtagtcttctattcctcatccccttcacaccctt

SEQ ID NO: 31026 - DNA, 120 bp, synthetic construct
  source 1..120: mol_type = other DNA
ctaaccactttctaatcaagctgtcagttttggcaatgtttgtagaagtgactcagaactgaatttccagatggtttgaaggtctgctgtgagggatatagaaacgttcagaggttgatc

SEQ ID NO: 31027 - DNA, 120 bp, synthetic construct
  source 1..120: mol_type = other DNA
cactcctgcaatgatgaatagtgtctcaatagtaccccatgtccactcctccaatgatgaacggtgcctcaatggtaccccatgtcgactcctccaacgatgaacggtgtctcaatggta

SEQ ID NO: 31028 - DNA, 120 bp, synthetic construct
  source 1..120: mol_type = other DNA
gtttggcatctctgtctggttccaatttccctcactctcgcttcactggaattaaactgcccctaaagctgatttctatggaatcccaaataaagtagggaactactttcaatgcaagcc

SEQ ID NO: 31029 - DNA, 120 bp, synthetic construct
  source 1..120: mol_type = other DNA
gtgtgccccacagatgcctggaaaggtggaattttagaaggtctgtgaggtcaaaatcattttacaatactctaaggtgttatgtgccttcttcactgagttgccttttccattgacagt

SEQ ID NO: 31030 - DNA, 120 bp, synthetic construct
  source 1..120: mol_type = other DNA
tactgtctgtgggatcttgtatacattctttgcctatgtttttccatgaccttatctgtgaagcgggatggtaactgtgtccaccttacaggattattgacaggactgaaagtattagcg

SEQ ID NO: 31031 - DNA, 120 bp, synthetic construct
  source 1..120: mol_type = other DNA
tgtgttggcgtcgtgtgtgtgtgtgttgtgtttgttatggtgtgtgtgttgtgtgtgttagggtatattatgtgctgtatgtgtgtttcgtgtatgttgaatatagatgtgtgttggcgt

SEQ ID NO: 31032 - DNA, 120 bp, synthetic construct
  source 1..120: mol_type = other DNA
gcctctgggtcactcccagtatgcaggaaggacatttaccctgggctcaaccatgagaattcagggagtccatgaaattaaataggaaaagaaatgcatttttatttacactgccttcta

SEQ ID NO: 31033 - DNA, 120 bp, synthetic construct
  source 1..120: mol_type = other DNA
tgaaatggatctaaagaggagcttctagtgcgagcatctgagtctgccattatgctaccaatccaggcggttgatattagggtgattttgtgtgagtgctctaaactgtaaatgaacacc

SEQ ID NO: 31034 - DNA, 120 bp, synthetic construct
  source 1..120: mol_type = other DNA
aatctcactgcttgactgtaaacctagcaaaactcctccgatatctcacagttgcaacttccaggtcaagactgtactctgaaacaaaataacacatctctaaagtgacaaccaacttgt

SEQ ID NO: 31035 - DNA, 120 bp, synthetic construct
  source 1..120: mol_type = other DNA
gatatctatcatgtacagctatagatatctatcatgtacagctatagatacctatcatgtacagctatagatacctatcatgtacagatatagatacctatcatgtacagatatagatat

SEQ ID NO: 31036 - DNA, 120 bp, synthetic construct
  source 1..120: mol_type = other DNA
tccacctatatatctatatgtatacattggaaggttagaaaagatgagaatgggtaggaaacaattctatatgtcaccttgttataggtggttgcaattatacaaaatattctgatcatc

SEQ ID NO: 31037 - DNA, 120 bp, synthetic construct
  source 1..120: mol_type = other DNA
ttgcttccttatctgacagttaagtctgccagctgaacgtttgacattctgtgcattgttttataataagctgtacaaaactttactcactgctaaatccaattttcatatctatgaaat

SEQ ID NO: 31038 - DNA, 120 bp, synthetic construct
  source 1..120: mol_type = other DNA
gagttctttgagtctttttagtaaattatcaaacctgatggtggtttagggatccacagaacgtgtagttggtgtcaaaagtcttgggcagattagaaatttggacggctccattctcgg

SEQ ID NO: 31039 - DNA, 120 bp, synthetic construct
  source 1..120: mol_type = other DNA
aaaaaataagttaaataaaaaagaaggcacttatgaaaaaagaaggagaccttgtgcccctgtgagcaatgctcctccgaaggaccatcttccctagtgtagaaggtggcagtgtgcagt

SEQ ID NO: 31040 - DNA, 120 bp, synthetic construct
  source 1..120: mol_type = other DNA
caggcccagatggtttcactggtgagttctgccgagcatttaaaaacaactacaacaaaacccagtattttaagaaatcttttgaaaatagaggaagggcaaagattgcctaagtagttc

SEQ ID NO: 31041 - DNA, 120 bp, synthetic construct
  source 1..120: mol_type = other DNA
cacaatcactatgcctgctaaggtaagtgacttttcttggctgtttcttcattttccagagatagatttaaagtgtccaagttaagtgtcagtactcaagagagagagaggagagagggg

SEQ ID NO: 31042 - DNA, 120 bp, synthetic construct
  source 1..120: mol_type = other DNA
taatacactgcctgttactaaaatcataaccaaatattgaacctaaatcaaagcacccgacaaaaacgtgcaagggatttaatatgtttaaattttactcgaaaacatttatattctaat

SEQ ID NO: 31043 - DNA, 120 bp, synthetic construct
  source 1..120: mol_type = other DNA
ggcctgctgagcaaagtctagagtgaatttaaagaacctaggggctaattaaacacaggacatgaagctgaagaagagccaatgatctgttccaggtttctaatcagagtcttagaaaac

SEQ ID NO: 31044 - DNA, 120 bp, synthetic construct
  source 1..120: mol_type = other DNA
ggtggggtttacttacattatgaacactctctcattcacgaactatatcagaaccagaagacacagagagggatgggggttttccttctttatttcagtcagtacttgggcaatttgaag

SEQ ID NO: 31045 - DNA, 120 bp, synthetic construct
  source 1..120: mol_type = other DNA
ttcaaacaacctgtcttcatttttgtctttcacttgagttaacaccaaatgaaaccattgccctacagacggggcctgataaactgactctcacagagagaggaagggcttctatggatt

SEQ ID NO: 31046 - DNA, 120 bp, synthetic construct
  source 1..120: mol_type = other DNA
cacgcaaacataggcacatagagcttttatccccctagctacaaataacagtaatttgcgacgattctaccaggttgcatcttaaacatgtatatctccttctcatttttacttccagga

SEQ ID NO: 31047 - DNA, 120 bp, synthetic construct
  source 1..120: mol_type = other DNA
taataagtataacgtcacctgccctacacacccccagaaggttggaaggaaggtgtaactacatgttaaagtgttttgccagatgtaaagtcctgtataagtgtaagatgcgagctttct

SEQ ID NO: 31048 - DNA, 120 bp, synthetic construct
  source 1..120: mol_type = other DNA
gagaaatcctgcacccccattcaatcactttgaaaagaaatcctgcacccccattcagtcactccagaaaagaaatcctgcacccccattcagtcactccggaagagaaatcgtgcaccc

SEQ ID NO: 31049 - DNA, 120 bp, synthetic construct
  source 1..120: mol_type = other DNA
tgaagcagttgtgtgcactcattgttccagtacctcaattttctttcaaccccaaacctagtggcttgcctattattttacccaaactgccctcaaaaattcaaccagtggcatcctttt

SEQ ID NO: 31050 - DNA, 120 bp, synthetic construct
  source 1..120: mol_type = other DNA
aaaacaaaagtatatgtctgcagcaagatcatttttctcaggaatcaaggatttagttactggggacctgtcctcagaaattacaatggtgaggccaggcacagtggctcatgcctgtaa

SEQ ID NO: 31051 - DNA, 120 bp, synthetic construct
  source 1..120: mol_type = other DNA
tatgtgtgaacaggaaaaaatatacacatagggtttgatactgtgtgtgatttcaggcatttgctggacatcttggaatgtttcccctaaggataagggaggactgctgtaaccttgatt

SEQ ID NO: 31052 - DNA, 120 bp, synthetic construct
  source 1..120: mol_type = other DNA
attggcatgaccatcgacagtgcttatggtgtggtgaccgtgtgtgatccgcaaggccatggatagtgagtgcacacggtgcggtgaccatgtgtgatcagcaaggccatggatagtaca

SEQ ID NO: 31053 - DNA, 120 bp, synthetic construct
  source 1..120: mol_type = other DNA
ttattctgccaaaaagacacatgtactcgtatgttcatggcagcatcattcatgctaacaaagacatggagtcaacctagatggccatcagtgttggactggatgaagaaaatgtggtac

SEQ ID NO: 31054 - DNA, 120 bp, synthetic construct
  source 1..120: mol_type = other DNA
gtcatctggggagagaccccaagttaagatcaagagaaaaaagcgggaaacaaaatggtaaagacaacaaggtaactcatgcctagagtccttggatcaggcattttatgaagccagaag

SEQ ID NO: 31055 - DNA, 120 bp, synthetic construct
  source 1..120: mol_type = other DNA
gtacaagtaaaaattaaccaagaccttttaaaaatgtgaaggaagcacttattgaagactgttgaaatgggagtcagaacgttgcaacagggagagccgttggcctcaactttcctgaag

SEQ ID NO: 31056 - DNA, 120 bp, synthetic construct
  source 1..120: mol_type = other DNA
gtaaccccctactttatgttacagtcatccatgcactctggtacaacaataagcaaaacatgcagcttcccttctggagtaaggaggcaaatgttacgtttagtaagtgaagtgtacagg

SEQ ID NO: 31057 - DNA, 120 bp, synthetic construct
  source 1..120: mol_type = other DNA
agaggtttttgaggttatggggtgagtagtctcctgtaggaatcagggtggagaggacaatgattttatcaggctaaaggtgaaatcagctcagtgacacagagtggtttaagtaaaaaa

SEQ ID NO: 31058 - DNA, 120 bp, synthetic construct
  source 1..120: mol_type = other DNA
aaggtcttttgggatgaggtgtcctaatttccggggttactttctgttgggtccattaaataattgtggtggcaaggacagttgagaaatttggtgggaaggtgaggttaaagtagaact

SEQ ID NO: 31059 - DNA, 120 bp, synthetic construct
  source 1..120: mol_type = other DNA
tgtgaatgcaatgctccaactcttcaggctgcagtctgggtgtgtgctgcggcgtcatgagcccatttggattgaagcctgtgcatccagagaactacctcctcatccttaaaacacgat

SEQ ID NO: 31060 - DNA, 120 bp, synthetic construct
  source 1..120: mol_type = other DNA
gattgagagttaaaaaagtgacggcccttggaaggaccttggtgccttgggtgtccatagcacatccagagacattaataaccatgactttaggaggccaccgtgctgcttgaggaggct

SEQ ID NO: 31061 - DNA, 120 bp, synthetic construct
  source 1..120: mol_type = other DNA
agcccagagccccagcagggtctcagtctgtactgaggtcacacctaggcattgtcgccatccttcggcaggtgattctcaaactccaaactcaaattagaacagagagattcttccctg

SEQ ID NO: 31062 - DNA, 120 bp, synthetic construct
  source 1..120: mol_type = other DNA
gttttaaaatatggccctaaatccctgactcttttcacataaaaatggaggtgaaaatggctcctgttgaatctagattgggcgacatcttgaccagttgaacacacctgacttagcacc

SEQ ID NO: 31063 - DNA, 120 bp, synthetic construct
  source 1..120: mol_type = other DNA
attgcaaatgtgtgaatgacgacctgatcgtgctgttttaattccctaagttttgtggtgtcttttcacacagccctagatgaacagagggcattttcacagtattgctgaggaattgga

SEQ ID NO: 31064 - DNA, 120 bp, synthetic construct
  source 1..120: mol_type = other DNA
cgcttatacactgttgaggggaatgttaatgagttcagccatagtggaaagcagtttagagatttcgcaaataacttaaaatagaaccagcattcaaccaaggaatctcactactgggta

SEQ ID NO: 31065 - DNA, 120 bp, synthetic construct
  source 1..120: mol_type = other DNA
gtgtgtgtaaatctcagcttctctaaaatattgatgaaataggagagaactttctcaattgaatcccaaagtgtcacaaagagcccattgtggtgggggcatggaattgtggactctttg

SEQ ID NO: 31066 - DNA, 120 bp, synthetic construct
  source 1..120: mol_type = other DNA
aacaaaaattacccagataagagaagctgaggcaaaatggtgcagtgcataagaataggaaatgagagcggatggcaggtgtcctgggtgcagcctggagaagagactcctggatgattc

SEQ ID NO: 31067 - DNA, 120 bp, synthetic construct
  source 1..120: mol_type = other DNA
gaggctccgtcctcatctgcccctttcccttgagttgatggatgcctctcagcacatcagcatgaattctactccgtccttctctctggcaacatccattcctctgaattcagtggaggt

SEQ ID NO: 31068 - DNA, 120 bp, synthetic construct
  source 1..120: mol_type = other DNA
ttcttggtgggcttccatatccatgcagtgtctcagtgggtacctgggcccctgggctgcctcagccccctgcagcaacaagaacgctaccatgttcctggtgaaatgctttccctccct

SEQ ID NO: 31069 - DNA, 120 bp, synthetic construct
  source 1..120: mol_type = other DNA
atgaggaaaggaaattgagcagaaggtacaggagtaatagcaattccctgtagctctcaaagcaaattttgagctcatttttctttttctgcaagctcagcagcagaatgcccagagtct

SEQ ID NO: 31070 - DNA, 120 bp, synthetic construct
  source 1..120: mol_type = other DNA
agggagagcaggagcagctgtgtggggagggaggagccagcctggatttatagctctactgggagaaggctcggagacaagaaaccttcctcaatctcagtgagaggaggtgtgcatttt

SEQ ID NO: 31071 - DNA, 120 bp, synthetic construct
  source 1..120: mol_type = other DNA
acagaccaaggacctaaataggtttctctcaaaagaatgttccaaagacctgtgatagtctctactggacatgtcaaccaggacatgtgtgtttagaaggaaactgcttgagtttctcta

SEQ ID NO: 31072 - DNA, 120 bp, synthetic construct
  source 1..120: mol_type = other DNA
ctacctgggcttctgttgctatgtggaacagacatttttgggttctcctgagtactggatgtacacgcggcatgtggttccccagaggtgactatcacctgtttgcttggccaatgaaca

SEQ ID NO: 31073 - DNA, 120 bp, synthetic construct
  source 1..120: mol_type = other DNA
gtttggtgatggcacttccatatggtctttgcctgacgtagttggtgtctctagtttgaaggcttcttctcctcgttactgcctctgactgcaccctcggtgggttctggagcaataatc

SEQ ID NO: 31074 - DNA, 120 bp, synthetic construct
  source 1..120: mol_type = other DNA
gtatcctgctgtggccccagtggatgtgaagggcttctgggtgatggcatttgtgggcctcagcagaatggacaagtggggtatagctgtctccaaagacacgatgtcccagtacatgga

SEQ ID NO: 31075 - DNA, 120 bp, synthetic construct
  source 1..120: mol_type = other DNA
cccagcagacacagtgtgtgtggaccttgggcggggccctggggttatggttttgacccggtaggaaagggtagtcatggaacacagcatgcgtgttaccatggggcgcagcgggggcta

SEQ ID NO: 31076 - DNA, 120 bp, synthetic construct
  source 1..120: mol_type = other DNA
ctccagaacactgagaaatgtatttttgttgtttataagtcacttggtgtatgattttctttcccccagcatcccacatatactaagagtgctggtgcctttgaagcccagctacaatgc

SEQ ID NO: 31077 - DNA, 120 bp, synthetic construct
  source 1..120: mol_type = other DNA
cttggggagcgagcccaagttatcaagagaaaaatgggggtgataaaaggtaaagacaagaaggactcttatgctttgggtccttcaatcagggattttatgaagccagaattctttcat

SEQ ID NO: 31078 - DNA, 120 bp, synthetic construct
  source 1..120: mol_type = other DNA
aaaatgtacaatctgacattgttcaatgaaactccaattctttagcacagaggatggtttttttttcccggagaagtaatgattttgtgactgcatgaaatgtaagctgacaccgactgt

SEQ ID NO: 31079 - DNA, 120 bp, synthetic construct
  source 1..120: mol_type = other DNA
taccctcaggcttggctgcagtttttaaaagctcttctgtagagtaaaatgttctctttacaactaagtctacttgtttagatccagaaataactagtctgtctcttcatatcttaaact

SEQ ID NO: 31080 - DNA, 120 bp, synthetic construct
  source 1..120: mol_type = other DNA
cctaatttccggggttactttctgttgggtccattaaataattgtggtggcaaggacagttgagaaatttggtgggaaggtgaggttaaagtagaactccacagaggaacctctcatcta

SEQ ID NO: 31081 - DNA, 120 bp, synthetic construct
  source 1..120: mol_type = other DNA
tatgtgaatgcaaggctccaactcttcaggctgctgtctgggtgtgtgctgcggcattgttagcccatttggattgaagcctatgcatccagagaactacctcctcatccttaaaacacg

SEQ ID NO: 31082 - DNA, 120 bp, synthetic construct
  source 1..120: mol_type = other DNA
ctgctgggacgttgctctgtgtctccctcatggccatgctcccatccttgcctcctccatagactgcggtcaggactcggcagcccagagccccagaagggtctcagtctgcgctgaggt

SEQ ID NO: 31083 - DNA, 120 bp, synthetic construct
  source 1..120: mol_type = other DNA
ccttgagctgttttaaaatatgttccctaaattcttttattattttttatagaaagaaaggtttctgttctctcctgttaggtctaggatgggtaacattttgaccaacagactacatgg

SEQ ID NO: 31084 - DNA, 120 bp, synthetic construct
  source 1..120: mol_type = other DNA
aaaacagtaaatatttcatagaatggggctatgaatctgcattgcaaactaacactttcagttgattttatgcacagtaattattgagaatccccttatctagatccaacggatctggac

SEQ ID NO: 31085 - DNA, 120 bp, synthetic construct
  source 1..120: mol_type = other DNA
cattctgtctttttttttttttttatgagccaagctccaccaaataacaggataaactttgtgtaaggcttggtaagagtagagtgtctgacacattatggtgctataatactcaaagca

SEQ ID NO: 31086 - DNA, 120 bp, synthetic construct
  source 1..120: mol_type = other DNA
agccatggacgtgtaagaatgcggatcgtccttttacattgtcagggatggtcaaattctatgctttatgttgtttgctaaaagacactttccaaagttttcaacagaaaatatgatggc

SEQ ID NO: 31087 - DNA, 120 bp, synthetic construct
  source 1..120: mol_type = other DNA
taacaatttgtaaacaaatgcaaaaatatctttaactaaacaaaagaacagtttgttagccttgttatgattagcagagaggatagctgcagacactgtaaaatcactcagcaacaagat

SEQ ID NO: 31088 - DNA, 120 bp, synthetic construct
  source 1..120: mol_type = other DNA
atctgtaatgtaagtgactagacaagatagcctatgatgttcattgtaactctaacttttccttcccaaagcaaatagctggaaaagacactgtgcttacaatatgcaacaaataaaaac

SEQ ID NO: 31089 - DNA, 120 bp, synthetic construct
  source 1..120: mol_type = other DNA
atatcaccacctttatgtacttatgtgtccctggaagtttcccgtgggagatttagttattctcttttcgttaggctctactgaccaagaacaaatcacagactcagagagcatcataaa

SEQ ID NO: 31090 - DNA, 120 bp, synthetic construct
  source 1..120: mol_type = other DNA
ctcaaggtatattacaggtaaccacacagaaatgggtaacataactttcaatacaaaaatggctaaaatttactgggctaagcatgcattttgggggcttttggaaaaaaaaaacagcat

SEQ ID NO: 31091 - DNA, 120 bp, synthetic construct
  source 1..120: mol_type = other DNA
ggcttataataaattatccaactgcataactggtatatctacttggacacttgatttcaaaagtaatatatatccaaaaccagactcacgattttccctcagaaacctctacatacacat

SEQ ID NO: 31092 - DNA, 120 bp, synthetic construct
  source 1..120: mol_type = other DNA
gcagcttcctcctgcttctgctgctgcaactcaggtacacacaaagcatgtgtggatccgttcttttttcagtagggcttcattactctgaatttaagttaattagctttttttaaagac

SEQ ID NO: 31093 - DNA, 120 bp, synthetic construct
  source 1..120: mol_type = other DNA
aggtatagaaggtgagaggaaacaatgggctcaagtctcccctgacttctcttcttacaacatatttcattgtccaaaacttttagaactatatcaatacaacattgacagtggatattc

SEQ ID NO: 31094 - DNA, 120 bp, synthetic construct
  source 1..120: mol_type = other DNA
taaacattaaattacttaatgtataataaacccttaacacgatgacaactcttaatgcagagtgagaccaaaatgaaggtattaactattttcttcctaatccttgctttagttgttctt

SEQ ID NO: 31095 - DNA, 120 bp, synthetic construct
  source 1..120: mol_type = other DNA
gattggaactgctacctttcttaaactgcatgtgtctctgacatatgagcagcaaccatgtcaagagctcccacataaaaacgttcatactaaatttattctgttacttaagagtgttta

SEQ ID NO: 31096 - DNA, 120 bp, synthetic construct
  source 1..120: mol_type = other DNA
agggaagccattgctgattctacctcagacaggacctcctagaagtctgccaggtaactcagatggttgtcacaggttgagacaacctcccaaatgaaatgtgtgatataatcttgactg

SEQ ID NO: 31097 - DNA, 120 bp, synthetic construct
  source 1..120: mol_type = other DNA
aatctttcagagtctacaacactcccctgccatccccatctgatcagctgctgatacacactgctgtgagacgtgaggacaaattatatcactggatccattgcagacattcttgagcac

SEQ ID NO: 31098 - DNA, 120 bp, synthetic construct
  source 1..120: mol_type = other DNA
ccccacccaaacctcatctcaaattattatccccacacatcgacagagggacttgtaatcgccatgtgtcaaagaagtttacttcatgctatactcatgatagtgagtgaattcttagga

SEQ ID NO: 31099 - DNA, 120 bp, synthetic construct
  source 1..120: mol_type = other DNA
cttctggaaatttttaaagtctccgcaggtttccagaggtgactgtagctgcactgaaagtcactgcctggataactggcctgttaaagcaaaggcaaaatatgtcaagcccactaagaa

SEQ ID NO: 31100 - DNA, 120 bp, synthetic construct
  source 1..120: mol_type = other DNA
gatggctccatgttgaacatataaattccaggttctagaagcaaaaaagcaaaagatgcattggatctgcatagggaactgcaagccatccagcaaccacaggacacagtcagaaacaac

SEQ ID NO: 31101 - DNA, 120 bp, synthetic construct
  source 1..120: mol_type = other DNA
tcattttgcgggtaaaaaaatggcattggaggagattctgggtcaatcatgaagctgtgaaagttgcatcttggaagcaggatccctgtaatgaaacgagacttgtttatcagaggtggt

SEQ ID NO: 31102 - DNA, 120 bp, synthetic construct
  source 1..120: mol_type = other DNA
ggaaatggagggaacatctcagatcatgaacaatcgatgagagaatccaggagatacacggcttatttttgccttttccctgtgaaacaagggcaagtattaaaaactttatgctgtctt

SEQ ID NO: 31103 - DNA, 120 bp, synthetic construct
  source 1..120: mol_type = other DNA
taggaacggtgctcttctttcttaccctggctcgcccattttattttggtttctgaatggacctcaggtgccctgggacttgtgctcttgctggaacccacataatgcgggaaacagaca

SEQ ID NO: 31104 - DNA, 120 bp, synthetic construct
  source 1..120: mol_type = other DNA
atggggaagctgttttaacacttattgaatgaatgagtgaatgtgtctctacatatgtacatgaatgttcagggactcaccgagggacaccaggtgactgatattttccagcatcacatc

SEQ ID NO: 31105 - DNA, 120 bp, synthetic construct
  source 1..120: mol_type = other DNA
tgctagaacatcagactcattgttgggctgtgatgttctgctcttcactcatctctatcgcctgcattaatcacaatcctaagtctatttcaggcaacagtatagttaatgggtcaatta

SEQ ID NO: 31106 - DNA, 120 bp, synthetic construct
  source 1..120: mol_type = other DNA
agtactcaaagagaaatcaccatcacctatgaccagaaaagggggtctcataggaaacctggaagactcattggctgagaggcctgcagccatctaattcgttaattctccatagcaacc

SEQ ID NO: 31107 - DNA, 120 bp, synthetic construct
  source 1..120: mol_type = other DNA
ctcggtagcacacaacatcggggactgacataagattattatccttgtggcattactgaattcctatctcactagtacttgttaaatagtcatcctggctaaatacatgggtttgatttt

SEQ ID NO: 31108 - DNA, 120 bp, synthetic construct
  source 1..120: mol_type = other DNA
gtgcactcattgctcggctcccccttataactgagaatatgtggtatttgtcttcctgttcttgagctaatttgcttagaataaagtcctccagctgcacccatgttgctgaaaaggaca

SEQ ID NO: 31109 - DNA, 120 bp, synthetic construct
  source 1..120: mol_type = other DNA
tgaatgtttattaaaatcgctgtactgattgaaagctattctagaattggcttttgtgttccagaatagaaaaaaaaaagtgctggtttttatacctctcttactgccaagaagttatca

SEQ ID NO: 31110 - DNA, 120 bp, synthetic construct
  source 1..120: mol_type = other DNA
tgtaattcaatacaaagtaaagaaagactgatgaatggttacaataaccccttctgcatgtagccaagggcaaattcaaggagatctgtgaacgtccaaatggctcctgtcgggactttt

SEQ ID NO: 31111 - DNA, 120 bp, synthetic construct
  source 1..120: mol_type = other DNA
gattcagggaattcctttgcttcccagctttcactgggcataatcattcagcattttcttccatcttttaaaatactgtattggcttcctacggctcctataacaaattacaacaaactt

SEQ ID NO: 31112 - DNA, 120 bp, synthetic construct
  source 1..120: mol_type = other DNA
caactgtccctttaatatatttttgcactatataacatttatttcttagaaaagaagcagtttggacacgtatattaaagccgtcacatagaatattatcctctcattgctaggaggcgg

SEQ ID NO: 31113 - DNA, 120 bp, synthetic construct
  source 1..120: mol_type = other DNA
aatttgttgtacatgctgtgtttttctcagctatgcagctgttcagttattccatatttcagtgcttccttggctgatcaatcaatttggcctacgtcagctccaagggcatccacttca

SEQ ID NO: 31114 - DNA, 120 bp, synthetic construct
  source 1..120: mol_type = other DNA
gccattcatcaactgagtgatcttgtgcaaataattcaacctttcaaagctccagtgtctcctgtttatttggtgatggctatagtgtcaacctcctactgtttgtctcaggaaaaaaaa

SEQ ID NO: 31115 - DNA, 120 bp, synthetic construct
  source 1..120: mol_type = other DNA
tcttaatactattgcattggggattagatttcagcatgaattttgggggagagacacaaacactcataccacagcaaataatgatggtgataatactactgataataataataataataa

SEQ ID NO: 31116 - DNA, 120 bp, synthetic construct
  source 1..120: mol_type = other DNA
gatcaagaccttcactgaaatgtattcttttaaaagcaaacactccttcattttggattcattaagagacagatgttagcatgaaaaagcccatatcccaagaaggctggggcatctgaa

SEQ ID NO: 31117 - DNA, 120 bp, synthetic construct
  source 1..120: mol_type = other DNA
ttagagtcgatgagtctttcttcttgaggtttgctcccctctgcttgtgtcccatgccatattgtcctcatttaattgtgccctcaaagagacttgtttttaacagcatttacttggatc

SEQ ID NO: 31118 - DNA, 120 bp, synthetic construct
  source 1..120: mol_type = other DNA
aggagaaaatgaaggttaggcatccaggtttaaaagttggtttcaatgggctgtccctgtcctgtgaacctgcagtggcctagtggcagggactgttctcagggcctctgatcagaaaag

SEQ ID NO: 31119 - DNA, 120 bp, synthetic construct
  source 1..120: mol_type = other DNA
tattgggtgcaatgctcattacagaggttagaattcagccacttacctggtgagtcagagaatggtcctcaaagaacaatgcacactcaggagatcttatgcaaatctggactcaggaaa

SEQ ID NO: 31120 - DNA, 120 bp, synthetic construct
  source 1..120: mol_type = other DNA
tccatgtctgtgatgtctcaggggtgcagcagtgacagagacatggggacaatgaggctttcctcatgacctgcctgacctcttcatttaaaatgtcaggttctgaagaaccctgattcc

SEQ ID NO: 31121 - DNA, 120 bp, synthetic construct
  source 1..120: mol_type = other DNA
ttgaacatagctggggaagtcccaaagtaacaaaagatggtgtgactgatgcaaagtcaattgacttaaaggataaatataaaagcattggagctaaacttgtccaagatgttgccaata

SEQ ID NO: 31122 - DNA, 120 bp, synthetic construct
  source 1..120: mol_type = other DNA
ggagtagctgtgctgaaggttggtgggacaagtgatgttgaagtgaatgaagagaaagacagagttataggtgcacttaatgctacaagagctgctgttgaagaaggcattgtttaggga

SEQ ID NO: 31123 - DNA, 120 bp, synthetic construct
  source 1..120: mol_type = other DNA
ccacatcaaacacaatacaatttacacacattaagaaaactagttcctcaatgttatttattatcttgtcaatatttcacatttctccaattgttccaaccatggcttcatggctgttga

SEQ ID NO: 31124 - DNA, 120 bp, synthetic construct
  source 1..120: mol_type = other DNA
gttattaggggcacacactgatttaatattaatatctgttcttggtgatgtaaccactttatcattaggaaaaatatctctccctattactgataataccccttgctctaaaatctaccc

SEQ ID NO: 31125 - DNA, 120 bp, synthetic construct
  source 1..120: mol_type = other DNA
tgcagaacaatttaatctagagccaaatagcactactactaatgtgttagttgcccaaggactctgcagtctctccactttgctagtgggaatgaaaatttttccagcctttagtgctcc

SEQ ID NO: 31126 - DNA, 120 bp, synthetic construct
  source 1..120: mol_type = other DNA
aatatgtcactgtacgcaatgtaaaaaccaagcaagggttgtagatggaggactcaagtcagaaccctgtggtgaaccagaggaaagactgtaagcatttgggaaatcacctgtgttttt

SEQ ID NO: 31127 - DNA, 120 bp, synthetic construct
  source 1..120: mol_type = other DNA
gaatagacatttaagacctcaagttactcttggctcaggagcattcaaggcagtccaggggccagatgatttcccctgcatatagattcaacgtttagagggaaaaatgctaaaaaagaa

SEQ ID NO: 31128 - DNA, 120 bp, synthetic construct
  source 1..120: mol_type = other DNA
gatgaatatcacaaagaagaaatacttccagaagagcaaggaaatagggagagaacagtagcagctaatgcaaagacaacaaatgatttacaacatgagaacaatctgaacacacttatg

SEQ ID NO: 31129 - DNA, 120 bp, synthetic construct
  source 1..120: mol_type = other DNA
gacaaggacgcaggcattttcattcctagttcagggctttttccaggatgccatgaggctcattggggcatggcttcaatttagtgacatcctgggtcccttttctgtctatgattccat

SEQ ID NO: 31130 - DNA, 120 bp, synthetic construct
  source 1..120: mol_type = other DNA
gtgtcatctcaggaagctgattccttagagatacagtggagatgatcacacttatctcagaagaaagagctatgtgaaaagtatgaggatttgccaagaaaaacatcctgggcccccatt

SEQ ID NO: 31131 - DNA, 120 bp, synthetic construct
  source 1..120: mol_type = other DNA
aagtaagccccagttttgggggctctcacttggtctctgggctgatccagtcagattcattctcaggccttacagagacactttacattgaaaaaaagaaaaagaaaaaacagccaaaaa

SEQ ID NO: 31132 - DNA, 120 bp, synthetic construct
  source 1..120: mol_type = other DNA
aacaaatatttattgaacacctactataagccacacattcctttaagcccttgggatacttcaacatccctgccttccgggagcttatattttagatcccagatctgccatccatctctg

SEQ ID NO: 31133 - DNA, 120 bp, synthetic construct
  source 1..120: mol_type = other DNA
gatggttgaaagaaagatcttacttatgtcagatctgcaaatgctacgtacgatgactttaaacagcagcaacaacagcagcaacaacaacagcacagtgttggtcttgcgtgattagga

SEQ ID NO: 31134 - DNA, 120 bp, synthetic construct
  source 1..120: mol_type = other DNA
ctaaaaatagactggcttcctgatattcagagaagcagggatcaaccaataattccatatacggatattgaagaggaaagtgaaccaacattgaggtgtggctacttagtgccaagccct

SEQ ID NO: 31135 - DNA, 120 bp, synthetic construct
  source 1..120: mol_type = other DNA
ccctgggcttcataacaattgctgttagcttcttattaatccttccagaggtgtcccatgtgtatggaagcagagatgaatccataccccatttttatgtaagcaatagcagactctaga

SEQ ID NO: 31136 - DNA, 120 bp, synthetic construct
  source 1..120: mol_type = other DNA
acataagttgattaaggaacatctttgttcagaaaaaaagcctggaaaggtggcattctgtaaagggctctgtgtacctagtttctttcctatgctgagccccaggatcctgattcttac

SEQ ID NO: 31137 - DNA, 120 bp, synthetic construct
  source 1..120: mol_type = other DNA
ggggtttaagcaggaggcattccagagaaagggaagataattgatggaggaaagaatatgtaaggttagatataaaaggagcacatgtacatggataagaataaagcggtaacctggccg

SEQ ID NO: 31138 - DNA, 120 bp, synthetic construct
  source 1..120: mol_type = other DNA
aaatgcccacctcccggtttctacctgcaaggggtttatctacccattttcccatctgctgcctgagggttgacttctgggtctgtatctgggagccaaaggggcagggtgaacagtaga

SEQ ID NO: 31139 - DNA, 120 bp, synthetic construct
  source 1..120: mol_type = other DNA
gggttataaatgggtctctgcattttgtgtcttctaaggccacagagaacaaatgggtagttttaaaggggcacaagaggacttccagagggtattcttccaggtttagcacaaagagaa

SEQ ID NO: 31140 - DNA, 120 bp, synthetic construct
  source 1..120: mol_type = other DNA
ggtgggggtggcatggatatgaaacagctttccatagttaatagcttcaagttccaaactaaaacatcaactccagatatatagctctgccccactaaatctcctttaaccaaaggaagg

SEQ ID NO: 31141 - DNA, 120 bp, synthetic construct
  source 1..120: mol_type = other DNA
accatgtcttccccaaacaatgactgctcacccaccccgaccagcacagacatcttcccgtctatttgttccctctacgtctccccagtggatgcacttgttgcacgtgttggtccctga

SEQ ID NO: 31142 - DNA, 120 bp, synthetic construct
  source 1..120: mol_type = other DNA
tcattctcaaaggacaatgtggacacgctactatcccactgctggtggaacaaacacttgagacacatatttcaggaagtaaataatacgcctgaatgccttgggtgggtttggtgaata

SEQ ID NO: 31143 - DNA, 120 bp, synthetic construct
  source 1..120: mol_type = other DNA
agacagagaaaacaacttaggtcatttgtgtaaataaaaatacttactctctacctggagaaagctggaagcaaatggagaaagaggcagcaatgacaatagagacctgggcatccgctg

SEQ ID NO: 31144 - DNA, 120 bp, synthetic construct
  source 1..120: mol_type = other DNA
tgctctcagctcctgtcctcttctgccagatttctgtgtcctaaaaaaatctttgaataattctcttgctaaaagccacatccatcctgagggggaggatggcagaacccattatagaat

SEQ ID NO: 31145 - DNA, 120 bp, synthetic construct
  source 1..120: mol_type = other DNA
gtgttttcagaagtcgatttgatctgtagccatttcagccatcccaagaatgctcttaaggcagcatatgaaagaacacaggaaatcctttcatgagcgctaaggcataaacaccattta

SEQ ID NO: 31146 - DNA, 120 bp, synthetic construct
  source 1..120: mol_type = other DNA
cccagcagtccttgtggacatatcacaatctaaaattcagggataagaaaatctacataggaatctctgcttcactcacctgtgagactcttccaggctaattttctttgggtcatgtgg

SEQ ID NO: 31147 - DNA, 120 bp, synthetic construct
  source 1..120: mol_type = other DNA
ttaaaaggagacaaaaaataattgtagcacagggtcagcagttggatctctgtttgtaagtgttgttgggcagaatggccatacggcaggaggggaaatcaaggtacaagtcaaataagt

SEQ ID NO: 31148 - DNA, 120 bp, synthetic construct
  source 1..120: mol_type = other DNA
attaggaagcacagggtagcaggttgtctttctggcttattttaatcgctgttgacattccttggctagatccctgtttccctatgtgtttgcaaaatggcgacactcctcatttattag

SEQ ID NO: 31149 - DNA, 120 bp, synthetic construct
  source 1..120: mol_type = other DNA
tggtagaggttttcctggacccccatcctcctccactttcctagatgattgacttgaccttctgattcccaaccagcatggattttatttgaaaatgtacatcattccatgtcacactta

SEQ ID NO: 31150 - DNA, 120 bp, synthetic construct
  source 1..120: mol_type = other DNA
tgaaagcagctttgtaaaactcattatctcacatgccacactgataggatcttacagagatatcaggaaaacccagaagcaaggctgatggtagggaggacagcgtaaggtggaccgaga

SEQ ID NO: 31151 - DNA, 120 bp, synthetic construct
  source 1..120: mol_type = other DNA
acctttaaaatgttagactgtcagtttcaaacaagccctcacaggccatctatttagagatgggaatgaaggctcagagaaggaaagtgactaatctgacgtcacacagcaacttatgtg

SEQ ID NO: 31152 - DNA, 120 bp, synthetic construct
  source 1..120: mol_type = other DNA
gttgcgacaagaggttgtattgtggaggccaaagttgtatcatgcagttgatgcttttagctagcaggcttcagagagaacaggctgtaaaatgtttcttatcacacttaaagtctgtgt

SEQ ID NO: 31153 - DNA, 120 bp, synthetic construct
  source 1..120: mol_type = other DNA
ctggggacatagattaacgtaggagtcagaagattgctgacatctcagtctaaaatttcctgagcagagttcaaaggcacctgctatttgtgttgtcagtaaattacgttcttgcctact

SEQ ID NO: 31154 - DNA, 120 bp, synthetic construct
  source 1..120: mol_type = other DNA
agaactggattagatgatctctaagataccttccagccttgacattcctcaattctggtgagaggactttctcttccatttcagtacatttcagtcaggagattcttgttgaaaactgtg

SEQ ID NO: 31155 - DNA, 120 bp, synthetic construct
  source 1..120: mol_type = other DNA
acctgtaaatctcagcacttggggaggctgagcgagggaggaggatcatgtgagctcaggggtttgagtccatcatggacggcatagagagaccccgactctacacaaaaagaaaattag

SEQ ID NO: 31156 - DNA, 120 bp, synthetic construct
  source 1..120: mol_type = other DNA
aagccaaataaatggaaaaatcaatgacttttcttggacccattagggaactgagggctccgggcaaacccattgcgtggaaatctggagtcacagctgagatgagctaacctggaatgg

SEQ ID NO: 31157 - DNA, 120 bp, synthetic construct
  source 1..120: mol_type = other DNA
tcaggttagtcccattcaaccatcgcctccatttgcaggcttgaccaggtcccagtatcatgtggataaattgacaaagatcaggaagtcatggattgtatgtttaaatgaggattctaa

SEQ ID NO: 31158 - DNA, 120 bp, synthetic construct
  source 1..120: mol_type = other DNA
gtaatataatggaggaagaatagtcttctcaacaaatggtgcttgaacaattgatatccctatgcaaaagagaaagagaaggagaggtagagaggagaagaggaggcaatgaagtggggg

SEQ ID NO: 31159 - DNA, 120 bp, synthetic construct
  source 1..120: mol_type = other DNA
ttactatatcctgaggacccagtttgtgctttcaagatagcaccttgttgctcagccttcacatggcagaagagacaaacgctgtgtcctcccatggtggaaggagcaaggcagtttctt

SEQ ID NO: 31160 - DNA, 120 bp, synthetic construct
  source 1..120: mol_type = other DNA
cagaccagagcaaaggaagggataaagatataaaaagagaatgagtttactgtggtagatagaaacttgcttggaaggctcagcctgatttctcctccatattcaccaaagcaacgactg

SEQ ID NO: 31161 - DNA, 120 bp, synthetic construct
  source 1..120: mol_type = other DNA
cactatactatatactagtgtattatactagtataatacactatactatatgctagagtattatactagtatatacactatactgtatactagtgtatgtactagtatatacactatact

SEQ ID NO: 31162 - DNA, 120 bp, synthetic construct
  source 1..120: mol_type = other DNA
gacttattatataataagtatgagtgatctgaaaaagatacctctggccagtttcgaacgtgcatatcaaaaccagtggcctgaatacggcataggtcactgtgggtcctagatcctcat

SEQ ID NO: 31163 - DNA, 120 bp, synthetic construct
  source 1..120: mol_type = other DNA
tttgttagtgagcatgagatgggatgccaaaaggcatctttcctggccttcttttattctttcaaacctgtgacagcccctcctagataacaatgtaaaatgcaaaggaattacagaaga

SEQ ID NO: 31164 - DNA, 120 bp, synthetic construct
  source 1..120: mol_type = other DNA
tatgcagtaattatggctttggtgcgtgaggtgatatcttacaggaaaggggactcagagctaacttgacaaaatgattgctacccctccttttctccctgtgatacttgtagagaataa

SEQ ID NO: 31165 - DNA, 120 bp, synthetic construct
  source 1..120: mol_type = other DNA
aaatgtattttgttttgaatttagggtgccaggcaggacttgatttttcccaaccatttccatcaggtaagttaaatctcttgtatataattattttttctcttaggagctctggcgctg

SEQ ID NO: 31166 - DNA, 120 bp, synthetic construct
  source 1..120: mol_type = other DNA
atggccactggacaaatgagaatatggaccttaacctgccggctactaggcccaaactagagttgatcttcaaggatctttaaaaaaccacaatatacccctcccattttttgtctagta

SEQ ID NO: 31167 - DNA, 120 bp, synthetic construct
  source 1..120: mol_type = other DNA
aagtgctgggattataggcatgagccaccatgctgggcgagatgacctttaaaaaacatcaagacatgagtgtgtacctagtatctgctcaatcagataccactactatgtatatgtaga

SEQ ID NO: 31168 - DNA, 120 bp, synthetic construct
  source 1..120: mol_type = other DNA
tcctcaaaccttagggcagtgggagatttctgctgtgactatcagtagggttgcctcattgctcccgctttgcattgtcatcttttccaacactttatctgtacatattaaattctttct

SEQ ID NO: 31169 - DNA, 120 bp, synthetic construct
  source 1..120: mol_type = other DNA
tacaggaaaatgtatggttgtaaatgcctgtatttataaagaagatagatttaaaatcagtaaattatcttccatctcaagaaaattaaggaagagccaactaaacccaaagcaagcaca

SEQ ID NO: 31170 - DNA, 120 bp, synthetic construct
  source 1..120: mol_type = other DNA
tcctaaatagcttattttatagattgccaatttaatccccttgtggtgagaaatacactctgaagtatttaaatgtgcttaaacacatcaatatttgttttatggcctagcatatggttc

SEQ ID NO: 31171 - DNA, 120 bp, synthetic construct
  source 1..120: mol_type = other DNA
tagaagtagagatgacagtctgctcaggatctgtcttttgagatgaaagctcaacttttacaaagttgaaggttccaaggcaaaccagtcactgaaaatcttttcctgagctccgacaca

SEQ ID NO: 31172 - DNA, 120 bp, synthetic construct
  source 1..120: mol_type = other DNA
cattgaatacacagataaaacagatggaatggaatggttggactggcactcaggtgaattgagttctaaagtcatagctctggctttaaacagatgtaggacattgggccctctgtgcca

SEQ ID NO: 31173 - DNA, 120 bp, synthetic construct
  source 1..120: mol_type = other DNA
cttctggtattgccacttgtcttcatggtgctaattttcttattctgaaaactatgctggaggaaaatatgtaaagttatctgtttcaatcagaggatttttctgttctgcattttccct

SEQ ID NO: 31174 - DNA, 120 bp, synthetic construct
  source 1..120: mol_type = other DNA
agtattcatccttcaggccctttctgaaacattttacaaggtgatctatctcctgcaccttaatttctctctcttctggccgtgagaatgtttgtctgctggacatttctctttgtcttc

SEQ ID NO: 31175 - DNA, 120 bp, synthetic construct
  source 1..120: mol_type = other DNA
tccattacttgtgtatccaatttaagtttactgagctactctaagtggatttctgataggcacttcaaaggtaatgtctttattgcaatttattggtttgcttccaaatctggccttcat

SEQ ID NO: 31176 - DNA, 120 bp, synthetic construct
  source 1..120: mol_type = other DNA
actttattgggtagacagacacatgtacagcaaatgaacattccatgtgttaagttctacatcctgatccgagacctgtgggagtttagaacatgtgcatttagactaattacgactgga

SEQ ID NO: 31177 - DNA, 120 bp, synthetic construct
  source 1..120: mol_type = other DNA
cttgataacctgtttgactaccttaggtagctgtcagctaaatagccttactctgcatatcaaaggaaacaattcataggtgaaaatcagataggaaacttacatctgaggaacacagcg

SEQ ID NO: 31178 - DNA, 120 bp, synthetic construct
  source 1..120: mol_type = other DNA
cggggcagagagtcaggcagccctgctcttgtatccctcagaaaactcttgagattttgttcctaaagcctcccaaagagggaaaaggaattcatctcatgacatcccacttttcattca

SEQ ID NO: 31179 - DNA, 120 bp, synthetic construct
  source 1..120: mol_type = other DNA
aaaagaaaaagaaaaaagataccgtgctccatttgcatttgatcttccaaaaggaaggtactgataaaaccggaatttcagcgatacagacgcaggtcaaccgctaaacagtgaaggcca

SEQ ID NO: 31180 - DNA, 120 bp, synthetic construct
  source 1..120: mol_type = other DNA
atgcaaggggaaagctacacttttgtgaaaaatagtttctaccccaaatgaaaacatattgcttaaatatttcttcaaaaataagttattattctgtgctgcaggatatatcctgagaca

SEQ ID NO: 31181 - DNA, 120 bp, synthetic construct
  source 1..120: mol_type = other DNA
ggtgtctggccacctgcaagaagtttaggtgactttgccaataagaatgatggatttgtaattaataagtaatgttgaaagcaaaacttgcattacaattctgaaattagtccagcgggg

SEQ ID NO: 31182 - DNA, 120 bp, synthetic construct
  source 1..120: mol_type = other DNA
catattgactgagttttgataaaaccactcccatgctggcccttcatgttgtttaatcagcaccactagccaatcacattcatccattttgacaaatcccatggctccacctcttataag

SEQ ID NO: 31183 - DNA, 120 bp, synthetic construct
  source 1..120: mol_type = other DNA
tgagctcctgaaaaagcaaactgtttcctgtgatcgccatgtcttatcacacacatgcaccgataggaaaagcctctagaaaaggagagggtgggatatgagtgttaggactttctggat

SEQ ID NO: 31184 - DNA, 120 bp, synthetic construct
  source 1..120: mol_type = other DNA
tgtgcagatccagtacatcataccttccgttgatgacttcagcttggagttccatgctcaagatggagacatctcagacatgagaagagagaatgtgcctttttcacctgcagaagaagg

SEQ ID NO: 31185 - DNA, 120 bp, synthetic construct
  source 1..120: mol_type = other DNA
ttccttgtcttagtccaggttccctacactccccaggccaatgcttttgaataaatcttgacgtcattgaatgaagtagtggtgactgctgtgcttgcttccaactgagacactctcctg

SEQ ID NO: 31186 - DNA, 120 bp, synthetic construct
  source 1..120: mol_type = other DNA
cctctgggaaggaggacagggactctttcaggtttgattctcctcggggttttagacgttggctgaggtgggaactgccttcatccacatgaaaggcccagccagggcatcctcaccagc

SEQ ID NO: 31187 - DNA, 120 bp, synthetic construct
  source 1..120: mol_type = other DNA
ccagggatctattgaaaggaaatgtttaggttaagataaagaggtggggaggccaagttttactgtgcagaggaaccttcagatagtagacttgagagggagtaggttgtaaaatgtttc

SEQ ID NO: 31188 - DNA, 120 bp, synthetic construct
  source 1..120: mol_type = other DNA
atgagatccgaagaaaaccatgttgcttggctcagcgcttctctttcaataatcctactgcgcattgcatactttctcctctgtgccctaccctttaccaaccacacctagtccagtggg

SEQ ID NO: 31189 - DNA, 120 bp, synthetic construct
  source 1..120: mol_type = other DNA
actgctgtgattgcttccaagtgagacacgcttctgctctggctcatcaagtttacattaccacttgccattcctaagttttgttttcaatttttggtttgtatttcatatacctgtaca

SEQ ID NO: 31190 - DNA, 120 bp, synthetic construct
  source 1..120: mol_type = other DNA
gacgtgactaaccccgctgcgatgggggaaactaagagccaggggggcaagagggtttggctcttacaacccgaaacggggggagtgcctcacaacctgcgatgcgggtcctaaaagcca

SEQ ID NO: 31191 - DNA, 120 bp, synthetic construct
  source 1..120: mol_type = other DNA
attttttaaatttatatttaggcctctcctcataagatacattaatcaagagcctttccattgtgtttcaaaacacagtagcatctcactctacacaccggacatgcctggttactgttt

SEQ ID NO: 31192 - DNA, 120 bp, synthetic construct
  source 1..120: mol_type = other DNA
tccacattttagggcatgcactgactaaggatttggccaatctctgatctatcaatgtaagtggtggatcttggctacatcccttcttgaaaacacatcttcgtgctctggttggagaac

SEQ ID NO: 31193 - DNA, 120 bp, synthetic construct
  source 1..120: mol_type = other DNA
gagattatgcaacatagtccaatctttgctatccatgaacatagggagttacctggggtgattccaggcctggaatgaattcatgtgaggaattctttgaagtaagggtgtttctgcatc

SEQ ID NO: 31194 - DNA, 120 bp, synthetic construct
  source 1..120: mol_type = other DNA
gctgcaccaaggacaatctagtctcagaggggacttcctggacacaggcgggtcctgacaccctgagggaacagaggagaatggccttcacaggggctgctgtcttggggctcacagaag

SEQ ID NO: 31195 - DNA, 120 bp, synthetic construct
  source 1..120: mol_type = other DNA
agagcaggagagtgtctcagttggaagcaagcacagcagtcaccactacttcattcaatgacgtcaagatttattcaaaagcattggcctggggagtgtagggaacctggactaagacaa

SEQ ID NO: 31196 - DNA, 120 bp, synthetic construct
  source 1..120: mol_type = other DNA
cttcccttcttctgcaggtgaaaaaggcacattctctcttctcatgtctgagatgtctccatcttgagcatggaactccaagctgaagtcatcaacggaaggtatgatgtactggatctg

SEQ ID NO: 31197 - DNA, 120 bp, synthetic construct
  source 1..120: mol_type = other DNA
aaagtcctaacactcatatcccaccctctccttttctagaggcttttcctatcggtgcatgtgtgtgataagacatggcgatcacaggaaacagtttgctttttcaggagctcatccaca

SEQ ID NO: 31198 - DNA, 120 bp, synthetic construct
  source 1..120: mol_type = other DNA
tgtcaaaatggatgaatgtgattggctagtggtgctgattaaacaacatgaagggccagcatgggagtggttttatcaaaactcagtcaatatgagtgtgacccagtcagaattagccta

SEQ ID NO: 31199 - DNA, 120 bp, synthetic construct
  source 1..120: mol_type = other DNA
accattactgagcgtgccatctctaacaggcccctgagctcagggcttcatcctctctctagaacttgtataaatttgtttgtggattctctttgcatttagctgataatttcatcagtt

SEQ ID NO: 31200 - DNA, 120 bp, synthetic construct
  source 1..120: mol_type = other DNA
ttaatagcaacaattaaaggatgcattagtgcccctccctttcattgtctcactatttttcagtgaatttggcactgtaggaaagatgagcccctcacaatgtggaaatgcagggatgca

SEQ ID NO: 31201 - DNA, 120 bp, synthetic construct
  source 1..120: mol_type = other DNA
gaggagctcgaataagagaaacattctgtgtgatgctttaatgccagagatctgccactatgcatttgtcaaatacaatacaattttacagcacaaatagtacatcttagtgggtcagga

SEQ ID NO: 31202 - DNA, 120 bp, synthetic construct
  source 1..120: mol_type = other DNA
gcaaaaataaaaaactcttgaagaaggcagggactcgaagaaaggggtggaatttctgcccacatgccaaagagtgcagaaggaattctaagtgttagagcagcatcagtaaaactagat

SEQ ID NO: 31203 - DNA, 120 bp, synthetic construct
  source 1..120: mol_type = other DNA
tctgtctagcacaacagactatttcgctgtgttcctcagatgtaagtttcctatctgattttcacctatgaattgtttcctttgatatgcagagtaaggctatttagctgacagctacct

SEQ ID NO: 31204 - DNA, 120 bp, synthetic construct
  source 1..120: mol_type = other DNA
ctatttctgcaactaactggaggtgtgtgacagagatcaatggatctcagatgcttctgtgttcagtgatcaacaggtctcaaatgtcactgtgcaggagacttaattggaaaagtcatt

SEQ ID NO: 31205 - DNA, 120 bp, synthetic construct
  source 1..120: mol_type = other DNA
attatcttacttgtacgcagctagagcttgaacctatgaggaggagacacagtaccaggtgcccatgtctcctagtgggttacaccacatcagtcacgcttaaaatttgaagggagcaat

SEQ ID NO: 31206 - DNA, 120 bp, synthetic construct
  source 1..120: mol_type = other DNA
accttgtaaaatgtttcagaaagggcctgaaggatgaatactggccataggtcactggagttggccctggtaatttattaagagaaaaactactattaactgactaaggaggtacctggt

SEQ ID NO: 31207 - DNA, 120 bp, synthetic construct
  source 1..120: mol_type = other DNA
ccctggcatatgatttcggagtctcacagttttaggtagaaagataaacaacatgatgctagtccttctcaatttactgtgcaaagaacaccaatggaatcgtgtatttagctctggcaa

SEQ ID NO: 31208 - DNA, 120 bp, synthetic construct
  source 1..120: mol_type = other DNA
aaatggtcaactgtttaggatggcagggttgaccttcagcccaaatcacaacataacttggtgaaaaagaaccctctacccgcacctagtcaacttagctatttttggacttttacatga

SEQ ID NO: 31209 - DNA, 120 bp, synthetic construct
  source 1..120: mol_type = other DNA
acaccactctctcagcaactgatagaacacagggaaaaattagcaaagtcatgcatgatctgaacaataccaccattccactgactgcattgatatttatagaacacatcataagacaac

SEQ ID NO: 31210 - DNA, 120 bp, synthetic construct
  source 1..120: mol_type = other DNA
acaaaagagaagttcacagcaacttctaatgtcttctccatagactcagcaggtgcttacaaaaaagattagagtatttcatgatgtaagtcggctgaggggaacagtagccactgtgag

SEQ ID NO: 31211 - DNA, 120 bp, synthetic construct
  source 1..120: mol_type = other DNA
ataccccacttcccacttccctggggtaattcctgtgtaaatgaaggaaacactctaggcttcttgagggctgtgtttcaaatctcttttggaaaacagtggatcatatgtaaatagagt

SEQ ID NO: 31212 - DNA, 120 bp, synthetic construct
  source 1..120: mol_type = other DNA
ttattccattaacatagttagtacatatagatggatacataaaacatgacagcaatgtgcacagcagttactggatcctagctatggctctgaagaattaacagcctcttgagcctcaat

SEQ ID NO: 31213 - DNA, 120 bp, synthetic construct
  source 1..120: mol_type = other DNA
aaaaacaaggatagcagtctatgaaccttttaaaatgtagttatggtagagattgagacaggtaaggagaagggacaggtaaggatctgagcttagagacacctatgcactcatgccagt

SEQ ID NO: 31214 - DNA, 120 bp, synthetic construct
  source 1..120: mol_type = other DNA
agtgagagccagagttcatcgagctttgaaatagtggagtattttcacttatgaactgatgtgctgatcctggataatcattagtgcatatgctggcactaatccacctggctgtaagtt

SEQ ID NO: 31215 - DNA, 120 bp, synthetic construct
  source 1..120: mol_type = other DNA
catcatgccatatgcccacataaatgagcatacatttacatgaatagctacatgaacgacaaattgatggataggcggtccatttatcaaagacttttatgtgtcacacacacacctgtc

SEQ ID NO: 31216 - DNA, 120 bp, synthetic construct
  source 1..120: mol_type = other DNA
ttgtaaaaccatagtgcaatatcacaaccaggttattgacactgatgcataacatttccattatcaggaggacttctcatgttaccctttcagagccactctctcttccctcacacctcc

SEQ ID NO: 31217 - DNA, 120 bp, synthetic construct
  source 1..120: mol_type = other DNA
gattatgggagcaagaacccaagatgagatttagatggggacagaaaccctatcatccaccaaccttgttctttccggtattgtattgacgatcctaggtcttttgaatcagtatggaaa

SEQ ID NO: 31218 - DNA, 120 bp, synthetic construct
  source 1..120: mol_type = other DNA
tgaattgtctccttttaacctctcttctcattcttgtcctccttttcacctaagccctaagtgagcctgatgctctgtggttacaatcccacccttggacaatgcccgccatcaagtatt

SEQ ID NO: 31219 - DNA, 120 bp, synthetic construct
  source 1..120: mol_type = other DNA
tgaaagactgcttcaggccatgaaaggaagtgggggttggacatgcctcattacactttccatcatgaacatcaacacagactttaagtgtgataagaaacattttacagcctgttctct

SEQ ID NO: 31220 - DNA, 120 bp, synthetic construct
  source 1..120: mol_type = other DNA
tgtcttctcttcaatgcctgaggtttgcggggcaaggaacaggtgggcaggctcagtcaattccaccccattgcacctcgtgtgacataaataatgggcgcttctaatcttttcttcctg

SEQ ID NO: 31221 - DNA, 120 bp, synthetic construct
  source 1..120: mol_type = other DNA
taacaaaattagccaataagcgtgattttctagtttgatttctttgaaatgatatgccttattcttcagaattatccacaaaatagttccgtggggattgctttctgggtctgtgatttg

SEQ ID NO: 31222 - DNA, 120 bp, synthetic construct
  source 1..120: mol_type = other DNA
gaaagttcaaaatgaacacccagcccctgcctctttgagatgctcacactgttcacccatgcagaaagtccaagaccactgcttgatgtctctttttcaaaatccatgtctaggtaagac

SEQ ID NO: 31223 - DNA, 120 bp, synthetic construct
  source 1..120: mol_type = other DNA
ctatgtttctgttggtagatgggagtcatgttgctgggaaataagctaattatctgctcaactgtggtggacaccgcagctttctgaaggcagaaaatatatctttacacaaccatgtct

SEQ ID NO: 31224 - DNA, 120 bp, synthetic construct
  source 1..120: mol_type = other DNA
catgtactgccttttcaaaggggtctcagaattttgtgatattccactttcctttcctagtcaagggaatatctcttaagtatctggagatgggaactgactagaaaccgagctccaaac

SEQ ID NO: 31225 - DNA, 120 bp, synthetic construct
  source 1..120: mol_type = other DNA
gcccactagaatgtacactttggggctacagtctcaattcccagctcaagttgcaatgaatatttgtcatcttgcctttggcctctcgcaacctcttctaaactcactcttgtttttttt

SEQ ID NO: 31226 - DNA, 120 bp, synthetic construct
  source 1..120: mol_type = other DNA
caatttaggaggctgaagcaggaggattgcttgagcccaggagttcacatctgggctcgaaaccagtctgggcagcatagtgagaccccattttattttctacagaaaatttaaaattta

SEQ ID NO: 31227 - DNA, 120 bp, synthetic construct
  source 1..120: mol_type = other DNA
ggaacagatcggcaagtgctcgacgcgtggccgaaaatgctgccgaagaaagaaataaaaaccctgaaacatgacgagagtgttgtaaagtgtggaaatgccttcttaaagtttataaaa

SEQ ID NO: 31228 - DNA, 120 bp, synthetic construct
  source 1..120: mol_type = other DNA
tgctatgggaatctccctctgacagcagacaaaagggaacctgtcaagatgtgtgacagctgtgttcagacattggataataagcagtgcaacagaccaatgaagtgagactttcgattg

SEQ ID NO: 31229 - DNA, 120 bp, synthetic construct
  source 1..120: mol_type = other DNA
aatgaagaaatagtacaaagagaggagaaaagggctggaaaataataagcagtgacctgtgcagaaacatcaagcaatctagcaactatgtgtgtttagacagccaggcgtggtggctca

SEQ ID NO: 31230 - DNA, 120 bp, synthetic construct
  source 1..120: mol_type = other DNA
cgcaaaattcctaagtttcagtgcgaaatggaaatgcagggtaccatggtttaaagagcagaaaaagaaagtgtaatgaaaggcagtaggatattaagctttttcaaacaaatatttttc

SEQ ID NO: 31231 - DNA, 120 bp, synthetic construct
  source 1..120: mol_type = other DNA
catttaatggcaaagttgagttgcacaaagcatttcctcacatctagacataattttgattcatgtaaaagctcttaaaaacaggtcctttttgaaggtacagttaaatgagggcaatat

SEQ ID NO: 31232 - DNA, 120 bp, synthetic construct
  source 1..120: mol_type = other DNA
gtgtagtaggcataataatggcctcccaaagatgtccatgtcccaattcctagaacctatgattatgcttctttacatagcagataagaattaatgtcagcagacagaattaaagttgct

SEQ ID NO: 31233 - DNA, 120 bp, synthetic construct
  source 1..120: mol_type = other DNA
taactcttcctccctcagaaggcactctgagctcagtattacatgaatagcccatttatttcagatctgtagcttggaatttattgtgaacagattcagtcttaggtgagggtggaagac

SEQ ID NO: 31234 - DNA, 120 bp, synthetic construct
  source 1..120: mol_type = other DNA
aaacctgacttctgtcaatagggtcacaatgccttctgcatgacctcactaagctctgcctctgcccattgatatgacccctaattatgtggtcactggagctgctttcaggtgtccttg

SEQ ID NO: 31235 - DNA, 120 bp, synthetic construct
  source 1..120: mol_type = other DNA
ggagagagatgtagaaacaatataaagcaacacagatgtggaggggaaagagagaaggaggaatttcagtgttttaccgtgtatactttctgctgtttaattcctttaccataaaaatgc

SEQ ID NO: 31236 - DNA, 120 bp, synthetic construct
  source 1..120: mol_type = other DNA
aggcaccaaacctcagagccataagcagaaatgaaaatccaccagaaaatgcaaaattattgtgaagactttctatttgaataggaggagacttggatctgtaatcatgagtccatagat

SEQ ID NO: 31237 - DNA, 120 bp, synthetic construct
  source 1..120: mol_type = other DNA
atacagtattttaaaagatggaagaaaatgctgaatgattatgcccagtgaaagctgggaagcaaaggaattccctgaatcttggccaggcatacatgtacagacccagggaattgcctc

SEQ ID NO: 31238 - DNA, 120 bp, synthetic construct
  source 1..120: mol_type = other DNA
gccagttcttaggataactgacttttgccgaaagaggagctttggagacaaaaatttagtagaataatgcctgatttttaatttttgaggtctagtaactgctagtaaacttgcctaatt

SEQ ID NO: 31239 - DNA, 120 bp, synthetic construct
  source 1..120: mol_type = other DNA
gttccgatctttacatccgtgtgtaaccaacgctttgttctcacttataactaagaacatatggtatttggttttctcttcctgcattatgttagaataatggcctccagctgcatccat

SEQ ID NO: 31240 - DNA, 120 bp, synthetic construct
  source 1..120: mol_type = other DNA
tcctgaggtctgcatttaactaacatttttgatgttaacaggtgtagaccatcaggaaatggcctctctttggtgctgcctaattatcatttttagagaggcaatgtgataattgacagg

SEQ ID NO: 31241 - DNA, 120 bp, synthetic construct
  source 1..120: mol_type = other DNA
cttccattgctgtattttaatttaatttaattttattgtatgtaaatatgttgcatattcctttttttaaaatgtgagatatttcctctctcctgttacataaactttgtatgcagtgtt

SEQ ID NO: 31242 - DNA, 120 bp, synthetic construct
  source 1..120: mol_type = other DNA
gtaattttgtcatattattcaaaccctgttgatcatttattaaattggtaaataaattataatcagcaggattattatgagggttaaataaggaaatatatgtacatctgtaagcacaat

SEQ ID NO: 31243 - DNA, 120 bp, synthetic construct
  source 1..120: mol_type = other DNA
tgaagcacaatcacctgagtgtaattaggctggcattaagtgctttctaagcaaagaaaaaaactggagactttgaatttagtgaatacattgacctctgttctaaatcataacatgaga

SEQ ID NO: 31244 - DNA, 120 bp, synthetic construct
  source 1..120: mol_type = other DNA
agagcaatacttacaaatattgaaagaatacaatctgttgttgaaaaaacttagtatgttggtgaagcccttgtttcatttatgcagccctaacaaactgattcgcatctgaactccttg

SEQ ID NO: 31245 - DNA, 120 bp, synthetic construct
  source 1..120: mol_type = other DNA
gttgaaattgacacatcatcatattaaaaaatctccacgagtgattgattttactctgcagccagggtttatgtcaagtgtgaggataatgagcaagaaattcaagcccttggcaaactg

SEQ ID NO: 31246 - DNA, 120 bp, synthetic construct
  source 1..120: mol_type = other DNA
ctccggggcgtctggcctgggcgggactgagcccatccagggactgggactctgggattctggtgtaggtggatccggggcaggctcaggaccaagtccctctccttccaccaaggagcg

SEQ ID NO: 31247 - DNA, 120 bp, synthetic construct
  source 1..120: mol_type = other DNA
gtccctggctgatatagaacatcctgccgaaggttgggcttgggtgacttcctggccagccttcccaggcagtcatctttgaaaaccttgaagagactcacagaggctattcactggtat

SEQ ID NO: 31248 - DNA, 120 bp, synthetic construct
  source 1..120: mol_type = other DNA
cccagccacctggctgtcatctgctctttcatggcccctctctactggtacctctaggcactggcatgtcctccagaggctgcaggagggcatgatactcagtactctcccacctgcagg

SEQ ID NO: 31249 - DNA, 120 bp, synthetic construct
  source 1..120: mol_type = other DNA
aaaaacctttgtctttacctctttctctcaaaacccagaacaaatccatcaacaaccccttcaactcgatcctccaaacagatctagaaaatgggcctggcacagtggctaacacctgta

SEQ ID NO: 31250 - DNA, 120 bp, synthetic construct
  source 1..120: mol_type = other DNA
gatgaacaggctagaaccgtggaaagggaagagaagaaagaaaacagtggagcaatcagatcagacagatgtgtaaaggcatcattccagcagggactggcaaacaatatttccttttat

SEQ ID NO: 31251 - DNA, 120 bp, synthetic construct
  source 1..120: mol_type = other DNA
taatgcccacaagtaatgtgttagagttccagtttagaatctcctcattaacacttggtattgccagtctttttagtttgtatttttctgttgactaataatgttgagcatcttttcatg

SEQ ID NO: 31252 - DNA, 120 bp, synthetic construct
  source 1..120: mol_type = other DNA
tttcctttaattcttggaatttattttctttaagtctttgaaattttttataattgatgctttgaggtctttgctaactaaccctaacacatctgggatatgctgggtatgatttttagt

SEQ ID NO: 31253 - DNA, 120 bp, synthetic construct
  source 1..120: mol_type = other DNA
aaaaaaaaagaaagtccagagttatcctttcaaacactgtcatcagttgtaagaggaagagagatggattgcagtgccttgatgccgtatgtcagaactgactgactggaagtaactaag

SEQ ID NO: 31254 - DNA, 120 bp, synthetic construct
  source 1..120: mol_type = other DNA
ttgagatgagtatttcagtaaatctgattgcagtaggtagaaaagaaatgggaagataagagaatcaatgtgaatagaatgcatatttgaaaagtttggcagatagattagaccattaac

SEQ ID NO: 31255 - DNA, 120 bp, synthetic construct
  source 1..120: mol_type = other DNA
gagataaagggaaggaaagaacgggagagagaggaagggagggagaaagactgagagaggaagcaagggagaaagcgagagaggaaggaagagagaaagggagaggaaagaaagaaggga

SEQ ID NO: 31256 - DNA, 120 bp, synthetic construct
  source 1..120: mol_type = other DNA
aggctgtgctaactttccagattacatgaggcccaagagacatgaaaacgaagttaaccttctgcccccaactgcatccagtattggaagagaaagtacattattagatcaactgacaga

SEQ ID NO: 31257 - DNA, 120 bp, synthetic construct
  source 1..120: mol_type = other DNA
gcaccttattacaacttacatcgccacctcgtgatacttgccaatttcccctttttgcagagagagaagggaaacattgggcaggctaacgttttaataacattgtttggttttcactgt

SEQ ID NO: 31258 - DNA, 120 bp, synthetic construct
  source 1..120: mol_type = other DNA
attaatgtgttaatatatgacctcaaatctacagaaacaaacaacaaaaaaaagcagcctcacatagcaattatggcctcgtttgattgacagatatctgtgggtttgtttttctgtctg

SEQ ID NO: 31259 - DNA, 120 bp, synthetic construct
  source 1..120: mol_type = other DNA
ggggaatagagaaatgctttctgtgatacctaccatggggaagcaagcaggcaaacccagaatttgggatacactaaggacagctgatgtggcttcttaaatatatgagtgtgtttttta

SEQ ID NO: 31260 - DNA, 120 bp, synthetic construct
  source 1..120: mol_type = other DNA
tctagaactaccctctggactccagatccccataacaaactgtctacttgttatcgccacttgtgtgtcaacgtaatgctttctaaaatgaaagtttgattattgccaccccctgtaaac

SEQ ID NO: 31261 - DNA, 120 bp, synthetic construct
  source 1..120: mol_type = other DNA
agcacctgacctacagtgatcactgagcctgtgcttgttggtgtttctgagcttttcacaaaggatagtactttgtttactcgccaaatttttccatcatcagactgcatttgttaattg

SEQ ID NO: 31262 - DNA, 120 bp, synthetic construct
  source 1..120: mol_type = other DNA
tccttctgctaaagcattacctcaccaagccccttcttggtcagtcacttacactgtagtataaatttcattgtcagatcaatgcctctactgcagtcagttaagagtagactcaggaaa

SEQ ID NO: 31263 - DNA, 120 bp, synthetic construct
  source 1..120: mol_type = other DNA
ctgcaacccccatatcacaccccgcagcccccatatcacaccctgtagcccccatatcatatcctgcaacccccatagcacaccctgtagcccccatatcatgccctgcaacccccatat

SEQ ID NO: 31264 - DNA, 120 bp, synthetic construct
  source 1..120: mol_type = other DNA
ccaagataatgtcccagttgcagttccagcagaatcgatattaatatgtatcaatggacaattgggccttcagtggcaagtgcctcagacagctttcaccaaggggtacattaaaaaaaa

SEQ ID NO: 31265 - DNA, 120 bp, synthetic construct
  source 1..120: mol_type = other DNA
cagtctgtgggccactcttttggaatgtatttttgaggctggaactcagatctgagtcgaatcctatgactccttaccttgctcatctatttattaccttgtgaattcctgattttaatc

SEQ ID NO: 31266 - DNA, 120 bp, synthetic construct
  source 1..120: mol_type = other DNA
ggaggttcagagcactttctgcaacccaccccatgtttcagtaagataagttaggaatggcatatttccatgatacactttagacaaccagagtactcgaagattgatgcttaacttgca

SEQ ID NO: 31267 - DNA, 120 bp, synthetic construct
  source 1..120: mol_type = other DNA
acgcacgtgtgggggagaggtctccatgacaccacggccgtacttaaatacaactcataaggaagtaaatctgaggagcaaacagagtaagtttttgtgttttctgtttgtgttttaaaa

SEQ ID NO: 31268 - DNA, 120 bp, synthetic construct
  source 1..120: mol_type = other DNA
ggaaaataaaaatcaagaaaatcccccccccacccccccccccaccaaagtagaacaaagatacagtaaaattggagacaaaagaaaaatctgaggaggaattcaagatgtcagtgcttc

SEQ ID NO: 31269 - DNA, 120 bp, synthetic construct
  source 1..120: mol_type = other DNA
gcaactagaatgctcatatattgcagtgggaatgcaaatgcttctgacactctggaaaacagtggacagtctctcataaagttaaacatactctccacatatgacccatagttccctttc

SEQ ID NO: 31270 - DNA, 120 bp, synthetic construct
  source 1..120: mol_type = other DNA
caataatatcttatacagtcatgcaccaatcaacaacggggatacattctgagaaatgtgtcgttaggcgatttcatcattgtacgagcatcacagagtgagttacacatgcctagatgg

SEQ ID NO: 31271 - DNA, 120 bp, synthetic construct
  source 1..120: mol_type = other DNA
taccacacacctaggctatacggcatagcctgttgctcctaggctacaaacctgtacagtacaatactgtactgaatacagtaggcagttgtaacacagtggtaagtatttgtgaatcta

SEQ ID NO: 31272 - DNA, 120 bp, synthetic construct
  source 1..120: mol_type = other DNA
ccactgggcaataacccaagtgaaagtcctctctgttcacatcacagggaatcactcttcctttcctaatactgtgtcctctgaatatatgcactacaccaagaaaatcagatcatatat

SEQ ID NO: 31273 - DNA, 120 bp, synthetic construct
  source 1..120: mol_type = other DNA
atccatggcaggacttagaactctactccgaatcagcacctaggagacatacacacttgctttaaaaatagattaagtgatcaaaccagaatctgaaattccctctttaaagctattttc

SEQ ID NO: 31274 - DNA, 120 bp, synthetic construct
  source 1..120: mol_type = other DNA
gtgtgtgtgactgtggtggggttgttgccttgctgagtgtgggtggtggttgccttgctctgtgtgtgtgtgtgactgtggtggggttgttgccttgctgtgtgagtgtgggtggtggtt

SEQ ID NO: 31275 - DNA, 120 bp, synthetic construct
  source 1..120: mol_type = other DNA
tatgagtgggagtgtagggtggttgccctgctgggtatgagtgtgagtgtggggtggttgccttgctgtgtgtgagtgtgagtgtgggaggtggttgccttgctgtgtgtgtgtgtgaat

SEQ ID NO: 31276 - DNA, 120 bp, synthetic construct
  source 1..120: mol_type = other DNA
caaatgtatgctgtcttcagtgtcattgcatgtgagacccatcactcataggttcaaagtaaaggctcaaagaaagatctgccaagcaaatgagaaacaaaaaagcaggggttgccattc

SEQ ID NO: 31277 - DNA, 120 bp, synthetic construct
  source 1..120: mol_type = other DNA
ggttgccaaatcagtgttctgtgggtggacgaaggctggggatcttctacttagccatcttacagatgttctgcttcatttgttctttgatttctttttcttctttttttcaagtagatg

SEQ ID NO: 31278 - DNA, 120 bp, synthetic construct
  source 1..120: mol_type = other DNA
tcagaacaatattgccctaaaatctcaatggttaagatatggtcaggtatttataacaactagcacagcagtaaaaaaaccaaaggggttatctctagatctatatgtttcagataaaga

SEQ ID NO: 31279 - DNA, 120 bp, synthetic construct
  source 1..120: mol_type = other DNA
aattttcttggccccaggaaatggacttatctgatggagagtttggaaagaaccaggcatgataagttagccactcttcagctctacagctcctcctagtgagcctacttgtagaaagcg

SEQ ID NO: 31280 - DNA, 120 bp, synthetic construct
  source 1..120: mol_type = other DNA
atcagacccgcagacagaaacagcgcctttttatgggaagggagctaagattgtagattatatacaccttggaggaaataggccaatttctaaaatcctttaaagggattgtcctcccct

SEQ ID NO: 31281 - DNA, 120 bp, synthetic construct
  source 1..120: mol_type = other DNA
gcctctaatatactacctctggcttctttgcttctgtagatgagtaacagtttggtggccgtttcagctctcaatctttttgttgttgtttgttattgttttgtatttaaactaggctat

SEQ ID NO: 31282 - DNA, 120 bp, synthetic construct
  source 1..120: mol_type = other DNA
taattcagattcagattcatattcttcattcatgaggaaggaaatttcttcccagatattcacatttattttcagacttactgacagaagtatatacatatagagcaaaagaagagaggc

SEQ ID NO: 31283 - DNA, 120 bp, synthetic construct
  source 1..120: mol_type = other DNA
ggtgtaaaaatgtctttaacaaaactcttcatgatctagccactcaatttttcttaaaagaaattttatgacataaaagttatataggagttataaaatttctaagattatcagaatgct

SEQ ID NO: 31284 - DNA, 120 bp, synthetic construct
  source 1..120: mol_type = other DNA
ccttagtttccacaatatataattagaagattctgagaaaaaagtctggcagaaatcagagttatcgtttttgtatgcatatctccacctatggattgattaaaaacaacattgacccag

SEQ ID NO: 31285 - DNA, 120 bp, synthetic construct
  source 1..120: mol_type = other DNA
atcctaagcaaaaagagcaacactggaggcatcatcctacttgcctccaaattatactataaggccacagtaactaaaatggcatgggactggtacaaaagcagacacatgaaccacttg

SEQ ID NO: 31286 - DNA, 120 bp, synthetic construct
  source 1..120: mol_type = other DNA
tgaattggggtctgagttcggatggccacagcataattatctcagtagacctcttccggtctaggcgtcccaatagacttctacaatcattcaccatcttaccttttggtattaaagtca

SEQ ID NO: 31287 - DNA, 120 bp, synthetic construct
  source 1..120: mol_type = other DNA
gggattacaaggcgtgagccgctgcgcccggccctgaggtgttcttaatcacatccgaaaggtggatacatttaattcacattgaaaacaaatattttttcatcgttattgatcctttgt

SEQ ID NO: 31288 - DNA, 120 bp, synthetic construct
  source 1..120: mol_type = other DNA
gctattatgaatggaattttgttcttggtgtggctcacagcttggtgtatagaaatgatattgattttttatacattgatttttcatcctgcaactttactgagtatcaggtctatggcc

SEQ ID NO: 31289 - DNA, 120 bp, synthetic construct
  source 1..120: mol_type = other DNA
tgtttccattcttcacagagaagcagcaggcttgaaaataatgcccagattcttaacaccaatgccagaagaaacagaatggacctcattcatgaaaaattggtctgcctgttgactccc

SEQ ID NO: 31290 - DNA, 120 bp, synthetic construct
  source 1..120: mol_type = other DNA
agacattaccagaaatgaaaactagtccagtattctttataaataaagatacaaaaattcttaacaaaatactttaaaatggaatctagcaatacattagaaggattatacaccacaacc

SEQ ID NO: 31291 - DNA, 120 bp, synthetic construct
  source 1..120: mol_type = other DNA
gtccgctgagtctacaaaatatttttgaaagaaaaagaagacccaagtgaatggaaagatttctcatgctcatgagttggaagatttaatataatttaactgaaaatacttcccaaattg

SEQ ID NO: 31292 - DNA, 120 bp, synthetic construct
  source 1..120: mol_type = other DNA
tgtggagaaattggattctcatacatttctgatggaaacataaaatggtggaggtagtttgaaaaacaggttggcatttcttaaagaattaaaaatagagtcaccatataacccagcaat

SEQ ID NO: 31293 - DNA, 120 bp, synthetic construct
  source 1..120: mol_type = other DNA
gttaatggttttgcatatttaaagatgcttccttttttcctgttacttttatttgtgcattttattttctttgtaattcatactgcaaagactgagatgtttctgttttctattattatt

SEQ ID NO: 31294 - DNA, 120 bp, synthetic construct
  source 1..120: mol_type = other DNA
attgctgggttatatgctaactctatttttaattctttgaaaactgccaacctgtttttcaaactgcttccaccattttggtggtttaaggctctattttttgtgctgatgggcctcctg

SEQ ID NO: 31295 - DNA, 120 bp, synthetic construct
  source 1..120: mol_type = other DNA
tttagttctgagttggttcagtagtttatacttctatgatttcttcagctataatcagcatcactgatgtctgtgagctcctcagtgtcttagccttcattgttaatggaggctgtggtg

SEQ ID NO: 31296 - DNA, 120 bp, synthetic construct
  source 1..120: mol_type = other DNA
aatgacagacagcagtgtgggttgatccccagcgtcctggacaacgaccttgggtagtggtagtgacagcaatgggtgggatgggcctgtgctctggccctggaatagtgctcaggcagg

SEQ ID NO: 31297 - DNA, 120 bp, synthetic construct
  source 1..120: mol_type = other DNA
tcactaagtttgttgtaatttgtgatagcagccataggaagccaatacagtgttttaaaagatggcagaaaatgctgaatgattatgcccagtgaaagctgggaactgaaggaattccct

SEQ ID NO: 31298 - DNA, 120 bp, synthetic construct
  source 1..120: mol_type = other DNA
ccctacatggatttctgtttcgaggcaaaagtcctgacaggagccatttggacgttcacagatctccttgaatttgcccctggctacagcagaagagggttattgtaagcattcatcagt

SEQ ID NO: 31299 - DNA, 120 bp, synthetic construct
  source 1..120: mol_type = other DNA
ttagattgaaaagtgttttaattctgagcagtctttgtatgtaacacagagcaccttttccatgacaacttcttggcaataagagaagtataaaaaccagcaccttttttttttttctat

SEQ ID NO: 31300 - DNA, 120 bp, synthetic construct
  source 1..120: mol_type = other DNA
accatttgacccactaatctcactactgggtgtatatccaaaggaaagtaaatcagtcttgtaaaaagacctaaatttgtatgttcatcacagtggtattcacagtagtgaaggtatgga

SEQ ID NO: 31301 - DNA, 120 bp, synthetic construct
  source 1..120: mol_type = other DNA
atcctgtgttttcttctccagtcttgttgcatcccatttttgactgtgagtcgtgcttccgcctgtgctggtctatccaattagttgcttctatttttattgagtgacagtgaaaacaaa

SEQ ID NO: 31302 - DNA, 120 bp, synthetic construct
  source 1..120: mol_type = other DNA
gccttgtgtgttagattagtgaatgtatatttgtctcatccactgctgtatgaacttcttgcttgctaggacaaggctatattcctcagaactgaggagggagttgaatcatgtggctat

SEQ ID NO: 31303 - DNA, 120 bp, synthetic construct
  source 1..120: mol_type = other DNA
tctacccctccttttaaggtttttaaccaacccctcttgtttttttttcaccgactttgttgagctatgatgacatttaaaaagctgtacatatttaaggtgtacatctcagtgagcttg

SEQ ID NO: 31304 - DNA, 120 bp, synthetic construct
  source 1..120: mol_type = other DNA
cactctaacattgatgggcatctaggttgattccatgtctttgctatacgaccttggggaaagagagtcttgctgcttgcttgtgggacttgccttggaaggtagataagttcactgcat

SEQ ID NO: 31305 - DNA, 120 bp, synthetic construct
  source 1..120: mol_type = other DNA
tctcataatctgtgttcactatttgtgtgccttttccacttttgttttgaccatatctcattatttgaactgcctcctccaagattctagatctgcattggccaatatagtaactactag

SEQ ID NO: 31306 - DNA, 120 bp, synthetic construct
  source 1..120: mol_type = other DNA
ttccaattatagtgtaatctgatatatattcgttctggtttcatactttaaaaaaatctattctcttttactctgtggtgatctttgcttttctattttttcattgctagaatgtgagct

SEQ ID NO: 31307 - DNA, 120 bp, synthetic construct
  source 1..120: mol_type = other DNA
aaattttagacctataacataagtttttaaaagtttctcctaaagattgcttgtgtatgtatgtggtttaaaatatatttaatctctacatcttgaaatcgttttgatagattccacaca

SEQ ID NO: 31308 - DNA, 120 bp, synthetic construct
  source 1..120: mol_type = other DNA
tacaaaagtcagagttgagtgaaaataaaagtggagtaaagcttcagaaggctgtggtgggtgttggagaaacgttgctagggcataaagctaggataataaaatctgagaaatcccagt

SEQ ID NO: 31309 - DNA, 120 bp, synthetic construct
  source 1..120: mol_type = other DNA
agagcaagtgcatatacattgctcatgcccagacattgaaagatattgatatcatcacaattatgcaataactctgcagttgagatcttacagaagagaacatacctgtgtctgcaggag

SEQ ID NO: 31310 - DNA, 120 bp, synthetic construct
  source 1..120: mol_type = other DNA
tttttctgtgaatgaacattcagccaagcaccaggcttgatgttcacaagagaagagtgacaaaatgctgctaaaatggaaaataagagaggaaagccttcataagctaaataacaaggg

SEQ ID NO: 31311 - DNA, 120 bp, synthetic construct
  source 1..120: mol_type = other DNA
gaagtagcagttcatctcatgacaccccacattttattcaggtgagtcctgagttattacacagagacagacacagctgtgctccttttactgcagtccagaagataaaacaccagcatg

SEQ ID NO: 31312 - DNA, 120 bp, synthetic construct
  source 1..120: mol_type = other DNA
agaaagtactgaataatccacacctgaatttcagtgattcagactcaggtccaccgctaagaccaaacgtcctgtgctgccacctcatggccagcagagggcaatgaaacccacctttcc

SEQ ID NO: 31313 - DNA, 120 bp, synthetic construct
  source 1..120: mol_type = other DNA
ctccaggacagctgtgtgtgtatatgtctgtagaacatgccttgtagtcatctttggtaactgaacaccatttgtgaatggataaactatattcattgctgtacaataatgaaaaatcca

SEQ ID NO: 31314 - DNA, 120 bp, synthetic construct
  source 1..120: mol_type = other DNA
agagacactgggcagacagatacacacacgcctcctgagtctcagaagtctggtgtgcatcgaacattaagcccctagcctactgagacttcacctcccagctgctcttctaccatctga

SEQ ID NO: 31315 - DNA, 120 bp, synthetic construct
  source 1..120: mol_type = other DNA
tgtgctctggaggctgtggcaaggcaggcgcggcttggaacccgcaccatgtgctctgggggctgtggcaaggcaggggcagcttggaacctgcgccatgtgctctgggggctgtgccag

SEQ ID NO: 31316 - DNA, 120 bp, synthetic construct
  source 1..120: mol_type = other DNA
agcagaacagttggagtctgagggctttttcctggcaggattctccagctagtctttgttttagacagtcttgctccgttgcccaggctggagtgcacgatctcagttcatgcaacctcc

SEQ ID NO: 31317 - DNA, 120 bp, synthetic construct
  source 1..120: mol_type = other DNA
gggccttatccaattttcactcccctcgggggatgttgtctcactgtgctgggaggatttgtgttcccagggcagagaccagcactctgacccacccctcttgcctagcagggttggtgg

SEQ ID NO: 31318 - DNA, 120 bp, synthetic construct
  source 1..120: mol_type = other DNA
aacatgcaaaagtaattcttcagtacttgaagagcatccagcacagaaggtacaaaccttccttaaggctccctcctcaaatcggtttggtcattttgatgtgcacccccccaggccttt

SEQ ID NO: 31319 - DNA, 120 bp, synthetic construct
  source 1..120: mol_type = other DNA
cagtttagcaaggctgaaaagaacacccacacccccttgttacccacagatgggtgggactgtgttggccagaggccgagaggagggtgctcacaggggaacgtacagcatgtagaggcc

SEQ ID NO: 31320 - DNA, 120 bp, synthetic construct
  source 1..120: mol_type = other DNA
gttctgttccaccagagaggggactgagtgtgctcacaggggtgaggggttttcggtggcccagccaaacagcaccttctctcaagggccctgacctcgtaccagaagtggttgttttcc

SEQ ID NO: 31321 - DNA, 120 bp, synthetic construct
  source 1..120: mol_type = other DNA
cataccaacagttgcacgggcctcaagggtgtcacgcggcatgaaagacactcatctcaggccacacaggattccatctattgaacattcctgagacaacggaattctggcgatggagca

SEQ ID NO: 31322 - DNA, 120 bp, synthetic construct
  source 1..120: mol_type = other DNA
tgactgacggcgggtgcttcacacacacaggatgcctcacagtctacggcaaaggacagaacgttggttgcttgagagcccgtcttaagtctcctatgagcttcaagccaacacagcaga

SEQ ID NO: 31323 - DNA, 120 bp, synthetic construct
  source 1..120: mol_type = other DNA
cagaatctgatgagtctcttaactttgcctctaagctctgtgtggatgggagagagagaaatctcaagggcccattcacaggaacattaaacacgcaatagaatgtgttggcaaagctct

SEQ ID NO: 31324 - DNA, 120 bp, synthetic construct
  source 1..120: mol_type = other DNA
gcgagtgcagctgtgtcccagtgaccagaacgattactgcctttaaaaagtcgtgaaaatgatcgtgaaccgtaccccacacggagcgcgcgtctaccccctaaggcggtggagacgccc

SEQ ID NO: 31325 - DNA, 120 bp, synthetic construct
  source 1..120: mol_type = other DNA
gttgactatgtcgtagaacatggccaggcggtgcgcggactctgggaggcgaagcttaggacgggcccacttggggaggggcccagtgcccgggaggcggggccgagtccgggctgggct

SEQ ID NO: 31326 - DNA, 120 bp, synthetic construct
  source 1..120: mol_type = other DNA
agttagcaacacagcttagatttcagtactgctcctgaaatctgaactgtgttcaaagtctaaaacgtttaccttagcaaattcctcatcaaactccatttggaagagtcccgagagcta

SEQ ID NO: 31327 - DNA, 120 bp, synthetic construct
  source 1..120: mol_type = other DNA
tcgagaccagcctggccaataataacaataaaaaagcctttttagattccaagccactgaaagaaaactgtcccttagttaatgtcatgcttattggatccatgaagtctttgaaaattt

SEQ ID NO: 31328 - DNA, 120 bp, synthetic construct
  source 1..120: mol_type = other DNA
gtggccgtttcagctctcaatctttttgttgttgtttgttattgttttgtatttaaactaggctatcattattgtttctctactctgtagaaatagatccatagccagaaaaaccaatgc

SEQ ID NO: 31329 - DNA, 120 bp, synthetic construct
  source 1..120: mol_type = other DNA
cttggtcctgatacgtctctagagctgcatcttccagcttcgagtgagcagagcagttggagtctgagggccttttcctggcaggattctccagctagtctttgttttagacagtcttgc

SEQ ID NO: 31330 - DNA, 120 bp, synthetic construct
  source 1..120: mol_type = other DNA
tgcagaaagaaaatgctatttttggagctagaattttcatgtctgatttatgatgattttcttgagaaccagaactgctggcagaaagggggcacccacacgcctagacagctaatgtct

SEQ ID NO: 31331 - DNA, 120 bp, synthetic construct
  source 1..120: mol_type = other DNA
ccacatctggctagtttctgtatgttttgtgaagatggggtcccactatgtggcccaagttggtcttgaacacttggggtcaagtagtcctcctgctttagcttcctaaagtgctgggat

SEQ ID NO: 31332 - DNA, 120 bp, synthetic construct
  source 1..120: mol_type = other DNA
ctcaccggcctctgcccgagttccccgcatagtgtgggagtgtggagcatcctagcttttccccagcgcccagttctttcacttccactggagtcctgcagggacagctcgggcaccatg

SEQ ID NO: 31333 - DNA, 120 bp, synthetic construct
  source 1..120: mol_type = other DNA
ggagggtgcctttctcataccagcaaatagctccggtggccctgggtggactccttggccatcagagtctccgcgagcacctcgtacagtttgtccaaaggctccgtgtggacagcctcg

SEQ ID NO: 31334 - DNA, 120 bp, synthetic construct
  source 1..120: mol_type = other DNA
gtactgccgatccatggtgcctggctcacggaaggcatttattaaacattttgagactgaagaaaacactagctaacaccgacacgcatttaccatgagccaggcactgatccgcaggca

SEQ ID NO: 31335 - DNA, 120 bp, synthetic construct
  source 1..120: mol_type = other DNA
gtctctttaagaacagtaatgacaacctaaggcagtttaacagtatggaatggttaccttttagaagttaagctatgggcatggaagttcaatcagtgcattgaagtttttcctttatct

SEQ ID NO: 31336 - DNA, 120 bp, synthetic construct
  source 1..120: mol_type = other DNA
atgtagcaaggaaatttatgtaattagtgaagcaggcagagataggagttttggcttcatattcaaattccactccatgagcccaaggtggagagtgttttgttatctacccacgtggga

SEQ ID NO: 31337 - DNA, 120 bp, synthetic construct
  source 1..120: mol_type = other DNA
cagattcatttcgtttgtttgtttatgaaccatttgttttaaactctaaatattctcctctttgcaccaatacaagtggaactccagccaagaaataaattgcgtgctgggtgctgtggc

SEQ ID NO: 31338 - DNA, 120 bp, synthetic construct
  source 1..120: mol_type = other DNA
ctaggacagctatcataatttgagaaaaggaaaatcacaagtattggtgaggaggtagagaaactggttcacgcattgctaatgggaatgtaaaaatgatgaagtcttttgaaatagttt

SEQ ID NO: 31339 - DNA, 120 bp, synthetic construct
  source 1..120: mol_type = other DNA
ctttgctaagacctcagaaatacctgagatgatacttcagagaactattcaggcagttctaagtcctctagaatttttgaaagatacttcacagatcccatacattaaaaagtagggctt

SEQ ID NO: 31340 - DNA, 120 bp, synthetic construct
  source 1..120: mol_type = other DNA
atgagttcatagtcacaacctcactttttcctcacaaaaccctatcaggcaatttaatcctcattttatagaagaaatgagaaataggtaagtgactggcccaagacagaatgagcatct

SEQ ID NO: 31341 - DNA, 120 bp, synthetic construct
  source 1..120: mol_type = other DNA
agtgctagggttacagaggtgcatcagcatgtcaggctgccactttttatttctaatattatttgtttcttctttcttaccttgatggaggttgacatattcatttatctgtagagtttt

SEQ ID NO: 31342 - DNA, 120 bp, synthetic construct
  source 1..120: mol_type = other DNA
tgtgtgtgtgtgtgtgtgtgtgtgtgtgaatgcagagtatagcatctcactggggagtacttgacccgtgtgtgtgtgtgtgtatgtgtactgacacatttacaaaataaaattccaatc

SEQ ID NO: 31343 - DNA, 120 bp, synthetic construct
  source 1..120: mol_type = other DNA
gttgagaaggcaatggatagtttacttaatttaaaagagaaatagacttgttagaatggaaagtttagtccgggcgtggtggctgacacctgcaatctcggcagtttggaaggctgaggt

SEQ ID NO: 31344 - DNA, 120 bp, synthetic construct
  source 1..120: mol_type = other DNA
tagcatacaggcaaaggcagagagcaggtttataaccttagaaaacgttcagcaagaagcttaaccatcatcacatcatatatttagctgtgtcttcctgtttgattccaaaacgtgcta

SEQ ID NO: 31345 - DNA, 120 bp, synthetic construct
  source 1..120: mol_type = other DNA
cttgaatctgtcactatggataagcaagcccaacgtagacagatgtttataaaaccaaggataaattcttggatgatgtcaatgggttgggaaaatatcttttatgtgttcagggatgtt

SEQ ID NO: 31346 - DNA, 120 bp, synthetic construct
  source 1..120: mol_type = other DNA
caaaccataatatgtgaagtcctaacaatcagtggaacatggtttggaaaccaacaattcactataagcaggccagtttcaccctgtacgctgacctccctgtgtaattaatggaaggaa

SEQ ID NO: 31347 - DNA, 120 bp, synthetic construct
  source 1..120: mol_type = other DNA
aattaacatcgctaggctattagtagttacgtttggggggagttaaaatttataggaaaattttcaactatgtgggggatcagcacccctaaccctgttgttgaagggtctactgcacat

SEQ ID NO: 31348 - DNA, 120 bp, synthetic construct
  source 1..120: mol_type = other DNA
ctcaaaacaaaaaaagaaaataggtttaattgactcccagttctgcatgcttaacaagaagcatgaccggaacgcctcaagaaaattacaatcatggcagaaggtgaaggggaggcttat

SEQ ID NO: 31349 - DNA, 120 bp, synthetic construct
  source 1..120: mol_type = other DNA
aaatggtattttgaagatttgtacattttacattatttcagtggccataaatgtaattatgaaaccttaacaacagttcatttcccaaggcttttactcactttaaagaaaaaaaaaata

SEQ ID NO: 31350 - DNA, 120 bp, synthetic construct
  source 1..120: mol_type = other DNA
gttggaatttgaagctctaactctttaattataatcccatagcctgagccaagttgtgggactcctatactagaaaccaggttgtagctagcaatggtagaagcaaacacactgatgcgt

SEQ ID NO: 31351 - DNA, 120 bp, synthetic construct
  source 1..120: mol_type = other DNA
tcagctccaactactgctcaggaatcgatcagcataaaaaacaaaagaacctcaaatctacgtctataaaagactgaatggtgggctaattcacaaatactttttttggtgatttggttt

SEQ ID NO: 31352 - DNA, 120 bp, synthetic construct
  source 1..120: mol_type = other DNA
caactaatggctgtggacgcaaacccaggagattttagtaaactatacatagcctatacatatacaatttaacaatgcttagaactttaggaaattatataagttcacaggagtatgcta

SEQ ID NO: 31353 - DNA, 120 bp, synthetic construct
  source 1..120: mol_type = other DNA
aaacaagaaagtgcctttgttcctggtcgtgggttttccaacaagattattaataccattacgtatccagatggggaaagctgagccatatgatcaacatttcaaactcttctggctgcc

SEQ ID NO: 31354 - DNA, 120 bp, synthetic construct
  source 1..120: mol_type = other DNA
tacatgggctctttaacacagggttacatcctgataaacccattgtaggctgaggattttgcaatctgaaagtgcgtcccttttcaacttaagatgggtttattgagacttgaccccatt

SEQ ID NO: 31355 - DNA, 120 bp, synthetic construct
  source 1..120: mol_type = other DNA
gattaaggaatggctagaaagctagtaaagcattctttctggatatgtctgtaagggcgtttccggaggagattggcatgtgagttgccagactgaggggggagatctacaatcaatgtg

SEQ ID NO: 31356 - DNA, 120 bp, synthetic construct
  source 1..120: mol_type = other DNA
tatactcccaaaaccagtgttacccttgaattttacctctcacccatcctcctcatccaatctactcccaaaactagtattgccattgatatttacccctcacccatcctcctcattcaa

SEQ ID NO: 31357 - DNA, 120 bp, synthetic construct
  source 1..120: mol_type = other DNA
atccaatctactcccaaatctactcccaaaaccaatgttacccttgatatttaccccccacccatcctcctccttcaatctacccccaaaactagtgttacccttgatatttacctcacc

SEQ ID NO: 31358 - DNA, 120 bp, synthetic construct
  source 1..120: mol_type = other DNA
tttcctccctgccttctggatctttcctttctgggatttcttccacacatttctactggctatgattgacccaatcgttgttccctagttcttcaagccaccaaaaatgagaaatgttat

SEQ ID NO: 31359 - DNA, 120 bp, synthetic construct
  source 1..120: mol_type = other DNA
aactggtgttgtaagctttaactcacgacttggaaacctgtctatagccttgaatatgaagtactgattctttatgtagaagtaacagccccacattaaaaagcagagcaggaaaggagg

SEQ ID NO: 31360 - DNA, 120 bp, synthetic construct
  source 1..120: mol_type = other DNA
tacttctttctgaaaaccatggcttacaaaaacacatgggtttaacccatctattaacacatctcctagtctcactatgtctgacactaggagaattaacccatctccttggggctcagt

SEQ ID NO: 31361 - DNA, 120 bp, synthetic construct
  source 1..120: mol_type = other DNA
tagcaggttgacattcactttttttttttttgactaagtctcgctcagtcacccaggcttcagtgcagtggagccaccttggctcactgcaaccacctcccgggttcaagcgattctcct

SEQ ID NO: 31362 - DNA, 120 bp, synthetic construct
  source 1..120: mol_type = other DNA
ttgatcctcttcctttttgaataaagtggatatcaagcctgttgtagatgatttgcatgcaatctcagatgtggtatgtgtcgaatagtacatctcggtctcacctgtagggacacctag

SEQ ID NO: 31363 - DNA, 120 bp, synthetic construct
  source 1..120: mol_type = other DNA
aaggagtgacttcctaaccaatacacttggtcttggagtctattaaaaaatcttcctgggatagaattttacctttatcaacatgcgtagaaacattttcataatgcgctttactgcttc

SEQ ID NO: 31364 - DNA, 120 bp, synthetic construct
  source 1..120: mol_type = other DNA
agagtggtgtggtagaggtcaaaggaatcctagacttggagttctaagaaactacttcaagttctcaccttcacagtcactcataactttgcatcacaaatatcttagtttttccatctg

SEQ ID NO: 31365 - DNA, 120 bp, synthetic construct
  source 1..120: mol_type = other DNA
tagcgtaggctgtacttctcccagcccccggaagtaaatatacattgttcttagctaatcatgggggcttctccaactttgccaagtcataggtttagttatgagcataggatgtaattt

SEQ ID NO: 31366 - DNA, 120 bp, synthetic construct
  source 1..120: mol_type = other DNA
gcaatgaatcagagtttttgaatgatgtgtgcagaattcttgcttgtttatgagagactgaattattagttcactagttgatgaactggttttcttttggtaggtaattaagaatcctct

SEQ ID NO: 31367 - DNA, 120 bp, synthetic construct
  source 1..120: mol_type = other DNA
agattcccaggggaatgtaggattatggtatcctgtatctttcaccagtatacctctttcttttctccacctcgattttctcctttaaagcgttcaggctagtcaacccatacaagaatg

SEQ ID NO: 31368 - DNA, 120 bp, synthetic construct
  source 1..120: mol_type = other DNA
cggttatacattccactccaaaacctggaaaggatggcaaagcgtcgtgataccaccttatcacagtctgaaaattcacatcctcaagtcttctaaggtatctatgataccacagtctta

SEQ ID NO: 31369 - DNA, 120 bp, synthetic construct
  source 1..120: mol_type = other DNA
aagagtgggaacattggaaattgtctagaaacttctcagatgttacagtttctcacctttggtagctttaaaaagtgttacctaggctagccatatgtagaaagctgaaactggatccct

SEQ ID NO: 31370 - DNA, 120 bp, synthetic construct
  source 1..120: mol_type = other DNA
ggctgtgattggtagaaaataactgtctctggggaatagtgttttccggcatcctggtaccaggcacttgattatcaaacgtgttggtcatacttacaggacattgatgattttcaatag

SEQ ID NO: 31371 - DNA, 120 bp, synthetic construct
  source 1..120: mol_type = other DNA
catggcaaagagcccccaaatctgtcacctccaaaatggaagtctcttttaccatttctaaggccaagtgagcaagaaaaagtcatgattaatgtcatcatggaaaattgccccatatcc

SEQ ID NO: 31372 - DNA, 120 bp, synthetic construct
  source 1..120: mol_type = other DNA
cattctctgtaatattgaagaaatgctaagcattaagaaacttgctttgaaattctggtctccatcattcattatagtaaaccattatttcttctgcacatctggcttacagtaaagttg

SEQ ID NO: 31373 - DNA, 120 bp, synthetic construct
  source 1..120: mol_type = other DNA
tctgactttacagctgagaggaaaaagtcagctgatcgtgtccagattattccatgtaaaaacagaaacacgtagccttgttctgggcaattgcaacagttcctaaatggccttactatc

SEQ ID NO: 31374 - DNA, 120 bp, synthetic construct
  source 1..120: mol_type = other DNA
tttcccccctttcttggcacaacattctccctgtttgtattaaatctaagtaactttttggaaaattgcttatcaagtgccttagtctgcttctgagctctggccactgcaggaattgga

SEQ ID NO: 31375 - DNA, 120 bp, synthetic construct
  source 1..120: mol_type = other DNA
accaagatgaattacggagaggtagaaaatctgaatggatctgtaataataaggggattgaatctgtaatgaaaaccctcccaacaaaggaaagtttaggagcagatggcttcaccagtg

SEQ ID NO: 31376 - DNA, 120 bp, synthetic construct
  source 1..120: mol_type = other DNA
agaaaacccaaagattccccaaaaacctattagaataaataaattcagcaaagttgcaggatacaaaatcaaccatcagttccatttctatatgctaacaatgaacaatctgaaaaggaa

SEQ ID NO: 31377 - DNA, 120 bp, synthetic construct
  source 1..120: mol_type = other DNA
catagaaacattcaacaaagtcaattaaaaaccagctaccacaggtgcacatagaaagaacacttagactttgatgacagggaaggcttctcagaggaagggacagctaacggaagactt

SEQ ID NO: 31378 - DNA, 120 bp, synthetic construct
  source 1..120: mol_type = other DNA
gaggagtgaacactggacacaggctccagaagcctaaaccgaaaacctgaaaaccataggcacaggccaaatatcttattttacaaatgaggaaactcaggcacaaagtgaaatgatcac

SEQ ID NO: 31379 - DNA, 120 bp, synthetic construct
  source 1..120: mol_type = other DNA
ggacaaaggggcaatgaggaaaccagtctaccagcagaatctctaataggaagctctaaataattcaatacttaatatatttccttcaatactgtcaccaccagcatccgagccaccatc

SEQ ID NO: 31380 - DNA, 120 bp, synthetic construct
  source 1..120: mol_type = other DNA
ggtagatggcaatgggaaagtgggatagaaaacaattgggttcatgtcatatcaaaatctacagtctagatgtctcttcagaatgaaattatgggacggccaataactgaccttccaccc

SEQ ID NO: 31381 - DNA, 120 bp, synthetic construct
  source 1..120: mol_type = other DNA
cacatggcatgagagaaatccgatcaaaagaagaataacaaaataaaagacccaacacctagcacagtgaatgaatccggcctaggagccagacaacttgaattctactacggtatctgt

SEQ ID NO: 31382 - DNA, 120 bp, synthetic construct
  source 1..120: mol_type = other DNA
gctcaagcagccatccaaggactacctgaatcgggatcatccgagagctcattcaatactagatttctgagtcaaacagaatcagaattactggagtgaggttcaagaatctgaattttt

SEQ ID NO: 31383 - DNA, 120 bp, synthetic construct
  source 1..120: mol_type = other DNA
cattaattacttgtgtggctttaggcagtcacatgactctgtccttctgtccctgatctgtataatgcagatcagtagggttgttcctgcctcaatatgtgcatgtaatttgttggtaat

SEQ ID NO: 31384 - DNA, 120 bp, synthetic construct
  source 1..120: mol_type = other DNA
ggttggccattccaactatctgtatttgtattcatcttatcgggacaacaaggaaatttaaacatgcagtaaatcaaaactctgatgcaaggcacctcaggtccaatctgccacagtcct

SEQ ID NO: 31385 - DNA, 120 bp, synthetic construct
  source 1..120: mol_type = other DNA
aaccggctggcttaaaatctagaatatggaaggtaagaaacaaagcagccgaaaaccaaatttgagaatagtttcaagggcaaaatggggtggaagaagaaagaagaaagagggggagga

SEQ ID NO: 31386 - DNA, 120 bp, synthetic construct
  source 1..120: mol_type = other DNA
gttcatttcttagaaagctcaaaggacttctttgaaaacgttaagtgtttcccttcaaagacggttcattccttcaggaatgtagtgctcactgaggcaacaggctcttttcccatctct

SEQ ID NO: 31387 - DNA, 120 bp, synthetic construct
  source 1..120: mol_type = other DNA
caggtctccccgtgtgggtgactgcatctcgttgagtttctgttattcatgtcagtagcataacttctccacacagtcataaacacagaaaatgcagctgacagtttaacgtacagataa

SEQ ID NO: 31388 - DNA, 120 bp, synthetic construct
  source 1..120: mol_type = other DNA
gagaggcagggactatattgtctaactctgtccatctccagcactgagaatgcctaagtcacatccaatgaacaaagaacactgaatatccaagtctttaacaatctcgaagcacaaatc

SEQ ID NO: 31389 - DNA, 120 bp, synthetic construct
  source 1..120: mol_type = other DNA
tacagtgagccgatattgtgctactgcactccagcctaattgacaaaccaagactgtcccgggagagaaagagagaaaagacacaaagaaagacaagaaagaaacacaagaaacaagaaa

SEQ ID NO: 31390 - DNA, 120 bp, synthetic construct
  source 1..120: mol_type = other DNA
acaggaataatgttatagatttctatgtcaacctccaaaagcctatttcacttgtaaactacctgaaatagtatagttggccccctgcatccatgggctcctctgcatccatggactcaa

SEQ ID NO: 31391 - DNA, 120 bp, synthetic construct
  source 1..120: mol_type = other DNA
ctcaccctcccactaataccagggtagcctcagccaagtcacttaaattcatgtcttgagagaagacagaattaactaaggaatccccaaacagcagttcccttagttgaaatcacaaac

SEQ ID NO: 31392 - DNA, 120 bp, synthetic construct
  source 1..120: mol_type = other DNA
tgagttaggtttgatcaccttgttactccctgggatgatatttgtcgtgagctgagtccgcagcaggagaagaatcaggaacaaagagaatgaaaacaaagaaaacagtcaggaggcctg

SEQ ID NO: 31393 - DNA, 120 bp, synthetic construct
  source 1..120: mol_type = other DNA
caatccttgctcagtcacctcagtccctacttgtgacatcctatggcttgttggagtctgtgcctgtggcctgacacctacggacacccagcgtcacttcctactctcattgtttcaggt

SEQ ID NO: 31394 - DNA, 120 bp, synthetic construct
  source 1..120: mol_type = other DNA
agaacttgacaagttcctcttaaataggatagagtggaggggacactggcaagtattacacaggaaaaatgacagagaagaggagagtgaagaaaggggtggaaggaagagaggaaacca

SEQ ID NO: 31395 - DNA, 120 bp, synthetic construct
  source 1..120: mol_type = other DNA
gagagagagagacacttgacccccagttggatgaaaaggttgccatattaaacgaagaacgtgtaggttcatttgaatttcagacaatgaatatctttttttagcataagtatgtcccac

SEQ ID NO: 31396 - DNA, 120 bp, synthetic construct
  source 1..120: mol_type = other DNA
ttaatcccataatctccatcccaagcccctgcctctctcccaaactcgcagacacacaaacactttttggatttgacatttcctcttgcatgttccaaaggctttcaaataagtctgaaa

SEQ ID NO: 31397 - DNA, 120 bp, synthetic construct
  source 1..120: mol_type = other DNA
ctggatccttcctgtgagtcagattttgtggttcccagtcacctctgtcccatcatcctattttaattctcagcttggcattcatcactatctcacatgtcttgttaatttgtttgttgg

SEQ ID NO: 31398 - DNA, 120 bp, synthetic construct
  source 1..120: mol_type = other DNA
acacatcacatacacacaccaccaccacatacacacacaccactgcctatacatatctaccgcctccacacacacaccccacctctctcacacacacacatcctaccatgcatatgccat

SEQ ID NO: 31399 - DNA, 120 bp, synthetic construct
  source 1..120: mol_type = other DNA
caatccctgacccaaagcacggctgctctcttgggagcaagaatcccagtcatggaacaatgtcagatgataaatgagagaatcggctaaaatagaattcagcaagtttggtttaattta

SEQ ID NO: 31400 - DNA, 120 bp, synthetic construct
  source 1..120: mol_type = other DNA
agaatcttggggcttggtggaatgagaaggtgaatgccctacatttattaccgccgagttcctaatggccctcgtaggcagtgcattcagtattagtagttaataaaaaaaatcagataa

SEQ ID NO: 31401 - DNA, 120 bp, synthetic construct
  source 1..120: mol_type = other DNA
tcatttggtttgtcagggttgggccaggaatagaacatgagccatgcgtggtgcctccttcctttttccttgcctgtggttttgaagttaatatatctctgattagatctgttttcttgt

SEQ ID NO: 31402 - DNA, 120 bp, synthetic construct
  source 1..120: mol_type = other DNA
acaataccttcttctggaagtcctcctgaaggacctgcctgaggctcttgaggagatgtcactcttttcagaaatttgcccatggtgttttgcttggtttatttctatttttcattgtag

SEQ ID NO: 31403 - DNA, 120 bp, synthetic construct
  source 1..120: mol_type = other DNA
ttaggcatactgagaaacatttggattcaggatttcaaagtctttcctttttgaggaggtgggaaagtctcagttgaattgatcgagctcctcaggtcatggcacatttctcatcagtct

SEQ ID NO: 31404 - DNA, 120 bp, synthetic construct
  source 1..120: mol_type = other DNA
cttccagtactcccttttcctcctcgtttaagcctaaaatcatcaaggtgtatggttcaacaggaggctacaattcctggagccagcttagattgaggtcactattcttaattctactta

SEQ ID NO: 31405 - DNA, 120 bp, synthetic construct
  source 1..120: mol_type = other DNA
gctgccaaagctagcataatagaaaacaaattcaactttctcattctcctgataaaaccctgtccacaagagtcctcttctactccaggataacatactgtgtatgtccgtgcatgtgag

SEQ ID NO: 31406 - DNA, 120 bp, synthetic construct
  source 1..120: mol_type = other DNA
cttgtggtttacctgacatggaattcttctaatttccatgtggagagtttggggatctcctgatctccttgacaagacttgaaggcactctagacagtggagtgaaaagatcaggggccc

SEQ ID NO: 31407 - DNA, 120 bp, synthetic construct
  source 1..120: mol_type = other DNA
agaagttgtgttttagtttttctctgaaggaggagtggggattcgaggaagtaacactaaggatgaggctagggcaaaacaaatagcctgtgccgaaatacaaactaccatcagagaata

SEQ ID NO: 31408 - DNA, 120 bp, synthetic construct
  source 1..120: mol_type = other DNA
gaaaagaaaaaagaaatcggcccattgaaatggggctgttactttatatgggaagatgttcatctgcatttcaggaatacactcacacacacactcacactctctcacacacacacacac

SEQ ID NO: 31409 - DNA, 120 bp, synthetic construct
  source 1..120: mol_type = other DNA
aaatgtgtcgctgactgcatgtgcttttcagagttgggtcacatttccagctgtcctttgggaactgtgcagggacacaaggtccctgtcgcacaacccttcatcgtctgctcctgctgg

SEQ ID NO: 31410 - DNA, 120 bp, synthetic construct
  source 1..120: mol_type = other DNA
ccacccccatcccccaagggcttcagagacttccagatcctctaatcctgtcccagaaagaaatgaaaaaaatatgtggtcttgcaacatttctttttttatactgtaagttctagggta

SEQ ID NO: 31411 - DNA, 120 bp, synthetic construct
  source 1..120: mol_type = other DNA
tgtttttaaatttttttttcaaattttggaaggaagtagagaaggagttagaactgtaatttgctattatgggggttggggtgcagtgcgtattagtacaatgttaggtggtggcaggtt

SEQ ID NO: 31412 - DNA, 120 bp, synthetic construct
  source 1..120: mol_type = other DNA
ccgatggaatgcaggggcagctataaagacccagctgcctatagtgaagtcagacattaaagagacttccaaatatgcaaaacaaagccacgcttccaagtgtttttgtttgagaaaata

SEQ ID NO: 31413 - DNA, 120 bp, synthetic construct
  source 1..120: mol_type = other DNA
attaattatactgatgatctctggacaccttagtaatgaacaacttaaaaacggggaactgaagttaggggtttgagtcaccatgagtttactgaagttactacccctgggacttgccct

SEQ ID NO: 31414 - DNA, 120 bp, synthetic construct
  source 1..120: mol_type = other DNA
tgttctattctgtaagcacacctgatctcatcccgctcctccctcgctgaaaacatcttactgactttcatttatgttgagggtaaatattaaaattcttaatttgcccaccggcctcag

SEQ ID NO: 31415 - DNA, 120 bp, synthetic construct
  source 1..120: mol_type = other DNA
tattggttttatctatccttctcagagccagaaatcttcactcaggagataacactactgatatatctggtttacccatttccgaggaatgggaggtaatggtcaccttgcagacatacg

SEQ ID NO: 31416 - DNA, 120 bp, synthetic construct
  source 1..120: mol_type = other DNA
cagagttttagttttgcaagatgaaaagagttatataaatgaatggtggtgatagttgcacaacaatgtggatgtatttcatgccaccaaactacacacttaaaatggctaagatggtaa

SEQ ID NO: 31417 - DNA, 120 bp, synthetic construct
  source 1..120: mol_type = other DNA
ttattgccaaatcaccatagaaagttggtgttgatttttcacttcctccaatagtgaatgggagtggccatttcctgacctcttgacaatacctggcacaatattcaccattcagaaaaa

SEQ ID NO: 31418 - DNA, 120 bp, synthetic construct
  source 1..120: mol_type = other DNA
ctaagtcatttgacaaagtgagaattaaaactaatagctgaattccttctcttctagcccttcgccacaagaagatgggcagatcatgtttgatgtggaaatgcacaccagcagggacca

SEQ ID NO: 31419 - DNA, 120 bp, synthetic construct
  source 1..120: mol_type = other DNA
gaacgcatgcacacactgtaatatggatgtgtctgtaattgatactttgattattccctttgcagcactcatttgactcgggttagaaagtgtttacaaaaacgcccgaccacatcagac

SEQ ID NO: 31420 - DNA, 120 bp, synthetic construct
  source 1..120: mol_type = other DNA
tacagtgctggaaatgagcctgactcactggggtggtgatcttccaccccttcaggtgccctcatcccagttcctactctgcctatgggtgttttacatggagagtcacagcactggggg

SEQ ID NO: 31421 - DNA, 120 bp, synthetic construct
  source 1..120: mol_type = other DNA
atacatgcttgctggctgatgaataaatgcccatatgaaaggaaagctacaaagcagccatcaggattggaacccaagtgcgcttttgaatcttgctttaatcattgcaatctacagagg

SEQ ID NO: 31422 - DNA, 120 bp, synthetic construct
  source 1..120: mol_type = other DNA
actgagacggtaatattagtattaaacaaagcagactccatgacataaagcatttcatggaatagacaggattattttaggttgataaaagtcatgcttaccaatagagccatatttatt

SEQ ID NO: 31423 - DNA, 120 bp, synthetic construct
  source 1..120: mol_type = other DNA
agtgtggtgtggaaggaacccaccaggctctctgtgccctgagactgggatggaaacattgttgagaatttggtgcaggaggttgtcaaagttgttcacagggctgcagggacaaagtga

SEQ ID NO: 31424 - DNA, 120 bp, synthetic construct
  source 1..120: mol_type = other DNA
tattaagccgataggaactgtaataatcacctggtccaatccctttaatcacgggtgagaaaatggtctccaagatgttagaagtgattaatctgggattgtagaaatgttccatttgcc

SEQ ID NO: 31425 - DNA, 120 bp, synthetic construct
  source 1..120: mol_type = other DNA
agcacttgagcaacctctctgaccctgtgtcctcatctgtaaagttgcaggcactgtatgtacctcatggggttgttacgagtaactctgaagtccgaggtgtctgtctatatatcaaga

SEQ ID NO: 31426 - DNA, 120 bp, synthetic construct
  source 1..120: mol_type = other DNA
ctggcttagattcttggtctctttttccatctgtctgtccatctctctgttcctgctcccatgggggtgggcagtgcctcatcctggtcttgatgcccttcttccagggacattgctgtc

SEQ ID NO: 31427 - DNA, 120 bp, synthetic construct
  source 1..120: mol_type = other DNA
cagctagtgggtgcaggatttcctttggaagggtgagaatgttctggaactagatagtggtgacggctgcacactgttcgaattgtactaaatgccaataacgatcaattttatgttatg

SEQ ID NO: 31428 - DNA, 120 bp, synthetic construct
  source 1..120: mol_type = other DNA
gacctgttacaagcagtactgggaacctattagctccattagtgttccttgtcattatcatcatatgaccgatgaaaatgaccaaactgcagttggacagacaaaatctctcaaagcgtg

SEQ ID NO: 31429 - DNA, 120 bp, synthetic construct
  source 1..120: mol_type = other DNA
gaggggtaaggaggtgcagagaaggggtctcaggaagctttagagccagctttaggatctgtctttcagggtgctagtatttaagagtgtaaaaaaaaaatccaaaacactggatataaa

SEQ ID NO: 31430 - DNA, 120 bp, synthetic construct
  source 1..120: mol_type = other DNA
ttccttgtaaactgttggcagattgacgatgggacagctgcccaaggagagctgaaagtgcttcttaggatatgcatgaaaacaaacttctcatgcttccttgctgttcccgctttaccc

SEQ ID NO: 31431 - DNA, 120 bp, synthetic construct
  source 1..120: mol_type = other DNA
ataaagtatctcatttaatcatcacaagacattgggagggattattctgcctgtgttagacaaatgagccaatcggagctcagagagattaagtaactgcccaaggtcacacagcagtgt

SEQ ID NO: 31432 - DNA, 120 bp, synthetic construct
  source 1..120: mol_type = other DNA
cacctcatagattctcctcaggtcccattttaaaacaaaacagggtaacaaaagggctgtgtaaactggaaaggatgcagagggccccatcattatactttcactctgataaatgcagaa

SEQ ID NO: 31433 - DNA, 120 bp, synthetic construct
  source 1..120: mol_type = other DNA
gagaaggaagaaaaggaggagaaggaagaaggggatgggaagaggaagaaggggatgggaagaggaagaggggaaagaggaggaggagggaatagagaaagaagagaaggaggaggagga

SEQ ID NO: 31434 - DNA, 120 bp, synthetic construct
  source 1..120: mol_type = other DNA
cttggagttgctcttctcgaggagtagctttgcaaaagtgactttcaaggccaaagatcacagataaacaattatgaacatgcaggaactcagggaatattgttcttgtgatcccatcct

SEQ ID NO: 31435 - DNA, 120 bp, synthetic construct
  source 1..120: mol_type = other DNA
ctcatgaaggaccacgtaactgtttgctggtcctactctccactacctcccctagcatcatttttaaacaaataaggaaattaagacagggtagcacagtgatagatccagaagaaaaca

SEQ ID NO: 31436 - DNA, 120 bp, synthetic construct
  source 1..120: mol_type = other DNA
aaagaccccatatcaaatgagttaatttacataaaatgaccagaaagggcaaatctaccgagactcgtggttgccgaggcctggaggtagtaacggagatctttttggagtaatggaaat

SEQ ID NO: 31437 - DNA, 120 bp, synthetic construct
  source 1..120: mol_type = other DNA
aaagaaaaatgtagacataatgtatttagaaaaagagactctgattaagccataaatctgagaaatggattatgcaagacatcttattatacacctcccccacctcttcataaacatcag

SEQ ID NO: 31438 - DNA, 120 bp, synthetic construct
  source 1..120: mol_type = other DNA
aatttgatgagctgttgaatatgcatgtctggagctcacaggaaatttccgagttggagaaataaatttgtgaggcccactcttgactattttaaagtgaagcactgctatcccctgcca

SEQ ID NO: 31439 - DNA, 120 bp, synthetic construct
  source 1..120: mol_type = other DNA
attctctaactctatgcatagaaaaatcttccatttaaataagctaagtggcaggagatcctaaatgcctcagagactgcatctcgctgtcagctaggtggaagaaaaccacggaggaca

SEQ ID NO: 31440 - DNA, 120 bp, synthetic construct
  source 1..120: mol_type = other DNA
gggaagatttccaagaagtaaataggtcctacctaacatcccaccccaatactccgggttcaccgcattctccccaaattgaggcataacattcaaagacttaaaaaaatctcaggattg

SEQ ID NO: 31441 - DNA, 120 bp, synthetic construct
  source 1..120: mol_type = other DNA
tcatgtagccatgttaacagtacactcaccatttctgttctatgttcagttaagttcttgccttttgactatgttaaaaacataaaatcttatatgagcaatctaaaaaaataggtgctg

SEQ ID NO: 31442 - DNA, 120 bp, synthetic construct
  source 1..120: mol_type = other DNA
ctttttagggttggaagtttttgagaactttggcagaacatgtattaatacttctactttggatagcattgaaaactttgaggaaaaataatttaggatttggctagccagttgtgtaag

SEQ ID NO: 31443 - DNA, 120 bp, synthetic construct
  source 1..120: mol_type = other DNA
aaaacgtggaagtgttggaatattgatcaaaaagatgtgcagaaatcatacagtcagttcttctgaggttaatacaaacctttactttgcattccttcttttaaagtgctaattttgcca

SEQ ID NO: 31444 - DNA, 120 bp, synthetic construct
  source 1..120: mol_type = other DNA
ggggaagtgctacaaaagtgtaattactttacccagcatgtgtgatttacgggacttaaaatgtgtgagtttccaaagagtcatctgtttttaaatacagtatccctcccagccaggcag

SEQ ID NO: 31445 - DNA, 120 bp, synthetic construct
  source 1..120: mol_type = other DNA
aaccatatgaagtgttgccatcccatgttttgggataagaaagctaaggctctgagagattaagtaattggtctgaggttttacagctggtggataggagcttaaaattctccagtggca

SEQ ID NO: 31446 - DNA, 120 bp, synthetic construct
  source 1..120: mol_type = other DNA
ggagtgtagggaatgcctaagtaccagtagggcaaggtgaatttgattcctgttttgcagatgtgactgttaggttgttagggttaatttaataacccaggtggaattgatttggagata

SEQ ID NO: 31447 - DNA, 120 bp, synthetic construct
  source 1..120: mol_type = other DNA
ctgccgtggcgtgccaagacacatccagggtgggctgtttggggggaatggttttaattttaagccttttaagtgaaaacccttagaccttgcctctgttttgttaaattacgattctaa

SEQ ID NO: 31448 - DNA, 120 bp, synthetic construct
  source 1..120: mol_type = other DNA
ctaagaaaaagcattgtttgttacaccaccactgtttgtaggcttttcattgtaactatatttttagaaaggctggctcatgtgtttgatggggactctgtgttgagggtaaggggctgg

SEQ ID NO: 31449 - DNA, 120 bp, synthetic construct
  source 1..120: mol_type = other DNA
agccagtagggagggagcaaagactcaaaagtgctgtggggctttggaatactgtgagtttctgattttggtaaatgtacatccaagatgttttaaccattaaatgtcccctcttctaca

SEQ ID NO: 31450 - DNA, 120 bp, synthetic construct
  source 1..120: mol_type = other DNA
aagctctagggtattttcgcaattattttgttgtgttaaaaatatggagaactaccttctaccccaggtggtcctcagcagagcttctgtgtggagcagaaagttttctcctgggatatt

SEQ ID NO: 31451 - DNA, 120 bp, synthetic construct
  source 1..120: mol_type = other DNA
tccagcttaagtgatagaaacagtgctgtacatcctcctagctaaatctgtgtatacacccttagtgatttccttagcttcaactcttagaagtggaatttctgggtcaaagggcatgca

SEQ ID NO: 31452 - DNA, 120 bp, synthetic construct
  source 1..120: mol_type = other DNA
tcaatgcctttttttttttctttttttttggaaatagggtctctgtctgtcacccaggatgtggagtgcagtagcatgatcatagcttactataacctcaacctcttgggctcaagcgat

SEQ ID NO: 31453 - DNA, 120 bp, synthetic construct
  source 1..120: mol_type = other DNA
cttcttttcccttagcccttggttttgtttggcagatggtgtaggtgaagagaacattagttgtggaagaggtatgtatgactcccttgggtacagtcattgatatttgttaaagacagc

SEQ ID NO: 31454 - DNA, 120 bp, synthetic construct
  source 1..120: mol_type = other DNA
cctacttggattaggccctgctggtgcaatgagcagcaaacagacattgtccttgttcatcctggaagttacagtgtagttgaaagtgtatattaaacagtgaagcaccgataaatagag

SEQ ID NO: 31455 - DNA, 120 bp, synthetic construct
  source 1..120: mol_type = other DNA
cagaaactctagcaaatcctccaagttgatgctgctaacatttgagggtcacagacctactacataaagctgatcatattatcccccccatttttaaaacctaatggcttagctgagcac

SEQ ID NO: 31456 - DNA, 120 bp, synthetic construct
  source 1..120: mol_type = other DNA
gggagctcagttcagacacacagcttcattctggaattcctcacgtggctcacagaagagtttgcttatgtgtgtgtctagatttatgttatttgtgctatgaagtatattttggggttc

SEQ ID NO: 31457 - DNA, 120 bp, synthetic construct
  source 1..120: mol_type = other DNA
gtgtaagaaaggatatctggtctttactggattttcaagagtgctccatgccttgatgaagactcttttaggcagcacctgtcccaactaagagtccctgctaagaaatggaaagttcat

SEQ ID NO: 31458 - DNA, 120 bp, synthetic construct
  source 1..120: mol_type = other DNA
tacttccttcgtgccttactgcaccaggaagaacttccagtacaatacagaacaaaaggtgtgacaatttggtatccttgtctttttcctgacctaaagaaaacacatttgctatctcat

SEQ ID NO: 31459 - DNA, 120 bp, synthetic construct
  source 1..120: mol_type = other DNA
tatatagtagaaaagggagacaatatgcatgaacataagggtaatttcagcagggagatgtaatataaaacaggagtcaaatggaaatactaggtttctgcagctaaagagatgctgaat

SEQ ID NO: 31460 - DNA, 120 bp, synthetic construct
  source 1..120: mol_type = other DNA
tatctttaagtctccctggactctctgtggcactagaatatcgacctgagaacccaggttaggaaaacctgtgacttaatgaggggaaagccaaaattaaggttcatagttacacaaagg

SEQ ID NO: 31461 - DNA, 120 bp, synthetic construct
  source 1..120: mol_type = other DNA
tagggattaggataaagacaacttggtgggggtaaaggggtggaagatggtgtcatttggcctatcatatggaagatggatttcacagaaattggaagaaccttgttcattgcagccttt

SEQ ID NO: 31462 - DNA, 120 bp, synthetic construct
  source 1..120: mol_type = other DNA
accagtgacaagcatagattggagtgtcctactttaggtattgaaaatgaaaagcacctgtgattcagaggaaactccctcctccctttttcattaccataaggtcttccagccatagaa

SEQ ID NO: 31463 - DNA, 120 bp, synthetic construct
  source 1..120: mol_type = other DNA
aatgtgagactggtacacacacagttaaagactaaaaagccatcaggaaccctcaaagccaaattctatctgcacactggctctacaaagttcgcagcaagaatctcttgcaccaagtca

SEQ ID NO: 31464 - DNA, 120 bp, synthetic construct
  source 1..120: mol_type = other DNA
attttgcgtacatggctcagtgcactcccctctttgcctttacagttttccacttgatatgggggtgtaataacaacttcttccatgactacgatgtttttttcttgccatttacagtct

SEQ ID NO: 31465 - DNA, 120 bp, synthetic construct
  source 1..120: mol_type = other DNA
agtatggtagaagttaaacgcgaaaccatgtagaactagtggtttcctacattttatttgaggggtgtgtgtgtgtgtttggatgtgtaggtttgtgtttgtgtgtgtgtgtgttgtgtt

SEQ ID NO: 31466 - DNA, 120 bp, synthetic construct
  source 1..120: mol_type = other DNA
gtttgtgcagtctcaagatcagccagaagagattaggaatacctcaggttttttttcccctgggtgtatttacaactctgcacatgcacatggttttatttttattcagtttcctacagt

SEQ ID NO: 31467 - DNA, 120 bp, synthetic construct
  source 1..120: mol_type = other DNA
aaaatcatgtcttctgactccgagtccagggttttttctgttacatcccagtgctgttaagaggagacattagccatactctgaaagaaaccacacataggcttacaataagtttcccac

SEQ ID NO: 31468 - DNA, 120 bp, synthetic construct
  source 1..120: mol_type = other DNA
tcttacacagttgaatgcatttgagctaaagggggttttagttttttgatgttattttttcctttctgcagtgaccctttgttttctgctcagcgccttccccctcatggctacccattg

SEQ ID NO: 31469 - DNA, 120 bp, synthetic construct
  source 1..120: mol_type = other DNA
ctgccatgtgccaggtgcagtttatgtgctatgcaagtattagggcagcatttgaactaaagccttcctcatttttcagaacttcattctttaactaatagtgtggactcttgagaggag

SEQ ID NO: 31470 - DNA, 120 bp, synthetic construct
  source 1..120: mol_type = other DNA
gtccagagttgctataccatcgttatgttcccaccagcagttcatgagatccactttctccacgtcctgtctgcatctggtattgccactatttattatttaagctgttctaaaaggcat

SEQ ID NO: 31471 - DNA, 120 bp, synthetic construct
  source 1..120: mol_type = other DNA
gggagctctggctttgaaggtctgtggtcagaatggactacaacttctacaactgcccccgtgtgtgatacagttccaattaatcaaaattcaattaacaagaacttacctctttacttc

SEQ ID NO: 31472 - DNA, 120 bp, synthetic construct
  source 1..120: mol_type = other DNA
ctcaggcatttttggcttaggaaacaagttctaacctgtagtggaagagagaggagctcctttccaaagacctattataaaccagtacctaaagacttccattgagaaccttcttggctt

SEQ ID NO: 31473 - DNA, 120 bp, synthetic construct
  source 1..120: mol_type = other DNA
gggcacttagttacaaacttttttacattgaaggtaacactacagcgaacatcctgtgcactcactgttatgccaggtgggagtatttctgtgaatacataactgaaagtggcattgctg

SEQ ID NO: 31474 - DNA, 120 bp, synthetic construct
  source 1..120: mol_type = other DNA
tgtctgctctcacacgcagacaccagccaggatctgccagtgagatccaagtcctggatccaggctccaaggcatggcttgcttcctgttacttctctccagggctgtggcctgtggctg

SEQ ID NO: 31475 - DNA, 120 bp, synthetic construct
  source 1..120: mol_type = other DNA
ttttacttttggaatgatttggctctgagtaactcatccaatttgtaactggctctaatttctgggcaatcatcttgcacacgcacaaaaggattcttgtgagctaagaaaatctaaggt

SEQ ID NO: 31476 - DNA, 120 bp, synthetic construct
  source 1..120: mol_type = other DNA
catagtcatctagaggtgaggttagtaagggttaagccattggtaataatgctggaagaaaaagaggttgtgttggacttatcgagagactatgtattggactcccacatggtgtgtctt

SEQ ID NO: 31477 - DNA, 120 bp, synthetic construct
  source 1..120: mol_type = other DNA
aaaggtggtttatttgcccagtggtaagctcaggaatataatttgtaccaaattacattgtatatggtccatcttgtcttcctaattatttgagtaataaatttcagattaggaggctta

SEQ ID NO: 31478 - DNA, 120 bp, synthetic construct
  source 1..120: mol_type = other DNA
ctcgctcgcttctccagccattcactcactcatgcaaaaggtctgtacacacaatgatgcctgatggtataataggaaccttaacatttcaattaaaaggcaaaatgaggacacttacca

SEQ ID NO: 31479 - DNA, 120 bp, synthetic construct
  source 1..120: mol_type = other DNA
acagggtcaggattttacagggtaggggaaagtccagtatgtgtctttgtaattttgacctaggcagcatttttttttccactttaacagaaactgcagtccagggtactaatacccatc

SEQ ID NO: 31480 - DNA, 120 bp, synthetic construct
  source 1..120: mol_type = other DNA
aggctttgttttttactttcatcccctggacatattttctcattttcttctgagtttttttccccatgcctttcttattgggaaatttttttttgactttgcctgcaatggagttttttt

SEQ ID NO: 31481 - DNA, 120 bp, synthetic construct
  source 1..120: mol_type = other DNA
tgtttggaccaaattccatcttctgcaagttttcttttcttctttaaacagaagtatgtgttaactggtataagaaatccacagtacttttatttgtatacttcaaatgtctctcctgcc

SEQ ID NO: 31482 - DNA, 120 bp, synthetic construct
  source 1..120: mol_type = other DNA
accaatagatcaagttacaaataaaaatggacagcaaaaaatatactgagataaatgaaaatgaaaacgatatatccaaacttacaggatgcagcaaaaggagtacttgaagggatattt

SEQ ID NO: 31483 - DNA, 120 bp, synthetic construct
  source 1..120: mol_type = other DNA
aagaaaaactaaacagttgattcaactctcgctctcctccagctacgttaaggatatgtctacctgtctttgttcacatggttcactccaactagaaatgccccgtctctctatatgcaa

SEQ ID NO: 31484 - DNA, 120 bp, synthetic construct
  source 1..120: mol_type = other DNA
cttttagcacaatctgagtaaggtgggagggagggaagggggggaaatagaggctcagaggcagagtagtcaatgtcatgagaaagctattttttgtttgtttgtttatttgtgttttgt

SEQ ID NO: 31485 - DNA, 120 bp, synthetic construct
  source 1..120: mol_type = other DNA
atcacatcatagttttcctttgtttctttctctttttctttctttttaattaaggccattagcaatgactttatttcttaatgacatggatgtgcagctcctcatgatcacacatatgaa

SEQ ID NO: 31486 - DNA, 120 bp, synthetic construct
  source 1..120: mol_type = other DNA
tatgtgtgtgtttatgtgtgcatttgtgtatgtgtgtgtacgtgtgcgcatatatgtgagtattggtgtgtgtctgtagatgtgtatttatgtgtgtatgtgtgtgcgggtgtgggtctt

SEQ ID NO: 31487 - DNA, 120 bp, synthetic construct
  source 1..120: mol_type = other DNA
gcagaaaaccactccttcattcatacaagcaactctttccctttgcaggaaattattctttagccacttgaaactgcagcaaaccacacaaatggcctccctgggaaactgtttttttac

SEQ ID NO: 31488 - DNA, 120 bp, synthetic construct
  source 1..120: mol_type = other DNA
ggctctcagctgggactcacacctctagtgcactaagcaatgggccaatctcaggtttttacgcacataaaatatcctaacaattagctccattttgtacagatctgtggatagaatatg

SEQ ID NO: 31489 - DNA, 120 bp, synthetic construct
  source 1..120: mol_type = other DNA
tatgatttcttgggggtgagaatggcgctttgtcctttctgagattgtggtatgagtttacacatattaatgctcttctgctattaaagagactttaagagttttatcgtttgttttaat

SEQ ID NO: 31490 - DNA, 120 bp, synthetic construct
  source 1..120: mol_type = other DNA
agcctgcggttcttcagcacgtggcaccagggcttggcatccccatcaggattcctaaatgataagagagtttaaggtttcctttttatcttcttattttttaatttttgtagagatggg

SEQ ID NO: 31491 - DNA, 120 bp, synthetic construct
  source 1..120: mol_type = other DNA
acagattgtccacattcaacatgtgccacatcttaaccttgacttcgctactcagtacaaatcatgctctgatatataggctttaaatccttgtggcatagacagttctcagcatcagta

SEQ ID NO: 31492 - DNA, 120 bp, synthetic construct
  source 1..120: mol_type = other DNA
gtgatacaggaaatgagcctgagcagtttcctttttctaatctattctgcttcctaaatcttttgttcatttctatctggtaattgctgttttccaaacttgaatatgctttcagtaatt

SEQ ID NO: 31493 - DNA, 120 bp, synthetic construct
  source 1..120: mol_type = other DNA
gaggaagagatggaagaggaagagatgaagaggaggaggaggaagagatagaggagaaggagtaggaagagatgtaagaggaggaggaaaagatggaggaggaagaggaagagataaaga

SEQ ID NO: 31494 - DNA, 120 bp, synthetic construct
  source 1..120: mol_type = other DNA
aggaagagatggaggagaagaaagagataggaggaggaagaaatggaggaagaggaggaagagataaagaggagaaggaggaagagatggaggaggaggaggaagagatgaagaagaaga

SEQ ID NO: 31495 - DNA, 120 bp, synthetic construct
  source 1..120: mol_type = other DNA
tgggagtacaagtatctctttgacaaactgattttcttttcttttcttttttttcttgaaggatgaaaatgagattgatctttattgtagaatccaggccagggggctgctttgaaggca

SEQ ID NO: 31496 - DNA, 120 bp, synthetic construct
  source 1..120: mol_type = other DNA
tgtctaactgtgagcattattattattatttttgaattttagacctgggaggagcctctgagactactcaaacccttctcttgtgcagaggaaaagtctgaggccaagagcgattgaagg

SEQ ID NO: 31497 - DNA, 120 bp, synthetic construct
  source 1..120: mol_type = other DNA
atgtactttaataggcactagcaagaggtggaggtcacttctagatggtgtttcatatgaatgtggacttggtggatctccaaaaagggagccactgcttccagtaggattcattttagg

SEQ ID NO: 31498 - DNA, 120 bp, synthetic construct
  source 1..120: mol_type = other DNA
cccccatgcagtggaaaatctacagaggacttttgactcccccaaaacttaaacactaatagcctgctgtggacccaaagccttaccaataacatcaacagttgattcacacatatttta

SEQ ID NO: 31499 - DNA, 120 bp, synthetic construct
  source 1..120: mol_type = other DNA
gtaaatgaccaggtggggaatgttttagactatgtggtctctgtcatatctacttaaccctgctgttgtgtgagagcaactatggataatatgtaagcaaataggaatgagtgagctcca

SEQ ID NO: 31500 - DNA, 120 bp, synthetic construct
  source 1..120: mol_type = other DNA
cgccgctcagtattgcttccaaggcctatttagtcaccacatgagctgctgtgtgcagcactgcagtgatagccaacatcataaaatgttattttacaagttatttggtgctatagatct

SEQ ID NO: 31501 - DNA, 120 bp, synthetic construct
  source 1..120: mol_type = other DNA
taatattctgactcactgaattcttccagcggaaaacctccactctatagagaccctgaaattagtaaggatgttcattaaagccattgtgtttttttagcgtcatgcactgcactgccc

SEQ ID NO: 31502 - DNA, 120 bp, synthetic construct
  source 1..120: mol_type = other DNA
gtctttaaagatatatatgttcttaaaaaggcataatgccttacatttttggtccattgatttttgacatgggtgtcaggcaattcaatggagaaagaagagtcattccaatcaatggtt

SEQ ID NO: 31503 - DNA, 120 bp, synthetic construct
  source 1..120: mol_type = other DNA
gtttcttagcagcagctgcttgctgcacagatgtgtagactgttaaggaaagcagcagctagtggcttacagaaatttccaaataattaaaaactcattcccttcaaatgtactcagccc

SEQ ID NO: 31504 - DNA, 120 bp, synthetic construct
  source 1..120: mol_type = other DNA
gcttcaaacgatgattgatttttttcttataatatgggagttgactgggtggttcttctgctggtttcacttagagtcactcatgtggttgcatcagctggtgaagggataggcttgttg

SEQ ID NO: 31505 - DNA, 120 bp, synthetic construct
  source 1..120: mol_type = other DNA
attctcaagctgagcccaattgtctctcgaatctcatatatgatcattgcccatgatgtgttcccaaataacaggatcagctcagtgtgtgccaagcattttgcatgccttagctaattt

SEQ ID NO: 31506 - DNA, 120 bp, synthetic construct
  source 1..120: mol_type = other DNA
tagtgaaataagactttaggatatttcactgattaacttatgagtgtgccgattcaaaatgttttcacattttaaattttatttagtactgcagactgtttttagaatggccatttcaat

SEQ ID NO: 31507 - DNA, 120 bp, synthetic construct
  source 1..120: mol_type = other DNA
tactatatccttatgttgtgtacctcttgattctggtgtgataggatccaagtaccaagtctttgaaaggtcccaattctaacacccatttcacaactctcactgagaaaagggcagctc

SEQ ID NO: 31508 - DNA, 120 bp, synthetic construct
  source 1..120: mol_type = other DNA
aaaatcatgctaaaatgttccaccttttcttgcatacctcttcctacatttctcttttgtttctaaaatattttaggtgctttcatgggaaaaatatccttacatagccaaaccatataa

SEQ ID NO: 31509 - DNA, 120 bp, synthetic construct
  source 1..120: mol_type = other DNA
ttgaatcttgtgtatgtaaaacctttcatatcacattccttcaaatcacattgacctctctggaccgtgattatatgtaatggtcctgataagaaaatatatttggccaagtgcggtagc

SEQ ID NO: 31510 - DNA, 120 bp, synthetic construct
  source 1..120: mol_type = other DNA
gtcagaaaaccactttggactggatgatacaacagttttcacctacagggacacaagtgtttgaattttctatgtacttggaaaattggggtcaagaaaatacatttcgtgcactcatct

SEQ ID NO: 31511 - DNA, 120 bp, synthetic construct
  source 1..120: mol_type = other DNA
ggtcaagttcaaccacaaaacccacactcattatggtagcaggaatggtgctttaaataaaaatgtgaaagagtgaagaattgatcaacgaagactgcaggccatccaggaaggcaaggg

SEQ ID NO: 31512 - DNA, 120 bp, synthetic construct
  source 1..120: mol_type = other DNA
agatatgtggctcttcatttaaaaatcagaagctctggaaactttgggcctccactgtttctcaggtatttcacagattccagttatcctcctccttgtgcatttgcctacctgacttct

SEQ ID NO: 31513 - DNA, 120 bp, synthetic construct
  source 1..120: mol_type = other DNA
gccgctgacatttctgagtcctaaagtctactttttagcattagtatgttgctgtctgcttgtctgcattgttattctttatccaccaaaatgtgaatgtcagacaaagaggtgccaacc

SEQ ID NO: 31514 - DNA, 120 bp, synthetic construct
  source 1..120: mol_type = other DNA
tgtgtgtctcttgtttgtttgcttttctggttctaggaatgctaatttatggtagtaaagcttctttctgtttcaataataatgtcttagggaaaattctgtctgatgtcaatcaaaaaa

SEQ ID NO: 31515 - DNA, 120 bp, synthetic construct
  source 1..120: mol_type = other DNA
agtctttccttttttcaatctttcttacaacttttattctaactggttaattctcacaattcttttatccagttcactgactcttctgttctcttctttctgctgttgagccatctattc

SEQ ID NO: 31516 - DNA, 120 bp, synthetic construct
  source 1..120: mol_type = other DNA
ttgccagataggggtagaatttcaggtttactactttacctccactggaagttaaacagtgggctcttcataactactgtaaaagagtaggagatccagttcgccagtaggctttcactg

SEQ ID NO: 31517 - DNA, 120 bp, synthetic construct
  source 1..120: mol_type = other DNA
cctgggtgacagagtgagaccccatctctaaatcagagcagaactacatgaaactgagacacaagatccatacaaaagatcaatgaaaccaaaagttggtcattggaaaggataaagagg

SEQ ID NO: 31518 - DNA, 120 bp, synthetic construct
  source 1..120: mol_type = other DNA
gcctacggaggctcctcctgccatttccaatggcctctctcctactaaaggtaagcaccattcaacttctcaataccacatatatttctgctacctcttttaaaatttcttttgagaata

SEQ ID NO: 31519 - DNA, 120 bp, synthetic construct
  source 1..120: mol_type = other DNA
tcagtccactcagggctacaccctctcgggacctgaaattttcctggatatttgagtaccaagttctatcttaatgaacaagaatggggataaaacgaggaggctagagccgaagcaacc

SEQ ID NO: 31520 - DNA, 120 bp, synthetic construct
  source 1..120: mol_type = other DNA
ttacccaaaagtcattcagaaacaagttgtttaatttccatgtaagggtgaggttttgagaaatgaaattgatatatatttttattccactgtggcccaagggtatgagttgctattctt

SEQ ID NO: 31521 - DNA, 120 bp, synthetic construct
  source 1..120: mol_type = other DNA
gattcgatggaaaattgatcacagctgataagcaattgactatggggccataagtgaatgtcaaaggttattctcaggtttcagatctggattaccagaggatgctgtcactgttcacca

SEQ ID NO: 31522 - DNA, 120 bp, synthetic construct
  source 1..120: mol_type = other DNA
catcatccaaattattctatttatgtactgttaggtgccccagtctctctgtcctaggtttctgggcctgaaagaaagtgtgctgaagcagcaggaagtgattctgcactgcttgtcgca

SEQ ID NO: 31523 - DNA, 120 bp, synthetic construct
  source 1..120: mol_type = other DNA
tcaaactcccagcctccagaacggtgagaaataaattttggtcatttaatccaccaagtctgtggtctttgttatggcagccctcgctgactaaaacactgattcaactgggaggatctt

SEQ ID NO: 31524 - DNA, 120 bp, synthetic construct
  source 1..120: mol_type = other DNA
tgcattccagcctgggcgacagagcaagactctgtttttgcggggtgggggtgggttgtgaggggaagaaatatactaaataaggaaatagcaaaggtaattatttttattttcaaaaga

SEQ ID NO: 31525 - DNA, 120 bp, synthetic construct
  source 1..120: mol_type = other DNA
attctttgtcaaccacacaggcattcaaatggcaagtgtgggatttcctccaccacaaagtgaggtacagctggcctcagactccaaagaatgaacattcaaagaaacattaaattactc

SEQ ID NO: 31526 - DNA, 120 bp, synthetic construct
  source 1..120: mol_type = other DNA
aaagcctaagcttgctaagagacgtcttcttacacagagaaagaccggtagatcatgtggtcacatgacttccatgggctttattctgtgagactcagatcatattcacaactgtgtagt

SEQ ID NO: 31527 - DNA, 120 bp, synthetic construct
  source 1..120: mol_type = other DNA
gggggtgggaggagggtgagggatgagaaattacttaatgggtataagataccctatttggatgatggtgacactaaaaactcagacttcaccactgtgcaatatatccatgtaacaaaa

SEQ ID NO: 31528 - DNA, 120 bp, synthetic construct
  source 1..120: mol_type = other DNA
ctcataagggacacaagagaaaacaactggaagtcccctaaatttaggaggtcagagcccatcagtatagcaagcagcaagaaacaaatgtgagaagcacttctttatggatccaggaaa

SEQ ID NO: 31529 - DNA, 120 bp, synthetic construct
  source 1..120: mol_type = other DNA
tataggagcacgttgcacacggctgagccatttaccatgaataaaagtgctagcgtttttactaggtttccatctgtgttttaaggtgctacgaataaagtgttgagtattggtcccagt

SEQ ID NO: 31530 - DNA, 120 bp, synthetic construct
  source 1..120: mol_type = other DNA
attgtatccaggtatttggtctgaaagggccaagtacaaaagggacaagcgtacttctgcaaaacttacagaaatccattaagtttccgtctttagtgtgcgtgagtcactacacagaga

SEQ ID NO: 31531 - DNA, 120 bp, synthetic construct
  source 1..120: mol_type = other DNA
agaaaacatgctctgtaatgctgctgaatactagtttttactgaagaccaggcttcacttaattaaaactgtactttagaaataccttagtagttgaggggacagcaggtgtgtggttaa

SEQ ID NO: 31532 - DNA, 120 bp, synthetic construct
  source 1..120: mol_type = other DNA
cctatgaggggatttatgaaaagccttctaaactacaacagtgttcttctgcaaaactaaaacacattataaagtcaaacaggtaaattaacaggaaaaccaaactgatctcaataaagt

SEQ ID NO: 31533 - DNA, 120 bp, synthetic construct
  source 1..120: mol_type = other DNA
tacacctgatattgcttttaaaaaagatgcatttttgaaaaagatgctgtatttttcacacataataatcacctatcttaagtgcctgactttcccaacttagaactactaggaacatac

SEQ ID NO: 31534 - DNA, 120 bp, synthetic construct
  source 1..120: mol_type = other DNA
cactgctagagactgtgattctgccaaattaagaatttaactgagagtgagtaagacatatgagatacaagaaaccgcttcaaacccaggaaggtggcctttaggaggagatagtgttga

SEQ ID NO: 31535 - DNA, 120 bp, synthetic construct
  source 1..120: mol_type = other DNA
agaaagaaagaaagaaactgccaaattattgtccagaatagctgtgccattttttattcccgcttataatgtatgactggttaaattttttgcatcctcactggtatttggcattgtcat

SEQ ID NO: 31536 - DNA, 120 bp, synthetic construct
  source 1..120: mol_type = other DNA
aggtgaagccatcattggagaagaacatctggagaactgggttttcagaaggcagcttttggtctggaaaggaaggaacaatgaaggctctacactataaggctaagagtaaaggaggat

SEQ ID NO: 31537 - DNA, 120 bp, synthetic construct
  source 1..120: mol_type = other DNA
atgagctgagtcaaccccagtgaaaagattgtgcataaaaggaagccatgctatctttctagtctagaacaacaaaaacaaatatccagaaagatgtttagaaagttcctttggctgtta

SEQ ID NO: 31538 - DNA, 120 bp, synthetic construct
  source 1..120: mol_type = other DNA
ctggaataacctagcaagtgctatgctactttcactttataacatgcttcccaaaataacaagtaggtaagtgaaattgactttttattcaagcttttagacagaattgaattcaagccc

SEQ ID NO: 31539 - DNA, 120 bp, synthetic construct
  source 1..120: mol_type = other DNA
aatggttgctggaggttagggggctgacaaggatgaatagatgggacacaaaagattctcagagcagtaaaaccactctgtatgatactacaatggtggatacatggcattatacatttg

SEQ ID NO: 31540 - DNA, 120 bp, synthetic construct
  source 1..120: mol_type = other DNA
cttgtgttttgaagatgtttctcctcccaaagctatcaccttggtagttatcaccaagatgtataatagcaagcactactgaatgatcttcccagttatcagcactagcatcacggcgag

SEQ ID NO: 31541 - DNA, 120 bp, synthetic construct
  source 1..120: mol_type = other DNA
tttaaaaggcaaacaagttactattattgcaaaacaaaggctaaactgctaccaaactactagaggtgaaaaagtctatagagtctcacaaataagtaacttagataaataaaagaccaa

SEQ ID NO: 31542 - DNA, 120 bp, synthetic construct
  source 1..120: mol_type = other DNA
taaataaattaatccattcaatgtctccattagagtaactaatgcaaactttttttttttaagaaagagaaaaggcacctatggccatgccaccctgaacatgcccaatctcgtctgatc

SEQ ID NO: 31543 - DNA, 120 bp, synthetic construct
  source 1..120: mol_type = other DNA
tgttttgcttatagctgaagagtccctgctttcagcctgccttgtgattttcatcttgttgcagttgaattaggtttgtggcacctctgctttttgtagttttcgtatcaacaccttggt

SEQ ID NO: 31544 - DNA, 120 bp, synthetic construct
  source 1..120: mol_type = other DNA
gtgagaaaagggatctcttacaaaggccaaacctcacttgtttgcctgcattgcaataagtctcagagagaaactaacaggtagagagaggtgggaaatcaaaacaaagcaaaaggaagc

SEQ ID NO: 31545 - DNA, 120 bp, synthetic construct
  source 1..120: mol_type = other DNA
gctctgattgttcctgcaagactaactctgcaaataggtagactccctatttccttttgcagtatgcttttaagagaaggcctgaagaaatctctaatcattgcccattccacattgacc

SEQ ID NO: 31546 - DNA, 120 bp, synthetic construct
  source 1..120: mol_type = other DNA
ggaatcatagaatgcttgctcaagaagaaacctaagaaatcgtccctgaactttgcatatgagaaaaatgaggtccagagaggttaaattatttgcctgcatttatagaactagttgggc

SEQ ID NO: 31547 - DNA, 120 bp, synthetic construct
  source 1..120: mol_type = other DNA
catgctgatatgcaatcctactcccagggaagaattgtaagtgcatctctctaaatactggaggtcatctcacttgctagatctttcctacaaagaaagcttatgctgaagatagggatg

SEQ ID NO: 31548 - DNA, 120 bp, synthetic construct
  source 1..120: mol_type = other DNA
cccaggtagtgcttttaaccactacacaatgctgacagttcaatcagcatctctggaggtgtgaggcctgagcatcagtttgggttgctttttgtttttgttttttgggtcttttttttt

SEQ ID NO: 31549 - DNA, 120 bp, synthetic construct
  source 1..120: mol_type = other DNA
tgttttttggtaaagatttaaatccaggctttctattcgtcctccttttgaaaaaaaaaaaaagttttggaatttgccagcctttactcaaaagccatttttgtttgttctcattctgtt

SEQ ID NO: 31550 - DNA, 120 bp, synthetic construct
  source 1..120: mol_type = other DNA
atccgtgagacctgccttaatccagccctgcattcttctatcggttagtgcagaaagtttttttcttccatctttatggagatttgagccattgggcttagattctgccaactaaatgat

SEQ ID NO: 31551 - DNA, 120 bp, synthetic construct
  source 1..120: mol_type = other DNA
ctgcctgaatatgagccaggaatttcgatgtgatttttttccttctttttcttattttgcttctcctcccgctcccactcccaatccccgttttctttctttgtagaaagatagcagaca

SEQ ID NO: 31552 - DNA, 120 bp, synthetic construct
  source 1..120: mol_type = other DNA
cagacagcagaggtctttttggtagaaggatttccataatccatgtattttctagaacttgttggctaaatggctaagtgaatgttttttggagtgctaccagaccctgcccttcctgtt

SEQ ID NO: 31553 - DNA, 120 bp, synthetic construct
  source 1..120: mol_type = other DNA
taaaattatcaaaggatattctcctactttaaatttaagactgatccttggggtcttaagtacaggatgagtcactgggttcaacgtgtgggcacacatgtaggagagaagtgctggcat

SEQ ID NO: 31554 - DNA, 120 bp, synthetic construct
  source 1..120: mol_type = other DNA
aaccagctgtgataatgtaactctttgggattctgcactatgataaaatgcagatggtcctcagacttgaatgcatctaaggcgttggggaaggtctctggttgctttacattttcttga

SEQ ID NO: 31555 - DNA, 120 bp, synthetic construct
  source 1..120: mol_type = other DNA
ataaaataaaggatctttcaaagaatacctctgatctgattctggcatgccccagtatcaaacctaccaactacttcccaccataattaagacggtaggccccagtatcaaccctaccaa

SEQ ID NO: 31556 - DNA, 120 bp, synthetic construct
  source 1..120: mol_type = other DNA
aggtcatctgcaaacagggacagcttgacttctttctttccaaatggggatatcctatactttacttcttttgcctaatttttcagctagaacttccattactgtgttgaagaaaaataa

SEQ ID NO: 31557 - DNA, 120 bp, synthetic construct
  source 1..120: mol_type = other DNA
caaccctacccatgtaaatgaaactctggtggcttcaatgtgaatactcctaaatatctcttcctgtcttcctttctgcatctatgcagccactgccttaatttaagcttggaacagtac

SEQ ID NO: 31558 - DNA, 120 bp, synthetic construct
  source 1..120: mol_type = other DNA
gtactaaacccatgaagggcttcctactctgtgcatgcccaaggtgatatacatagggtgcagtgttgggttgaaccataagagataatcctttatgttggtcaaaagagtcaactattg

SEQ ID NO: 31559 - DNA, 120 bp, synthetic construct
  source 1..120: mol_type = other DNA
tcttatcaattactatgtcccctcagagaaggcaaaacataagtatgtaattttgctgctatgacagacagaagagtcttgctggaggccactggcaaacacattaatcactgaagcacc

SEQ ID NO: 31560 - DNA, 120 bp, synthetic construct
  source 1..120: mol_type = other DNA
atacttagatctagttcatatcaaacccaagggtactttaaaacaagttgttggcctttctacttatgtggcagcatatttcttctattttgtagtgttcagtttctgaaggaataatgt

SEQ ID NO: 31561 - DNA, 120 bp, synthetic construct
  source 1..120: mol_type = other DNA
cacttcacatccacaaggatggctcttatcaataacccagacaatgacaagttttcaccaggatatggagaaatcagagccttcacacactgaatgtaaaatggagcaggcattgtgtaa

SEQ ID NO: 31562 - DNA, 120 bp, synthetic construct
  source 1..120: mol_type = other DNA
agagctattaattcacgtgacaacttgaaaacattatgctaaaggaagaagttagttacaaaagaccacacattgtatcattccatttatacgaaatgtccagaataggcaaatgcacgg

SEQ ID NO: 31563 - DNA, 120 bp, synthetic construct
  source 1..120: mol_type = other DNA
ccgttttggaaataggctttcaacaaagcactacatgagataactctgcagcatgctccagtgacacattccatcaagacatgattcacagtaattctacagtttatggtgctttctaca

SEQ ID NO: 31564 - DNA, 120 bp, synthetic construct
  source 1..120: mol_type = other DNA
tagtcatcagcgccatcattaaccttagagatgtctggtaagtattttctaggccattagattgttttttagccaactaaaatgtgtacttcctgtaaggattttccatatgtttctggt

SEQ ID NO: 31565 - DNA, 120 bp, synthetic construct
  source 1..120: mol_type = other DNA
gctcactgcctgtcttggaaggctgtaactctttgactcacacacccagggtctgtgttgacttttgtttatcagtatatttctagaagttagtccagtgtttgaattcaataggtgact

SEQ ID NO: 31566 - DNA, 120 bp, synthetic construct
  source 1..120: mol_type = other DNA
gaattgttgtctcacgagactttttaatgtctgtgagagtatggacattagcaagagatgccttaactcttaaaaccacctcagtcagtactgtgactcaatgcctcttaactaggcgag

SEQ ID NO: 31567 - DNA, 120 bp, synthetic construct
  source 1..120: mol_type = other DNA
atagcccgctgaagggaaggagagaggtagaagtgggagtgggagaggaaagaggaacaagaggtttctggttttgttatgtaagatggaggaaatgtgcttatgaataagctaaaaaaa

SEQ ID NO: 31568 - DNA, 120 bp, synthetic construct
  source 1..120: mol_type = other DNA
acttccgcatcttgtagttcacgtcaaagtagttttaactcaatgctaactttcagttgtcattgccgaggaagacaatgtggaaatcagatgttgaaggccaattcaaagcgtcaccca

SEQ ID NO: 31569 - DNA, 120 bp, synthetic construct
  source 1..120: mol_type = other DNA
agcgaaggagagagagggcttaaggaaagttgaaaataatcatggactgattaatatatttttaagcatttactatgggtataccacttgtttgggcaatgaggtgaagaagaataggta

SEQ ID NO: 31570 - DNA, 120 bp, synthetic construct
  source 1..120: mol_type = other DNA
agctgttcctattcggccatcttggctcctcccctcgacatcatctagctctaaccttttggtaatcatcacatttgaattactgatggtgatttttctaaattcatctttatggtgggc

SEQ ID NO: 31571 - DNA, 120 bp, synthetic construct
  source 1..120: mol_type = other DNA
ctcttttttcttttaagagactggatctcatgttatggttcccaggctggcgtgtagtggctattcacaggcatgtaggcatgatcatagtgcactgcaaccttttttttttttttgaga

SEQ ID NO: 31572 - DNA, 120 bp, synthetic construct
  source 1..120: mol_type = other DNA
gagggctgcagacatgctagtgtcagctggtcctgaacccatctttcacttgttataattttatgtaggccaaatatcttgtacattagaaaaagtttaggttgtttaaaaggcaaatga

SEQ ID NO: 31573 - DNA, 120 bp, synthetic construct
  source 1..120: mol_type = other DNA
tgaggaaatttcaaggtacagattggcttgataatgaaatgttaatccaaggtggtaattttcagtgattcaataattctcccatagtaggtcaatacgttccaagcaattgagaggtag

SEQ ID NO: 31574 - DNA, 120 bp, synthetic construct
  source 1..120: mol_type = other DNA
ggagcatggagtcaggactgagcagagaatggtgcagaccaaaaagagaagtacataacagagaaaacctaaataaggcataaaataagtgttactggtcttgagaatggtctggaagcc

SEQ ID NO: 31575 - DNA, 120 bp, synthetic construct
  source 1..120: mol_type = other DNA
aggcaggccagaaataatttcaccaatttctattatgcttttagaacagcgctatccaaactagttgtgtaaaaccaggaggcttttctagttatcttggggattggttagagtttagtt

SEQ ID NO: 31576 - DNA, 120 bp, synthetic construct
  source 1..120: mol_type = other DNA
ctctgctttgctcttccccaccccttttccatttggtggggctagtgagcggaggcgtgaggaatggtggtggaaggagcataattcgatttctttttttttttttttaattttaatttt

SEQ ID NO: 31577 - DNA, 120 bp, synthetic construct
  source 1..120: mol_type = other DNA
cccggatggggcgcctttctttatgggcccatgaggcctctttttgcttcttccctgttttactaacacaaacaaattaagctgaataacaaaagctaataagcaaggagaagggttttg

SEQ ID NO: 31578 - DNA, 120 bp, synthetic construct
  source 1..120: mol_type = other DNA
atctaaaatgatcaagaaaacaatgtaaatacacggcacagttctcaaaaatgttcctgagggtacaagagtgaagagggagctggaataatggctgaagctgaagcaaaagctgcaggc

SEQ ID NO: 31579 - DNA, 120 bp, synthetic construct
  source 1..120: mol_type = other DNA
agcaaaacatcactagaaagcttccctatgcccttccccctaggcacactctcctttgtcatccctaaagaagatgattctcctgattattatagcaattgcttttttgtgtgtgtactc

SEQ ID NO: 31580 - DNA, 120 bp, synthetic construct
  source 1..120: mol_type = other DNA
ggaagaaattgtgacaggagcgacaagacttagtaagcgactgaagtaggggagaaagaaaaatgaggttttgattctgcgtggctgggtttctctaaattgaatgagaataaggaaagg

SEQ ID NO: 31581 - DNA, 120 bp, synthetic construct
  source 1..120: mol_type = other DNA
tttgtgattaaaggtccagtcggctacatccaggtacactaagttaaaaaaaatccttgaatgtgctcgagcttgagttcgttactcagataacatggcagtggccgctttagttatggt

SEQ ID NO: 31582 - DNA, 120 bp, synthetic construct
  source 1..120: mol_type = other DNA
agatttcgctatgatgatggaacattttatccaagaaatgagatgcaggacgtgatttcaaaggtaacgacctctcccacaacctctccaatagtagaatgcatgttgtcattcttcaga

SEQ ID NO: 31583 - DNA, 120 bp, synthetic construct
  source 1..120: mol_type = other DNA
aaaagtacatcactgagctgaagaaagataaactggtaatttctactctgctctgcactagtgaaggtgctatagaatctattaactatgtctattagtttactttcttctgtattttaa

SEQ ID NO: 31584 - DNA, 120 bp, synthetic construct
  source 1..120: mol_type = other DNA
agggctttgaacaggggagtgaaataagttgtgagagcttcacaaatacactcttgcttcagtttgaaaaatggattggagagaaacaaggttgacgatagttaacacctgttagcaggg

SEQ ID NO: 31585 - DNA, 120 bp, synthetic construct
  source 1..120: mol_type = other DNA
aatgatgaatttcatcttgatttggagtcatatggtttataataagcacataatttcttaagtgaaggaagctagttccgtaatttagtactaaaaatagtgacatttctgctgttgcca

SEQ ID NO: 31586 - DNA, 120 bp, synthetic construct
  source 1..120: mol_type = other DNA
agatagaaattcaggaaagcgagcattgcatttggggctactttttccttgagagaattaaccctttttaaagagaccaccgagaggcaaagtgatgctttttatagcttcccagggaga

SEQ ID NO: 31587 - DNA, 120 bp, synthetic construct
  source 1..120: mol_type = other DNA
gagaaatcagggagtatagtcccatcattaaggactatctatctctaattaagcttttcaagtcagctaactttagtccaaactctggcaggaagagttataagggatcgtggcggcttg

SEQ ID NO: 31588 - DNA, 120 bp, synthetic construct
  source 1..120: mol_type = other DNA
cagatgttaagagcaaaaatggaaacaccatccattgtaaagttcacccagtcaccgggataaaaacaattcagttgcctctaagcatgtttcctggtacttgcttcggttatactgtgc

SEQ ID NO: 31589 - DNA, 120 bp, synthetic construct
  source 1..120: mol_type = other DNA
cttcaatttgacattcagagcactgggcagaaatcacatcgcgtcaacacccgccgcgggcctttgtggaatggtgctaaaatatttaaacaatggagaaaaaactcttaagtagattaa

SEQ ID NO: 31590 - DNA, 120 bp, synthetic construct
  source 1..120: mol_type = other DNA
gtacacactggatgattcaatttatgaaattctagaaaacgtgaactatcccatagtaataagaaaccagagcaatgttacccggggactgaggaggtcaggcggaaggagggattcaaa

SEQ ID NO: 31591 - DNA, 120 bp, synthetic construct
  source 1..120: mol_type = other DNA
tatacatatatgtttatttatttttgagatatatcaaggtcttgttatgttttccaagctgttctcacccaggctgaagcgtggtggcatgttcctggctcactgcagcctcaacctcct

SEQ ID NO: 31592 - DNA, 120 bp, synthetic construct
  source 1..120: mol_type = other DNA
ctgtcaatatgtatttatgatagccatcaattaatggctattcaggcaggaggctttgcacatcttccctttttaagaactctgctggaaagtcagtgaaccctggagaagaggatggaa

SEQ ID NO: 31593 - DNA, 120 bp, synthetic construct
  source 1..120: mol_type = other DNA
ggcaagtctactggcaacaagtttccccagtgtttgtggaaatctttattctccttcacttttgaagcataatttcacagggtacagaattcacagtggtgttttctttctttcctctcc

SEQ ID NO: 31594 - DNA, 120 bp, synthetic construct
  source 1..120: mol_type = other DNA
gttgctcttggacttaccacttcactaggttggggagaatcccctggctctgtgttgttcccaggtggccgttgtcctgccttgtttttctttttttttttttttttctcattgatttgt

SEQ ID NO: 31595 - DNA, 120 bp, synthetic construct
  source 1..120: mol_type = other DNA
aacctgcacacgtaccccttgaaacttaaaagttggaagaaaaaaaagtcaggttgtgtatagtagtacttcagaagactgaacgtattcttttatttctgctccttctgaaatcgtgct

SEQ ID NO: 31596 - DNA, 120 bp, synthetic construct
  source 1..120: mol_type = other DNA
ctatgagtttgaatactttagataccttgttgccatggtttgaatgtgccccccagatttcatgtgtgtgaaacttaatctccaaatttgtatgttgatggcatttggaagtggtgggga

SEQ ID NO: 31597 - DNA, 120 bp, synthetic construct
  source 1..120: mol_type = other DNA
aaaaacaacttacagctaacattatacttcatggcgagaaactagatgtttcctttctaagataaggaacaaagcaaagatgtcccctctaccactcctgttcgacattgtacaagtcct

SEQ ID NO: 31598 - DNA, 120 bp, synthetic construct
  source 1..120: mol_type = other DNA
gcagatgggtccagtccatggaccacattttgagtaacattgccttagaggactgatctgtgacttcctgtgtaaaacaaggcaaggcataacatataataggtctaaataatgctagtt

SEQ ID NO: 31599 - DNA, 120 bp, synthetic construct
  source 1..120: mol_type = other DNA
gagaatataaaccagcattcttgcttacttttaaaaaaatcttccctcctttgaaaatttatagacttttaaagtgagaaagttaagtgtctttattgctttggagaagagctagccaaa

SEQ ID NO: 31600 - DNA, 120 bp, synthetic construct
  source 1..120: mol_type = other DNA
ccgctccacaaacacaggatcagaatctaccttttaacaagatcccccaggtgattcagatgcatattcaacctttagaagccctggtccaagtcttatattaatgatcagatgtatgat

SEQ ID NO: 31601 - DNA, 120 bp, synthetic construct
  source 1..120: mol_type = other DNA
cctcttctgaactccctgtgatcctgcgtatgtctgtgtctaagtgaagaaataacgtaatcatccaggtgattcaagggagaaaaaaggttgtatccagaaagaatgtctattcccagt

SEQ ID NO: 31602 - DNA, 120 bp, synthetic construct
  source 1..120: mol_type = other DNA
gacaagaacactggtctactcgccgaacttttttccaagttccttgacaccgaggattaccaattgcttgccaatggagagtctgatttctgaaacgatatttcgaaagtgttagttaca

SEQ ID NO: 31603 - DNA, 120 bp, synthetic construct
  source 1..120: mol_type = other DNA
tgcttttcccgttctatctgagcacaagtgctgcataaaggaaaatggctgactgttctatgtgtatttaaactgggaggtctgaactaaatgatctcttttactgctttccaactctga

SEQ ID NO: 31604 - DNA, 120 bp, synthetic construct
  source 1..120: mol_type = other DNA
aactgggagtggcaagaaggaagctgctaaacgggatccagatgcagctttatccaggggacgcctcatgcctggtcatttgggtggctgggcttgtcccacctcctccccttcttcacg

SEQ ID NO: 31605 - DNA, 120 bp, synthetic construct
  source 1..120: mol_type = other DNA
tttcttcacctctcagttccctccgcgcagctctttggtggttgttgacgctgtgagtgattgttatagtaattgcagtgttgcctgtaattaatgagcctttcaaataaaaaatatgga

SEQ ID NO: 31606 - DNA, 120 bp, synthetic construct
  source 1..120: mol_type = other DNA
gatgtgtgtgcatgtccatgtgtgtggtatgtaaccagtgagataactgtgccttcaaacaaatctattggcaccgtgaaaggatgtaggaattcaaagaactaaaggctactgtaatgg

SEQ ID NO: 31607 - DNA, 120 bp, synthetic construct
  source 1..120: mol_type = other DNA
tacaacttacccaatttacataattggcacacctaaattcctgcattgtagtgaagacgagtctacaactttggctgcacattaaaattacctgaaggccaggtgcagtggctcatgcct

SEQ ID NO: 31608 - DNA, 120 bp, synthetic construct
  source 1..120: mol_type = other DNA
cactccagcctgggtgacagagacatcatctcaaaaaaagaattagctgaagagctaagaaaaatgacaatacccaggatgcattccagagcaattaaatcataacgtggggatggtatt

SEQ ID NO: 31609 - DNA, 120 bp, synthetic construct
  source 1..120: mol_type = other DNA
atttggaaggctaaggcacgagaatcacttgaacctgggaggttgcagaaagacaagatcatgccactgcaccgggtgacagagtgagactgtctctaaaaaaattttttttaattaaaa

SEQ ID NO: 31610 - DNA, 120 bp, synthetic construct
  source 1..120: mol_type = other DNA
gaactctcagagggcaatcttctaagttcttgggggatgactcactgtgtcactcccactaatggcaatttaggtttctgtgcatgtacacagttatctatatacacattcacaaacatc

SEQ ID NO: 31611 - DNA, 120 bp, synthetic construct
  source 1..120: mol_type = other DNA
ctacttattacatacattgcatacatcattctgctccaacccctctgtaatgctaggggtgaaaagaaaacttcttctcccttaaatctctcactggcaaaagatcactgctggcaacag

SEQ ID NO: 31612 - DNA, 120 bp, synthetic construct
  source 1..120: mol_type = other DNA
ccttccaaaaaaagcacacacacacatacacacacacacaacaacatccccccccacacacacaccaaacaaaaacccaaagacaagttcactggcagaagatggtggattgacactgac

SEQ ID NO: 31613 - DNA, 120 bp, synthetic construct
  source 1..120: mol_type = other DNA
gagaataaaataggtgctaccctgtgataaagacaagcaaatcggttggcctgccaattggtaagccatattttctgagaagcttcatttgtgccacttcacaaattatgctctgctgca

SEQ ID NO: 31614 - DNA, 120 bp, synthetic construct
  source 1..120: mol_type = other DNA
gggggcgggtaggagcggaagatttgccagatgggaacttgatgatttttgaactgagattaaatacctgaaagttgtcagtttacttaccagaataaatattgcttgtacagggaagga

SEQ ID NO: 31615 - DNA, 120 bp, synthetic construct
  source 1..120: mol_type = other DNA
tttcaacgttctcttctggaagaacaggtaggtcttcaaagcttgagagttcaaacaggggccatttaaacaggtagattatcaatggctaatgtattcaatggagtcctataggcaaag

SEQ ID NO: 31616 - DNA, 120 bp, synthetic construct
  source 1..120: mol_type = other DNA
tgctcggccagctatacagttattccatctaatatttgtgtcactatttataccatctaaacataaaacaagtgcttgcaggagttccactaaaatttcaaaagcatcatgcctccctgt

SEQ ID NO: 31617 - DNA, 120 bp, synthetic construct
  source 1..120: mol_type = other DNA
cccttcaccctcttcttcgctggggttctgagcattgctattgttggtttctttatgtttttgttcctgctcagaagtttcatcaatttttttctgtttcagtgtcctgatttcatcttc

SEQ ID NO: 31618 - DNA, 120 bp, synthetic construct
  source 1..120: mol_type = other DNA
gaaaactcttcttcagagacccatgtagctagcaacctgtcactcagacaccttgtaaccccattccttgcttcctttttctccttagccgtgtatcactgtctaacatactatatattt

SEQ ID NO: 31619 - DNA, 120 bp, synthetic construct
  source 1..120: mol_type = other DNA
ctagtgaccctcccaccttggcctcctaaattttggggataacaggtgtgagtcactgccagctctagaattttcatcttaaaagttgcctttaaagattttaaaaccacagtaaacgga

SEQ ID NO: 31620 - DNA, 120 bp, synthetic construct
  source 1..120: mol_type = other DNA
aagtgtaaagtactcagtatttgggattggttgcattgttattaaaatgtaatgccagttggatgaacctggaggactttataaaccaggcacagcatgacaaaccccacatgatctctc

SEQ ID NO: 31621 - DNA, 120 bp, synthetic construct
  source 1..120: mol_type = other DNA
agcctttttgaacaattctgttcatcagactcctgggtaaatgaatttctactgtacacactgacagatacagggttagaacctagatctcttgccctccactcctatgttcttcctgtt

SEQ ID NO: 31622 - DNA, 120 bp, synthetic construct
  source 1..120: mol_type = other DNA
gaacaaagtcactgatgcactgaagagcaagtgtatcagatgtcagtgaagtcccttagaagacattcactactactcctctcattcatttcctgcttcacactctacttttcacatcta

SEQ ID NO: 31623 - DNA, 120 bp, synthetic construct
  source 1..120: mol_type = other DNA
ggatggaaacttgcatagatatcccttcaggttacttccaaccacaagacccagtgaatttaattgtaaacgtctccctagtctagatgtacacacggttgttgccagaattgaatagct

SEQ ID NO: 31624 - DNA, 120 bp, synthetic construct
  source 1..120: mol_type = other DNA
tcactatttggatgctggttacactaaaagcccaggctttatcactgtgcaacacagccatgtaacaaaactgcacttgtacccccccattcaacctctgaaaacagagatttaaaaaat

SEQ ID NO: 31625 - DNA, 120 bp, synthetic construct
  source 1..120: mol_type = other DNA
ggaaatagaggacaggaagacaaaagcaaaagcagacgccaccaaggagctgttgtcagcaatattccagatgagcaggacaggcaagcagtgcaagggctgagacgttaagtcctgggt

SEQ ID NO: 31626 - DNA, 120 bp, synthetic construct
  source 1..120: mol_type = other DNA
tatggagacaaaaaaaatgaagtttaatgttaaattgtgggaatgaaatattactcatcgaagtaatattattgaaggaaggatatttttaaagccacagtaaggaaaatatgaatgcat

SEQ ID NO: 31627 - DNA, 120 bp, synthetic construct
  source 1..120: mol_type = other DNA
catgagggctccttaagttttcttgagccttttggtattaacgtctgtcaatcccattctgctttagcaaactcactgtctgccatcacttctgggttttcttcctttgtttcctttgtt

SEQ ID NO: 31628 - DNA, 120 bp, synthetic construct
  source 1..120: mol_type = other DNA
tccctatagtttcgccttttctagaatgtcatatcaatggaatcattctgggtgtggcttccttcacttgtcataattctctgatattcttccatgctgttgcatttatcagtagtgagt

SEQ ID NO: 31629 - DNA, 120 bp, synthetic construct
  source 1..120: mol_type = other DNA
gcctgacagctctctattttttctttttatcacttgtttttagtaattttattatgatgtgtctggtgtggttatatacatatttattctgcttgaggttcattgagattcttagatctg

SEQ ID NO: 31630 - DNA, 120 bp, synthetic construct
  source 1..120: mol_type = other DNA
taactgagattcccaccaacaggtcataagcattcccttttctccacatccatgccaacatctgttatttgttgactttttaatggtagccattttgactgtggcaagatgatacttcag

SEQ ID NO: 31631 - DNA, 120 bp, synthetic construct
  source 1..120: mol_type = other DNA
actgagtttacctaatttagctagtcccagaggactgttagagattctttctctcctgttagctcttatttcccagttgtatcagctttaaagagccccctttcctgctatcatgttaaa

SEQ ID NO: 31632 - DNA, 120 bp, synthetic construct
  source 1..120: mol_type = other DNA
agacctccctccctttgtgttatttttataaaaagcttattaatcatattcactcatttattaggttcacataaggattgcatatgttgtcaccaaaactcttctataaatcccttcagg

SEQ ID NO: 31633 - DNA, 120 bp, synthetic construct
  source 1..120: mol_type = other DNA
actctgtatgttaaaccaaagtaattcggcagtcatcccttttcactaaatgttgacactaggtgatcatgaatagtctctgggcttgggcagggccatttgggaattaccattttggaa

SEQ ID NO: 31634 - DNA, 120 bp, synthetic construct
  source 1..120: mol_type = other DNA
atcactgctaaatattgcatacttcagtccactgcctgtcagtgtcttaaagtatttgttaatatgcactggtgaaagttgctttcaccctcataggcttggacacttacaagctagatg

SEQ ID NO: 31635 - DNA, 120 bp, synthetic construct
  source 1..120: mol_type = other DNA
tgactcttgttatttgtggaagttatattctgtaaagtcacagcgaacactgagttagcaaatactgaaccattgctcctagcggaaatagagggctagatccctatgagcctctgatca

SEQ ID NO: 31636 - DNA, 120 bp, synthetic construct
  source 1..120: mol_type = other DNA
tactgggtatggatgagggaacaggatgtctcaattaagagtgctctgactacctcagaaaaacagcactcctgctttcagtaagtgcatgagtaaccaacattatgtagtgacagattt

SEQ ID NO: 31637 - DNA, 120 bp, synthetic construct
  source 1..120: mol_type = other DNA
cctaataaatggtgccccatccagcatccagtcagtcaccaaaactatagaaatctaggaatctttgttttttgcttcctttctctttctcctatcccacaaccagttgatattaccatc

SEQ ID NO: 31638 - DNA, 120 bp, synthetic construct
  source 1..120: mol_type = other DNA
cctttgtatggatcagagccccttaacagtttgagaacaatgggagttttcaagctgtgttctgtggagctctgaaattcaaaagccattaatctattttatcttggacttcgctgccct

SEQ ID NO: 31639 - DNA, 120 bp, synthetic construct
  source 1..120: mol_type = other DNA
attcaatttgtcccataacaaattcttatagctacagccttgctcgtgagtcctcaactgccatgaatggtgaccaactttatgatttgcgtggctataccttgtaaagtgcctagcaca

SEQ ID NO: 31640 - DNA, 120 bp, synthetic construct
  source 1..120: mol_type = other DNA
tttgaggcatagtaaatgacagaatgaaaaatagtctctctcagtcatgctaatcatgcaacatcattaactggtgaccctatgaagccctatcctttcttttcataaattcaactacta

SEQ ID NO: 31641 - DNA, 120 bp, synthetic construct
  source 1..120: mol_type = other DNA
gaacctattatgtggatcataatactcgaactaccacatgggagagaccacaacctttacctccagggtaatatagcactctttatgcatttgtaattatattttatcacacatgtggtt

SEQ ID NO: 31642 - DNA, 120 bp, synthetic construct
  source 1..120: mol_type = other DNA
agggacagtctgccctccaatgatctacatttgcagcagttgacaggtgcattgtgaggactctgaggtttgtgagcctgcaagttggttattagagcctctgtctttttcttgtgtctc

SEQ ID NO: 31643 - DNA, 120 bp, synthetic construct
  source 1..120: mol_type = other DNA
atgcactgtatcattactgttcttagtaaaaattgacatgtttgcttcattatctgaagcaggatgtgcagtgattcagctagaactcaggataagatggagggacacacagctccagcc

SEQ ID NO: 31644 - DNA, 120 bp, synthetic construct
  source 1..120: mol_type = other DNA
atgccttctgttcattaatagaagtatagttaagagctattttcaaatatggggtcctgcattaggggtttcacaagtcctcatgagaatggttctttgatttttcatgtaatagaaact

SEQ ID NO: 31645 - DNA, 120 bp, synthetic construct
  source 1..120: mol_type = other DNA
tttgaagttacattattttttagaatgtatgtaagtattgaatccaggtgtcctggttggctctcctattgcctagctatgggaacctgagcagtgaagagcttcactcgtcccaggttg

SEQ ID NO: 31646 - DNA, 120 bp, synthetic construct
  source 1..120: mol_type = other DNA
gatgcacagattatggaaggaaaagtcatgagaaaagtttattgagtgataatggacaagaacattaaaaaactgcattaggttgcattgtaggggcctctggcggactgtgaggaaggt

SEQ ID NO: 31647 - DNA, 120 bp, synthetic construct
  source 1..120: mol_type = other DNA
tggagggagggagggacttaaactactcagcaacaaacacaaatgaacacagtagaagactggaaatgtatgtcccatgtgagggaaagattaattttccccttcaagtgttctcattga

SEQ ID NO: 31648 - DNA, 120 bp, synthetic construct
  source 1..120: mol_type = other DNA
ggtgtctttaagtttaccttccagagactacactttattgttttcttcaagaatctcatttttatattctcattaaaaaaattcaatgtatactgcataaagaaatacgtgtcttgcttt

SEQ ID NO: 31649 - DNA, 120 bp, synthetic construct
  source 1..120: mol_type = other DNA
ttggattgtggcccactctaatccatatgacctcattttaactagttacatctgcaaagactctgtttccaaataaagtcacattctgaggttcagggtggatatgaatcttggaggaca

SEQ ID NO: 31650 - DNA, 120 bp, synthetic construct
  source 1..120: mol_type = other DNA
aaagaatttgggttttatgttcctaaggctgaatcgtgtttctcaaccatttttacattattgtttcccttcacccaggacaattgtttgactttattcctctaataacctcctcttacc

SEQ ID NO: 31651 - DNA, 120 bp, synthetic construct
  source 1..120: mol_type = other DNA
actttttatagatatagaaatggagattcagggaggtcaaataacttatctgaggtcacagagctactaagtgttgggacaatgacgccaacttaagcagttgggttccagactcccagc

SEQ ID NO: 31652 - DNA, 120 bp, synthetic construct
  source 1..120: mol_type = other DNA
tgcaatcataactcacagtaacctggaactccagggctcaagttatcctttcacctcagcctcacaagcagctaagactacagggacttgccacgctaaaaatgggagaaaatttttgca

SEQ ID NO: 31653 - DNA, 120 bp, synthetic construct
  source 1..120: mol_type = other DNA
gtgggtatgacatacctcatttttgggattatttaacccttcgtagcctagaacatataatagctctgtaagaaaggactgtccagtgtcacaagcagactagaaagcagagtgaggtca

SEQ ID NO: 31654 - DNA, 120 bp, synthetic construct
  source 1..120: mol_type = other DNA
cctggcattcagcagtgttaaagctgtcaatctacacctcagcatttggagctctaatgatttttacttttgtaaaattagaaatacttaaacgaccttacagcaatatgcatgcactgt

SEQ ID NO: 31655 - DNA, 120 bp, synthetic construct
  source 1..120: mol_type = other DNA
tttcgtttctcagtcacactagctgcatactcaaatttacatgtgcctgatggttactatgttagaaagctcagttataaaacacttctgtcatcagaaaaggacaatggcatcctagaa

SEQ ID NO: 31656 - DNA, 120 bp, synthetic construct
  source 1..120: mol_type = other DNA
tggcccagaatcagagatgactgcagcacatccctatggtctttaatgggagtgaacttggattaagagggaaaccaggtaagagaatgagataaatctatggcaatcgattactatttt

SEQ ID NO: 31657 - DNA, 120 bp, synthetic construct
  source 1..120: mol_type = other DNA
gctcggatgagaaggagttgatcctgctgttctggaaagtcgtggatctggccaacaagaaggtatttctccacattttcgtctaaatgcaaggaatggggcaagaagtttgtggtagag

SEQ ID NO: 31658 - DNA, 120 bp, synthetic construct
  source 1..120: mol_type = other DNA
agttcctcggatagcatttctctaaattcaaatctagatatggcttgttcagtctcagactggccttcactgatagagaccactgtgtaagaagttagtgtacttaggcagttttggcac

SEQ ID NO: 31659 - DNA, 120 bp, synthetic construct
  source 1..120: mol_type = other DNA
ttgaagtgctatttagatatcttggtttatttctatatatgcttttatgatatcggctcttaaaaattacgtgctgggcgccgtggctcacgcctataataatcccggcactttgggggc

SEQ ID NO: 31660 - DNA, 120 bp, synthetic construct
  source 1..120: mol_type = other DNA
tcttttctgtcataactggttaagcagctttttgtccttattgtcacctccagtccctcctaggccattagttgtcttccctcttttcaaccttgaactctgtagttcatgttctaacca

SEQ ID NO: 31661 - DNA, 120 bp, synthetic construct
  source 1..120: mol_type = other DNA
ctttaacaatatttcacattaaatattgtgttttctaaaaaactgcctaaaaattaatggatgtgccataatttatttagtctcctattgttaaatatttaggttgtttccagcttttct

SEQ ID NO: 31662 - DNA, 120 bp, synthetic construct
  source 1..120: mol_type = other DNA
gttgcatttctacatttggaaattcaacaactacatttgtacacatttgaactcagacttcgaatgtacaagtcaggaaatgcaaattgatagttcccaaagctactatgacctgctttc

SEQ ID NO: 31663 - DNA, 120 bp, synthetic construct
  source 1..120: mol_type = other DNA
ttgtcaggaatgctcccagttggttatcctctatacccacatctttaagaaacagaagcatttgcttaatgtctttttcaaaatccagtctcagaaggaggtttgctgcttctggatgtt

SEQ ID NO: 31664 - DNA, 120 bp, synthetic construct
  source 1..120: mol_type = other DNA
ccctcccccgccccacacacttttaaccagttttaggattttattaattaaatactttgccacatgtctggtcagttggtgtctttgtataagaatggtaccacttcctggtaccaaaac

SEQ ID NO: 31665 - DNA, 120 bp, synthetic construct
  source 1..120: mol_type = other DNA
gaaatttgggagatgggcacaattattgtctcattttatagacagaaaaactcaacctcaaagttttagtccaggtgtctgacttcaggatggatgctcttcgcagacctcccaacaaca

SEQ ID NO: 31666 - DNA, 120 bp, synthetic construct
  source 1..120: mol_type = other DNA
tttatgtggatttgtccatttctctgtagtccagatattttttgccttatactttgaaatgtgttattaagtgcatatatatgtaaattgtttttttttccaggtagttattcattttta

SEQ ID NO: 31667 - DNA, 120 bp, synthetic construct
  source 1..120: mol_type = other DNA
ttcagtgagatgatgtctctgcaagctttggcacagagttgttattcaagtgaatattagctaccactctttgaggttagtagtcctggggacaattcttttctccccctaaagaaggaa

SEQ ID NO: 31668 - DNA, 120 bp, synthetic construct
  source 1..120: mol_type = other DNA
caaagtgaccattaagttccttaattgtgaggaagcatctttaagaggaaatgattctacagccagaaatatgcgtgaccagttctacaggatgtgatgtcatgtgactggtggagcttg

SEQ ID NO: 31669 - DNA, 120 bp, synthetic construct
  source 1..120: mol_type = other DNA
attttggcaatttcactgtttaaccacatcctagttttgtccattggtttgcttacactatttcttttttattttttttaatatttcctttcctttttaatattaaacaattgtgattct

SEQ ID NO: 31670 - DNA, 120 bp, synthetic construct
  source 1..120: mol_type = other DNA
tgtaaatgctagagcaaccatttttaaaaaatggtatagccaataagccatagaaaagatgagatggaatttgaaaagaaaaacctcatatgaaatgaaaggaagaaaggaacagtgaaa

SEQ ID NO: 31671 - DNA, 120 bp, synthetic construct
  source 1..120: mol_type = other DNA
ttaattatccactcagttctgtggtggagcctgacaacaagttagggaaaaaagaactgtggtaacaaggaagccagagctttatgctaccagcttccttcaaaagtcttagctaaagtg

SEQ ID NO: 31672 - DNA, 120 bp, synthetic construct
  source 1..120: mol_type = other DNA
atgtgctgtaaattaagttgtttgcaattaaaacaaggtttgcccacatccaagatgaccttgtgattttgtgctgattgtgtctgaggacctttccctccacatatggtctggcagatg

SEQ ID NO: 31673 - DNA, 120 bp, synthetic construct
  source 1..120: mol_type = other DNA
ggagggggttctcagaatgtgacatattctagacctctaagatatagcccccagcgaagaacaatgtgcttttgatgtgtattaaacaaaatcccctgctgagaactaacttcaaaaagc

SEQ ID NO: 31674 - DNA, 120 bp, synthetic construct
  source 1..120: mol_type = other DNA
agaaaacctgcagaagtaagttacagtgggagttggagaagggcttgttctgctaaatgctcctctagttagttttcctttccgtgcaaatcttaagcaagatgtgcttgtattcagcat

SEQ ID NO: 31675 - DNA, 120 bp, synthetic construct
  source 1..120: mol_type = other DNA
gagttagactgggttcaaatcctcgttcaggatcagttattagttgtgtgactttgagccaggtactgaccctctccatgctgcttcatctacaaaataggatcaacaatagtacttcat

SEQ ID NO: 31676 - DNA, 120 bp, synthetic construct
  source 1..120: mol_type = other DNA
gacctgtccctgacaggtattcactataagtgacccctgcaaagccattatcttctttgactctcagttttctcaattgtaagatgaaaacaataccaagatggccgaataggaacagct

SEQ ID NO: 31677 - DNA, 120 bp, synthetic construct
  source 1..120: mol_type = other DNA
gagaaatggagaaattgagaaacttggcaacacatccagtaaagagctgaagcttttataacagcacaatacaggaacaaaaaggatagctttggggaatgccagcctttccaaggtaag

SEQ ID NO: 31678 - DNA, 120 bp, synthetic construct
  source 1..120: mol_type = other DNA
ctcattgtggtattacatagacaactgtgaagataattattttgatgagtaaattactacaataaattgtcatacgggaaatatccagatcaagaatagaaattgggtccccacacaaac

SEQ ID NO: 31679 - DNA, 120 bp, synthetic construct
  source 1..120: mol_type = other DNA
aaaaagaatgccatagtgaggatgacatacttcatcactgttttacccttggcagctctcactccacctgcatgaagacatgaaaaaatctctttctgcgtgatagtgcaggtgtgtagt

SEQ ID NO: 31680 - DNA, 120 bp, synthetic construct
  source 1..120: mol_type = other DNA
aaaattcaatatctgaaataaaaagcttactggataggcttaatagcagaatgaagatgacaaaaaattgattggaaaaaggtcagtgaaaattacccaatctgaagaggagagagaaaa

SEQ ID NO: 31681 - DNA, 120 bp, synthetic construct
  source 1..120: mol_type = other DNA
aaaaaaaaagaagatgtctcaagggaaattaaaaaaaatacactaaaccgaataaaaatgaaaatacaacaaatcctgttaaaatttgtaggacacatgctgctacttgaagagcctaga

SEQ ID NO: 31682 - DNA, 120 bp, synthetic construct
  source 1..120: mol_type = other DNA
tctgaagggtagttttactagatatggtaatcttggctcacagtttgttttctttcatcattttgaatatggcatcccattgtctcttggcctatgtttctgctgagaaatctgctgtta

SEQ ID NO: 31683 - DNA, 120 bp, synthetic construct
  source 1..120: mol_type = other DNA
tctagcattaggtatatctcccaatgctatccctcccccctccccttgaaatgtaagaacaaataatcattggcggttcccatattcaaaagatcagatagtgcttaggttagtgacaga

SEQ ID NO: 31684 - DNA, 120 bp, synthetic construct
  source 1..120: mol_type = other DNA
ggagttttgggttatattggactcctagggaatatgaatctgtactttgaacatgacttagtacattggtgagagagctaacatgagtttggattgattctacatcagaagattcaccag

SEQ ID NO: 31685 - DNA, 120 bp, synthetic construct
  source 1..120: mol_type = other DNA
cttaatttatgtaacgttgttattttatgattatacttttttcatggacatataccggcttgagtatgatctactggcaagggcaaaaggtggtgtagctagtctgttacctaagaattg

SEQ ID NO: 31686 - DNA, 120 bp, synthetic construct
  source 1..120: mol_type = other DNA
aaccactactgaagctgcatcccagaaattgtgatatgtttacattttttattttctttaaagtgttctgttattttccttatgatttcttctttgggccctgggttatttagaaatatg

SEQ ID NO: 31687 - DNA, 120 bp, synthetic construct
  source 1..120: mol_type = other DNA
taaacctttacaagcatccttatcccagctacacaagaggtttatatcaacttaaaatccccagataattttcaacttgtttcaagccctgcctaataataggccatattagtagctagc

SEQ ID NO: 31688 - DNA, 120 bp, synthetic construct
  source 1..120: mol_type = other DNA
gctcatgaagatgtagaatattaagtatgagtgaatgctgtaatcaatcatgaagccttgatgagaacttctgggtagtccacccagaagtccaactgctgcttgtctcacctgtgccaa

SEQ ID NO: 31689 - DNA, 120 bp, synthetic construct
  source 1..120: mol_type = other DNA
ccttttggcttagaaattccacttttaagtgtgttaggagtttcagagttaaggaaatggagaagtgggcaaagatatacacagagagatgtacacagtgagagatatcacacagttaat

SEQ ID NO: 31690 - DNA, 120 bp, synthetic construct
  source 1..120: mol_type = other DNA
aattacttatttgcatgtcaaccagtaagggggcatatctatagacttttatcaaataaatcatacatgggatggctggcagaactcctcatggcccatggtgatggtggttgtggggta

SEQ ID NO: 31691 - DNA, 120 bp, synthetic construct
  source 1..120: mol_type = other DNA
catcagtatctatccagaagcacttttccatcgggtttctgttctcttctctcttcttccctctttcttccttcttcttctcttctattctcttttctcttccctttccttctctctgtc

SEQ ID NO: 31692 - DNA, 120 bp, synthetic construct
  source 1..120: mol_type = other DNA
attcgagaccagcctggacaaaatagggagacccaacctctacccgcaaaaaaaaaaaccccataaactggcttatcttcaaaagtggatgggtgtcagtcttgtacatgaaatattaag

SEQ ID NO: 31693 - DNA, 120 bp, synthetic construct
  source 1..120: mol_type = other DNA
actggaacaagatcatttcagagataacacagtcctcaaagcccaaaatatttcctatctggccctttacaaaaaacatttgccaatccctggtcctgatcctggctgcactactcaatt

SEQ ID NO: 31694 - DNA, 120 bp, synthetic construct
  source 1..120: mol_type = other DNA
agttcacagtaagacagttcacagtacacagtaggacagtttacagtacacagtaggacagaacacagtaggacagtttacagtacacagtaaaacagttcacagtacacagtatgacag

SEQ ID NO: 31695 - DNA, 120 bp, synthetic construct
  source 1..120: mol_type = other DNA
agtaggacagtacatagtaggacagtttccatgacacagcaattagtaggacagtttccaagacagtagagaagtttccatgacagtttccagaggcctgttaactcaatagacacagtt

SEQ ID NO: 31696 - DNA, 120 bp, synthetic construct
  source 1..120: mol_type = other DNA
tcctttcagggtgtgggttctctttagaccagggccttactagtgcacgacactttaccatagtgacaccagtgcaccctcgtatattggtaatatgcatgtgtataatataaatataca

SEQ ID NO: 31697 - DNA, 120 bp, synthetic construct
  source 1..120: mol_type = other DNA
cctcttgctaattcagatagatgaagaaaagccagcgtgcattcgtgaaattccagaaccacagcgcataggctgtttctgtcaagtccatacagcaactcagctttaagttaaacataa

SEQ ID NO: 31698 - DNA, 120 bp, synthetic construct
  source 1..120: mol_type = other DNA
gtactaaaagtatatgcagcaagctcttaatataacatgacacactgtccagtttaaagatcagtaaatacagccaatttctgttatctgaatcaagtagttttacattctggaaagtaa

SEQ ID NO: 31699 - DNA, 120 bp, synthetic construct
  source 1..120: mol_type = other DNA
atagcaaacccaacccagaaatttacagcgtgttaagaaaagcagcattgcgaactgcaaacgtaagagttttcctttgacactctacgcacggttttcagctgtcaaattacaactcag

SEQ ID NO: 31700 - DNA, 120 bp, synthetic construct
  source 1..120: mol_type = other DNA
gaaagtggctttcagctccatccatattgctgcaaaggatgtgaactccttttttatggctggattgtatttcatggtgtatatgttctacactttcttcatacagtgtatcattgatgc

SEQ ID NO: 31701 - DNA, 120 bp, synthetic construct
  source 1..120: mol_type = other DNA
tcccagcacagtgtattgaaaagactatcctttcaccctatgaatgttcttggtgcctttgttgaaaatgagttggctatcgaatactatgcagccataaaaaaggatgagttcatgtcc

SEQ ID NO: 31702 - DNA, 120 bp, synthetic construct
  source 1..120: mol_type = other DNA
gccttgcacttgtatgacatgccctcagcccttaggggctacccagtgttccctaccaggtggccttctccttagcatagcagtttgttttttcttttctttttttttttttttattata

SEQ ID NO: 31703 - DNA, 120 bp, synthetic construct
  source 1..120: mol_type = other DNA
acaggtgtgagccatctcacacggctatatcctgatttttaatatcgaaacctaaaataatgctaaaatctaggtcctctgaataataaaatttcagttagtctgttcactgaatttaga

SEQ ID NO: 31704 - DNA, 120 bp, synthetic construct
  source 1..120: mol_type = other DNA
ctttgacctagcagagaaggaaagcaactgaagagcaaccttattctggccctattttggcacttaggttggtttcattttggtacatggctctgttctttcatcatacagggaagtatt

SEQ ID NO: 31705 - DNA, 120 bp, synthetic construct
  source 1..120: mol_type = other DNA
tttcagaataatgctttatggaaattgaagcttgcatttaatagattctatattcagtcatgtactacatcatgatgtttcagtcaacaatgggccacatatatgatggtggtcccataa

SEQ ID NO: 31706 - DNA, 120 bp, synthetic construct
  source 1..120: mol_type = other DNA
ctatgatagtgaattacctctcttggacttttcatctgtactagggttgttttcttgctaggtagggagaaatccaagagtaaagattgcttgatatagaggagaaatcactgaggaggc

SEQ ID NO: 31707 - DNA, 120 bp, synthetic construct
  source 1..120: mol_type = other DNA
atcccagtttgtcttataagattaacacaaaagagaaccctatatactaactctgtagaacatttccaagtattactccttaggccctttccctccctccctccctctctcctttccttc

SEQ ID NO: 31708 - DNA, 120 bp, synthetic construct
  source 1..120: mol_type = other DNA
aatatctagacaaaggaacagctgagcattgtccctggtacatacagcagctcagtgaaaatacatgtggctgaaaccaggagaacaagagaacaaggaaacaaccagacatttaagaat

SEQ ID NO: 31709 - DNA, 120 bp, synthetic construct
  source 1..120: mol_type = other DNA
agttcccactttgcatgcagaaactgaagttcaaagggttaggtaacttgctaaggatcacatggcttattacagttactcttctctcattcaattgtgaacccattccagcgtgtatcc

SEQ ID NO: 31710 - DNA, 120 bp, synthetic construct
  source 1..120: mol_type = other DNA
atagtaacagtgtctgtttcagctcttcactaggggaaggtcagtcagaaacctctactctttgctctaatacctgaaattggaggcttttcattttaccactgatgtagaagtcaagcc

SEQ ID NO: 31711 - DNA, 120 bp, synthetic construct
  source 1..120: mol_type = other DNA
tggaagcctctggtgagttatggcatcaaatcaggggacattttgactgaacgagttctgccagaaaaggaaggacacaagtcaaaatcctttgcttttgtatttcagtgacctttgaat

SEQ ID NO: 31712 - DNA, 120 bp, synthetic construct
  source 1..120: mol_type = other DNA
atgggtaacagtaaccagggttctgagaacaggaataaaatgtatcaggaggagatggatcttaaaggaatgtggtacacttagacttaattagagaactgtgaaaatggacacttccag

SEQ ID NO: 31713 - DNA, 120 bp, synthetic construct
  source 1..120: mol_type = other DNA
gaaaggtgaatttgaaacttgtcccatcaagaaatgaagtctgattccccttcccttgaataggggcagactttgtgatttgcttcagcccacaaaatccagcagaaataactttgtgca

SEQ ID NO: 31714 - DNA, 120 bp, synthetic construct
  source 1..120: mol_type = other DNA
ccccagcagtaccctcacttgggtgagtttgagcaattgccaggaaagctcagcattgtaagttttcccaggagatagatttcctttaataactatgatatgtgccaaaaatacaaacat

SEQ ID NO: 31715 - DNA, 120 bp, synthetic construct
  source 1..120: mol_type = other DNA
agatggtgttcttgtcaaggcataaatccaaagggaggcagatgtgcaacacacaggtaataagggagttccttagcaatcaatgagatttgaaatgtccagcttttctttgcctgtatg

SEQ ID NO: 31716 - DNA, 120 bp, synthetic construct
  source 1..120: mol_type = other DNA
cgcatgtattcagcgtgtaaaactgtttcatatatcttggcagtggcagacagtttttaacatccttgcattgtctgggaagaggataaaagtaccagttaatattaggctgtgagcata

SEQ ID NO: 31717 - DNA, 120 bp, synthetic construct
  source 1..120: mol_type = other DNA
ttctaaattcctcccatcctgcttataacccctaggataagttcacttgtttgaaaacctctagaattgaaactatgtttttgatgtaaccagaacatggcagacaccagtgagttctgc

SEQ ID NO: 31718 - DNA, 120 bp, synthetic construct
  source 1..120: mol_type = other DNA
gtatcctagaattagattcctttgtttcaaagtcaatattcaatatttgctaagaatttgtatggggcaggttaactttctaaagtagggataatgggagtctctatctcatagggttgt

SEQ ID NO: 31719 - DNA, 120 bp, synthetic construct
  source 1..120: mol_type = other DNA
gggcttaaaatattcatcatgccatgctgtaaacagatgtgctgtcattcacgctgtttggttccatttctagagcacaggcagagtagatgtagaataattcttaaggaccctaggatt

SEQ ID NO: 31720 - DNA, 120 bp, synthetic construct
  source 1..120: mol_type = other DNA
actcatttgagtgtggttcatggcactccaaaacggttacaatagcaatctcaatgatctcaaagatcactgatgtgccaagtgcagcagcctcccagctacttgggagaccaaggtggg

SEQ ID NO: 31721 - DNA, 120 bp, synthetic construct
  source 1..120: mol_type = other DNA
aaagattctatcaccctctcctccagctccctacacagtgtcccagcatgcagaagctgaaaatgcactttgctcaggaaatgttccaataaaaaagacaacatcaagctcaatttttca

SEQ ID NO: 31722 - DNA, 120 bp, synthetic construct
  source 1..120: mol_type = other DNA
aagcaaagaatatgtacatctcaattagacaccaaacatgggttaatgtctgcagcaaggaagatcagggagtaaattcattcattagactccaatttgcattcctgctatacattttta

SEQ ID NO: 31723 - DNA, 120 bp, synthetic construct
  source 1..120: mol_type = other DNA
tgctatttctcaaggacctttaaatcttagggcagaggctgacgtaaagaagctgtctttcatatcaccatacaccctatacgctactctgatcagatagttgtagatatgcggcgttat

SEQ ID NO: 31724 - DNA, 120 bp, synthetic construct
  source 1..120: mol_type = other DNA
tttgcatgttatttctatctgctaaggcttgtacctcctcccctgttctaacattgtcagccttacagctcatttccaaggatgcatcagggtaccactgaaattattattagcctagac

SEQ ID NO: 31725 - DNA, 120 bp, synthetic construct
  source 1..120: mol_type = other DNA
taggcctgtaaaaataagctggtgatctcagtccagttctttgtggagtaaaagaaaatgaaaatattaacagatacagcgatgtttctttgaacgtttctgaacattggctgtgctaaa

SEQ ID NO: 31726 - DNA, 120 bp, synthetic construct
  source 1..120: mol_type = other DNA
aactcaagacatggatttaaattccatgtacactataattactactatagaacacgatatatataataaaaaatgctaccaaaaatgacaagaaattctacagtagttttcaaataaatg

SEQ ID NO: 31727 - DNA, 120 bp, synthetic construct
  source 1..120: mol_type = other DNA
cagtgtctattatgtaggttgattctggagacagaatttaagtccagaagtgaacaaaagcacccccaggcattctttgaaaattgaaggagagagtaggtttcccttgtatgtgggatg

SEQ ID NO: 31728 - DNA, 120 bp, synthetic construct
  source 1..120: mol_type = other DNA
tggtacagatccataactgtgttataaagtaagaaaaggcacatagtaggataatgatatactttgatagataaaaggcaataaaataaagtgcttttgaaggttactagtagaatgcgt

SEQ ID NO: 31729 - DNA, 120 bp, synthetic construct
  source 1..120: mol_type = other DNA
ttctgctacttttgcttctgggtgttcattggaaacagccctgggaattttccgtttaaactgcaggaggaaaaataagcagccagagagttagcagaagatataggcaagggtaatttt

SEQ ID NO: 31730 - DNA, 120 bp, synthetic construct
  source 1..120: mol_type = other DNA
cctaggtgtcagctaagtcatctcttttaatatctgaatatgttttgttggaaccgcatcgcatagcaaatgaaagacacctgattctctctctctcacacttctgcaaattcctaggag

SEQ ID NO: 31731 - DNA, 120 bp, synthetic construct
  source 1..120: mol_type = other DNA
tgtttaaacttgcttattgtcatcttttgtttgatcttttaaccccagttttaatggtttaatttagtctatttcttcactaaaagccacctcatttctttttggcaaaatgcctggtat

SEQ ID NO: 31732 - DNA, 120 bp, synthetic construct
  source 1..120: mol_type = other DNA
agtagtctcccatttcactcctatgtgggaggagttctacatccatcacattttccacatttaccatctgtgataagttctagctcaataaacttgaagttcaataaacttgaagcacag

SEQ ID NO: 31733 - DNA, 120 bp, synthetic construct
  source 1..120: mol_type = other DNA
agctcttggtttatatagactttgcaattttaggtcctcaatatttgcacaaaattatgaatttttataaatgtttgaatctcaaaaggaccaacatgatcaagcaaaagacagaaccat

SEQ ID NO: 31734 - DNA, 120 bp, synthetic construct
  source 1..120: mol_type = other DNA
actattacctaactatgtagtaaaacttttaagaacccatactaaaactggatccagtagatgttcagcaagccgctctggtgtaggaaaggcttccaaacatccaccagtgtaggacag

SEQ ID NO: 31735 - DNA, 120 bp, synthetic construct
  source 1..120: mol_type = other DNA
tttgtcctaaaggtatatccaaaattatgaattatttttcctaaagtggagcttccaaatttgacaagctttcagttgcacaaaattgcatcaacccctgtagatgttagtgtaaatgga

SEQ ID NO: 31736 - DNA, 120 bp, synthetic construct
  source 1..120: mol_type = other DNA
tactttgtgtgtgggagagtcagagatagagcaagccctcttgtgtctcttcatataagcctactaatccccatcagaccaggtcccttatgatcttaaaccctaattacatcttaaaag

SEQ ID NO: 31737 - DNA, 120 bp, synthetic construct
  source 1..120: mol_type = other DNA
agtggtaataatatatgatgctaaactgttttggaatgagattcaagcagcagcagaatgtggagaaagaaactacattacttaatcctttccttttcaactaccagtttactaattatt

SEQ ID NO: 31738 - DNA, 120 bp, synthetic construct
  source 1..120: mol_type = other DNA
actgcacgtaaggtaggtacatttttccaatcgtcacatgtgtaacttgcccatataataataagtgacaactacagctcaaggctagactttctcagttaccaagctcatgttcctttc

SEQ ID NO: 31739 - DNA, 120 bp, synthetic construct
  source 1..120: mol_type = other DNA
ggagaggggcctgagattctgtgatacgtatgtctgcatttctaacaaactcaagtgtagccaacattgctcatcttactggacatggatcatactttgaatagcaaggtctaatgaaca

SEQ ID NO: 31740 - DNA, 120 bp, synthetic construct
  source 1..120: mol_type = other DNA
gctctttgttttattttcgtggtctggaaccaaacacacaatatctctgacgtgtgtcttagaacttagtgttcaaaaacagaggcacaaaacccagccactagttcaaaaccttcccct

SEQ ID NO: 31741 - DNA, 120 bp, synthetic construct
  source 1..120: mol_type = other DNA
aattagctgcactaatcatgtaaaagcaacaataatgttccactctttaagaagatggcctctgcattcaaaattatcaagaaagactaatttatatgtttattttatccaccattgtta

SEQ ID NO: 31742 - DNA, 120 bp, synthetic construct
  source 1..120: mol_type = other DNA
tctcaaaaaaaaaaaaaaaaagtgtgcttctgcagggagttaatgctattagcacagcagcagcccccttagctacggtttcactttgtgcagtttcagttacctgtggtcaattgtggt

SEQ ID NO: 31743 - DNA, 120 bp, synthetic construct
  source 1..120: mol_type = other DNA
aaatgaggaccattctcaaaatccaaagcacagaggccaaggaccacatgggaagacataaaggcaatttctggttatccccgtgtgctaggataaaaaggttaggttctataagaaata

SEQ ID NO: 31744 - DNA, 120 bp, synthetic construct
  source 1..120: mol_type = other DNA
tgactttaaagcagattaccctttatgatatgggtgggtctcgcccaatcagttgaaggcctcaaaagcaaagacaagtttcccaaagaaagaattctgccttaagactgcaacatagaa

SEQ ID NO: 31745 - DNA, 120 bp, synthetic construct
  source 1..120: mol_type = other DNA
ttgggcttctgttagtcatcagatttgagaattagcatcaggtttgaaagccaattcaacagcagggatggccgaatttttcattgtaattatctcattcaggcccacctgacaagcaca

SEQ ID NO: 31746 - DNA, 120 bp, synthetic construct
  source 1..120: mol_type = other DNA
caaggacctttaaaatcattgtcttgtttaatttccacaatttccctatgtggtaccaatttctttaaacttagacctaaggaaacaattccagcggggccaagggaagtgcccgagttc

SEQ ID NO: 31747 - DNA, 120 bp, synthetic construct
  source 1..120: mol_type = other DNA
ctaacatttgagaaccactgacttagcagaaatgatctgggctgtcaaatgcaatgagtgaggcttgtggaagaccttcttaacacacatcccacacctggcacaaattggaatagtaca

SEQ ID NO: 31748 - DNA, 120 bp, synthetic construct
  source 1..120: mol_type = other DNA
acctagataggcaattggtgccaaagagggcaactggaagattctgagtccccagaaatctctgtacttcctcttcccttctttgacaaagtcaatgttttctcaatttatccacttcaa

SEQ ID NO: 31749 - DNA, 120 bp, synthetic construct
  source 1..120: mol_type = other DNA
agctacagattaatttcactaatattgatgtacttattgatatgaatagcatattagtaaatagaacccaaaagaataattcacaatgatcaagttgggctcaaattttacaggtaagtt

SEQ ID NO: 31750 - DNA, 120 bp, synthetic construct
  source 1..120: mol_type = other DNA
tattatcctggttttatttattattaactaggaaaagagatgaccctcccttccttttctggcacactggttcaaatttcacgcctctcagagcctctcaacaccttccttgccactaaa

SEQ ID NO: 31751 - DNA, 120 bp, synthetic construct
  source 1..120: mol_type = other DNA
cactatccccatacaatgtctttgattaaccccatctttgtcagagaaatggcaaagaatatgcatttttagagagcagaagaaaaattatggattttcctttcatgttcgcaatgtgat

SEQ ID NO: 31752 - DNA, 120 bp, synthetic construct
  source 1..120: mol_type = other DNA
aaggaagagaaggaaggttttgtgtacgagacctgaatccatccatgacgttctccctaacatcagttctccctaacatcagtagtcagtgtctaaaagtgtttaatcaccaagtagcaa

SEQ ID NO: 31753 - DNA, 120 bp, synthetic construct
  source 1..120: mol_type = other DNA
gttgttctttgtaatttaatgtgcagattgtaaaatgctgtattttattatgtttaggatcttaaaacttcaaggggtctatttgaagaaatgaagaaaacagcaaacaacaatgctgta

SEQ ID NO: 31754 - DNA, 120 bp, synthetic construct
  source 1..120: mol_type = other DNA
gtgtttgcaggcttggaagagaaacttctttaaagtattcctgattagtcctgtttgcataagcaaacatgggggagagcatgcctaggcaatgtcaaagtcgaacatcctcttcagtca

SEQ ID NO: 31755 - DNA, 120 bp, synthetic construct
  source 1..120: mol_type = other DNA
ccaccatagagaagctttcagatgaagtaaagtcctgtaaaaagcctgttagcaaatgtagagggagagtttttgaagctgtgtaccagtagcctatgatgatcttgcagatccaagtaa

SEQ ID NO: 31756 - DNA, 120 bp, synthetic construct
  source 1..120: mol_type = other DNA
gttccctccagatgtgtgagtcaagtgattaaactttacatccagcagtgtacccttgggcaatttgtatgaggggtgtttatcaattatcatgaaagcatggcctgaaagcaagactta

SEQ ID NO: 31757 - DNA, 120 bp, synthetic construct
  source 1..120: mol_type = other DNA
gatcgaggcattttttttccctttttttttcctttttttttttcttttaaaaattttggccatcgttctccgtacgggggctttttctgtctgtctgtctggctggcaggctggctttcc

SEQ ID NO: 31758 - DNA, 120 bp, synthetic construct
  source 1..120: mol_type = other DNA
ccaagtgctagctgtgtaaccttggagagatcgtttaactttcctgagcctcagtttccttatctgcataatgaggattgtgtagtgattattacctacctgagaaggcttttaggatca

SEQ ID NO: 31759 - DNA, 120 bp, synthetic construct
  source 1..120: mol_type = other DNA
ggcatcttaattattcacccgcaaacacattctggcccctgagcctcagttttgtcgtctgtaagagaggtgtcgcaatgtctctctctcagggtttctgccaggatgaaatgagcccaa

SEQ ID NO: 31760 - DNA, 120 bp, synthetic construct
  source 1..120: mol_type = other DNA
tttacttggtgtggtggtgtttcattgccattattcttagcattcctgttgaatgcttttgacaagagatttcagaaacacttcctcatcatgtccccgactgcctggcacctctatata

SEQ ID NO: 31761 - DNA, 120 bp, synthetic construct
  source 1..120: mol_type = other DNA
aaaatctatcttagcaactttgaattccagtctaactgaaactttctacactatgatccatatcctccttttccccatccctcctcctcccacaaatctcagcctctcgtaaccaccttt

SEQ ID NO: 31762 - DNA, 120 bp, synthetic construct
  source 1..120: mol_type = other DNA
gcctgcagtgaatatctattcctatacaaagatatttatagcacaaaagctgccctatttgtaggggaaaaaatgatgttttccttccctctctccccactctgcttctctctctctctc

SEQ ID NO: 31763 - DNA, 120 bp, synthetic construct
  source 1..120: mol_type = other DNA
gatcacctgaaagaaccattcttagaagccactgacaattctcatctgaggtccatgccagcaagcttccttcctccttcatcagtgaagaaacgaggtattattttttgggcttatttt

SEQ ID NO: 31764 - DNA, 120 bp, synthetic construct
  source 1..120: mol_type = other DNA
attacactgagtccactgggataatccagaaacatctccttaaaggtcagctaataggcaacctcaatccccctttttcatgtaatatatctaccggttcagggactagggcatgaacat

SEQ ID NO: 31765 - DNA, 120 bp, synthetic construct
  source 1..120: mol_type = other DNA
aaaatgaatcgtgccattggaaaatgccctgtagatcttcatggggttatctgtagccagcagcgtacaggaaactagtcacattattaattgcattctctcttggccaaaggtttagct

SEQ ID NO: 31766 - DNA, 120 bp, synthetic construct
  source 1..120: mol_type = other DNA
aggttccagcctagtggtggcagcagcttgtctctggtaaaagcagcatcataatttcttattttatttttgctactctgttctctcccttgttccttttgctcttccagcttttctagt

SEQ ID NO: 31767 - DNA, 120 bp, synthetic construct
  source 1..120: mol_type = other DNA
acactttttttgctttttctgccgaagataaaacttccttccctaaggcccactgcaggctcccagaaataaacaaaacaagtggcttgactgaccacttttataaaccacagcagaaaa

SEQ ID NO: 31768 - DNA, 120 bp, synthetic construct
  source 1..120: mol_type = other DNA
acactgcaaaaccggtgatgttacctttttacaaaaagtaaatgaggaaaatgaatttcaaacactggtttaggccagctgcagtagctcatgcctgtatccccaacactttgcaaggct

SEQ ID NO: 31769 - DNA, 120 bp, synthetic construct
  source 1..120: mol_type = other DNA
tctcatccctaatgaaaaccaattgatcacccctgcagggtcacaatgagcccagaagccctgtttttctggtctttacctgacagttaagcctattcttttttctttttcagtctttac

SEQ ID NO: 31770 - DNA, 120 bp, synthetic construct
  source 1..120: mol_type = other DNA
acactaactttaccaaaaacctcactgctcacattagctcaagtaatctacttacaaccacaattataaattctgagcttccttggctgacgagtttgcagtaggtggttcttggccctg

SEQ ID NO: 31771 - DNA, 120 bp, synthetic construct
  source 1..120: mol_type = other DNA
caactactgggactttggaatagagaatttccacttaagggaccttgctatgaaatgttagttgaagttacccctatgacatctgaaatacccatgctgtctcaggtgatgtccaagaac

SEQ ID NO: 31772 - DNA, 120 bp, synthetic construct
  source 1..120: mol_type = other DNA
aaacgtcacttcacctcttgaggaactgtccctcttcagtgtccatctcactctctagactgggaatatttactttgaatcacctgctcctagtataataccaacgaagttcccaaaaaa

SEQ ID NO: 31773 - DNA, 120 bp, synthetic construct
  source 1..120: mol_type = other DNA
taaacatgctggctcataattatctggacatgtctggcccccattcatatgagaggttccaggatagcagagtatgcagcacaacagctggcaaatggtaggcacttaatacagaaagac

SEQ ID NO: 31774 - DNA, 120 bp, synthetic construct
  source 1..120: mol_type = other DNA
ccatttttctgctctgacaccctcaacacatcctccctaagctaggctccctcatggtcccaagatggctgccacggttccaggtatcacatgctaaccccagtacgtcccacaaaagaa

SEQ ID NO: 31775 - DNA, 120 bp, synthetic construct
  source 1..120: mol_type = other DNA
ccactggctctgtggtaaacatagagtaagatacacatattatgatcataggtggcctgttgggatgcctacagaacacatggtgcttctggcactctttgtatcagttaagtttagttc

SEQ ID NO: 31776 - DNA, 120 bp, synthetic construct
  source 1..120: mol_type = other DNA
gcagcttgtggtgcaataggaaacaaaaactcagattatactgaaagatggcacctggacaacactttagaatctacagactctatgggtacaatagtgtctttgatccttgcagcaacc

SEQ ID NO: 31777 - DNA, 120 bp, synthetic construct
  source 1..120: mol_type = other DNA
tgttccaggcaaacaatcatcatgcgaggacactcaggcaatgagatccttcttggttgggtaggatttccaaaatttagctggagcagaatctggtcatttcctgatgttttcatttaa

SEQ ID NO: 31778 - DNA, 120 bp, synthetic construct
  source 1..120: mol_type = other DNA
tatggcatcagatggtgctgtggtttgaatatgtcccacatatttcatgtattagaaagtctccaagtggcagtattgaaagggggcttttaagaggtgattggatcataagggatctgc

SEQ ID NO: 31779 - DNA, 120 bp, synthetic construct
  source 1..120: mol_type = other DNA
ttcagagcctttgctatgtcacttacaagctgtgtgtcattggtcagaagatgtttttattctatcagagcttgagtttcatttggaaattgttcttcacagagttttggtatttgtgaa

SEQ ID NO: 31780 - DNA, 120 bp, synthetic construct
  source 1..120: mol_type = other DNA
ctggtagctgcaccttcagggaggcagtcaatggtaacattaacatgcttgacactttgggcataaaaaaactgaaaggtcactggactgcaaatatatgaatgtggagattcaaacctt

SEQ ID NO: 31781 - DNA, 120 bp, synthetic construct
  source 1..120: mol_type = other DNA
tgacactaaaaaccaaaagtgaaatttgggggaataagaagctcccagacagaaacagcttgaaaaacaggctcccatagagttagcaggagggcttaattcagagggaaatctacccag

SEQ ID NO: 31782 - DNA, 120 bp, synthetic construct
  source 1..120: mol_type = other DNA
tcagacctgaatctttgtgtctccaatcatgcccaggaacctaaacaagatccccaactccttcctgtgtttggacattttatgtgaaattcgactttaacccatgtttgatatctgcct

SEQ ID NO: 31783 - DNA, 120 bp, synthetic construct
  source 1..120: mol_type = other DNA
aaaactctgatttcatgaacagtgtgctaatcaataattttccctgttcaagaaggtttaatgtggcttttcctagagcctttcccactacagcacaaataaaaactaaccctatgtcat

SEQ ID NO: 31784 - DNA, 120 bp, synthetic construct
  source 1..120: mol_type = other DNA
atttggtgagagccatgaagagcgaatgtgaaaagggaagacagctgaggagtttgttatagggcacccaaaaaacaaaatcaaaaggatctgtcaaagcttaggaagatgagcagtcag

SEQ ID NO: 31785 - DNA, 120 bp, synthetic construct
  source 1..120: mol_type = other DNA
ctccgatgcaagtctgacaagttaatgatttaacaaatcaaagtgggcacgactcagagaaagagggcaaaggaaaattcccgacataaaaaagcgaagaagaaggagaaggagaaggag

SEQ ID NO: 31786 - DNA, 120 bp, synthetic construct
  source 1..120: mol_type = other DNA
aactcagcaaagttaagtactatccaagtgtactcatactgggacttgaaccctgactccagtacattttttccaatgcaggtcttctaaatctgactctagtatcctttctccaccaat

SEQ ID NO: 31787 - DNA, 120 bp, synthetic construct
  source 1..120: mol_type = other DNA
tgttcaggttgtgcactgaacaaccttagagaataccattcattcccatcatctatgatgtctattcttaacctgaaaaaccatacagagtggccctgtctgtatgcaagatggcatgga

SEQ ID NO: 31788 - DNA, 120 bp, synthetic construct
  source 1..120: mol_type = other DNA
tttggttcatgacagagtcttcaggatgcagcagttaacgagatcacctctttgctctttggggagatgacactaaacaagtacctgtcaggtaaaggtaagagctaagaggggaaataa

SEQ ID NO: 31789 - DNA, 120 bp, synthetic construct
  source 1..120: mol_type = other DNA
gtaagatgggggatcgatgattcaatacacagaaaacacttaacactgcatgaggttcatggtacgtacttaataaatgtgtgcttatatgtgtgcttgtgggggtatatttggggggtg

SEQ ID NO: 31790 - DNA, 120 bp, synthetic construct
  source 1..120: mol_type = other DNA
aaacacataaatctgcatcacctggccattcttttggtgcaggatcagagggttaagctggaaaatgctgtttggagttctgcctttgaacttcttgcaaaaccataaacatagtgcatg

SEQ ID NO: 31791 - DNA, 120 bp, synthetic construct
  source 1..120: mol_type = other DNA
agagcagggactgaaatccctgcaagcacaggctctcaaatcagtccattcagatgggccggaatgcccatctgtgctgtgccatctccagcacagtcctcttcacaccattatcagcag

SEQ ID NO: 31792 - DNA, 120 bp, synthetic construct
  source 1..120: mol_type = other DNA
aatgtgcctgaggaaaacctctcagaagtgtgtaattcagcaaacgaaagctgagtgataaaatcctgggcaagcattaggcctgtggtggtctatgtataggtctacaggtaaaaccca

SEQ ID NO: 31793 - DNA, 120 bp, synthetic construct
  source 1..120: mol_type = other DNA
gagggagacgccatgaaatacctaagcctggttttgttctcttagtggtaggatcttttaacaaatgtccatggcctactaggacacaccagcatactgcagaactccagatattttggt

SEQ ID NO: 31794 - DNA, 120 bp, synthetic construct
  source 1..120: mol_type = other DNA
gcttgaggtatcaaaagcctcaaaaagtgctctttccttctactgcatacgtaattccccttttcggagtctattccaggaaatggctcaatgtgcagttttgtgcccaaagatgtttat

SEQ ID NO: 31795 - DNA, 120 bp, synthetic construct
  source 1..120: mol_type = other DNA
caaagtgctggaattacaggcgtgaaacaccgcccccaggcctatcatgttatttttaatagcaaaatgtagagagctcctcctgcatgctccacattaaggaaattattaattaaacca

SEQ ID NO: 31796 - DNA, 120 bp, synthetic construct
  source 1..120: mol_type = other DNA
gtttactggagacgttctgagttattggaggattttaaagtaagggttgctgtgatgtaatgatacttctaaaagatcgccctggcttctatgtgaaaactgcatctcagagcagcagga

SEQ ID NO: 31797 - DNA, 120 bp, synthetic construct
  source 1..120: mol_type = other DNA
ggagctgggatgcccccgttgctggttacacacagagcctgatttggtagggctggggtggagctgggatgcccccgttgctggttacacacagagcctgatttggtagggttggggtgg

SEQ ID NO: 31798 - DNA, 120 bp, synthetic construct
  source 1..120: mol_type = other DNA
gagctgggatgcccccgttgctggttacacacagagcgtgatttggtagggttggcacggagctgggatgcccccgttgctggttacacacagagcctgatttggtagggttggcatgga

SEQ ID NO: 31799 - DNA, 120 bp, synthetic construct
  source 1..120: mol_type = other DNA
tctcctgaaccatacacaggaattttcaactgccttccaggtatctccacagggatgttctataggcaccttaaactttggactcacatctttctgcaaaatcagttagtcatcaaagac

SEQ ID NO: 31800 - DNA, 120 bp, synthetic construct
  source 1..120: mol_type = other DNA
gccaatgcctgtcctttaattaaactttacacaagagttaaggtgtttggaaaagtcggggggggggtaataactctattgatcttattaatttccacactagtaggtcattgtgcaggc

SEQ ID NO: 31801 - DNA, 120 bp, synthetic construct
  source 1..120: mol_type = other DNA
acagccaccactaactcatgagcctgtctgcccccaacagtgccgaagttgctgaattgtgagcaaataaataagatggttatttttcaagaccattcaatttggcagtagtttgttatg

SEQ ID NO: 31802 - DNA, 120 bp, synthetic construct
  source 1..120: mol_type = other DNA
gattacagtaagatggagaaacctgcttaaaaatgaaaacctgagcctataaaagtaaatatggcattgcacagacctctcacatggacatcagcatgtcctctgtgagctgcacgcctg

SEQ ID NO: 31803 - DNA, 120 bp, synthetic construct
  source 1..120: mol_type = other DNA
agctcacgtgacagctttctgtagttactaagaatccagactgcttctgcccttctcttccgcactccttcaccctggcttctatcccaaggctcttctcattcacagtggctattatac

SEQ ID NO: 31804 - DNA, 120 bp, synthetic construct
  source 1..120: mol_type = other DNA
gtcaagtaatactagcctgatttctgggaaagagtggcctggagattgattttggttacaattaacccccgataaacactctgaattctgaggcttagatgagtgtctctagtgatgaca

SEQ ID NO: 31805 - DNA, 120 bp, synthetic construct
  source 1..120: mol_type = other DNA
tttttctattaataccattggagtcaaaggtaccaatgttgtctcctcattgacattccacagagtgtatctgagaatgagaaaaaaggagcagaagctgctgggctggaactgaggggt

SEQ ID NO: 31806 - DNA, 120 bp, synthetic construct
  source 1..120: mol_type = other DNA
agaactccagcatcccctccacctacccataactctatcatcccctccatctacgcacagctctatcatcccctctacctacacacaactgtatcatcccctccacctacacacaattcc

SEQ ID NO: 31807 - DNA, 120 bp, synthetic construct
  source 1..120: mol_type = other DNA
aatttatttagtctcacatatttgtgtactctttgctttttgttggtgttccactgtttgagatggaccccaggcatagtactaaagggctgtctagtgttcctaagggcaggaatgctg

SEQ ID NO: 31808 - DNA, 120 bp, synthetic construct
  source 1..120: mol_type = other DNA
atatatatatatatatattttaaaatctccaatgtaaactattttccctgaactcctcccccaccaccccccacacatacccattctcctctcttcttccctgaagctgggcagaatgcc

SEQ ID NO: 31809 - DNA, 120 bp, synthetic construct
  source 1..120: mol_type = other DNA
tggagtatctgtgaagcatttcagctagcagcaagagagccaggcaacagttaattgagatgatgggagggaagaagggggaattttttaatgagtgtccatttcagtgaaaaaaaaagt

SEQ ID NO: 31810 - DNA, 120 bp, synthetic construct
  source 1..120: mol_type = other DNA
cagaagaggatttcaggtgaggtttggccttatcctaagtgcatgaggaaaaggaaacattgaaaaatgaacagttcagatctcagttgcatatgtatgtgtatgtgtgcacgtgcgtgt

SEQ ID NO: 31811 - DNA, 120 bp, synthetic construct
  source 1..120: mol_type = other DNA
tatgtgtatacgtgcatgtgtacacgtttgtggaggtgtgtgtatgtgtgtacgtgtgtgcatgtttgtggtggtatgtgtatgtgtggaggtgtgtgtgtatgtgtgcacgtgcatgtg

SEQ ID NO: 31812 - DNA, 120 bp, synthetic construct
  source 1..120: mol_type = other DNA
tgggctcttctcaggaacctggggggaacagtgttacattcctataagcaacacaggcttgggagttgaatcacctgagcttgaaacctaactataccattttataaattattttaccta

SEQ ID NO: 31813 - DNA, 120 bp, synthetic construct
  source 1..120: mol_type = other DNA
ctccagaatctttttgccatcttgtatcttccttcccactgctatcctcccttcctcttgtccttcaaaaaagcaaaacctcaatctctcagcatggtttggcattactgcctgttattt

SEQ ID NO: 31814 - DNA, 120 bp, synthetic construct
  source 1..120: mol_type = other DNA
atgatggtgatgatagtagccatggtgatggtgatggtggagttgatagtgatggtggtagtgattgtgatgatggtggagttgatggtgatggtgatggtaaagttgatgatggtaata

SEQ ID NO: 31815 - DNA, 120 bp, synthetic construct
  source 1..120: mol_type = other DNA
tgatggtggagttgagggtgatggtggtagtgattgtgatggtgatggtggagttgatggtgatggtggtagtgatcacgatggtgatggtggagttgatggtgatgatgatggtagagt

SEQ ID NO: 31816 - DNA, 120 bp, synthetic construct
  source 1..120: mol_type = other DNA
tgtgatgaggtgcgtgtggtgtgtgtgtgtgtgatgggatgtgtgtgtgatatggggtgtgtgtgtgcatacgtatgtatatgtgatggtgtgtgtgtatatgtgatgtgtgtggtggct

SEQ ID NO: 31817 - DNA, 120 bp, synthetic construct
  source 1..120: mol_type = other DNA
gagatggtgtgtttgtgtgtgatggtgtattatggtgtaggtgtgatggtgtaggtgacggtgtgtgactgtgtgtgtgatggtatattatggtgtgtatgtgtgatagtgtgtgtgatt

SEQ ID NO: 31818 - DNA, 120 bp, synthetic construct
  source 1..120: mol_type = other DNA
ggctggaagcattatgcaaagacagctttctgagaagagcagagaatttaaaatgactcctctgtccccaagcaatgtctctaccttttcaatctctcatttttcatcttctctcaagcc

SEQ ID NO: 31819 - DNA, 120 bp, synthetic construct
  source 1..120: mol_type = other DNA
tgcagggatcagagaagatgcagggggtacacacagcaggtgtcagagcaggtagggggggcatacaggggtcagagtgggtgtgagggtgtgcaggggtcagagcgggtgtgtggagat

SEQ ID NO: 31820 - DNA, 120 bp, synthetic construct
  source 1..120: mol_type = other DNA
aggcttgaaaaccaggtttctggactcctggtgtgtgcagcagggagacagcaggaggaagacattttccagagagaagacataaagtgattgtggatgtagaaatgacgacttcaattg

SEQ ID NO: 31821 - DNA, 120 bp, synthetic construct
  source 1..120: mol_type = other DNA
aaaaccacattcaactcatcagagacttagccttggccccaccacttactgagtgactttctgagcttccacttcctcatctgtcaaacgggcaaaacgtactaggaacacagggtgtgg

SEQ ID NO: 31822 - DNA, 120 bp, synthetic construct
  source 1..120: mol_type = other DNA
caggaagagccaggatttggggtataaggacagcaggtcgcaggaggagccagggttggggatgaggacagcaggtcgcaggaagagccagggtttggggatgagaacagcatgtcgcag

SEQ ID NO: 31823 - DNA, 120 bp, synthetic construct
  source 1..120: mol_type = other DNA
tgaggacagcaggtcgcagtaggagccagggtttggggatgaggacagcaggtggcaggaggagccagggattggggatgaggacagcatgtcgcaggaggagccagggtgggggtagag

SEQ ID NO: 31824 - DNA, 120 bp, synthetic construct
  source 1..120: mol_type = other DNA
cctgtccaagggggaatccctgaacccacggcaaggacgctttctgctgggcttcctccagggagtcacatgccaggaggctgcatgccctgatgccaggaggatttttccagtgattaa

SEQ ID NO: 31825 - DNA, 120 bp, synthetic construct
  source 1..120: mol_type = other DNA
aatgacgtctaaatgtgtcatttgaactttcaacggagtttaccacagatgaagaaagatggtccccaatcacctttctccagtgaatccctcaagtctgcaaacaacacaacaaccact

SEQ ID NO: 31826 - DNA, 120 bp, synthetic construct
  source 1..120: mol_type = other DNA
cttccatgcagtgcttcagacacattactgaatcccatgaggacccctgtatgggaggagtataaaattcaaccaaggaaagctccccaccagccaccatggttgggagcagcaagctgg

SEQ ID NO: 31827 - DNA, 120 bp, synthetic construct
  source 1..120: mol_type = other DNA
cagatgaatgagttgatggatgggtagataggctggtggataagctggtggatgggcttgtggataaatgagtgggctggtagatgggttggtgggtaaatggttggataagtggatgga

SEQ ID NO: 31828 - DNA, 120 bp, synthetic construct
  source 1..120: mol_type = other DNA
gatggatggatggatgggtgggttggtggatgggttggtgggtaaatggttggtttggtggataaatgagtgggctggtagatgggttggtgggtaaatggttggatgagtagatggatg

SEQ ID NO: 31829 - DNA, 120 bp, synthetic construct
  source 1..120: mol_type = other DNA
acaaggccacatgctatgaacacaaggacaaaggaagcgcagcccctgcaatcaggcacaaatggtgagtggggaggtcgacacctatatgcggagctgtggcagacgctgtaccagagc

SEQ ID NO: 31830 - DNA, 120 bp, synthetic construct
  source 1..120: mol_type = other DNA
tatgggtgcgggcccagagagggaggtattctctctggatgctgggattccgtgtcatccaaacattattttctccatacttttccttcttttctaaaatgaacacatgttatttttgtg

SEQ ID NO: 31831 - DNA, 120 bp, synthetic construct
  source 1..120: mol_type = other DNA
aatacatcctgcacagggaaacaatgaattctacacagaggagacaatgcatcctgcacagaagagataatgcattctacactagggagacagtgcatccttcataggggagacaatgca

SEQ ID NO: 31832 - DNA, 120 bp, synthetic construct
  source 1..120: mol_type = other DNA
ctacacagggagacaatgcatcctacacaggtagacaatgcatcctacacagggagacaatgcatcctacacaggggaaacaaaacaacaaatttttctaaagtctgaagaatcctcata

SEQ ID NO: 31833 - DNA, 120 bp, synthetic construct
  source 1..120: mol_type = other DNA
ttcaagtcaggacgatgagaaggaccaggcccctcactctagagggtggaaatgacagtattgtggggaacaaataggctatgtcctgtgcatcacaggtcaccaacagcacatctggaa

SEQ ID NO: 31834 - DNA, 120 bp, synthetic construct
  source 1..120: mol_type = other DNA
gaagccttgtaaaaattaattacacttaaatccttcatgctgaacatgctctgtatgctcctcctgatttgcttataccctctgctgtgttccaagagacagactcaggtgacagcatca

SEQ ID NO: 31835 - DNA, 120 bp, synthetic construct
  source 1..120: mol_type = other DNA
cttgtttgggtaactgcttcctcttgtccttctacctggagggtccaaagtccccagctgctgatagccccaggctgcttcccatgcctcctgggtttcccttcaccacccaggtccttg

SEQ ID NO: 31836 - DNA, 120 bp, synthetic construct
  source 1..120: mol_type = other DNA
aaaaatttaatgcaagaaggggagagcttcaaaaaagcagaggcccaaataaaatgagcagaaagctattgtgctgcaggaaacattggaaaagcctccctttccattcaaaagcctccc

SEQ ID NO: 31837 - DNA, 120 bp, synthetic construct
  source 1..120: mol_type = other DNA
ctgtcaaaacattaggaaacagtgaaaagcaaaaagaagaaaaattgcctataatcccaaaacacagaaataacccttgttaacatcttggtgtatattcttctagacatttttctgtgc

SEQ ID NO: 31838 - DNA, 120 bp, synthetic construct
  source 1..120: mol_type = other DNA
tacgaccaggtggtgtggagtccagctggaatagcaacctcagtgcgataacactcatcatgatgcccaaaaggcatgaccgaaagctccccaaaatcaacccctgtgcaataacgcatg

SEQ ID NO: 31839 - DNA, 120 bp, synthetic construct
  source 1..120: mol_type = other DNA
agaaaggctgagttcatatctgaaggctaagcaaatacataatagaaattcagtgcagtaattgctcccactcaagtatgtgccaactgctgtggccacacaaaggaagaactgtctctt

SEQ ID NO: 31840 - DNA, 120 bp, synthetic construct
  source 1..120: mol_type = other DNA
tacacttgttggctgtccagtgtagaatgaaatggagggaagatactgaagctggtggctggttaaaaagctgcacaatacctgtggtcaaagcctgagatcatggggccctaagcatga

SEQ ID NO: 31841 - DNA, 120 bp, synthetic construct
  source 1..120: mol_type = other DNA
agaattccacctcgattacgtattccacacagcagctctgagagttcacatctgaattgaaagggtctgagaaaacattagctagtaaacagtcctgagcttctgccaattagaaatgga

SEQ ID NO: 31842 - DNA, 120 bp, synthetic construct
  source 1..120: mol_type = other DNA
tacactagtctaatttaccgaagatatggcaggtggctctttttccattttaaaagtgttatactgttctttgaaaagcaacacacaaggaaaaaaaaagaattggaagaaagttcacca

SEQ ID NO: 31843 - DNA, 120 bp, synthetic construct
  source 1..120: mol_type = other DNA
cgatccatcgtacagatcacacctgtaacactaaaacacactcaatgatccactgtacagatcacacctgtgatactaaaacactcaatgatccattgtacagatcgcatctgtgacact

SEQ ID NO: 31844 - DNA, 120 bp, synthetic construct
  source 1..120: mol_type = other DNA
tacagatcacatctgtgacactaaaacacactcaacgatccaccatacagatcacacctgtgacattaaaacacactcaactatccaccgtacagatcacacctgtgacactaaaacact

SEQ ID NO: 31845 - DNA, 120 bp, synthetic construct
  source 1..120: mol_type = other DNA
gggaggtcttcagctgacatttcatatgtgtccgctccattaccacttccaaaagagcaacacaagcatataatgtactgtcagtcactgtggcctcctttgcaggtcataaaaattaat

SEQ ID NO: 31846 - DNA, 120 bp, synthetic construct
  source 1..120: mol_type = other DNA
acaggccaaagagaaaggcttcaaaccagcaccgccaacatctgcatttcagatctctggcctttggggccagaataacaaatttgcagtatgtgaaacatatggcaagattaattttta

SEQ ID NO: 31847 - DNA, 120 bp, synthetic construct
  source 1..120: mol_type = other DNA
aaaaaagcatgtattattaatgcattcaactataggtgactgccaacatgtgcctctagctagctgtagggtgtggggcttcctttggaggtgataaaaatgttctaaaactgactgtgg

SEQ ID NO: 31848 - DNA, 120 bp, synthetic construct
  source 1..120: mol_type = other DNA
agacgaccctggcagaggttccgcttcagagcggaaggttgcttggcttggctgggctgagctgagctgcacatcgtggtaactacggcatgtctgcacacagggaagccagtggggtgg

SEQ ID NO: 31849 - DNA, 120 bp, synthetic construct
  source 1..120: mol_type = other DNA
gcagaacctgcaggccacactgagtcctgggttttattacaggagcaacaaaacaggatctgatttgcaatttaaacagtaactgtgaggggtgtccggagaatgaagcaatgggaggct

SEQ ID NO: 31850 - DNA, 120 bp, synthetic construct
  source 1..120: mol_type = other DNA
acacacgtccacaggaaaacttgtacacaaatgctcacagcagcactatttacaatagtcaaaaggtggaaacaagccaaatcgtagatgaactgggacatatccatacactcggatact

SEQ ID NO: 31851 - DNA, 120 bp, synthetic construct
  source 1..120: mol_type = other DNA
ggggaataatgcacatggggtctcctcttgggggaataatgcacatggggtctcctcttgggggaataatgcacatggggtctcctcttgggggaataatgcacatggggtctcctcttg

SEQ ID NO: 31852 - DNA, 120 bp, synthetic construct
  source 1..120: mol_type = other DNA
atgttcaaaaacaggcagaaccaatctatggtcaagatagaggttacccttggagggtgaacagtgattagaaaggggcatgtggaagatttctggggtgctggtagtattttcattttg

SEQ ID NO: 31853 - DNA, 120 bp, synthetic construct
  source 1..120: mol_type = other DNA
cacaaaaatgctagagtacgcattataagaaaatttcactgttgatcaattgaaagtattcctattgaggaattttttatacttgataataggccactggcaggttaatctcattctact

SEQ ID NO: 31854 - DNA, 120 bp, synthetic construct
  source 1..120: mol_type = other DNA
ttccacaggtcagttcagctcacaaatgggcataaattggcacaaaaaggtatgtcctactattgaggtgtaaggtaacctctaagaaaaatccttctttccttctgcatatgtggcagg

SEQ ID NO: 31855 - DNA, 120 bp, synthetic construct
  source 1..120: mol_type = other DNA
ggccaccaatttgaaccagataatttatgcacacactgttttgatggtaaacacctgttttctctctagggtctggaaagtgaataaatgaggtcagtcacgtaggcgttgtatgcctat

SEQ ID NO: 31856 - DNA, 120 bp, synthetic construct
  source 1..120: mol_type = other DNA
atgacaccctctttggggctttgcagttcctggcatctccactcttctgggcgccacctcgttcccctcatccagatgcgggtttccacagcagaggctgcatgcagtacatctggtcca

SEQ ID NO: 31857 - DNA, 120 bp, synthetic construct
  source 1..120: mol_type = other DNA
gggtttggaaaatgacagatttttttaaaacttccttaggtcataaagaaaataaacattctgacaaaatttttagggcccaagacactcccagtggggactccctacagggtccccgct

SEQ ID NO: 31858 - DNA, 120 bp, synthetic construct
  source 1..120: mol_type = other DNA
ccgtgttttcacgcccacctgcgagtgtctgtgaatttccgtgttttcacgcccacctgcgagtgtctgtgaatttccgtgttttcacgcccacctgcaagtctatgaatttccgtgttt

SEQ ID NO: 31859 - DNA, 120 bp, synthetic construct
  source 1..120: mol_type = other DNA
gccctgggcatgtctgtgcctgggccacgtgtgtgtctgggtacatcaagggaaggccagggtgttgggccgtgtgacctcaagaaagtcacccttgcgcacccgtctttctgtctctag

SEQ ID NO: 31860 - DNA, 120 bp, synthetic construct
  source 1..120: mol_type = other DNA
tcaggtgtggctgcagcatcctctccaggaagtcttcctgttcaccccagccaggtacatgtggtcaaggaccaggtggcggggcagggtgagcacatagcccaggtccctgctgtaagg

SEQ ID NO: 31861 - DNA, 120 bp, synthetic construct
  source 1..120: mol_type = other DNA
gtaaggaccaggtggtggggatggtggggacagggtgagcatgcagcccaggtccctgttgtaagggaaggtcgcgcagctgggctggaattctgggctcagcccctcccttactcacag

SEQ ID NO: 31862 - DNA, 120 bp, synthetic construct
  source 1..120: mol_type = other DNA
tgacggttcagcggccgatgctgcagatgagaaagtggaggctcagtcagggccctgaccaggtgacagggagagctcagagtgccagagggtggggtgggaagcacctgggcctggtct

SEQ ID NO: 31863 - DNA, 120 bp, synthetic construct
  source 1..120: mol_type = other DNA
tgtgaccaggatcaggctcagtgtgtggccagggtcaggcctcagtgtgaccaggatcaggactcagagtgtgaccagagtcagggcttaacgtgtgaccaagatctgggttcagtgtga

SEQ ID NO: 31864 - DNA, 120 bp, synthetic construct
  source 1..120: mol_type = other DNA
ccacacacttcccaaatggaaatcaatggctttgaggctgatatctcacagctttcagaaaacattaaaaccctgacctgctatgctcctccacttagccccttaaatgttttgtgctta

SEQ ID NO: 31865 - DNA, 120 bp, synthetic construct
  source 1..120: mol_type = other DNA
tcactcactcactcatccactaattcactcactcactcagtcatccactcactcattcactcactcactcattcactcactcactcatccactaattcactcactcactcactcatccac

SEQ ID NO: 31866 - DNA, 120 bp, synthetic construct
  source 1..120: mol_type = other DNA
tcattcactcattcactcactcactcatccactcattcactcactcaagtattcactcattcactcgttcactcactcactcatactcattcactcactcactaattcactcattcgctc

SEQ ID NO: 31867 - DNA, 120 bp, synthetic construct
  source 1..120: mol_type = other DNA
cgtacagaccaatgaaacagaagagaaggcccagaaacaaatccatgcatttgcagttaactaatctttggcaaagttgtcaccaatacgtcatggggatatgacagtctctgcaacaaa

SEQ ID NO: 31868 - DNA, 120 bp, synthetic construct
  source 1..120: mol_type = other DNA
gggtttgctggggatcatgtgcccatttaaaagacgaaaatgctgaggcccagagtcaccgggcaggcaagtgaggagttccagcccagtgcatttgggatcagagccagactctcccta

SEQ ID NO: 31869 - DNA, 120 bp, synthetic construct
  source 1..120: mol_type = other DNA
ggcctgggcaccatatacccaccgcccgcgttctctatctgcagggcccgggcaccatgtacccgccacccgcgatctctgtctgcagggcccgggcaccatgtacccgccgcccacgtt

SEQ ID NO: 31870 - DNA, 120 bp, synthetic construct
  source 1..120: mol_type = other DNA
atcaccaccatcatcaccgtcaccaccaccaccactgtcaccatcaccaccaccatcaccatcaccaccaccatcatcaccaccaccactgtcaccatcaccatcactatcaccaccacc

SEQ ID NO: 31871 - DNA, 120 bp, synthetic construct
  source 1..120: mol_type = other DNA
agcagaagtaactgtgccacatgctttcacaggcaatcctgaggcattcctggtattatattttacaggagagcgcaatgaggagcagagattaagcaatatgctcgaagttgcacacaa

SEQ ID NO: 31872 - DNA, 120 bp, synthetic construct
  source 1..120: mol_type = other DNA
ttatcagctaaccttgccctttgttggccttggattaactcagaagcccaaactctttagccaccatctgacccagcctcacttctcagaaccttgagccccgttcccctggaaagcttc

SEQ ID NO: 31873 - DNA, 120 bp, synthetic construct
  source 1..120: mol_type = other DNA
tttctgtagttatttgaagactatagccgctcccactgcacaggcgctgtgatgcctcaatgcattgacccatgtgagccccaggatgttcctggcggaggaaagatctgtgaaggcagc

SEQ ID NO: 31874 - DNA, 120 bp, synthetic construct
  source 1..120: mol_type = other DNA
cacatccactcatctgtccacctgtctgttcatcactgtccagccaaccccttccaacctcctcttccttctattcatccatccatccgtctactcacccatttatccatgctgtctgtc

SEQ ID NO: 31875 - DNA, 120 bp, synthetic construct
  source 1..120: mol_type = other DNA
aggtgggagcaggacattctatgcagaggcaacttcacagatgcctcatccctccctgatactccctggtggaccccctcgggaacaggagtgggacagtctatgcagaggtgacttcac

SEQ ID NO: 31876 - DNA, 120 bp, synthetic construct
  source 1..120: mol_type = other DNA
aatgatcagggtggggccagtgtctattaatgagcggagcaggggccagtgtctatcaatgagcaaaggggaggccactgtctgtcaaagagcaaaggcggggtcagtgtctgccaacga

SEQ ID NO: 31877 - DNA, 120 bp, synthetic construct
  source 1..120: mol_type = other DNA
gtctgtcaatgagcagaggcagggttagtgtctgtcaacgagcagaggcagggacagtgtcaatgaacagaggcggggccagtgtctgtcagtgaggggagcagggaccaggttctgtca

SEQ ID NO: 31878 - DNA, 120 bp, synthetic construct
  source 1..120: mol_type = other DNA
gactcacctgttattgctgcatttgacagggaagacggaacctgagtcactgagagggttagtgactgcccaatgacacacagctggaaaatgctggaatccgcatccaacccacattta

SEQ ID NO: 31879 - DNA, 120 bp, synthetic construct
  source 1..120: mol_type = other DNA
tcccttcaggacgtcccgtgctgcagccaccagcatgggatgggccttacgtgtgtgcacccatcaatctgcttcccatgagcaggggcagagaaaggccacactggcatgatgctgctg

SEQ ID NO: 31880 - DNA, 120 bp, synthetic construct
  source 1..120: mol_type = other DNA
tggctccacttctgctctcagaggaactttagtgtatttatcaactccattcctgcacagcagagaaaaaggaagatgcccaacataaaccagtaaagagaaacgtggcctggtgtgctt

SEQ ID NO: 31881 - DNA, 120 bp, synthetic construct
  source 1..120: mol_type = other DNA
gaagggcagtcactgtctttgggggcactggccagtttgacacgtcggttccacaagtactggcaagtcgctgtggagcccactactccaggctctggggatggggctgaccccaggcaa

SEQ ID NO: 31882 - DNA, 120 bp, synthetic construct
  source 1..120: mol_type = other DNA
actctgctgatgacagacagatcttgttagcactgacccctcccattaccaccacaacccaggcccagaaattcaacaaaatggtgcttttcccttcactatccccatctgctctctgag

SEQ ID NO: 31883 - DNA, 120 bp, synthetic construct
  source 1..120: mol_type = other DNA
gttatgcatgtgtgactgtgagtgcctgtgtggttgtgggatgtgtgaccatgtgacattgtgtgtgtgtgagggaaaaagggagacaggaaaaggcaccgagaatgggcagagcagaaa

SEQ ID NO: 31884 - DNA, 120 bp, synthetic construct
  source 1..120: mol_type = other DNA
gggatatgcaacaccaccaagggaggggaggaggtcagagaggaaaagaggctggagtagatggatgacgaaccagcaccaacgaagaccagggccctggagagcatgagagggatgagg

SEQ ID NO: 31885 - DNA, 120 bp, synthetic construct
  source 1..120: mol_type = other DNA
agagcatgggctgcacagcaggaggaaacttctagaaggaatcaactcaacagtaaaaagaaaaatacccgatcaggacatgggcaaaggatctgaatagacattccttccaagaagata

SEQ ID NO: 31886 - DNA, 120 bp, synthetic construct
  source 1..120: mol_type = other DNA
ggagacaaaatttactaatgctccctttataggtaatagatattggctgaatgcacagacgggtggatgcacagatgagtgaagagtgaacggggcagaggatgaatgaacaagaacact

SEQ ID NO: 31887 - DNA, 120 bp, synthetic construct
  source 1..120: mol_type = other DNA
tggcatccacaccatcctctctctgcacagagacacactctccaagctggaaaccccggacaatggcctgtgaggggatccaggcacttggtgactgagctcagcctctgctcagaaatg

SEQ ID NO: 31888 - DNA, 120 bp, synthetic construct
  source 1..120: mol_type = other DNA
gtccactgtgtagggacagttgttaaggaagagaactcccagggagagaagccaccacggagagaggagagggccccacagacaacacaggagatggggacgagtcagggggatgttaac

SEQ ID NO: 31889 - DNA, 120 bp, synthetic construct
  source 1..120: mol_type = other DNA
taaacatagaaaaggtacggcagaaatacagttttaaggatttttttaaatgatacaactgtatagggcacttaccatgaacggggcttgcaggactagaagttgcctgcgtgcgtcagg

SEQ ID NO: 31890 - DNA, 120 bp, synthetic construct
  source 1..120: mol_type = other DNA
gacgctgtacactgctggggactctgtaacagacgctgtacactgctggggactctgtaacagacgctgtacactgcaggggactctatagcagacgctgtacactgctggggactctat

SEQ ID NO: 31891 - DNA, 120 bp, synthetic construct
  source 1..120: mol_type = other DNA
cacagcccaggccctaacccatgtcataggttgaactctgacctttgtcacacatttaatcttggtcacacattgagccctgaccctggtcacacactgagccctgatcataggctgagc

SEQ ID NO: 31892 - DNA, 120 bp, synthetic construct
  source 1..120: mol_type = other DNA
tggtcacactgagcccagatcctggtcacacactgagccctgattctggtcacacactgagccctgaccctggtcacactgagccctgatcctggttacactcagaaccctgacactggt

SEQ ID NO: 31893 - DNA, 120 bp, synthetic construct
  source 1..120: mol_type = other DNA
tcacagtgaacggtgattttgtgccctgttctctgtcactggcccttcttcctcttctttccagaactttgtccagatccttagcaacctgttggcagaggagaatcgggacaagtggga

SEQ ID NO: 31894 - DNA, 120 bp, synthetic construct
  source 1..120: mol_type = other DNA
cttggaagagccagacaggcccagacctggaccagaagctggcactcagaatggggtcacagcaggcttatgggttgggcccaagtggagcgacccctcaatgcccacccggttcctttg

SEQ ID NO: 31895 - DNA, 120 bp, synthetic construct
  source 1..120: mol_type = other DNA
aaacacttgttgtcgaatgctggtgactgttaccaggctagtgtcagttccagggacagtgacggagctggttctgatgaggcgatggcagtgttggagacgagaatgatgatgtgctta

SEQ ID NO: 31896 - DNA, 120 bp, synthetic construct
  source 1..120: mol_type = other DNA
tgatgggatggtgatagtgatggttgtgtggttttgatgacagtggtggtggtgatggtggtcggggtgggggtgatgatggggttgtggtagtaatggttgcgtgattttgatgacgga

SEQ ID NO: 31897 - DNA, 120 bp, synthetic construct
  source 1..120: mol_type = other DNA
gttgatggcatgatgctgatggtcgtgtcttgaggtgatgattgtggtgtgatgaaggcggatggtattgttggtagtggtggtgagacctggtggtaatgatggtgttgataacacatg

SEQ ID NO: 31898 - DNA, 120 bp, synthetic construct
  source 1..120: mol_type = other DNA
agtttggacaacagaggtgagcagcgctacctggggtagttcgaggggcctgtgtggaggcagtggcttttgaaagcctggtgggttggcagtgcttctgcacacgaagagaaggcgact

SEQ ID NO: 31899 - DNA, 120 bp, synthetic construct
  source 1..120: mol_type = other DNA
ggtagtggttgtgatggtattggtgctggtgctagtgattatggtgatggtggtgatggtggtggtggtgatggtggtagtgattgtgatggtggtgatagtggtgctgatggtggtgat

SEQ ID NO: 31900 - DNA, 120 bp, synthetic construct
  source 1..120: mol_type = other DNA
agatggggttctgttgggtgctgaccttgggcccctgcactctccacaggtacattcgctcagagcgttctgtcatcctcatcaacttctgcctgtccatcatctcctccaatgccctca

SEQ ID NO: 31901 - DNA, 120 bp, synthetic construct
  source 1..120: mol_type = other DNA
attgaagtggggttctgaaggatgaagaggagtttgtttgacagatgacatgaggtaggctgctcagggtagagggaacggtccttattgggtttcaggtttccatgggcaccacaggtg

SEQ ID NO: 31902 - DNA, 120 bp, synthetic construct
  source 1..120: mol_type = other DNA
agggggtaaaatcacccaggaaagcggggagcagaggagaggacccgggagcaggaactggggatgggagagcagagggacttggttttcccaggcaagagggaagagggagtcccggga

SEQ ID NO: 31903 - DNA, 120 bp, synthetic construct
  source 1..120: mol_type = other DNA
ggaggttgtagtgagccgagatcacgccattgcactccaactccaacctgcaggacagagcgagactctgtttcaaaaaaagaaactatgtctcttttttataaagaagagaaatagtac

SEQ ID NO: 31904 - DNA, 120 bp, synthetic construct
  source 1..120: mol_type = other DNA
ccatgtagaagtggaagtgacctgattttttcctgacttttcaaggctgtatgtttacatttgcctccaatcattcctatatgggaattccttgggagtctaacttggagattttgtttc

SEQ ID NO: 31905 - DNA, 120 bp, synthetic construct
  source 1..120: mol_type = other DNA
gttcctgatcctaaactcacactttaatctgatgtctttgatttctaggacgcacgtagtgggtcaagagcatagctctcaagtcaggggctgtggacttgaccctcactctggaactgt

SEQ ID NO: 31906 - DNA, 120 bp, synthetic construct
  source 1..120: mol_type = other DNA
ttagtgagatcagggctcgccccacgtgctggagttagtgagatcagggctcgccccgcgtgctggtgttcttgagatcagggctcgccccgcgtctagtgttagtgagatcagagctca

SEQ ID NO: 31907 - DNA, 120 bp, synthetic construct
  source 1..120: mol_type = other DNA
taacgtttatggttatgagaaaaattgcataaccaaaacaaaaccagtctgccatcttttttgtccctatcatttggcacagacagacgaactcctgacgtcacagcaggaccaagagct

SEQ ID NO: 31908 - DNA, 120 bp, synthetic construct
  source 1..120: mol_type = other DNA
agggtgtctctgaggtcaatgaggaacagctgaggtccagggacgcaggaaggatggggtgaactccgggatggggccggcagggagcctcacgcttacagagcctggtgttggcactct

SEQ ID NO: 31909 - DNA, 120 bp, synthetic construct
  source 1..120: mol_type = other DNA
catccagagcaaatacgtgtcacatagcgggggcagctggcgcgagggcactcaccggcttctccaccggcactctgttgtagtagcggatgcagtccttccccaggaagtcaaattcca

SEQ ID NO: 31910 - DNA, 120 bp, synthetic construct
  source 1..120: mol_type = other DNA
cgcacgccacacaggcacgccacacacacaggcacgccacacacaggcacgccacacacatgcatgccacacacgcacgccacacacacacgccacacacatgcacgccacacacatgca

SEQ ID NO: 31911 - DNA, 120 bp, synthetic construct
  source 1..120: mol_type = other DNA
cacacacaggcacgccacacacatgcacacacacacatgcacgccacacaggcacgccacacacaggcacaccacacacgcacgccacacacaggcatgccaaacacgcacgccacacat

SEQ ID NO: 31912 - DNA, 120 bp, synthetic construct
  source 1..120: mol_type = other DNA
cccgagacttccagtcagcccggtactgggagcggatctcgtccacaaatccccgcaggcgtcgagctgtttcaaacttctgccaagctgtctccccctaaacgaagaaaataacaggaa

SEQ ID NO: 31913 - DNA, 120 bp, synthetic construct
  source 1..120: mol_type = other DNA
ctctcccacctgtgggcctctccagcccgagtccctgaagcagctctggagggaatttcttttctggaggaggcgggagtgagaaacgggagcagggtgagggttcccaagtgcacatcg

SEQ ID NO: 31914 - DNA, 120 bp, synthetic construct
  source 1..120: mol_type = other DNA
acggtgtgggggtttggggatggcgcgggttccaggggacggggcgggggcttgggggatggtgtgggttccaggggacggggcggggatttgggggatggcgtgggttccaggggacgg

SEQ ID NO: 31915 - DNA, 120 bp, synthetic construct
  source 1..120: mol_type = other DNA
agatacacaatccaccaaaactgactgaagagtagaaaatctaactagatctacacagcgaggagactgagtcagtaatcaaaaatctcccaacaaagaaaagcccaggacacagctggg

SEQ ID NO: 31916 - DNA, 120 bp, synthetic construct
  source 1..120: mol_type = other DNA
gcactttttattcttgtaaggacattagtcctagtggatcagggccaaacacgtataatcccatttaacctcaattacctgtttgaagaccccatccccaaacgtagtcacattgggggt

SEQ ID NO: 31917 - DNA, 120 bp, synthetic construct
  source 1..120: mol_type = other DNA
caaccccaccaccacgaagctcacacacaaaacagcacccgctacacgaccccatcaccacgaagctcacacacagaacagcacccgctacacgaccccatcaccacgaagctcagacac

SEQ ID NO: 31918 - DNA, 120 bp, synthetic construct
  source 1..120: mol_type = other DNA
cagagggaagcttccagaactcatgccatcttaggtaggaaaggctgttctcagcacatcaatacatgaaatctcaagagactggcagatttaagtgcacagaaaagtaaaaacttctgc

SEQ ID NO: 31919 - DNA, 120 bp, synthetic construct
  source 1..120: mol_type = other DNA
ttatatcccccaccatctggaccctcagtccaggacacactggccctgaacctctgcagcactgaccacaggaccatcctgaactgcctgccaagagctgcccacctgtagcgtcaggaa

SEQ ID NO: 31920 - DNA, 120 bp, synthetic construct
  source 1..120: mol_type = other DNA
actgccaaggactccactcacaaagccgaaaggcctgcctgcctcaaacaaacagagaaataaataaataaccacagcacactttgaaacaacttccaaattaagagttgcatccatgct

SEQ ID NO: 31921 - DNA, 120 bp, synthetic construct
  source 1..120: mol_type = other DNA
atcatgaatgttcttcgtggcatctataatgatgactcctttccagaaggttttcggctgactttgcccagatccatcagaggaatcattatggcacctacagccttgtgaaacatattt

SEQ ID NO: 31922 - DNA, 120 bp, synthetic construct
  source 1..120: mol_type = other DNA
tttgcaaaactgggacagtggccatgcttccctccattaggtgagggttgctcttggggcagttgtcagcagggttttgctttttacttacattttcagagtgggatggagcagctatgt

SEQ ID NO: 31923 - DNA, 120 bp, synthetic construct
  source 1..120: mol_type = other DNA
tcatcttggcttccgctgttgatacctgtggctcatctgtgtttctttgaacgagttttcctgatcactcgtaaccatgtggaatgagctgagtcaatggaagccagtccacgcacacag

SEQ ID NO: 31924 - DNA, 120 bp, synthetic construct
  source 1..120: mol_type = other DNA
gcagaaggaggtgaggacgggcagccgcaacagccgggggccaggcaggaggcagggggaggaaatggcgaagcagggtgcgtggtgggggtgaggctcagatcgggctccgacctcaga

SEQ ID NO: 31925 - DNA, 120 bp, synthetic construct
  source 1..120: mol_type = other DNA
ggtgtacgcagaggacgggagcacccctgagcgggtgtggaccccagaggtgtgggccccgggaggtgtgagccccgggaggtgtgggcctcgggaggtgtgagccccgggaggtgtggg

SEQ ID NO: 31926 - DNA, 120 bp, synthetic construct
  source 1..120: mol_type = other DNA
tgagaagaaagttacagaacccagtgggcaaaccgatgcccacagggccaggcagacagacacagatgagtccagtggcctgagtttcagaaaaatggggaagggtcatgaattgaagcc

SEQ ID NO: 31927 - DNA, 120 bp, synthetic construct
  source 1..120: mol_type = other DNA
ccaagcccagacccaaccctgggggtcagctgaccctgtggtcagaggcttgcttcaggagaagaacagccttggggagaaggaggttgggagcctctgtaacacaaggacactcaggac

SEQ ID NO: 31928 - DNA, 120 bp, synthetic construct
  source 1..120: mol_type = other DNA
accccagcaccccccagccgaccccagcccctcgcctgtggccaggtgcactcacttctccaggtagatggcagacaggctgcggacctgctccagcttgcccagcgtcagctccagctc

SEQ ID NO: 31929 - DNA, 120 bp, synthetic construct
  source 1..120: mol_type = other DNA
acgcatggaggctttgtgatagttacagaaacctttacgacataataaaaataatgtaactgaccaaattgagatggaagatgagggaggaggcaaaagagagagaagcgaggcccattc

SEQ ID NO: 31930 - DNA, 120 bp, synthetic construct
  source 1..120: mol_type = other DNA
tgatggtgatgatggtggtgatgatggtggtgagggtcatggtgatggtgtgatggtggtgatgatggtggtgaggtctggggacagccagaggttctttttgcatttctgaccagctcc

SEQ ID NO: 31931 - DNA, 120 bp, synthetic construct
  source 1..120: mol_type = other DNA
catgtcacagtttccctcacacgagaacctgccttgaattcaggacctgcgaaccccacagatgcatccggcccctcaggacccgtcaataccccacaagactctaccccacaagaaaca

SEQ ID NO: 31932 - DNA, 120 bp, synthetic construct
  source 1..120: mol_type = other DNA
ttaagtacctctaccctcagtactttccccctcaagaccctctcccctcaggaacctcttccctgacaacctccttccctgaaaaccttcccccatcaggactctcattccctcaagatc

SEQ ID NO: 31933 - DNA, 120 bp, synthetic construct
  source 1..120: mol_type = other DNA
tctcacgaccctctctcctcaggactgccttgccctcgggactatcttccctgaggaaactctccccctcaggaagctcttatctcaggaacctcttccctgaaaacccttccccctcag

SEQ ID NO: 31934 - DNA, 120 bp, synthetic construct
  source 1..120: mol_type = other DNA
tctcctcaggactgccttccctcaggactatcttccctgaggaaactctcccctcaggaccctcttcccttagaaccctttccctaagggccctcttccctgaggacccacttctctgaa

SEQ ID NO: 31935 - DNA, 120 bp, synthetic construct
  source 1..120: mol_type = other DNA
tcttccttcagaaccctttccctaaggtccctcttccctcagaaccctctagaaccctgtccctgtcccctcaggacctccccttaggaccttcgccctgaggacactctctcttcaaga

SEQ ID NO: 31936 - DNA, 120 bp, synthetic construct
  source 1..120: mol_type = other DNA
gaaccctttccctaaggtccctcttccctcagaaccctctctcctgaagaacctgtcccctcaggaccttccccttcatgaccctcttctctcaagaccctctctcctcaggaaactttt

SEQ ID NO: 31937 - DNA, 120 bp, synthetic construct
  source 1..120: mol_type = other DNA
caagaacatttttctacaccagcactgaccagctagaaagtatatgaaaacactatctacaatagcaacagaaacttattaacagccaggtgtcatggcgcatgcctgtggttccagcta

SEQ ID NO: 31938 - DNA, 120 bp, synthetic construct
  source 1..120: mol_type = other DNA
gaggcactctggcctctgatttaaagtgagaggtgtgcggctcttcctctcacatgaacacatagaggtgattgtagggttttaattggactaatttcattattgttgtctttcagggag

SEQ ID NO: 31939 - DNA, 120 bp, synthetic construct
  source 1..120: mol_type = other DNA
accatccaccttctctctctacgaatttcactgctcgaggcacttcgtgtaagtggacgtaaacagcgtttgtccttttgtgtctggcttctcccactcagcataaggtcctgaatgttc

SEQ ID NO: 31940 - DNA, 120 bp, synthetic construct
  source 1..120: mol_type = other DNA
gccttccctcagtttaataccaggtcttcggccttccctcagtttaataccaggtcttcggccttccctcactttcataccaggtctttggccttctctcactttaataccaggtcttag

SEQ ID NO: 31941 - DNA, 120 bp, synthetic construct
  source 1..120: mol_type = other DNA
ttgccacctcaggccctgctggatgacggagcacacagaccacagacagcggtactttggaaaacaccctgcatggggcagccagttacgcggtcacagaaacccgagcagggcaatggg

SEQ ID NO: 31942 - DNA, 120 bp, synthetic construct
  source 1..120: mol_type = other DNA
agaaaagaagcaagttggacaaaatgtcactggaactaatctcccaagtagaagaattccacattgtttactgagatagttccccttcgaggaggtgatgcttaactcctcactccagaa

SEQ ID NO: 31943 - DNA, 120 bp, synthetic construct
  source 1..120: mol_type = other DNA
acaccctgatcacagcatttagagcagacagctagcaaatcgggaagggtgcacatggagcgcctgctctgaagagcaaaccgggtcattcagagcatggaggagggcggggtgactata

SEQ ID NO: 31944 - DNA, 120 bp, synthetic construct
  source 1..120: mol_type = other DNA
acctgccccactcaggattatgggctgggtgtagaagcagatgtgtgctcaggcacctgccccactcaggattatgggctgggtgtagaaacagatgtgtgctcaggcacctcccgcagt

SEQ ID NO: 31945 - DNA, 120 bp, synthetic construct
  source 1..120: mol_type = other DNA
acctgctgcactcaggattatgggccgggtgtagaaacagatgtgtgctcaggcacctgccgcactcaggattatgggctgggtgtagaatcagatgtgtgctcaggcccctgctgcact

SEQ ID NO: 31946 - DNA, 120 bp, synthetic construct
  source 1..120: mol_type = other DNA
cagcgatccgctctgtgtcctcgcgccggttgcagtaaatgataatggaatcgaggttttgaaaacgtttgccttgcagcagcgtcaacagtgcctgatgaggagcggttggcgtgggca

SEQ ID NO: 31947 - DNA, 120 bp, synthetic construct
  source 1..120: mol_type = other DNA
caggcacggcagaagggcacagggcagggagcagcaggtggggagtaggctagacatagcaggcacggcagaagggcacagggcagggagcagcaggtggggagtgggctgcattgcaca

SEQ ID NO: 31948 - DNA, 120 bp, synthetic construct
  source 1..120: mol_type = other DNA
gactgctgaaggtcagggcctggaacataacaaatatctatgaaatgaatggctgagtaggcgattatcccgacagatattcccaggtatgtgatcaaaccgataagtatttatgatcta

SEQ ID NO: 31949 - DNA, 120 bp, synthetic construct
  source 1..120: mol_type = other DNA
gctgaaccttcgtagtattcagaggcaaaggctgaaccttcgtagtattcagtggcaaaggctgaaccttcgtagtattcagcggcaaaaggctgaaccttcgtagtattcagaggcaaa

SEQ ID NO: 31950 - DNA, 120 bp, synthetic construct
  source 1..120: mol_type = other DNA
aggaatgtgctgtatcaatatgaataatactgtaaagtcttgttgagacatataaaagaagacttgaatacataacagagaaacacacactcccggatgggaaaattcaataaatataaa

SEQ ID NO: 31951 - DNA, 120 bp, synthetic construct
  source 1..120: mol_type = other DNA
tccagtggtttccatcggacttaatccagtggtttccatcggacttaatccagtggtttccatcggacttactccagtggtttccatcggaccccagtgctttccatcacatcccagtgg

SEQ ID NO: 31952 - DNA, 120 bp, synthetic construct
  source 1..120: mol_type = other DNA
tccatcacactccagtggtttccatcggactcactccagtggtttccacagactaactccagtggtttccatcggactccagtggtttccttggctcttgatgagctgacagacgttact

SEQ ID NO: 31953 - DNA, 120 bp, synthetic construct
  source 1..120: mol_type = other DNA
tttgtttaaaatgcactttcaaatgaatgtaatgggataattctctcaacaaagaatagcattttgttcccttttcagtgcactcctgcgcgcgtgtgggcagaacaccagcctcctaag

SEQ ID NO: 31954 - DNA, 120 bp, synthetic construct
  source 1..120: mol_type = other DNA
caccacagagggtcagcatcaactcacagatgcaatctgaggtgtgtttgaggaatattcatttggcaacagtatttaaaatgaagtgggaagagaaataagccatttggtgacaaaggt

SEQ ID NO: 31955 - DNA, 120 bp, synthetic construct
  source 1..120: mol_type = other DNA
tgtgcgtgtgcgtggtgtgtgcaagctcatgtacctgtgtgtgtgtggaggcatgtgtgtgctcgtatacctgtgtgcatgtgcgtggaggtgtgtgtgcgagctcatgtacctgtgtgt

SEQ ID NO: 31956 - DNA, 120 bp, synthetic construct
  source 1..120: mol_type = other DNA
cctgtgtgtgtgtgtggaggcgtgtgtgctcgtgtacctgtgtgcatgtgcgtagaggtgtgtgtgcgagctcacgtacctgtgtgtgtccatggaggcgtgcatgtgctcgtgtacctg

SEQ ID NO: 31957 - DNA, 120 bp, synthetic construct
  source 1..120: mol_type = other DNA
tcgtgtacctgtgtgcatgtgcgtggagttgtgtgcgctcgtgtacctgtgtgtgtgcatggaggcgtgtgtgtgagctcgtgtacctgtgtgtatgtgcatggaggcgtgtgtgtgcat

SEQ ID NO: 31958 - DNA, 120 bp, synthetic construct
  source 1..120: mol_type = other DNA
tgggtcaactttatctccactgttcacttatcagctgtaatttgttgctttgctattttagtaaatgcttttgggtttataacatacatctttactttgtcatactctgccttcaacggc

SEQ ID NO: 31959 - DNA, 120 bp, synthetic construct
  source 1..120: mol_type = other DNA
tacctgagagcacgtatgcctgtgtgcatgagagcttgtgtgtccctgaaaaagcatatgtgtccgtgtgcgtgtgagcctgtgtgtacctcagtgtgtgcccgtgtgtgtgagcctgtg

SEQ ID NO: 31960 - DNA, 120 bp, synthetic construct
  source 1..120: mol_type = other DNA
atgagagcatgtgtgcccacgtgcgtgtgagtacgtgtgtgtgagtgcatgcccactgctcaagcagccctgccatctgccgagtttgcatcccttgcaagagtgatggctccaaaccca

SEQ ID NO: 31961 - DNA, 120 bp, synthetic construct
  source 1..120: mol_type = other DNA
acttggccgtgccgacagccatgacgagcgccctttgcactaagtgtaaagcgtacagtataggatacacttttgggcttggacaaaacaatgaatcattaaatatataaaataatcatc

SEQ ID NO: 31962 - DNA, 120 bp, synthetic construct
  source 1..120: mol_type = other DNA
cactgcacactgcggcagcccctgtcccggcggccccgttcacggagcactcactgcacactgcggcagcccctgtcccggcggccccgttcacggagcacccactgcacactgcggcat

SEQ ID NO: 31963 - DNA, 120 bp, synthetic construct
  source 1..120: mol_type = other DNA
agccaggactacagcgcgtaccaccatgcctggtgaacctatatttgagtcttaaatttaatccataatcagcacacaacaggaaaagctgcctctccacatgagatttaaaaagataca

SEQ ID NO: 31964 - DNA, 120 bp, synthetic construct
  source 1..120: mol_type = other DNA
tctggaactccaggcctctgcaggcgcagtctccactcctgtctggaactccaggcctctgcaggcgcagtctccactcctgtctggaactccaggcctctgcaggcgcagtctccactc

SEQ ID NO: 31965 - DNA, 120 bp, synthetic construct
  source 1..120: mol_type = other DNA
agacagtgtggagactgaattagaggggggctgaggctaccgccaggtagacagtgtgaggactgacttacagggtggctgaacactcacccagtaggatctgaggctaccgccaggtag

SEQ ID NO: 31966 - DNA, 120 bp, synthetic construct
  source 1..120: mol_type = other DNA
tccccgtttatccaccttggaccactccccctccctactatccgccttagagcgattcccctctccccgttatccaccttggaccacgttccactccccattattatccagcttggacag

SEQ ID NO: 31967 - DNA, 120 bp, synthetic construct
  source 1..120: mol_type = other DNA
aattcaagggatccaccaggatagccaaaacaatcttgaaaaagaacaaaatgggatacaccttctgacttgaaacttctcacaaagctaccataattaagacagcgtggcacgggcatg

SEQ ID NO: 31968 - DNA, 120 bp, synthetic construct
  source 1..120: mol_type = other DNA
aaccaaaacagatctctcatcaggctatcaacaggttacatgtgttttttgtgactactcagataaagatgttcaattgtaacagtttctcaacattgcaggcagggctgagcccaccca

SEQ ID NO: 31969 - DNA, 120 bp, synthetic construct
  source 1..120: mol_type = other DNA
aacttctaatgcagggcacctgtgctcaccactgccccttcaaaggcgaacaaacaaaaacagaatcatctttccccagttggctgacaagatcttactcaagatctcatgccattcaga

SEQ ID NO: 31970 - DNA, 120 bp, synthetic construct
  source 1..120: mol_type = other DNA
atggacaggagcgtttaaagagggtgccatggcagaaaagccagctacagttggcagaaatagttcagtgggtttatatgtagcaggtggtcctcactgtgataaagcaacaacaaaaaa

SEQ ID NO: 31971 - DNA, 120 bp, synthetic construct
  source 1..120: mol_type = other DNA
ggctgatgctgtgtttcctgatcttggacctaaaaagagggagtcagccatggagacacagactcaaaagccagggccacagtacaaaggggcaagatgctgaccctaaggtaaagtggg

SEQ ID NO: 31972 - DNA, 120 bp, synthetic construct
  source 1..120: mol_type = other DNA
cccacctagagtgggagaacagcagctccaaagggtgaacagccaggggcagcctgtgctgcagccccacatgtcatcattatgtgtcaacgcctaccaaatcctagtggtcagttctat

SEQ ID NO: 31973 - DNA, 120 bp, synthetic construct
  source 1..120: mol_type = other DNA
agcacatgaggaatgtgggtgttatattttgggtatcatgtgtgcattaggaatgctgcatttgcgttccgacgctgcaagtggaccctgcaatgcagcccctccccttgccttgggaga

SEQ ID NO: 31974 - DNA, 120 bp, synthetic construct
  source 1..120: mol_type = other DNA
ggcacgccgcctgctggcagctacggacattgcagggtcctcttgctcaaggtgtactggcagcacgcccgcctgctggcagctggggacactgctgggccctcttgctccaacagtagt

SEQ ID NO: 31975 - DNA, 120 bp, synthetic construct
  source 1..120: mol_type = other DNA
acctgccatctgctgccatcggagcccaaagccgggctgtgactgctcagaccagccggctggagggaggggctcagcaggtctggctttggccctgggagagcaggtggaagatcaggc

SEQ ID NO: 31976 - DNA, 120 bp, synthetic construct
  source 1..120: mol_type = other DNA
attagtgatacacccggcaccctgtcctggacaagctgttggcctggatctgagccctcgtggaggtcaaagccacctttggttctgccattgctgctgtgtggaagttcactcctgcct

SEQ ID NO: 31977 - DNA, 120 bp, synthetic construct
  source 1..120: mol_type = other DNA
ttagagaccctgtgtctgtcactgaaaccttttttgtgggaaactattcctcccatctgcaacagctgcccctgctgactgcccttctctcctccctctcatcccagagaaacaagtcag

SEQ ID NO: 31978 - DNA, 120 bp, synthetic construct
  source 1..120: mol_type = other DNA
gtggctccctgtccccacccccatgacactccccagccctccaaggccactgtgtttcctagttagctcagagcctcagtcgatgcctgacccagcaccgggcactgatgagaaagtggc

SEQ ID NO: 31979 - DNA, 120 bp, synthetic construct
  source 1..120: mol_type = other DNA
cgcgctggggaggccggacctttggagactgtgtggggcccgggcactgacttcggcaaccacctgagcgcgggcatcctgtgtgcagatactccctgcttcctctctagccctcaccct

SEQ ID NO: 31980 - DNA, 120 bp, synthetic construct
  source 1..120: mol_type = other DNA
ccagctgctctctcttgctgatggacaagggggcatcaaacagcttctcctctgtctctgcccccagcatcacatgggtctttgttacagcaccagccagggggtccaggaagacatact

SEQ ID NO: 31981 - DNA, 120 bp, synthetic construct
  source 1..120: mol_type = other DNA
tcttgctgcccttgatcttctcaatcttggcctgggccaaggagaccttctctccaatggcctgcacctggctccggctctgctctacctgctgggagatcctgccatggagaagatcac

SEQ ID NO: 31982 - DNA, 120 bp, synthetic construct
  source 1..120: mol_type = other DNA
tgtgtggtgcgcagggatgagaaggcagaggcgcgactggggttcatgaggaagggcaggaggagggtgtgggatggtggaggggtttgagaaggcagaggcgcgactggggttcatgag

SEQ ID NO: 31983 - DNA, 120 bp, synthetic construct
  source 1..120: mol_type = other DNA
catataggaaaaatcagagccaaatgaaccacagccccaaagggcacagttgaacaatggactgattccagccttgcacggagggatctggcagagtccatccagttcattcaacacctg

SEQ ID NO: 31984 - DNA, 120 bp, synthetic construct
  source 1..120: mol_type = other DNA
tcaccctgccctccctgcttgcaagtcccctgtctgtagcctcacccctgtcgtatcctgactacaataacagcttctgggtgtccctggcatccactctctctcccttcttgtcccttc

SEQ ID NO: 31985 - DNA, 120 bp, synthetic construct
  source 1..120: mol_type = other DNA
acaggacagcattctttcctgctggacctgaccctgtgtcatgtcaccttgctaccacgagagcatggcctgtctgggaatgcagccagacccaaagaagcaaactgacatggaaggaaa

SEQ ID NO: 31986 - DNA, 120 bp, synthetic construct
  source 1..120: mol_type = other DNA
aaaataattctaccaggaagctaccattattaccacaacttcacaaatgagaacaccgaggcttagaggggttgggttgcccaaggttacagaggaagaaaacaggggagctggatctga

SEQ ID NO: 31987 - DNA, 120 bp, synthetic construct
  source 1..120: mol_type = other DNA
aggtctctcagcccttctgtgcctcagtttcctcatctataaaatgagatgacggcagtgcctgctcatgaagtgtgagttaatgcactcaaatcaatggttgtgcacggtttatatgaa

SEQ ID NO: 31988 - DNA, 120 bp, synthetic construct
  source 1..120: mol_type = other DNA
actggggaatctgtagggtcaatggaggagttcagagaaggtgcaacatttctgaccccctacaaggtgcttgctacctgccaggcaccctttccataccttgtctcagttcagctcccc

SEQ ID NO: 31989 - DNA, 120 bp, synthetic construct
  source 1..120: mol_type = other DNA
ctcctttgctcccgctgctggcttccccagccctcccttctgccctcctcaggccagcacttttcagtgagttcctcctttgcatacaggctttccagatctgtacttgccttgaatact

SEQ ID NO: 31990 - DNA, 120 bp, synthetic construct
  source 1..120: mol_type = other DNA
cgcaagcggtcttgagtgctgagggtacaatcatccttggggaagtactagaagaaagaatgataaacagaggccagtttgttaaaaacactcaaaattaaagctaggagtttggacttg

SEQ ID NO: 31991 - DNA, 120 bp, synthetic construct
  source 1..120: mol_type = other DNA
gtaccaactgtaagtcaccttatcttcatactttgtctttatgtaaacctaaattagatctgtttttgatactgagggaaaaacaagggaatctaacactaaccagcccgtagtgtgtgg

SEQ ID NO: 31992 - DNA, 120 bp, synthetic construct
  source 1..120: mol_type = other DNA
ggaagctccggggcgagcccaagacgcctccccgagcgcggctccaggaccccgtcgacccggagcgctgtcctgtcgggccgagtcgcgggcctgggcacggaactcacgctcactccg

SEQ ID NO: 31993 - DNA, 120 bp, synthetic construct
  source 1..120: mol_type = other DNA
tgcctccggcatttttggcccttgccttttagggttgccagattaaaagacaggatgcccagctagtttgaattttagataaacaacgaataatttcgtagcataaatatgtcccaagct

SEQ ID NO: 31994 - DNA, 120 bp, synthetic construct
  source 1..120: mol_type = other DNA
cctgggcaagccatgaatggagcttcagtcaccccatttgtaatgggatttaattgtgcttgccctgcctccttttgagggctgtagagaaaagatgtcaaagtattttgtaatctggct

SEQ ID NO: 31995 - DNA, 120 bp, synthetic construct
  source 1..120: mol_type = other DNA
ggtggaggagtgaagaaaatgtgacagggtgtcctaagccccgatctacaggaagaaaactggaaataagactgaggacttagtttaagatgttcctactcagcctctagcttttgtgct

SEQ ID NO: 31996 - DNA, 120 bp, synthetic construct
  source 1..120: mol_type = other DNA
cagaatatgtaaatccgtggagaaagaaagccgatttccaggggctaaggggaggggagaatgggaagtggctgcttcatgggtacaaggtttcattttgagctgatgaaaatgttttgg

SEQ ID NO: 31997 - DNA, 120 bp, synthetic construct
  source 1..120: mol_type = other DNA
ggacccgaagctcctgtttgatcggagaataacgttcaatttactccgccgctgaactgatggtttaaatattcatctttggatatggtttcacattaggcaaaagttaggagcttggag

SEQ ID NO: 31998 - DNA, 120 bp, synthetic construct
  source 1..120: mol_type = other DNA
ctgtgtttttgtttgcttgcttgtttttcttttaatgccagaacaaaataccccactcacgttcatagtaccccaggacatgtgcaaatcgggaaagccacagaagccacaaccgaaggc

SEQ ID NO: 31999 - DNA, 120 bp, synthetic construct
  source 1..120: mol_type = other DNA
gctgagctggaagcccgggatgaatgttgcaagaagcaggaacgctagtggttaccctttgggatgttttcctctgcttgtttctacgcctttgcaacaacgtccggcaaagatgccttc

SEQ ID NO: 32000 - DNA, 120 bp, synthetic construct
  source 1..120: mol_type = other DNA
acataactaagatggctttcacgaaacaatatacttacactatagtgatcactgatatttccttttaaaaaaaaatggccataaccaactaaattgatttcacacataccagtatgggcc

SEQ ID NO: 32001 - DNA, 120 bp, synthetic construct
  source 1..120: mol_type = other DNA
actatgccacggtatatattcataatttaaaacccacctacttgggaaaactttgaggtgccatctaataaaaatgcagcatgaaagaatattatgcccttgatagtcacatagtgtcta

SEQ ID NO: 32002 - DNA, 120 bp, synthetic construct
  source 1..120: mol_type = other DNA
acctgacaaacactccttcagccaggtgatcaggtcgtcaacatcaacatcaataacagtcataaccttttatttcatgtcataaaatggtgacacttacttgtgttaaaaaaatttaat

SEQ ID NO: 32003 - DNA, 120 bp, synthetic construct
  source 1..120: mol_type = other DNA
aacataactgtcagttaaaaaaaaataaatttagtcttcaaaaatgtttaaaatgtattttaatgcaagttggaaaactatattgagaatgtcgcaaaatacgactccaaatggctttat

SEQ ID NO: 32004 - DNA, 120 bp, synthetic construct
  source 1..120: mol_type = other DNA
gaacaacttactcaggtttgtttatttagtctgtttcttctttaacccactgggttatttctccattttctacttttttgcaaacaatacctagcatacaataacttttataggttttct

SEQ ID NO: 32005 - DNA, 120 bp, synthetic construct
  source 1..120: mol_type = other DNA
ggttacaaaaatatagatatgccctatttagtagtaaagtgacatagtgtctggaatttgctttaatacactacaccaagggcaataggtacatacaggctcattataccattctactct

SEQ ID NO: 32006 - DNA, 120 bp, synthetic construct
  source 1..120: mol_type = other DNA
atatttaaattgttcctagcatcttagatatttaccttagggattagaattttagagcatgaaaaacatcttaaggagttcaaatttatagtgctacctgaaggtgaaactccaagtcaa

SEQ ID NO: 32007 - DNA, 120 bp, synthetic construct
  source 1..120: mol_type = other DNA
tgcattgttctgatatgaaaagcacaagaagatcaacatggcataacaaattacaaccataataactgtagcatacatttcaacactgatggggacaggacgggagggggaaaggactga

SEQ ID NO: 32008 - DNA, 120 bp, synthetic construct
  source 1..120: mol_type = other DNA
gtattgttttcaaaatgtgaacaatactacagactgaaggtggaaaaaaaaaaactagttgaaagtagaatcagtttttaagggcatggctaaggcaaaattagaaatatatatataagg

SEQ ID NO: 32009 - DNA, 120 bp, synthetic construct
  source 1..120: mol_type = other DNA
tactgatgcacaagaataactaatctttcttccctcccttaccaaaaagattccccacaggagaaggcagaaaactaatccattattaaagtgaacagaggagagaggagccaagatggc

SEQ ID NO: 32010 - DNA, 120 bp, synthetic construct
  source 1..120: mol_type = other DNA
aggaacagaacctagagaaaatgaaagtcaaaatttaataaaagaatttgtcaggaacttcaaggtaaagactccatgtattttttggcaactataaaacactaagaaggctttttaaat

SEQ ID NO: 32011 - DNA, 120 bp, synthetic construct
  source 1..120: mol_type = other DNA
agaataacctcgtcagttacctaattaggctctctacccgttatgcctgttctccctcttttgatactatagaatatggcttcgtatggcaccaaaaagtacctgttaaattcttttcaa

SEQ ID NO: 32012 - DNA, 120 bp, synthetic construct
  source 1..120: mol_type = other DNA
gttagggaagactgacattaggaaagagtcaaagagaagacaggaaaagaaagatggagtgcgaagaccctgaatatcagtctattaactgtgaactatattctgcaagcactggggact

SEQ ID NO: 32013 - DNA, 120 bp, synthetic construct
  source 1..120: mol_type = other DNA
agcccaagtggtagttttcatctctctggaggcaagctttgttgtctgtttttttttttttccccctcataatcctgtttacatccctaacgtcatcaacatcacaagcttcttctctgg

SEQ ID NO: 32014 - DNA, 120 bp, synthetic construct
  source 1..120: mol_type = other DNA
gctgcccattatccaagtgtcattacttgtactgcctcagaattctctgaatcacaagcagctactgaggtcaagctttgcaaccagaggaattggacaagttggaaaattctttatatc

SEQ ID NO: 32015 - DNA, 120 bp, synthetic construct
  source 1..120: mol_type = other DNA
tcagacttatttttattttctcacctctttaatatgataatcattcaatcataaatagtgaattatcactctaaaggaaaaggaaaacaaaacatagataattccaaaatcacttgccca

SEQ ID NO: 32016 - DNA, 120 bp, synthetic construct
  source 1..120: mol_type = other DNA
acaaatcctactgttaatatttgcctcttaagttgaaatgtaagagtatattaatgctttattctaaaactggtatttatctttgatataatacttgccagactacatgagaaagatcta

SEQ ID NO: 32017 - DNA, 120 bp, synthetic construct
  source 1..120: mol_type = other DNA
attattatcttatgaaattgcgatagccaccccaaccttcagtaactactaccctgattggtcagcacccatcaacatcgtggcaagaccctctaccagcaaaaagactatgacttgctg

SEQ ID NO: 32018 - DNA, 120 bp, synthetic construct
  source 1..120: mol_type = other DNA
ggttgttcaagaaagtctgttataattttatccttgccaaaacatttgacacaaagtcaaatacctaagggagtaaatgatgccgaagagatttaattcactagaatacacaaaattaac

SEQ ID NO: 32019 - DNA, 120 bp, synthetic construct
  source 1..120: mol_type = other DNA
ctcttacttggccacccccatttcttaataaagtagctatcttgaaggcatttttttcttgtccagggtaaactttctaaatagaccagtatgttttatatactggattttgtatgccct

SEQ ID NO: 32020 - DNA, 120 bp, synthetic construct
  source 1..120: mol_type = other DNA
tctttcgtttattaaaaccagaaatcgaatataactggcttcccatcctgttcataaaacctagctcttttactttttacaactgaaaaaaaatagtacattttaaaagaaatcgtttaa

SEQ ID NO: 32021 - DNA, 120 bp, synthetic construct
  source 1..120: mol_type = other DNA
ttcatttttaaatatggaatatcaattcaccagaggaataaacagtcacacaaaatcttgcaacatgacatttattgaactttacttaccttccccaaattcatttaaaatgaccgctac

SEQ ID NO: 32022 - DNA, 120 bp, synthetic construct
  source 1..120: mol_type = other DNA
gacatgttaagttttaagttgtaggacatcaaaatagaaattacacaggtgtgtagctaaagatggacaaagggggaaggaggagggagccttaaaaagaagccagagaagcaggtggaa

SEQ ID NO: 32023 - DNA, 120 bp, synthetic construct
  source 1..120: mol_type = other DNA
tcaccttgattttttagtctcgttaaaaaaaaaagttttaattcataggggaaagaatggaaggttataacattataattttaattgtaatttttatacctgaaggataaccagtgacac

SEQ ID NO: 32024 - DNA, 120 bp, synthetic construct
  source 1..120: mol_type = other DNA
aacaacaccaagtattgttgaacatatggaaaaactggaacactgattatgggagtatacaaccatgttgtaaaacactttaactggtcatttacccaagaggaatgaaagaatgtatcc

SEQ ID NO: 32025 - DNA, 120 bp, synthetic construct
  source 1..120: mol_type = other DNA
ctttaatgtgcagaaaatttgcccaggcagtttcttttaaatgcagattttggaggaccttccataacaatctccctcaagagattctggttgagtaggtctcaggtgggatcaagaaac

SEQ ID NO: 32026 - DNA, 120 bp, synthetic construct
  source 1..120: mol_type = other DNA
agagatggctgggctcaaaacctgaccgaacactcacggaaaaagcccaggttctgtgaccagagatggctgggctcaaaacctgaccgaacactcacggaaaaagcccaggttctgtga

SEQ ID NO: 32027 - DNA, 120 bp, synthetic construct
  source 1..120: mol_type = other DNA
tgggctcaaaacctgaccgaacactcacggaaaaagcccaggttctgtgatcagagatggctgggctcaaaacctgaccgaacactcacggaaaaagcccaggttctgtgatcagagatg

SEQ ID NO: 32028 - DNA, 120 bp, synthetic construct
  source 1..120: mol_type = other DNA
aagttcaaaagagggaatgtggaggcatctgtggtactcagagccagcatgccagagctcaccaaaaccatctacccttcccaggcctagttaaattggtcagcggtcaggactcattgt

SEQ ID NO: 32029 - DNA, 120 bp, synthetic construct
  source 1..120: mol_type = other DNA
cttggagcagtggctcacatctgcaaccccagcactctaggaggctgagatggcaggatcacttggagcagtggctcacatctgcaaccccagcactctaggaggctgagatggcaggat

SEQ ID NO: 32030 - DNA, 120 bp, synthetic construct
  source 1..120: mol_type = other DNA
atagtaatataaatagcagttattgttgctgctcctctccttccatatccctaatctagccactagtaccatcattactgctactactaccaccagccaccaccattctcattagtccca

SEQ ID NO: 32031 - DNA, 120 bp, synthetic construct
  source 1..120: mol_type = other DNA
caccatcaccatcaccaccacctccaccatcaccacctcctccaccatcaccaccacctccaccaccaccacctcccccactaccaacagctccttcaccatcaccacaacatccaccac

SEQ ID NO: 32032 - DNA, 120 bp, synthetic construct
  source 1..120: mol_type = other DNA
ccttccttccttccttcctattcatctcaatagagctgctttttcctctaaaaataatagcttcagggtagccctttttaggggatgggattatccctgttatgagatggttcagctcac

SEQ ID NO: 32033 - DNA, 120 bp, synthetic construct
  source 1..120: mol_type = other DNA
ttcagaagataccggtttcctgttttcattaagaaaacagggaatgcggaacagctgagtgcggcgggggtggtgtcactgcagccggagggagacctcgccggtgaaagctcagcctat

SEQ ID NO: 32034 - DNA, 120 bp, synthetic construct
  source 1..120: mol_type = other DNA
gacagtcctggagacaggtctggctgctgcagcttctctcctgttaatggagtttcagacagtcctggagacaggtctggctgctgcagcttctctcctgttaatggagtttcagacatt

SEQ ID NO: 32035 - DNA, 120 bp, synthetic construct
  source 1..120: mol_type = other DNA
cttggaaaatggacacttaacgattgtttagaggctgtggtctaatcctcagagtaatttagggctgatggacagttagcaacaatgttaggtgaaaaagtccctgccattctatcttgg

SEQ ID NO: 32036 - DNA, 120 bp, synthetic construct
  source 1..120: mol_type = other DNA
ttactggaaggaagggaaattacttcttgctgttacagtttgacagagcatgggtaaggcagttctttagtagaaaattgacaaatatgacacaggaaggggaacatcacacaccgggga

SEQ ID NO: 32037 - DNA, 120 bp, synthetic construct
  source 1..120: mol_type = other DNA
tttgtcttttttcttctatcaggcagagaatacattctgaactctttgtgggtggataacagactagggaggaatttggaatgtgtgcaagagtcactacatcccccttattggcccaac

SEQ ID NO: 32038 - DNA, 120 bp, synthetic construct
  source 1..120: mol_type = other DNA
ttaataaggggactaaatataaaggtaatggccagtttgaagaagggaatcagtcaatcatgtggatagcagtctgccaccttgagaagaaagtgctctttctagctaggaccatgttca

SEQ ID NO: 32039 - DNA, 120 bp, synthetic construct
  source 1..120: mol_type = other DNA
aatgtatcgccttatttaatttttccaggtttctatgaggtaggtacagatattatcccttagaaagggtaagtcacttgctcaaggtcccagagctggtcaggacagaactgggattca

SEQ ID NO: 32040 - DNA, 120 bp, synthetic construct
  source 1..120: mol_type = other DNA
ggaggggagggaagagaagaaagaaaatgctataggtgactaatgaaagttccatttctgcttcatgtcctgtagcatttgaagtggggaagggtactaatggaatagattcttttaaag

SEQ ID NO: 32041 - DNA, 120 bp, synthetic construct
  source 1..120: mol_type = other DNA
tgactgtcttcatttcttcccaggcagatttgtctagcttgtcactagaccagcagccaaagtctattttatttactccagtttcctgtggataacatggtgaagagtgagatcagaatc

SEQ ID NO: 32042 - DNA, 120 bp, synthetic construct
  source 1..120: mol_type = other DNA
ttcggcctggtttgggacccagaattcttgatggacaactggttttggggcgtaacagataactttactactaactgtagattgaatatgtcctgttaatcaggaacatacccttttgtg

SEQ ID NO: 32043 - DNA, 120 bp, synthetic construct
  source 1..120: mol_type = other DNA
aacagtagaagtctgaaaactcaaattaatcacaaattactgacatgtacttccaaaacgattcctacctagtaatggtaaacatttgtcttaatctccacctgcaggcaatattttctg

SEQ ID NO: 32044 - DNA, 120 bp, synthetic construct
  source 1..120: mol_type = other DNA
taaaagccatttcagattgagctgtactcaactctaagagcttgcctttaaagcaaacccactgcagcttccaaatgcttgaaagcatcagtagggtcttcagctatgatggtctgaacg

SEQ ID NO: 32045 - DNA, 120 bp, synthetic construct
  source 1..120: mol_type = other DNA
tagatctctggtttaaagcggatcttatttttaaaagggatgcagtgaatattactttggcacacattgtaagataaaatggttatctaacagtgtaataacgtgaaagcaagtagcaat

SEQ ID NO: 32046 - DNA, 120 bp, synthetic construct
  source 1..120: mol_type = other DNA
ttcaggactgcggctgctgtggcctacacacctgggcctgtgtgcctgtcccgggctttaggctgctttccctacccggctcaaccagtctttagtatgggctatcactcagcttttaag

SEQ ID NO: 32047 - DNA, 120 bp, synthetic construct
  source 1..120: mol_type = other DNA
ctaggaagtaaggagtgtctctgcctgaccgcccgttgtctgggatgtgaggagcatctcttcctgaccgcccatcgtctggggtgtgaggagcatctctgcctgaccgtccaccgtctg

SEQ ID NO: 32048 - DNA, 120 bp, synthetic construct
  source 1..120: mol_type = other DNA
cagaaatgtctgctgggagtttgattgggattacattgaatctttggatccatttggggagagttgctatcttagcaatataaacaagatgtatttctccattgaagtatttttactttc

SEQ ID NO: 32049 - DNA, 120 bp, synthetic construct
  source 1..120: mol_type = other DNA
atgcaatgtattcagactgtcatggttttccttttttagtttgttaataaggtaaattacatgtatttaattttgttaaaccccaaccctgcattcttggataaacctcatttggttgtg

SEQ ID NO: 32050 - DNA, 120 bp, synthetic construct
  source 1..120: mol_type = other DNA
gggatcttggcctgtagttataatgtctttgtctggttttgttatgaggcctcataaaatgagataggaagtggttccttctctttggtgttctggaagagtctgtattcaactgatatt

SEQ ID NO: 32051 - DNA, 120 bp, synthetic construct
  source 1..120: mol_type = other DNA
tatcttctcagaaaatgtcctgacagcaaaaacatactctttgagggaggggagcccattgcccgtgctattagttagggtatcgtttcagcttgtgtataatcactcaacagactcttt

SEQ ID NO: 32052 - DNA, 120 bp, synthetic construct
  source 1..120: mol_type = other DNA
tgcctcaaactgtgctaaaattatcaaatcattttcaaccaaattgtctttgtgccttctactaaaaatcacctgccggtctatcaattttgttgatcctttcaaaaaaccagctcctgg

SEQ ID NO: 32053 - DNA, 120 bp, synthetic construct
  source 1..120: mol_type = other DNA
ccacatgtagaacttagtccaccctaagtgaaggttcatacatcagtcatgaatgacacagctcatcccaaagcgtattctacagaatacacaggttatcggtaatcattactcgaaaaa

SEQ ID NO: 32054 - DNA, 120 bp, synthetic construct
  source 1..120: mol_type = other DNA
gtattaactcagccatgggtatagcttcatgctataatgtgtagaggagtcctgtgagttctgctacatcattgaacctgggaacagacttggaaacactgacatacaaagtgtaacaac

SEQ ID NO: 32055 - DNA, 120 bp, synthetic construct
  source 1..120: mol_type = other DNA
gaattcagaatgcaaaatgtcacctgaatcaaatccttcagatatttctatcatttctttcttttctttttttctttctgtctctctccctccctccctctctctctcccccccctcctc

SEQ ID NO: 32056 - DNA, 120 bp, synthetic construct
  source 1..120: mol_type = other DNA
ttttcctgagcatctagtgagatggatttgctatttagaaagtggggaagatttaggaaaaacagattattttggccagggttgatgaggtggggagatcaaatggtaccttctgctgag

SEQ ID NO: 32057 - DNA, 120 bp, synthetic construct
  source 1..120: mol_type = other DNA
agagatatggtactttgccacagtagagtaaggaaagagagtcttgaagttattagtttcatgagtaatataatctaactaccttatggaagatgatcttgccttcttccattgaaagtt

SEQ ID NO: 32058 - DNA, 120 bp, synthetic construct
  source 1..120: mol_type = other DNA
aaggaatggctttccctcatttagattcactaaacataaagatttaactttggaatcttttaaagatctcagtatgttgtgtttccctatgcaagaaaatctgatgtcttaggatttcaa

SEQ ID NO: 32059 - DNA, 120 bp, synthetic construct
  source 1..120: mol_type = other DNA
aataaataaataatcccaaatcttagctgcttaaaccaacccataatttctgaaggtcaggaatctgaccttcagattctgcctcagggtctcatgaggttgcagttagcatgttggctg

SEQ ID NO: 32060 - DNA, 120 bp, synthetic construct
  source 1..120: mol_type = other DNA
tatcaataaaaaaaaaaaaaaaaaaaagaagtggcacactgttacatctgccatattctgtttgttacaagccagttgttaagtgtagctagcctacactcaaggggaggagaatgaagc

SEQ ID NO: 32061 - DNA, 120 bp, synthetic construct
  source 1..120: mol_type = other DNA
gatattgcttctgcgagttttctgaagattaggttctataaaactcagtagatgctggatcccacattctttgtgtctgtgggtggttattgggtcagaattattgcagagctcaaacat

SEQ ID NO: 32062 - DNA, 120 bp, synthetic construct
  source 1..120: mol_type = other DNA
tgcaaaactacttgaatcatcctgccattcctttggtggcatttgttagtttcaaataactcttaagcagaaatgcagtaccttttcttatagtagatatttatctgaacagtaggattt

SEQ ID NO: 32063 - DNA, 120 bp, synthetic construct
  source 1..120: mol_type = other DNA
tgccctccctcttgtagtttacttacttatgaaccttggtcactgtaattgtacctgttgggacacattaggcaccaaaatatttgtagagtgaatgcttcatagctggttactgtggac

SEQ ID NO: 32064 - DNA, 120 bp, synthetic construct
  source 1..120: mol_type = other DNA
cttcaccccgtgtcttgtagtcattgtcctgctggtacttttactacacaagctggctctcagacactttgcaattgtccctcaaacaaaaggacattagttagaagtggaatttagaaa

SEQ ID NO: 32065 - DNA, 120 bp, synthetic construct
  source 1..120: mol_type = other DNA
caaattcagcagattactaagtagattggcttggaatgtttgttgataggtcacagccagtgttttcctgcgttatgtggacacaaaacattagatgttgttggcattcagataaaatgg

SEQ ID NO: 32066 - DNA, 120 bp, synthetic construct
  source 1..120: mol_type = other DNA
cgcttgaagcaagaccttgaggcttaaggtacctcttcagacatcaatggctgtgtgtccttgagaaagacattttaaccccttccttatattcccatatttcttaaatgatagtgacag

SEQ ID NO: 32067 - DNA, 120 bp, synthetic construct
  source 1..120: mol_type = other DNA
tttcgaagttgctaacaaatttcttccaccaatatacctactcttctgttgtttgtttcaataagcagcttctccagagcctcaggcacagcacttccaaatgtcagcagctattagctc

SEQ ID NO: 32068 - DNA, 120 bp, synthetic construct
  source 1..120: mol_type = other DNA
tggttctaaaatggtatctccatccaatcacaggacctttctctttaattcttcacttcatgatagaggctggcttggagtttctgaattaacaagaaacacatctacgtaggcaggagg

SEQ ID NO: 32069 - DNA, 120 bp, synthetic construct
  source 1..120: mol_type = other DNA
agagaccatcatgcctttaccttcctacatcaatctggacctgttgctttagatacctatgtatagttatttttctgggaattccatttacccttctcccgtgtttgacctcctgttact

SEQ ID NO: 32070 - DNA, 120 bp, synthetic construct
  source 1..120: mol_type = other DNA
ccgcgcccggcctccccttcattatttagtgaaaacgcattctagtgtgtcaatctgacaattctatggaaaaaaaggatggagttaactttgtacctattatgctgctgacctttgttt

SEQ ID NO: 32071 - DNA, 120 bp, synthetic construct
  source 1..120: mol_type = other DNA
catctggcaatctagtattaaaagtggggagacttccagaatcagacactggcttatctatttctgaagcatgtcagtttctaatttatacagtcttaattggcagactgttgggccact

SEQ ID NO: 32072 - DNA, 120 bp, synthetic construct
  source 1..120: mol_type = other DNA
acccaatctctgtcagcatcattgatgtaaaaattccaatcaaaatattaaccaactatacccaacaatgtttcaaaaatgctaagactgagtttgatttaccacatattgcaagggttc

SEQ ID NO: 32073 - DNA, 120 bp, synthetic construct
  source 1..120: mol_type = other DNA
tgctgtgaattcttgtttagacagcaattatgtgcaatgtagaagtgtggggagttcatttcccaagaggcacaactttgacaaatgagctagggaagctggtggagaaatttctcactt

SEQ ID NO: 32074 - DNA, 120 bp, synthetic construct
  source 1..120: mol_type = other DNA
agggaggggaagaggaggagagagagagaaggagtaggaggaaggggaggaagacaaaagaaaaggaaaggaaaaaaaaatcttggaatttagaggttttgattgggatttttccctttc

SEQ ID NO: 32075 - DNA, 120 bp, synthetic construct
  source 1..120: mol_type = other DNA
ttctctgtgcttaaaatgaaccaacaatttggcaccgcacaatactatcccctagcttaggtgtatatcaatacaatattagtttctttttctttttcttttttctttgacggagtcttg

SEQ ID NO: 32076 - DNA, 120 bp, synthetic construct
  source 1..120: mol_type = other DNA
ccgtgggtaaataaacccaagaacggaaatccgaggaaagcagagttacatacaattaggacttttcctgaatcctccatgacatgtgtgtcacaggaataaccaaacctggaaatttga

SEQ ID NO: 32077 - DNA, 120 bp, synthetic construct
  source 1..120: mol_type = other DNA
aaaatcaaagcctttgaagcagtcatcttgcagtcaccttgtgaccgtgggtaaataaacccaagaacggaaatccgaggaaagcagagttacatacaattaggacttttcctgaatcct

SEQ ID NO: 32078 - DNA, 120 bp, synthetic construct
  source 1..120: mol_type = other DNA
atatgcaatgcaacattggcactcagattcataaaacaagtacttcttggactgcagtaagatttagacagctgcacaagaatagtgggggacttcaacgttccactaacagtgctagat

SEQ ID NO: 32079 - DNA, 120 bp, synthetic construct
  source 1..120: mol_type = other DNA
cgttccagagcgattcttcagccaaaatgaccaacatagtgttttgccagacagagggggttttctctcctaagagacattctgactccaacccctaatttttatttctcctatacatat

SEQ ID NO: 32080 - DNA, 120 bp, synthetic construct
  source 1..120: mol_type = other DNA
gaaatagtacattttaaaggactaaaataaacacatttggacctgggaaaggtgaagaaatccaagtgccaacatgtcatcagggagggactcctcatctgggaacaggaaggaagatgt

SEQ ID NO: 32081 - DNA, 120 bp, synthetic construct
  source 1..120: mol_type = other DNA
actccttgtgtgccccaagatttttaccttcaagcttatctgtcaaagttcaccatggcagtgtaattgatcaacctatcaattatctttgcaggtacaggggacataggacagaactca

SEQ ID NO: 32082 - DNA, 120 bp, synthetic construct
  source 1..120: mol_type = other DNA
tgaatgcttatcacacagtaagctagttagaagtatatatgaactaccagagaataatacttgaaatcacagacaatgcagacatttctcagctccattaacataagcctctcaagagag

SEQ ID NO: 32083 - DNA, 120 bp, synthetic construct
  source 1..120: mol_type = other DNA
aacttctttatctaattgtcatactagcttgctgttgggaactataagcaatttgtattatttaaggcatgctatttgtcaataattcagagagattttcaagaatgtgcaccacgatta

SEQ ID NO: 32084 - DNA, 120 bp, synthetic construct
  source 1..120: mol_type = other DNA
cctcataactgttaggataactattataaaaaagataagagataacaggtgttggtaagaatgggggaaaaaaggaaactcttgtactgtgttggtgcaggcattatgggaaacagtgtc

SEQ ID NO: 32085 - DNA, 120 bp, synthetic construct
  source 1..120: mol_type = other DNA
tgattaggactaagaaacacagaaaaaccaccattcaagaggttgccagatcaggctatagatggcatggtaataagaagataggctgttagatgtagttacaaaaaaagcttatttacc

SEQ ID NO: 32086 - DNA, 120 bp, synthetic construct
  source 1..120: mol_type = other DNA
ctctcatagtcccaacactgctgatacacactaagctttctttctgaatctaaaataaaaattgaaatttaataagaagtacaaatgagatctaattaaactaaagagcttctgcacagc

SEQ ID NO: 32087 - DNA, 120 bp, synthetic construct
  source 1..120: mol_type = other DNA
caagattccaggtagttcagataagggaaaattgcatgaagaaatccaaattactatgaacctatctgaacacgtaccttagccatataagataaataagcatgcagcaattcgatctcc

SEQ ID NO: 32088 - DNA, 120 bp, synthetic construct
  source 1..120: mol_type = other DNA
tagaatgatgcagatcttcccctctccaactcttggggtgtttgatgatctgaattgtaacatatacagaatggcaattatttgaataatttcagcaccaaattactcctttgttatcca

SEQ ID NO: 32089 - DNA, 120 bp, synthetic construct
  source 1..120: mol_type = other DNA
tttaagctcaggttgagagacacattaggcctggtgtactcctgtaatcatcattggcagtgattactgtttggtaatctaagcttcaactgaatccaacattcttgcctctgctgaaag

SEQ ID NO: 32090 - DNA, 120 bp, synthetic construct
  source 1..120: mol_type = other DNA
ctccaataacaacatctgcttggcagcttttcaagcccacggatagttatctaactgaggcttttgtgctgtactgtttattctatgtgaagaaatgcctccttagttgaaagagtactt

SEQ ID NO: 32091 - DNA, 120 bp, synthetic construct
  source 1..120: mol_type = other DNA
agacaggtaataacaattgtcaccaaggctgtagaggaattagaaccctcaaatactgctagtgggaatgcaaaatggtgcagcaactttagaaaaacagtggcagttctttaaaagata

SEQ ID NO: 32092 - DNA, 120 bp, synthetic construct
  source 1..120: mol_type = other DNA
taatctatagcatattacaatgtcacaagcatatcatattccactcccctacttagctcaatgctcccaaacatcccagtgttaaaactttgaattcggggggaggagccaagatggccg

SEQ ID NO: 32093 - DNA, 120 bp, synthetic construct
  source 1..120: mol_type = other DNA
aacataatccttataaaaacctaggatatccagacattgttaatcccattttatggaggaagaaactcaggcataacgggctcaggtagcttgccaaaggggctggagaaggagaagcag

SEQ ID NO: 32094 - DNA, 120 bp, synthetic construct
  source 1..120: mol_type = other DNA
cctgttttttatggtatcagtcccagagtaaaactgttctcacactccaactgactctattgtccacaatcaagctgacttaggttggcttatttgggcaagaatgcacatctggttgtt

SEQ ID NO: 32095 - DNA, 120 bp, synthetic construct
  source 1..120: mol_type = other DNA
gttcctattcagccatcttggctgcctcccctttaatatggttgttgaactttgacaagatacaatattttttccattcacatttggcatctaacgcaacagcacattcagggagaggag

SEQ ID NO: 32096 - DNA, 120 bp, synthetic construct
  source 1..120: mol_type = other DNA
tcgagaagcatggccaacattcccaatgatccgcagatgtggtttccacctggccggtgccatgacaccggaacacacggcgacaaggagaagggagaagaaaacctcgccctctccctc

SEQ ID NO: 32097 - DNA, 120 bp, synthetic construct
  source 1..120: mol_type = other DNA
acagttgaaagttttaacaatagactggaccaggcagaagaaagtatttcagagcttaaagacctccaattcatatcaccaactaataattttttaaaaaatagcttgaagacccatctt

SEQ ID NO: 32098 - DNA, 120 bp, synthetic construct
  source 1..120: mol_type = other DNA
aatccgcctatttccatggatttgtttctgtaatagtttcctcccattcagagagacattgtagtgcagtggttaagaggatatatcatggagccagggtttcagggtttgaatttcagc

SEQ ID NO: 32099 - DNA, 120 bp, synthetic construct
  source 1..120: mol_type = other DNA
cacagtcagaggagacaaaagaaaacagaataaaaaagaatgaagcactcctacaggatttagaaaatagtctcaaaaggggaaatctaagagttattggccttcaaggctggcgggggg

SEQ ID NO: 32100 - DNA, 120 bp, synthetic construct
  source 1..120: mol_type = other DNA
gcagatttcccgagtgtccttgaatgatttattcatggtctacttgtgtagtagcaaaagaaaagaattatacattactttttttttcatcttgtgcaagagaggagtttaaaaatatat

SEQ ID NO: 32101 - DNA, 120 bp, synthetic construct
  source 1..120: mol_type = other DNA
cttctggtcctgagcattttacataagggatgctcaacctataccaatattaatcctggaaataggagattaagctttgggttccaccagcagataggagcttgaacctaaagctccgac

SEQ ID NO: 32102 - DNA, 120 bp, synthetic construct
  source 1..120: mol_type = other DNA
ttctcccattattcctccttctctttctgtgcctgttgtctgatttctaggttttttatttgtttgtttgatggtggtggaggggggatgcatcagatttttaggacagaatcttgaggg

SEQ ID NO: 32103 - DNA, 120 bp, synthetic construct
  source 1..120: mol_type = other DNA
tatgctgtattgcttattacgtattgaagcaaatatttgaacacaggcagttcagctcaagagcccattcatagtagctaggcatgcgggtttaaatgaaaggatgcctgtaaggttcct

SEQ ID NO: 32104 - DNA, 120 bp, synthetic construct
  source 1..120: mol_type = other DNA
tccattgatggacatgggttacttccttgttttagcaattgtgaataatgttcctacgaatgtgggtatacaaatatctcttcaagaccctactttcaattctttcagggttatacccag

SEQ ID NO: 32105 - DNA, 120 bp, synthetic construct
  source 1..120: mol_type = other DNA
aaagtagcctagataatttagatataacttcaaaaaataatgaaatcttccgtctctaccctccacatttcaagttttaaggaaaaacaatagcttaacagattaagcaatttgaaatag

SEQ ID NO: 32106 - DNA, 120 bp, synthetic construct
  source 1..120: mol_type = other DNA
ctgcctaaattagctatctaaaaaaagttccacttaggagatgactggtacagagtatgcaattaaaatgccttcttctggttctggccagggcattcaggcaggagaaggaaataaagg

SEQ ID NO: 32107 - DNA, 120 bp, synthetic construct
  source 1..120: mol_type = other DNA
tcaagcatagaccgcctggtactttgggcaggaatccttgcggtttagtcaataaacagaatctgaatgaaagacaccacagtaactagacagtaacgttttgaacagatcttaacctga

SEQ ID NO: 32108 - DNA, 120 bp, synthetic construct
  source 1..120: mol_type = other DNA
gagagaagggacactttctaaactagcaaacccctttgtttaatggttccagggtttttcaaagttcagggcaggtgacactggtctgttcctaatctttactgtgttagcaatgttaag

SEQ ID NO: 32109 - DNA, 120 bp, synthetic construct
  source 1..120: mol_type = other DNA
agttatgacactaggacaggcatacatgtttcaacacacacgcagctcaaaacaaagtttttggcactatatgacagagaacttaaaccaagactcaaagaaaggttatggagtgtgtgc

SEQ ID NO: 32110 - DNA, 120 bp, synthetic construct
  source 1..120: mol_type = other DNA
tgagaaatctccaaactgctttccacagtgactgaactaattttcaaacctaccaacaatgtataaacattgccttttctccacagcttctccaacatctgttatttttgactgtttagt

SEQ ID NO: 32111 - DNA, 120 bp, synthetic construct
  source 1..120: mol_type = other DNA
agttgtagggttttgaaattccctgactggctttcatccaagcactttatttgcaagacttagatacggtacaaccaacgagagacatacagttaactattgaccctgtggggaaaagca

SEQ ID NO: 32112 - DNA, 120 bp, synthetic construct
  source 1..120: mol_type = other DNA
ggatggaatcaagagatttatttcaaggaattggatcctgtgatcttgggaactgacaagtgcaaaattcataggacatgtttgcatgaaaacccctcaggcaggaattggtgctgcatt

SEQ ID NO: 32113 - DNA, 120 bp, synthetic construct
  source 1..120: mol_type = other DNA
aaaagatttttgcacactgaagttgcatattgattatagccaacccaaatagatcctttcctgggaacagaagtttgagtgggtttggaatcaggggacctgggtttcagtcctctctct

SEQ ID NO: 32114 - DNA, 120 bp, synthetic construct
  source 1..120: mol_type = other DNA
attttgtgtaatcattccacagaatttaaacaacctgcatttaattgtttacaacaggtacaatttcatccctccaccagcttcttgccctgagagtagacactggccatagagcccaga

SEQ ID NO: 32115 - DNA, 120 bp, synthetic construct
  source 1..120: mol_type = other DNA
gtattagattactgctcctgggtgcttgctggctttcacgtcttgggggtgtggagcttacacatgttttctattcttaaaactcagttcctattgaagtgatgaccaaagtgattttgt

SEQ ID NO: 32116 - DNA, 120 bp, synthetic construct
  source 1..120: mol_type = other DNA
aaccttggctgcacattagaatcgcctttgggattttaaaaactgccgtgtccagaccacatgccaaaccaattacatcagaatgtttaggagtgaaatttctgaatttgttattgatct

SEQ ID NO: 32117 - DNA, 120 bp, synthetic construct
  source 1..120: mol_type = other DNA
gataaatactacttgtattaattgtacccaagttatgtcttatctttttctttttcttccttagagcctttctgagtacatgatttaatatgggtacacatacgaaaggggcactgactt

SEQ ID NO: 32118 - DNA, 120 bp, synthetic construct
  source 1..120: mol_type = other DNA
ttattgattagttctaaaagttttttggtggatgcattatatattaatttaagcagtgcattgctttttgaaaaagatattgcaggaatcagaatggccacttgtcagtatctccatgga

SEQ ID NO: 32119 - DNA, 120 bp, synthetic construct
  source 1..120: mol_type = other DNA
gctatggaattgaaagtgatttaattttcagcgagcttcacctcaaatagccaaatagaacaaagatcccttgactggtaagaagtggtataaatttaccaggagtcctcgtgtgggggg

SEQ ID NO: 32120 - DNA, 120 bp, synthetic construct
  source 1..120: mol_type = other DNA
tgtaaccgtgggaatgaccgcagtgtaaagaaccaactctagtctcatagcagcgtacaacctagtaaacttcacaagttaacaaggtctgctttcttcatctctatcagataaccttca

SEQ ID NO: 32121 - DNA, 120 bp, synthetic construct
  source 1..120: mol_type = other DNA
ccagaaacaaccaagtctgaatcctggattcactacttactaattaggggtacttggacaagtcagcctcttggatttccaggttccctcaactgtaaaatgaaggtaatcaatagagct

SEQ ID NO: 32122 - DNA, 120 bp, synthetic construct
  source 1..120: mol_type = other DNA
tttcaaccaactttcaggacaaaagctaggtgggactagctactagaggatctacttaccatgttttcttggccaattcctgtttgtaaaatctttgtgcctcagactgtaaacagaact

SEQ ID NO: 32123 - DNA, 120 bp, synthetic construct
  source 1..120: mol_type = other DNA
aaagggatggagccgtctgggatctgaggagtgcctctgcccagcgaccgccctgtctgggatgtgaggagtgcctctgcctggccactgccccggctggcaagtgacgagtgcctctgc

SEQ ID NO: 32124 - DNA, 120 bp, synthetic construct
  source 1..120: mol_type = other DNA
ttaaccttagtgtttgttaatgtcagtatgaactcacaaagcctaataaatgctggactcaagtgtaggcatcccagaaagggcagagagcctcccagagtataaggagtagatgaagtc

SEQ ID NO: 32125 - DNA, 120 bp, synthetic construct
  source 1..120: mol_type = other DNA
ctttttttttttaagacgaagtctcgctctgtcgccgtgagtggctttttgaaccttggtacttagcgcagaatttcttttcagcttgtatttctggcaatgcctgtaccttgctaacat

SEQ ID NO: 32126 - DNA, 120 bp, synthetic construct
  source 1..120: mol_type = other DNA
aaatatgggagactgacccataaaattattcactactgggttgtggatcattttggtctcaccgacccaaacacctgacctcacaatctctaagtgacacatggaaaatgaacttttggg

SEQ ID NO: 32127 - DNA, 120 bp, synthetic construct
  source 1..120: mol_type = other DNA
gtatgtgggccaagtgcaaatcacccatctagattggcaaaattgaaatgtaagaaaatgctgggttctgggtgggagagcatattgccttgaattgtctttcaaacctggctaaattct

SEQ ID NO: 32128 - DNA, 120 bp, synthetic construct
  source 1..120: mol_type = other DNA
agatctccttccttccctactttgcaaccaacccctgagggcaaatcaacaaaaatcatttagttcattaaaaacaaagttgctctagacaaaagtacccatttgctgactgctgtttgg

SEQ ID NO: 32129 - DNA, 120 bp, synthetic construct
  source 1..120: mol_type = other DNA
aggcctgctttatctgtgctcgatgaaccttatggctttctaaggaacatttctgatatccctgataacaactgttaatccagccaccagtgccaagacctcaaactaattagcctaaaa

SEQ ID NO: 32130 - DNA, 120 bp, synthetic construct
  source 1..120: mol_type = other DNA
ccagcaccatgttgaatagaagtagttagagtgggcatccttgtcttgttctgattcttagcaggaatgctttcaacttttcctctttcagtattaggttggctgtgggtttgtcataga

SEQ ID NO: 32131 - DNA, 120 bp, synthetic construct
  source 1..120: mol_type = other DNA
atgaaggaccttgaagatgagagctaaacctcttcctctagaagattctcaactggatccagaaggactcagtggttgtttcagaggactttggcaaaagcagtgccccttttcactcac

SEQ ID NO: 32132 - DNA, 120 bp, synthetic construct
  source 1..120: mol_type = other DNA
cttgcagacaacgtgatcttatacagttgcttgtctatatccatgggttccacatctgtggattcaaccaaccacagattgaaatattaggagaaaaaattacatctgtactgaactttt

SEQ ID NO: 32133 - DNA, 120 bp, synthetic construct
  source 1..120: mol_type = other DNA
tatcactattctatgaattaggtaggagaagcccatctgtctctcctcattttacagataagaaagcagacactcttggaagtgacggaaactttttcactgcatggccttcagtgcata

SEQ ID NO: 32134 - DNA, 120 bp, synthetic construct
  source 1..120: mol_type = other DNA
tttttgcctttacagggtttgtttgcatctgtagtcctgagcagtcttaaggttagggttttaatgggtggcttgggttatacagtattcgctctggaaagtatttagtctgatcgcctt

SEQ ID NO: 32135 - DNA, 120 bp, synthetic construct
  source 1..120: mol_type = other DNA
gtctgctactgttagatttatttacaagtgatcgggctgattcatcagcccatctatccttttgaataaagtgttgttaggcaacttagtattcataacttgaatagctggtttggggat

SEQ ID NO: 32136 - DNA, 120 bp, synthetic construct
  source 1..120: mol_type = other DNA
gtaagtggttaggaaagttggctagaataattcagtaagctactacacaatacatataggagataagttcttccccttggacactggctaatgagttagtctctccattagaaaactgcc

SEQ ID NO: 32137 - DNA, 120 bp, synthetic construct
  source 1..120: mol_type = other DNA
ttccttcccgtttttccttccttcctttcctcctcacctccctcccttccttatttttttcttcactttcttaatctctccattgcaaatggtttcccaacttttctctgttttgttttg

SEQ ID NO: 32138 - DNA, 120 bp, synthetic construct
  source 1..120: mol_type = other DNA
atacaagctttagaaataaccatgcaaccttgttgaccaatcatgaaagaatggtcagtgaaactcctttttctgtttcttctccttccagttgctctttcattttatagatgtagaata

SEQ ID NO: 32139 - DNA, 120 bp, synthetic construct
  source 1..120: mol_type = other DNA
ctttcagcatctgctgatgtgggctctgcttctcctttttcccatgtttctcctttctgcagcttttttttttttttctgctgactcttgcttccccacttttagcatctgctaatttgg

SEQ ID NO: 32140 - DNA, 120 bp, synthetic construct
  source 1..120: mol_type = other DNA
gctaatttggtctctgcttctcctttttcctatgcttctcattcctgctgctgttttcacttttgctgactctgccctacttcccccttcttttagcatctgttcatggcctctgcttct

SEQ ID NO: 32141 - DNA, 120 bp, synthetic construct
  source 1..120: mol_type = other DNA
tggtggttatagaagtgagtctttgaaatggaagaactcatgaaagtgtgagataatgtattagtcaatcaggatcatttccatgttgaaccaggtttcaatccttcctccttaatcttt

SEQ ID NO: 32142 - DNA, 120 bp, synthetic construct
  source 1..120: mol_type = other DNA
attgtctcccccatcttgttcccagagactttttagattttttttcctaattgaacccaccgtgaaaatttaataacacagatataatatctatctatttgtgtactatatgtatatctc

SEQ ID NO: 32143 - DNA, 120 bp, synthetic construct
  source 1..120: mol_type = other DNA
tctgggctgtgatctccctgagacccacagcctggataacaggaggaccttgatgctcctggcacaaatgagcagaatctctccttcctcctgtctgatggacagacatgactttggatt

SEQ ID NO: 32144 - DNA, 120 bp, synthetic construct
  source 1..120: mol_type = other DNA
gactgtggacagaaagtacagtatgcagacttttcctaatcatgactgttaattcctgtcctggactgctgaagcagatgctatgttaaactacatttagcacagtcacaaacggtgact

SEQ ID NO: 32145 - DNA, 120 bp, synthetic construct
  source 1..120: mol_type = other DNA
gccacggcacctggaggtaaactctagtaaatgttaaagagcttaatataagagagtgtgtcataaatagtgaataagagaaacacatcatatgaggaaaagttagatgaagtttatgag

SEQ ID NO: 32146 - DNA, 120 bp, synthetic construct
  source 1..120: mol_type = other DNA
tatgaacactttgctaggacccaggaagcggtgcatgccagcagtctctagaacataaacttcatcagctttgtagtgaatgtgtctctgggcccaggtttttttgttttttttttaatt

SEQ ID NO: 32147 - DNA, 120 bp, synthetic construct
  source 1..120: mol_type = other DNA
acctggcaaccaatatttccaagctcggaagatgacttttatgttgaagtggagagaaggtctgtgcaaaaaagtgatcagcagaatattaaagttccaggcaacttgacttcggtgcta

SEQ ID NO: 32148 - DNA, 120 bp, synthetic construct
  source 1..120: mol_type = other DNA
agtccagtcttctgtcttgggagaacaatgatgttacatcagtagaaaaacgcttctaaaacaagagtggagtgaactctacatgcctatagtcccttagaactaaacccctctccctcc

SEQ ID NO: 32149 - DNA, 120 bp, synthetic construct
  source 1..120: mol_type = other DNA
cctctcttatttcttccatatatacacgatccttctccctacaaatgtgacagatctccagtttctagtcatgatttgctaagcatagtgctgcatgctctacttacatacttcactgcc

SEQ ID NO: 32150 - DNA, 120 bp, synthetic construct
  source 1..120: mol_type = other DNA
gaagaggctgacatcatgcgttcctcctatgtgagtttactggaattgtacagaaaaaaaggctctaggaaacttttaactcgggccagctgttttgttgacttataatcatgttttagg

SEQ ID NO: 32151 - DNA, 120 bp, synthetic construct
  source 1..120: mol_type = other DNA
cacactagttagactaatctagcaaaagacagagaaagtacaaatattgattgtggtttggtaaagaggaaagaattgcagctatagaggaaattaaatatttgaaaacctagataaagt

SEQ ID NO: 32152 - DNA, 120 bp, synthetic construct
  source 1..120: mol_type = other DNA
ggtcctgtgctctgcttccaggttctggccctgtaacccgggggacagggccggccaagacagggccactgggtgccagccagcacctgggcgaggtgccaggtggaagggctctggcgg

SEQ ID NO: 32153 - DNA, 120 bp, synthetic construct
  source 1..120: mol_type = other DNA
agccagaactcaaacctctcgaagttctgtgtgactctgggaatttttaagcatactagttcctagatggcatttttccagcctgtagaatcccagtctatgggtacatggtttattact

SEQ ID NO: 32154 - DNA, 120 bp, synthetic construct
  source 1..120: mol_type = other DNA
attaagaagataatctgggcagctgttggaggatatatcccagaaaagttcacattgtgaggccaacttttgtcttaggtacagggctatcctgcaaattcagaacaaagttcctgaggt

SEQ ID NO: 32155 - DNA, 120 bp, synthetic construct
  source 1..120: mol_type = other DNA
tcacaaacatggatattttgacgtggtatggccaagacagccacattttcaagtttccttagctccatagtaattctgatgccaggctgtcttgtccataccttcagaattcctgagctg

SEQ ID NO: 32156 - DNA, 120 bp, synthetic construct
  source 1..120: mol_type = other DNA
ttactaactttaattactgggctgacagattcagctttttttttttttcttctattgcctccttaattcaaaatcatactgctctccttgagacttgatttcttgatatcttttttcttt

SEQ ID NO: 32157 - DNA, 120 bp, synthetic construct
  source 1..120: mol_type = other DNA
tctcatgaagttcaaaatcaaggtgttagcaaggttggttccttctgggggctgtgttccttctgggccctattctatgcctcccacagtttggaggtttgctggcaatctttggtgttc

SEQ ID NO: 32158 - DNA, 120 bp, synthetic construct
  source 1..120: mol_type = other DNA
gggttcacagtgaaggatcgaaaccctaggctaagagagattgcttttgcgtagtatctgtacgtaatactcacactgtactctttgggaaatgtgacttgcattaaggtatctgtatgt

SEQ ID NO: 32159 - DNA, 120 bp, synthetic construct
  source 1..120: mol_type = other DNA
cctagaagaaaacctaggcattaccattcaggacatacgcatagacacattttaagaaagatttttctacctagcccatgttgctctgttccaagataactttattacctggtggtagtt

SEQ ID NO: 32160 - DNA, 120 bp, synthetic construct
  source 1..120: mol_type = other DNA
cattactagctgtgagttgttttgtctctaggtaccataattattgccaggtgtttatgctatagaaagtactgagtgtaagaactgccatgttggtcacttgcaaaggtattccccctg

SEQ ID NO: 32161 - DNA, 120 bp, synthetic construct
  source 1..120: mol_type = other DNA
ccatttttgttaggtcttttctcttgagtaagacatattccctacagaagattcatacattttcctgctcggatgaaacttggctgcctgggttctgctgtagatctcaataagagggga

SEQ ID NO: 32162 - DNA, 120 bp, synthetic construct
  source 1..120: mol_type = other DNA
aaactgacgggaagggtgaagattaaccaagggaaggctacatattcagagaaaacaaatatttttaaaacagacatatgtggccaaaaaattctaaatattttgatagttcctgtgggc

SEQ ID NO: 32163 - DNA, 120 bp, synthetic construct
  source 1..120: mol_type = other DNA
tatgctgtcttcattctccctcccattttttaagggtattctatatctgcattgtcaaaatatatagccataagtatatattcactccctgtaacccttatttaatcttaattctatagg

SEQ ID NO: 32164 - DNA, 120 bp, synthetic construct
  source 1..120: mol_type = other DNA
ggtcaataagattaggtttcatatcagtccacggcatgaaaatgggaattctgggctgctattcaccattatgaagacaaaggcaacttggtatcaagtgtctctaaggacaggaaaagc

SEQ ID NO: 32165 - DNA, 120 bp, synthetic construct
  source 1..120: mol_type = other DNA
aaataattagaacacctataatcacagcattttgaaaggccaaggcacgaagattgcttgaagcctggtgttcaagaccagcctgagcaacacagcaagattctgtctctacaaaacaca

SEQ ID NO: 32166 - DNA, 120 bp, synthetic construct
  source 1..120: mol_type = other DNA
agaaaggaattcttttccacaacaacaatgctcctgctcattcctctcagctaacaagcataatttggggagagtttctaggggaaatcattaggtatcccccttaaagtcctgatttgg

SEQ ID NO: 32167 - DNA, 120 bp, synthetic construct
  source 1..120: mol_type = other DNA
tccagtctaccattgttggacatttgggttttaatatatttaaaaaaagattatattgacctggttaaattccaggacactcagttctttacggatgaactaagtggctggtatcatcac

SEQ ID NO: 32168 - DNA, 120 bp, synthetic construct
  source 1..120: mol_type = other DNA
tattgttaggtgcttaagtgggaaatacatcaaatctattttctattgaaatgaaaactctggtgtacatatataaaaattaatcctatctcatttgccttgtaaattcaatggtctagg

SEQ ID NO: 32169 - DNA, 120 bp, synthetic construct
  source 1..120: mol_type = other DNA
gggagggagagggagagggagggggagggggagggggagctacatttcaatttttacaacattgtacttaatcagtttcattatcaacttcatactttaagaaatgcattaaaattaaaa

SEQ ID NO: 32170 - DNA, 120 bp, synthetic construct
  source 1..120: mol_type = other DNA
tcaaccaatcataagttaagtctatggcatactgaccttcacccatgcaacctgtggctaaagaagcagcctagctccacacactgaggtggagaaaagcaaactatcttaattatgtgt

SEQ ID NO: 32171 - DNA, 120 bp, synthetic construct
  source 1..120: mol_type = other DNA
gaaacagcctgggattatacaaatgctgagtttgtggagggctaataatatctactcagccatgagttcacagcagttgggctctagttttgcttttgttgttgttgtttttttgcaggg

SEQ ID NO: 32172 - DNA, 120 bp, synthetic construct
  source 1..120: mol_type = other DNA
tttgctatgatgtcttctccttctgttgcttcttttcttgctgccgttgaagttggaatgctatatcttgaaatccacgtctcagagtacaaggagtcaaatagtattctcccatgctgg

SEQ ID NO: 32173 - DNA, 120 bp, synthetic construct
  source 1..120: mol_type = other DNA
cccatccttgcacatcacgtactgccttagctgcaggcctttgcacatgccagtcctacgcccagaatggtcccctgcctccccagaggctcctttacccaccagccttcttttcttgac

SEQ ID NO: 32174 - DNA, 120 bp, synthetic construct
  source 1..120: mol_type = other DNA
tttcttgaatctactgtgcctagaatgttcagacactgcagtaaaggacactggtacgatccagcccgtgggaagaaaagcaatcaattgagcaattactatgcagtgtgatgagcactg

SEQ ID NO: 32175 - DNA, 120 bp, synthetic construct
  source 1..120: mol_type = other DNA
gatggaacagggagggcactgaagtgggctgggtgaaggacagggggctggagggtgagaagagggtggggtacttaccgcctgtgcccggatgcttgaaccatgttttgtctttcagat

SEQ ID NO: 32176 - DNA, 120 bp, synthetic construct
  source 1..120: mol_type = other DNA
ctttcttacaggagggaaacactccacttttgtttgctataaattccaggagacagcatatggtggaatttttattgaagaaccaggcaaatatacatgccgttgacaatttcaaaaggt

SEQ ID NO: 32177 - DNA, 120 bp, synthetic construct
  source 1..120: mol_type = other DNA
ttcaaatacttgtccacttaaataataactatcatgtatctgttacagactaagcatttttccaatgttacaaaatacatttaaaaatacagttgggagattgttattaccactgttatt

SEQ ID NO: 32178 - DNA, 120 bp, synthetic construct
  source 1..120: mol_type = other DNA
tgcctcttttaatctggtgaatctcactgtctaagtctcagctcaggcatgatctctagaaaagccatccctgacagcttttattctcattctttaaacacctgtgcctaccacttagca

SEQ ID NO: 32179 - DNA, 120 bp, synthetic construct
  source 1..120: mol_type = other DNA
cttgtataaattgaaaatattttagcttggcagcttttagcatagaacaaaatataccataccaattatttcttctttgagacattaacacagtaaatcttttattctaagtgtattttt

SEQ ID NO: 32180 - DNA, 120 bp, synthetic construct
  source 1..120: mol_type = other DNA
cggaaaattaatttgctcaaggtcgcacagctagtatctggtagatctgggattcagacccagcccttctggcttctgtgtagaactgcctctcaaaccattccatggaacacctggttg

SEQ ID NO: 32181 - DNA, 120 bp, synthetic construct
  source 1..120: mol_type = other DNA
aatgtgcaggcttatttttagattatcaattcttagtttatgtctattcttagtttatgtctattcttataccaggaccaaattgaatttactgagaaaattttttcaatcatgttgcat

SEQ ID NO: 32182 - DNA, 120 bp, synthetic construct
  source 1..120: mol_type = other DNA
aagctacatggtatcccttttactgcattctattcattaggagaaggccatcagtaaggatggcccatattctattcttttaatgggatgaatatagattctcttttgttttaattgaca

SEQ ID NO: 32183 - DNA, 120 bp, synthetic construct
  source 1..120: mol_type = other DNA
tcactatcccaatctgagaaagtggggaggagcaaaggagagagccaagaccaagaaacacaacagaaaatggacagacaatatgtatcaaacattaaaaatatgtatagcggctaggcg

SEQ ID NO: 32184 - DNA, 120 bp, synthetic construct
  source 1..120: mol_type = other DNA
gccttgccactacatacctttaacggcgataaggtagttcactgcatgaatatactgacattaattgaattaattccctattattgaacatttatgccacgtccaaatttttagtaatac

SEQ ID NO: 32185 - DNA, 120 bp, synthetic construct
  source 1..120: mol_type = other DNA
cacagccattctttctattttttttgtacctattaaccaccagcccccgactactacccttctcagcccctgtggtaaccatccttctagtgtctatgtccatgggttcaattgctttga

SEQ ID NO: 32186 - DNA, 120 bp, synthetic construct
  source 1..120: mol_type = other DNA
gtttaagtatgaggcactaaaaaaataacagtcacaaagtttgtgtgtcagaggtgtgcttgctgatcattaagcttcactataggttgaaagttaattggctttgccggggaagtcccc

SEQ ID NO: 32187 - DNA, 120 bp, synthetic construct
  source 1..120: mol_type = other DNA
agtgaaagaacttaaacaaggattaagtaaaagcaacacaccagcattccccaacatcagtcctcagccagaattctctggagaaaccctcacccaagcccttcacatgtttacattttg

SEQ ID NO: 32188 - DNA, 120 bp, synthetic construct
  source 1..120: mol_type = other DNA
gtctgaatctctttgctgagcccagctagttggcctcaaggaggaggaaggaggaagcataatttgtggaatagataaaatgtgttcttaattttctgaggagagagacccaggttgaag

SEQ ID NO: 32189 - DNA, 120 bp, synthetic construct
  source 1..120: mol_type = other DNA
acagggatcagcaagatgaaagctacggctccatcgccaggaccctcggggtgtcttgtttggaagcatccctgctggcctctggtcttcagcagggcgtctctcttctctggttgagga

SEQ ID NO: 32190 - DNA, 120 bp, synthetic construct
  source 1..120: mol_type = other DNA
gctttctggaatgcagggaaaaggagccactgccaggaccccagaaattctgcagtcccaggacctgtgtacacaggcggggatcttgccctggtggatttgtccacatttggagtcgat

SEQ ID NO: 32191 - DNA, 120 bp, synthetic construct
  source 1..120: mol_type = other DNA
gccacttagggctttaagggctggagagggcaaggctagagccatagggtttggagtttgctgacagtggtgtctttgttctgggttcattgtggaccattcagaaacccagaaggtctg

SEQ ID NO: 32192 - DNA, 120 bp, synthetic construct
  source 1..120: mol_type = other DNA
acctcattttctgtatcagccatctcccctccctgtacctcaacagtccccctcgccattttctccccatttttccttcctgcctctaccttaacatcctcctcattcttctccatcaaa

SEQ ID NO: 32193 - DNA, 120 bp, synthetic construct
  source 1..120: mol_type = other DNA
taggacattgctagaaagactctggttctcctggctttggcaggggttggccaagtctcagaagggctgagaatggcttctggccatcccccagagagctctagctacaggaaagtcccc

SEQ ID NO: 32194 - DNA, 120 bp, synthetic construct
  source 1..120: mol_type = other DNA
ggagtgcaatagattggcctcttcaccccactaaccccaacacccttgctcttagaacccagaacacaagtgtcttcctgtagttactacaatgccctaaactgttactttgtcaaagta

SEQ ID NO: 32195 - DNA, 120 bp, synthetic construct
  source 1..120: mol_type = other DNA
gacagtgaggaggaagtcctggctacaaatcacccttttagagaaacttctctttgtggaggatattatttgtagttggctaagatgctatgtcaagttaagatctggtgtggccacatt

SEQ ID NO: 32196 - DNA, 120 bp, synthetic construct
  source 1..120: mol_type = other DNA
gacttaactctctgggcttggcagatacatggggcccctgtgcaagagtgtggctagcaaggcagccccagctctcagacttaactctctgggcttggcagatacatgggccctgtgcaa

SEQ ID NO: 32197 - DNA, 120 bp, synthetic construct
  source 1..120: mol_type = other DNA
cccagctctcagacttaactctctgtgcttggcagatacatggggccctgtgcaagagtgtggctagcaaggcagccccagctctcagacttaactctctgggcttggcagatacatggg

SEQ ID NO: 32198 - DNA, 120 bp, synthetic construct
  source 1..120: mol_type = other DNA
tgggcttggggaggtgccaaggtatagaggttagcatggaatcatttttctccataatggctcttgaatgtgactctgacagagttgtgtgtctctattattcttaattacctgtttcct

SEQ ID NO: 32199 - DNA, 120 bp, synthetic construct
  source 1..120: mol_type = other DNA
ggcttataactgggacagtgagttttacctgccacaaggagtcctgtgcctgtagagagtttctatctttctgtcttaaatatctcaggtctctttccatcatctcttttacctctaaga

SEQ ID NO: 32200 - DNA, 120 bp, synthetic construct
  source 1..120: mol_type = other DNA
cctgcttatgataccaggaacagatgactcttctgttcttcctgcttccttgggtggaaactgcaaaggatgccttccaaaatcagcttattatttttgtggacccaagatctgtagaca

SEQ ID NO: 32201 - DNA, 120 bp, synthetic construct
  source 1..120: mol_type = other DNA
ccttctaaactctcaaactgtggcctagcaagttcgggccttgtccctatataccatgaaaaaggacatactgattgtcaagaggtcatccattttggattttgtatagtcactcctatg

SEQ ID NO: 32202 - DNA, 120 bp, synthetic construct
  source 1..120: mol_type = other DNA
caacattatttagataattgcgtcatctaaataatttgttcccctttcactagctccccagcccttctaaatgctggaatagaaagtaaattgccaggccacacatggtggctcaagcct

SEQ ID NO: 32203 - DNA, 120 bp, synthetic construct
  source 1..120: mol_type = other DNA
atgatttggtttagtttttaacaggatcacactggctgctatgtggagatgactgtaggaagtgaagagaaccagggcatctggtcaggaggatattgtaatgattcagataagagatgg

SEQ ID NO: 32204 - DNA, 120 bp, synthetic construct
  source 1..120: mol_type = other DNA
gccacagtcagaatgtagaacagtctggatgtcttttgaaggcatagctaacatgatttgtgcatggattggatgaggggagtaacccgagtagctagaaagttggaaaattattaaagg

SEQ ID NO: 32205 - DNA, 120 bp, synthetic construct
  source 1..120: mol_type = other DNA
tgtgtgtgtgtgtgtgtgtgtgtgtgtgtttacatgctcgtgcaccttatggaggggaaggccagattctgaggctctgaactttttgcagtgtttaaaatagactcaggatttatttat

SEQ ID NO: 32206 - DNA, 120 bp, synthetic construct
  source 1..120: mol_type = other DNA
gtctcgatttgtgttgctgtagaagccagggcatccaggaaccgtcctttttataccagttctgcacaaggacaggagacaaaatagcttcttttttattgcttcggtgaggaactgagg

SEQ ID NO: 32207 - DNA, 120 bp, synthetic construct
  source 1..120: mol_type = other DNA
catgaaaggggcacatgaatagcaaagctccgtccaggtgggggttcgtcttcttagcagcattgtgaacaagaccccacgatggccacagcggtcagaaaccctgccctggcaggacaa

SEQ ID NO: 32208 - DNA, 120 bp, synthetic construct
  source 1..120: mol_type = other DNA
ttatttattatgttcaatacatttcaacaggctctctcccaagccccttcttctaggacacggaggcccctttccattctaccccacagcacatcatgcattaaatgccctataataatg

SEQ ID NO: 32209 - DNA, 120 bp, synthetic construct
  source 1..120: mol_type = other DNA
tgtgaatccaattaacttcaaatttagctcataatgaacttatctcattttgctaccagctcggttctcatcgtgtggcagtaattaaccactgggggttgtcactcccagacacatgac

SEQ ID NO: 32210 - DNA, 120 bp, synthetic construct
  source 1..120: mol_type = other DNA
gaaaggcaaccacagcctcaacttttacaggattattttctacctaaagaggcatgtgcataaatggcaggatgcccagcacacctcattttactgtgtttcactttattgtacttcaca

SEQ ID NO: 32211 - DNA, 120 bp, synthetic construct
  source 1..120: mol_type = other DNA
ccttccctattggatcctcacaaaaaccctaagatgtcaagtctgttattgcttcctcccattttacagatgaggaaactgaggcagggggttaaataacttgcctagtcacaagatcta

SEQ ID NO: 32212 - DNA, 120 bp, synthetic construct
  source 1..120: mol_type = other DNA
actgtgcaacagaaaactagaacttattcctcctatccatctgttcttttatacctattgactaacctctctccatccagtctttggccagtctctggtaaccactattctaccctgtac

SEQ ID NO: 32213 - DNA, 120 bp, synthetic construct
  source 1..120: mol_type = other DNA
tctggctggcaaactgaaggagctaaattaaaattggtaatgacagcagtggctcagcctcatatatggtttttaaatgcactgtgtattttgaagagacttattctccagctcgcctgg

SEQ ID NO: 32214 - DNA, 120 bp, synthetic construct
  source 1..120: mol_type = other DNA
gttaagacatcaaatgcattttctcctttaccttacttcacgtttgtttgcatggagaagttaagaccatcccatctctgtattataccgcaatgcttctctatagcacacaacttggct

SEQ ID NO: 32215 - DNA, 120 bp, synthetic construct
  source 1..120: mol_type = other DNA
catttacagtcaattgattttatacaaggtaacaaaaaaacagaatgggaaaaaatagtcttttcaataaatgatattggaacaactgggtatccatgtgcaaaaaaaattacaaagttg

SEQ ID NO: 32216 - DNA, 120 bp, synthetic construct
  source 1..120: mol_type = other DNA
aaaatgaaaagccatgtcaaattaagggctaagttgttctgaagactgggcaacaagtgctgagatgtaaggtcagtgagagaacagtcagagaaagcttcaagaagaggaaattgcctg

SEQ ID NO: 32217 - DNA, 120 bp, synthetic construct
  source 1..120: mol_type = other DNA
ctaaaacatgtgcatttcaaagaacagtatgatggcctttctgtacaagttaacctagaatccatgaaatgaatacgcacagctgctgtgtccattcacaaaagtgaagaaataagacaa

SEQ ID NO: 32218 - DNA, 120 bp, synthetic construct
  source 1..120: mol_type = other DNA
gaagccaggagtttaagatcagcccagagaccatagtgaaaccctgactctatagaaaatttgccaggcatagtggtctgtgcctatagtcccaggtactcaagaggttgaggcaagagg

SEQ ID NO: 32219 - DNA, 120 bp, synthetic construct
  source 1..120: mol_type = other DNA
ctgtttctgtcaaacatgcaaacttgttagatattccttctggaaaacatcatccctctgcctccttacctggcaaagtttcacttactctgcatgcttaccctaaatcctacccatctt

SEQ ID NO: 32220 - DNA, 120 bp, synthetic construct
  source 1..120: mol_type = other DNA
gagatcatgccactggactccagactggtgatagagcgagactacatccccgaaggaaaaaaaaatttacaaaaagtcccctgcatgcttctgaattttctcccaatttaaaagacacat

SEQ ID NO: 32221 - DNA, 120 bp, synthetic construct
  source 1..120: mol_type = other DNA
ctctgaattaagagagattggcttcaaatgcacttattttccttattattaaatactccatgggatttctcctaatgcaagaggatagatttttatcttaactattagaaagctcagtat

SEQ ID NO: 32222 - DNA, 120 bp, synthetic construct
  source 1..120: mol_type = other DNA
accaagcagtgatgtggttctggggacaccagatttgtttcttaagcctgaggtccagacttctgcatgagtccactaaagtttacatgttgactcaattcaaagaggcaaagaacaaat

SEQ ID NO: 32223 - DNA, 120 bp, synthetic construct
  source 1..120: mol_type = other DNA
ggccacaaacactaataaaattattttccttaaactcttctcattttctatcatatgttatttaaagtgttatccaaaaaaaaaaagagaagaagaagaagcctaacaaacgcgccaaag

SEQ ID NO: 32224 - DNA, 120 bp, synthetic construct
  source 1..120: mol_type = other DNA
ttttattttccttggcttacattttccatatatcaaagtctcttttgaaaattaaactatataatataacctcaattttaaaacatcaatgataagctggatttaatcaactcagaaccc

SEQ ID NO: 32225 - DNA, 120 bp, synthetic construct
  source 1..120: mol_type = other DNA
gcttaacatcactaaccaatttgggttttggttaattggatttagtgagggtctgaaggtacaggtagacatggagaaatgttgaataatatcatttagtgcaaaaactatttggaaaga

SEQ ID NO: 32226 - DNA, 120 bp, synthetic construct
  source 1..120: mol_type = other DNA
ctactgtggaagcctacaggaaaagggatgtgaaatgcttgacgtgatgagggatgcagagtgttcagcacttatttactgagcagctcatcacctgattgtatagtatacaatatatga

SEQ ID NO: 32227 - DNA, 120 bp, synthetic construct
  source 1..120: mol_type = other DNA
ttgctccatattctcaacaacacgtggtactgacaatatttttaatcataaccattttagtgggaagaataactcactgtggttttaatttgcatttccttaatgacaaaacgatattga

SEQ ID NO: 32228 - DNA, 120 bp, synthetic construct
  source 1..120: mol_type = other DNA
tgttctcatagtccaggtttgctgataatatattacttttaacttttctatgtctgaaaaatatctttgtttcatcctttcttgaaagacggttttgctgggtatagaaacctaggagag

SEQ ID NO: 32229 - DNA, 120 bp, synthetic construct
  source 1..120: mol_type = other DNA
ttttaggtcataacctataggcaataaactatgttatcattttgtaaaaaaaataccacaggaagtagtgcttcagtacattttcccgacgatatgattaatccataataaattctgcta

SEQ ID NO: 32230 - DNA, 120 bp, synthetic construct
  source 1..120: mol_type = other DNA
gctgaaaaaagtagtagacagctgagataatggtggggcagaggtggggataggttaatgggtacaaaaaaagtagaaagaatgagtaaaacttactatatgatagcacaatagggtgac

SEQ ID NO: 32231 - DNA, 120 bp, synthetic construct
  source 1..120: mol_type = other DNA
attttacagagataagccttcaatgtcacatgaaccactctatttttaatattagaattctgaagtttttaagcatcagaatcttcagctttctcaaatgaagaatggtaattatatgct

SEQ ID NO: 32232 - DNA, 120 bp, synthetic construct
  source 1..120: mol_type = other DNA
ccataaagttaattccaatcctttgctgtcttagtgtgtatgtaaaccttaatgagacatgttccagttaactgcacatattcaattttgggtaatctatgggaatttggccccatggtc

SEQ ID NO: 32233 - DNA, 120 bp, synthetic construct
  source 1..120: mol_type = other DNA
cccacaattattaacacagatcaaactgcagttttggaagagagcctttggacggggaaactactgaacagtgatgaatggccatacctaattcattgtttggaaattgatgtggaggac

SEQ ID NO: 32234 - DNA, 120 bp, synthetic construct
  source 1..120: mol_type = other DNA
gtgttaggctttttccctacaggtatatgatgattgggttttagataatgctttcagatttaaaagaatagagacatacatgtctctaagaccgcgtacatccttcagttaacaagtggg

SEQ ID NO: 32235 - DNA, 120 bp, synthetic construct
  source 1..120: mol_type = other DNA
acaagcttctgaaggtaatcagaatatgtcacccccaaatatgcctttttgacaaatattttgaagtaaaggcaattaagaagcagccaatggaggaagagctctctagatcctcccctc

SEQ ID NO: 32236 - DNA, 120 bp, synthetic construct
  source 1..120: mol_type = other DNA
aaccaagggctctccctcatccgctggtccagaacgacctacaacagggaaagggagaatgatgtttattagcttgatttaatcacgccacaatttacacatagcaaacttgtcaattaa

SEQ ID NO: 32237 - DNA, 120 bp, synthetic construct
  source 1..120: mol_type = other DNA
atggcgctcacagccaataatccggaggattacagaaaagcgactcttggagatgagggcagagctctggaaatccttcatactatagttgctattttgtatgatgactttcatattatc

SEQ ID NO: 32238 - DNA, 120 bp, synthetic construct
  source 1..120: mol_type = other DNA
agtttagcaagaattactctcccattttgtagttttccactcagacaccccaccccagccactctgctccttggctacgaatccacacttctccttgttgtatttgaagttgagctcagt

SEQ ID NO: 32239 - DNA, 120 bp, synthetic construct
  source 1..120: mol_type = other DNA
tgaatagctctaatcaaaaatgtatggtgacctgtctgcctccctttctgggctttctcaacttcggggtcctgcacccagcccccttccaattctctattctgttccatcaaagcctgc

SEQ ID NO: 32240 - DNA, 120 bp, synthetic construct
  source 1..120: mol_type = other DNA
tggaaaaaaaaacccacaaaatctcctatcttcttgactttttatagggtttttaggtgttttcattctgtaatgttgaaagaggcaatccaccattggctctgagtgtctcctcatgct

SEQ ID NO: 32241 - DNA, 120 bp, synthetic construct
  source 1..120: mol_type = other DNA
atatgatagacaattactgtaactttctaccttgcgtaacagatatttatgaatatgcctccccattcctgttagatactaaagtcaaaaaggatggaaacaacaggcaaagcagggctt

SEQ ID NO: 32242 - DNA, 120 bp, synthetic construct
  source 1..120: mol_type = other DNA
cataatggaaggatctataattggcagaatccatgaaaaagatggaattggttgttttaaacttaaatatgtactcattctgtggagaaaatctgaaacataaaaccaagcattgttgtt

SEQ ID NO: 32243 - DNA, 120 bp, synthetic construct
  source 1..120: mol_type = other DNA
ttggaactcagatctaaattcattatgactttgatatttatgaaatgatgaaactctatgcaatattgtatcaacattcagttcctgtaattataacttctaataaggctcattttaatg

SEQ ID NO: 32244 - DNA, 120 bp, synthetic construct
  source 1..120: mol_type = other DNA
aaaaccaaacccattggagggcatacagttttctctcatcgtttgtagtttgactgctgaaaagacccatgtcattacagtcctatttttctaactcagggttctctttttctttacaca

SEQ ID NO: 32245 - DNA, 120 bp, synthetic construct
  source 1..120: mol_type = other DNA
tgcagaggttcctattcaagagatttcatatcagtggaatcatataacgtgtggtcttttcaatgtggcctctttcacttagcatggtattttcaaggttcatccatcttgtagcatgta

SEQ ID NO: 32246 - DNA, 120 bp, synthetic construct
  source 1..120: mol_type = other DNA
gatttgcaatactttcttccattctgtgggttatcttctcttttgttctcccatgttttaagagttttatagttttagttcttacatcgaggtctatttggtacatttttatgtatgtgt

SEQ ID NO: 32247 - DNA, 120 bp, synthetic construct
  source 1..120: mol_type = other DNA
tattctcttgcaatccatgttatttctgtaaggttggtagtaatatcactctttcatatgtcattctagtaatttgaatcatctcttttattcttggtcagttgtactaaaggtttgcca

SEQ ID NO: 32248 - DNA, 120 bp, synthetic construct
  source 1..120: mol_type = other DNA
atagtccctttggctctctagggttactctttgcatggtacatgttttcccttcttttattttcaactaaattacccctttcaatctaaattgtatgtccttagacagcatatagttaag

SEQ ID NO: 32249 - DNA, 120 bp, synthetic construct
  source 1..120: mol_type = other DNA
taactctaaatcaatttctacagtggctgtggcatttactttcccaccagtaacaaaagagagttccaatttctctaggttcttgccaaaacttgttattttctgtttttatttatttat

SEQ ID NO: 32250 - DNA, 120 bp, synthetic construct
  source 1..120: mol_type = other DNA
ttattctttttgatgatattgcaaatggaattgtttccttaatctcactttcagatttttcattgctagtgtagagaaatacaaccaaatttttggtgttaattttgtatcctgcaactt

SEQ ID NO: 32251 - DNA, 120 bp, synthetic construct
  source 1..120: mol_type = other DNA
ctcccatctgtctcctctgtgctgtttttttgtaatatatttctataggcccaacaatgaaaatatatacattatatatttgtatattctctattatagttttatacattgctttttaaa

SEQ ID NO: 32252 - DNA, 120 bp, synthetic construct
  source 1..120: mol_type = other DNA
gtgttttcaaccattatttttcaaatatttttttctgatcctttctctctctcctggtattttcaattacgtatatattggtgtgcttagttatgtctgatatttctctgatgatctatt

SEQ ID NO: 32253 - DNA, 120 bp, synthetic construct
  source 1..120: mol_type = other DNA
ggtcttggcttaaatgcctcaaactctcactattattactgattaataaatgtttcttcatttgatgtatttccttaggacatcttctaaagactttcaatagttgttttttaaaataat

SEQ ID NO: 32254 - DNA, 120 bp, synthetic construct
  source 1..120: mol_type = other DNA
agagacacttaaaaacacaactacattttagctctgatgattcaatattgtaagaggtttcataaaagtattataaatatattaaataagtcagtacagagtacttaatactaaaatcag

SEQ ID NO: 32255 - DNA, 120 bp, synthetic construct
  source 1..120: mol_type = other DNA
aaatattattttccccttctagttagtatgcttgttttataagaaaagacatttctataaaggccttttgaatcacttcaagtcattgtcacaagggacaatgggtaagacgattgctca

SEQ ID NO: 32256 - DNA, 120 bp, synthetic construct
  source 1..120: mol_type = other DNA
tctggcaaatagtcctaaaacatttccttaacttcaggtaagaaagaatttcactttagttccttcacaaagaacaaaatacataatataaaccacatcaaacactattctactttgttt

SEQ ID NO: 32257 - DNA, 120 bp, synthetic construct
  source 1..120: mol_type = other DNA
acctggaagttgtatctacccttccctgtaaattaggttggatgataatttgtgatttagtccagttttaattagattgcatccttattcactttaaaacacttaagaaatgaacaagtg

SEQ ID NO: 32258 - DNA, 120 bp, synthetic construct
  source 1..120: mol_type = other DNA
acaaacaaacaaaaaaagaaatgtcaaataagaagcacacagcaagctcctggaacctaccaggttatcagcaaatagtaccaataagcagtagttgttgttggcaactgttgctctcag

SEQ ID NO: 32259 - DNA, 120 bp, synthetic construct
  source 1..120: mol_type = other DNA
aaattaagctttgggtacataaaaaacaatatgtctggtcaaatatttttggaattcagtaaacaatgtgatgagtttggtttaaagctctggctctgctgttctgtactctagggaagg

SEQ ID NO: 32260 - DNA, 120 bp, synthetic construct
  source 1..120: mol_type = other DNA
ggaaaggaaaagagaaaggaagaggaatctacaagttttacagaagagaatattttatttttctttctttcttcattaatcaatttatttatttattttagagatgaggtctcactttgt

SEQ ID NO: 32261 - DNA, 120 bp, synthetic construct
  source 1..120: mol_type = other DNA
aaagaactttactgctcacagcacagcatgcagcatgagtgtcagaatatttgcattggttccccctatctccaaatttcacagggcaacacaatccatcagcccaggtggatgctacac

SEQ ID NO: 32262 - DNA, 120 bp, synthetic construct
  source 1..120: mol_type = other DNA
ttctcacagcaactactcaactctgccaccaaagtgtgaaagcagccacagacacaggcatggctgggttgcaataaaaatttatggatatgaaatctgaatttcatacaagttttataa

SEQ ID NO: 32263 - DNA, 120 bp, synthetic construct
  source 1..120: mol_type = other DNA
gatcccctaggggaacctggggtcctggtcttagctatgccactaattttgtctctggccaaaataaaggcatttgtctactctgctgcaaaagtattttattatatatgtgtatgtaac

SEQ ID NO: 32264 - DNA, 120 bp, synthetic construct
  source 1..120: mol_type = other DNA
ttgatggtagacaagctagaaatatgtctcctgctgaatgaggtaggtctaggaaattttttattaatgtggtggtagccattaaaaattaccatttcaacttctgtgatcatcatttta

SEQ ID NO: 32265 - DNA, 120 bp, synthetic construct
  source 1..120: mol_type = other DNA
aataaaaaaaagaaaaccaatatgcatttcaagagtaacctcaaaaagaacttctgaaaaaaaggcattgcaatctacatgagaaaattgtttctgctcaaaggaaagcttacaaaataa

SEQ ID NO: 32266 - DNA, 120 bp, synthetic construct
  source 1..120: mol_type = other DNA
agagacagagagagagaaaatgaaactatacttaaatacttgtattttacctctgaaacgtttatttaagcctaaccaatgtttttcccccaatatttcaatatctaggcttaaatgatt

SEQ ID NO: 32267 - DNA, 120 bp, synthetic construct
  source 1..120: mol_type = other DNA
aaaaaaaaaaaaaaaggcaatctgggaaaatttaaagaggaattagtaccaggaatcttttaaaaatgtgctaaaaccttgtcactacaacgtaaaagatatttttaaaaattaatacac

SEQ ID NO: 32268 - DNA, 120 bp, synthetic construct
  source 1..120: mol_type = other DNA
agacgttggcagaatcaactgaaaaaaaataacacaacgagaaatttataagaaactcacttcaaaataaacataggcaggttaaaagtaaaaggatggaaaaaatacactctgcaaaaa

SEQ ID NO: 32269 - DNA, 120 bp, synthetic construct
  source 1..120: mol_type = other DNA
acccttcttttcttacccaagggaaggggaaggaagctgagaagcactctgaaggtcacagtccaggaagacaggttctctaaaagactgacctaatcctaagagtacaggatgcttctg

SEQ ID NO: 32270 - DNA, 120 bp, synthetic construct
  source 1..120: mol_type = other DNA
agagtgtctttgatggcctcatcaaagtctgggaagactgggaagtgctgaggaaagaatcagtgagtttgaagatacgtcaataaaatttttccattaaacacaaagagaaaaagaatg

SEQ ID NO: 32271 - DNA, 120 bp, synthetic construct
  source 1..120: mol_type = other DNA
gtagaaataaagacttagataaacagaattgaggaaatctttctccagtagacctaccttgcaagccatgttaatagaagttcctcagagaaaagaaaaacaatataggtcaaaaacaca

SEQ ID NO: 32272 - DNA, 120 bp, synthetic construct
  source 1..120: mol_type = other DNA
gagctagagaaagatataccatggtaacactaaccaaaaagaaagccagagtatctaaattaattttagacaaagccaactgcagagcaaggaaaattatcagagatgaaaaagggtatt

SEQ ID NO: 32273 - DNA, 120 bp, synthetic construct
  source 1..120: mol_type = other DNA
ttaactcattccatgggccagcattaccctaatacccaaaccagcaaaaccttacaaaaaagtaaactgcaaacaaatatctctcttgaacatggatgaagcaatccttaaaaaatatta

SEQ ID NO: 32274 - DNA, 120 bp, synthetic construct
  source 1..120: mol_type = other DNA
aaaaacagtaagattgaaaaacttctatcaagactgacagagacaaaaacagatgagacaaactatgaatatgagaaatttaagtggatatcactacagatgctggagacatcaaacaaa

SEQ ID NO: 32275 - DNA, 120 bp, synthetic construct
  source 1..120: mol_type = other DNA
caggaaggatagccttttcaacaaatggttctggagcaactgaacattcatagtcagagagagtgagagagaatcaactctcacatcttatataaaatgtgtcccaaaatagggcatgga

SEQ ID NO: 32276 - DNA, 120 bp, synthetic construct
  source 1..120: mol_type = other DNA
ttcaaactttgaatgcaaccagacctttgctctttctactagaccaaattggctggcaggcatccaggggagagagggatcaccctgggaagggacccagatgccgactgcacaggtcta

SEQ ID NO: 32277 - DNA, 120 bp, synthetic construct
  source 1..120: mol_type = other DNA
taatctaaagggaggaaacaaacgttccaggtagatttagaggaagactttgaccagagtaaggtggttaccggttcccactggtcttcatgaagaattgttagacccagcctgccctac

SEQ ID NO: 32278 - DNA, 120 bp, synthetic construct
  source 1..120: mol_type = other DNA
aaatttacattactgcatgtttgccgcgatttgaggagttggacctgtgtaacaatgtactgagccagaactcagcctctaagagaaagcatattggaagaactgatgaccaaacttttg

SEQ ID NO: 32279 - DNA, 120 bp, synthetic construct
  source 1..120: mol_type = other DNA
aaagaaggacatagaccattgtggtttccttaattgctcataatttatttcaattgattataagcatattggaactggaaaggatcttaaagagcatctaatataacccttatatttttc

SEQ ID NO: 32280 - DNA, 120 bp, synthetic construct
  source 1..120: mol_type = other DNA
ataataataataataataataataataataaaaataatagttgtatgggtacttgaaatagggatgcatatggtttcacatagtgaagtcgcaatattgtaagtagaaccattgtaaacg

SEQ ID NO: 32281 - DNA, 120 bp, synthetic construct
  source 1..120: mol_type = other DNA
caagtttctattgaggtatctctaagcttagggattctttccaaagctgtgcctggtctactaataagcccatcaaaggcattcttcatttctgttatgctgtttttgatctctagcact

SEQ ID NO: 32282 - DNA, 120 bp, synthetic construct
  source 1..120: mol_type = other DNA
ggattataggtccagctgaaattttttcttgataaccagatgtgatgtaccaggtaaaagtaactgtaactgctgtaaagaggcctgcagtactataagtaacatgtgtgggaaggggaa

SEQ ID NO: 32283 - DNA, 120 bp, synthetic construct
  source 1..120: mol_type = other DNA
gcacatagaacattaacatatctatgttatttcttagcacttttaaagacctctgttttttctaaatacagaaagcatgtaaattaccgaatcagaggtttgtatttttcatgatgcaca

SEQ ID NO: 32284 - DNA, 120 bp, synthetic construct
  source 1..120: mol_type = other DNA
atttttaatatggcagaggcagttgagaagtgttagaatatgccatcccttagacattgttcttacacttaaatgtctaccagaagcatgaggaaggttggttacaagagactcggggcc

SEQ ID NO: 32285 - DNA, 120 bp, synthetic construct
  source 1..120: mol_type = other DNA
ataatattgggggcctagcatgcctgcctctcaggattgttaggggaacagggagcagggtacactatggaaactgaccagcacctgacacagagtgtcaccaagaggtagtgtgacctt

SEQ ID NO: 32286 - DNA, 120 bp, synthetic construct
  source 1..120: mol_type = other DNA
caagtatacactatttttcttcaactaaacacaacatgaattgtgaaaaatttacacgtagtacaaataatagaggaagtagctagcatgcagaagaccaacagaggggaagatggcaga

SEQ ID NO: 32287 - DNA, 120 bp, synthetic construct
  source 1..120: mol_type = other DNA
gagctgatggttttataaaggggagtttccctgcacaggttctcttgcatgctgccatgtaagacgtgtcttgattctccttcaccttctgctatcattgtgaggcctccccagccatgt

SEQ ID NO: 32288 - DNA, 120 bp, synthetic construct
  source 1..120: mol_type = other DNA
ggtttcttgagatggaaactactccaggtgtagatgctgtgaatcttgttgaaatgacaacagagtatttagaaaattgcataaacttagtggataaagcagtggtagggtttgagagga

SEQ ID NO: 32289 - DNA, 120 bp, synthetic construct
  source 1..120: mol_type = other DNA
ccactgagacaaacataaacagcgagtgaattctgcatttctaactgaggtatccagattccctcattgggactgactaggcagttggtgtgacccatggagagcaaggaaaagcagagt

SEQ ID NO: 32290 - DNA, 120 bp, synthetic construct
  source 1..120: mol_type = other DNA
agtgggagccgaacaatgagaacatatggacactgggagggaaacaacacaccctggcacctgtcgagggagggccggtggtagggagagcatcaggaaaaatagctaatgcatgctggg

SEQ ID NO: 32291 - DNA, 120 bp, synthetic construct
  source 1..120: mol_type = other DNA
accccagggccacaggcagcctggagctgacctgggatggggagaccaggggtacagaggatgggagtaaaaccctggggcgaggggtagcaggagaactgggcaatcagggtgtggggt

SEQ ID NO: 32292 - DNA, 120 bp, synthetic construct
  source 1..120: mol_type = other DNA
agaattatagccagcttttctggggcctcccctctctgcacagcgagtccctggtggctaacgcctgggtaactgacaggtcttatactttacagtctcctcctttcttgttcaatgaaa

SEQ ID NO: 32293 - DNA, 120 bp, synthetic construct
  source 1..120: mol_type = other DNA
aatggccacaaagtcagagacccagcctcaagtttgtgccgctgttgtgctccttccagatgggcaagcatctgttgtgccccacgcttcagagaatttggtttctcaagtgccccaggg

SEQ ID NO: 32294 - DNA, 120 bp, synthetic construct
  source 1..120: mol_type = other DNA
actggccgaagacatccggtgcctctagccaccatcaccactgtccaaggcactgtcttctttgggaaggtatctgatttggtcagtcacaaattcttttttagccttccctggagaaaa

SEQ ID NO: 32295 - DNA, 120 bp, synthetic construct
  source 1..120: mol_type = other DNA
tttcagcacagctttcctcctctctgggccctgtccatatgggaaagcaggaggtctccacaaatcatggacaggaggagccaggtctctagagggagttttctctgccttgtgccacat

SEQ ID NO: 32296 - DNA, 120 bp, synthetic construct
  source 1..120: mol_type = other DNA
aacacgcattctctaagatgggcagtagggatccattttatattcattacagggctaaaaaaggaatgttttgaaatcttacaaaacaaattaatctatgcttgagatatatacatagcc

SEQ ID NO: 32297 - DNA, 120 bp, synthetic construct
  source 1..120: mol_type = other DNA
tcttgactaatccttctccctctacaaacaatattattatttgccaatattcaaaagtctgaataaacgaccttatccctgggaatatcttgccaaaaaactattacctgcagctacaaa

SEQ ID NO: 32298 - DNA, 120 bp, synthetic construct
  source 1..120: mol_type = other DNA
tagtccaccggttcctggacgttctctctactctccagtggccaccacctccactcccactcctatagtcccgaacctgctggcctgagggttcgcagagggccagtcgttgcgacagcc

SEQ ID NO: 32299 - DNA, 120 bp, synthetic construct
  source 1..120: mol_type = other DNA
gcggtgtggagcgaaggcgctcagctcttggcaggttcatggaggagcaggtgcttcagtcgcaggggatgtggcgaccgatcacctagcctggggcgggctgagctggaagcctgggat

SEQ ID NO: 32300 - DNA, 120 bp, synthetic construct
  source 1..120: mol_type = other DNA
ctatgccacggtatatattcataatttaaaacccacctacttgggaaaactttgaggtgccatctaataaaaatgcagcatgaaagaatattatgcccttgatagtcacatagtgtctat

SEQ ID NO: 32301 - DNA, 120 bp, synthetic construct
  source 1..120: mol_type = other DNA
tatttttcactttgtttcaaaactgtgaatcctttgagacttaccaatgaggaccaatcgatttgttctctcagtgtcatccttccagctcactggagtctcctccagatcacagagctc

SEQ ID NO: 32302 - DNA, 120 bp, synthetic construct
  source 1..120: mol_type = other DNA
ggtaacatttcaaagcacacaggtttgttctagctgcaaccctaaagaaagttgtgcaaataaatcaagccttatgcagtgatttccaaagctccttttcagtcatgaaaataataaaga

SEQ ID NO: 32303 - DNA, 120 bp, synthetic construct
  source 1..120: mol_type = other DNA
gagccaggaataaaactcagaaccaaagtaaatttgttctcttaaaaaaaaaatacaaaagaaaggcttggcttatctttaactgaataagcatgtgccaagaggagaagagttcttagt

SEQ ID NO: 32304 - DNA, 120 bp, synthetic construct
  source 1..120: mol_type = other DNA
agtataatatctggccaccagggacaactgaatatatggcattatcatccaaatcactttgccgtcccgatttttctatttctaggtttctctagtcaatctaggcttgtttcccatcac

SEQ ID NO: 32305 - DNA, 120 bp, synthetic construct
  source 1..120: mol_type = other DNA
caccaagagcaataggtacatacaggctcattatactattctactcttatgcacgtttgaaatttcctattaaaatacatttgtttttttaaaatactccaggcaaaagaaatgttggga

SEQ ID NO: 32306 - DNA, 120 bp, synthetic construct
  source 1..120: mol_type = other DNA
atggaatttgaaacgcagggagcacatttggtgtatggttgtagaggacttacactaagggcattcttctgctacctctgccagcagatgagtggctcctgagaatgcataccaaattaa

SEQ ID NO: 32307 - DNA, 120 bp, synthetic construct
  source 1..120: mol_type = other DNA
tttctagtactgttaacaagctggctaatagtcaatattgtcagtgtcagagatttagcttaggtctctataaggatataaaagtcaagtaataattatcattccttttatgccaaaaac

SEQ ID NO: 32308 - DNA, 120 bp, synthetic construct
  source 1..120: mol_type = other DNA
aattcaaaacaaagtccctgaactataacttcatttgaaaagtccatctttgttttcaaaaggaatgggagtctccagaacagtcagcaaaatgactgttagcacatatttcagcatcat

SEQ ID NO: 32309 - DNA, 120 bp, synthetic construct
  source 1..120: mol_type = other DNA
acacgcatgcagattaatacatcaaaagagaaatgttaacaaattaaaaataaataaaaacacctcatgtagatcaatatatcagttaaggattatatagtgctctataggagtgattca

SEQ ID NO: 32310 - DNA, 120 bp, synthetic construct
  source 1..120: mol_type = other DNA
taacttttctagctgaaagcatttttcttccccatttgcaatttttttctacaagtgaacctgtggggttttatagggggaggaagagggcttaggatttcatactcctgaccttttctt

SEQ ID NO: 32311 - DNA, 120 bp, synthetic construct
  source 1..120: mol_type = other DNA
agcctttgtgaaatcttttatgccacataaaatcagcctgtgtacaatgctacacaaatgtcaataaccatatatcagagccaaaccagtttcataattcatggggagatgatcattagg

SEQ ID NO: 32312 - DNA, 120 bp, synthetic construct
  source 1..120: mol_type = other DNA
agtaaagatgaatgaacaaaattgattagtggctctcaaaccagggtgcttttctccccagggaatatttggcaatgtctgaagatgtttttggttctcttaactaggggaatgctactg

SEQ ID NO: 32313 - DNA, 120 bp, synthetic construct
  source 1..120: mol_type = other DNA
gagattacaggcatgagccaccgagcccggccagcaacagatttttaatggagatgaaatggcctccttttggaagatgccatttaggactttcatagctatagagaagtcaatgcctgg

SEQ ID NO: 32314 - DNA, 120 bp, synthetic construct
  source 1..120: mol_type = other DNA
tttattaaaatcagaaatcgaatataactggaatataactggcttcccatcctgttcataaaacctagctcttttactttttacaactgaaaaaaatagtacattttaaaagaaatcgtc

SEQ ID NO: 32315 - DNA, 120 bp, synthetic construct
  source 1..120: mol_type = other DNA
ctattacagtgctgctaaaaacttttacatgtaggctatacatgtcttctgaaataaagttttctagtatataactagatcttcctacaactaggaagattttacggagtattagggtat

SEQ ID NO: 32316 - DNA, 120 bp, synthetic construct
  source 1..120: mol_type = other DNA
tcaggtcttgaatgttttgccagctttgacaatgtaaccatgaaccagctgaggaagaaataaggcaaataccttaggcgtggtggttcagttcactgtattctgccaaaggagagaagc

SEQ ID NO: 32317 - DNA, 120 bp, synthetic construct
  source 1..120: mol_type = other DNA
ttttaaaggttgataaatgccgctgtaattcttttgagtgtttctttcccttgcctcaggtagtttcatgcactttgttacacactgaagggcgaccctctccagatttgcaaagttttc

SEQ ID NO: 32318 - DNA, 120 bp, synthetic construct
  source 1..120: mol_type = other DNA
cctgtcattttgaaggaaacaaacacaactagtttactcttgtatgtgctatggagagtctgcagaataagaatacaattaagatttcaataactcagccgggcatggtggctcatgcct

SEQ ID NO: 32319 - DNA, 120 bp, synthetic construct
  source 1..120: mol_type = other DNA
taaccaagggctctccctcatccactggtccagaacgacctacaacagggaaaggaagaatgatgtttaatagcttgatttaatcacgccacaatttacacatagcaaacttttgtcaat

SEQ ID NO: 32320 - DNA, 120 bp, synthetic construct
  source 1..120: mol_type = other DNA
tctcatttaagattcgattatattccaatcttaaattcaatcttatctgaaagtagtgctgcatttcttaaatttatcagctgttgcctgctagttcttggcatgccccttcattttcaa

SEQ ID NO: 32321 - DNA, 120 bp, synthetic construct
  source 1..120: mol_type = other DNA
aaaccccacaaaatctcctatcttcttgactttttatagggtttttgggtgtttttattctataatgttgaaagaggcaatccaccactggctctgagtgtctcctcatgctttgctggg

SEQ ID NO: 32322 - DNA, 120 bp, synthetic construct
  source 1..120: mol_type = other DNA
tttcacttttcaagaagggttagaaaaataccgtgattcattatgcatgattgccaagtgagaggttaagtgtggaggtatttttccaggaacgcccttgcacatctcacaggcagcact

SEQ ID NO: 32323 - DNA, 120 bp, synthetic construct
  source 1..120: mol_type = other DNA
ttataatcggaataagacaagttcccactgcaatatcaatgaatagattccaccagtagtcactatgataaactagagaacattcccctattgagtaaagtaaaacaaataaagatattt

SEQ ID NO: 32324 - DNA, 120 bp, synthetic construct
  source 1..120: mol_type = other DNA
atgaggacaagaaagggttttgtcaggagacaaggtttccatagtatctacatcttctaatatacatactcctctcctacacagatgtaccctcattatctgtaattctcttttagctta

SEQ ID NO: 32325 - DNA, 120 bp, synthetic construct
  source 1..120: mol_type = other DNA
tctgcagaggttcctattcgagagatttcatatcagtggaatcatataacgtgtggtcttttcaatctggcctctttcacttaacatggtattttcaaggttcatccatcttgtagcgtg

SEQ ID NO: 32326 - DNA, 120 bp, synthetic construct
  source 1..120: mol_type = other DNA
ataatttcttccattctgtgggttatcttctcttttgttctcccatgttttaacagttttatagttttagttcttacattgaggtctatttggtacatttttatgtatgtgtgagataga

SEQ ID NO: 32327 - DNA, 120 bp, synthetic construct
  source 1..120: mol_type = other DNA
ttatttcctttctaatttggatgtttttcttctttttttttttttttcattttcttgcctaatcagtctggcctgaacctctagtacaatgctgaatagaactagtgagagtatacattc

SEQ ID NO: 32328 - DNA, 120 bp, synthetic construct
  source 1..120: mol_type = other DNA
tcataggctgagaaggcacagtcacaggtgacccccctgcgtttctctctgcatctccctccattgcgacacaagtgtccataggtgctgcagtgtcctgcacaccctggctccactcct

SEQ ID NO: 32329 - DNA, 120 bp, synthetic construct
  source 1..120: mol_type = other DNA
tgtagtgacaaacaccattatgaaggcgacaattctcaatgttaggagcatggaaattacctagagtttctggaaaatgcagtttttagcctcctcccagagattccaattcggtgggcc

SEQ ID NO: 32330 - DNA, 120 bp, synthetic construct
  source 1..120: mol_type = other DNA
ggttttgagtggaccctggaggacttctgtcccaattacaagctctctaactccaccgagaagtgaaactgaaggaatggataaaaatgtctaatgatctcactaatagtgttgataaaa

SEQ ID NO: 32331 - DNA, 120 bp, synthetic construct
  source 1..120: mol_type = other DNA
gggagctagaaatattagatatgaatattgctcaagcaaattcacagaaaattgagtcttgtgcagacacaggaaaacatgaaggcacgctcaggatggaaggagataatgacggcgatg

SEQ ID NO: 32332 - DNA, 120 bp, synthetic construct
  source 1..120: mol_type = other DNA
tcaatggtttatactctataacttattttgatgcttaagttgtctcaaatgtggcagctcctttaagctgacacccatgcctttttcagctttttttttcccctttgtcataacaaaatg

SEQ ID NO: 32333 - DNA, 120 bp, synthetic construct
  source 1..120: mol_type = other DNA
ctatgggaataatataaaaaccaattcagtaaaataagagctaaaatatgagataaacagaaaagatgatttttaaggaaaaaaaatcaaagacccaaacaaaatcacagaggtaacaga

SEQ ID NO: 32334 - DNA, 120 bp, synthetic construct
  source 1..120: mol_type = other DNA
tggtattaggggatggagacaccacaccatctggcacactcggcaagaatgtacagagaggctcaggctccttgttgaaccacccctctcagaagtagcccccacacattgaggtagaac

SEQ ID NO: 32335 - DNA, 120 bp, synthetic construct
  source 1..120: mol_type = other DNA
aagctgtgcaggccatgcagcttctcacagcaactacttaactctgccaccaagtgtgaaagcagccacagacacaggcatggctgggttgcaataaaaatttttggatatgaaatctga

SEQ ID NO: 32336 - DNA, 120 bp, synthetic construct
  source 1..120: mol_type = other DNA
atggaggatgcttgtattttaaaagatctatttcacgggagctccaagtttcattccattttcaatactgactgtgcaaaatattgagaatgtgtaaatgaaatccacatttcagtttaa

SEQ ID NO: 32337 - DNA, 120 bp, synthetic construct
  source 1..120: mol_type = other DNA
gttacatgtgtcatcattatattagcaaaacaacttgtggatttttgcagacagctgaattatatgttatatgtatattttagagaatatattggtctatttgaacatagtccactatac

SEQ ID NO: 32338 - DNA, 120 bp, synthetic construct
  source 1..120: mol_type = other DNA
ataaacccaaaaatatcgacaccaagatccatcataattgaactttttggaaacaaaacaaaacaaatcttgaaagcagcctgagagaataacacattacctgcctgtaaaagaacccta

SEQ ID NO: 32339 - DNA, 120 bp, synthetic construct
  source 1..120: mol_type = other DNA
gcctaagcatacttataaaacatataatctctggatgctaagaattacaaaatgctgaggcaagaaatcaaagatccaaataaatggaaagatatctcatgttcatggattggaagactc

SEQ ID NO: 32340 - DNA, 120 bp, synthetic construct
  source 1..120: mol_type = other DNA
gaacaacaacaaaaacattcacagacatctatctcactgaaaacgatatacagatggcaaataagcatataaaacatgctcaatattattagacatcagggagacacaaattaaaaccac

SEQ ID NO: 32341 - DNA, 120 bp, synthetic construct
  source 1..120: mol_type = other DNA
aggtcaatccaggcagaggaaatggtctggcatattccaggggctgattggccagacggactagggaaggcaatgcaggtatgggttagtggatcagcgcaaaccaccttcagatgacag

SEQ ID NO: 32342 - DNA, 120 bp, synthetic construct
  source 1..120: mol_type = other DNA
aacatttgtatggggattttttaagaactacgaaacaaaacaatgtgatacattttaccttgagaaatcaccctcccagcccttcacatctcaggatttttaatggcttggctgctaaat

SEQ ID NO: 32343 - DNA, 120 bp, synthetic construct
  source 1..120: mol_type = other DNA
acattataggatatgcatttgtgtttataaaattccacttgactcacttctccttataatatcagtagtaaaagacccaaagaaggacacagaccattgtggtttccctaattgctcata

SEQ ID NO: 32344 - DNA, 120 bp, synthetic construct
  source 1..120: mol_type = other DNA
ttgaggtatctctaagcttagggattctttccaaagctgtgcctggtctactaataagcccatcaaaggcattcttcatttctgttatgctgtttttgatctctagcactcctttttgct

SEQ ID NO: 32345 - DNA, 120 bp, synthetic construct
  source 1..120: mol_type = other DNA
atcttccctcctcagcttctcaaagtaataggattataggtccagctgaaattttttcttgataaccagatgtgatgtaccaggtaaaagtaactgtaactgctgtaaagaggcctgcag

SEQ ID NO: 32346 - DNA, 120 bp, synthetic construct
  source 1..120: mol_type = other DNA
cttgatttcctcatcttaaaatgatgacaaccaaggtccttcctggttgtgactttggttgagtcttttgatatccaccaagaccatttttatgggatttctcactttgctttcattgtt

SEQ ID NO: 32347 - DNA, 120 bp, synthetic construct
  source 1..120: mol_type = other DNA
atgtaaatcaccgaatcagaggtttgtattttatcatgatgcacatgaacagatgtattatgaggagtgtaggagctagagagatgccttggcagagcattgaatcttgcctataatcca

SEQ ID NO: 32348 - DNA, 120 bp, synthetic construct
  source 1..120: mol_type = other DNA
gctattgaagcatggttcttttcaaactcatggcaaatatacctcagaattaaactctataattaaggaagaaaccctcattctccctgtaataactgaatacctaagcacattaaaagg

SEQ ID NO: 32349 - DNA, 120 bp, synthetic construct
  source 1..120: mol_type = other DNA
tgctgagtgtggtggcagatataaattttccaggtaacacacaagaataggcttctgcttttaggtaagatactatgcctggaggatgaaagatacacagaagtaaaagatgtggtccct

SEQ ID NO: 32350 - DNA, 120 bp, synthetic construct
  source 1..120: mol_type = other DNA
cagagggtgattcttcagtaaagacagatgatttttaatatggcagaggcagttgagaagtgttagaatatgccatcccttagacattgttcttacacttaaatgtctaccagaagcatg

SEQ ID NO: 32351 - DNA, 120 bp, synthetic construct
  source 1..120: mol_type = other DNA
gtgctgaaatatctcttctgatgtgtttgcatgattgcaaatatgcagatacatataaacaactaatcaaaatgaaatgacaaagagatgctgacagaaacgagagggaggtgtgaggct

SEQ ID NO: 32352 - DNA, 120 bp, synthetic construct
  source 1..120: mol_type = other DNA
aactcagagagagatgagctccctggctagttagctgagcaacttgggattatattaagtgagcaaatggccagaaaccttcccaactacccttcccacgactacagagtgtggttctgg

SEQ ID NO: 32353 - DNA, 120 bp, synthetic construct
  source 1..120: mol_type = other DNA
gaaataagcatgcattttagcattatgtagtataagtgaaaaaaattaaagtggaggttaaattaaaataaatgaaatcatagcccaaattttatttaggatatgctgtgaagtgtgaaa

SEQ ID NO: 32354 - DNA, 120 bp, synthetic construct
  source 1..120: mol_type = other DNA
tagatttccattttaataactgaagctttatctctttaactttaatactttctgctttagatccctaaagtaaaagcctccctcatattaaggcttctttttagcttatcgaaactatac

SEQ ID NO: 32355 - DNA, 120 bp, synthetic construct
  source 1..120: mol_type = other DNA
aggatgtgaggactggcgacacaacagtcaattttgtattctcaatatcatggaaggaggcatggcattgaatagcagaaagattccataaaggtaagtttaaaagaatttgaccttcag

SEQ ID NO: 32356 - DNA, 120 bp, synthetic construct
  source 1..120: mol_type = other DNA
caggtgggctgaaggatcctgctcccagtgggtttttgcaggggacgttctgattcccttagctgacgaatatgatcctatgttcccttatgattatgagaaagtagtgaagtgccaaag

SEQ ID NO: 32357 - DNA, 120 bp, synthetic construct
  source 1..120: mol_type = other DNA
gggatccagcatggtgatactgtttcatggtgatacaaccccatgaaacaaaagggatccagcatgatgatccagcatggtgatacataatgatactgtgttatttacctggaatttggt

SEQ ID NO: 32358 - DNA, 120 bp, synthetic construct
  source 1..120: mol_type = other DNA
ctgtgttggctattttgactttctgttgaaactattctctttggtcatatatatatttaaaaaatattttatatatatatatattttttttttcaagtgattatcctgcctcagcctccc

SEQ ID NO: 32359 - DNA, 120 bp, synthetic construct
  source 1..120: mol_type = other DNA
ataatcccaacactttgggagggtgaggtgggaggatagcttgaacctcggagtttgagacaagcctgggcaaataacgagacctcgtctctacaaacaataataataataataataata

SEQ ID NO: 32360 - DNA, 120 bp, synthetic construct
  source 1..120: mol_type = other DNA
accacaaatactgatgaggtaaaatgcaatgtataggactgcatgtatataacaagtcttctattactagatctatatttctgtttacatataatttttattactaagaaaggctgaata

SEQ ID NO: 32361 - DNA, 120 bp, synthetic construct
  source 1..120: mol_type = other DNA
acatgaataaaaatattactctttctgaagaatcactgtaacaaattctggtaatttgcttaaagtaactagaatttaattatcaaatatatacagtagaagcctttacaatgggataaa

SEQ ID NO: 32362 - DNA, 120 bp, synthetic construct
  source 1..120: mol_type = other DNA
atcttgtcaaataatttggtaacataatgaattgtctttgatggtaaatttaaatgttaaggtatttaaaatcactagaggtattccgtgctttcttttacctgataatatgtcaaagat

SEQ ID NO: 32363 - DNA, 120 bp, synthetic construct
  source 1..120: mol_type = other DNA
gagttaaacaaaatctttgacatgttctttttataactgcaaaaagtgccctctttaagaatatcttttgacaaataaaagcagatctttgtataactgttttcatgtctatcatccaca

SEQ ID NO: 32364 - DNA, 120 bp, synthetic construct
  source 1..120: mol_type = other DNA
taacgtaggtgcctggctccaagttgcaactacccacttgtcaaagagacatggagtttagttttcctttgcataaaggagtgtgcctccccaatcaccaggtgaatgtaagatgggctg

SEQ ID NO: 32365 - DNA, 120 bp, synthetic construct
  source 1..120: mol_type = other DNA
agctctgtagttaacaaacttgcccacatctgactgcatgtgagattagttcccatctattgtaactcagtctggcttcatgggatttgagcccctaacctagcatttgcccaacaaaaa

SEQ ID NO: 32366 - DNA, 120 bp, synthetic construct
  source 1..120: mol_type = other DNA
gacagtctgtggctgtggacatgagaaggacacatttccctataaataaaacaaaagagcacattgagcagccttacaggtggtgcttctatctaattaaagccagattttacgaagacg

SEQ ID NO: 32367 - DNA, 120 bp, synthetic construct
  source 1..120: mol_type = other DNA
caacatcttactaggtttttaaatggtttttgtttgtttgtttgttttgctttgtttggctggtgaaaggaataagcaattcttgggcattattcacacataggaatttcagttccagag

SEQ ID NO: 32368 - DNA, 120 bp, synthetic construct
  source 1..120: mol_type = other DNA
aacccagagacaccagcttaactgtggttctccttattggctatactcaataattccatcagcgaacccatcagtaattcagaataacatggaatgtatatgaaaacctgtgtctattgt

SEQ ID NO: 32369 - DNA, 120 bp, synthetic construct
  source 1..120: mol_type = other DNA
taacctaagtgatgtattcattgtgtggtctggtgacacacagtcagagatattttcaggttttggtcctgcaacccatgagccaactcctccagcacataacaggaaagaaaacatgtt

SEQ ID NO: 32370 - DNA, 120 bp, synthetic construct
  source 1..120: mol_type = other DNA
ttgcacttactgtcccagagtaactatcacttgtgtattttttatttcttaaaggtgttctggtttagatgatgaattatatggtcattttatctaactgtgaaaagactgagtaccaac

SEQ ID NO: 32371 - DNA, 120 bp, synthetic construct
  source 1..120: mol_type = other DNA
ctgtaagagaaagaaagaaaactgaagttctctaggaaagaaggaattttgcctccagacaacctctggactccagctgcaatatcacctcttacctaggacttgccagtccttacaatc

SEQ ID NO: 32372 - DNA, 120 bp, synthetic construct
  source 1..120: mol_type = other DNA
aatgtaaatgaagacatctaagattattattccctggccatgaactaagggaaacttgaaaaagattgactacagactttcacatttttagcacttcccttatacttataatcatgtctt

SEQ ID NO: 32373 - DNA, 120 bp, synthetic construct
  source 1..120: mol_type = other DNA
ttacaaccattcatccacacttacacagctccttctctgccagccagcttgttcctgggctgactcacttcaatcactggtaacctaaatcttactcagaagtattaatatatctatctc

SEQ ID NO: 32374 - DNA, 120 bp, synthetic construct
  source 1..120: mol_type = other DNA
aaaagaaaaaaaaaaaaacacgattccacagaaattttcttaaagtgttctatcaatcaccttcactcagattgactaggagtgaccacttggagactttagaacgtgagcctcaaccag

SEQ ID NO: 32375 - DNA, 120 bp, synthetic construct
  source 1..120: mol_type = other DNA
cacacatacatctttatgttgacatatgcattcatttctgctgggtaaatacatgggagtggaattgctgagctatatattaagtgtatatttagcttagaagaatgccaaattgttttc

SEQ ID NO: 32376 - DNA, 120 bp, synthetic construct
  source 1..120: mol_type = other DNA
tagctcactggcatattcaacaacagattggtcacagcagaagatctgattagtagtatagaagataaagcagtacacaatgtctagactgcagcataaatagaaagaaaagatgaaaga

SEQ ID NO: 32377 - DNA, 120 bp, synthetic construct
  source 1..120: mol_type = other DNA
agaagaggagagaaaaaggagtataaaacaagtgaaccaaatataaaacagagagtaacatgtcagctacaatttcacatatgtcagtaattacatttaatataagtggactaaatataa

SEQ ID NO: 32378 - DNA, 120 bp, synthetic construct
  source 1..120: mol_type = other DNA
agaacattttagaattctgttaattatctcggctgtgctccaagtattaaaattttaaaaaggaatccaccactcccagaccccctcccccaccaaattttccgccactaagggaccaaa

SEQ ID NO: 32379 - DNA, 120 bp, synthetic construct
  source 1..120: mol_type = other DNA
tcacttggaacatctgggtgttaataactgcctttctactacataaagatgcatcaaatatcagatggaagaatggaaacataactgtaaaaccttatattcgctatttttactagagtt

SEQ ID NO: 32380 - DNA, 120 bp, synthetic construct
  source 1..120: mol_type = other DNA
aacttggaaggcaatttccataatctgtgggacaccaagtttagattaagtcggtagtagagctaaagagagctgaaatcatgcaaggtgtaatttggagggaagaatacagaatttcgt

SEQ ID NO: 32381 - DNA, 120 bp, synthetic construct
  source 1..120: mol_type = other DNA
tatgatgatcaggtgtctgaacaaattttagcatcaaatggtgatctctccgagcggaggaccatcaggttgcttaaggaagagtgaactagccctgctcccaaatgaagcaggtcaaga

SEQ ID NO: 32382 - DNA, 120 bp, synthetic construct
  source 1..120: mol_type = other DNA
aactgggttgtacaggggttatgtaataaaatggaaataatagtatctgagacattaaatgctgcatgaatgacagacgttgttatcatgctttagaaaattaatattctgcagggctaa

SEQ ID NO: 32383 - DNA, 120 bp, synthetic construct
  source 1..120: mol_type = other DNA
agttcaacatttcatgccgacattggcttttacagtttggctttgacagaatctcatgctgaccttgatttcacacagggaataaaggccacttactatatgcacatccgtacacttcga

SEQ ID NO: 32384 - DNA, 120 bp, synthetic construct
  source 1..120: mol_type = other DNA
tctgaacattgggaaggatcagagtgcaaagcaaacaaaattgttttagatattttttcattgttttcagatttttaagaatatggcatgtgtgagaacaaggaaagggttaatgctctt

SEQ ID NO: 32385 - DNA, 120 bp, synthetic construct
  source 1..120: mol_type = other DNA
attaacatttaagaaactttaaatagacattacctaatagtttgtgaataaggcagatgagaaacatactctttgcaacttcagagatatcaataaaaaatcaaacatttattacatatg

SEQ ID NO: 32386 - DNA, 120 bp, synthetic construct
  source 1..120: mol_type = other DNA
attttcagataaaatgatcagttttcataacatgttccttaggtatacatgaaagtgactgaaatctgtggcttggagtccactcacatgctggaaatatgtttcataaataacttagga

SEQ ID NO: 32387 - DNA, 120 bp, synthetic construct
  source 1..120: mol_type = other DNA
cttcagctcagttttggagtttcctgtaagtgatacatcatatgatgaacacaggctgcgaagctggagagacctgggtctgaggccaagtcccaacatatactggttctgtgactatgg

SEQ ID NO: 32388 - DNA, 120 bp, synthetic construct
  source 1..120: mol_type = other DNA
tatctcaaaaaaaaaaaaaaaaaagtactatggaatctaaagttttctctagcactaaaagagcatggcctgaaatagttagtttatatttgggtcaagaaagaaagaaatgttagaaaa

SEQ ID NO: 32389 - DNA, 120 bp, synthetic construct
  source 1..120: mol_type = other DNA
cagagatgcccactccatcttcatctctggactcaccacaagtaattacttagtacttcccaccaactgcagagcaatttacttaattggaatgttttcacactttttcatccctgataa

SEQ ID NO: 32390 - DNA, 120 bp, synthetic construct
  source 1..120: mol_type = other DNA
gatctagttaacccccttcttgcccttgaccttcaagttgcccttaatcattcctgggcttaggcaagccaaccgtgagagacatctagtttatagtttaaatgataatagcccttcccc

SEQ ID NO: 32391 - DNA, 120 bp, synthetic construct
  source 1..120: mol_type = other DNA
tcaggcagttgttacactgtctctctaaaataattggttgtagccagtgccagggaaaggcagtctcgcaatagatagaaacacctgtaactggtgatcagaagcttcccaatatgatct

SEQ ID NO: 32392 - DNA, 120 bp, synthetic construct
  source 1..120: mol_type = other DNA
gccaggtcagctagcacaagcacaggtaccagaagaatcacaaacatacttatttctataagatcttgtacaaatctataaacaggtccaccttccctgtcatattttccttcctttttc

SEQ ID NO: 32393 - DNA, 120 bp, synthetic construct
  source 1..120: mol_type = other DNA
atctgtgaataattctaactgggcagctaacactgcagtcttaagttcttccccacattttcccaaaatggattgctggcaccaactgtccgcccttgccatcaaactattttttctcct

SEQ ID NO: 32394 - DNA, 120 bp, synthetic construct
  source 1..120: mol_type = other DNA
aggatattctaataaagctaaacaatttgctccttctaaagggaattcatcccaggtttccaattcatccaagagaccattacctccctcctctgagatcccagattgagcaaagaaggg

SEQ ID NO: 32395 - DNA, 120 bp, synthetic construct
  source 1..120: mol_type = other DNA
ttgaaattttccccaggaacccaatcctgctgagccaaagtagataatgggagacttttaagcaaacagtcggggtctcttacctaatccaagaggccacattttatgttaagtgtgttt

SEQ ID NO: 32396 - DNA, 120 bp, synthetic construct
  source 1..120: mol_type = other DNA
aagccatatttaacaaggttaggtaatatgcgagttctacagagcttattttaaatattgttcttatattcagtcatttcacctggcacaaatatgccttctgtactaaaggaagatggt

SEQ ID NO: 32397 - DNA, 120 bp, synthetic construct
  source 1..120: mol_type = other DNA
ggcatttaaatgagtcggcaatattgctaaaccaaaatgacgagagctatgtaattaacaataaattcaagatgaatgcttactatgcatgaaaagttaaatgttgagctggagagaaaa

SEQ ID NO: 32398 - DNA, 120 bp, synthetic construct
  source 1..120: mol_type = other DNA
actctcagaggcattaattctatcttcatttagcccatgtcagtatgagtaaacagtgacgtttacacacgttgcctgctacgcctccattttcccatatgtcttcatgaaaataaaatg

SEQ ID NO: 32399 - DNA, 120 bp, synthetic construct
  source 1..120: mol_type = other DNA
aaaagaatgtggaaaacagtggacttgtctggctaggtgtcaggcaccctgccttagtctgttgaggctgtcataacaaaatactgcagactgggaggtttaaataatagacacttattc

SEQ ID NO: 32400 - DNA, 120 bp, synthetic construct
  source 1..120: mol_type = other DNA
tgctgatcaaagtggtacctacgtattttactggtacgtatgtgtcagaaaaatacatatatgtattacatgtctatcatgactctgtattttcactccaatcatgactttcacaggggc

SEQ ID NO: 32401 - DNA, 120 bp, synthetic construct
  source 1..120: mol_type = other DNA
ttaaaccttttacgatttgacttttttcctcacaattctgatactgatgttgcagtgatcaccaatatcactccaacaagcctgaccccttttcctcagttctcagtctccactgccctt

SEQ ID NO: 32402 - DNA, 120 bp, synthetic construct
  source 1..120: mol_type = other DNA
agcagcctgtcaatgacagagctggattctcacccagatctgcctaacctcaggttcctaactattttaagataaaatcactcagaagatcttgggggttaataataaagactctggaac

SEQ ID NO: 32403 - DNA, 120 bp, synthetic construct
  source 1..120: mol_type = other DNA
gtgtccttgtaaaaattcaaatatctaaatatatggaataaaatgagtaagtcatcttttgccaatctgttctcctccctagaataaccagatcagtgaatgcactttgagttctttaac

SEQ ID NO: 32404 - DNA, 120 bp, synthetic construct
  source 1..120: mol_type = other DNA
ctgggttatcaggtgggttgtcatggtatcacagtgcttgtgttcaaatcactcttatttcaatcaacaacggctccaaagtgcacaagtagtgatgctggcatattgctacaattttct

SEQ ID NO: 32405 - DNA, 120 bp, synthetic construct
  source 1..120: mol_type = other DNA
ctttcctctctatacttctgcataagcctatttttcttcaaaattttatagctgtttgtgtagtgactccaaataaaaacagtgaaaatacactgattatttttcaactctaaataccca

SEQ ID NO: 32406 - DNA, 120 bp, synthetic construct
  source 1..120: mol_type = other DNA
ggattccgtcttccaagttggagcaactgggagaacaacaggggccactggaactgtccaacagagtcctgcagctgcaggacagccatggggtagatggaggacagtcagaattctctg

SEQ ID NO: 32407 - DNA, 120 bp, synthetic construct
  source 1..120: mol_type = other DNA
atgcattgggtggggggctctaactacgtacactttgaaaaaggaagatgttttcctactctgtctttctagaagagttgtgtctggtcctactcaagtctgcagagggtcagtttcctg

SEQ ID NO: 32408 - DNA, 120 bp, synthetic construct
  source 1..120: mol_type = other DNA
ggctctgcttgtgtgacatgagctcattactgagcctctctaaagttgtatttcttcatcccaagttaatgatgaaaaagtaaataatagaatgcagctaaaattctaaaaatctcacct

SEQ ID NO: 32409 - DNA, 120 bp, synthetic construct
  source 1..120: mol_type = other DNA
tccctattcatggtctccatcctggggtctgtatgctacgaggacaatggtccttagccttgaatgaatatgggaatcatcaggtggattctttaacatactgcttagttcctactctct

SEQ ID NO: 32410 - DNA, 120 bp, synthetic construct
  source 1..120: mol_type = other DNA
aagaaacaaggtacaaagtggttaatcagctagtccaagttcatacagctagcaaatgaagccagtatttgaacccaactgatttgactcagaatctgcattcttacctacgtcctgctt

SEQ ID NO: 32411 - DNA, 120 bp, synthetic construct
  source 1..120: mol_type = other DNA
gcaaaaaggaagccatcctagaagaaagccggattaaagtcgcagacagagcaggctgctccaacagcaaagccatatattttgagacagcgatgcgctgcctttcttcacaaggtttac

SEQ ID NO: 32412 - DNA, 120 bp, synthetic construct
  source 1..120: mol_type = other DNA
ttctgtcgggttacatccactaataaatgttacaaagttaggatgacatttaacttgagatacagttttgtagccgctgttgttgttttttaatctaataagctccttctgtgctatacc

SEQ ID NO: 32413 - DNA, 120 bp, synthetic construct
  source 1..120: mol_type = other DNA
tcccagatgtggtgaggggttgtgagtaaagattctgcagccaggccacttgggttcaaattattgtgctaccactaactagctctataattggggcaaataaataaagcctgtcttttt

SEQ ID NO: 32414 - DNA, 120 bp, synthetic construct
  source 1..120: mol_type = other DNA
tgtttctgtggctactttaaaatctttaattcatctacaatctactttgacgcaaggaatagggtaatggtccagttttattaattttttcctgagggatacctagcttccccagtacca

SEQ ID NO: 32415 - DNA, 120 bp, synthetic construct
  source 1..120: mol_type = other DNA
caccttctgcttctatgggctcaacatttttagactccacatataagctggatcctgtagtattggtctttctgtgcctgacttattacaccgaacataatgtcctccaggttcatctat

SEQ ID NO: 32416 - DNA, 120 bp, synthetic construct
  source 1..120: mol_type = other DNA
ttgtgttccattggtctatgtatgtgtctgttttttatgtcagtaccatgctattttgattgctacagctttgtagtacattttgatgtcagatagtgtgatacctccagctttgttctt

SEQ ID NO: 32417 - DNA, 120 bp, synthetic construct
  source 1..120: mol_type = other DNA
gttctggatagaactttcagtactgtgttgaaagaagtggtgatagtgggcatccttgtcttgtttggatctcagaggaagagttttcaacttttcaccactgaataggatgttagctga

SEQ ID NO: 32418 - DNA, 120 bp, synthetic construct
  source 1..120: mol_type = other DNA
atatcttatagttgcagcaagttttttttaacttgaatacaacttaaccgtgatcacacacaaaaattcaacatttttacccacccacactttatgtttttgatgctttttatattgtgt

SEQ ID NO: 32419 - DNA, 120 bp, synthetic construct
  source 1..120: mol_type = other DNA
cttcattcttctgcatatggctcaccagtgatcttaacactatttattgaatagatagtcctttccccattgcttatgtttgttgactttgtcaaagattagatggctgtaggtatgcag

SEQ ID NO: 32420 - DNA, 120 bp, synthetic construct
  source 1..120: mol_type = other DNA
ttagggcacaaagtggggaagagagctggaagggcttctccttaaagagtatggttattgtacttcacttccatgcttaatcatttgataacactcacccacagttgctattttggatac

SEQ ID NO: 32421 - DNA, 120 bp, synthetic construct
  source 1..120: mol_type = other DNA
ccagcccctgaactcatttcatcctacagctgaaactcaaatcttctgaataatttgtgaagttggcaacacaccatgctgacccttaatttgtgaagaaggcccacaagtattagaaag

SEQ ID NO: 32422 - DNA, 120 bp, synthetic construct
  source 1..120: mol_type = other DNA
ttgcctctgctaatgtttagtttgccttacaaggacaatctgcctgacttcgtgttggataaagggaagctgtacacgaagatggagagatacagaaggaaacaagccatgatttcagta

SEQ ID NO: 32423 - DNA, 120 bp, synthetic construct
  source 1..120: mol_type = other DNA
aaaaacaaaattccatacatgggaacaagaaataatgacttccataaggaaacacaaaaccagggaagacacaggctggaggcgggtggggtggggagggcagtgggagctgtgtacgtg

SEQ ID NO: 32424 - DNA, 120 bp, synthetic construct
  source 1..120: mol_type = other DNA
tgagggaaaatggcttgtcagtgattgctaatctgggactatggttaatagaatgttatggtataatctctcagcatgattccaggacatggttaggtggatttctaaatatcttttctc

SEQ ID NO: 32425 - DNA, 120 bp, synthetic construct
  source 1..120: mol_type = other DNA
taggagagagctggaaatgcattctgttctcctggtacaggaaggttaatacgatgaccctgagggcaggggatgtagctgtggtcaggaaaagataataataataaagataataatgtg

SEQ ID NO: 32426 - DNA, 120 bp, synthetic construct
  source 1..120: mol_type = other DNA
tacataggtattttataatccaaacttgacagcctctctctttgcaattttacaactttcagcaaattccccatattctctccatctcagtctgaacagccatttcacatcttacagctc

SEQ ID NO: 32427 - DNA, 120 bp, synthetic construct
  source 1..120: mol_type = other DNA
aggcacctatttgaattgatgaccacacttaactactgtttccttatgattcccaagtttacagattcttagaagtcagattctaagatatttttgtagtgaatctttgttcaaaaatat

SEQ ID NO: 32428 - DNA, 120 bp, synthetic construct
  source 1..120: mol_type = other DNA
taacagaggaatttttttagaggcaagcacacaacagggacaatgtggggcatcagaattctgctaacgtttgtcccactgaattctttggaaaaaatatgacaacctaaaaaaatccag

SEQ ID NO: 32429 - DNA, 120 bp, synthetic construct
  source 1..120: mol_type = other DNA
ccagtttcttccaatctataaacatagtgtgtctctcaatttatttgagtcttctttattttctaatagctatgttttatagtgttccatgaacaggtcctgcacacctttcgtaagatc

SEQ ID NO: 32430 - DNA, 120 bp, synthetic construct
  source 1..120: mol_type = other DNA
taatagatccatactggaaacaagccacaagtgtccattttaaaaagaatggataaacaaacagcacaattgaaatctactcagcaatagaaggaaatgtgccacaaatccacgcaacaa

SEQ ID NO: 32431 - DNA, 120 bp, synthetic construct
  source 1..120: mol_type = other DNA
caagcactttctaaaaacagaaaaagagggcaaaatacatatacgcttttgcctagccagtttcaatttgcttctagcaaaattatccatttcatccctactcctgcacttctatttcat

SEQ ID NO: 32432 - DNA, 120 bp, synthetic construct
  source 1..120: mol_type = other DNA
ttccaagcttatccctaatcactaaggataagatagcacccttccttcaaggaagttagaattgcacaaagcgtaagaaaagcatacaaacacctagtaagcacactggcatatgataaa

SEQ ID NO: 32433 - DNA, 120 bp, synthetic construct
  source 1..120: mol_type = other DNA
cccttccctatccaccttctcctctagcgtctggtaaccaccattctactctctacttctgtgagcactgtctttaaattccacatgtaagtgagactatatggtatttgtctctctgtg

SEQ ID NO: 32434 - DNA, 120 bp, synthetic construct
  source 1..120: mol_type = other DNA
tgcttataaaagtgcattaacttgtttggcccatgggttcatcatttagtggcatggaagaactagtttacttgtggtatccaagaggcatgaagaaagacacctccaaaaagtccattt

SEQ ID NO: 32435 - DNA, 120 bp, synthetic construct
  source 1..120: mol_type = other DNA
gctctgcagcaatagaatctaaagtaacgaaacagagcccatatctctgcaacaaatgaaatcacagacttaagaaaaataaacagaaaaatgaaaagttaaattgttcatgtttcatag

SEQ ID NO: 32436 - DNA, 120 bp, synthetic construct
  source 1..120: mol_type = other DNA
catggttatttctctacagtggatgctaaagagagaatcaagtccaccataataagaaataaactaagagttgtagttaaaacataataaaaatcttcttaaacgtttctttactttgcc

SEQ ID NO: 32437 - DNA, 120 bp, synthetic construct
  source 1..120: mol_type = other DNA
ctccaccataatgaagacataaaacaggtccattagccctcaaagttccctaatgtcccacattttctcaattctgcaagatgtctgggtacatcacccatccaacactactttaaactc

SEQ ID NO: 32438 - DNA, 120 bp, synthetic construct
  source 1..120: mol_type = other DNA
ctacgacttagcaaaatgtcaactatgttcagtgagatagataagaggtaattcagggtctctcctgatttgtttggttgagtacatgatactgcaacaacagaaagaaaattcagtgca

SEQ ID NO: 32439 - DNA, 120 bp, synthetic construct
  source 1..120: mol_type = other DNA
agcaggatccaagaaggaaggacatcatccagggaatagtgcctcctaagcctgtctgcctgatgttattttctctctattttctgggaaagaataaaacaaatccaagaacatctaaag

SEQ ID NO: 32440 - DNA, 120 bp, synthetic construct
  source 1..120: mol_type = other DNA
gaaggctcaacaacggttgagagagaagtagagataaacccatagaggatcccacctgccaccttccatgcagccacctcaagtgacaactttgaagatgcacgctagaccagagggttt

SEQ ID NO: 32441 - DNA, 120 bp, synthetic construct
  source 1..120: mol_type = other DNA
gcaccttaaccagcttcgaattatcagaaaaacacaaagcctattattaaagagttcaacagatggttactgtgttatcacagatgtacagaaaacctctttgttctaaaaaaaaaaaaa

SEQ ID NO: 32442 - DNA, 120 bp, synthetic construct
  source 1..120: mol_type = other DNA
gaacagaaataaaggaaaatagtcacgctcctaagctggtaaacggtatgcctgaagctaaggcatagacagagctgcccaagaatgaggccagttgtagatgaaaataaaactgcaaga

SEQ ID NO: 32443 - DNA, 120 bp, synthetic construct
  source 1..120: mol_type = other DNA
ctaataattgttattacaaatgtatccacagctgtgggaatataagtgataaagatgaactgttaataaagggcaataaatgatctttccacgggtacaaaaaaatagaaaaaatgaata

SEQ ID NO: 32444 - DNA, 120 bp, synthetic construct
  source 1..120: mol_type = other DNA
gaacacaatgggaaatgttacataatactaccttgtagacctccgagcaaccactatacaaagagacactgttgttatgattgaggacaacatcgttcatcaaatgtgaaaagctaccca

SEQ ID NO: 32445 - DNA, 120 bp, synthetic construct
  source 1..120: mol_type = other DNA
gaattcaaagttttctatgggcagcaggctttgcttgccctttggcaacactgctgaaataaatctcttatagttcaagatgtattgataagcgtgttaagcttatttttatatatgaag

SEQ ID NO: 32446 - DNA, 120 bp, synthetic construct
  source 1..120: mol_type = other DNA
acagcccaggcaatacatactagaccacgtcttcttggtaatttaattcttagcaataattttaattgctgcctaattaagtaggcatgctacttaaatcacaatcctgtagttataagg

SEQ ID NO: 32447 - DNA, 120 bp, synthetic construct
  source 1..120: mol_type = other DNA
ctttctataagtaactcatttatgtgtttatttaagccaaacggcagtttccattacaagacccaaggattttaatttaagtaacaacgttttattcacaaagccctctcacaaaagcag

SEQ ID NO: 32448 - DNA, 120 bp, synthetic construct
  source 1..120: mol_type = other DNA
gctgacagcagggagatgccactgaaagaaaaataaaagtgatttgagaaggaggaggaagacattttaaaaattctaatctcatggtttcattaatcaagaaagaaagacgactctctg

SEQ ID NO: 32449 - DNA, 120 bp, synthetic construct
  source 1..120: mol_type = other DNA
acttacgtggatttcctgctcctacggggctccaagtctgagtggggagaagcagcagcaccttgaggacggcccaggccactgaagccatgctcacttcagccaggcgccctgagaccc

SEQ ID NO: 32450 - DNA, 120 bp, synthetic construct
  source 1..120: mol_type = other DNA
aggcgggaggtgggaggcagggggcgggggggtctttctctttttctcttcctctgcttctcaaattcacagtaggggcaaagattgacaaactcactcacattaccaccaccgcgagtt

SEQ ID NO: 32451 - DNA, 120 bp, synthetic construct
  source 1..120: mol_type = other DNA
gattttttaaatgcactactgcattagtcaaggcccagaaagaaagcatgatttgttcagatagtttaaaggaacaggctgtaaagaaaagtgaagggacccaccaggtgaccttgtggc

SEQ ID NO: 32452 - DNA, 120 bp, synthetic construct
  source 1..120: mol_type = other DNA
ttaaagaagaattagtaccatttctttacaaactcttccaaaagttgaagaggagggaacacaaacattttttatgagaccagcattaccctgataacaaagacagaaaaggatactaca

SEQ ID NO: 32453 - DNA, 120 bp, synthetic construct
  source 1..120: mol_type = other DNA
cgagagcaaggacctaattcttcttaattctctgaaggctgagagaggttgggaagccacagaaaaaagtttgaagctagcagagattggttcatgaggtttaatgaaagaagtcttctc

SEQ ID NO: 32454 - DNA, 120 bp, synthetic construct
  source 1..120: mol_type = other DNA
gggctggagcagagagggagagccagtcctagcttctcgccctttcttgtctcccattgtcatcttgtctctccgcgtcatcttgtctccgtacgtcatcatgtctcccagtgtccagta

SEQ ID NO: 32455 - DNA, 120 bp, synthetic construct
  source 1..120: mol_type = other DNA
gtccagaccccccaggtgaggtgggcgaaagagcacctgatggagcctcccagtcctctcatgagcctatggaagatgctgctcccattctctccccgttagcttccccggatcctcaag

SEQ ID NO: 32456 - DNA, 120 bp, synthetic construct
  source 1..120: mol_type = other DNA
ctggtggctaacgcctgggtaactgacaggtcttatactttacagtctcctcctttcttgttcaatgaaatgtccaatgtctgcccaattcaaagggagactacaatgtccccactgctt

SEQ ID NO: 32457 - DNA, 120 bp, synthetic construct
  source 1..120: mol_type = other DNA
aacacccatgtgaaaaccagcaatctagcagccccgaaaagtgggaaagcctgtgtgaacacagcccaggtgctttccttcctcgagccgtgtactcagcaggggttgggagcccatatt

SEQ ID NO: 32458 - DNA, 120 bp, synthetic construct
  source 1..120: mol_type = other DNA
catttaatattccacaatatatatggttttttatttataagagggtgatggcttctatttgtgccatgcttggtgtgggcttggtttccagatgcgacaggacatggagggatgttgaca

SEQ ID NO: 32459 - DNA, 120 bp, synthetic construct
  source 1..120: mol_type = other DNA
gacctcagagacttcacacagagtcataaaacagggacctcatgcagagactcatgcagttcactgcaacctctggcctccagccccagaaatggcacatggcaccccccactgcctcac

SEQ ID NO: 32460 - DNA, 120 bp, synthetic construct
  source 1..120: mol_type = other DNA
gggacacccagatactgtcagcattgcagtgaaggcggttttctgcttggggacatcctcacacttttttttttttttttgtaatatcgctgcctctgaaaagaattatggattccacag

SEQ ID NO: 32461 - DNA, 120 bp, synthetic construct
  source 1..120: mol_type = other DNA
ccttgaggagtgactcgggaagtgatttattaagatgcacagagaggactcatatagaaaacatcctgaaagcccacatgggcaggaacttgggccagaccaacgagggcttgatccccg

SEQ ID NO: 32462 - DNA, 120 bp, synthetic construct
  source 1..120: mol_type = other DNA
acagagaccttgtatagattcctcacacaggcctcaggttgctccacactcattgcccagaaacctctcacatagaattccctcaaacattccacacagagattctgtagggctttcaca

SEQ ID NO: 32463 - DNA, 120 bp, synthetic construct
  source 1..120: mol_type = other DNA
gcagcgccgacgaggccgacaggtgcccgcccagcaccgcgcccttggtgggagcgcagccgttggcgcagtcctcctgatgctgctgctattgctgcaaaattgtccgagcagcagcgg

SEQ ID NO: 32464 - DNA, 120 bp, synthetic construct
  source 1..120: mol_type = other DNA
aaactctgaggggtcactcgggccgccgccgccctcgatgtgctctcggggaagcgcaaccccgccccaccgggccacctgcagccccggctggagtgactgctctaggaactgctgtct

SEQ ID NO: 32465 - DNA, 120 bp, synthetic construct
  source 1..120: mol_type = other DNA
gagtctgtccttacccagaatggtgagctgaattatatttaaggttctgacaatattcccaggcttcaggggggtgttgctttgctccttctaccttccttcccacctccccaagatgct

SEQ ID NO: 32466 - DNA, 120 bp, synthetic construct
  source 1..120: mol_type = other DNA
agataactgaaagagttcccaatggtcaaagctgggaaaatttgagcaacaaaataaagtagtattaaattgtaacccaaagtataaaatattcgtgtccacactgataaacataaatga

SEQ ID NO: 32467 - DNA, 120 bp, synthetic construct
  source 1..120: mol_type = other DNA
gtagctataaacagctgtttaaggatatccttatctaaatttctgcctgcaaacaaaacaaaatatgacgtgattacattatgcttattaaaatgacacagttcacctatcaattccagt

SEQ ID NO: 32468 - DNA, 120 bp, synthetic construct
  source 1..120: mol_type = other DNA
ttgtgtacacttgtgaacacacaagagtagacactcaactgactggttaagcatacactttagaatcactgcttcctagaagaaatacctttcatgacttaaatacccaaatatcaagta

SEQ ID NO: 32469 - DNA, 120 bp, synthetic construct
  source 1..120: mol_type = other DNA
ttttttggaattagcaactccatttcctacattctgcacaggtaccaatggatttagtatttacacaaactactaccttgtattttaaaaaactcactcaaaaaccctgatgaaagggtc

SEQ ID NO: 32470 - DNA, 120 bp, synthetic construct
  source 1..120: mol_type = other DNA
catgaaattcaaatttcaaacttgtagacatttgctctctctcttattatataagtacctacacaatgtcctcaaatttgctttttgatctgtaaagactaagatatttatcatctagtt

SEQ ID NO: 32471 - DNA, 120 bp, synthetic construct
  source 1..120: mol_type = other DNA
aatatgtaagtgtaaaactactcgattttatgggagctcatttgcttagtggacttttagaacttcaccgtttggtatatttctgtattagaggaaaagtaaaacatttaaagtaattct

SEQ ID NO: 32472 - DNA, 120 bp, synthetic construct
  source 1..120: mol_type = other DNA
ttggtcagataaagtttcctctgcttttaattttaataaagtattattatgtatatgatttctttttacctattatatatatgcatctattgttttctccctggtaaatatgggacagac

SEQ ID NO: 32473 - DNA, 120 bp, synthetic construct
  source 1..120: mol_type = other DNA
tcagggtatgtggtttggtactgaaccaatttctgtcaaaagcaagttttaatttattatttaggaaaaatttttcctaagacccaggttttatacagtcctaaataaatagtgtgagga

SEQ ID NO: 32474 - DNA, 120 bp, synthetic construct
  source 1..120: mol_type = other DNA
tttgattatgtgaaaataaactagaaataacctgtcttatgtacttatcacatttgactatgttatgaaatttgacttatattttggattgtaagctttttcagtgccaaggaaatctta

SEQ ID NO: 32475 - DNA, 120 bp, synthetic construct
  source 1..120: mol_type = other DNA
cacaggttcacttgtagaaaaaaattgcaaatgaggaagaaaaatgctttcagctagaaaagttagttttggatttgtgtattcagtaacagaacatgttgaagtttttattaaatgcaa

SEQ ID NO: 32476 - DNA, 120 bp, synthetic construct
  source 1..120: mol_type = other DNA
gatcacagaccttggaatctgcttgggttctaatccttggtctgtttctcattgtcttcttagggagcttatttacccttttaaagcctcctctgtaaaaggcataatgcctatcataag

SEQ ID NO: 32477 - DNA, 120 bp, synthetic construct
  source 1..120: mol_type = other DNA
ccattgaatgttatcttaatttcagaaaatttctgtgcagggatattttattaagctcatttttttttttttttttttttttttttttgtggtgagaaaggctcagcagctgatagactc

SEQ ID NO: 32478 - DNA, 120 bp, synthetic construct
  source 1..120: mol_type = other DNA
atggttcttgccaatgcatctgagaatctagggactttctgaaatagtacttccttgctatgaggactgaagttggattagaatccgtttcaatgaagatcagatgtcctgagtagaatt

SEQ ID NO: 32479 - DNA, 120 bp, synthetic construct
  source 1..120: mol_type = other DNA
tgtgaagatcagggtcctagagtaacctaatattttgtacattggttatttgactcctcatttttatattaaatgttatatcaagggagggggtataaaagaaatacaaaaattgcagag

SEQ ID NO: 32480 - DNA, 120 bp, synthetic construct
  source 1..120: mol_type = other DNA
accccttgaatcgcagtttcccatttcccagtcttcatagcccctggcatccaccattctacactctttctatggggttgactattttaattacctgacacaagtggaatcatgcattat

SEQ ID NO: 32481 - DNA, 120 bp, synthetic construct
  source 1..120: mol_type = other DNA
ctttattctgtgcatatgtatatatatgaatgtgtgttttttttaagaaattttaaaaaaacttaatctgccagcttttctctattggaatttgcaaacaacttgtaaaattggaattac

SEQ ID NO: 32482 - DNA, 120 bp, synthetic construct
  source 1..120: mol_type = other DNA
aagcccccctactcgtacatcgcgctcatcaccatggccatcctgcaaaacccgcacaagcgcctcacgctcagcggcatctgcgccttcattagtggccgcttcccatactaccgccgc

SEQ ID NO: 32483 - DNA, 120 bp, synthetic construct
  source 1..120: mol_type = other DNA
gcgacccgcagctgctcactccaccttgcgcggcccatactgggcgtgtgcatctgaatcccgctggagagcaaacacgaacttctgttcgttcgctgcaaaatggttagaaagattaca

SEQ ID NO: 32484 - DNA, 120 bp, synthetic construct
  source 1..120: mol_type = other DNA
cgatgaaacaaaaatgaagactgctttcatgtgctcatcagtagatggcatataactgagaaagactctgtgagctcaaagatatgtcaatatatactgccaaacgttaaatgcaaagag

SEQ ID NO: 32485 - DNA, 120 bp, synthetic construct
  source 1..120: mol_type = other DNA
agctccaagccaatatagtttcactggtgaattctgccaaacattaagacagaaattctctacaatcttttcagtaaaatagaggggatgctttctaactaattctataagccagcagtg

SEQ ID NO: 32486 - DNA, 120 bp, synthetic construct
  source 1..120: mol_type = other DNA
aaggaagaaataaaactatctttgtttgcaaatgatatgattgtccctgtaggaaaccccagagttgacagacaaacatctggaactaagtgattattagcaagattgcagcatacaagc

SEQ ID NO: 32487 - DNA, 120 bp, synthetic construct
  source 1..120: mol_type = other DNA
gcctcaggaaactaacaatcatgccagaaagtgaaggggaagcaatcacatctttaccatggcaaagcaaaagagagaacgaagggggaagtgccacacacttttaaaccatcagatctt

SEQ ID NO: 32488 - DNA, 120 bp, synthetic construct
  source 1..120: mol_type = other DNA
tttgtggtcatgctgacaacctccgggaatttgggaaatccctgggctccgaaggtccctcccagccggtcaaagcagcagaaaaaattatagtacttccttcggacgcacgggcttacg

SEQ ID NO: 32489 - DNA, 120 bp, synthetic construct
  source 1..120: mol_type = other DNA
ctcctgaatcctcttgtactgttcccgctgtctcctcaaaggcacagattgatattctggtgctgtgctgtccaatagaaagataaggcaaaacacaaatataaatcagaatttttggcc

SEQ ID NO: 32490 - DNA, 120 bp, synthetic construct
  source 1..120: mol_type = other DNA
gtgttcatcaccacatgtggcatttagagtgatactaatgctgcctctttccgggtagtagaggaagaatttcctatattggaagcccaaaaatattgggcctgaaattccttgcataaa

SEQ ID NO: 32491 - DNA, 120 bp, synthetic construct
  source 1..120: mol_type = other DNA
gtttatgtgtccgtacattaacatggaaaagtagaaatagagatggatcagacacattcctagaagatgtagaaatgcagatgaatagcagagcaaagtggcatgtggatagatgcagat

SEQ ID NO: 32492 - DNA, 120 bp, synthetic construct
  source 1..120: mol_type = other DNA
tttttaaaactgctttttttgagattcaattcatgtatcttaccatgtacccatttaaagtgtagaattcagtgatttttttagtacattctcagataatgtactaatatcactgcagtc

SEQ ID NO: 32493 - DNA, 120 bp, synthetic construct
  source 1..120: mol_type = other DNA
tgataagcttgatgctgtccaactgttcatttcttgttatttttccttctgtttctcactgcataatctcagtgggcatgttgtccagttgcttcattctacccgttcagacctgctgtt

SEQ ID NO: 32494 - DNA, 120 bp, synthetic construct
  source 1..120: mol_type = other DNA
tgcctttgaatgtttttggcaaatgccttcaagaataaggcttttcacactggggaactctgacttaattcaatcagcctttcaagtcagctcttccagggaaccacagattaggtcaga

SEQ ID NO: 32495 - DNA, 120 bp, synthetic construct
  source 1..120: mol_type = other DNA
gaccaatgcttccccattcctcacccctcacccccagcctctggtaaccaccattctactgtctacatctatgagtttgaactttttaggttccacatataagtgactataatttgaaat

SEQ ID NO: 32496 - DNA, 120 bp, synthetic construct
  source 1..120: mol_type = other DNA
aaacaaaagcaacatgtcattactttcccattaaaaatttcaaatgaacaccctcagttaatgctttgctgccatatctttttttccctttggaaatccaaaagcctgtgaatctggtcc

SEQ ID NO: 32497 - DNA, 120 bp, synthetic construct
  source 1..120: mol_type = other DNA
ttccacctacaaataatgctaatataaacatttatttacaggtttctgcatggacaattggttttatttctcttgtgtatattcctaggagtgaaactgctgggtcatatggtatctgtg

SEQ ID NO: 32498 - DNA, 120 bp, synthetic construct
  source 1..120: mol_type = other DNA
tgtaactgcaagttagaaaccatcaggtatagctaaagtagtggacagaaggaagttcgtagtctcattaattaagcaagaacagcatcaaaaatacaatagtgaaaacagaagaattta

SEQ ID NO: 32499 - DNA, 120 bp, synthetic construct
  source 1..120: mol_type = other DNA
tacccaggggaaggatggagtaaatgtattcctttctactctacccactaagtgcagctaaatatctgtatatagaagcatgcctcagagatattgcagtttctgttccagaccactaca

SEQ ID NO: 32500 - DNA, 120 bp, synthetic construct
  source 1..120: mol_type = other DNA
gttttggtgctgtaatattgtttctgtgatttaaaattccaattcatcattgtatgtttgtaggcatagatttgtatattggccttagattctgcccttgctaaaaacacttattagttc

SEQ ID NO: 32501 - DNA, 120 bp, synthetic construct
  source 1..120: mol_type = other DNA
atcattttggtttggcctgagcatgagaaaacatcaaaagtgtttcctgttctgttagaccaccattttctcagacctctggctggaagaagcaggcttttctttgtgctctttttgtct

SEQ ID NO: 32502 - DNA, 120 bp, synthetic construct
  source 1..120: mol_type = other DNA
agaaagaagactgaatacatgaatgtgtgtgagaaactgcagcttgatattaagcatgagaaagctcatgctgaagagaaatcttatgaacatggtgaaaatgctaaagctttcagttat

SEQ ID NO: 32503 - DNA, 120 bp, synthetic construct
  source 1..120: mol_type = other DNA
cagaattcaaacctcagtaaacatctgagaattcacacaaaagagaaaccttgtgataacaatggctgtgggagatcttacaagtcacccctcataggacaccagaaaacagatgcagag

SEQ ID NO: 32504 - DNA, 120 bp, synthetic construct
  source 1..120: mol_type = other DNA
aactttctcccagaaatcatacctcagtggacatgagagaattcacacaggggaaaaaccgtatgaatgtaacgtatgtgggaaaacttttgtctataaggcagccctcatagtgcatca

SEQ ID NO: 32505 - DNA, 120 bp, synthetic construct
  source 1..120: mol_type = other DNA
tatgccgtttattcaggtggggctgaccatgggatgtggtgctaatgataaatattacatttacccttggcccttaaaaaaaaaaaagaaaaaccctcacagtcttcctggttcataaga

SEQ ID NO: 32506 - DNA, 120 bp, synthetic construct
  source 1..120: mol_type = other DNA
aggacatacccatgacatagccttaggaggtcctgagaacatttgcccaaggtggtctggctacagcttgaatttccatgttttatggaggtataagacatgaatcagtacatgtaagac

SEQ ID NO: 32507 - DNA, 120 bp, synthetic construct
  source 1..120: mol_type = other DNA
acttcatgtcaatgatttccacaattgtcataaaatagatgaactccttgaaatacacaaactaccatatctcactcaagaagaaatacataatctgaatagccctacatctgttagaga

SEQ ID NO: 32508 - DNA, 120 bp, synthetic construct
  source 1..120: mol_type = other DNA
caaatttaacagcaaattaataggatcatacaccatgaccaagtgggatttatccctgagttgcagggatggttcaacatatgaaaatcaattaatgggatacagttaatagaataaaag

SEQ ID NO: 32509 - DNA, 120 bp, synthetic construct
  source 1..120: mol_type = other DNA
agcttgggatggaaatcccagtacactatctacccctaccaacccctggctgccctgcctctccctggaaggatgatgttctggtctcttctgagacttcccatcatagaaggctctcca

SEQ ID NO: 32510 - DNA, 120 bp, synthetic construct
  source 1..120: mol_type = other DNA
tctttccttaaacctcatgaaccaatctctgctagcttcaaactttttttctgtggcttcccaacctctctcagccttcagagaattaagaagaattaggtccttgctcttgattagggt

SEQ ID NO: 32511 - DNA, 120 bp, synthetic construct
  source 1..120: mol_type = other DNA
gtggggggggatctcactgtgtttctcaggctggtcccgaacttctggcctcaagcatttctcctgctttgacctcctaaaccgttgggattatggttgtgagccccggcctctgtgtcc

SEQ ID NO: 32512 - DNA, 120 bp, synthetic construct
  source 1..120: mol_type = other DNA
gcattgtaggcagaaacaacagaataaaggtgctaagagggaactccgtggtgtgtctgaagctcaggaaagaggcttgtcgagcagagagagggagagaaggtaggggaggaggccagg

SEQ ID NO: 32513 - DNA, 120 bp, synthetic construct
  source 1..120: mol_type = other DNA
cataagaatggataatactaaaacaactgacagcgtcaagtattggttagaaagtggaactgattctctcattttcattgtagtttaagatggcataaccacttaggaaaatgtctcccc

SEQ ID NO: 32514 - DNA, 120 bp, synthetic construct
  source 1..120: mol_type = other DNA
caaaggacgggaactggccgttcaccccatcccagttccacagagaactcaaccactatggcccctgagcggaccttcaggcctggtgggctgtgctctgtgcccgcaaacctgacgcca

SEQ ID NO: 32515 - DNA, 120 bp, synthetic construct
  source 1..120: mol_type = other DNA
ccagagctgcagccccacctgctggcgcgcgccgccagggagcgtcttccgggagcccggcagcaaccgcggtgcaggcgcgctccgccagggaccgtcttctgggagctcggcagcaac

SEQ ID NO: 32516 - DNA, 120 bp, synthetic construct
  source 1..120: mol_type = other DNA
agccatatgtattcatttgaatcatgagtttcctttggtttcaagttgtttgaaaatcaaagaattaatttgtttaaaaaatgcattattgttatttcagtgctctttccccatagtacc

SEQ ID NO: 32517 - DNA, 120 bp, synthetic construct
  source 1..120: mol_type = other DNA
agtaggactcaagccctagttgaaccgaatccaaagactgagctctttctactcaaataggctgctgttttcattaaggcagtgagcaataagagctagtaagtattgtactttcttcaa

SEQ ID NO: 32518 - DNA, 120 bp, synthetic construct
  source 1..120: mol_type = other DNA
tttttctacacaggcttattctttttttttttttttcttaattagtgtaaaacaacacaggaaataaaatattccccggaaataggctttatcttaaaactcaaacaaaactaaagcaac

SEQ ID NO: 32519 - DNA, 120 bp, synthetic construct
  source 1..120: mol_type = other DNA
aaaaaaccccaaaaaaacaaaaaaccttcaaggttgggatacactcttgattaaaaaccccagaatagataagtgcaatatataaatttctgtatctcaaaaatgtaagaaatctctaga

SEQ ID NO: 32520 - DNA, 120 bp, synthetic construct
  source 1..120: mol_type = other DNA
aatcaaatctggtgtcccctgagtttctatcattgtttggtctgctgtgcagaagttgcccctttatagaaggcaggtattctccagtttgctactgtgcccaccttagtacttccctta

SEQ ID NO: 32521 - DNA, 120 bp, synthetic construct
  source 1..120: mol_type = other DNA
ggaaaataaatgcatttgaagccaatctgtcttaattcaaagctcatttccatggtgacccatttggagcaggagtgcctgacattggcatctgggatcctgacaccattgatagaagtg

SEQ ID NO: 32522 - DNA, 120 bp, synthetic construct
  source 1..120: mol_type = other DNA
gacggtacagtagttctttttttaaaaataaaacctgagtattctagagtggtcactcaagtcagaaatattaataagaagattaacataattattggcatataatgaaaaatatcacca

SEQ ID NO: 32523 - DNA, 120 bp, synthetic construct
  source 1..120: mol_type = other DNA
tggtaaagtgtatcaaactagctttttaaaaaagtctttattaaagttcttgagtggagttatttctttgttgttttaggtcagctctcatgcttgctgtatactatgactcaccaggta

SEQ ID NO: 32524 - DNA, 120 bp, synthetic construct
  source 1..120: mol_type = other DNA
taatgattgacctttgccaccaggatgccttcactgattcagacccctcagttttcatggtgattcatatatagaggtcaaagctacggtgtttattagtttatgtacttgtgctcagtc

SEQ ID NO: 32525 - DNA, 120 bp, synthetic construct
  source 1..120: mol_type = other DNA
atttgttgagtagctccaaggaagcagtgtgagcaaaaccaaaacaggtgacacgcaatattgaaattgtgattatcgctatgaaactattgatgtatggtgatctctgaaatgggaaca

SEQ ID NO: 32526 - DNA, 120 bp, synthetic construct
  source 1..120: mol_type = other DNA
gcttgtaaggtttacaaatttgaagtgtatgggacattaaaattctgatattaggtctgatattgcttgaaagtgttttggaatttaatatgtttggtgaatattttttatttcattata

SEQ ID NO: 32527 - DNA, 120 bp, synthetic construct
  source 1..120: mol_type = other DNA
gcaatccctttctggtaccataagtaaatggcaataagaactgtagaactgaaccagtgtgcacccatacaaataggagattattttttgaagacagctactgagcacaggagacggaaa

SEQ ID NO: 32528 - DNA, 120 bp, synthetic construct
  source 1..120: mol_type = other DNA
ccagccttgcatgcaggcctttctaaggatggcagcctcttgcctgctatatgaaatcttttctgcacaacacttgtaaccccaacttaatttttggtgttgttttaaaatttcatttta

SEQ ID NO: 32529 - DNA, 120 bp, synthetic construct
  source 1..120: mol_type = other DNA
cggttggaaataagaccagacagtgaatgctataggtaagtacataggttcctcactgatcctcttcctttgagggatgaggttgacaacagcctgtattatgatgatgtgactcaccta

SEQ ID NO: 32530 - DNA, 120 bp, synthetic construct
  source 1..120: mol_type = other DNA
cagagaaaaatgtgtcaagtatgtctttctgcacgtatagtggataaggggtactactgtgtactctgttttaatggcgcctcatattttggtccagaaatcatgctctttgacactggt

SEQ ID NO: 32531 - DNA, 120 bp, synthetic construct
  source 1..120: mol_type = other DNA
catttaagtttatcattagaatgtggttagtccaagagtttgtcctaataaatttgacaatttcagtggtaaccagtatcttatttttaccatcaaaggctctagggcagatcttactta

SEQ ID NO: 32532 - DNA, 120 bp, synthetic construct
  source 1..120: mol_type = other DNA
gagattgctgaactacatagatctgtggcccagtacaggtgtctcctcacctctgcctcttttcccgattcactgatgtccttcccatgtccatgtgggctgggtcaggggcatgattgg

SEQ ID NO: 32533 - DNA, 120 bp, synthetic construct
  source 1..120: mol_type = other DNA
actatttgttataaagctcaaggttagttttcattgaatattttatagatttagacaagtggaggcagaaataggtaactaaaatctatttttagaagaggacatattttaattatatca

SEQ ID NO: 32534 - DNA, 120 bp, synthetic construct
  source 1..120: mol_type = other DNA
ggctaggccaaaagggcaattaggggaaaccaatatggaagcacatcagtgtagaacagggcattcaaattgtcatgaatgagttgaggagcttctggaaggtgcacattctgattcagc

SEQ ID NO: 32535 - DNA, 120 bp, synthetic construct
  source 1..120: mol_type = other DNA
cagtgttttcttttttgataaatattttgatatcagaagcttattcgacatggttcattttatgtgatccttgcatgagtggatcaaggagctctaactcaaggccaaatgaggggatag

SEQ ID NO: 32536 - DNA, 120 bp, synthetic construct
  source 1..120: mol_type = other DNA
acccctatagttttaatttctctttccccttatgtctagaattaacattttattttacaaaacatgatgataatcttctagagtagtgatgacaaagtataaatccaaagtttcttacct

SEQ ID NO: 32537 - DNA, 120 bp, synthetic construct
  source 1..120: mol_type = other DNA
agatgttagactttttagcctagttttggatgacagtcatctgcagatatagtttgtgtgagagacatctgaaggtgtcatctcactctgtaaatcatttggagaaacacctgcaatatt

SEQ ID NO: 32538 - DNA, 120 bp, synthetic construct
  source 1..120: mol_type = other DNA
gtaaagcaggataaagtccttcatgaccgttggacttttttattggaattattaaaaatcagatttcagtataaaaaacacaataattgatgaaaaaagatttctgaatgaaaccatgtg

SEQ ID NO: 32539 - DNA, 120 bp, synthetic construct
  source 1..120: mol_type = other DNA
aaaattaaagaagattattatttcgtgatgtgaaaattatacatgttgaaaggaaaactttagagtttaattgagtaaagaatgatctgtgaattaggcagcccccagaaccagagtagg

SEQ ID NO: 32540 - DNA, 120 bp, synthetic construct
  source 1..120: mol_type = other DNA
aggatcagcaatccagaaccaattcatgactgttgttactatcttatggggcaggctgtggattggaagcgggggcggtgcacataggtacgtgtagcttactggtaatgcttttatgtt

SEQ ID NO: 32541 - DNA, 120 bp, synthetic construct
  source 1..120: mol_type = other DNA
aatgggttctttgccacttgtatgccctattcatttcttcattttgtgttctttcttgctttttattccctgtatgtgtgtatttctttttgtcaggctgtaatacatatgcatacaagt

SEQ ID NO: 32542 - DNA, 120 bp, synthetic construct
  source 1..120: mol_type = other DNA
ttcagtgaactaaagttaatttagttttgagaatttagttgtattctttgagataaagcataagaccctgaataattgaggaaaattgaaagaatttccagttttactatcctgttaata

SEQ ID NO: 32543 - DNA, 120 bp, synthetic construct
  source 1..120: mol_type = other DNA
ttaagtgtacaatacagtattgctaactataggcatgagaatgtgcagcagatctctggaacgtttcactctttaaaactgaagctttataccccttgaatagcagcttcccatttccct

SEQ ID NO: 32544 - DNA, 120 bp, synthetic construct
  source 1..120: mol_type = other DNA
cacaatgagctcatattcagataaattgagctcatatccagataaatataatagtttttctttatttcaacattgttcattgattgcaacccatttctaaaacaaattatttaatataac

SEQ ID NO: 32545 - DNA, 120 bp, synthetic construct
  source 1..120: mol_type = other DNA
gccgggtccctgtggttctgggagggaggtcccggatgcctcccagatctcgggcttctgtaaccctgaggctgggttttaaaatcacggctcttccaagttacacgaagagtccatggt

SEQ ID NO: 32546 - DNA, 120 bp, synthetic construct
  source 1..120: mol_type = other DNA
acctgcaaaaaagttacataggtgatcgctaacaatactagaattcgccccatccaaaggaaacattagagtagaaaaagaaaaaggatttgagaatccagtatgaaattcagttaatca

SEQ ID NO: 32547 - DNA, 120 bp, synthetic construct
  source 1..120: mol_type = other DNA
ttgaattagaatgctaataagggttacgtattgtgtttggttgatatgggctattatatctcttttagatttcctcaatcctctttttttgtttcccttgcattttttatgggagaaact

SEQ ID NO: 32548 - DNA, 120 bp, synthetic construct
  source 1..120: mol_type = other DNA
gcctcttcgagggccagcgcaactacctgcccaactttatccagagcgtgctgtcgtccatcgacctgcgcgaccgtcagggctgcaccatggtggtgggcagcgacggcaggtacttta

SEQ ID NO: 32549 - DNA, 120 bp, synthetic construct
  source 1..120: mol_type = other DNA
cctataactagaagcaccttttggcatagacccatatcccagtttcctctttcccaggtccagcagcatctcaaggacatctacaagagggatacctaatttcaggggtctctgaattat

SEQ ID NO: 32550 - DNA, 120 bp, synthetic construct
  source 1..120: mol_type = other DNA
gggtgaagggaatggtggacatgtttcagaatttcaaacagccaactttaaccaatcttttcctcattttgttcaccttcttgggggcttatgctaaagtgaagtgaatagccataaggc

SEQ ID NO: 32551 - DNA, 120 bp, synthetic construct
  source 1..120: mol_type = other DNA
aatttattttgggatttcccatggagtgatggagaataatgagccttgggagagctatggcagctctcatactccttcctgggccaacttttttaggaaatgggagaaatataccctgtt

SEQ ID NO: 32552 - DNA, 120 bp, synthetic construct
  source 1..120: mol_type = other DNA
cctggaaaataccctcactctttgtttatgtatttatttaatgaaattgattgttgaaaaactagtcagttgtcctgcagaatatttccccttctggaattttctggttgctttttatgg

SEQ ID NO: 32553 - DNA, 120 bp, synthetic construct
  source 1..120: mol_type = other DNA
acatttaaaaattcccagaaatattttaattcccctttaaagatataaactatgtcatactataaagcaaaagaaaaaccaatcatgtgaagagtaaatagtatctttaaacgaattgtg

SEQ ID NO: 32554 - DNA, 120 bp, synthetic construct
  source 1..120: mol_type = other DNA
acacatttgggaaatccaaaccagattttttcatgtgataaccacaccctcttttgactttagccttggaggtaatggagtatggcagaaaaaaccctgtatcagcagctggaagactca

SEQ ID NO: 32555 - DNA, 120 bp, synthetic construct
  source 1..120: mol_type = other DNA
gaaagctgtgcttcaatacctagggcttctttcctggaatggatctgagaatctgggattgggtggctaatatctcatctctagaagggagaaagaactgggtggtgatggctttgtatt

SEQ ID NO: 32556 - DNA, 120 bp, synthetic construct
  source 1..120: mol_type = other DNA
tagccttaagagtcaatttgcaaacactcaagatttggccaatatgcctctactacttctacttaacacagtcaaagggaaatttttagattctttcatctgatttgactctcttagtta

SEQ ID NO: 32557 - DNA, 120 bp, synthetic construct
  source 1..120: mol_type = other DNA
ataacctgggaatctcttaatctaagaatctttactgtagatttttctagaacaaatgtacaaacatctatgtacaagggtactcactgcagcattttgctaaggaaaaactcagaaaaa

SEQ ID NO: 32558 - DNA, 120 bp, synthetic construct
  source 1..120: mol_type = other DNA
tctccccttcatgcccaccccatggccctctactgaagccagatcttaatctgctcatttcatgaggattttcaaatcgaatggactgggccatgtgagagattactgaaaggaacagac

SEQ ID NO: 32559 - DNA, 120 bp, synthetic construct
  source 1..120: mol_type = other DNA
atgggtcaggagtaaggaatataaacagtgtaagtatgactattccaggcagaaatctaccttgtaagaacagctttgtgcagtgagctcaacaacattgatcagttagcagtccggttc

SEQ ID NO: 32560 - DNA, 120 bp, synthetic construct
  source 1..120: mol_type = other DNA
cctccatcatgtgatcttttagataacaaaatcgagatacatagggatttgggatcttgcgcaaagtcacccaggcagtaggtggcaaagtcaattcttacattctttcccatcgaacac

SEQ ID NO: 32561 - DNA, 120 bp, synthetic construct
  source 1..120: mol_type = other DNA
gacatggtggaggctgtatggtcctggagaacacttcctctgtgtagcatcagggaagtttctgttcattgtgtcttcactctctccaattcacttggggagtgatagggattataacac

SEQ ID NO: 32562 - DNA, 120 bp, synthetic construct
  source 1..120: mol_type = other DNA
tccacttgggtgtgtgcaccttctggaggactgggtgaggttgcccttcttccagccaaacccagaccctatggtgtgggacgttcagcggggagcaacagaatgccatggcttggtcct

SEQ ID NO: 32563 - DNA, 120 bp, synthetic construct
  source 1..120: mol_type = other DNA
tgacatccacagaactggtcatcctattattaaaatcctcctctgcctaggtcaccattttgtgagtgtccataagggacacacatatcttcacaattttccatgtcttaccttagaagc

SEQ ID NO: 32564 - DNA, 120 bp, synthetic construct
  source 1..120: mol_type = other DNA
atgtagcccctggctgggcagctgttcctcagcattgactctgtgctatggaagggcttcctaagtttttgtggactgctatcccagtctgtcaccactatacaatcttcataattttcc

SEQ ID NO: 32565 - DNA, 120 bp, synthetic construct
  source 1..120: mol_type = other DNA
tgttggtattggtttggtcatatgaagtcttggtgggggctggaggatccactgtgagatggctcagtcccttggctggaaagttggtgctggctgttgttggcaggccttgctccctct

SEQ ID NO: 32566 - DNA, 120 bp, synthetic construct
  source 1..120: mol_type = other DNA
atggagaatggtacatgatggaggtcagattatgtagggccttgtagactacaatgaagactttggctttgttttgggttggtgagggacaaggaaagctattggaatgttttagtgact

SEQ ID NO: 32567 - DNA, 120 bp, synthetic construct
  source 1..120: mol_type = other DNA
atcagtctagaatacagtttgagtactagggttttaaaaagcttcgtaagtgattctattttgtagaaatattgagaactactagattggatgatattgaatccaattttaaaacaaggt

SEQ ID NO: 32568 - DNA, 120 bp, synthetic construct
  source 1..120: mol_type = other DNA
atttctttcctcttatattattatagtctcacagtgactctttgatgatagacaagcaaggtgcagaggacctagctcagaaaaattcagtgaggtgcccaaagagatccaacaaagaag

SEQ ID NO: 32569 - DNA, 120 bp, synthetic construct
  source 1..120: mol_type = other DNA
tagaacactgagtttgcatgaatgtgggtaggagccaaattttaaccagcaacagttaccattataaattattcctcatcccaggcaaagcagtgcagtctgaagggaaaacttattatc

SEQ ID NO: 32570 - DNA, 120 bp, synthetic construct
  source 1..120: mol_type = other DNA
gccacaaaataaaccttaacaaattcaaaaagattgaaatcatgtctagtattgtttccaaccacaatggtgtgaagctaaaaatcaataacaagaggaatcttggaaaatttacaaata

SEQ ID NO: 32571 - DNA, 120 bp, synthetic construct
  source 1..120: mol_type = other DNA
cattttagaaagttcagcattctttcttaacaaaaactcttaacactttaggtatagaaggaaagtttctcaacataataaaggtcgtttataagaaacccacagctaacatcataatca

SEQ ID NO: 32572 - DNA, 120 bp, synthetic construct
  source 1..120: mol_type = other DNA
atagaccaagggaacagaatagagagcccagaaataaatcaaggcatatatagtcaagtaattttggaccagggcaccaagaggacataatggagaaagaaaaaaacctcttcaataaat

SEQ ID NO: 32573 - DNA, 120 bp, synthetic construct
  source 1..120: mol_type = other DNA
ccaacagaaaaatattgtgagtcacatacatactttacatttttagtagccacattaaaaaagtgaaaagaaacaagtgaaattcacattgtgttttatttaaactactatatctaaaat

SEQ ID NO: 32574 - DNA, 120 bp, synthetic construct
  source 1..120: mol_type = other DNA
tttttggtgttcacattttaggtcctgcacccgatgttgtctcagacaaaatctaccaaatcagcaaaacgattgaggaatatgctatatgtcctgatctccgaatcgacctatctcgac

SEQ ID NO: 32575 - DNA, 120 bp, synthetic construct
  source 1..120: mol_type = other DNA
aagtaatttaacttagcccaaaagaggaaatacctggtttgtgtccatgtgatattttagggatagagaaaagattaaaatggattgtgtggggggtcacagtatttgcccaatgttacc

SEQ ID NO: 32576 - DNA, 120 bp, synthetic construct
  source 1..120: mol_type = other DNA
tcatccattaaatatcacacctggatttactaaaaattattgaaagtgggttggtaatatcttcagtgcaagtttaaaagtatttcagggtttcaaagtagtatgtatttgaaaaatctg

SEQ ID NO: 32577 - DNA, 120 bp, synthetic construct
  source 1..120: mol_type = other DNA
gggcaggaaatattgagacctgtacacctgttgggtttcagaggttaagaggaaagttggattcatagatattcacacaacatgtgtatgttcagatatttggaatgctctggaaaactt

SEQ ID NO: 32578 - DNA, 120 bp, synthetic construct
  source 1..120: mol_type = other DNA
ttggaggaacacattctccaggaactcagtgagagaaagctcatggtaggtaaatattttgtgtattgtatatctgaaaaggccttttattctacacttgcccttgattaatatttgact

SEQ ID NO: 32579 - DNA, 120 bp, synthetic construct
  source 1..120: mol_type = other DNA
aaccactcatctgctttctgcccccatagttttgcattttccagaaagttatgtaaatggaagcatacaatatgtcaccttttgcttcaagcttctttcactcagcataataatttcgat

SEQ ID NO: 32580 - DNA, 120 bp, synthetic construct
  source 1..120: mol_type = other DNA
gctgggcaggcacaatcaagagatgttcactattggaggattgtgtgttgtattggtggaaaataagtggaaagcaatatctttcagatatttcagctaggaggattacatgctgttcca

SEQ ID NO: 32581 - DNA, 120 bp, synthetic construct
  source 1..120: mol_type = other DNA
ctgaatacatcttctgtattcctaccacagtaactggcacatagtagatgctcaataaatagtagttcaagcaaatattgttctatattgtatctttaaaacgattgtaaatttatgttt

SEQ ID NO: 32582 - DNA, 120 bp, synthetic construct
  source 1..120: mol_type = other DNA
aaatataagatggcagtaaagtggattgtgatgattatgggaatgggctgctagcagatgcttctgtccgatcatttttacgcattccttcctacaggaccgttatatgatcctaggcca

SEQ ID NO: 32583 - DNA, 120 bp, synthetic construct
  source 1..120: mol_type = other DNA
cagagtctgacatgttcaaccagcacgtgttattatagaaacagtgtatgtgcctggtggaaagttagaaaacacaaataagagaatgtaaatatcatatcccctaccttgggttaccta

SEQ ID NO: 32584 - DNA, 120 bp, synthetic construct
  source 1..120: mol_type = other DNA
acaggtaaacatatatgtggcaatagaaattattacaatgttactgtatgaggggtaggaagaaggcaccgggaaacattctgaggtgacgggaatgttctgtgtcttaatctgggtggt

SEQ ID NO: 32585 - DNA, 120 bp, synthetic construct
  source 1..120: mol_type = other DNA
tttttgagcacggtataaggtaggggtcgaggttcacttatttcccttatccagtttttccaatcccatttttaaaaaagaattttctttcccctgaatagccttggcaccattattaaa

SEQ ID NO: 32586 - DNA, 120 bp, synthetic construct
  source 1..120: mol_type = other DNA
ttgaggtaggtattactctcctcatattaaagatgttgaaccaatgatcagagagcttaagtgacttgtacaaggtcacacagtgaattagaaattgactcaggatttgaaactaggtct

SEQ ID NO: 32587 - DNA, 120 bp, synthetic construct
  source 1..120: mol_type = other DNA
ccataaacagggtggtgaatggattagtgctcatctaccctctatttgctcttatgccacccctatggttcaccatttatccactcaagaaatatttattaaggacctcctatgtcctag

SEQ ID NO: 32588 - DNA, 120 bp, synthetic construct
  source 1..120: mol_type = other DNA
ctggagttgtgaaaagtgggctgtcagacaagagctgaacttggcaggggggagaaatgccccaacttgtctcttctcaccctccaacctcctgctggtgcctcctataaccaaactgca

SEQ ID NO: 32589 - DNA, 120 bp, synthetic construct
  source 1..120: mol_type = other DNA
tcacattactaatgagcttaagcatctcttcatatgcttgagaaatttgggagtttccttttctattaattgcctattcctgtcctttgaccatttttttttttctatttagggttcttc

SEQ ID NO: 32590 - DNA, 120 bp, synthetic construct
  source 1..120: mol_type = other DNA
ttttatggcttgagtcaagcatccccttctcagtaagtcctttgataccatgttccctccaccccaacagatatttcaaaaagttaactactatgagctatcaacatgcttcttttgact

SEQ ID NO: 32591 - DNA, 120 bp, synthetic construct
  source 1..120: mol_type = other DNA
gtctaaacaagtcactttgaccagtggtggatggatccaatactgaaagaagctccttagaatcgccctgtctgattagggattcaaggctactttaaactggggtttcaatgccatcca

SEQ ID NO: 32592 - DNA, 120 bp, synthetic construct
  source 1..120: mol_type = other DNA
cttggaacttcttttctgactaggggcaagaatcattgctctctttgaatgactctagttcccagcatagaggtttgtatttactagaccaccaataaacattggttaggttcaggtgag

SEQ ID NO: 32593 - DNA, 120 bp, synthetic construct
  source 1..120: mol_type = other DNA
agtagattggcctcaggtgaaccgtgatccagcagctcacatgatactaccatttgacctggtattccctcttgtctgctttgccttagatggtatcactcttatccctaggctctgagc

SEQ ID NO: 32594 - DNA, 120 bp, synthetic construct
  source 1..120: mol_type = other DNA
gctcatcttcccttccatgttcccttttcctttagcaaacttcactgccaacaaaatgtgttaatattctctgtgtaaggtgttctgctagattcagggaggtccgtggcttcagcgtga

SEQ ID NO: 32595 - DNA, 120 bp, synthetic construct
  source 1..120: mol_type = other DNA
gaacacatataggaccctagaagtcccatctctttagaaaaattatctttctgggaaaatacagagtttcttttataacacatctgtgtctctgtatgctggccaaaagcctcaaacccc

SEQ ID NO: 32596 - DNA, 120 bp, synthetic construct
  source 1..120: mol_type = other DNA
ggatgatgatgaggaggaggaggaggaggaggagaggaggaatatctaccagagaaaatactccagggtgtaggatatgacaatttacaacccaataagaaaagtatttttcccatttta

SEQ ID NO: 32597 - DNA, 120 bp, synthetic construct
  source 1..120: mol_type = other DNA
gtctgcattatttttcttcctttatttaaatcttcaactttgctgaattgcttattgaagaaaatgctgtctctaaacataacattactggcagctgaaagtgaaccttacacatgatgc

SEQ ID NO: 32598 - DNA, 120 bp, synthetic construct
  source 1..120: mol_type = other DNA
ggatcatgagatgaggacagatccctcatgaataaattaattgtgtctcttggaggtgagttcttactcagttcccatgagagctggttgtcacaaagagctggtatctccccaccttct

SEQ ID NO: 32599 - DNA, 120 bp, synthetic construct
  source 1..120: mol_type = other DNA
gaaaagaaggcaccatgttatgtgctgggacctcattcattcttcatgtcataaggagccaattcttctctggacttttccacattccatgcaaagtctgtctggcttcctgtccattta

SEQ ID NO: 32600 - DNA, 120 bp, synthetic construct
  source 1..120: mol_type = other DNA
gagataaattaaccatgctcatgagaagatgtagagtgaggaattccttccacaaatgctctgcttatctgattattggttagccagtgatttcctgtcatccacaaaaaaagatgaaat

SEQ ID NO: 32601 - DNA, 120 bp, synthetic construct
  source 1..120: mol_type = other DNA
agtcaacgatgcctgctagctttacacctgtgcttgtgtgtgtacatgttggggtatgatattggaaagaaaaacaaatctcatagcgatatacggtgaaaaaggtccctgaacttggat

SEQ ID NO: 32602 - DNA, 120 bp, synthetic construct
  source 1..120: mol_type = other DNA
atgaatttgtaaaaattgaacagtcctatgaacataccctgtaagctcaagacatagaatgttaccagcccctgcaagcaagctgcctgctcacttctagtcattaacccctccctcttt

SEQ ID NO: 32603 - DNA, 120 bp, synthetic construct
  source 1..120: mol_type = other DNA
accggtaaatcactcaatatattattattcccaaaattcgtgaagctaagagatgagccatcttgaaaaacaacctggcatttgactggaggtgagtggctaagggaggatctcagtgtc

SEQ ID NO: 32604 - DNA, 120 bp, synthetic construct
  source 1..120: mol_type = other DNA
taaacatcttctgaatggatgggcaaataaaacaagcaagcacagggatgggactgatacagacccggaaaacactccccagcctatagccaaacattgttgtgtgcttctgaaatcttg

SEQ ID NO: 32605 - DNA, 120 bp, synthetic construct
  source 1..120: mol_type = other DNA
caatgtttgacaaaaggcataaaacacagagaaaaactaaacagagatgtattctctcaggaagtgtggggatgcgtggggaggtaagtcctgagcaaaggaagcaaaataaccctattg

SEQ ID NO: 32606 - DNA, 120 bp, synthetic construct
  source 1..120: mol_type = other DNA
aagaaaagaaaaaggacaggttttcattatcaatatttttcaagaaggggattgggagatacttctcaggcatatatttagaaaagtgaaactccttactagaagaaaatcacataagta

SEQ ID NO: 32607 - DNA, 120 bp, synthetic construct
  source 1..120: mol_type = other DNA
ttacagaaagattcccattgacatgggtaaaagttttaaaagacatttaaagttgcatgctttatcaactgagaaatctacttatttctccacatcctctccagcacctgttgtttcctg

SEQ ID NO: 32608 - DNA, 120 bp, synthetic construct
  source 1..120: mol_type = other DNA
acaaatctggaaacgctgtacaaagcagtgtatagtgaggacaagtctcaaatcagtaagtgtgagtataataggtcaaaagaagttgttagacagcgtttgtgggggggtgtgcacatg

SEQ ID NO: 32609 - DNA, 120 bp, synthetic construct
  source 1..120: mol_type = other DNA
gaggcacacgggtatgggcacacatgcacacacgtgagggtaagtggagaggcatgacaaggaaggaagaggttggaataatttcattcttttacaagaattaatgagaaattcttaaac

SEQ ID NO: 32610 - DNA, 120 bp, synthetic construct
  source 1..120: mol_type = other DNA
gtgggagtggatgccacaaattgatccccttctccaaccagattgaaaaccactggtctagagcaatatttttcacgacccatcaatgtattgtgaactcaattcagtggattaataatg

SEQ ID NO: 32611 - DNA, 120 bp, synthetic construct
  source 1..120: mol_type = other DNA
atggctggatgattgaattctcgggtacttgagtgtcccctaaacaattctagccctgtatcccttaaagcaaagtaacttctgagggttgcttagtcttagcatcctatatttcactca

SEQ ID NO: 32612 - DNA, 120 bp, synthetic construct
  source 1..120: mol_type = other DNA
tattatttactttattttcaaaatatgaccacccatccctggagaacagtgggtcagattgcaactaaagagaaccagcaaagggcactagcttgatgattgtgtcagctggagcctgct

SEQ ID NO: 32613 - DNA, 120 bp, synthetic construct
  source 1..120: mol_type = other DNA
tgtgactctttgacctgcacaatttaaactgagtgatgactttcttcaagcagatcagctcctactactgatgtcaaagtagacatcagctgtgcttctgacacagagattgagcaacaa

SEQ ID NO: 32614 - DNA, 120 bp, synthetic construct
  source 1..120: mol_type = other DNA
cacaactctgttagttccagtttatttcaagtccctgtcttttaagaattttcatagttgatattcagacatgtaggaatgctatccagtgagtctgtaactatctgaggaattagctcc

SEQ ID NO: 32615 - DNA, 120 bp, synthetic construct
  source 1..120: mol_type = other DNA
atttcacatcttatcacaaaaaagtgataaataagtgaggtgacagatatgttaattagcttgagttaatcatcccacattttgtgtgtgtgtgtgtgtatatcacattgtaccccataa

SEQ ID NO: 32616 - DNA, 120 bp, synthetic construct
  source 1..120: mol_type = other DNA
gaaaagaaaaagaaaaagaaatgcctcaggttagagaaaatagcctatgtttttcacactgggaaccccccgcttcagtgggataatgctcactgaacaagcattttggggctggccatg

SEQ ID NO: 32617 - DNA, 120 bp, synthetic construct
  source 1..120: mol_type = other DNA
gacttttagcggtatatattggcaagcaagcaggtgctgggatcgtctcatataaagcttgattctttcagaatgatttatgtttggtcagccctgaaggaggataaatgattctgtgac

SEQ ID NO: 32618 - DNA, 120 bp, synthetic construct
  source 1..120: mol_type = other DNA
tttattcacagaaagggtccagagaccacttacaataacttcatttgctgtgaatagatattttctgcggttttggagcctggagcaagaggtttatgctgatgtatgagggatgctgac

SEQ ID NO: 32619 - DNA, 120 bp, synthetic construct
  source 1..120: mol_type = other DNA
aagagttggtataaatatgactgcaaaactgtcctgagctgctaatctaagcacactgcctattgggtagccccactctgcaggagcagtaacagagctgtaacggtgccagagctataa

SEQ ID NO: 32620 - DNA, 120 bp, synthetic construct
  source 1..120: mol_type = other DNA
tctatctgcctgtgctccctttctagagcaggctaacacagtatagccttgtagaccagtataaagtggtgctttaatcttatagacttacttggccaaattaatcactgaagggctaga

SEQ ID NO: 32621 - DNA, 120 bp, synthetic construct
  source 1..120: mol_type = other DNA
ttgtaccaattaaccaacctctatctctccctccgtgctccccttcccagcctctggtaaccactattttactcactgtctccatgagatcaattttttattattcagccgtaaaaaaga

SEQ ID NO: 32622 - DNA, 120 bp, synthetic construct
  source 1..120: mol_type = other DNA
aagcgaaagtggtatattattaatggagtttcatgaaatattgctccagaatatggagatactcccaagtccaagagtgaaaggccttcaaccactctcttccaagagctcagtggggac

SEQ ID NO: 32623 - DNA, 120 bp, synthetic construct
  source 1..120: mol_type = other DNA
tgtcacctgtaaaaaaaaaatgtatagtaaatatttgcttgtgtatattcttctctcaattttgcacatccctaatgcctactatcctgagtcttaatggatgcttattacaatttaata

SEQ ID NO: 32624 - DNA, 120 bp, synthetic construct
  source 1..120: mol_type = other DNA
taacttggggcataccgtaccggttggacaagatctcaaatggtgacttaacttttaatgagtgcttataaaaacatgtgtgttgcctcatgacactatgcaattgctgctttagtggtg

SEQ ID NO: 32625 - DNA, 120 bp, synthetic construct
  source 1..120: mol_type = other DNA
caagcagggagctaaatgataaggatactagaagatctgagaagatagaaactcatgcatatagctatatttcctttaattttcatgtggatattctctgttggaagataatgttccagg

SEQ ID NO: 32626 - DNA, 120 bp, synthetic construct
  source 1..120: mol_type = other DNA
atctggggtagaatctcagcgagagggcacaaagcttactctgtccttctggtctcgcttttaaactttattccttattttgtataacttcgtttaggcccagagaatgccaatgactaa

SEQ ID NO: 32627 - DNA, 120 bp, synthetic construct
  source 1..120: mol_type = other DNA
caaccacttctacctttataattccaggccatgaaagatcactgttttagtctgcgtggtgcagtggaacagatagacctcggtttgaatctcagctctactgtttactagacatgaaat

SEQ ID NO: 32628 - DNA, 120 bp, synthetic construct
  source 1..120: mol_type = other DNA
tttaatagagataatatctcaacaggagtttgtgaggctgacagtctctgatgttctgaccacctacgtcacaatcctcattggggactttctaagggcatgttttgtgaggttttgcaa

SEQ ID NO: 32629 - DNA, 120 bp, synthetic construct
  source 1..120: mol_type = other DNA
gctacaaacgtcaaaagaactaggatgaagaatggttagaagtatgaatgagaaagaaagtctacacttttgcttagcacaagtttagatggcaaataaaaggcttgagttttcccaaaa

SEQ ID NO: 32630 - DNA, 120 bp, synthetic construct
  source 1..120: mol_type = other DNA
ctggagataacaatgaataagactgtctttgaggataatcagcaagagagagagacacataaggcaataggcatgcactgttattatatgtggtggacaatgggaactcagatggggtgt

SEQ ID NO: 32631 - DNA, 120 bp, synthetic construct
  source 1..120: mol_type = other DNA
aaaaaatacactaacagtaaagatagctgatgagaatgaaaaaaaaatgtgtcgggctacattcaaagccatccctggccatgggttggacagacctcaacaggcacatggattccctat

SEQ ID NO: 32632 - DNA, 120 bp, synthetic construct
  source 1..120: mol_type = other DNA
agtttagtcacagggagaccaagttcaacaaatcttacatttactccacatttaacaaatacataagcatccatctgttttagagaaagcttcatcattagatagaataagaactcttct

SEQ ID NO: 32633 - DNA, 120 bp, synthetic construct
  source 1..120: mol_type = other DNA
tcccacagaagcttcctggtttcagcaaggactctcttcatcaagatctatttgtgttttaagtgacttctcccattttgtcccggagtaaagtaggacagttctaaagtagccacattt

SEQ ID NO: 32634 - DNA, 120 bp, synthetic construct
  source 1..120: mol_type = other DNA
gtcagcccaacctgcacagtagcgcaatgttttgatgcagcctgctaaatcattcagatatgcattggaatagagttttccaccattcattgactccattgtctgaaaaacatgtcaaac

SEQ ID NO: 32635 - DNA, 120 bp, synthetic construct
  source 1..120: mol_type = other DNA
caatagactaatcctctctatgtagtatttgtgtgtcacagggaactcaggaatttcattacttgacccccaccaaactaatagctctgagcacatggaacctttcctctctagatgtga

SEQ ID NO: 32636 - DNA, 120 bp, synthetic construct
  source 1..120: mol_type = other DNA
tataattgatgtcattcttactgatgtattattgatggggcatctatttgctgtgcacacagaatggaaaggactactggtccccgtcctaaactgccacatctgtggttacacgtgtga

SEQ ID NO: 32637 - DNA, 120 bp, synthetic construct
  source 1..120: mol_type = other DNA
tatctgtgtagtttattttcccagtgcgtgcaaggctttcctcaacagcggagagcttttgcatagcaggagaacaaactaggatagccaagagcaaacctgaaatgactaattttattt

SEQ ID NO: 32638 - DNA, 120 bp, synthetic construct
  source 1..120: mol_type = other DNA
gggaaatgtaggtattgctaattctgagattgttgcatgtgtattgtggtttagagcaaatgagtaattaggtcggtgatgttgctaacggattttcagcatagcaaaaaggatacacag

SEQ ID NO: 32639 - DNA, 120 bp, synthetic construct
  source 1..120: mol_type = other DNA
acaggggtggtgaagggagaggccaagcaaagtgcctcccaaaagaattattttgttctgttaaattcaacacatgattgaatactgcatttgaggtccctacctgagcatttctttact

SEQ ID NO: 32640 - DNA, 120 bp, synthetic construct
  source 1..120: mol_type = other DNA
cctctgttaaccatcattctactccacattcatgatcagctttttcagctttcacatatgggtgaggacatgcgatatttgtctttctgctcctggctgatgtcacttaacataatgacc

SEQ ID NO: 32641 - DNA, 120 bp, synthetic construct
  source 1..120: mol_type = other DNA
atgtgagatggaacttagttgacaaatgtgtgtgttctgccttttccactgacggcatttccctatatctcttcctctcatcagaccttccctgagatataataatatggaaatgaggcc

SEQ ID NO: 32642 - DNA, 120 bp, synthetic construct
  source 1..120: mol_type = other DNA
gaagcagcaagtaatgatgcagaagctgcagcaaatggttcagctaagatcattgatggaggttaatatagcaaacaacagatttccagtttaggtggaacagccttccattgggaaaac

SEQ ID NO: 32643 - DNA, 120 bp, synthetic construct
  source 1..120: mol_type = other DNA
aagaaagccagggtaaatttttatctccaagctaggaaaaaaccaactacccagcctggcagcctaatcatttatatctccatctccacctgtatttgcatctatccgcatatctgtgtc

SEQ ID NO: 32644 - DNA, 120 bp, synthetic construct
  source 1..120: mol_type = other DNA
cattttagagacaaggaaagtaggattctgagagtttaattactgtatccatgtgcccctatgttaagcacttgacacgtattatctcatttagtcttcacaacaatcctataagggcag

SEQ ID NO: 32645 - DNA, 120 bp, synthetic construct
  source 1..120: mol_type = other DNA
tttagagacaaggaaagtaggattctgagagtttaattactgtatccatgtgcccctatgttaagcacttgacacgtattatctcatttagtcttcacaacaatcctataagggcagaat

SEQ ID NO: 32646 - DNA, 120 bp, synthetic construct
  source 1..120: mol_type = other DNA
ttctctcattttagagacaaggaaagtaggattctgagagtttaattaccgtatccatggttaccctacccttcggcggcatagctgggatctgaaggcaggtgtgactagagcgccatc

SEQ ID NO: 32647 - DNA, 120 bp, synthetic construct
  source 1..120: mol_type = other DNA
gtactaacattagtcccatcttatagatgagaaacctgaggcacagagatgttgagtgactggcccaaggtcatacagcttgtaagtggtatgactgggatttaaaactgtagtcttgtt

SEQ ID NO: 32648 - DNA, 120 bp, synthetic construct
  source 1..120: mol_type = other DNA
aagcatctaccccaactgccaagagcttcttgccctctctctctttgggataaagagtactttgcaccactttgccctcagccttggaccctagttgttcattcagtgacttaacaaaat

SEQ ID NO: 32649 - DNA, 120 bp, synthetic construct
  source 1..120: mol_type = other DNA
atagccaatatttttaataaattaaaattacattaacagttgacaagaaacagaattatgcaagtactctaaatcaagcttgtttaacctgcggctgcagatggctttgaatatggcccg

SEQ ID NO: 32650 - DNA, 120 bp, synthetic construct
  source 1..120: mol_type = other DNA
ctctgagaaacggcaaatgttcagaactggggtacagcttggtctgcctgatgtttctcagggttcccattatccaacactgagagaaagagtcaactgatttttaaaatctatttctca

SEQ ID NO: 32651 - DNA, 120 bp, synthetic construct
  source 1..120: mol_type = other DNA
agaggttgagggattgcagttaatggggagatgttggtcaaagggcacaaactttcagctatgtgatgagtaagttctgtggacctaatgcacagaatggtgactacatactgtaatata

SEQ ID NO: 32652 - DNA, 120 bp, synthetic construct
  source 1..120: mol_type = other DNA
catgctcccaaggagggtctgagaaagtagacaacatcagtgtttcctgtgcctttgtgcgaggccagggtgggagcagtgtataagtggggtactgatatggtttggctgtatccccac

SEQ ID NO: 32653 - DNA, 120 bp, synthetic construct
  source 1..120: mol_type = other DNA
aagtgcaaattatttctattttgttaaatcccccacaaagcctgaacacattttggtcatagatgagtcacctgttgacatttatccatgactgtcctgctagggcccaaagcagagtga

SEQ ID NO: 32654 - DNA, 120 bp, synthetic construct
  source 1..120: mol_type = other DNA
tagcagtcagatcaccagagtagtgccgaacacttcctggcttcatctgaaaatttgagtaagtggacaagaactaggagacaaaggctattggacttcactcttcattttatagctctt

SEQ ID NO: 32655 - DNA, 120 bp, synthetic construct
  source 1..120: mol_type = other DNA
agaaatcctcaaatgttaagcccaggtacgttcaatttgagtcttacatctttttaatcaaagatctgtcaatacagctaaaagtgcagtaagtattagctagaaggtcttcagccttaa

SEQ ID NO: 32656 - DNA, 120 bp, synthetic construct
  source 1..120: mol_type = other DNA
attctcatgtttataatggagactgaccagcaagattttgctgtgcgatgagttatctttgacgctttgacgtttattcaaatacagtcactctaataacaaaggatacggttggcagcc

SEQ ID NO: 32657 - DNA, 120 bp, synthetic construct
  source 1..120: mol_type = other DNA
tactcatgtgacgtgtgaggcagacagatttgcctttaagtagcaacaaagaatatctgcactccagatcttggtggagaatttagtctctctgccgcctaactcttaccaaattttgaa

SEQ ID NO: 32658 - DNA, 120 bp, synthetic construct
  source 1..120: mol_type = other DNA
ctctcttctaagatgtctccaacccaagggtaataaacaactcgagggtaataaacaacttgggttggcagcacagattaggagagggggtgtcagatcactaagctctgatcttgatcc

SEQ ID NO: 32659 - DNA, 120 bp, synthetic construct
  source 1..120: mol_type = other DNA
tagagtttggactgacttatgctctcctccttcaatacgtaacttaggaaaccatgccctacaccctagataacttgtgaaaaggccagacaagaacagagatattctgttgatatctgg

SEQ ID NO: 32660 - DNA, 120 bp, synthetic construct
  source 1..120: mol_type = other DNA
aaatggactagacccagaattttagtaaatatcttgccatgatcacggagtcctctgataagagttagacgagcccatgttctgggaagggatctgtatttcactctactgataaaccag

SEQ ID NO: 32661 - DNA, 120 bp, synthetic construct
  source 1..120: mol_type = other DNA
ttaaatttccactggcaaggctgctcagaaatatattgcctgataaaccatctctactcgcttaatgccgtacacagaggtcagaacagagggctgttaattcttgtaatggaaggtgct

SEQ ID NO: 32662 - DNA, 120 bp, synthetic construct
  source 1..120: mol_type = other DNA
tacacttcttatctagatctttgtttaacttgcagggatccagatcatatgtagtacacactgtattccaatctaaaaggatggggagggaacaggaagggaaggaagggaaagagagga

SEQ ID NO: 32663 - DNA, 120 bp, synthetic construct
  source 1..120: mol_type = other DNA
catttccattacaaaccatgcttttcaatctccccttcctgctttccacagcagctctctctgctcaccccaaccctggcatgaggagtatctaggatttcagggcaggagatggttttc

SEQ ID NO: 32664 - DNA, 120 bp, synthetic construct
  source 1..120: mol_type = other DNA
taggcagagttaggaaccctatcctgtgtgtttgcaggtggcattttagaaatgaaggcataagtcttaaaaatgtcacactggtagtgggaagaattgagaccactctataagctgtgt

SEQ ID NO: 32665 - DNA, 120 bp, synthetic construct
  source 1..120: mol_type = other DNA
ttcatttgtattgtatgttacaaatgtacctatctttgacttacggggcggggcggggaactggtctgtcaccataaatagtttgagcagcactgcctcaggcaatattactttactaaa

SEQ ID NO: 32666 - DNA, 120 bp, synthetic construct
  source 1..120: mol_type = other DNA
aagacactaattcttgctctgtcaccttttaagagcttggcaatagtgagacataaaactgaagaagcttgcagtggcatcacggtccactaggcatgctcattagcacttaattaggaa

SEQ ID NO: 32667 - DNA, 120 bp, synthetic construct
  source 1..120: mol_type = other DNA
atctatcttcccattgtgtattatttttgcttgttttacagctttttgtagcatatttaattacacttgtttgcaggtctcactttctgtactatgacctgtccaagggcagaggcaatg

SEQ ID NO: 32668 - DNA, 120 bp, synthetic construct
  source 1..120: mol_type = other DNA
aggcatggggatagatatacgtagaatgtgtgaaatgttttcctgggagggatgacattttaaacttttattttctacattactgggagtcatatgtagattttaagagggggctaggaa

SEQ ID NO: 32669 - DNA, 120 bp, synthetic construct
  source 1..120: mol_type = other DNA
aaagagtgagattgattacaactcggcgtttgcctttttgaatgcagtttgaacattaagcagtctatgagtggttgaattatggctgccgggattggccaacactcagctattgttaca

SEQ ID NO: 32670 - DNA, 120 bp, synthetic construct
  source 1..120: mol_type = other DNA
tttccttaacctaagggtctgtcttagttgataaaggggcatctattttggtcttttagatcacaatagcttagcgcactgtaacctatccctgctttaagggagttgcatacttgccac

SEQ ID NO: 32671 - DNA, 120 bp, synthetic construct
  source 1..120: mol_type = other DNA
taaaatgccgaaactctccctgcttctgagatttaaaaactggctaaaatggattaaaactattaaggccaactggagtttgcacagaacaagctggctggcgtcacagcccaaatttct

SEQ ID NO: 32672 - DNA, 120 bp, synthetic construct
  source 1..120: mol_type = other DNA
ttgacctcaacttcatctgcttgagtgggttggggttgtttatactgtacttgttctacatggtattgaccctgtattcatcacccaccgaaaaaaataatgacacccaaaaggtaagga

SEQ ID NO: 32673 - DNA, 120 bp, synthetic construct
  source 1..120: mol_type = other DNA
gcgtgacatttaaaggtaatgtcagcctattctatctgagcttcagggtgaccctttctgtctctttcatgaggactcagtcccatgatttcttagaatgtcagttactagatagtctca

SEQ ID NO: 32674 - DNA, 120 bp, synthetic construct
  source 1..120: mol_type = other DNA
ctaacagatcctcatttccttgttctgatcctggctgcagctttggacctcctgtttcctgcagtcccctgggccagcatcatgataccaccctctttcgtcgactgttatgcccagacc

SEQ ID NO: 32675 - DNA, 120 bp, synthetic construct
  source 1..120: mol_type = other DNA
ccaacacaacttaggccaaactaccaactaaattcctcacggaatatgttaacctcaactgctgttaagcatgacttagcagaatcctttcctttttgggccagtaaaggcaaactagag

SEQ ID NO: 32676 - DNA, 120 bp, synthetic construct
  source 1..120: mol_type = other DNA
tacatattttcaaggagaaaaattagaaacaacaagctcattctccatcttgggtcatcctcacctcgtcacctcacctgttgatcaagaaaagcaggggaccctcagaagagaattcgc

SEQ ID NO: 32677 - DNA, 120 bp, synthetic construct
  source 1..120: mol_type = other DNA
gcctgggagcaaatcttccccaaccttgaaaacacagcctccttctgaaaaccttttcagaaaatggatgcagaccttattgcagtggtttaataaacctagcataatgtgtgaagaaca

SEQ ID NO: 32678 - DNA, 120 bp, synthetic construct
  source 1..120: mol_type = other DNA
aaaggtaggagttagctcagctcttactgactccctcttttgacttttaaaaggtgaccaatcccctggaactagtgtgaaggaatgagtatcatgtgcctccaaaagccccttttctcc

SEQ ID NO: 32679 - DNA, 120 bp, synthetic construct
  source 1..120: mol_type = other DNA
aagatcttcccttaatgtatacggtgcacctcaggatggatgtgtcacctctgatcttcatggggttagtggaatataataaatattgtgtagaacacctgaagctcatgatccagaggt

SEQ ID NO: 32680 - DNA, 120 bp, synthetic construct
  source 1..120: mol_type = other DNA
ttatctggggtatatgccctggcgttcatcatcttgtgccaggaaaatttagaacacagacacacacgaggagtttaggagcagatgtttaataggcagaagataagagaaagagaaaca

SEQ ID NO: 32681 - DNA, 120 bp, synthetic construct
  source 1..120: mol_type = other DNA
agaggagctcaaatatgctttccatggagaatgtggggaattatcagggatgcagccaggagactgccccaaaaaaccatctcttgcatgatccggagacatcttcagaggaggatctga

SEQ ID NO: 32682 - DNA, 120 bp, synthetic construct
  source 1..120: mol_type = other DNA
ggaacattgatgaagacctttttgcagcagtctaataaacccatcataacatatggaaaacaagaaagttcctaggaaaagggtagctccttgtcatcatctgtgcagaatagaggtcga

SEQ ID NO: 32683 - DNA, 120 bp, synthetic construct
  source 1..120: mol_type = other DNA
ctcccatcacttttctatttagaccacagaaaatccagcactctgttgtcagtcaccttcagattatgtgaacacatggctcaatgcacagcccacctttctgccttccttttttttttt

SEQ ID NO: 32684 - DNA, 120 bp, synthetic construct
  source 1..120: mol_type = other DNA
cctcgattgtccaaagtgtttctctgccttcctttttagcccatgacaatgcacacagtgttatgagatgcctcacgaacacaaatgcaggttttgaaattgtgtagccaaatctgtaat

SEQ ID NO: 32685 - DNA, 120 bp, synthetic construct
  source 1..120: mol_type = other DNA
aacctggggaaaaaaaaaaaagttactgctcctgttacaaagaatgcatacagttcctcaccccctccaagaaattgactaagatttatgcacaaagtgtctaaaattatcatattctgc

SEQ ID NO: 32686 - DNA, 120 bp, synthetic construct
  source 1..120: mol_type = other DNA
tgggaggcagaggttgtagtgagccgagatcatactactgcattccaatctgggtaacaagagtgagaccccgtctcaaaaaaacaaaaacaactagtcatatgatttttgcctataaca

SEQ ID NO: 32687 - DNA, 120 bp, synthetic construct
  source 1..120: mol_type = other DNA
tattgtaaactgtggattcatttaaaataacagagatctgtatttaccaatatggaaaactgctcatggttaattttttttaaaagccagttataaaacagtctattatataaccccatt

SEQ ID NO: 32688 - DNA, 120 bp, synthetic construct
  source 1..120: mol_type = other DNA
ttctgaggactgtaaatgagcctcaatccataaagctgagaggttgtcttagcccacatatgcagcaggtgactccctctgacaaaagcaagatttagctggatcttttaaaaaaaaaat

SEQ ID NO: 32689 - DNA, 120 bp, synthetic construct
  source 1..120: mol_type = other DNA
atttttatttcacttacaggcatcttgcatgtgaataactcacaactttaattcatggaacaaattgagaaatagtcttttgggggtttggtactccctggaaacataagagtgctttgg

SEQ ID NO: 32690 - DNA, 120 bp, synthetic construct
  source 1..120: mol_type = other DNA
tttgcttggcctataatgttagtaatacttgacccaagatttaaaatttgaaaagtttcatataaaaatatagatttacagcttttctagaaaaactataagagttaacagtttctgaat

SEQ ID NO: 32691 - DNA, 120 bp, synthetic construct
  source 1..120: mol_type = other DNA
gctgggattacagacatgagccaccgtgcccggctgcaaaattatgttttaacataggccctggactatatttaaaggataagaagcatgttacacatatctgttacctgaatgggtttg

SEQ ID NO: 32692 - DNA, 120 bp, synthetic construct
  source 1..120: mol_type = other DNA
tctattactattatttttgagacagcatctcaccctgttgcccagggtagagtgtgtagtggtgcaatcatggcttactacagcttcaacctcctgggttcaaataatcttcccacctta

SEQ ID NO: 32693 - DNA, 120 bp, synthetic construct
  source 1..120: mol_type = other DNA
atgcatatatgatatatatatgctattctgtccctttagagatccttgattaatacagatggggtcccactatgctgcccaggctgctttcaagtaagcctcccaccacaaccttccaga

SEQ ID NO: 32694 - DNA, 120 bp, synthetic construct
  source 1..120: mol_type = other DNA
taccaaaaagcctgaatcaatcccacatttctacataaaaactagaccaacaacaagctgacaggattgtagcagttcttatgtgcatactggaggcaggcagaagggatggcattccaa

SEQ ID NO: 32695 - DNA, 120 bp, synthetic construct
  source 1..120: mol_type = other DNA
tggcaatgggtaagtaactatcctgggatgaaaaatttgccacaatacaaaccacaggttatcaagagttgactctgctttatgatagagcactgcttttcaactttaatgtgtacccag

SEQ ID NO: 32696 - DNA, 120 bp, synthetic construct
  source 1..120: mol_type = other DNA
catgttctcgatcatctgctagtgacagatctatttggaatattaaccttggctttaaaatcgtgataagagcagagcctcacttgagaggtacactaagaagaaccaaccatgtggaag

SEQ ID NO: 32697 - DNA, 120 bp, synthetic construct
  source 1..120: mol_type = other DNA
tacccagcttaagttataaaacagggcaacagaggtctataatgttcctttcaactgccacttagcccccaatcaaggattgatttgtaagtcaatcctttcatcaattctcagtgagca

SEQ ID NO: 32698 - DNA, 120 bp, synthetic construct
  source 1..120: mol_type = other DNA
atgagtgaatgaatgcctgattcagtcagtcaatgaagtgaataaatgaatacacacagtggaagacacagatgatggaggatggaaggaaagccaatttgcattgtagcttgtcaacct

SEQ ID NO: 32699 - DNA, 120 bp, synthetic construct
  source 1..120: mol_type = other DNA
ttctttgaacttcaaaattagtttgtggattatgactttctttttaaaaggtggcactaaaataatggctttttaatatataaagtacatatacaatttggttttctttgaatgtagagt

SEQ ID NO: 32700 - DNA, 120 bp, synthetic construct
  source 1..120: mol_type = other DNA
atgaccttggatttaggcaatggattcttagacatgacaccaaaaagcacaagcaacagaagaaaaaaatagataaattggacttcaacaaaactaaaaatttttgcatatcaaaggata

SEQ ID NO: 32701 - DNA, 120 bp, synthetic construct
  source 1..120: mol_type = other DNA
gaactgtggcatatccatacaatggaatattacttggcaataaaagggaatgaagttcttgtacatgctgcaatgtagacaaaccttgaaaatattatgctaaatgaaataaggctgaca

SEQ ID NO: 32702 - DNA, 120 bp, synthetic construct
  source 1..120: mol_type = other DNA
gctgtgaacctaaaacggctctaaaaaaataaaatcttaatttttaaaatatctaggaaatctccaattatgtcccatgccttgggttcagcttaacatttcaacggaacagagcctggc

SEQ ID NO: 32703 - DNA, 120 bp, synthetic construct
  source 1..120: mol_type = other DNA
agacctgagatcatatggaatatttcaaaatgaaaaactgaatctctcacaatcctcaactaaacttaatcttttcatttgatggtaaaagaagaaattttccctagattttcatttatt

SEQ ID NO: 32704 - DNA, 120 bp, synthetic construct
  source 1..120: mol_type = other DNA
ttaaactaagtatccaagaggcactgctgcttagagcagtgctactcaaaatgtgatctgtggaccagtgctagttcacagacattgttgtcaatttgcactcctcagcatactgttaga

SEQ ID NO: 32705 - DNA, 120 bp, synthetic construct
  source 1..120: mol_type = other DNA
agtagtgcatggatatgtcaaaggtacaaaatttctaaaactatgtcttctttctgtcctctgctgtatcagatgtttcttttgaggtaaagttctacacctttcattttctttccttat

SEQ ID NO: 32706 - DNA, 120 bp, synthetic construct
  source 1..120: mol_type = other DNA
tgcagactataccaggctactcagagtgtggtctagcactgtttgttactgtcctgcaccagaatgtaaatcaactatgtcactaagcacactgctttagttcaggtgacatttttttca

SEQ ID NO: 32707 - DNA, 120 bp, synthetic construct
  source 1..120: mol_type = other DNA
taccaaattctggtctttgagaattcctggatgtttcttaaattatcaactgaggaaaaagataagtgtcctataaccattaggtctacattatttaagaagatctatgtaccttcattc

SEQ ID NO: 32708 - DNA, 120 bp, synthetic construct
  source 1..120: mol_type = other DNA
ctgaaaattagaatctcattactataaaagctctaaaagcaaaattatttttcagttataagactgatgacttgtgttcaaatactattttcataacacattagatgatagtacttttag

SEQ ID NO: 32709 - DNA, 120 bp, synthetic construct
  source 1..120: mol_type = other DNA
agggcaatattcctaatctgaataccacaatgtatatacttattctttatacatggtagttaggtatagctgaattaaggctctaggaaaaatatttaatatatgtcataggacaaataa

SEQ ID NO: 32710 - DNA, 120 bp, synthetic construct
  source 1..120: mol_type = other DNA
gaaaatctacagagctagatgcattaagaaactacctgcagtctattcactttttgcgcttctttcaaagatacagcatgccctttgttttcctgtaccatcatctgcacttgattcttc

SEQ ID NO: 32711 - DNA, 120 bp, synthetic construct
  source 1..120: mol_type = other DNA
gataaagaaactgtgatatatatacacgtatatatatacgtgtatatatatgtatatatcacaactcctatataaaccaactccaacattcaagcttccaattaccagtacttcctgttc

SEQ ID NO: 32712 - DNA, 120 bp, synthetic construct
  source 1..120: mol_type = other DNA
tgcagtggtgatctgcgagactatttgtcaggacttatccaactgtacccacgaggggtaaatgttcttgtatataaacgatactttaatatgcgtaactgaacacaccccacaatccaa

SEQ ID NO: 32713 - DNA, 120 bp, synthetic construct
  source 1..120: mol_type = other DNA
aaaccacacaccactccacaccacacattcacaccaaaccacacaccacacccaccactccacaccaaaccacacacatcacaccactccacaccacacataccacgccatatgactcca

SEQ ID NO: 32714 - DNA, 120 bp, synthetic construct
  source 1..120: mol_type = other DNA
aaagtcaacagtagaggaggacagaagccacacagaatccagataacaacgacaaagtgaaaagtaggaagaatgagtgtcaagctcaatgtaacaactggccagtatgccctgacaagt

SEQ ID NO: 32715 - DNA, 120 bp, synthetic construct
  source 1..120: mol_type = other DNA
ttaggtacgtttacacaaatacttaccattgtgtcagaactgtgcacagtattcagcacagtcacgtgcagtacaggtttgtagcctaggagcaacaggttatattatctagctgaggca

SEQ ID NO: 32716 - DNA, 120 bp, synthetic construct
  source 1..120: mol_type = other DNA
aaaagaattatccttagaatcaaagaggagccaatgaactggtctaagttgggaggaatcactgaccacatctagttagacaataaccctggcagtggacagactggaggcaccaggaac

SEQ ID NO: 32717 - DNA, 120 bp, synthetic construct
  source 1..120: mol_type = other DNA
agaggaatatgtaaagctccgcatcctcccagtccttacccctgctataggagtaaagtttcttcatttaaatcctccactagggcttttagtagtgatcttgttgccaattaaacctca

SEQ ID NO: 32718 - DNA, 120 bp, synthetic construct
  source 1..120: mol_type = other DNA
cccgggtcctgattctgtgtcctcccacctgatcccaggtcctgattctgtgtcctcccacctgatcccgggtcctgattctgtgtcctcccacctgatcccgggtcctgattctgtgtc

SEQ ID NO: 32719 - DNA, 120 bp, synthetic construct
  source 1..120: mol_type = other DNA
aacaagaaaaaacaagccaattagaaaatgggctaaaggcacgaaccgatatttcactgaacaggatagattgatggaaaatgagaaaataaaaaaacttttatcagaggaatgccagtc

SEQ ID NO: 32720 - DNA, 120 bp, synthetic construct
  source 1..120: mol_type = other DNA
agaggaacagggactgatggcgtccatggtggacctcatattgaaaatccctgtgtgtgtgcgtgtgtgtttgtgtgttatttttatttattttgttttttgtgcaggctgcagtgaaat

SEQ ID NO: 32721 - DNA, 120 bp, synthetic construct
  source 1..120: mol_type = other DNA
taggggtagatcgtgtactgggatttccatcccaagctctcagtccatctgtgggggagccaggaggcatgaaggcaaaatcaaacccgtgggctcagcggccaggaccggtcatgagac

SEQ ID NO: 32722 - DNA, 120 bp, synthetic construct
  source 1..120: mol_type = other DNA
tagagttaatttgatctcatctgtccgggagggaactgactctgaagaagtcagttgaaaaaacctgaggtgggggctcctaggaaggaaatcagaaccctgggtccttctcagattctg

SEQ ID NO: 32723 - DNA, 120 bp, synthetic construct
  source 1..120: mol_type = other DNA
tatccccgatgaagaacactggagtagcttgccctgcgtcgcagaataaagtgcaagctctctccttacctgaaactcagcaccctgaaaggcctttgttgaggaaacaactagaaggtg

SEQ ID NO: 32724 - DNA, 120 bp, synthetic construct
  source 1..120: mol_type = other DNA
agaaagcaagtgctgaccaaaccatctgttcacatgccagagaggcttcaggcctcctcacctgcatgtaagcagttccagagggccccgcgagggatcccatcttcaaatgatcatggg

SEQ ID NO: 32725 - DNA, 120 bp, synthetic construct
  source 1..120: mol_type = other DNA
caatccaccacaaatttctgcccaggagacacatagggaagggaggacggggcctccctgctggctgacactggaaacgcgggacctggaagaagagggagcgcagggctggcaggggat

SEQ ID NO: 32726 - DNA, 120 bp, synthetic construct
  source 1..120: mol_type = other DNA
ttgcttctagaaaccaagcccacaccaagcacagcacaaataaaagccatcaccctcttatgaataaaaaaccgtatatattgtggaatattaaatgttctgcgtgtactaacatgagag

SEQ ID NO: 32727 - DNA, 120 bp, synthetic construct
  source 1..120: mol_type = other DNA
caactttctgctcatgtgggctttcaggatgttttctatatgattcctctctgtgcgtcttaataaatcacttcctgagtcactcctcaagggcttcctcaggttcctttccgactcctc

SEQ ID NO: 32728 - DNA, 120 bp, synthetic construct
  source 1..120: mol_type = other DNA
ccgccaaatcctcacgtggagacaagctttgagggacggtgtccagtggaagtgccactgagtcacagtgagatggtgttaacagagtggagtcccgcaggggaggaggagtgaagcctt

SEQ ID NO: 32729 - DNA, 120 bp, synthetic construct
  source 1..120: mol_type = other DNA
ctttgtcattcacaaagggcttccacacacagaccctccacccccacggtcctcacaactgccctgtgaggagaaaggactggggtggtctcagagaggaatcagccttagcagagttga

SEQ ID NO: 32730 - DNA, 120 bp, synthetic construct
  source 1..120: mol_type = other DNA
cactttcaatcaaagggacctacccacatacaattaagattttttaaaaattctatttatgtacttatgtaattttattttaagttccggggtacatgtgcaggacctgcagttttcctt

SEQ ID NO: 32731 - DNA, 120 bp, synthetic construct
  source 1..120: mol_type = other DNA
ccatacactaccacccctccaccctgctctgtggctataaaatttctattcagagggaaacctgaatatatggaaactggagattactgcaagaccctattgcagtaatctctatatcta

SEQ ID NO: 32732 - DNA, 120 bp, synthetic construct
  source 1..120: mol_type = other DNA
cttcaggtcctaggacttgatgaataattattagacatgacaccagaaaagcacaatcacacacctgtaatctcagcattttatcaggacaagctttctctccggagtgaaaaggcgagt

SEQ ID NO: 32733 - DNA, 120 bp, synthetic construct
  source 1..120: mol_type = other DNA
ttttgacactgactttttgaagagtatggcccacttttcatgtacaaagtccacctttctaatttgtctgtttcctcatggtgttgtctaagttgcttctgcatcacctgtatttctgta

SEQ ID NO: 32734 - DNA, 120 bp, synthetic construct
  source 1..120: mol_type = other DNA
caccattatcaccaccaccattaccatcagcatcatcaggatcatcaccattatcaccatcatccccattgtcatcatcatcatcatcaccatcattgtcaccagcataaccatcatcat

SEQ ID NO: 32735 - DNA, 120 bp, synthetic construct
  source 1..120: mol_type = other DNA
accttgccttaaaggtgtttgctgccagtcttcgccaaaagtgtctcctaagtgtcttccctggtaataagtctgctcttttcctgcaaactatagacacatgtaaatacacagaatgaa

SEQ ID NO: 32736 - DNA, 120 bp, synthetic construct
  source 1..120: mol_type = other DNA
ggtggaggatgatggtggaggatggtggtggaggatgatgatggaggacagtggtggaggatgtagtggaggatgcggtggaggacaatgatggaggatttacatggtggaggtgtacat

SEQ ID NO: 32737 - DNA, 120 bp, synthetic construct
  source 1..120: mol_type = other DNA
ggatgcagtagaggatgatggtggaggatttagtggtggacatggtggaggacagtggtgttaggacgtgggggaggacatggtggggggcggtagcagaggatgatagtgttaggacgt

SEQ ID NO: 32738 - DNA, 120 bp, synthetic construct
  source 1..120: mol_type = other DNA
accaaatcaggaggtctgcacgagccttgctgagtatctacagttgtcacagcctctcccttagatcagctgagtaggcctgtctgctcagacaaaagttctcagagcagagaatccaac

SEQ ID NO: 32739 - DNA, 120 bp, synthetic construct
  source 1..120: mol_type = other DNA
actcacctctgtgctcccaggtgatccggggtatgggtgcaaatgccatcgctgtcccaaacatcactgcaagggccatgagcagccccctaatgggggtgcacatcctcatcaggtaga

SEQ ID NO: 32740 - DNA, 120 bp, synthetic construct
  source 1..120: mol_type = other DNA
actgtgtcctttttgcttaagtcaggtgttttggtttctctagcagctgcaggatccccataaagattatgctcataaggtagtgatggaaaagtaaaatagagcctgaaagcgggaaac

SEQ ID NO: 32741 - DNA, 120 bp, synthetic construct
  source 1..120: mol_type = other DNA
acaccttcacaacagcctccactaataaccataccctaaggcactgagaaaatcacaggtgtcactgaggctgtttatggccatagaaattatacatagattaaatactgcattcacccc

SEQ ID NO: 32742 - DNA, 120 bp, synthetic construct
  source 1..120: mol_type = other DNA
tatatatacccaacatatatatacccaacaacatatatatattttcaggaaaaagacctcctctacaaaagcaatttcaaaaaactggaagaaatgactgttgtaccacatgggcagata

SEQ ID NO: 32743 - DNA, 120 bp, synthetic construct
  source 1..120: mol_type = other DNA
tgatccttctgcctcagcctccctagttagcatgccatgcctggcatcagactgtaagctccaaatgtaaagaggagaactagaaaaaaattacttcagttcaccttttcttaattctga

SEQ ID NO: 32744 - DNA, 120 bp, synthetic construct
  source 1..120: mol_type = other DNA
tccaaattctcatggcacatcttcactctacaatttttgtgtcttcccagatctgtcttctggagtagttgtgataatgtctatttgaggttccagtgtgactaagctatgcctgggtac

SEQ ID NO: 32745 - DNA, 120 bp, synthetic construct
  source 1..120: mol_type = other DNA
gcggggctgacaccctgcattctgtgggcagggctgacaccctgggctctgtgggtggggaatgacaccctgggatctgtgggtggggctgacaccctgggctctgtgggtggggctgac

SEQ ID NO: 32746 - DNA, 120 bp, synthetic construct
  source 1..120: mol_type = other DNA
cctaggctctgtgggtggggaatgacaccctgggatctgtgggtgcggctgacgccctgggctagtgagtggagctgacaccctgggctctgtgggtggggaatgacaccctgggctagt

SEQ ID NO: 32747 - DNA, 120 bp, synthetic construct
  source 1..120: mol_type = other DNA
accacattacccaaatgttcacagccacaggagacccttcaagagatcaatcagatcacatctcctccttgctgaaaccctccaaggcgtttccacctacctcaactaagctccaaatct

SEQ ID NO: 32748 - DNA, 120 bp, synthetic construct
  source 1..120: mol_type = other DNA
tatggctattgacgattcagaagcttagggacatcactgacctctgtgattctcagtttcttcatcattaaagtaggggagagtctacctctcagggaaattgctattatgaaagtgcct

SEQ ID NO: 32749 - DNA, 120 bp, synthetic construct
  source 1..120: mol_type = other DNA
gagggtcctgcctcctgtggtctggagcccccccctcaaggaagaaacccgtgctgtctgctcgcaactccaggatgtttggacacctcagccccgtgaggatctcttgtctcagaggca

SEQ ID NO: 32750 - DNA, 120 bp, synthetic construct
  source 1..120: mol_type = other DNA
acatgcgtaagaacatgaggttgttaagtagaacatcaaaattcaggagactaagagagctgcttaggaggagaaagaagagacagcagggcaggcgtggtggcccacgcctgtaatcca

SEQ ID NO: 32751 - DNA, 120 bp, synthetic construct
  source 1..120: mol_type = other DNA
aagtgagcggaagctccataattcatattgtggggatcaacaggtgttgtctgtagttgatgaatcaacaaatggtagttaagcatactatacagtatctagaattatgagggtaacgtg

SEQ ID NO: 32752 - DNA, 120 bp, synthetic construct
  source 1..120: mol_type = other DNA
caacagctattcttcccctgaacccttcagaagcacctctcctaaatacgtctatattacttgcatcaggagtttcagtgacttgagcccatcacagcctaacagaaggtaaccaaaaac

SEQ ID NO: 32753 - DNA, 120 bp, synthetic construct
  source 1..120: mol_type = other DNA
ctgccagattcttctagtttttgccaatctggtggcagttaatagtacctcactgtggtactatcttgcaagttcctgattaccattaagatgcaccagttgttccttagttggccattt

SEQ ID NO: 32754 - DNA, 120 bp, synthetic construct
  source 1..120: mol_type = other DNA
actggattaggggcccacgctactccagtatgacctcatcctaactagttacatctgcgataatcctatttccacaggtcacatttagagatacaaggggttaggacataatcttttttt

SEQ ID NO: 32755 - DNA, 120 bp, synthetic construct
  source 1..120: mol_type = other DNA
tgtcaagaccattcagtggaggaaagaacaatcttcaacaactagtgctgggacaacaccagcaagagaatgaagctgaatccctacctttcaccaaatacaaacattagctcaaaatgg

SEQ ID NO: 32756 - DNA, 120 bp, synthetic construct
  source 1..120: mol_type = other DNA
tggagtcctcttccattgctggtgggcatataacagcatagccactttggaaaacatttggcagttcatcaataaattaaatatagaattaccaaatggcccaacagttcccctcctaag

SEQ ID NO: 32757 - DNA, 120 bp, synthetic construct
  source 1..120: mol_type = other DNA
aggtaaattttggaaattttaagtagggccatactcagaaattagttttaccttgttcagcccgaataaggaggcttaaagctgtgcctacaacccctgcccacgcactgaatattaggt

SEQ ID NO: 32758 - DNA, 120 bp, synthetic construct
  source 1..120: mol_type = other DNA
cgggcacctgtagtcctcactactcgggaggctgtgatgtattcttattatgaaataccatttagaattgagaagaacaacaccatggagctacatacgacatcataaatgaatctccca

SEQ ID NO: 32759 - DNA, 120 bp, synthetic construct
  source 1..120: mol_type = other DNA
tgtgagagaccctgtcttttaaaaataagtacataaatatcaagatacttactactttagcagaaaacgagaggtatatgatggggaagaggaatgccagggtacttctggggtgttggc

SEQ ID NO: 32760 - DNA, 120 bp, synthetic construct
  source 1..120: mol_type = other DNA
gaaaaggttggagaaagggaaccagatgaaatcacttatgttttgcacatattgagattacagggattaaacatgtaggcaggcatattataggacgttaggcagaggcctagagtggag

SEQ ID NO: 32761 - DNA, 120 bp, synthetic construct
  source 1..120: mol_type = other DNA
catagaaggcgaagctggggccctgttccacgacggccttcagctgggacgcgttggccatcagcagcgcgatgtccagcatgctctcggctgcgctcttcttgctggcgtaatggttca

SEQ ID NO: 32762 - DNA, 120 bp, synthetic construct
  source 1..120: mol_type = other DNA
atgttatctgccgccctctcactttatattcttctgagaaatattttgaaaacaatagaggtaacacgtttttgtagagaaaggagaaccacccacacccttgtcgccaaggctgaaagg

SEQ ID NO: 32763 - DNA, 120 bp, synthetic construct
  source 1..120: mol_type = other DNA
acctggcggcctccctagggtacagagtccatggcgatctcctggggctgtacgccacaggacaggcctgtggcacctcaaggcacactggcgcaaggccgggacattctggtctctgtg

SEQ ID NO: 32764 - DNA, 120 bp, synthetic construct
  source 1..120: mol_type = other DNA
tgtcagtctacttgctgcccctttgaaggtagtgccccccccccccccgccctctctttgctgagtttaagatattctctttgtgtttgatttttaggagttttatactgtaatatgccc

SEQ ID NO: 32765 - DNA, 120 bp, synthetic construct
  source 1..120: mol_type = other DNA
aacaaaaagcctatgtggcaggtgttgaaattcaggagtaaaatcagaacttgcttcctcatttccgaccttgaaaactacctgtttttcttgccatcaaaggaagaggaggggcacttg

SEQ ID NO: 32766 - DNA, 120 bp, synthetic construct
  source 1..120: mol_type = other DNA
tctccatgctcccctctccatcctccccttaccttcttcccccttcatcctcctttctccatcattccctctccatcctcccctcaccttccttcccttccatcctcccctcacctttct

SEQ ID NO: 32767 - DNA, 120 bp, synthetic construct
  source 1..120: mol_type = other DNA
caccatgaggttcattctagccttctccttttgcatgattatttgtagtttctttctctgacagtgaggacctggctcatacggcatttgctttaaccctagtgttcctgcaaagtaatt

SEQ ID NO: 32768 - DNA, 120 bp, synthetic construct
  source 1..120: mol_type = other DNA
tggttccatgtcctgctgtcctgcttcagccattcctctatgtggctttcagtcctctcacagatttcttcatttttgcaaggtagcgtgggaatgatgactagcacatggcagcacaca

SEQ ID NO: 32769 - DNA, 120 bp, synthetic construct
  source 1..120: mol_type = other DNA
ggtggcgggtctcagacagggtgcgtgcattgaatttcaacgaatgctaaaataagttcctaacctcttgaattgatacgtgaaatagatgccagtgtttgttgaaataaaaatgagcca

SEQ ID NO: 32770 - DNA, 120 bp, synthetic construct
  source 1..120: mol_type = other DNA
cctagaaagctgcctagacccaggctggaattgtttccttagaggagtattttaaacactgtgtgtccctgaataaatgggttcacaaatacatagttggttaaaatttgatcgaggaaa

SEQ ID NO: 32771 - DNA, 120 bp, synthetic construct
  source 1..120: mol_type = other DNA
ccagtgggttctgtctgagcctggtgctttatattttggaaggttattaattattcaatttctttaatagttatagacctagtcagatttctgtttcttcttgtgtgagttttgacagag

SEQ ID NO: 32772 - DNA, 120 bp, synthetic construct
  source 1..120: mol_type = other DNA
attgtaatattaatagcatcctggtcacacagcactctgcgcttgcacacctgtgtgtatgtgtgtgtgtatgcctgtgtttgtgtgtctgcatgtgtttgtgtttgtatctgtgtattt

SEQ ID NO: 32773 - DNA, 120 bp, synthetic construct
  source 1..120: mol_type = other DNA
acccttgggcctgtgagtgggtggaaacactgctctcgttggagcccatctcttagggaccaggcgacttgatcctcactggccgaggaggacttgctcagagggcctgattcggcgtcc

SEQ ID NO: 32774 - DNA, 120 bp, synthetic construct
  source 1..120: mol_type = other DNA
cagggcaaagagaaagcctgggagtctgtgtggagcctgccagaagtgggtgaacttggactgagctgaggtgcagctgtgtctgttcaggtgcagatgcagctgcaggtctatgttcag

SEQ ID NO: 32775 - DNA, 120 bp, synthetic construct
  source 1..120: mol_type = other DNA
ggtgcagatgcaggtgtggatgtaggtgtgggagtaggtacaggtgtagatgcagctgtgggtgtgggagtaggcacaggtgtagttgcaggtgtgtgggagtaggcacaggtgtagatg

SEQ ID NO: 32776 - DNA, 120 bp, synthetic construct
  source 1..120: mol_type = other DNA
tataggagtaggtacaggtgtagatgcaggtatgggtataggagtaggtacaggtgtagatgcatgtatgggtgtaggtgtaggaacaggtgtagatgcaggtgcaggggtggaggtagg

SEQ ID NO: 32777 - DNA, 120 bp, synthetic construct
  source 1..120: mol_type = other DNA
ctttggggttttattttggcacattataaaggagtaaagcctgtatacagtcagtttctgtctattctaatgaagggcaaggggatgaagggatttaccttgagtaaccatccacttaac

SEQ ID NO: 32778 - DNA, 120 bp, synthetic construct
  source 1..120: mol_type = other DNA
ctgctgtgagcaagctgcttggcttccccaagtgtggatatgacgatgtcatgggtgtttacagattcccttgcactgtgtcccacagcagtactggttcacgtgtgatacactgcactt

SEQ ID NO: 32779 - DNA, 120 bp, synthetic construct
  source 1..120: mol_type = other DNA
cacgggagctgcccacatcacccaccagtgactcttcactccccacattttccccaagggcctgttgtgccctcagctggggaagccctgccaagataaactctccttcccaaaggcgaa

SEQ ID NO: 32780 - DNA, 120 bp, synthetic construct
  source 1..120: mol_type = other DNA
tgttgggagggaactgttttagatgccaatgtaaatctgtgtctacatcaattccacacgagttcagtcatcatatgggaagggaatcatagctgttgggggagctccatgcaagaccct

SEQ ID NO: 32781 - DNA, 120 bp, synthetic construct
  source 1..120: mol_type = other DNA
accctgagcccaggccctgggtgcggtgtcttttcagcaggggatgggcttccaaagagaggtcgcttcttggacttgctggcaggagaaggtgatgggctgaggcctcttttctgagca

SEQ ID NO: 32782 - DNA, 120 bp, synthetic construct
  source 1..120: mol_type = other DNA
gtcggggccttggggccatccttgctgggaaggtacactgaggcagagagggaggaggatgggtgtggtgagggccgctcctcctgcctgcaccacacaggggagggcagggcttgggga

SEQ ID NO: 32783 - DNA, 120 bp, synthetic construct
  source 1..120: mol_type = other DNA
tgtcagtatttggaggcaatcagggttagagcaggtcatgagcgtgggtcccagtcatggaatccgagctctgataagggcaggaggagacaccagggctcttgctctcagccacaagag

SEQ ID NO: 32784 - DNA, 120 bp, synthetic construct
  source 1..120: mol_type = other DNA
acagtcaccacagtccacggctctgggctgctgggctcgtggtgcactcagagctatcactggagcccgtggctttggggagcactctcctagatggcctagtcctgataatggtagtaa

SEQ ID NO: 32785 - DNA, 120 bp, synthetic construct
  source 1..120: mol_type = other DNA
gaaggccatgggaccagcctccctcacaggcctgggtgcccccaaccacctgggcagaggtaacgggcaccccaggagcagctgccaggagtaggggaggtggacacatgacacctccac

SEQ ID NO: 32786 - DNA, 120 bp, synthetic construct
  source 1..120: mol_type = other DNA
gattttcacagctgctagtcatgttacactaaatagtgggacagggagcccatctctggtccttctcctttgagctcccagtaactgaacatagggaccaacgaagaaccaggggttctt

SEQ ID NO: 32787 - DNA, 120 bp, synthetic construct
  source 1..120: mol_type = other DNA
acccatcctctccatcctttccactacacggtgtattcccccaggcatcttggtccgcctctaaggagccctcctccctaaccacagactcagggtgccatggccatccccaggtgtgat

SEQ ID NO: 32788 - DNA, 120 bp, synthetic construct
  source 1..120: mol_type = other DNA
tcattttgtttcccagcatattgtgctggtgttaaatgtttattttgtatcttttacatgattttaacttaactaagcaatacttttgcatggttccaaattcaaattgtgcacagtgga

SEQ ID NO: 32789 - DNA, 120 bp, synthetic construct
  source 1..120: mol_type = other DNA
ctgtcctcatcttcatcacaagtgtcatcacatgtggttctcagcatgggaattattgtagcctgtctttaaaaaaatcttcattctcattttcacacagaattgctgtttatcagcgtc

SEQ ID NO: 32790 - DNA, 120 bp, synthetic construct
  source 1..120: mol_type = other DNA
ccggccgccctcaaccgctcccagcatcggttgccggtggttcggggcagggagacgacgcagcgcgagcggaaagggcggttacccaacggccttagctctcatggcgtcctccgtggt

SEQ ID NO: 32791 - DNA, 120 bp, synthetic construct
  source 1..120: mol_type = other DNA
aatttgttgcgtatttaattcgtgagaatctaatatgtattcacctgtgtgggttggtggtgtctgtgtggagattgcagattaaagaaggtcataattgggctgggcatggtggctcat

SEQ ID NO: 32792 - DNA, 120 bp, synthetic construct
  source 1..120: mol_type = other DNA
ggaggctactcaggcgcgggactcgttctcgaggcgggagctgaggtgcggggcggggcctcctgcccggcgccggcctgtggggaggcggggcggggcacagtctcttaaccgtgcagc

SEQ ID NO: 32793 - DNA, 120 bp, synthetic construct
  source 1..120: mol_type = other DNA
gcgtcggaggggcggtcctagcgatggggagcagagtttccaggggcgttgctggggaccagccgaggagcaagttaggctggcctctttctccagttttacttttgcttgaggtcgaga

SEQ ID NO: 32794 - DNA, 120 bp, synthetic construct
  source 1..120: mol_type = other DNA
ctgtctcatgaattgatggacagtaattactaaccagtggcccagctagtaacctgcgaggtagcttccttcatcccttcccatacttaaaacaatcagaaagtctagctaagtttatta

SEQ ID NO: 32795 - DNA, 120 bp, synthetic construct
  source 1..120: mol_type = other DNA
ctcctctctgagaacgcatggagttgatgttaattgtgatgaatactgagttttcttggtgtttgctgtagatagtgagaaggctagcatgagcaggtagcagtgtttttctgagtgtgt

SEQ ID NO: 32796 - DNA, 120 bp, synthetic construct
  source 1..120: mol_type = other DNA
cttactgttaggtatccttttggctgtatacacgtaaacatgctttattaccctatggaagcatttttgaaatttctcagtttcagctggacgcggtggcttacgcctataatcccagca

SEQ ID NO: 32797 - DNA, 120 bp, synthetic construct
  source 1..120: mol_type = other DNA
ctttaaaaaaataataaaataaaataaattgccaaactaattattttaaaagtaattgtacagttgtacattgcagctagcactgtatgataattctagttcatccatatccttaccaac

SEQ ID NO: 32798 - DNA, 120 bp, synthetic construct
  source 1..120: mol_type = other DNA
ccatatattagtcagtctctgaactctttattctgttcctttgatctatttgtctttacatcagtaccctgcagtcttgattactggaggttcataagacttgaaaactaacagtccccc

SEQ ID NO: 32799 - DNA, 120 bp, synthetic construct
  source 1..120: mol_type = other DNA
tgaagtaggggtccagctttactctttcacatgccaaaaattagttgctctaacagcatttgttcaagagaccattcttttatggcacccttgctcaaaatcagttggccatacatggct

SEQ ID NO: 32800 - DNA, 120 bp, synthetic construct
  source 1..120: mol_type = other DNA
ataggctcagagtgacatctggccagatctgtatactgttcagatgttttttccctggtttttgatagttacgtcacatgcatgtgcttatcagtaccctgctgaattcttgaagtggat

SEQ ID NO: 32801 - DNA, 120 bp, synthetic construct
  source 1..120: mol_type = other DNA
tgatagttttgaagtaggtgatagagcagtgcatgatttaatggtgagaaacatcagtgcatggagataaattgacttgctgaaagtgaccaggctgactgaacaatggagctgggactt

SEQ ID NO: 32802 - DNA, 120 bp, synthetic construct
  source 1..120: mol_type = other DNA
ggtgaaacagttgtggcacatacattaggtggagtactaagctgccgttaaaagtgatgaaatgactatatgcctattgatatgaatatggtgaatttatttttatgtaaatcggctaca

SEQ ID NO: 32803 - DNA, 120 bp, synthetic construct
  source 1..120: mol_type = other DNA
gaaagaatgggctacccagtatgatatgcgtgcctgaggacacatgttgatcccatatatggatgtgcacatgtgactgctttgatttttgtctagtgtagacatgcctgaacatttatg

SEQ ID NO: 32804 - DNA, 120 bp, synthetic construct
  source 1..120: mol_type = other DNA
gaactagtagaggagctagaagcagattgaattttggggaatgagaaaatgtaatcaggtaaaaaatcagtacagtactatcactagagaagtcaggaggagaaattaattactatgatt

SEQ ID NO: 32805 - DNA, 120 bp, synthetic construct
  source 1..120: mol_type = other DNA
gtgtgggaacagcttccaaccttatctttttttgatggacagcagatgacctgattgattgagaaaagccaggtgcctagttcatctgaactttttgggtcatattgagaaagtaggcga

SEQ ID NO: 32806 - DNA, 120 bp, synthetic construct
  source 1..120: mol_type = other DNA
tcttggcctcttagtttgcattaatttgggttgtggttaataaattgtttgaaaagttgtgaaaagcagttattttgtaaatatttaatgaatgctgcttggtctgtccaatgagatagg

SEQ ID NO: 32807 - DNA, 120 bp, synthetic construct
  source 1..120: mol_type = other DNA
agagtggaattacgggtgtttgggaagaagcccatagagatgaagtaccattttcattatatcatatcaacagtatgtgccactgttgatgttaaccttgatcacctggctgagatactg

SEQ ID NO: 32808 - DNA, 120 bp, synthetic construct
  source 1..120: mol_type = other DNA
gtgaggaaacaggtgtatataatacacacatttgtaagtatttccatttgtgaccatctgtatctatatgaagttaaaaatgagttcataatgatgtgctcaactctaatccatgattac

SEQ ID NO: 32809 - DNA, 120 bp, synthetic construct
  source 1..120: mol_type = other DNA
actgataatatttgttgcctatgataaaattccagcttccaaatgaaaaaaaaaaaaagactccactatttcccagagttacttggatcactgcctttccccataccccctttagtgagg

SEQ ID NO: 32810 - DNA, 120 bp, synthetic construct
  source 1..120: mol_type = other DNA
tgtatatcatctttgaggagactgttgcggtcctgtcacccctccccctttttcttgttgacgatcgggatttattacctcatttaacaagaaatctgatggaaagacagttccaggatt

SEQ ID NO: 32811 - DNA, 120 bp, synthetic construct
  source 1..120: mol_type = other DNA
atattcacggtgatgtagaactaccactatctaattctagaacattttcatctcccccaaaagagtccctatatctttccattaactgtcactctccatctctcccttttctcagatcat

SEQ ID NO: 32812 - DNA, 120 bp, synthetic construct
  source 1..120: mol_type = other DNA
tactgcatcaattaagatgattatgtgggtttttcctctttattttaatgtgttgtattacattgattggttttcataggtgaactgttattacattcttagaataagtccttggttatg

SEQ ID NO: 32813 - DNA, 120 bp, synthetic construct
  source 1..120: mol_type = other DNA
gtatgcacctctacttatggttgggttgtctggataagcccatcgtaggttgaatatatcataagtctaaagcgactttcaagttagtatattttcaacttacagtcggtttattgagac

SEQ ID NO: 32814 - DNA, 120 bp, synthetic construct
  source 1..120: mol_type = other DNA
cggcctcccaaagtgctgagattacaggccactgcgcccggcctcctttttttttttttttttttttttttttaaggcaaggtttcactcccttctcccagactggagtacagtggtatg

SEQ ID NO: 32815 - DNA, 120 bp, synthetic construct
  source 1..120: mol_type = other DNA
gaggtggtactacagacacatgtcaccatgcctggttaatttttaaattttttggagagatcgagtctcactgtgttgtctatactggtcttgaactcctagcctcaagtaaatctccca

SEQ ID NO: 32816 - DNA, 120 bp, synthetic construct
  source 1..120: mol_type = other DNA
cttgtgtttgaatttagcttaattttgcatgtttcttaatacaagtgaggctactaagggacatttgatttcagtgaactggttcatatttcttgccaatctttttattgggctgttagt

SEQ ID NO: 32817 - DNA, 120 bp, synthetic construct
  source 1..120: mol_type = other DNA
agtattccctgaaagtatcaagatcatgaaagtaaaaaaataaaagtcttgggaactgacttagattggaagagcctaaagaaatgtgagaactaaatgcagtgttaaatctttgattag

SEQ ID NO: 32818 - DNA, 120 bp, synthetic construct
  source 1..120: mol_type = other DNA
gatagggagagtttcttatcctctcatatgcctgtggcaggaagatatttctccttgtggtagtcttgatctttggcaatctaggttcagaaatccatgttttgtcttcacctgactgtt

SEQ ID NO: 32819 - DNA, 120 bp, synthetic construct
  source 1..120: mol_type = other DNA
tcctcgtgttgactcccttttttacctgagtgagttatatgttcttgtttctttgcatattgcaatcattttttgttaaaacctgtatatttagataatatagttttgcaattttgggtt

SEQ ID NO: 32820 - DNA, 120 bp, synthetic construct
  source 1..120: mol_type = other DNA
ttttatttttatttttaagcttggcttccttgggttctctgtctccattatttagggatcagtcagattggtaagagattatagttaaacacctcgagccagtaaactttcagctctcta

SEQ ID NO: 32821 - DNA, 120 bp, synthetic construct
  source 1..120: mol_type = other DNA
cttacataaccacatatgattttctgttatcttgggcaggaaaggattaattcagcaggcccaagttgctcaagtctttcatgttcccaagaggaccattttctgtgactgttccttgac

SEQ ID NO: 32822 - DNA, 120 bp, synthetic construct
  source 1..120: mol_type = other DNA
tatatctgggagtaaaattgcatggttgtgttcagcatcactatgtagtgctaaaagttttccagagtgggtgaacaatttactcttcagccaggcagactccatgtcttcaccagcaat

SEQ ID NO: 32823 - DNA, 120 bp, synthetic construct
  source 1..120: mol_type = other DNA
gtccctgtgtataaccctggtctagtatattttttccaatatgtgacctcagtcttactactgactagttctgtgggtctcttgctaggtggtaaggatttttatacttgggcttataga

SEQ ID NO: 32824 - DNA, 120 bp, synthetic construct
  source 1..120: mol_type = other DNA
tgtataaattccttagtgtggttcattttcctcaagattgccttggtctaagccttttttatgtctgtatatatatattttataatcagctcttcaatacccacaaaataatctgctaag

SEQ ID NO: 32825 - DNA, 120 bp, synthetic construct
  source 1..120: mol_type = other DNA
catatctgtaggtcagcagctttgagaggaagacaccagggagcttactttgtgaccttttagtaccctttcatttatggctattttttcctactcctctgatttgggaggtttctttct

SEQ ID NO: 32826 - DNA, 120 bp, synthetic construct
  source 1..120: mol_type = other DNA
tttgggggagggtaggtagaaaacagtagaaaagtttttaaaagcatggattgaacatttttagaggaattgcctgcatggtagcttgattgctcagaaatgggcccatatggtcagaaa

SEQ ID NO: 32827 - DNA, 120 bp, synthetic construct
  source 1..120: mol_type = other DNA
gtgtgaatactctataggcctaacttcatttttattattgtgtacacaaaagggcttaattattatgtaacttttaacttctctgcctatcaacagaataaagtgggcaattgctaccat

SEQ ID NO: 32828 - DNA, 120 bp, synthetic construct
  source 1..120: mol_type = other DNA
tagaaaacgcagcacttctacctgtgatgttaacattgttctcgaacagttaccggctgaagattcatttgatgaatccagttttttgaaatagacaattctgatgattcaggtgattct

SEQ ID NO: 32829 - DNA, 120 bp, synthetic construct
  source 1..120: mol_type = other DNA
aaaggatagtggagatttatttctcaatattctttaatttggaccacccccaccaactgagccgacgtcccagcgttagatcaaaatgactgctctccccaccagcaattacagtatttg

SEQ ID NO: 32830 - DNA, 120 bp, synthetic construct
  source 1..120: mol_type = other DNA
tctgcaaatgagggcttggcaattatcagtggacggacacagagtgtccagcaccaggccatgggccttcctgcttcctgagtttcacaagtaggatgcacatgaggggtgcaacccata

SEQ ID NO: 32831 - DNA, 120 bp, synthetic construct
  source 1..120: mol_type = other DNA
agctgcttcactttgagtccctcctcttatcagtttacctatgtctgctgtcctgggttaatcagttggtggctgataggggattggaatctgttcctttttctttccaattatgtgaac

SEQ ID NO: 32832 - DNA, 120 bp, synthetic construct
  source 1..120: mol_type = other DNA
tcattaagcatatgtacactcctcttctttatccctgtgaggccctggggatagtatatggtgtacattcatttgggtgtcattgtaccagttaatgcagttttgtgcagaattgatatg

SEQ ID NO: 32833 - DNA, 120 bp, synthetic construct
  source 1..120: mol_type = other DNA
aagttacttaggtgaagaagtagaaataaaagatgcctcttcaggcagctgatgttgccatgatgtcaggtatgggagtttaaccctgagaatgggctaacaatcctgtcttcattactg

SEQ ID NO: 32834 - DNA, 120 bp, synthetic construct
  source 1..120: mol_type = other DNA
gtgacttgttttgtgggattaaatgaaagtaggctatttcctcatgcagtggactgcattttccgagcttgcagactcagcagttggccagattaaagtgagaagcaacttctgttgccc

SEQ ID NO: 32835 - DNA, 120 bp, synthetic construct
  source 1..120: mol_type = other DNA
tacaaatggtttgcagatttctatccctctgtaattctagctgttctgtaacgtgaagatctgtgctactgcttccatctcacagttaaatgggtctcatcagagtcctgtgtgaagtct

SEQ ID NO: 32836 - DNA, 120 bp, synthetic construct
  source 1..120: mol_type = other DNA
tgtggagtctgtatttgcagacttggttctattgggagggcttagtctggagtgactcttgtctgtcatgtttgggcagacccattttaaaagattattttctatttattaaaataaaaa

SEQ ID NO: 32837 - DNA, 120 bp, synthetic construct
  source 1..120: mol_type = other DNA
tcttgttaaaaggctaaaggctactaggacacacttgagactttgtagtgtcatcagaagacggaaagacagtgagctgtagtatattaacagaagggcaccatgccagtaaatgcaaca

SEQ ID NO: 32838 - DNA, 120 bp, synthetic construct
  source 1..120: mol_type = other DNA
aagacttggagtcagacccatttaggttcaatgagtagttctgccactcagtgaagaaactcacttactgtcactacgcatcagtgtcttcatgtaaatcgcccggctagagatctggct

SEQ ID NO: 32839 - DNA, 120 bp, synthetic construct
  source 1..120: mol_type = other DNA
gagatcaaggacagggcaacagaacaagtgacttatgtcattagtaggcaaagtagacctggagacaaacagacaacccatagtttcccatctgtaaaatgggacaatcctcatcataaa

SEQ ID NO: 32840 - DNA, 120 bp, synthetic construct
  source 1..120: mol_type = other DNA
aagatggcaatcatggaaggaaaaggcactaaatatggtttaaagatagtttggaattttaaccaatggagcacaccttctagcctcccaggttggctttcaatcttttggggaaaaaaa

SEQ ID NO: 32841 - DNA, 120 bp, synthetic construct
  source 1..120: mol_type = other DNA
agtcctaaaagacaaaaggaagttgggatcagattgaaggaagaagccaagttaaactcagaagacgactactgaaaaggtaggtgcagcctctggatattccaagtttagagtcagcag

SEQ ID NO: 32842 - DNA, 120 bp, synthetic construct
  source 1..120: mol_type = other DNA
cttaacattagttgatatggcaaatatgtttgtcttactctacgttatgccagggatctgcatagcttttgtgtagataagagttgattcatagaccaataacaggagctgaaattgtgg

SEQ ID NO: 32843 - DNA, 120 bp, synthetic construct
  source 1..120: mol_type = other DNA
aataaataaataaaagagttgattcagcaggcctgagactgctactcttagaaaggctttcttgtaaggtttgcccttggctggcatctagaaacaagattctcataactgccgaggggc

SEQ ID NO: 32844 - DNA, 120 bp, synthetic construct
  source 1..120: mol_type = other DNA
ccagcggaagcatgaccaggaggcgattaccttctaatcacaaataactttatttttaggtaacaccacggaggacgccatgagagctaaggccgttgggtaaccgccctttccgctcgc

SEQ ID NO: 32845 - DNA, 120 bp, synthetic construct
  source 1..120: mol_type = other DNA
aaggcctcttcccttccccaacacccacccatcagtgcaaaagactgctgcccagcagggagtgacatctgtgtctcagattttcttgctgtgctctgagtactcactcctcatctcctt

SEQ ID NO: 32846 - DNA, 120 bp, synthetic construct
  source 1..120: mol_type = other DNA
atgtctggggtcctgtgttccaaacctgtttatatgcaaattatccctgctccacttggactcaggaggatctgctgagtcaggtcactctctgggtcctgcccttgacttttttcattg

SEQ ID NO: 32847 - DNA, 120 bp, synthetic construct
  source 1..120: mol_type = other DNA
aggctctgaaaaggctggtttccttttcagtagaggaaggagagtagcgcacaaataggaagacagtcctattattattattattcaaactaggatgtgtgtcctgactgatgaggtgca

SEQ ID NO: 32848 - DNA, 120 bp, synthetic construct
  source 1..120: mol_type = other DNA
agtctaggacactttgtcctagcagccctatgtgactaggacaaggtccatcatctcaggaacttccttcctgactggtatctggaaactgtatcagagccatgggaaagaatgaagaaa

SEQ ID NO: 32849 - DNA, 120 bp, synthetic construct
  source 1..120: mol_type = other DNA
tccacctctcaggccatggtccttcctcagagtttcctttgtcttagttcattccaaagatcatgttgtagggacgtttatcacgtatacggtatttgcataaactgtatgagcgattaa

SEQ ID NO: 32850 - DNA, 120 bp, synthetic construct
  source 1..120: mol_type = other DNA
atgtgatatgcctagatatattttggtgggggggggggcatttatcttgcttggtgttctctgagcttcctagatcaatgatttagtgtgtgacattaatttggagaaattctcagtcat

SEQ ID NO: 32851 - DNA, 120 bp, synthetic construct
  source 1..120: mol_type = other DNA
gatagtaacatttataaggtcaagatacgaaatatttccatcacagggatctctcatattgcccttttgtagccaagttcacttgtctcttccttctgcctccttaaccccaggcaacca

SEQ ID NO: 32852 - DNA, 120 bp, synthetic construct
  source 1..120: mol_type = other DNA
cagcactgcagccatgatatctgtccatttccccaaggctgcaaggaaggaatgatataccaccagtctatgtgttttccatatgtgcatgtacaatgagttattgtgtgttaaattgga

SEQ ID NO: 32853 - DNA, 120 bp, synthetic construct
  source 1..120: mol_type = other DNA
gttgggcacaggagggaagtgcaagctgccacttgatggagagctgcgcaaggctggtgttgtgcctctctgaggagggaaccctggatgctggctgaaaagaatcctgcttatacaaca

SEQ ID NO: 32854 - DNA, 120 bp, synthetic construct
  source 1..120: mol_type = other DNA
taaatgatttctgtttctctgtgtgtatttgtgtttgtgttgtgtccattttctcttgcagcttgaactcagtgaaaatagaatctttggaggtctggacatgttagctgaaaaacttcc

SEQ ID NO: 32855 - DNA, 120 bp, synthetic construct
  source 1..120: mol_type = other DNA
tggattacagttgcctagagttttgcatggaaacgccaagatcctcctcagtcttacatattgggataagatatgaaaagctgagtttcagtgccacttgggttgtagacttgatgtgtg

SEQ ID NO: 32856 - DNA, 120 bp, synthetic construct
  source 1..120: mol_type = other DNA
ttaatttgaacctggggtgtttgcagttggtttttgattatgaataatgctgtgataaacatctctgagttttccttttgcaagttgcccatccagtggagggaatgagctccctgctgc

SEQ ID NO: 32857 - DNA, 120 bp, synthetic construct
  source 1..120: mol_type = other DNA
ttgatttggaaatgaagaacatcacatgtagtttggggcacatcctcgtcagggtcacatgtgcacagcccacaggtggtcctggccctccctgggtgggtcttcactctggccaagatg

SEQ ID NO: 32858 - DNA, 120 bp, synthetic construct
  source 1..120: mol_type = other DNA
cccaggaggtcccagctgacgtgggacaagaaactattcacatggtcacccgatttttgttgaaggcacattattgagtggacgtttctgcttgctgacctcaggcaagcaaatcccttc

SEQ ID NO: 32859 - DNA, 120 bp, synthetic construct
  source 1..120: mol_type = other DNA
tagaaatgggaactgggcccgcatatgccaatgagcaaggcaaaatgggtgcacgttgcaaacaaaaagtaccaagaaatgctgggcagaaccaaagatatcaatgtaattaataaagta

SEQ ID NO: 32860 - DNA, 120 bp, synthetic construct
  source 1..120: mol_type = other DNA
gatgtcttcaggctaaactacccttagcacttccaatcatccccatacaggatagttttacagcctgcttatctacgagtcatttcacaaacagcctttggaggacagattttttgggca

SEQ ID NO: 32861 - DNA, 120 bp, synthetic construct
  source 1..120: mol_type = other DNA
ccaagtattttggataaggggtactcaacctgtactgttatttcccttttacagataaggaatttgaggctcagaaataataacttgcccaatttcaggtagtctaacttcagagcacgg

SEQ ID NO: 32862 - DNA, 120 bp, synthetic construct
  source 1..120: mol_type = other DNA
aatggtgtcttagtctgcttgggcttctatcacaaaataccacaaactggacagattagaaacaacagaaacttatttcccaccgttctggaggccagaaagtttgagatcaaggcgcca

SEQ ID NO: 32863 - DNA, 120 bp, synthetic construct
  source 1..120: mol_type = other DNA
ttaatggtcaagggtctggcttgagccaggtgtctgacttcaagtatcccacttactagctgaaggaccttgggcaaacttttagcttcagtttcctcccccataaacgaggatgataat

SEQ ID NO: 32864 - DNA, 120 bp, synthetic construct
  source 1..120: mol_type = other DNA
atctctaatttaatgacatgttctgcatcttaccctgcagcaatgacaaaagatgcctccatgcaaaggaaaaaaaaaggtctgctgcatctctctctctctctctctctctctctctct

SEQ ID NO: 32865 - DNA, 120 bp, synthetic construct
  source 1..120: mol_type = other DNA
acaatccttgcaaagagaaggttcatcatggaggagacttcccttatgagatattaaagtataatataaacgtaaggtgacttaaataccgggacactgacccagaaagcatcagacata

SEQ ID NO: 32866 - DNA, 120 bp, synthetic construct
  source 1..120: mol_type = other DNA
ataaagccatggagtacttgcaggactttctaagcatgacaccaaaagcagaaaccacaaagatataaatccagctatgtgaagatgtttaaaacccctacattgggccagatgcgatgg

SEQ ID NO: 32867 - DNA, 120 bp, synthetic construct
  source 1..120: mol_type = other DNA
tggcaaacactgggcagcagcagggaccctggtctagaagaaaaaagccaatgtttattcagcagctgctgtgtaccagacactgtgcaaagtgattttgttttgttttgttttgttttg

SEQ ID NO: 32868 - DNA, 120 bp, synthetic construct
  source 1..120: mol_type = other DNA
gggagccgctgggcttgtacaccgcagcccttccgggacagcagctgtgactcccccccagtgcagatttcgggacagctctctagaaactcgctctaaagacggaaccgccacagcact

SEQ ID NO: 32869 - DNA, 120 bp, synthetic construct
  source 1..120: mol_type = other DNA
ggttacctggttacccctgcttttgcatcagataaagccatcagctacattgcaaggaaaactaaatatcaaacttagcggggcaaaatagttaaaaacaaaaatggtgggagaggggag

SEQ ID NO: 32870 - DNA, 120 bp, synthetic construct
  source 1..120: mol_type = other DNA
tctacccacaaaaaaaaaacaccaatgggagaaaatggagaggtcagggatgaattccctgactatactttggttttatagttttgactttggaaccatggaaatgtttaacattaaaac

SEQ ID NO: 32871 - DNA, 120 bp, synthetic construct
  source 1..120: mol_type = other DNA
gtcatgtgagaaccaacctgcatttataaagaaacactagaagaattataagatttctggacagagtgagagcctgtctctaaaaaaaccaaacaaccgctctcgctctcgctctccctc

SEQ ID NO: 32872 - DNA, 120 bp, synthetic construct
  source 1..120: mol_type = other DNA
accaaaaaaaagaaaaaagaaaagaagcatttatatgtactgtatatatatttgtaagtgcctgctctacttactgtgcaaatccatttcttagaatactctacaaaactactttcagac

SEQ ID NO: 32873 - DNA, 120 bp, synthetic construct
  source 1..120: mol_type = other DNA
aagcaggtctttccagcttcaaagtcactctaccttctagtactctcagttaccccagaaatccagaccatagaactacttccataattgatcaactctccctgaaagggaaatacattg

SEQ ID NO: 32874 - DNA, 120 bp, synthetic construct
  source 1..120: mol_type = other DNA
gaatggaataactgtgattattagtattggtaccccctgtacaaatccagtttattcttgctcacctgcagaggggtacacagatgacaactccattcaagatacagtgaagacagccaa

SEQ ID NO: 32875 - DNA, 120 bp, synthetic construct
  source 1..120: mol_type = other DNA
catgtttctagtaatttttatgtaattgtctgctttcccattatactataagcttgtaaactccttgaaggtaggaacaactttttttttttttttttttttgtggttcctattatagct

SEQ ID NO: 32876 - DNA, 120 bp, synthetic construct
  source 1..120: mol_type = other DNA
ttgagactctttgtgaagacaggcactgtttgtaactaagtagtcatgccagaacaacaggcatagacaagaactgtccaggcatacaagaaatttggtcaccttaagacagcaaaatgg

SEQ ID NO: 32877 - DNA, 120 bp, synthetic construct
  source 1..120: mol_type = other DNA
tgccatacaaggatttacccataaactcctgtttcccagaatttcttaacccaattgcaaaaacttcctgtgcagctgaacacgaagcgggagcatgcagtgaaaataactccaaatgaa

SEQ ID NO: 32878 - DNA, 120 bp, synthetic construct
  source 1..120: mol_type = other DNA
ccatccaaactcttttgttttcagtcctgcctttcaaaccaaaacttctaggcataaaacaggcactcaaaatagctctttgaatggaaaattctaatcatgcttttgacgttgtcatca

SEQ ID NO: 32879 - DNA, 120 bp, synthetic construct
  source 1..120: mol_type = other DNA
ccagaggagaggatgaaagatggcatcttgaattggttcttgattgtgatatttttggtagataagacaaaagtatatgataagaaagttttaaattcttaacttcatacttatgataaa

SEQ ID NO: 32880 - DNA, 120 bp, synthetic construct
  source 1..120: mol_type = other DNA
gctagtgttcattggtcaaagaattctcatttttaaattgctgactcaactgagcagcctgagttgctttcattattactagaaatgtggctttgcaataaagacagggttgactatttt

SEQ ID NO: 32881 - DNA, 120 bp, synthetic construct
  source 1..120: mol_type = other DNA
agttcacaacagacctgaactctgttaagattcttggcttgccactggatacaccagtggttgaatcacactagcttctgatctgattagggatcaaaatatcaagttgaggctaaatca

SEQ ID NO: 32882 - DNA, 120 bp, synthetic construct
  source 1..120: mol_type = other DNA
agggctaatgttctgccattcagttgacatccgctctgcatataaaatgcaaatgccttagcttggcatacaaactctgtgtggtatgttatcaagttgactacttttccagaatcatct

SEQ ID NO: 32883 - DNA, 120 bp, synthetic construct
  source 1..120: mol_type = other DNA
agagacaataattaataacaaaggtgtcaataggaacaatgttgtggtcacaagcaggatgaactcattgcctgagatgtcagcacaggccagtttcatgacagctagaatttcacaggt

SEQ ID NO: 32884 - DNA, 120 bp, synthetic construct
  source 1..120: mol_type = other DNA
aattcatttaatatcatcacagttctaggaaaggggtattagtatccatattttacagatgaataaatcaaagcggatatgttaagtaaacttgaccaaaggtacatactatatagcaga

SEQ ID NO: 32885 - DNA, 120 bp, synthetic construct
  source 1..120: mol_type = other DNA
tgcagaattgacagctcctatgatccaggacccagctgccatgggtacataggcatccttactcatgatgatgggatatctcagagggttgcagatagccacatagcggtcaaaggccat

SEQ ID NO: 32886 - DNA, 120 bp, synthetic construct
  source 1..120: mol_type = other DNA
ggaccatgttttgacaaacactggcagagtgcattacgcatatcaaagtgccttcacagacatggtctcattttcattccaaacataaaacatgtgatacaaagctccaaaacccaggtc

SEQ ID NO: 32887 - DNA, 120 bp, synthetic construct
  source 1..120: mol_type = other DNA
taaattgtctttctccacttaggcagttggtacttatgagttgccaggtcatgcctctgacccaccatccctgtatgccttcatctgatttaagtcacctcctatttgtgaataaatttg

SEQ ID NO: 32888 - DNA, 120 bp, synthetic construct
  source 1..120: mol_type = other DNA
ttgtaattgtggtctgaaaatatttttgtacggtaacgaaattactggcattctcactgttccccctagaaatttttgttctaaaatagagaaccaaaggggtttttgttagtgtccagt

SEQ ID NO: 32889 - DNA, 120 bp, synthetic construct
  source 1..120: mol_type = other DNA
ataaaatcaaatttaaatgtttagaatcccagagcacagatcactctagtacccacatagctctgaattttaagtttgcatcacctagacatgattgcttgggcagatggaggcacacca

SEQ ID NO: 32890 - DNA, 120 bp, synthetic construct
  source 1..120: mol_type = other DNA
tctgccttctggactggatcatggccttacctctaaagacactgctccaaccatttcatgctacgggagcagaaagcgataaaacagaaaaatctgttctcaattgcatttataaggttt

SEQ ID NO: 32891 - DNA, 120 bp, synthetic construct
  source 1..120: mol_type = other DNA
tgacttaaacatgaaagctgtggaacaagatgaaccaatacctcaaaaacctcagtcagcattttattattgcagattgcttcttagtatattgggaatgaattcctgggacaaacggag

SEQ ID NO: 32892 - DNA, 120 bp, synthetic construct
  source 1..120: mol_type = other DNA
ctccaatgtctcctcgaactagcaaaagccgcatgtccatgaagctgcgtcgttcctctggctcagccaataaatcctaaggagacaagcagcccagcagtgatcagcagtagccacctt

SEQ ID NO: 32893 - DNA, 120 bp, synthetic construct
  source 1..120: mol_type = other DNA
tactgaacttgcaggtccaggttggtatacattccaccctctagaagtattttcttacagtagataagctgctcacattttgttttgaatgggcatctcctgaggaaatgtagcatgata

SEQ ID NO: 32894 - DNA, 120 bp, synthetic construct
  source 1..120: mol_type = other DNA
agatttgtgagggaggaaatagatgcttataagccataagactgggggaagtttattatgcagcattgttacatggagttattagacctaattttgacagataagaaaactgaaactttt

SEQ ID NO: 32895 - DNA, 120 bp, synthetic construct
  source 1..120: mol_type = other DNA
caggttcagttatagttgatgttgtctctatctctctgagcctagtaataataaaacactgttggttctgggatagtggaagaacttccttttcatttagcagttgtattcataggttgt

SEQ ID NO: 32896 - DNA, 120 bp, synthetic construct
  source 1..120: mol_type = other DNA
ctgttcatagtattggtgaggcttgtggtcaacagtaaggtattaatagtcagattttggagagtcagaagttatatgtggtgttttgattgcataggggttggcatccctaacccccat

SEQ ID NO: 32897 - DNA, 120 bp, synthetic construct
  source 1..120: mol_type = other DNA
aaaatgtggattattttgcaaattgagattaaaattatttggggtttagttacaatttaaaaaatgctttagcaaagtagcatttaatatttattgacgaaatcattagaaatgagctcc

SEQ ID NO: 32898 - DNA, 120 bp, synthetic construct
  source 1..120: mol_type = other DNA
taggtatgaagtgatatcgcattatagttttcttttgcatttctgtgatggctagagatttgagcgtcttttcgtgtgtttactggccactcacatgtgatcttttgaatagtgtctgtt

SEQ ID NO: 32899 - DNA, 120 bp, synthetic construct
  source 1..120: mol_type = other DNA
ccatatgagtaggaagttgttacaacactgtttgttgaaaagacagttctttccctcattgaatgatcttgccacctttgttgaaaatcagttggcttgacctatgtgggtctatttcta

SEQ ID NO: 32900 - DNA, 120 bp, synthetic construct
  source 1..120: mol_type = other DNA
gcaaccctgttggagatgaaccagacatgctgctgtaaactgtccccacatttggatagaatttaataaagtaaagtttaatggtttggtcccaagaggcaaacagaccatctggttagc

SEQ ID NO: 32901 - DNA, 120 bp, synthetic construct
  source 1..120: mol_type = other DNA
tgcatgcatgcatgtgtgttttctcccctagatgggtgagagtttaaggtggggatgacttagctagtagtcaaagataaattgaaaatgcagaaaggataactatcagaccatctcgca

SEQ ID NO: 32902 - DNA, 120 bp, synthetic construct
  source 1..120: mol_type = other DNA
acttgccctctctcttacagagccctcatgcacattcacatacacagcttctcaaatgatgtggagaaacacagttaagaattggggcaacttctctatttcttagcattatcagtgtac

SEQ ID NO: 32903 - DNA, 120 bp, synthetic construct
  source 1..120: mol_type = other DNA
gtagaggtagaggagctacattggccgcgtcccctgtccctctgccctcttgcccatctgcccaaacttttgtatttgatctctgttttgatgtcgaaccccaaagcactgtaattgggg

SEQ ID NO: 32904 - DNA, 120 bp, synthetic construct
  source 1..120: mol_type = other DNA
cagataaaggctgaggttgcttataaaatttccacccattcctcttgtctttaacattttggacaggactcctttcaaaaccacctgtgggtctagctgacaatgcatcaagtgtgtatg

SEQ ID NO: 32905 - DNA, 120 bp, synthetic construct
  source 1..120: mol_type = other DNA
agcatatatttctctctggggaaagcatctatgctcatcaaaattctaggaaaacaaactcttcttgattcttgagacctagaggcgaagtgggctccatagctgcatgttccaaactga

SEQ ID NO: 32906 - DNA, 120 bp, synthetic construct
  source 1..120: mol_type = other DNA
tcatctgtctatttaggagttggcagaccacgtatcgcctgaaggccaaatctgtgtgccaccttgcaaactaagagcggcttttaatctttttaagtggttacatttcaaatgcaaaga

SEQ ID NO: 32907 - DNA, 120 bp, synthetic construct
  source 1..120: mol_type = other DNA
caggtaatggagcatggtaagtgaaaccttgtctttatgacaactatttgacaagagctaaaagcaactagatgtgggggggggggggaagaattctggctcaaaattaaatggaaatca

SEQ ID NO: 32908 - DNA, 120 bp, synthetic construct
  source 1..120: mol_type = other DNA
ccctttgtgaaccacaatgtgaacatggagttagagaaacgggacaaacaaaacagtgctgatactgtggaaagtccaggcagtattcactatcagtacccaacagaaatcacatgctta

SEQ ID NO: 32909 - DNA, 120 bp, synthetic construct
  source 1..120: mol_type = other DNA
gtggatgacatgcacagactctctgggcctcagtttcccattcacatataagatggggaggcctttatccacttccctaagagggttgttgtgacaattcagagcagtgttagagtccaa

SEQ ID NO: 32910 - DNA, 120 bp, synthetic construct
  source 1..120: mol_type = other DNA
aaaagcccctggctttcattcacttctcccttgatcttcctgctctccctctctctttatattcacatctttggctcaaatattccctcctccagtggcacattcttttctttttttttc

SEQ ID NO: 32911 - DNA, 120 bp, synthetic construct
  source 1..120: mol_type = other DNA
agactttttgtggggggttgggggggggtgagtccaggacagcaagttcatcataaatgcaaatgggaaggctattgatatttttattcatagcatgaatgatgtaataaatgagtcacg

SEQ ID NO: 32912 - DNA, 120 bp, synthetic construct
  source 1..120: mol_type = other DNA
gggggcgggggggtaaggtatcgtattttgagttcaatctggtcgcaaactggattctgtccagatttttgttgggatttcagatgtttagccccaaacaaattgaaagttaaattgaaa

SEQ ID NO: 32913 - DNA, 120 bp, synthetic construct
  source 1..120: mol_type = other DNA
tgagtcctctttctcttgcaatagcccctgtttcttttgaggctcatgccattcatccattgacttcctcaatcttccctgcttcaccagttattaaagtccaaatctgtttttcttgta

SEQ ID NO: 32914 - DNA, 120 bp, synthetic construct
  source 1..120: mol_type = other DNA
atatgtattatgaatacctacgtggactcagatactagtaggaatacagcataattaatatgtattatgaatacctacgtggactcagatactagtaggaatacagcataattcatatgt

SEQ ID NO: 32915 - DNA, 120 bp, synthetic construct
  source 1..120: mol_type = other DNA
caagtgttctgtcaatgagatagaacaaaagattaggatatacagtattagaataattatatttgagtcatgcttattttcatcactgatctcttactgaacagaaaattgatggagttt

SEQ ID NO: 32916 - DNA, 120 bp, synthetic construct
  source 1..120: mol_type = other DNA
gctgtaagataaaagggaagtaaaaaggtacatagtgataagacatttaagatgggagtgctgacagaagttaatgctttctaaagtcttcaagttgttcaggaagaaggcagaaacatt

SEQ ID NO: 32917 - DNA, 120 bp, synthetic construct
  source 1..120: mol_type = other DNA
accttgcaaatacttaggcttcagcaacaagccaactctggaacgcttgaaaaagccaaatatatttcaaatcaaatctgacacaagaggggtgcaaaggagtggaggttgaagagagat

SEQ ID NO: 32918 - DNA, 120 bp, synthetic construct
  source 1..120: mol_type = other DNA
cgtgaatatggagtagcatcaatccacatggttgcagggtttttccctccagtgttgctctgctgtacaggtgtaagttcagaaaatagcagaaagctaaattcaaaggcaagacataaa

SEQ ID NO: 32919 - DNA, 120 bp, synthetic construct
  source 1..120: mol_type = other DNA
tcagcatgagagtataaatcccacatagattggaaaagaaagataccctttgactaaaagacttttggtgggggttggggggctttacagtctttggataaatgttaggatgtcaaggtg

SEQ ID NO: 32920 - DNA, 120 bp, synthetic construct
  source 1..120: mol_type = other DNA
aaggaacttaagctgtttaaggaaggaagacaaaacgtgaagaaagtagggatcattaaaagggggtaggatcaatagattaaaagtttcagggggaggagccaagatggccgaatagga

SEQ ID NO: 32921 - DNA, 120 bp, synthetic construct
  source 1..120: mol_type = other DNA
gaccttcaccaccccaaagatggtttttatactctatgtaatagaaagttttaaatgtaaaactaggacactcagtgggagtcactttaaaggcaaggaggagctctccctctccctctc

SEQ ID NO: 32922 - DNA, 120 bp, synthetic construct
  source 1..120: mol_type = other DNA
agagcttggaaataaaatttctgcttaattaatcatttttctatgacagcaatattttgtgtctgattttgtattaaggactcaaggatttctgtttgcctgtgagattgagtgctggaa

SEQ ID NO: 32923 - DNA, 120 bp, synthetic construct
  source 1..120: mol_type = other DNA
agctgttagttggttggtggaaatatatttaatgtgatcattttgttgcaaaagaggttgaaatttacaagattgccggagtggtgtaaccatatttctcaagtggtcttgagaataacc

SEQ ID NO: 32924 - DNA, 120 bp, synthetic construct
  source 1..120: mol_type = other DNA
tacattgaaaaaaatggagaaattgggaagaatcttagtgactaagggagagggagcagctagctacaaaaggatgcaagaaaaggaattaagaaataggattgtgtcccctccccaccc

SEQ ID NO: 32925 - DNA, 120 bp, synthetic construct
  source 1..120: mol_type = other DNA
aaaagacattctcagatcatcatggactcagaaagtatcccattccctccctgaggagcaggcaaatcaccacacagagagagaaatagagatagagaaataatagagaacgtggtttga

SEQ ID NO: 32926 - DNA, 120 bp, synthetic construct
  source 1..120: mol_type = other DNA
aaaatgtgtcaaggctaccataaagatactgaaggccagttttctgccctacagagtctgtctgcaagctgagctcctcatctattgacattactatacttagtgctctattatccacac

SEQ ID NO: 32927 - DNA, 120 bp, synthetic construct
  source 1..120: mol_type = other DNA
ttagggcacagacgtggaaatggaatccaagcttttggaattcaaaaggtagtaaaggttaaacatagaatgcatagcatgtgagcagcacacacatgagggtagaacaagacatgcaag

SEQ ID NO: 32928 - DNA, 120 bp, synthetic construct
  source 1..120: mol_type = other DNA
gcaaccccacaccgtttgttgtctgtggttgcttttgtgctgcattggcagaattgagtagttacgatagagatcttgcaaagcagaaaatatttactatctgacttactccaggaaaag

SEQ ID NO: 32929 - DNA, 120 bp, synthetic construct
  source 1..120: mol_type = other DNA
tccagtgcagccatgtggtggaagatttatggacagaaaaaggagagtgatgtacagaaaacagaagtgtgaggtatggaaacagttgattggttacaactccgtgtttgccttatttga

SEQ ID NO: 32930 - DNA, 120 bp, synthetic construct
  source 1..120: mol_type = other DNA
ataatggtatgttcccagtaatggggaagtagactgattctggggaccaccagtggtctgttcattgcttgaataattttgctattcctaatgatgccattactcctgctttatcggtgt

SEQ ID NO: 32931 - DNA, 120 bp, synthetic construct
  source 1..120: mol_type = other DNA
gctggctcttgaattccttcctgtgtgaagccatgaacccatgtggcctcccaaactgaactccaattttgaggtttgccctgtagaaaggaatatagtttgaattgaacaaatattatg

SEQ ID NO: 32932 - DNA, 120 bp, synthetic construct
  source 1..120: mol_type = other DNA
ccttttcctgtcttctgcgttggactcttttcagtgctaatacacttggtataactagctccaaaaagaacaaagaagggatgccagggagaaggcttcacagaattcctagttatcttc

SEQ ID NO: 32933 - DNA, 120 bp, synthetic construct
  source 1..120: mol_type = other DNA
atattccaggtataggagacaacatacgcaaagtccctggggcaggaaagagtttggtacatttgaggaccaaatagaaaactggtatggccttggtttatcatggctgacatacaaagt

SEQ ID NO: 32934 - DNA, 120 bp, synthetic construct
  source 1..120: mol_type = other DNA
cagaactcctcctccttcctcagaactcctcccacctcctcagaattcctccttcctcctcagaactcctttcacttcctcagaattcctcctggctcctcaggattcctcttcagagct

SEQ ID NO: 32935 - DNA, 120 bp, synthetic construct
  source 1..120: mol_type = other DNA
ctgaccaccaaagaaccctcaatcattaaatgcagcaatcccctcaaactcctgacccccttagacttctagtcacagaatcatagaggatcttcaatcattaattcctactaatcacct

SEQ ID NO: 32936 - DNA, 120 bp, synthetic construct
  source 1..120: mol_type = other DNA
agaggttcttaggaacaagagaaccatcatcagctctagcttgttaacagagaataaagagggatgatggcggtggcagttaattaccttgtggaatccttactccatttctgaaaactc

SEQ ID NO: 32937 - DNA, 120 bp, synthetic construct
  source 1..120: mol_type = other DNA
attcatgctatctcagtggagaggctttctttgagcatttgacagctgttgagggtacaagcactccctaaagacagtagacaagataatggcttttcaagttttaccacagaaatctcc

SEQ ID NO: 32938 - DNA, 120 bp, synthetic construct
  source 1..120: mol_type = other DNA
ttggttagtatttgtaatggtggtgagaactggtaggcatttgggtcattagggatccaccctcatgagtaaattaatgtccactctcaggagtgagtgagttattgctctcataggaat

SEQ ID NO: 32939 - DNA, 120 bp, synthetic construct
  source 1..120: mol_type = other DNA
catcactgcctcctacaacttccacatcttccttctgtttcttacgggtctgaaagtataaaagttttaggattaaggcaacattctttcaattagcaaatgtttatttagaacacctac

SEQ ID NO: 32940 - DNA, 120 bp, synthetic construct
  source 1..120: mol_type = other DNA
cactttgtggccaatttcagcaagcaagcatagaatcctaagttaaggtagacatcgatcctcagtgttcatattcccacgtttccatatttctgaaatcaggatgccccttacagtaga

SEQ ID NO: 32941 - DNA, 120 bp, synthetic construct
  source 1..120: mol_type = other DNA
gccacttttaaatgcgattaaccctaacagttttttgcacagtagttaacctcatcactactttgggtgggctgtacagggattctttccttcatcttacagatgagtaaacaggcacag

SEQ ID NO: 32942 - DNA, 120 bp, synthetic construct
  source 1..120: mol_type = other DNA
gaactgctcttgcggctgagctagcatctgcttccccatctggtctcaacttttttcttaattacccactgaattggctctaacaaaatgctgacaacttgaacgagacattagctgata

SEQ ID NO: 32943 - DNA, 120 bp, synthetic construct
  source 1..120: mol_type = other DNA
ctttggggtggtcgcttaacctctctgtgcttccctttcctcatcagattaaagggagggtatttatatttaccttgctgtgttttaggggacatatcagaaataggcaaaggttctagt

SEQ ID NO: 32944 - DNA, 120 bp, synthetic construct
  source 1..120: mol_type = other DNA
ggtggcgagcactaagccaggagctctgggtttgaggctcagctcacttggcctccagcctgttttcttgccaggaaaatgggggtgattgtctctgccttgccattctgttgtgaagat

SEQ ID NO: 32945 - DNA, 120 bp, synthetic construct
  source 1..120: mol_type = other DNA
tagggtaggaaagcactttataaaatgcaccagaaatatagaagattgtctttataaatttagaggagaaagtgactagaggctggtggtggctggtggtgatggtgagtggatggtgtg

SEQ ID NO: 32946 - DNA, 120 bp, synthetic construct
  source 1..120: mol_type = other DNA
ataaatacctcccactctgtggcctggaaacagttgagtatttaaaaacagaattttatgagccatcggggcctttccagaaatgcatctatatggatggggcccagcagaaatattcat

SEQ ID NO: 32947 - DNA, 120 bp, synthetic construct
  source 1..120: mol_type = other DNA
ctctgcctttttctcttctgggtccccagggtgaaattctcaccagcccaggggactctggaggcaccccctgcctccaaacacagaagcctcactgcagagtccttcacggaggacggt

SEQ ID NO: 32948 - DNA, 120 bp, synthetic construct
  source 1..120: mol_type = other DNA
gaaaaagaagaacagagacctcaaatagtttccccaaggtcacacagcttataattagaactagaattggaactccaggctggcttcagatctgcctctctctcatgccctctttaagat

SEQ ID NO: 32949 - DNA, 120 bp, synthetic construct
  source 1..120: mol_type = other DNA
gagcatttcgctcacttgctgatcctcagggacaccaagacctacatgcttgcttttgacgtgaacgatgagaagaactgggggctgtctgtctatggtaggcatgcttagcagccccaa

SEQ ID NO: 32950 - DNA, 120 bp, synthetic construct
  source 1..120: mol_type = other DNA
tccttccatttgccatctgagatgaccaccagtggtgtgaactacctcctgcccccatctgcagtcccaggatcctgggacagggcttatgaacacaaccactgtagtcagctcacctga

SEQ ID NO: 32951 - DNA, 120 bp, synthetic construct
  source 1..120: mol_type = other DNA
agaaggggcatctgaaccaatctagaaagatgaggagcataatacaacctgctgttctgtgtacaatgtgtgatgatcaaatcggggtcatttccaccacctcaaacatttaccatttct

SEQ ID NO: 32952 - DNA, 120 bp, synthetic construct
  source 1..120: mol_type = other DNA
ggggctcatgattgacagcctcttgttacgtgagggaagcagcactcctcccgtggcagaaaagttgggcctgagttgttccatctattccgtatgtgcagctgcgtacaccatacaggg

SEQ ID NO: 32953 - DNA, 120 bp, synthetic construct
  source 1..120: mol_type = other DNA
ttaatttttttatagcagaagttgaaaagaagcaaacagatcatccttgaaacacgagtacaatcactggtctttttgagcaaagggcttgggtgtatctcagggctccaggtacaccct

SEQ ID NO: 32954 - DNA, 120 bp, synthetic construct
  source 1..120: mol_type = other DNA
cctgctccttttcactcgtttagccaaccatccattcattcatcgttgaacaagatattcaatgagttttctatatgccagacagcctcaggaatctgttcaaattaggacacagagcag

SEQ ID NO: 32955 - DNA, 120 bp, synthetic construct
  source 1..120: mol_type = other DNA
ctcctaacctttgaaacccctactttggcatatgtctgtttttaagcaaagacaagagttctacagcaaagtgagaacttttcctctctcagtgatcccagaaaatatgcatgtcgtggt

SEQ ID NO: 32956 - DNA, 120 bp, synthetic construct
  source 1..120: mol_type = other DNA
ttagcttatggatgtttccctaagtaggggtgggggggtaggggggaaggaaaactttggggaaaagaagggatatcatcttagctaatacgatttttcatggaatgatgcaagttaatt

SEQ ID NO: 32957 - DNA, 120 bp, synthetic construct
  source 1..120: mol_type = other DNA
acggataaacaatgaatacacaaagagattacagaggttttctcaagcttccacatctggtaagatgtagaaccaatacatgaacagagggcccagattctcatctggattccccattgc

SEQ ID NO: 32958 - DNA, 120 bp, synthetic construct
  source 1..120: mol_type = other DNA
attctaagggctgaagagtaacccattcattacataagaaaaagaaaacttacccaagagcaatcttgtgcactgtctctcttctgttctgtagaggactgcagtgtgtctcaccagctt

SEQ ID NO: 32959 - DNA, 120 bp, synthetic construct
  source 1..120: mol_type = other DNA
aataagccttaatcagccagtcagaacccttgacctctaacatttatgcagcattcagtgagttacttaatctttctaagtttcagttgccactttatacagagaagcacaggaattaga

SEQ ID NO: 32960 - DNA, 120 bp, synthetic construct
  source 1..120: mol_type = other DNA
aggaaggaaggaagagagccagggaagaaaatgaagaatggagggaggaaaggaggaataaaatgaaataaggaaagaaaagttcacaatgggaagaaaaagccagaacagagcagcaca

SEQ ID NO: 32961 - DNA, 120 bp, synthetic construct
  source 1..120: mol_type = other DNA
taggggcatagtctgtgttctcattttctcttccactctctgtcgatggaaacacttatcatctgtgttgtgtttgtccatgttcttgtcttctggcctactaggctataatctccaaaa

SEQ ID NO: 32962 - DNA, 120 bp, synthetic construct
  source 1..120: mol_type = other DNA
acttgagtctgtagaggggcactcttattccaatcagtagaataaacgtggcgtgagctttacagtgttcctctgggtaaggcaagtaatgcttaagtagttgtacttttaatctagtgc

SEQ ID NO: 32963 - DNA, 120 bp, synthetic construct
  source 1..120: mol_type = other DNA
ttacaagcagggcaacagtgaggaagaaggctgtgtagcaaaatatacacttagactccagacctatggctttatcttgtcaatatcattaatattcacgggacccaagctaaggctgaa

SEQ ID NO: 32964 - DNA, 120 bp, synthetic construct
  source 1..120: mol_type = other DNA
acctaagtcacacatctagagaatggaacagatgacacatagcttcttatgtatgttgccatttgttgaaacttacacctgtcgggaggagaatgcatcaatgactgacttgtgctgagt

SEQ ID NO: 32965 - DNA, 120 bp, synthetic construct
  source 1..120: mol_type = other DNA
ccattcagggagaggcaggtggtatgaccaacacataaaaactttcacagtcaggccactgaagtttgaaattgtttgttcccaagacacaaacgaatgcattctgactgatacattcat

SEQ ID NO: 32966 - DNA, 120 bp, synthetic construct
  source 1..120: mol_type = other DNA
agtaagtactattactattcctattttacaggtgagacattgggaaagagatgttgagtaacttgcctgggtcacatggttagtgaatggcagacctgggatttgatcccactgcattct

SEQ ID NO: 32967 - DNA, 120 bp, synthetic construct
  source 1..120: mol_type = other DNA
tgtatttaaatctagaggctattggtggaagagtgccttatttttcaaactggctaacacacaccttggatgacccgctgtttagaattatgccctcaagcctgtgtctaatggagaaca

SEQ ID NO: 32968 - DNA, 120 bp, synthetic construct
  source 1..120: mol_type = other DNA
aagtgatgcatcctggtttatctttgggatgggaacagtggtttcctagaactgactccagctggctcacaagatccaattgttaaatatttagggatgttgcatggcagttgttaaatg

SEQ ID NO: 32969 - DNA, 120 bp, synthetic construct
  source 1..120: mol_type = other DNA
cacatccttgaatttatcttgtttggtattccagctccttgggaggcctctaaattcatatctaatacagacttctctagtctcagctggtttgagacactgtggatcgtaatgctgaga

SEQ ID NO: 32970 - DNA, 120 bp, synthetic construct
  source 1..120: mol_type = other DNA
aagtggtcagttcaaagtaatcacaaccagctttaagagctggaagagggagtagattactcatttgggttgggttgaggaagataactgatgtagaaactgattaggggctaggaaaac

SEQ ID NO: 32971 - DNA, 120 bp, synthetic construct
  source 1..120: mol_type = other DNA
cttaaataatgtcatttcattctcacaaacatctctataagacaggtactgctctcccccatagaggaaatctggcccttcaaaggataaatgacccacaaagctgggatctgaactcca

SEQ ID NO: 32972 - DNA, 120 bp, synthetic construct
  source 1..120: mol_type = other DNA
aaataccttcaacggtccccaccaacagcagtggactactaatttctttggccaagaaatcctctctccaaaagatatgtcactgaaacctaagcaaacaaaaccaatgaagcagagctg

SEQ ID NO: 32973 - DNA, 120 bp, synthetic construct
  source 1..120: mol_type = other DNA
tcaggaacagctgaacacatccctctctgggctgtgttatcaaataacacaatataattaccaaattatcccatatcaactgccccttggccatggcaagtaattccatctctctgagcc

SEQ ID NO: 32974 - DNA, 120 bp, synthetic construct
  source 1..120: mol_type = other DNA
agagtgctgtgtcatgacatctgcaattaactcaaatgagtagagacaggaaaaaaagagataaagcaaatacagaaaacattaactggtgaatctagatgaatatacatggttgttcac

SEQ ID NO: 32975 - DNA, 120 bp, synthetic construct
  source 1..120: mol_type = other DNA
caatgctgagcataacattcctgcacacatcttgaacacatggggactatgctcagaagcagaactgtgggtcagagtatgtccatccttcattaagttcagtagatattgtcaaattac

SEQ ID NO: 32976 - DNA, 120 bp, synthetic construct
  source 1..120: mol_type = other DNA
gagatgctgaaaccaggagtgactggatcagggcagcttctgaaattcccccagctacacgtggccaagaatggtcactgtgtactctgtacttttatgtgttactaaagatgttgctgg

SEQ ID NO: 32977 - DNA, 120 bp, synthetic construct
  source 1..120: mol_type = other DNA
aactcagcagccacactcctggttttctttgacatggtgtctgagtttctgcccgtgccagtggcctggaaccctgtggcttactgagagccactttcctgctgtcttgctgctgctgaa

SEQ ID NO: 32978 - DNA, 120 bp, synthetic construct
  source 1..120: mol_type = other DNA
tgtctggaacgttttgctttgctgcagataatgttcacaatgaacctcatttgtgtgtgtgtgtctgtgtgagctatgtttgtgtgtgtttgtgtagctgtgtttgtgtatgtgagtgtg

SEQ ID NO: 32979 - DNA, 120 bp, synthetic construct
  source 1..120: mol_type = other DNA
tcattgtatctgtgtgtgcccgtttggttgtgtgtgtttgtgtgtgtttttgagtgtgtgtgctccgccatctacaggttctgttatctctaactgagtaagcaggagccgttaaattct

SEQ ID NO: 32980 - DNA, 120 bp, synthetic construct
  source 1..120: mol_type = other DNA
accaaaacaatacagaggcaataaaatagactcagaaagcatatgccttggaaatagctctaggttttaaaccttacttctcaagcaagttgctaaatttttcaaagcctcagtttcctc

SEQ ID NO: 32981 - DNA, 120 bp, synthetic construct
  source 1..120: mol_type = other DNA
aagacgactgttgaacgcagtcaatagagtgatttttttttctgctctgctcacagaatgaaaggttcatcctccctagctcatgacatgctatcatcattagtttgcacaagtctccct

SEQ ID NO: 32982 - DNA, 120 bp, synthetic construct
  source 1..120: mol_type = other DNA
gctgaaagctctaactcgatatccctatcaggtttagtatctgttgcatcttctgtataatcactctgtaactaagaaaaatactgattttgctctccctctccctctccctctccccat

SEQ ID NO: 32983 - DNA, 120 bp, synthetic construct
  source 1..120: mol_type = other DNA
gaaggagcataggacaagtatacaaatgactattcagaaacagagtaattgctgtaagagtggtatcaatgtggtttgtaagttggtacaacttttctggaggacaaattggcagggcca

SEQ ID NO: 32984 - DNA, 120 bp, synthetic construct
  source 1..120: mol_type = other DNA
cctagcactaagcggttggtggcagaacttcctttatttttctgttaacatagtcccttttgtttttttatgtgtgcagttaaaagaaatgtgccgtcgggaactcgacaaggcagaatc

SEQ ID NO: 32985 - DNA, 120 bp, synthetic construct
  source 1..120: mol_type = other DNA
agtcgacattacatggctttaaatttggcatggccatctctgtacactcccagtgcccgagagggatgggttgagagctaagctgagaaagtctatctctgaatttcattgctgataaaa

SEQ ID NO: 32986 - DNA, 120 bp, synthetic construct
  source 1..120: mol_type = other DNA
acactgcacttcctgcccaccctttgagtttccaggacaagacagggaagggaagcaggcacacactccacctcctgcccaccctttgagtttccaggacaagacagggaagggagcagg

SEQ ID NO: 32987 - DNA, 120 bp, synthetic construct
  source 1..120: mol_type = other DNA
atgatagaagctggctgcataaaagacaagtctttacagagtcttgtcaagccctcaggtctgcgcacgtctgatctaaccaaagtttttcctgtggagtggccagtctgatctcagaca

SEQ ID NO: 32988 - DNA, 120 bp, synthetic construct
  source 1..120: mol_type = other DNA
acacacctgactagtgtggacaaagccagacacaaaattacactcacagacctgaccatcccgagatacatcgaggcctccagacttccgtgtacacactatctcacaaatacacactca

SEQ ID NO: 32989 - DNA, 120 bp, synthetic construct
  source 1..120: mol_type = other DNA
aagacaaagaactatgtcttccatcaaaagtacactgaatttttaatgaggttgccacaggaacagcaaaactggcacactcacgtctatggctccccaactcacaaaactaacttgctt

SEQ ID NO: 32990 - DNA, 120 bp, synthetic construct
  source 1..120: mol_type = other DNA
taagaagcagtttagggaaagctcttggagggcttgactggagtagctgtcctggtccctaaacacagcccgagcattttgggggaaaggacagggaggactggaaggaagagaggtaag

SEQ ID NO: 32991 - DNA, 120 bp, synthetic construct
  source 1..120: mol_type = other DNA
cacagctggaaagagagctgtgggagtgggtgcatttccaggtcttttgagaaaatgggaatgaaaggtggccaagatcaaagaaccagaatcactagtagactccaagttctctgtttc

SEQ ID NO: 32992 - DNA, 120 bp, synthetic construct
  source 1..120: mol_type = other DNA
aattaacggccccttctgtgattcagcaacgcagttaagtacattggggttttttggttggtgtttcgttttttgtttttttagaaagagggtcttgctctttcacccaggtggaatgca

SEQ ID NO: 32993 - DNA, 120 bp, synthetic construct
  source 1..120: mol_type = other DNA
caaattactcatgttcccagatctcccggtccatccccagtcacacacaaactcttcacacaggctaacacttcagaaaccacaagcgtatgaaagttcatcgtttgcacatgccagcac

SEQ ID NO: 32994 - DNA, 120 bp, synthetic construct
  source 1..120: mol_type = other DNA
ctgtattccagaaaaaggagacccttcttggagtaggactggaatctgtcacttagcagccatataactgaatggcaaatattgctactaccattactagagggcttttctaaccaacag

SEQ ID NO: 32995 - DNA, 120 bp, synthetic construct
  source 1..120: mol_type = other DNA
aagggaacagggacgaaggaggaggatccaccctgagcgagaccggggaggagagggagggtccgcgccaacggggaacggggtgaagggccaccctaaggggccgcggggccgctgcgg

SEQ ID NO: 32996 - DNA, 120 bp, synthetic construct
  source 1..120: mol_type = other DNA
aacagagacccatccacaacagagacccatccacaacagagaaccctccacaacagagacccatccacaacaaagaaccattcacaacagagaaccacccacaacaaagaaccatccaca

SEQ ID NO: 32997 - DNA, 120 bp, synthetic construct
  source 1..120: mol_type = other DNA
cacaacagagaccctctataacagagaaccatccacaacagagaaccatccacaacagagaacctctacaacagagaaccatccggcctcaaacgtcaatagcgctgaggtggagaaact

SEQ ID NO: 32998 - DNA, 120 bp, synthetic construct
  source 1..120: mol_type = other DNA
tcatggaacattttaaacaaatacaagagatggtggtatcatgaacccagtgtacccatcactcagtttcaggagttagacccacatggccagctttctttcatctgttctcctatccac

SEQ ID NO: 32999 - DNA, 120 bp, synthetic construct
  source 1..120: mol_type = other DNA
ggttctctcttcctgcgaaaatctggagaaaagctgaggtgatcatcagtctcacctcttttgttacctttctctcagggatcacagtcctgaactgcatattttctaatgtccaaaagt

SEQ ID NO: 33000 - DNA, 120 bp, synthetic construct
  source 1..120: mol_type = other DNA
ggcaagggaaaacagattatcccccatcatttatccagctgagaaatctttcacacagaatttttcagtagggaacagcccctgcccttaccctcttctcaattaggatctcttctgata

SEQ ID NO: 33001 - DNA, 120 bp, synthetic construct
  source 1..120: mol_type = other DNA
aattttaatgcatttctcttaatcatccatagaccaaatagtcaaaaaccctaagataatagaaataagtaattaaggacattgacttaataagtatatattgaggtccataaccgatag

SEQ ID NO: 33002 - DNA, 120 bp, synthetic construct
  source 1..120: mol_type = other DNA
gagagaatttacattccaaaatgtaaaattttgattccaaaatactgtcatttctaattcactcagttgctggtggacaacagaacattccacgccatgaaactacacaattattgaggg

SEQ ID NO: 33003 - DNA, 120 bp, synthetic construct
  source 1..120: mol_type = other DNA
cattcacgatgttgtgcaaccatcactgatatctacttccaaaactggaactcttgtgcactgcaaactttttcaccatcccaaacagataatctgaacccattaagcaataacctccca

SEQ ID NO: 33004 - DNA, 120 bp, synthetic construct
  source 1..120: mol_type = other DNA
acccagaggattacaatttgattcagtaactcattaatgttggaaccattgtgtttgcaatccttctggccaatgagagcccttcaggctgtcatctgtgtctttttgacatgtcaccat

SEQ ID NO: 33005 - DNA, 120 bp, synthetic construct
  source 1..120: mol_type = other DNA
gactgcccaatgaataacattcatgattattgaccagtactggatcaatttagcctcaaagaccattgatcatgctgtattcttagagctgtattggccttttacttctccacagaggca

SEQ ID NO: 33006 - DNA, 120 bp, synthetic construct
  source 1..120: mol_type = other DNA
gggagcacattgaaactgggtccttccagcagtgtgtcaagaaagtcttagcctctgcacatcattgggatggtaatgataacaatagctaacacatgctgaacatttgttttagatgtg

SEQ ID NO: 33007 - DNA, 120 bp, synthetic construct
  source 1..120: mol_type = other DNA
aaaccaaccaacatttagaatttctcatggttctgtgggtcagtgggtgattatgctggtctgggtcaacctggctgcagccggatggcctgagatggccccactcccttgtctgtagtt

SEQ ID NO: 33008 - DNA, 120 bp, synthetic construct
  source 1..120: mol_type = other DNA
cccctagggatccactccaagagagggacaggtggaggtgttccgttctcttctgagaaaaacactttcgttgcacccaaatgtgtttcttagataaagtaactaaattctaatgtattt

SEQ ID NO: 33009 - DNA, 120 bp, synthetic construct
  source 1..120: mol_type = other DNA
tccactgtgcttcatgaggtcagggtaccgtccactgtgcttcatgaggtcagggtaccttccactgtgcttcatgaggtcagagtaccttccactgtgcttcatgaggtcagggtacca

SEQ ID NO: 33010 - DNA, 120 bp, synthetic construct
  source 1..120: mol_type = other DNA
gcacagaatggtaaagtcacgaaatttcagctggatgttgccttagagatgagcggctcaccccctcatcttacaaaacaattaaacgttaagcatttgctactgctttgtccaaagtat

SEQ ID NO: 33011 - DNA, 120 bp, synthetic construct
  source 1..120: mol_type = other DNA
ccgaatttgataaaaatcctcttgtacatccttggcgggcagagcagagcgccggccgtggagtttgggcattttcactcttaactccaaaagtctcctttttccccatgtgtgagtttt

SEQ ID NO: 33012 - DNA, 120 bp, synthetic construct
  source 1..120: mol_type = other DNA
gagtcccctatgagtaggaccctacaagccaggggcctaggtggaggatcccacaatctagtttgaacagggaccctaccagccagggccatcgagacaaaaagaaacccaaatcaaacc

SEQ ID NO: 33013 - DNA, 120 bp, synthetic construct
  source 1..120: mol_type = other DNA
ccctgccaatcccacccatgtcctgtctccagagtgaagtacctggagcctgtgggaacaaggggatgggtcaggagcagaggttgtgacatcacagttcacttgtgggcacagcaggga

SEQ ID NO: 33014 - DNA, 120 bp, synthetic construct
  source 1..120: mol_type = other DNA
ttctcctaccctattgccttgtcctcttctccccctctactttttacatttctagttttatcatattgtgtaatccattgtatagtcacatgtaatcaaatgtgccctgtgcatttccgc

SEQ ID NO: 33015 - DNA, 120 bp, synthetic construct
  source 1..120: mol_type = other DNA
ttcaaacaccaaaaggaccggtttacttgagccctagatctgtggtttctaattaattgaggctttcgcatgtaaagatagctttttatttaaagcaagtagagtgagccagggtccggg

SEQ ID NO: 33016 - DNA, 120 bp, synthetic construct
  source 1..120: mol_type = other DNA
tatctctcctttcttgggagagaggccagaggttggatgctgagtggtgtagtttgaaagaagttgaggagggagccggtaaacagtggagtgagtgatggccattccagtctgacatgt

SEQ ID NO: 33017 - DNA, 120 bp, synthetic construct
  source 1..120: mol_type = other DNA
atctggatcaagatgtaaaacataccagcaccccagaaggctacctcatgccccctccaagtcatcaactatgtacaaatgtaaccatgattctatcaccataggtagttttgtctgttt

SEQ ID NO: 33018 - DNA, 120 bp, synthetic construct
  source 1..120: mol_type = other DNA
acttgtcttcacaatgggaagctagaaggagggaggatgaaaaattgatattcagggatgaaattgcatcactgagtgtcagccagacgtggtgcttatggcaacagaagagacagaaat

SEQ ID NO: 33019 - DNA, 120 bp, synthetic construct
  source 1..120: mol_type = other DNA
ggcaaaacagctgttttatatccagaaaactttgtgagctgcgcctgagtccaggccttgctattcctgagatagaaaacggagtcagatgcagagctgtccaacgtccagacaggagat

SEQ ID NO: 33020 - DNA, 120 bp, synthetic construct
  source 1..120: mol_type = other DNA
tttcctgagcagcacaaaactgttttcatcaagaaagaagactaagggtggtattacatggtttcttataaccccagaagggaaattagaacagcctgtagagcagggttgccacaccat

SEQ ID NO: 33021 - DNA, 120 bp, synthetic construct
  source 1..120: mol_type = other DNA
caaaaaacaaaacaaaacaaaaaaaagaatctagtgagaggaatctaacataactgactccatcctgtttctgacctcacagtctaaccacccttgctcattcctgtccataggctaagc

SEQ ID NO: 33022 - DNA, 120 bp, synthetic construct
  source 1..120: mol_type = other DNA
agctcaacaaatcctcaaaatgacaccaagaggttggtgctgtcatcttcatttttcagagatgaggaaacagactgagaaatgtagaatgacttgctaaggtcacagagctcattcagc

SEQ ID NO: 33023 - DNA, 120 bp, synthetic construct
  source 1..120: mol_type = other DNA
aagtcttgtttaccttgtagtaaatgtgattatagtgatccttgtcagggtcctcatcagaaatcagccttctccaaaataggctgacagacttagggcagcagtgtaaactatgactgc

SEQ ID NO: 33024 - DNA, 120 bp, synthetic construct
  source 1..120: mol_type = other DNA
tcgtggggtccattgtggtccatatgaaagcaagtctcagcattaatcctgaagattaactgcccactttttctttcaggaggatgaaggagaagatgactaaatagaacactgatggat

SEQ ID NO: 33025 - DNA, 120 bp, synthetic construct
  source 1..120: mol_type = other DNA
tggggggtgggaaataataatcttttcaacaaatgaacaaatggtgctgagacaactaaatatccacatgtaaatgaatgaatttggggccaggcgtggcagcttatgcctgtaatccca

SEQ ID NO: 33026 - DNA, 120 bp, synthetic construct
  source 1..120: mol_type = other DNA
agtttcaattgtctcttcatttgtttaacagccgatcccttgccagcccataggctctgatgactaagacctagctcttttgttcaagcaagtgtttaccgaattcctagtgattgagtg

SEQ ID NO: 33027 - DNA, 120 bp, synthetic construct
  source 1..120: mol_type = other DNA
gacaataggaacagtcattgatctgtaaatcctggctcttaacagtgagtggccaaggacttgatcagcccatttcttggtccctcagtgctttaaaatttaagtagcactgcattttgt

SEQ ID NO: 33028 - DNA, 120 bp, synthetic construct
  source 1..120: mol_type = other DNA
gaagaggggtggtaatgagaccgaaggtgatcatggtgatgaactggagtatcggtggggatgacatgaaagacagattccagatatatttaggaggaagactcagtaggacttggtttc

SEQ ID NO: 33029 - DNA, 120 bp, synthetic construct
  source 1..120: mol_type = other DNA
tgggattatgggcatgagccactgcgcctgactctacaatgggttttattacttttataataaccaaatatcctagcaatatgatagcaaaagtagtgggtggaagccggaggaattctg

SEQ ID NO: 33030 - DNA, 120 bp, synthetic construct
  source 1..120: mol_type = other DNA
ttggaccatagtggccttgtggcatctgagcttcttgaagacccagctgctgccttgtcaccatggtttccccagtgcctggcagagtaggctcccattcgtgcttatgggttgaaggat

SEQ ID NO: 33031 - DNA, 120 bp, synthetic construct
  source 1..120: mol_type = other DNA
aaaagaagccaggagacctgcggaagggagggcttgaaggcagatggctgagccattttctgcctccgtgagggctgattgaagggcaatgaggcagctaatgcgaagaaagatagaaat

SEQ ID NO: 33032 - DNA, 120 bp, synthetic construct
  source 1..120: mol_type = other DNA
tggctctggccacaggcctcaccctgtttctcagcccaggttactacagcagctgggaaccagcataaggtggcggaaagagtccctgtgtttagcttccaaagcatggtttggagaagc

SEQ ID NO: 33033 - DNA, 120 bp, synthetic construct
  source 1..120: mol_type = other DNA
gcgtaagccaccacgccgggccttaatcaaagcattcttgaagaaaaacaaagctgaaggacatatcctaccaaatatccagactttataaaagctgcagtgattaagacaatgcagtgt

SEQ ID NO: 33034 - DNA, 120 bp, synthetic construct
  source 1..120: mol_type = other DNA
gggcttctgttggtcgtcattctgggacttgtttttgtccctccacacgtggtccttatttcctggatcctatttgtattggttggataatttggacataatgacagcaactgtcttttt

SEQ ID NO: 33035 - DNA, 120 bp, synthetic construct
  source 1..120: mol_type = other DNA
gctttgtttctgaaaagcaaccttttcctgcctgaaagatttagtaattgccttccagaggagttcaaggaattttctgaaatctcggtcttggttttccaggcatgatgttgcagcccc

SEQ ID NO: 33036 - DNA, 120 bp, synthetic construct
  source 1..120: mol_type = other DNA
agcactccatcacacggagcacttgctcacacggagcacttcctgacatggaatgtttgaaactgccgttgagaataatcatttttcctttttttcagtttacccagttgaggttggata

SEQ ID NO: 33037 - DNA, 120 bp, synthetic construct
  source 1..120: mol_type = other DNA
cacacacacctgcagagcgagactccgtcttacacacacacctgcagagcgagactccgtctcaaacacacacacacacacacacctgcagagcgagactccgtctcaaacacacacaca

SEQ ID NO: 33038 - DNA, 120 bp, synthetic construct
  source 1..120: mol_type = other DNA
aacacacacacacacacacacacgaattaaagactaaatgcaaacattaacgttatagagcccactcctttgctaactgttctgtcaggcagagtcagtgtgagcatcagcttgagattg

SEQ ID NO: 33039 - DNA, 120 bp, synthetic construct
  source 1..120: mol_type = other DNA
atgagtgaaacatcattctactcaagcattgatctggggcatttccatggaatttactatatgttagaggaagagaaggcacaaagagcccagaggaagttgattttggtagaggcagct

SEQ ID NO: 33040 - DNA, 120 bp, synthetic construct
  source 1..120: mol_type = other DNA
ttgatatgatttgctgatggagtggatatgaggagtgagaaaaaaggggaaactacgtaaggaagcctgcaggcttctggtttgagcaccaggtaatgactttgctatttattgagaaga

SEQ ID NO: 33041 - DNA, 120 bp, synthetic construct
  source 1..120: mol_type = other DNA
ggactcaaggattactactgtattcaatggactgtaatccattatgagtgttatttattttggtgttcaattgtcctgggtttggtgagtaggaggctcctttcaactggcttctgtgtc

SEQ ID NO: 33042 - DNA, 120 bp, synthetic construct
  source 1..120: mol_type = other DNA
aattgggaaacgtgcactcctgtgtacagacacatctatatctatttctacatccatacattaaaaacaatccattgatactgatacttccaatcgcagtccaacacactgagggttgac

SEQ ID NO: 33043 - DNA, 120 bp, synthetic construct
  source 1..120: mol_type = other DNA
aacccataacagcactttcggttaggcctcctctccatacttcttggttcttgactgcgttccaatttattacgggggttaaaaaatgaatagtgaataagtgagtgtgcccttctatga

SEQ ID NO: 33044 - DNA, 120 bp, synthetic construct
  source 1..120: mol_type = other DNA
ttgtttctggctctaagtccatctttcttcccattattttacaggactccctaatggaaacacttgaaaacattgtatttgtgaatctagagcaggagtctccaacccctgggccacaga

SEQ ID NO: 33045 - DNA, 120 bp, synthetic construct
  source 1..120: mol_type = other DNA
atttcagggtaacataatcataataaagaggttgagagcttttgggaaaagtttcccagtttcttggtggcaagggaggataagcccgttgtgcccatcatttatactaggccgctgcta

SEQ ID NO: 33046 - DNA, 120 bp, synthetic construct
  source 1..120: mol_type = other DNA
aggctgtcttcctctatgcttcctaactctgatgtttaatccatttccctttttctcatttactgtgggtataatgacaagctgcctccaatcccacctgcgatggggcaggcagtggat

SEQ ID NO: 33047 - DNA, 120 bp, synthetic construct
  source 1..120: mol_type = other DNA
acttctgggatgtgggacttgggataagtcccttgtgaccctgagccttggttttctcatctgaaactgggcatggcgctggacacaacctcgaaggacgtgtgtacaaataagacgaga

SEQ ID NO: 33048 - DNA, 120 bp, synthetic construct
  source 1..120: mol_type = other DNA
aggatgaagaggctgtacttggctcgtgtgatggtgacattcaatctctgcaaacttgccaggaatctaggcaataaaaaaagagttccttctttgtctagaatgacttaacatgcccat

SEQ ID NO: 33049 - DNA, 120 bp, synthetic construct
  source 1..120: mol_type = other DNA
agacacaggtggactgcaggcagcttttccgggactccttcactcctctagaagtcacagtgctttcttactctccgtcccaatacagggtaccgggcacagaagaattcctattaaaaa

SEQ ID NO: 33050 - DNA, 120 bp, synthetic construct
  source 1..120: mol_type = other DNA
gcatctggccagaaatttgtgtttttaacaagttcctcacatggctctgatgatctgagtttgggacttacatatctaaaccacccacaaatggctacaaagaaggaactgggtgtcttt

SEQ ID NO: 33051 - DNA, 120 bp, synthetic construct
  source 1..120: mol_type = other DNA
agtgcatgcatgtggtgtgtgtgagtgcatgtggtgtgagtgcatgtgtgtgtgagtgcatgtggtgcgtgtgaatgcatgtggtgtgagtgcatgtggtgtgtgtgagtgcatgcatgt

SEQ ID NO: 33052 - DNA, 120 bp, synthetic construct
  source 1..120: mol_type = other DNA
ctcagttatttacagagtggtcgctaagtgtcaagcaccgggatgaccacaccctacacgttcatgcttcatttaggacttctggaagtcctgtcagatagggattataatctgcctgtt

SEQ ID NO: 33053 - DNA, 120 bp, synthetic construct
  source 1..120: mol_type = other DNA
tctcattggctctgaaaccttgagtgactcactagatgtctctaagccttgattctgcacacctgaatggcttctctcccatccttcatttgctcatttgaccatttgcaaaatgtttat

SEQ ID NO: 33054 - DNA, 120 bp, synthetic construct
  source 1..120: mol_type = other DNA
cttttctccacatatggaatttcgactgaattttcccatcgttgctgcatctgtccacttcatcttgcctgtgtgggctaggtttcatcctaacagtgatcagcagaagaaaatgtttat

SEQ ID NO: 33055 - DNA, 120 bp, synthetic construct
  source 1..120: mol_type = other DNA
tctcgtctaaatgttgtcattacgccatggggtggggacggttattccctgtttaatgagtgatgggaaactgagactccgagaggccaagtaacttgctcaaagtcacacagcaaagaa

SEQ ID NO: 33056 - DNA, 120 bp, synthetic construct
  source 1..120: mol_type = other DNA
ctcacccttccaaagaggcctgacttggagacccccatacataaagcatatattagagtggccacccagctggctcaggacaaggagcgtcgagcccctgagctcctctgacccacgagg

SEQ ID NO: 33057 - DNA, 120 bp, synthetic construct
  source 1..120: mol_type = other DNA
cccaggtagttttcgtaaacaggtgacgagcatacaagtgtcattcactgagctggtgtcagtccaggtgctgggatttgagaacacacacctcatatatatatatatatatatatatat

SEQ ID NO: 33058 - DNA, 120 bp, synthetic construct
  source 1..120: mol_type = other DNA
gtggctgtgccattttccatcctcaccagcagtgcatgggagctgtagtttctgtgcatcctcatttggtagtgtcattatgccctcttattttagctgtactaatgggggcatagtgat

SEQ ID NO: 33059 - DNA, 120 bp, synthetic construct
  source 1..120: mol_type = other DNA
accgttgtgtctctttgctaagcatggagtattggtttggccagctttggtgcacagggggatgcattgttatgtgaatgtatgagtatcatgctttcatttggttaatgtgtggtttta

SEQ ID NO: 33060 - DNA, 120 bp, synthetic construct
  source 1..120: mol_type = other DNA
cactgttgggagagaccgcagggacagggtgacatgaaggccacagcacttgagatgggaaagctaaaaactcccatgacaaatcaggtctacattttagaaaaatccctgcacttcctt

SEQ ID NO: 33061 - DNA, 120 bp, synthetic construct
  source 1..120: mol_type = other DNA
caagcttccaccaggaggattcctagccaatgcccgcactgctcactataatggcagctgcttctggaattcattttcttcacaataagcacgtgttcacaacagacttgataagtgggt

SEQ ID NO: 33062 - DNA, 120 bp, synthetic construct
  source 1..120: mol_type = other DNA
gcaagtgatgccgccacaggtagactgctggtcatcggaacaaagaagccatccctaacactgctggaaatttcatcttataattctcttaagaggaacaatcaaaagaagaaggaatta

SEQ ID NO: 33063 - DNA, 120 bp, synthetic construct
  source 1..120: mol_type = other DNA
agctgtttgacatccgtcccatctggtcccgaaatgctgtcaaggccaacatcagcgtccacccagacaagctcaaggtcttgcttcccttcatagcctattacatggtaagtgtcagct

SEQ ID NO: 33064 - DNA, 120 bp, synthetic construct
  source 1..120: mol_type = other DNA
acttccacacccttgagtgggactgccttgtgctgctctgggattcgcacccagcttggactacccgctccacgggccccaggaaaagctcgtacagataaggtcagccacatgagtgga

SEQ ID NO: 33065 - DNA, 120 bp, synthetic construct
  source 1..120: mol_type = other DNA
aggggatgcccacgatgcctgcatgtgttgcttctggttcctttcctccagttccaaccgccgcactctcccacaccagtgtgacagggggcccatcaccctagacttcagagggctgct

SEQ ID NO: 33066 - DNA, 120 bp, synthetic construct
  source 1..120: mol_type = other DNA
catttgcatataattttagggagactcatagacctcagaccaagagcctttgtgctagatgaccgttcattcattcgttcattcattcagcaaacatttactgaaccgtagcactggggc

SEQ ID NO: 33067 - DNA, 120 bp, synthetic construct
  source 1..120: mol_type = other DNA
gacatcgactatatagcaggcaccaacaacatggacggccacatcttcgccagcatcgacatgcctgccatcaacaagggcaacaagaaagtcacggagtaagcagggggcacaggactc

SEQ ID NO: 33068 - DNA, 120 bp, synthetic construct
  source 1..120: mol_type = other DNA
gccgaccatgcagatgacattcagtacgttttcgggaagcccttcgccacccccacgggctaccggccccaagacaggacagtctctaaggccatgatcgcctactggaccaactttgcc

SEQ ID NO: 33069 - DNA, 120 bp, synthetic construct
  source 1..120: mol_type = other DNA
gacccccacgggtgactccgagaccgcccccgtgccgcccacgggtgactccggggccccccctgtgccccccacgggtgactctgaggctgcccctgtgccccccacagatgactccaa

SEQ ID NO: 33070 - DNA, 120 bp, synthetic construct
  source 1..120: mol_type = other DNA
tctggctgaccttggaggacaaagcctgctggtattcctggcatgtgtcacagggcctgccatgcagtcattcattcacccatagagtcattcattcctagggagtgtatattcttgatg

SEQ ID NO: 33071 - DNA, 120 bp, synthetic construct
  source 1..120: mol_type = other DNA
tctacctgtggaggctggtgcactggggttggcggtgggggagggtgggggtgggagtgggggaggggctcacaggcgctgtatttgccaggctcctccgtcttccgcatcaggattttc

SEQ ID NO: 33072 - DNA, 120 bp, synthetic construct
  source 1..120: mol_type = other DNA
cagggtgaaggacagggcagcggccaggccgagcgtgacacccaggaacagggtcttcatctccagagctctgtgctgccgacctcggcaggtcactgggcgtctgaacaaggctgtgct

SEQ ID NO: 33073 - DNA, 120 bp, synthetic construct
  source 1..120: mol_type = other DNA
gaatccatgcatttacggtcaactgatttttgacagaaatgccaagaaacacaatgtggaaacgacagtctgttcaataaatgatgttggggccaggtgcagtggctcatgcttataatc

SEQ ID NO: 33074 - DNA, 120 bp, synthetic construct
  source 1..120: mol_type = other DNA
tgcgtgtgattgtgtgtctgtgtgtgtctttctgtgtatgtgtgtgtaatggtgtgtttctgtggccggaagggcgtatctgcgattgcgtgtctgtgtatgtaatggtgtgtctctgtg

SEQ ID NO: 33075 - DNA, 120 bp, synthetic construct
  source 1..120: mol_type = other DNA
tcctcaagtgcacatggaacagtgtccaaggtcaatcatatgctggaccataaaacaattctgagaaattcgaaaggactgatatccacagagtttcttctctagccacaggggaatgaa

SEQ ID NO: 33076 - DNA, 120 bp, synthetic construct
  source 1..120: mol_type = other DNA
tggtgatggtgtgatgatggttaaggtggtgatggtaatgattttgatgatggtgatgattgtgtgatgatggtgatgatggtgtgatggtgattttggtaatgatggtggtgatggtga

SEQ ID NO: 33077 - DNA, 120 bp, synthetic construct
  source 1..120: mol_type = other DNA
cagggtagttttccctctggaagagctcaatggagcatacacagactgtgttctgtaccttcttgttgagtgcctggatgaagagaaggctggagggagggatagagcatcagcaccagt

SEQ ID NO: 33078 - DNA, 120 bp, synthetic construct
  source 1..120: mol_type = other DNA
gacacccaacatttgagagaaacaaagtcgtggttgtttgtggtaccccagaaaatgttgcctctcatggagggaaaagaaagtgtcagaaggaaggatatgaaaatgcccaggacggag

SEQ ID NO: 33079 - DNA, 120 bp, synthetic construct
  source 1..120: mol_type = other DNA
tagatgggtggatgagtggatgggtgggtaggtgagtagatggatggatgggtggatgggtgtgtggttgcatgggtgggtgtatgggcagatgggtgagtgcatgggttgtagatggat

SEQ ID NO: 33080 - DNA, 120 bp, synthetic construct
  source 1..120: mol_type = other DNA
tctttgctccatgctttggttacctgcctctaggtgcactacctaaagaatacacatccccgtccctgttttattgagttcaggccttggaagcagaggctctgagcgtaatgctctttc

SEQ ID NO: 33081 - DNA, 120 bp, synthetic construct
  source 1..120: mol_type = other DNA
tagaattgcattggtttctttctcagggagccttacaggaggaagtttagtgggctgaactgcagctggtgtaggggctacaactgacactcacagtttccttctttttttttttttttt

SEQ ID NO: 33082 - DNA, 120 bp, synthetic construct
  source 1..120: mol_type = other DNA
tttcatctcaagattcttaactaattatatctacaatgaccctatttccaaagaagatcacactctgaggttccggggggggccatgaattttggggggatgctattcaatccactacag

SEQ ID NO: 33083 - DNA, 120 bp, synthetic construct
  source 1..120: mol_type = other DNA
tcaccttctgcccagtctaactgaccccactttctcaggctggggtccctgaagctctttcctgggatctccctgggagcccctggagcagatagggaagggacagagaaaagagaaaaa

SEQ ID NO: 33084 - DNA, 120 bp, synthetic construct
  source 1..120: mol_type = other DNA
ttctgaccacctcgtggtctgaaatatttatgcacatccctgaagaagctcgtggttcaggccccgtctctctgtcaggccctacaactgttgacattgatgatttcaatacagcagaga

SEQ ID NO: 33085 - DNA, 120 bp, synthetic construct
  source 1..120: mol_type = other DNA
aaaaccccgggcaagtcccagctcagctgccgacggggctggctttttgtctcccttaaaaataccaatgtgcagaagttgggttcgtaaaaccctctctgctgctggacttaagttccc

SEQ ID NO: 33086 - DNA, 120 bp, synthetic construct
  source 1..120: mol_type = other DNA
acctgtccatcagattaggacgaggctggaaggaggtttcgtaaacatctttggtgtcaccctagtttctgttctccacgtgaggacgctgaggccccaactgcccggagtcccagagca

SEQ ID NO: 33087 - DNA, 120 bp, synthetic construct
  source 1..120: mol_type = other DNA
accctccctctccctcaccctccctctccctcaccctccctctccccttaccctccccctccctctccctcaccttccctctcccctaccctccctctccctcaccctccctctcccctc

SEQ ID NO: 33088 - DNA, 120 bp, synthetic construct
  source 1..120: mol_type = other DNA
tggcaccatgtggtctccattcgtgagtggggatgacggccccagccgagcccctctccccctatcacagggctgtggggagactgaaccagaacgggatgggaggtcgtgttgcagtga

SEQ ID NO: 33089 - DNA, 120 bp, synthetic construct
  source 1..120: mol_type = other DNA
cgttcaaaggaacaggggaacagtcacgacattcggagaataaagcagtgtgtacagactgcatgggatgccctgattacattttaaaatccacagatagtcacagatgacggaaagaag

SEQ ID NO: 33090 - DNA, 120 bp, synthetic construct
  source 1..120: mol_type = other DNA
aggaaagggccagccccaggagaggggaggcagctggagccgcctgtctgagaacaagtcccagcagcttgctggagtggccgtgcgggtgggggcaaggctgctgggcctcaaatggga

SEQ ID NO: 33091 - DNA, 120 bp, synthetic construct
  source 1..120: mol_type = other DNA
ttacacccaagggtgcggagagcaaggaggccctgactcttggaaccaggcctccagcccagtgtttgcagctaccctcactgcctcaccctgagaacccctatgtgtagaattaccacc

SEQ ID NO: 33092 - DNA, 120 bp, synthetic construct
  source 1..120: mol_type = other DNA
gtctcactcaccaaattttctatagaactctgaaattcgctgattttcctcaaggtctccttgtcccgtttaacttcattgatgtacatcgccaagtccttgaaaacaagaggcagaggt

SEQ ID NO: 33093 - DNA, 120 bp, synthetic construct
  source 1..120: mol_type = other DNA
aagggaacacactgaccgagagccacacctcgtcagtgatgatgccaagagccccaaactcctggctggtgccacttctttctaccccatcacgtggtccctcttaaacatcctaataga

SEQ ID NO: 33094 - DNA, 120 bp, synthetic construct
  source 1..120: mol_type = other DNA
gtgaacagaaaatgggaactaggaacgctggctgcagtgccaggagggggacagagggccccaggactccaggccagagcaatcagagagatgcttcttgaagctggaaggaagaagcca

SEQ ID NO: 33095 - DNA, 120 bp, synthetic construct
  source 1..120: mol_type = other DNA
cacgggcatcaccacctaccgctgcgcccactggggctgaccactgagcacgggcatcaccacctaccgctgcgcccactggggctgaccactgagtgggggcatcaccacctaccgctg

SEQ ID NO: 33096 - DNA, 120 bp, synthetic construct
  source 1..120: mol_type = other DNA
tggccaagaaatgtagacaccccaaatgttcatcagcagacggatggataaacaaaacgtggtctacctggaccgtggaatattcttcagccagaagaaggaacgaagcgctgacttagt

SEQ ID NO: 33097 - DNA, 120 bp, synthetic construct
  source 1..120: mol_type = other DNA
cgtcccgccctccttgtgatcacgtggtttcacgactacactttttgaattcccggcagccaccatccacacccctcaacctgatattttcaaggggattcagcacgatctggcgttcta

SEQ ID NO: 33098 - DNA, 120 bp, synthetic construct
  source 1..120: mol_type = other DNA
accttcaatcacccagattctggggaccccacagggagcaacatagtcatgccaccctccacaagcccagccagggagtgtggccccatacccgatgccaaggcgaggctcctggctgcg

SEQ ID NO: 33099 - DNA, 120 bp, synthetic construct
  source 1..120: mol_type = other DNA
ctaaccactgagggcgtttttctgtcgtctcttgactctgggtttttaggggttttttatgtgtgtgtggtgttttctacatatttgactactgggaataatatggcatattgcgtcctg

SEQ ID NO: 33100 - DNA, 120 bp, synthetic construct
  source 1..120: mol_type = other DNA
gctttgagcaaaaagtcatgtgtgccgttctgttagggtgtgtgtgtgtatgagtgtgtgtgtgtgactgtgtattttgtatgtataggtatgtgtgactgtaggtgactgtgagtgtac

SEQ ID NO: 33101 - DNA, 120 bp, synthetic construct
  source 1..120: mol_type = other DNA
gggttttgtgtgtgggttgtatgtgtgagagtgcgggggttgtctgcgtgtgtgtgggggggttatgtgtgttggagatcgcagctgttgtgcctccgggggcttcttggatactgtcac

SEQ ID NO: 33102 - DNA, 120 bp, synthetic construct
  source 1..120: mol_type = other DNA
tgtccacatctgcctctaagctgtgaagaatttgggagtggatgctgctctggggctgtttcctcttctgaaccatggtggttcaggcagcctggtcccaggttaagtgtgccccttagc

SEQ ID NO: 33103 - DNA, 120 bp, synthetic construct
  source 1..120: mol_type = other DNA
tgctttaagctgagttttataatcaagagtggttttcctgccgaggccctttgggtgttgatggagcctgtctccatgaagggccactgcctgtgccctgggagtttgaggtcagtcaag

SEQ ID NO: 33104 - DNA, 120 bp, synthetic construct
  source 1..120: mol_type = other DNA
aaggtgctgaaggtgactgtgtgactgcaggtgactccatgtcaccctgtctataagagctgttaaaacagcagtgcgtgtgtgcgcgagggtccctgactgtgtgactgcaggtgattc

SEQ ID NO: 33105 - DNA, 120 bp, synthetic construct
  source 1..120: mol_type = other DNA
ttccacaaagctcaagggactttgtgtgggacttctcagggcctttcgtgtgccggtgtgtactgtagaacgggcattctcaggaacctcttttctgtggaacacttcatgggattgggg

SEQ ID NO: 33106 - DNA, 120 bp, synthetic construct
  source 1..120: mol_type = other DNA
cggtgattttgaagccagtccctgacatcagctgcgttcttcggtaactatttcggtctccgaaagaggaggacccctactccaaactcacctcagcttgctggccgtgtgccgtctgtg

SEQ ID NO: 33107 - DNA, 120 bp, synthetic construct
  source 1..120: mol_type = other DNA
agagctggtgtgtatagggctggaggagtgtagggctggggtgtgtgtagggctgggggtgtgtagggctgggagtgtgtagggctggggtgtatagtgctgagagtgtgtagggctggt

SEQ ID NO: 33108 - DNA, 120 bp, synthetic construct
  source 1..120: mol_type = other DNA
ataaggcaggggtttgtagggctggggttgtgttgggccgggcgtctgtagggctggtttatccgaatgcactgggtggccttgggctttagggcctgcacttttctgttttgtgcatcg

SEQ ID NO: 33109 - DNA, 120 bp, synthetic construct
  source 1..120: mol_type = other DNA
ttattagagatggctgttattttacatggctgttaatacggaggttgggaggcagtaattgtaacttttataaagtgtgaaagaaggactaaagctgctgtttgcagcttcaggcccagc

SEQ ID NO: 33110 - DNA, 120 bp, synthetic construct
  source 1..120: mol_type = other DNA
tagtttatagataatatggagggtgggttgggggtgtagtttatagataatatggggggtggggtagggggtgcagtttatagataatatggggggtgagggctgtggaaccttcctctg

SEQ ID NO: 33111 - DNA, 120 bp, synthetic construct
  source 1..120: mol_type = other DNA
tgttatccgagatgcctttcaggccttcagttctcatcaattctcagttcatttggagcctcctcttcactacttgacacccttaaagtgataccctgccatcagcgctgggaaactgat

SEQ ID NO: 33112 - DNA, 120 bp, synthetic construct
  source 1..120: mol_type = other DNA
tctagtgtcagacacagatgagccatagatcctttgcacagagaatctcataataagcaatgcagtgagagcagtgacactgtcatcttcaggaaggactaccccggaggccctttggac

SEQ ID NO: 33113 - DNA, 120 bp, synthetic construct
  source 1..120: mol_type = other DNA
agagaaagttatcctagcatggttagtggaggcattgttattggctggtggaaaggctgacaacttagtgcagcaattgtaaaattgccctatacctcctgattttcaccattcacttgc

SEQ ID NO: 33114 - DNA, 120 bp, synthetic construct
  source 1..120: mol_type = other DNA
ggctgttgtgatgatgatgatggtagtcatagtgattgtgcagtattttcatagcatcgccgtcagtgccgttaaccctgtctcattgaaaggggtgtgaagggtctacaagctcagtgg

SEQ ID NO: 33115 - DNA, 120 bp, synthetic construct
  source 1..120: mol_type = other DNA
cctctgggcatgaattgttcggtcggtggtttggtgcctggaagaagcccctgtgggcctgcagagtcagctcggaggccaggttggctctgtttctcccccgtctaagggaggctgcct

SEQ ID NO: 33116 - DNA, 120 bp, synthetic construct
  source 1..120: mol_type = other DNA
tcttcttcctttcccccctccttcctgcccccttcttcctttcccccctccttcctgcccccttcttcttatcccccttcttccttcctcccccctccttcctgactctcttcttcctgt

SEQ ID NO: 33117 - DNA, 120 bp, synthetic construct
  source 1..120: mol_type = other DNA
tctgcacttgggttcaaaacaatcaattgtacaagcgcagggccaggagaagcggcagtgaagtgttttatatgaaaaaaacttaggggtttgtgggtgtcaaacccattaacgatcatc

SEQ ID NO: 33118 - DNA, 120 bp, synthetic construct
  source 1..120: mol_type = other DNA
ggtgatgtttatggtggtggatatgctgatgatggtgatggtggttgtgatggtgtgatgctggtgaaggtggtggtggaggttaaggtggtgaaggtggtgatgctgatgaaggtggtg

SEQ ID NO: 33119 - DNA, 120 bp, synthetic construct
  source 1..120: mol_type = other DNA
cattgtcagaggtaaagagggtggggtgtgagcatgggcggtgtgtgtgtgtgcatgaacgagtgtgtgtgagcatgtggcatgcaggcacgggtgtgcttgagcctgcgtgtgtgtgag

SEQ ID NO: 33120 - DNA, 120 bp, synthetic construct
  source 1..120: mol_type = other DNA
agaacacagatgcggcagctttggataaacggcaacagccaagcccctcgaatcttgaatctgtctcaatagactgtggtcttctttcaataacaacgtgatagaaagcctacaatctcc

SEQ ID NO: 33121 - DNA, 120 bp, synthetic construct
  source 1..120: mol_type = other DNA
cacacccatgcacccccacactcatacatgcacacacacgcatacatacccccacacccccacactcatgcacacatgcacacacatgcacacccacacaccccacactcatacacacat

SEQ ID NO: 33122 - DNA, 120 bp, synthetic construct
  source 1..120: mol_type = other DNA
gacgcatacatacccacacacgcatacacacatgcacacacacacgtacacacatgcacacacatgcatacacacccgccacacacatacacacatgtataccaccccgatacacacata

SEQ ID NO: 33123 - DNA, 120 bp, synthetic construct
  source 1..120: mol_type = other DNA
tgcagactcatttgggactaaattataccccagatgtctgattagcctctaaggagaattcatgaactccactctctccttaacacatgtccaagtaataccttctgggctgttagcttc

SEQ ID NO: 33124 - DNA, 120 bp, synthetic construct
  source 1..120: mol_type = other DNA
caaggctgtgaggatgggatgaggatgccccacccctcgcctgcagtaaatgctggcttttattaccattcccttggtccatcattcattcattcattcgttcattccctccctcagtga

SEQ ID NO: 33125 - DNA, 120 bp, synthetic construct
  source 1..120: mol_type = other DNA
cgtcgtagcacgagcagggtcatggtcatgattggaaatgacagccgccagctccagggtgggccctttgatcctgggctgggcagttttcctcaagtcagtgtctttggaaattgcagg

SEQ ID NO: 33126 - DNA, 120 bp, synthetic construct
  source 1..120: mol_type = other DNA
tattttcttgaggaataaattttgaggaatcggagaaatacgcagtaggaaattgaagctccctttactcactcacctttacccacagacctactcagaataagaccaccctacactcac

SEQ ID NO: 33127 - DNA, 120 bp, synthetic construct
  source 1..120: mol_type = other DNA
ggcttgatttcttttcacccattcagctttatccctcaaatcacaaaagctctctcagttctgctgatgtgagttggggaggaattggtgatgggaaaagactcttcatctcttcataag

SEQ ID NO: 33128 - DNA, 120 bp, synthetic construct
  source 1..120: mol_type = other DNA
tcatcctgaatattttaagtttggcttacagttcttgtttttctatttataagacctgcaaatcttaagagtcacctttttagagcttttggataccataaatttagttctttaaataac

SEQ ID NO: 33129 - DNA, 120 bp, synthetic construct
  source 1..120: mol_type = other DNA
agctacagcgaataacggaacttgagtctcctacacccctgatttgcatccctgatgataagaacaggttggcaaagaaaatgtttacccaaccaatttgctgtgtttggggagttatca

SEQ ID NO: 33130 - DNA, 120 bp, synthetic construct
  source 1..120: mol_type = other DNA
tggtttggaagccaggggtctgagatcctgcgctgcccgagccaagtcgaatattagctgggaagggacatcgttattggcccttgtcattctgcagctgctgcaggtaaatcacattag

SEQ ID NO: 33131 - DNA, 120 bp, synthetic construct
  source 1..120: mol_type = other DNA
cctgtgactccacttacccgataagttgctcaaagattcagcaaagtggcaggcgtgcctgtgctcgctgtgtcagatgggccccttgctggctgcacaaggggaccagagtttggagac

SEQ ID NO: 33132 - DNA, 120 bp, synthetic construct
  source 1..120: mol_type = other DNA
cctctcctggttctccataaagagcttcagcagttcccagtgactccgcctgtctgtggggtccctcggggtgagaggtgctggctgggtgctcttttgggtgcagggactgggtgggaa

SEQ ID NO: 33133 - DNA, 120 bp, synthetic construct
  source 1..120: mol_type = other DNA
ccctgtcctctggagtcctccgggctcatccaagtgggcgcatttggatgcaaaccctggacagcatcgtgtgtcttttcttctctggctggcactgaattgctgttcaccagatgccag

SEQ ID NO: 33134 - DNA, 120 bp, synthetic construct
  source 1..120: mol_type = other DNA
gtgcagcacaagggactctcggaggaggacattttcatgcccctgcagacgggtgaggacggctgtgcccagtaccccgtgttcccctgtgtctctgtgtgatctccagtgtcccatgac

SEQ ID NO: 33135 - DNA, 120 bp, synthetic construct
  source 1..120: mol_type = other DNA
ttaccattcctgcacctgccagcccgagtgagggtcctcctcggcctttccacagcgaggcctccctccggctccctcaggtgtcagctcggcccatcgccccctgcacctgtccccact

SEQ ID NO: 33136 - DNA, 120 bp, synthetic construct
  source 1..120: mol_type = other DNA
tctgaggaaattgggtcagggactcaatacttgtcgtctggaactcccaagacaggtatgtccagaggctgccccgaaaacgcctccagtgaggccttctcccccttctcccccttctcc

SEQ ID NO: 33137 - DNA, 120 bp, synthetic construct
  source 1..120: mol_type = other DNA
cctgatgattagctaattaattctgtctctccctccctctatctctccttccctctctctctctctacctctctccctccctctctctctctcactctctacctttccctccctctctcc

SEQ ID NO: 33138 - DNA, 120 bp, synthetic construct
  source 1..120: mol_type = other DNA
cgtgtgtcacctttgggagaggaggacctcttccatgcctggtggtactgttgtgcctttgaagggaggtgtggcaccaggccgggtggtgtccgccatgccaaaggccactctgcatcc

SEQ ID NO: 33139 - DNA, 120 bp, synthetic construct
  source 1..120: mol_type = other DNA
tgcttcagagaacagggcctgggggaggaagggcaggcactgccctaggaagcaccatgggctcccactcagggccgtggccaggagaagctgtcagctggtgtctccaggacacaccat

SEQ ID NO: 33140 - DNA, 120 bp, synthetic construct
  source 1..120: mol_type = other DNA
ccacagaggccagcccgtctgcactgaccaaccacccaccccgccaggaccaccagaccatcctgcgcgcctgggccgtgaaggacttcgcccccaactgccccctctacgtccagatcc

SEQ ID NO: 33141 - DNA, 120 bp, synthetic construct
  source 1..120: mol_type = other DNA
ttctacagacacacatcatcacgcactttctacctgttctagagacacacgtcaccacacatgttctagagacacacatcatcatgcccgttctacagacacacatcatcacgcactttc

SEQ ID NO: 33142 - DNA, 120 bp, synthetic construct
  source 1..120: mol_type = other DNA
cgcactttccacctgttctacagacacacatcatcacacgctttctaccccttctacagacacacatcatcacacgctttctaccccttctacagacacacgtcatcacgcactttctac

SEQ ID NO: 33143 - DNA, 120 bp, synthetic construct
  source 1..120: mol_type = other DNA
ttcagagacatatcaccacacactttatatccgttctgcagacacacgtcaccacgcactttctaccctgttctatagacacacattgttacgcactttctactccattctcaagacaca

SEQ ID NO: 33144 - DNA, 120 bp, synthetic construct
  source 1..120: mol_type = other DNA
ctccagaaagaccagaaacgacttccacgctgtacttggtgggagcacagaggccacaattataaggcatgccattctctcatgtgccacagggcaaaggtgccaccaatttaatcatgc

SEQ ID NO: 33145 - DNA, 120 bp, synthetic construct
  source 1..120: mol_type = other DNA
ttatttaaaattatgtatcatcccttcaattaacacagacggacaggtcaaaaccattcctcgttctgtcacagcaaggctgcctgccttcctcaaggaacctatctctggttcaacatt

SEQ ID NO: 33146 - DNA, 120 bp, synthetic construct
  source 1..120: mol_type = other DNA
gagtaaaaatacagaagtctttttgctgtaagacctgcaaaaggagcatgaacagacttgagtacgccaggaatgcaaatatccccacaaaattaccccgtgttcttcccttgttagaag

SEQ ID NO: 33147 - DNA, 120 bp, synthetic construct
  source 1..120: mol_type = other DNA
gacttacacgggtgcactccaccttgacacctctgataaataaaataccgggtgaattcccagcgtcaggagtgcacatctgaagcccgtcctgtgccagcgacacctgaagccagtcct

SEQ ID NO: 33148 - DNA, 120 bp, synthetic construct
  source 1..120: mol_type = other DNA
gcctgcatcacctggagcccgtcctgtgccacacctggagcccatcctgtgccggcgacacctggagcccgtcctgtgccggcgacacctggagcccgtcctgtgccggcgacacctgga

SEQ ID NO: 33149 - DNA, 120 bp, synthetic construct
  source 1..120: mol_type = other DNA
aaagtcaaagcaggcagatgcccctgacttctaagcagggctcaggggtgtgagtcagcaccagtcaggcccaccccagctcttcttttccccagatgttctctcttcctctcttggcct

SEQ ID NO: 33150 - DNA, 120 bp, synthetic construct
  source 1..120: mol_type = other DNA
ccctgggaaagtccaggcctctaggttcttactcccacgtgtgcatgtgtatgccacacacagctcacaatgacattgtggacgcctgtgcacctctgtagttccagaaaacactcccta

SEQ ID NO: 33151 - DNA, 120 bp, synthetic construct
  source 1..120: mol_type = other DNA
actgcaggaaccaaggaccggccacaggaaccaaggggccccaaccaagatgaagatcaagtcacagattggcagaatgttgggggggagggtaccaagatgaagatcaagtcacagatt

SEQ ID NO: 33152 - DNA, 120 bp, synthetic construct
  source 1..120: mol_type = other DNA
gggaagggctttcagctctcagttggggtcctcatctgcaaagtgcagctgataccaatactgcgccgttgctgttggtgacaccaatactgcgccgttgctgttggtgacaccaatgct

SEQ ID NO: 33153 - DNA, 120 bp, synthetic construct
  source 1..120: mol_type = other DNA
cctccagcctcccttgtttgggtgtgtggactgaggcccagggcggggttcattccttcgagttcattcacacagcagacaccggtgagggctgtgtagggcatggacacagggagctca

SEQ ID NO: 33154 - DNA, 120 bp, synthetic construct
  source 1..120: mol_type = other DNA
actccctccccagagcatcccgagggccccgtcttcggacgaggagtgcttctttgacctgttgaccaagttccagagcagccgcatggacgaccagcgttgtcccctggacgatggcca

SEQ ID NO: 33155 - DNA, 120 bp, synthetic construct
  source 1..120: mol_type = other DNA
tcttcctcctcgtctttaacttcagaaattctgtctatagatttaaggatttcggcaacaagattcagtgtctcagctccggaaaccagttgcctgaaaacaagcatggatatcaggatg

SEQ ID NO: 33156 - DNA, 120 bp, synthetic construct
  source 1..120: mol_type = other DNA
cagacactcaccactgtcacagtcatggtggctggcgtgtccccagccaggcacagcagtaagggccttctgggaagtggctttttcagcaggagggaaacccccactatttcctttatt

SEQ ID NO: 33157 - DNA, 120 bp, synthetic construct
  source 1..120: mol_type = other DNA
tgtatgagggcgtcctctgcttggaggtgctgtcgtacgtgtccttcccgatgtcaaacttgtatgatgggaggaagtggatgtccggctcctggaagcccttgaagatggaccctgcca

SEQ ID NO: 33158 - DNA, 120 bp, synthetic construct
  source 1..120: mol_type = other DNA
aagttgaagtctccaaaccagaacacctcatcgaagcgggtggtgacgtccgctgcggcacagtgggccatgtgtgggcacaggcagagggacggcaggtccttccccttccccagaaca

SEQ ID NO: 33159 - DNA, 120 bp, synthetic construct
  source 1..120: mol_type = other DNA
acagaaaaatcattacaattcttcggacgtcccgtgcgtatttgacagcactcaccgatttgttcttgtcatctggcaaataagcttctgtctttttctttccaggtagccaacgaaaga

SEQ ID NO: 33160 - DNA, 120 bp, synthetic construct
  source 1..120: mol_type = other DNA
tgttctgtgtattttactgtcatttaaataggtcagaacagtaacgtgccttcaggaactttttacgtctaaacactgacaaagcttccgacgtcctcccctttgagaagtggaaggcgg

SEQ ID NO: 33161 - DNA, 120 bp, synthetic construct
  source 1..120: mol_type = other DNA
cagggccgctccatggaaatgcgactccagaaagcagcaggaggcagatgctgccgagacctttcacccaggacgaattctaaattgtgctgttttcctttctaagctaagcggccatct

SEQ ID NO: 33162 - DNA, 120 bp, synthetic construct
  source 1..120: mol_type = other DNA
agcctgagggtgcccctgcccctgggacccctccctcaccagcaggacctgcccccagcctcaaggggctttctgcccagaggggagtctagggctcccactctgcctgctcctgtgatg

SEQ ID NO: 33163 - DNA, 120 bp, synthetic construct
  source 1..120: mol_type = other DNA
attattacttttggtacgcgctgtgacacttcaaactcgtaccgtgagtaataatgcgccgtccacggcaccgcatcgaaaacgccgctgagacctcagccttgacctccctcagcgtgg

SEQ ID NO: 33164 - DNA, 120 bp, synthetic construct
  source 1..120: mol_type = other DNA
aagcttgacagccccccagacaatacacagagcctggacccagacgagacctccccacccccccatctttgtccccaccaggacaaagagctcttgccagtcttcccactggccagtggt

SEQ ID NO: 33165 - DNA, 120 bp, synthetic construct
  source 1..120: mol_type = other DNA
tggcccagagttccataagctcatcctgcaaatttttactcatctcctctaggaagccctcctgagctagcacgtgtttgcctggttcacacctgtccccatattgggtctgcagctagc

SEQ ID NO: 33166 - DNA, 120 bp, synthetic construct
  source 1..120: mol_type = other DNA
agtcccagcacttgagtggttggagacactacagaagcttttgaaggatgatccagtgtgttggtgggagaatgggaaggtctggggcatgaaatgtgcagggaacagcatggggaacag

SEQ ID NO: 33167 - DNA, 120 bp, synthetic construct
  source 1..120: mol_type = other DNA
tgcacttaccaggaaaagcgaattttcccgtactgtctatttctgagcccacgatcttctctatctcacagcttcctgagctgaaaggcagcaaagtgcccatcggtaaaatgctagcct

SEQ ID NO: 33168 - DNA, 120 bp, synthetic construct
  source 1..120: mol_type = other DNA
acttcaaagcagaactgtccccaaacctccccgggtttcagtcagccttttctgcagagcatttcatcacaaactctctcagtctctctgggttgttggaccctaggtggtgaaagagtc

SEQ ID NO: 33169 - DNA, 120 bp, synthetic construct
  source 1..120: mol_type = other DNA
tgcctacaatccccagaaggatccagtggccagcccggccagcctgctctgctcacccactggacagagcaggtcccatccagcacaggagccatgaagtagaggagagggagagaactg

SEQ ID NO: 33170 - DNA, 120 bp, synthetic construct
  source 1..120: mol_type = other DNA
ggcgtgagtcaccgaggtactcgctgttcacatctcacatttccctggtgcttgtgtcaaaaccaaggaaccaactttggcctacggactaaactcactttcctttgtagaaacaagggc

SEQ ID NO: 33171 - DNA, 120 bp, synthetic construct
  source 1..120: mol_type = other DNA
ttctccagaaggatgtcaggcttgcccaggaaaggggctgtgctgtcgtcctggtgtcagaagaagtgaggatgcctgcaggctgggactgctgctggggacgtttgggttggaaggaag

SEQ ID NO: 33172 - DNA, 120 bp, synthetic construct
  source 1..120: mol_type = other DNA
taattcaaaaggaagggtgaggtgcaggtattggctggatgatgctcagagaagcaggaagagtgggcatggcactgagtggctgaggccatcactggtggccttggtgcttaggcagaa

SEQ ID NO: 33173 - DNA, 120 bp, synthetic construct
  source 1..120: mol_type = other DNA
ctctcctgagtgccttcagagcctgagtgccagcaggcaggcgtctcctgcccagtgggtttggtaagatatatttcagaaggcatccaccactctaaaacatgcttattgcaggaacca

SEQ ID NO: 33174 - DNA, 120 bp, synthetic construct
  source 1..120: mol_type = other DNA
attgccccctaggcggctccagggctcctgacccttgtggaggccagactgtgaatccagggcagatgagggaccaaagagcaggtggtagacctaggaggtgtgggggaatggctcaga

SEQ ID NO: 33175 - DNA, 120 bp, synthetic construct
  source 1..120: mol_type = other DNA
aaaaagtccacagtgtagaagaaggcagagaaggcctgtagggggcgcagtcacactgtgaccgaaccccagcggctcagagcacctgctgccacccgcctgtccctactcacgacaaag

SEQ ID NO: 33176 - DNA, 120 bp, synthetic construct
  source 1..120: mol_type = other DNA
aacgcccctgaccaggctccctctgagagccgtccctggccctcccttctccaggcccagcccagccactgggcctttgctcatgctctgaccctcccacctgtctttccagccaattaa

SEQ ID NO: 33177 - DNA, 120 bp, synthetic construct
  source 1..120: mol_type = other DNA
tcccctggagctaccttttgctcatcacagcaggtactgtgtgtgtgtgtgtatgtgcatgtgtgttttcaggttttttactgtgataaaacacacaaaacgcaccaccttaaccatttc

SEQ ID NO: 33178 - DNA, 120 bp, synthetic construct
  source 1..120: mol_type = other DNA
caggcgtggtcggtggtgttacattcacgctgttgcaggcgtgcaggtcggtggtgttacacacattcacactgttgcaggcgtgcaggtcggtggtgttacacacatttgggctgttgc

SEQ ID NO: 33179 - DNA, 120 bp, synthetic construct
  source 1..120: mol_type = other DNA
gttgcaggtgtgcaggttggtgttacacacattcacactgttgcaggcttgcaggtcggtggtgttacacacattcacacttgcaggcgtgcaggtcagtggtgttacacacattcatgc

SEQ ID NO: 33180 - DNA, 120 bp, synthetic construct
  source 1..120: mol_type = other DNA
attccacagaaacccacgtcccttagggtgctatggggccaacactaaacctcctccatttccgagattatatgtgggaggagaggccggggtgggagagaggttcccagggtctaaaaa

SEQ ID NO: 33181 - DNA, 120 bp, synthetic construct
  source 1..120: mol_type = other DNA
gtgagaggaagggggtcccagggtctagaaagtgtccccagaggggtggggaccggggtgagaggaagggggtcccagggtctagaaagtgtccccaggggtgtggggaccggggtgaga

SEQ ID NO: 33182 - DNA, 120 bp, synthetic construct
  source 1..120: mol_type = other DNA
ttgtgtctgtggctccgtgtgtgacaccctcttctttccatcgtgcatggtcagcaccaccacgtctggcgagcgcccgccccagcctgtcctcggctcatttcactcgcttttgccatt

SEQ ID NO: 33183 - DNA, 120 bp, synthetic construct
  source 1..120: mol_type = other DNA
aaaaagatttttaaagacgtgaccaggcaaagtcccaagggtatgcacaggtcccaaagaaggaatgccccgcccagggaaagacccgcccagaaaaaaagacccgccaagggaaagctc

SEQ ID NO: 33184 - DNA, 120 bp, synthetic construct
  source 1..120: mol_type = other DNA
aaaagtcccgcccagaaaaaagtcgcgcctggtgaaagccctgcccagaaaaaagaccagcccagggaaagcccctcccagaaaaaaagacccgcccaggaaaaagctctggccagataa

SEQ ID NO: 33185 - DNA, 120 bp, synthetic construct
  source 1..120: mol_type = other DNA
ctcagtgttgctacggcttttgcatcgacctgctcatcaagctggcacggaccatgaacttcacctacgaggtgcacctggtggcagatggcaagttcggcacacaggagcgggtaggct

SEQ ID NO: 33186 - DNA, 120 bp, synthetic construct
  source 1..120: mol_type = other DNA
ttgcctttggaaagtgggacccacccagcctgaagggacttccacaatttccctcgattccttctagaagccccatgggagccagagggaattccccaaatccaagccaatgcctgattg

SEQ ID NO: 33187 - DNA, 120 bp, synthetic construct
  source 1..120: mol_type = other DNA
ggtgatctgccgacaccccaccccggacccacgaggggtgatctgccgacaccccaccccggacccacgaggggtgatctgccgacaccccaccccggacccacgaggggtgatctgccg

SEQ ID NO: 33188 - DNA, 120 bp, synthetic construct
  source 1..120: mol_type = other DNA
ggcagaggcgctgggggtcggccccacggcaagctgaccctgaggtgggggtggccgaggggctgggggcttgggaagatggggctcaggcccactgagcttatctttgggacactcacc

SEQ ID NO: 33189 - DNA, 120 bp, synthetic construct
  source 1..120: mol_type = other DNA
aatatactcccacatgatgaataaaaacaatgaataaacacccacatgatgagtaaaaacaactaatatactcccatatgctgagtaaaacaactaatatactcctatatgatgagtaaa

SEQ ID NO: 33190 - DNA, 120 bp, synthetic construct
  source 1..120: mol_type = other DNA
gctacacggggctacacgggactacacgggactacacggggctacacgggactacacagggtcacacgggactacacgggactacacggggctacacggggctacacggggctacacggg

SEQ ID NO: 33191 - DNA, 120 bp, synthetic construct
  source 1..120: mol_type = other DNA
gactacacaggactacacaggactacaccggagctacacgggactacacaggagctacacaggaactacacaggagctacacagggctccacaggagctacacaggagctacacaggagc

SEQ ID NO: 33192 - DNA, 120 bp, synthetic construct
  source 1..120: mol_type = other DNA
gaggaaacagagcttattagaaaggaaaaatggccccaattaaagaacaaggaaaattcattaacacgaaggagtttgtcatttcccagaggaaggtctgccatgcaacaagtggtccac

SEQ ID NO: 33193 - DNA, 120 bp, synthetic construct
  source 1..120: mol_type = other DNA
tgtgttaagggtccccaagatcatcctgaggtgattcagtgttacaggactcagcacacagtcacactctggctaagactcattacagtgaataatacacagcaatgtcagcaaagggaa

SEQ ID NO: 33194 - DNA, 120 bp, synthetic construct
  source 1..120: mol_type = other DNA
taggatgtgcttaacttctgcataagttgtaatgacatttgtgaagtgttgtctatctgagaagttcattagggactcattgcctgaggtttttactggggggtggtcacattgataccc

SEQ ID NO: 33195 - DNA, 120 bp, synthetic construct
  source 1..120: mol_type = other DNA
tgaggctgtgtggccagcactctgtctctgttttatcttcaaaagataaaactgtgtgtgctgtgcataaaacagcagaaacgcagacaaaatgcagtgaaaccacccctggggggctct

SEQ ID NO: 33196 - DNA, 120 bp, synthetic construct
  source 1..120: mol_type = other DNA
gtggcttccgtgcccctggtctctctctgtgcctgggcctccggctcccagccaggtcctccgacaggtggaagcgggcgggctctctgcacagggcttggtgcacctccagcaggcagt

SEQ ID NO: 33197 - DNA, 120 bp, synthetic construct
  source 1..120: mol_type = other DNA
cacagcagagacggggagaaggagcggacacatccgaggagaggctccacgtgggggtcccaggctgcaggcactgcacaccagggccagctccgggggccctggtcagcagtcccacgg

SEQ ID NO: 33198 - DNA, 120 bp, synthetic construct
  source 1..120: mol_type = other DNA
ccaagtggaacccagggctcaggtctgggggaaggtgccctcacaccagataacggccccacaggggctcagggatgcctgcaccaggaggccctgctccctccctggagatgccagatc

SEQ ID NO: 33199 - DNA, 120 bp, synthetic construct
  source 1..120: mol_type = other DNA
ccctgtctttcctcagggagtttccttcttggcgttggcatctgcgtttgtgccctgcccttctctcactggcacgtggaaccctcgtggacagagccggctgctcactgtgggtcccgt

SEQ ID NO: 33200 - DNA, 120 bp, synthetic construct
  source 1..120: mol_type = other DNA
ggcccacctcacagccactctggcacgagctgggcaagaggcagggaggggctctctgggaaggttggtcttggttggcacctgaacaacgggcagccccagtcacagaggatgtccctg

SEQ ID NO: 33201 - DNA, 120 bp, synthetic construct
  source 1..120: mol_type = other DNA
tgcccggccaaggcctactttttaagataaactatttactgaggtataagtgacacacggtaaggtatgccaatcatgggtgcaaatgcaccggtaaacccactgcccaaatctcaacat

SEQ ID NO: 33202 - DNA, 120 bp, synthetic construct
  source 1..120: mol_type = other DNA
tcctacagaaatatggggcaggccaggccactttatggactccaccgtggcccctcagccttgagagtcaaagccagggcccaccacatcctcccagcctccaacctccgtgtacctgga

SEQ ID NO: 33203 - DNA, 120 bp, synthetic construct
  source 1..120: mol_type = other DNA
tgttgacagagctggacacgaaccatgtaagggcagatgcctaaagcagcacagaaaggatggggggatgtggccattccaggaagcgccaggctgttccagggggtgctgtgtctgttc

SEQ ID NO: 33204 - DNA, 120 bp, synthetic construct
  source 1..120: mol_type = other DNA
tcacagaggggagggccatggccctgccccatggaggggctgccaggcagggcatgtgtagggtggaactgggcaaaggccagggggcggtgagtgaaaaggcagtaaacccacaacaaa

SEQ ID NO: 33205 - DNA, 120 bp, synthetic construct
  source 1..120: mol_type = other DNA
gctttgcccacagggaaggtgcctctcatttctcttttttaacctgaaaaagctgctgggagggcagatgttcttcttaactcgaagggatgaaaaatgcctcagtttaaaaaactaggg

SEQ ID NO: 33206 - DNA, 120 bp, synthetic construct
  source 1..120: mol_type = other DNA
ctctctcaacaaggaccctgcaggtgccaccccgcccccagactgggccatggccacagccacagccttgcagcctcccagagtccctgcgtctctctgcgtcctttcatgcctttgtgt

SEQ ID NO: 33207 - DNA, 120 bp, synthetic construct
  source 1..120: mol_type = other DNA
acaggaatggggagctgctcacccccaaaggcagcgggcgaaacatggcggagaagaagaactcctggtgggcaaagactgggtcacccttggctggccacgccccggactggccacgcc

SEQ ID NO: 33208 - DNA, 120 bp, synthetic construct
  source 1..120: mol_type = other DNA
cactgaatcatgtcctcttccttctccactttggcaaaggtggccaccttgttcttgaggagatagaggtgtccaggacctccctgtaagaagctgtggtcaggcatctgctcctccttc

SEQ ID NO: 33209 - DNA, 120 bp, synthetic construct
  source 1..120: mol_type = other DNA
tcccccgccacgtctcttccccttggtcttccttggccacacgcctcttccccttgatctccccaccatgcctcttccccttgatctccccctccacacgcctcttccccttgatcttcc

SEQ ID NO: 33210 - DNA, 120 bp, synthetic construct
  source 1..120: mol_type = other DNA
cttggtctcccccaacttgacttcttccccttggtcttcccctgccccaccacgattcttctcctggtcaggagacgagcactgagccccacctggcagaaaatcagcattttccagatc

SEQ ID NO: 33211 - DNA, 120 bp, synthetic construct
  source 1..120: mol_type = other DNA
gttgttagccccgcctttgcgatcggagatgctgagggcgtccccatctcacaaacaggtaaaccaagattcaggagtgcaaaagcgcagcccagcggccctggcaggggacccccagca

SEQ ID NO: 33212 - DNA, 120 bp, synthetic construct
  source 1..120: mol_type = other DNA
ttcggtgtgggaagccagtgctctccctggctcctggcaccacctcccacccaaaggcaaatcccacccagtgctcttcccgcgacagccttccagggctccccttcaactccagaacaa

SEQ ID NO: 33213 - DNA, 120 bp, synthetic construct
  source 1..120: mol_type = other DNA
ccgttgggtcagaaacccccatggaggctccatgcctcttattcccaggggctgtaacagtcagcttcttttccacaatcctggcatccatgtcatcctgcagccacctccaccatctca

SEQ ID NO: 33214 - DNA, 120 bp, synthetic construct
  source 1..120: mol_type = other DNA
gtctccaccaactcagacctgggcacagatcagaccgcctcccaccaccaacctgcatctgtgccttctctgtggtgctcctttgcctcacaagctgcactgggaggcttcagggggtag

SEQ ID NO: 33215 - DNA, 120 bp, synthetic construct
  source 1..120: mol_type = other DNA
gacgtgctgctgagcaggaaagctgcagagtggtttataaatgtgattccattattaaataaatactcaaggcctcccaaaagaaaaacacccgtacctgtatgcaggcagaaacagata

SEQ ID NO: 33216 - DNA, 120 bp, synthetic construct
  source 1..120: mol_type = other DNA
tttatttttatttttcctgcagcttttccttgggaatccctttcctctcgcctctccagggactgaggtgtcagagtcctcatttgaggcggaatgggggaggccattgctagttccata

SEQ ID NO: 33217 - DNA, 120 bp, synthetic construct
  source 1..120: mol_type = other DNA
gaatctccaacaactgaaactaatgagacaagagggaaaagaatctccaaaaaaaactaaggagacaatggggaagagaatctccaaaagtgaaactaaccagggacctctacctacagc

SEQ ID NO: 33218 - DNA, 120 bp, synthetic construct
  source 1..120: mol_type = other DNA
cacctggatgttgaggtgcctgggccctgtggctgggctgcaggcgggtcactcggatgttgatgtgcccgggccctgtggctgggctgtgggcgggtcacccggctgttgaggttttgc

SEQ ID NO: 33219 - DNA, 120 bp, synthetic construct
  source 1..120: mol_type = other DNA
tccatccctcactcactcactccactctgtccactccatcccccgtcactcactccactctgtccactccatcccacactcactcactccactctgtccactccatcccacactcactca

SEQ ID NO: 33220 - DNA, 120 bp, synthetic construct
  source 1..120: mol_type = other DNA
cccccactcactcattccactctgtccactccatccctcactcactcactccactctgctcactccatcccccactcactgactccactccatcccccactcactcactccactctgctc

SEQ ID NO: 33221 - DNA, 120 bp, synthetic construct
  source 1..120: mol_type = other DNA
agaattctgggaacaactgaagaatggagggtgaagggtcctgggcctgtctgaggacatccgggcctcatgtgaggagacgggcacacgtaatgagaccgttggaggtttgaggacatc

SEQ ID NO: 33222 - DNA, 120 bp, synthetic construct
  source 1..120: mol_type = other DNA
tagacatcgagttggatcacacagccaaagttcaggcaaacgtccctgggtggcaacacacatcagtgtgccaggaggtatagggtccagccctactgtgcctgtgtgtttttttcttca

SEQ ID NO: 33223 - DNA, 120 bp, synthetic construct
  source 1..120: mol_type = other DNA
ccagacctcactctgtgggtctcttgactgttttgactgatcctgattttcatccttttttttttaagacagagtctcactttggagtgcaatggcgcgatctcagctcactacaagctc

SEQ ID NO: 33224 - DNA, 120 bp, synthetic construct
  source 1..120: mol_type = other DNA
aaatggcttttccccgtggccagaggactaccaggaactctctggagaaggtgaagcaagcaggtaagagcccaaggacatcaggtgtggctacgaatccaagaacagtgtccactccag

SEQ ID NO: 33225 - DNA, 120 bp, synthetic construct
  source 1..120: mol_type = other DNA
ccagacaggagcacccccagactcctccccaacagcgtccactccagacaggagcactcccagactcctcagtgagtgtcccctccagacaggagcactcccagaatcctccccaacagt

SEQ ID NO: 33226 - DNA, 120 bp, synthetic construct
  source 1..120: mol_type = other DNA
agttaccttttgctggtgaagagaaatttgccgggtaccctggtgtcccagcccctcagaaggccatcgtcgccccctgtgtggagaaagagaagcatcaacaccactaatgacaggaaa

SEQ ID NO: 33227 - DNA, 120 bp, synthetic construct
  source 1..120: mol_type = other DNA
ccctctgtcatcttaaagcacttgtttaggggaacgaaaaggatgggagaagagaggagttggtgcactgaaccacaaccaatcttccaagaaaagcaatgcagacatggggtgaatggt

SEQ ID NO: 33228 - DNA, 120 bp, synthetic construct
  source 1..120: mol_type = other DNA
caggggtccatcttcacgctttcgcatatggctctcccggtgtcctagcactgtttgctgaaaagattctccttttattgaatagtcttcatggcttcattgaaaaattaattgaccata

SEQ ID NO: 33229 - DNA, 120 bp, synthetic construct
  source 1..120: mol_type = other DNA
tttgtgtggacctgggttttcatttcttcggctatcccgggaatgggataactggttcatatggtgactgtctgttttaagtactggagtaaatgccaagttgttttctttttttggaga

SEQ ID NO: 33230 - DNA, 120 bp, synthetic construct
  source 1..120: mol_type = other DNA
ttttaaaaaaaaattaatctccttatgttgtccaggctgttcttgaactcttggccttaagtgatcctcccatctgggcctctcaaagcgctgatattacaggtgtgagccatgatgcct

SEQ ID NO: 33231 - DNA, 120 bp, synthetic construct
  source 1..120: mol_type = other DNA
atattgaataatattagagctgataatcaattcagaacttaggcatcacccacagtcctgagtcctgcagcccccgcatagcctgctgaactggttttgtagttagttgttcccatttta

SEQ ID NO: 33232 - DNA, 120 bp, synthetic construct
  source 1..120: mol_type = other DNA
ttcctgcctgtgaggcagtctcgttggtcggcagtcttgttggtcagcaaccttgtggtttctgataggttccatgaattttcatcttaatttgctccatattaaactcagggaaggagt

SEQ ID NO: 33233 - DNA, 120 bp, synthetic construct
  source 1..120: mol_type = other DNA
gtttgctatgaaacaaaataattttctgtagacagttttatataagccagccaaagaaattgtgttggtggtggtgtcatagggggaggaaattgtgttggtgtcatggtggggggagga

SEQ ID NO: 33234 - DNA, 120 bp, synthetic construct
  source 1..120: mol_type = other DNA
ggccctacaggcacagcccttgaggactaccagcactctggcctcttcgctgcctggccatgctgcaaaaacccttcctggaggggctggcaaaggcaggactccaagcgcttttcccca

SEQ ID NO: 33235 - DNA, 120 bp, synthetic construct
  source 1..120: mol_type = other DNA
caggctggccggcctgacccgacctcaaccttttgcagtattcttctgtacatggcaaagctttagaaaatcttaaaaataattacagtgtcacaggaaactgcaaaaaaacctttcacc

SEQ ID NO: 33236 - DNA, 120 bp, synthetic construct
  source 1..120: mol_type = other DNA
atggaattataatgtatgtaaccttttgagagtagcttttgtcactcagcatagttctcttaagatcatccaagttacgtcattagcccgtcccgttctctgctgaggccttggtgttct

SEQ ID NO: 33237 - DNA, 120 bp, synthetic construct
  source 1..120: mol_type = other DNA
tcatcctctcccacgcctctcactcttgttccctccacgcctctcacgctcatccccttgcacattgctttgctgtcggtgtgtcatctttggtgaaatgtctttcagacttctgctcgt

SEQ ID NO: 33238 - DNA, 120 bp, synthetic construct
  source 1..120: mol_type = other DNA
cccacagaggtggtgcggcagagactgtggcggtagggtgcctgccctgcacccggagtgtgctctgtatctgtgggccccacggaggtggtgtggcagagactatgggaaggtgggtgc

SEQ ID NO: 33239 - DNA, 120 bp, synthetic construct
  source 1..120: mol_type = other DNA
gcccgtgtctgtctgggcctgtggcctctccacccttcaggatttcctgccaccccaaacccaatttagtcttgtttggtatttttttaaagccacaatttattgaaaattacgttttaa

SEQ ID NO: 33240 - DNA, 120 bp, synthetic construct
  source 1..120: mol_type = other DNA
agcctgtgatgttcagaccagcaaaatcacccagtgacacatttcccagaacacaccgtgttgttacgtgagacatgactgcatcacggtccctttgttaagttgatatatttagattat

SEQ ID NO: 33241 - DNA, 120 bp, synthetic construct
  source 1..120: mol_type = other DNA
ccactgctggcctgtgatggcctggactgtcctgccaggtatacgttcatgtttcctggatacccagcccagaacccctctcaccccagaaccttccttgacttctgccagagttgagca

SEQ ID NO: 33242 - DNA, 120 bp, synthetic construct
  source 1..120: mol_type = other DNA
aagtatgagctgatgcgcccctccaacaaggccccgctcctcgtgctgtgtgaagaccaccggggccgcatggtgaagcaccagtgctgtcctggctgtggctacttctgcacagcggta

SEQ ID NO: 33243 - DNA, 120 bp, synthetic construct
  source 1..120: mol_type = other DNA
aggaattggtatgtgattattaaatcaagcagaaatagagattaaggaaaagcaaaactagtgagttgtggccctgagatgtgtggtgatgacgctgagatgtgtggtgatgacgctgag

SEQ ID NO: 33244 - DNA, 120 bp, synthetic construct
  source 1..120: mol_type = other DNA
gggatgtgtggtgatgacgccgagacgtgtggtgatgacgccgagacgtgtggtgatgacgccgggatgtgtggtgatgacgctgggatgtgtggtgatgacgctgagatgtgtggtgat

SEQ ID NO: 33245 - DNA, 120 bp, synthetic construct
  source 1..120: mol_type = other DNA
gcagagcagaacacacttcaggaacgtgaaacgctcacgtgcttttaatccagcaatcctgcctctgaggatgcatccttgagaaataatgtagaaaatgaaaagcactaaaatatttgc

SEQ ID NO: 33246 - DNA, 120 bp, synthetic construct
  source 1..120: mol_type = other DNA
acctacgttttttattttcttctcctttgcacatattttttcagaattacagtgttctaatttactgtgtgattataaatcatctatattttacatgtggcacaagtatttctccaaatt

SEQ ID NO: 33247 - DNA, 120 bp, synthetic construct
  source 1..120: mol_type = other DNA
tgaaagagctggaaggcagataaaggttctgtcaggcccagccctgggccctctcattgctcttccaaggcttcttaccgacccaaagcagtggcaggcatctttgtgccttttttgtaa

SEQ ID NO: 33248 - DNA, 120 bp, synthetic construct
  source 1..120: mol_type = other DNA
attcttacctctttgatctcgacaataaggtaatgtgttttgtggggttggggccacgcagaacttgtgaactgtaaaacctgaatgtgtttgtcccagtagggctgggattcagaagag

SEQ ID NO: 33249 - DNA, 120 bp, synthetic construct
  source 1..120: mol_type = other DNA
cgattgaggggcgccgtgtaccgagaccgtagagaggccgattgaggggcgccgtgtaccgagaccgtagagaggccgattgaggggcgccgtgtaccgagaccgtagagaggccgattg

SEQ ID NO: 33250 - DNA, 120 bp, synthetic construct
  source 1..120: mol_type = other DNA
tctctgagattctgttcatccacccagtgatggcttcagcagccagtgaatttcgatgtagaatttccgttggattctttttctgtttctccgctgagacttctcatttctctgatattt

SEQ ID NO: 33251 - DNA, 120 bp, synthetic construct
  source 1..120: mol_type = other DNA
cgtctctgcccgctactacaccgggtaggggccaggggtgaccactgttctgcgcttctcctaggacgacacggagccctatttcatcgggatcttttgcttcgaggcagggatcaaaat

SEQ ID NO: 33252 - DNA, 120 bp, synthetic construct
  source 1..120: mol_type = other DNA
agatggaagaggagggagcaggccccacagcaggcgagagctctccttccagagccccatcctcacccagtgactgccccaagatgcctggtgcacaggagggtatatggaggggtgttt

SEQ ID NO: 33253 - DNA, 120 bp, synthetic construct
  source 1..120: mol_type = other DNA
ccctggatctcccagcacacatagactgggtccagggctgctcctccttcccctccccttcttccccctccccctcctcttcccgcctccctcttctgtttctcttcatctctctccctc

SEQ ID NO: 33254 - DNA, 120 bp, synthetic construct
  source 1..120: mol_type = other DNA
actgtgaggatcatcagagtgtgcttctgagaaaccctaggcctgtgagggctgctggcagcttcctgctcttgtgtgtgcccagggcctccaggccctcagttcccagccatgctcttg

SEQ ID NO: 33255 - DNA, 120 bp, synthetic construct
  source 1..120: mol_type = other DNA
catctagcagcctgggaagaggtatggctggaggtggtgattcgagggacatgggtgtcccagtcatcttcagagcttgagaccacccaggatccccagggaatgggaagtgtggaggaa

SEQ ID NO: 33256 - DNA, 120 bp, synthetic construct
  source 1..120: mol_type = other DNA
gcacaggtgtggcccaattgactcgtgatgggtgctgggggcacagtgtagacggtagggaaggagagtgggagccggaagcagtgatccaggtgggagtggtgagggtttgtaccaggg

SEQ ID NO: 33257 - DNA, 120 bp, synthetic construct
  source 1..120: mol_type = other DNA
ccacaaggcgacctgacactgtgtctgaacacaggtgacaagagacactgtgcccgaggggccaggacacgttggagcatggaccgagctgggtgtgtccgtgctgtgacggaactcttc

SEQ ID NO: 33258 - DNA, 120 bp, synthetic construct
  source 1..120: mol_type = other DNA
tgcttgggaggctgaccctggccttgggctccagtcctgtggggtcttctctggggtctccgcgtctccatgtgtgctctgctgcctgaggagcccaaatccagagactccctggataga

SEQ ID NO: 33259 - DNA, 120 bp, synthetic construct
  source 1..120: mol_type = other DNA
actggccatgctcgtctctctccgtggtgctgatctttccagctctgcctgtgggtgggggatggaagggagggacacagctgtgtggtgtcgggggcacacgcccactcctgggaccat

SEQ ID NO: 33260 - DNA, 120 bp, synthetic construct
  source 1..120: mol_type = other DNA
tcgggagacacgaatttacttagttttgttatagcagagggtggtggcggaactccaggattctgttttggctctgcaaaactttagataactattttcatacaagtggagatcttgggt

SEQ ID NO: 33261 - DNA, 120 bp, synthetic construct
  source 1..120: mol_type = other DNA
gcgcagcatcctgggagcagagtaaagcgttcggagaacatggtcagcaccacgaccgcacagcatcctgggagcagagtaaagtgttcggagaacacgatcagcaccgcgaccgcacag

SEQ ID NO: 33262 - DNA, 120 bp, synthetic construct
  source 1..120: mol_type = other DNA
atttcattttggcaaggttaaggacatgcccagaataaaaaaaaaacactttggagaaaggtatttggtgtgtttgtggtgtgtgttgtgtctggtgtgtgtggtgtgcatgtgtgtgtg

SEQ ID NO: 33263 - DNA, 120 bp, synthetic construct
  source 1..120: mol_type = other DNA
aggaagaggtcaggaaggcaggagtggaagcgtgtggagggggggcggtgccagaagttcatggccatagaaggcctgaggaaaaagactgcctttgagtaaaagagttgcaggaagtga

SEQ ID NO: 33264 - DNA, 120 bp, synthetic construct
  source 1..120: mol_type = other DNA
ggtcacccttccctcttctgatcctgtccatagattttcataatcagctgaaggctctgcagctacctccatgcctgggatctcgcaaacctgtggagggctcagtctctccccagtgga

SEQ ID NO: 33265 - DNA, 120 bp, synthetic construct
  source 1..120: mol_type = other DNA
tgtgtttcccagcttaccatgacagttgaacacagacggcagggcagggcagtctgagaattaccaacttatgtaggtggggaggccttggaggcagtgtgtttcccagcttaccatgac

SEQ ID NO: 33266 - DNA, 120 bp, synthetic construct
  source 1..120: mol_type = other DNA
caacatcaacagtgcatgaaacaaacaggcaggcttgccataatctgttcttggtggcatgtgctgtttcctggtcattgggagaagaaaagactcaagatgcaatttatgaatctgagt

SEQ ID NO: 33267 - DNA, 120 bp, synthetic construct
  source 1..120: mol_type = other DNA
tatagttgatttaaatacaaaaggtggttccaaaacggccttgtggggccacatctgccctcagggccatccctgactggcctccgtgctgccggcacaccctttagctttcttgttcac

SEQ ID NO: 33268 - DNA, 120 bp, synthetic construct
  source 1..120: mol_type = other DNA
gacgtttatgggtcctcctaggccccttacttgggagggactgtgtctgtgattctcaggaagtccttgttctagcaagagcagagagctgttgtccacttgggaagctcacagtagacc

SEQ ID NO: 33269 - DNA, 120 bp, synthetic construct
  source 1..120: mol_type = other DNA
ccaggtgcagttaggccacctgccctgatggaagtggccaggtgcagttaggccacctgccctgatggaagtggccaggtgcagttaggccacctgccctgatggaagtggccaggtgca

SEQ ID NO: 33270 - DNA, 120 bp, synthetic construct
  source 1..120: mol_type = other DNA
tgtcctagtggtggtgaggcccctgccgcccccgccctgcccagtgcttccttgctggcagccagcatggagctgggctcagtctttccacgagcactgtttgctgctggctgtcagagg

SEQ ID NO: 33271 - DNA, 120 bp, synthetic construct
  source 1..120: mol_type = other DNA
cgtggctactgtgttccactacctaggagttggaactagagcgggagtgtgacttgctcctggagtagccgcagcttccctttatccttgaggcaaaactgccatcaaactaaccaagac

SEQ ID NO: 33272 - DNA, 120 bp, synthetic construct
  source 1..120: mol_type = other DNA
tttgttgtgttgagctcctggtgtgtggaatttattttttttaaatccagaggaaaggcaagaggggatcccacagggatgtgagggagtgcggtgagatgcccaactccatcttgtgag

SEQ ID NO: 33273 - DNA, 120 bp, synthetic construct
  source 1..120: mol_type = other DNA
tcttgtgggagacgtgagggagcgcgaggaggtgcccaactccatcttgtgggagacgtgagggagcgcaggaaggtgcccaactcctccttgtgggagacgtgagggagcgcaggaagg

SEQ ID NO: 33274 - DNA, 120 bp, synthetic construct
  source 1..120: mol_type = other DNA
agacgcctggcaggttgaagcaccaggctattggtaaggcacctgcagtctctgaccctacaggaatctgtttgtcttctctgccacagacaaaaccaagagagtggcatcaaagagtct

SEQ ID NO: 33275 - DNA, 120 bp, synthetic construct
  source 1..120: mol_type = other DNA
tgccaagccgggtctaagagccagggctttcacgctagacaagaaacattttttggagctgcaaaaaatgcttccaaggaccccttttcctctctctctctctcttttttttttttcttt

SEQ ID NO: 33276 - DNA, 120 bp, synthetic construct
  source 1..120: mol_type = other DNA
gagactccgtctcaaaaaaaaaaaaaaaaggccaggtccccggagatgaggttttccaaatgcaggtccccgtggctgcagcgctcccagcacatacaaacagctgttgttacgacatcc

SEQ ID NO: 33277 - DNA, 120 bp, synthetic construct
  source 1..120: mol_type = other DNA
tttgcatttctaactattgcagggaccccactttgagaatcactggtcaacgtcaaccctctctataagcctcataagagatggcacagacttagtgcccaagacaacagcattcttcct

SEQ ID NO: 33278 - DNA, 120 bp, synthetic construct
  source 1..120: mol_type = other DNA
gctttcttattggtagggagacctgtaccccttgactggcagcacagattaggcacctgttgtgcgcacagtcagaaatgtattttgactgtcaagtgcagattaggcacctgttgtatg

SEQ ID NO: 33279 - DNA, 120 bp, synthetic construct
  source 1..120: mol_type = other DNA
attttgactgtcagcacagattaggcacctgttgtatgcacagtcacaaatgtagattttgactctcaagcgcagattaggcacctcttgtatgcacagtcacaaatgtacatttgatgc

SEQ ID NO: 33280 - DNA, 120 bp, synthetic construct
  source 1..120: mol_type = other DNA
tgtgattaagtggaagatctgaaatgagatcatcctggattagggtggaccctaaatctaatgactactgtccttctaagagacagaagaggagacacagacacagagaagaaggccaca

SEQ ID NO: 33281 - DNA, 120 bp, synthetic construct
  source 1..120: mol_type = other DNA
ctttctggaactgtggtagagctggttcctgtggtttctggcccccatttgtggccccttttgcagtgacagcctcaggaccccacaggtgtttccagggtctcggtgttcatcgatcct

SEQ ID NO: 33282 - DNA, 120 bp, synthetic construct
  source 1..120: mol_type = other DNA
tggtgtggacgggtgtgcgtgtgaaggcgtggatgggagtgaggtcgtctgtgtagatttggcaatggcgtagatggtgggatggtgtaggtggggtggtggtgctggtgtggatgggag

SEQ ID NO: 33283 - DNA, 120 bp, synthetic construct
  source 1..120: mol_type = other DNA
caggaagtcagcgtgggagggggtgtgtctctaggagtgtgtgtctcaaagacatagacatgcatacggtgaacacatcccggcagggacacaaacacatacacacgcagacacacacac

SEQ ID NO: 33284 - DNA, 120 bp, synthetic construct
  source 1..120: mol_type = other DNA
atgcaccgtggacacatcccattggggacacacacacacacacacacacacagggtgaacacatcccagcaggggtgagatgcatctgagtcaggcaggaaagctgacccccacctgggc

SEQ ID NO: 33285 - DNA, 120 bp, synthetic construct
  source 1..120: mol_type = other DNA
cgcggaggtatatgaacgaccgctaagcctggggctccacctagcccgggattggatggaaactgctccaggccttgggggctggaacctggagctcctgagggaaggcgtgtggcctgc

SEQ ID NO: 33286 - DNA, 120 bp, synthetic construct
  source 1..120: mol_type = other DNA
gccgctccgcacctgcaggaaggagctcctccgcagctcggcgcaggtgatcctgccggaccaggaccggttcacggcgtagaagatccgctggatgacctgcgggggcgctgtcagtgc

SEQ ID NO: 33287 - DNA, 120 bp, synthetic construct
  source 1..120: mol_type = other DNA
tgagaactgagcgggagagtgctgggcacacagtccccccaccacaccaaacccgaaaattacctccaaatgaattagctcataatttaaaataatcctaaagtaaatggagataatcaa

SEQ ID NO: 33288 - DNA, 120 bp, synthetic construct
  source 1..120: mol_type = other DNA
aagcagttttatagcttcttacaaaactaaacatgtggccaccagatgaggcagagctcacctctgcggtattaatcacctcaggaaaatgcaagcatgtctgcgtaaatcagtgcacag

SEQ ID NO: 33289 - DNA, 120 bp, synthetic construct
  source 1..120: mol_type = other DNA
tagggtgtgtaattatatgacaatacagctggccaaacaaaaaactattcaataaactaaaaaaaatgacagaaggaagtgtatgtaaaaaagatgaccatagatattcatgagagaaag

SEQ ID NO: 33290 - DNA, 120 bp, synthetic construct
  source 1..120: mol_type = other DNA
agactcagttgtttttctctgatccccatgtaggaggaacagaggccgcctccgtgacctggggcagagcaggcttcccgcagtagctgccgactgagtgctccttcagcacagctttac

SEQ ID NO: 33291 - DNA, 120 bp, synthetic construct
  source 1..120: mol_type = other DNA
cgaaatctctcacagccttgcagagctctggggaagaggaggcaaaacgcagggtcctccggggaagctcccagaacgcgtcaccttcagtgggaagaatgagctccaagtaaatcccca

SEQ ID NO: 33292 - DNA, 120 bp, synthetic construct
  source 1..120: mol_type = other DNA
gtgacagagtgagactctgtctcaaaaaaaaaaaagtgagatgaatacttggacatttttagccccaaatttacagagcatgcaccccattaacagacactctacggggcaaaagctgag

SEQ ID NO: 33293 - DNA, 120 bp, synthetic construct
  source 1..120: mol_type = other DNA
aggccaccaaggaacgctgaagaggtcagtcaggggaagacaggctgatgctaactttatccatgcctgacaacgcagcctcggcactgatcaagtaaacaccactggacacaaactgag

SEQ ID NO: 33294 - DNA, 120 bp, synthetic construct
  source 1..120: mol_type = other DNA
actaatagacgagagatggaacaaacaacacaaccaccccatgcgggcacagaagatttacaagcttaatctcatggacagaaatagactcggccccagcacagctgcagagcacacatt

SEQ ID NO: 33295 - DNA, 120 bp, synthetic construct
  source 1..120: mol_type = other DNA
cttcgtctcaaaaaggaaaaaaaaaaaaaaaagacttttggaaaacagcctcaaaatcctgaagtgcacacataggcagagatttagactctgacctggagccctcgaaccacctctgga

SEQ ID NO: 33296 - DNA, 120 bp, synthetic construct
  source 1..120: mol_type = other DNA
cactactgtgtacagggacgggccatccacacccagtggggccaccatggggctgtctatacactactgtatgcagggacgggccgtctacagtggggccgccatggggctgtctataca

SEQ ID NO: 33297 - DNA, 120 bp, synthetic construct
  source 1..120: mol_type = other DNA
tccaccgtccctctgctgtcgggacacaatcttaccatcaacctctaaaggctcctaaaatgcccagaagacctttatgcaaaattttcataaaaatctcttcacttttcattctcacta

SEQ ID NO: 33298 - DNA, 120 bp, synthetic construct
  source 1..120: mol_type = other DNA
gtatgcacctgtgtatgcacctgtgtgtatgcacctatgtgtgtgtgtgtgtatggacctatgtatgtgtatgcacctgtgtgtatgtatctgtgtgtatggacctatgtatgtgtgtat

SEQ ID NO: 33299 - DNA, 120 bp, synthetic construct
  source 1..120: mol_type = other DNA
aattttcaaatggtataaacaagttccgacggaacattctgaatatttcaggcttccgtagtattctcgggacaccagacgcaccagccatacgtgtttctataacatctggaagcaatg

SEQ ID NO: 33300 - DNA, 120 bp, synthetic construct
  source 1..120: mol_type = other DNA
ttgggaggccgaagcgggaggattgcttggacccaggaattccagagcactctaggtaacatagcaagacctcgtctctgcaaaaataaataaataaataaataaacaaaaattagcctg

SEQ ID NO: 33301 - DNA, 120 bp, synthetic construct
  source 1..120: mol_type = other DNA
ccgttcccgtaggactggttatgaggtcaacacattcaaacacagcttgctctcgattttgctgagcagaggaagatacagatgcatttgatccaaagtgtgttacatctttcattatat

SEQ ID NO: 33302 - DNA, 120 bp, synthetic construct
  source 1..120: mol_type = other DNA
cttgggtacctggtttctctggaagaggcttggacacctggtgtcctgggagggcctttgggacctggtgtcctgggagaggcttggagatctgttgtcctgggagaggcttggggacct

SEQ ID NO: 33303 - DNA, 120 bp, synthetic construct
  source 1..120: mol_type = other DNA
tctggtgtcctggggagaggctgggggacctggtgtctcgggagagagccttggggacctggtgacccgggagaggcttggacacctggtgtcccgggagaggcttggggacctggtgac

SEQ ID NO: 33304 - DNA, 120 bp, synthetic construct
  source 1..120: mol_type = other DNA
ttaactacacacgtttggaagatccttagagtctattgaaactgcaaagatcccggagctggtctccgatgaaaatgccatttcttcgttgccaacgattttctttactaccatgctcct

SEQ ID NO: 33305 - DNA, 120 bp, synthetic construct
  source 1..120: mol_type = other DNA
ataacagtgtgtcatcatttcctcccaagaaaaagctcactccacgtgagtagaaagacatctacctggtccctgtagaatctgaacgtttctctttagagacggaatttcaatcttgtc

SEQ ID NO: 33306 - DNA, 120 bp, synthetic construct
  source 1..120: mol_type = other DNA
ggtctagcctgctgcacatctaggctgtatagtaaattgctcttcagctacacacccatacagcatgttactgtactgaatactgcagacaaacctaatgcaagggtaagtatttgtgta

SEQ ID NO: 33307 - DNA, 120 bp, synthetic construct
  source 1..120: mol_type = other DNA
tgaccatacatagatagataaaagagagttggtagataaaatagatatggatagagccatagagagatagatagaacaaagagagttaatagataaaatagatgatagattgaaagacag

SEQ ID NO: 33308 - DNA, 120 bp, synthetic construct
  source 1..120: mol_type = other DNA
tttccttttttgcataaagaagtatcaaataagagtagtttcactgccctaaacatcctctgaggtccatgtattcatccctccatctgcccaacgccaaccaactccggatctttttac

SEQ ID NO: 33309 - DNA, 120 bp, synthetic construct
  source 1..120: mol_type = other DNA
ttcagctttatattaaactgccaaggttccataatttgggaagtgtgttcagagccacatcactctggataaagagcctttgcctgttctcattcaagcggttttctttctctgtctctc

SEQ ID NO: 33310 - DNA, 120 bp, synthetic construct
  source 1..120: mol_type = other DNA
cgcgcctggccagtttttgatgatttctgcagtaaacatctccatgtggagaaggagcaagctgggaccacagatgtgcaccatcacacctgcctaatttaaatttttaaaaaaaaattt

SEQ ID NO: 33311 - DNA, 120 bp, synthetic construct
  source 1..120: mol_type = other DNA
agaggggagggaaggagggagaaacacagagaaaggatagaaggaggagggagaggaagagagaaatatggatgatcgatagataggtgatagatgatttattgactgataggtgataat

SEQ ID NO: 33312 - DNA, 120 bp, synthetic construct
  source 1..120: mol_type = other DNA
tgtcacctggataacctgtcaggattaacgtctcgcaattactttctggttaacggaaccagccgagaaattggcatccaattctttgattcacttttggacacaaagaaaataggtgag

SEQ ID NO: 33313 - DNA, 120 bp, synthetic construct
  source 1..120: mol_type = other DNA
tctctttcttttccctacacagagtagacaaagaggtgtccctactccacatttacctggacccagtgtagacaggaggagaccctgccccacctccacctggacccagcgtagacaaag

SEQ ID NO: 33314 - DNA, 120 bp, synthetic construct
  source 1..120: mol_type = other DNA
ggggtgaacgcacttcgggtagcggaggaagaggtgaagggtctgtggcctgtggagccaccttgaaagaggttgcagggagggtggacaaggatgatcctgcaaccatggaaccaggaa

SEQ ID NO: 33315 - DNA, 120 bp, synthetic construct
  source 1..120: mol_type = other DNA
gaaacagtgagccttgtgttgtgttttgttttgtttctagaatacccagcctggcacggaaaacctactggtaagtgaaaccacagaccctactgacaaccctcagcgtaaccctacggt

SEQ ID NO: 33316 - DNA, 120 bp, synthetic construct
  source 1..120: mol_type = other DNA
ccctacactcccctactcacaacccctagtgtaaccctacagtctcctacccatgacccctggcggaactgtacagtcccctactcacgacccctacactctcctacccatgacccctgg

SEQ ID NO: 33317 - DNA, 120 bp, synthetic construct
  source 1..120: mol_type = other DNA
ctacccatgacccctggcggaaccctacagtcccctactcacgacccctacagtctcctacccatgacccctggaggaaccctacagtcccctactcacgacccctacagtctcctactc

SEQ ID NO: 33318 - DNA, 120 bp, synthetic construct
  source 1..120: mol_type = other DNA
actcacgacccctacagtctcctactcatgacccctggagtaaccctacagtcccctattcaggagccgtagtgtgaccctacaatcccctactcacaacccccggtggaaccctacagt

SEQ ID NO: 33319 - DNA, 120 bp, synthetic construct
  source 1..120: mol_type = other DNA
acaggtctatgcttttctctgaagatgattttgagggctccaaattgaaaaggggaaggggcaggatattgagaagtatgcggttttcacctcaacaaagggtacagaagaaaaattgtg

SEQ ID NO: 33320 - DNA, 120 bp, synthetic construct
  source 1..120: mol_type = other DNA
gaactgtcctgcattctcagagtgggagatgaaatttttaaaaaggaaataaaactcttgtcggggaacctcagcttttatcctttagacgtttgactgattagaccaggcccactcttc

SEQ ID NO: 33321 - DNA, 120 bp, synthetic construct
  source 1..120: mol_type = other DNA
cgcagccatgaaaaggaacaagcagctttattcacaatagccaagaggtggagacagccctcatacccatctatagacgaatggataaatataatgtggtccagccacacggtggaatat

SEQ ID NO: 33322 - DNA, 120 bp, synthetic construct
  source 1..120: mol_type = other DNA
tgaatgctgaggacatcatgcttcctgagagaggccagatacaaaaagatacatagtgtctgtatgattccatttattccctatgtccagatacaggcaaatccacagagacagaaagtg

SEQ ID NO: 33323 - DNA, 120 bp, synthetic construct
  source 1..120: mol_type = other DNA
gacaggtagatagatgaatggatggatatatggatgtatggatgagatggatggatgggtgaatagatggtagctgatggataggtaggaagatgaatagttggatgcatggatgagatg

SEQ ID NO: 33324 - DNA, 120 bp, synthetic construct
  source 1..120: mol_type = other DNA
tgtataaagagagacagagacagggtggagagagggaggaagagacagagaagataaaggaggaaggaggagagaagagaaacagagattgatgatgatagatgagatacctaaaaagac

SEQ ID NO: 33325 - DNA, 120 bp, synthetic construct
  source 1..120: mol_type = other DNA
gattcccagagacctgaaggttggggcagagtacaaaacccaacctgcccacaggaaattcaggaaaaacgccagcaatgatggctgtgggaagggagacaatgatggctctacgtcaat

SEQ ID NO: 33326 - DNA, 120 bp, synthetic construct
  source 1..120: mol_type = other DNA
acaccgccatcgtggacagacaccgccatcgtggacagacaccgccatcatggacacacaccgccatcatggacacacaccgccatcgtggacacacactgccatcttggccatcgtgga

SEQ ID NO: 33327 - DNA, 120 bp, synthetic construct
  source 1..120: mol_type = other DNA
cctgttataactagagggtctggattcacagagcaggagcattgccatcttcgacacacactgccatcttggacccattacaccatcttggacacacaccgccatcttggataagcacca

SEQ ID NO: 33328 - DNA, 120 bp, synthetic construct
  source 1..120: mol_type = other DNA
tcttggacacacacagctatcttggataagcactaccatcttggacacacaccatctgggacacacactgccatcttggacccataacaccatcttggacaagcaccgccatcttggaca

SEQ ID NO: 33329 - DNA, 120 bp, synthetic construct
  source 1..120: mol_type = other DNA
actatcccatcaccagtaactatcaccccattaccagtaactatcccacatcacctataactatccgcctgtcaccagtaactaccccccatcacaagtaactatcccttcatcactaga

SEQ ID NO: 33330 - DNA, 120 bp, synthetic construct
  source 1..120: mol_type = other DNA
tttctccattcctagggggtcctgggtcactctcccctcccccatacctagggattccggatcactctcccctcccccatccctaggcggtcctggatcactctcccctccccattccta

SEQ ID NO: 33331 - DNA, 120 bp, synthetic construct
  source 1..120: mol_type = other DNA
gtcactctccccaaccacatgcctagggcgtcctgggttactctccccacccccatcgctagggggtcccaggttacaggttactctctccaaccccatccctaaggtgtcccgggtttc

SEQ ID NO: 33332 - DNA, 120 bp, synthetic construct
  source 1..120: mol_type = other DNA
cctccctgctctttcttcctccagaggagacctgcgacttcttaccaactgctctacaaacagcttcctcaagctggctttaaaatggcccggagttttcgtttcagtttcagggagaag

SEQ ID NO: 33333 - DNA, 120 bp, synthetic construct
  source 1..120: mol_type = other DNA
cggcaaatgtagagagaatgaataaatgatacccagagattccccacaaatgtggagggaatgaatgactgacacctaaggattccctacaaatgtagagggaatgaatatcactcagag

SEQ ID NO: 33334 - DNA, 120 bp, synthetic construct
  source 1..120: mol_type = other DNA
atggaatgtgtggagcaaatgagtaaatgaatgaatgcatgaatgaatgcatgaatgaatgccactctgagaatgcagagtgaatgagtgatggaatggacagaaggcggcaggggcagt

SEQ ID NO: 33335 - DNA, 120 bp, synthetic construct
  source 1..120: mol_type = other DNA
tcatccagccccaaaatgtcagcagtgctgaggctgagaaactccacatatcggttatccccacatgagagactccttatattggttatctatgtatccatctatgtatctacctatcta

SEQ ID NO: 33336 - DNA, 120 bp, synthetic construct
  source 1..120: mol_type = other DNA
tagccctgaggttcttgtgtcctgaaaataccttataaatccagggcaaaccaagatggattatctccccacatccaacacctgcacaggtaagtacaattctgtttaatcttgatgtct

SEQ ID NO: 33337 - DNA, 120 bp, synthetic construct
  source 1..120: mol_type = other DNA
aaaaacaaaacaacaacaaaaaaaaaacaggaagagaccgcagagcatccacgtactccctccttctctccctccctccattcctcccttcttcacccctctcccacaaatataagcaca

SEQ ID NO: 33338 - DNA, 120 bp, synthetic construct
  source 1..120: mol_type = other DNA
aataatctctctggtctgtaatattctctgattccccaaaagctccctagtcccccaaaacctgtctgtttccccaaaatctttctggtctttaatattcttgctgggcccaatggtctc

SEQ ID NO: 33339 - DNA, 120 bp, synthetic construct
  source 1..120: mol_type = other DNA
taaaacagcagtatttattttggtgactgagttttttggcattggagtgtctacacgtctccccgtaaccccgttcctgtttgattttctcatctgcaatgtagcgatggggtagaattg

SEQ ID NO: 33340 - DNA, 120 bp, synthetic construct
  source 1..120: mol_type = other DNA
tgacagggatttgaaccgtgtcagaaccaagagaacccggccttcccagaatgcaccttgaaaccagggctgaacgttccctttagcctcatgtgcttttttattttttttatttttttt

SEQ ID NO: 33341 - DNA, 120 bp, synthetic construct
  source 1..120: mol_type = other DNA
aaaaaaaaaaaacaaaaaaccaatgataggacaaaaacccggtttcacataagaggcctttaaagcaattgcctgggtcgttcactgtggttggggtaccagagacaacctcaggtcact

SEQ ID NO: 33342 - DNA, 120 bp, synthetic construct
  source 1..120: mol_type = other DNA
tttctcactgctttatgtgacgctggtgccagcgtgttgatgtgtgtggctggtgatgtttgcacgagagtcccggcactgaactcctgggagcaggtccatcctgcccgtggtgttctt

SEQ ID NO: 33343 - DNA, 120 bp, synthetic construct
  source 1..120: mol_type = other DNA
cgagtcacatttagaaggcaggcactgaaatcatcccacaggtaagggtagacatcctgcccaatatggctttccttttagataacgacctgaaataaatagggtcctaatttctattct

SEQ ID NO: 33344 - DNA, 120 bp, synthetic construct
  source 1..120: mol_type = other DNA
gtacatggacacagcctctctgtgtgagatggggacagtgtcccagttctcctgtgaggtccacccatcctggtggtccatgagtacatggacacagcctctctgtgtgtgataaggaca

SEQ ID NO: 33345 - DNA, 120 bp, synthetic construct
  source 1..120: mol_type = other DNA
ttcccagaggaccatgcccagcagatgcagggagcatcgtgcccagaacatctgtgcccagcagatccagggagcaccatttccagggcacgtgcgcccagtagacacagagagcagtgt

SEQ ID NO: 33346 - DNA, 120 bp, synthetic construct
  source 1..120: mol_type = other DNA
cagggagcactgtacccagagcaccagtgtacagcagacgcagggagcactgtacccagagcaccagtgctcggcagacgcagggagcactgtccccagagcaccagtgtatagcagatg

SEQ ID NO: 33347 - DNA, 120 bp, synthetic construct
  source 1..120: mol_type = other DNA
agacagagggagatgaataacctttaacccacctgagatgctgttatgattattcacagggtgcacctacctgctctgaaggtcatccatgttcagctcagcgacgtaatgggtggcaga

SEQ ID NO: 33348 - DNA, 120 bp, synthetic construct
  source 1..120: mol_type = other DNA
gggcaaacgagaaaggaagagagaaggagagggaggaaataaggggagagacagagaaagagacagagagaaagagagaaagggggagagaaggaaggcaaaggagagaggaggagagat

SEQ ID NO: 33349 - DNA, 120 bp, synthetic construct
  source 1..120: mol_type = other DNA
accagtatgtttttaagcatgtctcatatgccttggatgctacgtaactttggaacatacattgaaatgatgcatctttgagtgtccagagctaggctctctgggcacacccagaaaaaa

SEQ ID NO: 33350 - DNA, 120 bp, synthetic construct
  source 1..120: mol_type = other DNA
caggcagatagacccaggcagataggaataggacccaggcaggcactgcaagctgtgagcatcatcttgggaatatgcaaatgtttgtgctgaattactttcctttttaaaattatttat

SEQ ID NO: 33351 - DNA, 120 bp, synthetic construct
  source 1..120: mol_type = other DNA
gggaaaaatgtggaaggattccttaactcattgtctgcgacaaatccagctgccttttaactcttagcaactgccagtatcaaatacttgaaagtgacgagatgctccatttaatgcaac

SEQ ID NO: 33352 - DNA, 120 bp, synthetic construct
  source 1..120: mol_type = other DNA
ctctacctatgaggtattttgttcaccgtttgagtgacaggttcaactgaagcgtgaaccgcagcactacacaatgtatcttacaacaaagctgcacgtgtacctcatgaaatttttttt

SEQ ID NO: 33353 - DNA, 120 bp, synthetic construct
  source 1..120: mol_type = other DNA
gaaaagtgaacctatgaaaagaggaaaacactatgacatccaccactgtttggtcacaccaattcttgacattaactctctcgaaggacattagtatgaccttcaaatcctagcccgcag

SEQ ID NO: 33354 - DNA, 120 bp, synthetic construct
  source 1..120: mol_type = other DNA
caggggaaagacctcccagcaataagaaagaggtccaggcagcaaccatacaggaagaagcaaaaatgaaactggaaagtcagaatgaaaaactgcccaatgtctgctatattattttct

SEQ ID NO: 33355 - DNA, 120 bp, synthetic construct
  source 1..120: mol_type = other DNA
gttctatggtatcatgccgccattttatcaccgttctatggtatcatgccgccattttatcaccgttctatggtatcatgccgccattttatcaccgttctatggtatcatgccatttta

SEQ ID NO: 33356 - DNA, 120 bp, synthetic construct
  source 1..120: mol_type = other DNA
gagagcatactggtcttaggtccaggttactgccattgaatggtagtaggcacatccccacagaactgggctggcatctgtagggatctacatcagtggttttccattggaggccttttt

SEQ ID NO: 33357 - DNA, 120 bp, synthetic construct
  source 1..120: mol_type = other DNA
tgaacagcaatcattaccattttcataatcatcactatcaccaccatcaccaacatcatagccaccaccatcatcattaccatcatcaccatcaccaccatcatcactaccatcatcacc

SEQ ID NO: 33358 - DNA, 120 bp, synthetic construct
  source 1..120: mol_type = other DNA
tttcttgacctaaaacatgggtacttttatccactcatgagtgtatgatcaattgacacacacgagtcactcaccaacagctgcacaaggatgctccagagataaatcttctcttgcctt

SEQ ID NO: 33359 - DNA, 120 bp, synthetic construct
  source 1..120: mol_type = other DNA
aacacataaacaaactataaatgtctagacattgaccatgtacaagtgtgcagtgtggacagtgaatggaaatgtgagcatgaaatgtgtgttgacgcctcccatctcctgtgcacacac

SEQ ID NO: 33360 - DNA, 120 bp, synthetic construct
  source 1..120: mol_type = other DNA
ggggtatacctgccccacaggagagacctggacttggcagcagcagggagctggggcaggagggaaatcggccccacccacatgctgcaagcacgtcagccaggtcagagttccaggtga

SEQ ID NO: 33361 - DNA, 120 bp, synthetic construct
  source 1..120: mol_type = other DNA
caggaacgcatgagtctatctgtttatctacgcatatgcctgtctacagcctgactcgggacacttctcgaaaacatgaaagaaacaaaaggactcactatgaaaaggaaaacagtcaat

SEQ ID NO: 33362 - DNA, 120 bp, synthetic construct
  source 1..120: mol_type = other DNA
ggcagtagtggaatgggttaatttgaactgtcctcatattcccagttgaagggagacctgaagaggtcacagaggaagaggagtcagagatcacgataagcttttagagaaattttcaaa

SEQ ID NO: 33363 - DNA, 120 bp, synthetic construct
  source 1..120: mol_type = other DNA
aaagagctggattccaggagtgcaccctgtcatttaacatgctactggagatcttatccaacatggtcagacaaataattacaacagacacaagaacggcagagggagagtcaaaatata

SEQ ID NO: 33364 - DNA, 120 bp, synthetic construct
  source 1..120: mol_type = other DNA
ccttttaaaacttaaacataattcctagcttgtggatccagttttggaagcgatttaaattctagaaagcctgcagtaaactggctatttgatacgttctcagagttcctgcctttccag

SEQ ID NO: 33365 - DNA, 120 bp, synthetic construct
  source 1..120: mol_type = other DNA
tgtaggggaagaaggatgcggacagggcaggagaaggaatgaatgcggtcagcacggtggctggaggatgtctgggatggcgaggtgcagagaggagcaggctggctgcgtctctcactg

SEQ ID NO: 33366 - DNA, 120 bp, synthetic construct
  source 1..120: mol_type = other DNA
ccatggaactccaaaaatagcccagctgggaagaaatggaacgttctgggggacactgattttcacattgaaatttcctatctttttaaatttattttggttgagacagtcgcccaggct

SEQ ID NO: 33367 - DNA, 120 bp, synthetic construct
  source 1..120: mol_type = other DNA
tacgttctcagagttcctgcctttccagttaaacacaaataaaataggagtccggtgacctcgaacaccccagggtaagaacgcacaagctaaaagccagttggagcctgaatgtgaaaa

SEQ ID NO: 33368 - DNA, 120 bp, synthetic construct
  source 1..120: mol_type = other DNA
acgatgcaaatgcttagttatgaggactgaaaatgaacccctttcaacccaaaacgtgcaagaaagagaaatttcggcattttaatgatgcccaaggacaggcagtcaaccaacagcact

SEQ ID NO: 33369 - DNA, 120 bp, synthetic construct
  source 1..120: mol_type = other DNA
gtgacttgaagggcgtggcattccagtgttttctgccaccattgttcttaattccttcttccaaatcccagcttctccctccaaaatagttttaagactgacatgcagaataaagtttcc

SEQ ID NO: 33370 - DNA, 120 bp, synthetic construct
  source 1..120: mol_type = other DNA
cctacaaagacaactgaaggctgaggataaaaaatgcctcttggaagtcactgagtttgttaggtataaaagccaagacttcaactgaggtctttgcactgatgtgtacattaaccccac

SEQ ID NO: 33371 - DNA, 120 bp, synthetic construct
  source 1..120: mol_type = other DNA
atgtcagtcatttctttctgattttaaaaattagttctgaccatttccatacagtaaaagtagagttgaaactacttcatcccgtggggcagattaccagagattcgtttgccggaaggg

SEQ ID NO: 33372 - DNA, 120 bp, synthetic construct
  source 1..120: mol_type = other DNA
aaatatttaaggtggatggatatcccaagtaggctgatttgatctttacaaattatataaatgtattaaattattacatgtaccctgaagctatgtacatctgttatgcatcaattaaaa

SEQ ID NO: 33373 - DNA, 120 bp, synthetic construct
  source 1..120: mol_type = other DNA
tgtttccatttaggactacaggtttccaggcttgagggcggggcctttgctggggaactgccctcttgtatctagtatcttcaggcctcctgtccgtatcaacatgacttaaaatgtgtg

SEQ ID NO: 33374 - DNA, 120 bp, synthetic construct
  source 1..120: mol_type = other DNA
ggtgtgggtcaggcatttgggagctgggagacctgcattttaagaagcaccccaggtgatgcccaagcggagctatgtgcttcttttaagagatgatgactccgtgtgcaaccgtgtggt

SEQ ID NO: 33375 - DNA, 120 bp, synthetic construct
  source 1..120: mol_type = other DNA
gtatttgtcagtgtaggctagctgctataacaaacagcccccaaagaattaaaagtttatctcttgtttgtgttgcagccaggtgaggtggcaaaggtgtcctatgctccatatagtctc

SEQ ID NO: 33376 - DNA, 120 bp, synthetic construct
  source 1..120: mol_type = other DNA
tataattttacattttaaaaaggagacagagaaaggaaggatgggagagagggagggagggtgggaggaggaaggaagggaaaaggaagagaagaaagaaaagaaggaaacaatgaaagg

SEQ ID NO: 33377 - DNA, 120 bp, synthetic construct
  source 1..120: mol_type = other DNA
gtgctgggattacagggatgagccaccgtgtccagcctctggtatactttaaattatctctaggttactcataactcctgatacgctgtaaatgctatgcaaatagttgttatactatat

SEQ ID NO: 33378 - DNA, 120 bp, synthetic construct
  source 1..120: mol_type = other DNA
tctttcacccaacatggcagccatcattaacgaacaccacgtgttaacttcagtagcttttgtggcagtgatttgtaagcctttgttaaccaagggctgaaactgagtaagcagagagag

SEQ ID NO: 33379 - DNA, 120 bp, synthetic construct
  source 1..120: mol_type = other DNA
caacatgggccaaaggtggtcggggtacagcttgcttttacacatttcagagacatgagacatcagtcaatacatgtaagatacacattgctttgatctgaaagggtgggactacttgaa

SEQ ID NO: 33380 - DNA, 120 bp, synthetic construct
  source 1..120: mol_type = other DNA
atggcacaagagatgaagggtcctgtgtcataggaggtgagggactgtgatgagaagggtcgtcttggggagcagggtttgcaggaagatctctgagggatgggtggttttttccatggc

SEQ ID NO: 33381 - DNA, 120 bp, synthetic construct
  source 1..120: mol_type = other DNA
cccgtggctggtgtttgagatctggatttccaatggagaagtcacaccattaaaataataagctgactgtgcctaaactatatgcaaaagcaacgtggttcatgctaaacacctcctttg

SEQ ID NO: 33382 - DNA, 120 bp, synthetic construct
  source 1..120: mol_type = other DNA
tcctgcatacataggtacccctgtcaaacaccgaggcctcacgaaccgtgagggtgccattgtccagaagagaaacgcgtcccagggtttgggggccctccagatgcatgccattgggga

SEQ ID NO: 33383 - DNA, 120 bp, synthetic construct
  source 1..120: mol_type = other DNA
tgaataaggagagtgccatcttggtatatctgatacttctcagaggaggtggggatcaccttgttggttggggacaaccaagtcaccttgggcatgggttctcctttggcctcacaggct

SEQ ID NO: 33384 - DNA, 120 bp, synthetic construct
  source 1..120: mol_type = other DNA
tttttatggggcaagagaggaggaagttaagtatttgttaagaagttgagtatttgttctggatccgagtttagagggacaaaatttcattgcagaaaaagcacacactggggccgggcg

SEQ ID NO: 33385 - DNA, 120 bp, synthetic construct
  source 1..120: mol_type = other DNA
gaatcatggtgcaaaactccccgaaatataatgctgcaaagataagtgaaattcaagggcatgaagctttatttcatgttaaggaccatgaacctcctcagtgggtaaaattccaagtaa

SEQ ID NO: 33386 - DNA, 120 bp, synthetic construct
  source 1..120: mol_type = other DNA
cttcatgctcaagggtagcaccaggcatcgctggctcacactgtggccatcacgacctctgaaatccctcccaagtgctcatccgtaaacctcactctgcttccttttcttatacttgta

SEQ ID NO: 33387 - DNA, 120 bp, synthetic construct
  source 1..120: mol_type = other DNA
gggtggcttcccgacctcagtttagggatggctgagatcgtttttctgactccagttcagaatagtgatgaattttctcctatgcctcaactaaacaacgtgccacgcagcacagcagac

SEQ ID NO: 33388 - DNA, 120 bp, synthetic construct
  source 1..120: mol_type = other DNA
cttttattcttttactttcttaataaacttgctttcactttatggactttccccaaattctttattgcgagagatccaagaaccctgtgctggggtgtgggtcgggacccctttcctgta

SEQ ID NO: 33389 - DNA, 120 bp, synthetic construct
  source 1..120: mol_type = other DNA
ctcacttgtatgtgggagctaaacactggggacacacagacacagagagggggaaaagcagacacctggccgctggaaggagaagcacaggagaaggatgaggatggaaaatctacctgt

SEQ ID NO: 33390 - DNA, 120 bp, synthetic construct
  source 1..120: mol_type = other DNA
gagacgacatgtaatggtttgtttcatgtgttgatgggccgtggggtgcccagatgtttgttcaaacactgttttggggtatgtctgtgtgtttccagaaaagaaacacatatatcatac

SEQ ID NO: 33391 - DNA, 120 bp, synthetic construct
  source 1..120: mol_type = other DNA
catttcggatcaatagcggatatgtggtgttctgatttcctccacggtgccagtgaaggagactgacttcctgcccactggctctttgccagcaatcgcagcccacctaaaacgagctgt

SEQ ID NO: 33392 - DNA, 120 bp, synthetic construct
  source 1..120: mol_type = other DNA
ccacctctccattcacttcttatagctcagcaagttcaaaatgtgtggtcttgaggcataaagggaagcagggacactatatgaggaaggagaagtattttgttggagtggtgttttttt

SEQ ID NO: 33393 - DNA, 120 bp, synthetic construct
  source 1..120: mol_type = other DNA
acacccggcctctaatggctatttatcatgttttctcctactcagatcaaatgcaaatgccaactggactttcacttaagatcctaatggggaagcaaaatgtccatcatcctgtctcac

SEQ ID NO: 33394 - DNA, 120 bp, synthetic construct
  source 1..120: mol_type = other DNA
agggtggaaatcacaggctctaagccaagtgattttaagaaacagattcatggcattaaaagcactcaataacagagagatcattgtggtattctcttctcacggctctctcagaccttc

SEQ ID NO: 33395 - DNA, 120 bp, synthetic construct
  source 1..120: mol_type = other DNA
gatttggagggaacttggccctgcaagcaccttcatttgcaacttctggccttagaaagcgtgaaccgatacatttctgttgttataagacacaccgtttttggtgcttttttttttttt

SEQ ID NO: 33396 - DNA, 120 bp, synthetic construct
  source 1..120: mol_type = other DNA
tagaagcaacacctatattgaggacacaaacaagtggcaaggatagtgataccccaacacgaagatgaacgtacccagttttggcgaagttcgtccagtaggtcatgaccacggcgctga

SEQ ID NO: 33397 - DNA, 120 bp, synthetic construct
  source 1..120: mol_type = other DNA
tctcaggcatgtgagtttctggatgtagtagcattcagctctgtcaggggcccttttacccattttcatttccattcccccttcacccctcctcctgaacattcattttagggaatgtta

SEQ ID NO: 33398 - DNA, 120 bp, synthetic construct
  source 1..120: mol_type = other DNA
ttactgctgaagaacaccccatgttctagaattaacagaatgtttcctaatcacatcttgtttttcttccttagggttatggtgccctttgtaggaaacaacgcacccaggaactgctct

SEQ ID NO: 33399 - DNA, 120 bp, synthetic construct
  source 1..120: mol_type = other DNA
atactatctccttttatgggctgaatgttggcattctcccaaaattcaaccttgaaatcctaaactcccttcccccaggagatggtattaggaggtggcatctttaagaggttgttagat

SEQ ID NO: 33400 - DNA, 120 bp, synthetic construct
  source 1..120: mol_type = other DNA
ggagaagtgggagtgaaggaaatggagtaatgttatttgtcttttatttctttattttctgagacaggatcttgttctgtcatccaggttgcagtgcagtggtgccatcataggtcactg

SEQ ID NO: 33401 - DNA, 120 bp, synthetic construct
  source 1..120: mol_type = other DNA
taaaaggtgagactatatgatgggcattctaaaaatacatagaagacaacacctggctgcacaggaatgacatccttcatggcaagtccatttggaaaggcatatgcctggcatttagct

SEQ ID NO: 33402 - DNA, 120 bp, synthetic construct
  source 1..120: mol_type = other DNA
tccctcccttgattttcttttgagtcttttttaaaaatttgagacaggatttcactctgttgctgagactggagtgcaatcacagcacactgcagcctcgaactcctaggctcaagcaat

SEQ ID NO: 33403 - DNA, 120 bp, synthetic construct
  source 1..120: mol_type = other DNA
ttgcaaagtgtcttggtttttctttatctgataatttctggattagaggttgccctatcttctgcaatgtgttcactctattgctgtgttatctactgcatggacccctgccaactcccc

SEQ ID NO: 33404 - DNA, 120 bp, synthetic construct
  source 1..120: mol_type = other DNA
atcaacggaagcctgaacctcagcaacacacaagatacccttgtaacacacctgcagacgtaatccttggatctaaagtaaaaacagggattttctaaaaagctatccctcaggaatttg

SEQ ID NO: 33405 - DNA, 120 bp, synthetic construct
  source 1..120: mol_type = other DNA
aacatagataggagcttaatatttcagttggttagtttgcagaaatatttatatataaatacgtggaaagagagagagggagaaagagagggagagactgacaaataattagtttggata

SEQ ID NO: 33406 - DNA, 120 bp, synthetic construct
  source 1..120: mol_type = other DNA
aatacagggattaatgcaaccatgtgccattagccatccctcccccacttaacattttgctcatttccacaggaaaatctatgctgaggatttaatggattactgctaacatcttcccca

SEQ ID NO: 33407 - DNA, 120 bp, synthetic construct
  source 1..120: mol_type = other DNA
ccctaggctgaattcgtgacgcgcgcgcccagcacccgggcgagttgcaagccccggcgcaccgcaggggccaaaaccccgccggaacctcctaggaccccttcacgctgcctcctgcac

SEQ ID NO: 33408 - DNA, 120 bp, synthetic construct
  source 1..120: mol_type = other DNA
aatcaatcacgtgcgttatttcgtgcatcacccaagccgtcatcttatccgaggcccggagatgaaggagggaaaaaaaatcgcttaaatgcgaccccaaccaagccggttttccctttt

SEQ ID NO: 33409 - DNA, 120 bp, synthetic construct
  source 1..120: mol_type = other DNA
agctacaggcagagtttacagaactatgtgtgacaatttatctgaggcagttcaccagtttactaaaaaacagcacagtatagtcctcacaaaatgaaaacaaaccccagcatgctaggc

SEQ ID NO: 33410 - DNA, 120 bp, synthetic construct
  source 1..120: mol_type = other DNA
attacagacaattctcacctttgattgaacatccagcaattatagtatctcctgccagaacttgtgttgaggagaaaataggtttggcttaggaaggtgcacttggcaaagcctcccttt

SEQ ID NO: 33411 - DNA, 120 bp, synthetic construct
  source 1..120: mol_type = other DNA
aatttttatgactgttttagtttctgggagtccttagggtttttgcagtttctttccagagcctgaggggctttgctgtatgtttgtgtgatatttcacacctgatgaatggagagccag

SEQ ID NO: 33412 - DNA, 120 bp, synthetic construct
  source 1..120: mol_type = other DNA
cgcctcgggcctgaccattacttagcccacaacacgtccctttcttctttctgttttgggactggaccatccagccaatagattctgggccttttttacatgtaggggtggtgccagatc

SEQ ID NO: 33413 - DNA, 120 bp, synthetic construct
  source 1..120: mol_type = other DNA
tggaaactgagaaaataaactgttaactatggtcctaccaagtttgacgctgttcctgctggctgtgtgtgtgggcgtctatgtgtggcttcataatctttcctgtacatattaacattg

SEQ ID NO: 33414 - DNA, 120 bp, synthetic construct
  source 1..120: mol_type = other DNA
ggagaaggaagtgagatggaaaagttctttgattgcatccaagaagtgaatggtcctcaaggtgcagcagaggaatttgtaggagagagggatgattgattgacggcttttttttttttt

SEQ ID NO: 33415 - DNA, 120 bp, synthetic construct
  source 1..120: mol_type = other DNA
gaggggtatatacagggaggccaggcagcctggagttagccgaccgttgcgagacgttgagctgcggaagatgagtccaaagccgagagcctcgggacctccggccaaggccacggaggc

SEQ ID NO: 33416 - DNA, 120 bp, synthetic construct
  source 1..120: mol_type = other DNA
tgaaaaaagcctttttatttttgcaactcaggagacagaaagtacaattcatatttccatacattagaaatacacaggtcttttctacatctagtagaatttactatatacaaatatatg

SEQ ID NO: 33417 - DNA, 120 bp, synthetic construct
  source 1..120: mol_type = other DNA
aaaatattatgcctaaacatgtgcttttagtgtatctcacctcacaatattcccagtgaaattcacctcgccaatgaacctcaacacgtctacagcacttgttctcaactggaggtgatt

SEQ ID NO: 33418 - DNA, 120 bp, synthetic construct
  source 1..120: mol_type = other DNA
aagagctgctttagatttttttaagggagatgtaagcttcagaatcaccatctgaactaaaaatatctgtccaatgtctattacccagacaaaagaagcatgattaaattttataaaatt

SEQ ID NO: 33419 - DNA, 120 bp, synthetic construct
  source 1..120: mol_type = other DNA
ttcctgttttacttaggtaggtaaagacatatggacacctttcttttacagtgtttaattttgataaattgctcttttctcagaatcagcattgatggggaaaatatattatccttatga

SEQ ID NO: 33420 - DNA, 120 bp, synthetic construct
  source 1..120: mol_type = other DNA
ggacatctttccaagcctgttaggctttaaaataacacattcattcctacatctcttccctccacattgggccatcataacacaacttagaaagagaggcacttttggttttcacggtct

SEQ ID NO: 33421 - DNA, 120 bp, synthetic construct
  source 1..120: mol_type = other DNA
acctgtctagtttgtacatcctcctgtctaattatgttcacagatcaagttggcctagagatcatgtccttacgtgggtcatgccagatgatgcctctgatccggttgttctgttgtggg

SEQ ID NO: 33422 - DNA, 120 bp, synthetic construct
  source 1..120: mol_type = other DNA
ggccagaagactgaccctttgaacacgtttattcccagggcaagaggaatattttctgtacatttctttactttggacaataaagtggggggaaaaaagataaaatagcggcaagcaact

SEQ ID NO: 33423 - DNA, 120 bp, synthetic construct
  source 1..120: mol_type = other DNA
caacaagagcaaaactccgtctcccaccaccccccccccaaaaacaaaaaaacaaaaaaataaaacaaaaaaaaaaccagaaggtaagggcagtagggtggattgacaaaaagtgctgat

SEQ ID NO: 33424 - DNA, 120 bp, synthetic construct
  source 1..120: mol_type = other DNA
gcaactccaacagcctcagtgagcctcattccctgtatctgagaataaggatactaattcagccaatgcaataggtttggtgtgttttaaatcagttcatgtactggttttctacagctg

SEQ ID NO: 33425 - DNA, 120 bp, synthetic construct
  source 1..120: mol_type = other DNA
gccctgaaagtattgtaaatggcacccccaaatgaccagtatggggactaacaatgcccacactcatttatgtgagttgagctcaattttaacagatcaattcatagatatttgctttga

SEQ ID NO: 33426 - DNA, 120 bp, synthetic construct
  source 1..120: mol_type = other DNA
gtctgcctctttgcagtgttttagcatcggaaatggtgcattgcatacagtaggtgctcagtaaaggttagttgaatgaagtcctctcatggatcaatgcctcatactctatctgtaaac

SEQ ID NO: 33427 - DNA, 120 bp, synthetic construct
  source 1..120: mol_type = other DNA
gatccacagaaagtctcccacacagatttccagtgacttcctaactacaaaactcagtgagcccttttagttcgcatctcactgacctccaatagaattaaaaagtgttgaccttgtctc

SEQ ID NO: 33428 - DNA, 120 bp, synthetic construct
  source 1..120: mol_type = other DNA
agagataaaaagttttgagtgcaagaaatccccacaggagaggcatgttaacccttttactttctgaggtctcttttcagtagtgttggaatatttctttcagagccacgtgaaggggca

SEQ ID NO: 33429 - DNA, 120 bp, synthetic construct
  source 1..120: mol_type = other DNA
gcttaaaattttcagctggggctcctataacttaaggcagagagaaagtctttcatggaaaccaacataaacatttgccacccataagaatagagagaaaaagggacagagagggaggga

SEQ ID NO: 33430 - DNA, 120 bp, synthetic construct
  source 1..120: mol_type = other DNA
gaaatcatgccaaggagaccacaagaaaagcctttcacgggaactggcttcatctaagctggtgctttagccactgaaactgtaaaacaaataaattacagcactgacaattcaagaaaa

SEQ ID NO: 33431 - DNA, 120 bp, synthetic construct
  source 1..120: mol_type = other DNA
gctgctgcggcttctgcttcttctgcttcatcatctttctgcttctctgcgatgtattctttaaggacattcagcaacttccgagtatgtctataatcacgtttctgcctgtaacacata

SEQ ID NO: 33432 - DNA, 120 bp, synthetic construct
  source 1..120: mol_type = other DNA
aaggccctttttaatgtcagctagatagtaaatgaaaatgcattaaaagttaatgttgaaaagtggtttcttcgcatatattgaaatcaacgtgagatatgatggttcagcaatatcgga

SEQ ID NO: 33433 - DNA, 120 bp, synthetic construct
  source 1..120: mol_type = other DNA
tttaggcttgactctttccaattagggacctgcctgttgttaggatttagagtccatgtgaatgtgcagtattgttcagtgctgcgagcatttttgcttgtctgaatttcctgatagaag

SEQ ID NO: 33434 - DNA, 120 bp, synthetic construct
  source 1..120: mol_type = other DNA
caggaggtcaagactgcagtgagccatgcgagtgctccagcctggatgacagaacaaaatcttgtctctataaaaagaaactggaaaaaaaaaaaagtagttctagaggtcataagttcc

SEQ ID NO: 33435 - DNA, 120 bp, synthetic construct
  source 1..120: mol_type = other DNA
atgcttcactccctctggctctggctcttatcccaaatcaaagaatgttggtttttttagtgtttcctttataaacaaggatggtttccagattttttttttctttttgttttttttttt

SEQ ID NO: 33436 - DNA, 120 bp, synthetic construct
  source 1..120: mol_type = other DNA
cagtctgaggtgggtgcctttgtgaaaagcaattaaaatgtataactagaagagcaatcatgtctcagacaccaacgcaagcacaacttgccctaagttttctaagcacttcttacctca

SEQ ID NO: 33437 - DNA, 120 bp, synthetic construct
  source 1..120: mol_type = other DNA
tctcaacgctgccactttcttttaacaggcggttttatctttagctgtagaggctaaaattcaatctggaaaggcttgaaaggagaaagagaaacaagaggagaaagagaagtgactccg

SEQ ID NO: 33438 - DNA, 120 bp, synthetic construct
  source 1..120: mol_type = other DNA
aattcatgaaggataaattctgcaggtttctgcaagccctcttcctacacatgcaagccgaaaactttaacccacatgaaggattttgaaagagttctgggttgcctgttgctcttttag

SEQ ID NO: 33439 - DNA, 120 bp, synthetic construct
  source 1..120: mol_type = other DNA
tgggattatctttcttttggcaaaaggtgactttcagatcaaaggcaaattgttgaggtcaacaagaacccaggcagggtagactctgtgtccttgaaaggtaacacttcttactcatag

SEQ ID NO: 33440 - DNA, 120 bp, synthetic construct
  source 1..120: mol_type = other DNA
tgcatccggagctggatcttgctctcagttcctaaccgtttctaatcagtaatcctctgtctgtccaactagaatcattcctattttattgtggtatcatggggattaaatgaggcaaca

SEQ ID NO: 33441 - DNA, 120 bp, synthetic construct
  source 1..120: mol_type = other DNA
ttctctgaggactcccagcaaacactggcagcgggggtcttcaatgcactgtcctaactgcttgggcaggaaatgaagcaatttgttggaaaaactcaattttgagaataagaataataa

SEQ ID NO: 33442 - DNA, 120 bp, synthetic construct
  source 1..120: mol_type = other DNA
tttaccaacaacctgaaaagcttatattctcagcaggtcaatactccccatgtctgagggcgaatgttgtgtggattaacaggcaaaacatgttgcatagatttgcagatccacgtttac

SEQ ID NO: 33443 - DNA, 120 bp, synthetic construct
  source 1..120: mol_type = other DNA
tgtctgatgtctttgtctgtgattcaggagtgggtatttctattctgtgagcatttggggtctaatggctgtttgctactgtgcttattttcttgttaaaacaaaggagaccctgactgg

SEQ ID NO: 33444 - DNA, 120 bp, synthetic construct
  source 1..120: mol_type = other DNA
tggggttttgccttagtgtgtggtttagctaatttaatcagatgaatcaatgtttgcaaatagtgatggtttctaatatagtaagacttacagagaatgtttagcttatttttgtgttgt

SEQ ID NO: 33445 - DNA, 120 bp, synthetic construct
  source 1..120: mol_type = other DNA
aagagctttccacctgtgcctccccaagggtgtgtgtctgtaagagctgcccagggcctgggaaggacagtggagacaccaggtactcgttcgggagacttgtgctcaaaatgacatggg

SEQ ID NO: 33446 - DNA, 120 bp, synthetic construct
  source 1..120: mol_type = other DNA
agggttgaaatccactgggctagacagagtgtgaatggcccttgtagcagcaggaatatgactttgtttattatcctagttcctaggagttactcaaagtctacattgaaagtctttctg

SEQ ID NO: 33447 - DNA, 120 bp, synthetic construct
  source 1..120: mol_type = other DNA
tggtggtgttacttccatcaggaggcaccactctgtgcttgtttctttttgcggtgtgaagatgatcagtaggttctggccttgttagcccaatgctttgatttatattaataacatttc

SEQ ID NO: 33448 - DNA, 120 bp, synthetic construct
  source 1..120: mol_type = other DNA
ttgtccgaaatactttggaaagacgaacccttcgctataagcaggtatgtgccctgtaaacaaatatggaatctgtgcttgccctgcgagtgattttacaagccttaaaaaggtaacatt

SEQ ID NO: 33449 - DNA, 120 bp, synthetic construct
  source 1..120: mol_type = other DNA
gtgtcctatgcttttcatggtgtcatgtgaacactacaggtaactgtgatgatcttgaacactttgttagcgctatggtatgatcatatttttattcatgagccgaggcacccggaatct

SEQ ID NO: 33450 - DNA, 120 bp, synthetic construct
  source 1..120: mol_type = other DNA
cttcccccaggtaatccagactcttcctctagatccaagccagttgagtagcacagagcagtttctagaatgtagctaacatgggcatgttaattttgctacttttgtttactaaaactg

SEQ ID NO: 33451 - DNA, 120 bp, synthetic construct
  source 1..120: mol_type = other DNA
tttggcaggggagaggcccttggtgtatgaagttaatcactgtgataggcacccagttgaattctaaaagcattaggcaaagactcaagtgaacgtttaggaagaaagccattatttggt

SEQ ID NO: 33452 - DNA, 120 bp, synthetic construct
  source 1..120: mol_type = other DNA
ggcaattggccaccctttcccagttgttcttggccatcatctttagagtcactggcacctatcatttccaaaacgaacatctattaagtgtcaaggtgttgtatttgctgtaaaagaact

SEQ ID NO: 33453 - DNA, 120 bp, synthetic construct
  source 1..120: mol_type = other DNA
tgaaccctgagtggctttgtgcacaaccatgtttgagatatctttgttttagaaaccaatttaaatctacaattctgactgattagcgatcctagaaagaggaatggataacagatcaaa

SEQ ID NO: 33454 - DNA, 120 bp, synthetic construct
  source 1..120: mol_type = other DNA
tgtaactaggaaataaaaagaaaccacatcattaattgtcaggccctccatgtgacagtagaacaaccgataggccactggctcaattaaagtgtgcagggctcgtaactgaagagtttt

SEQ ID NO: 33455 - DNA, 120 bp, synthetic construct
  source 1..120: mol_type = other DNA
caaatgctttttgattatcggctcaattcatatgcctagactctgacaggttagctgagacgtcagactatattaataattggctttgccaccaatttgtgtttcaggaaagggcccctc

SEQ ID NO: 33456 - DNA, 120 bp, synthetic construct
  source 1..120: mol_type = other DNA
agtgagggagaaatccagttgtaataggttaagccactgccccatttcggagttgttacagcagttagctttccctaaaggatacaactttctttaggaaactgaagggaaagaaataac

SEQ ID NO: 33457 - DNA, 120 bp, synthetic construct
  source 1..120: mol_type = other DNA
taaaatggagctcagcatagattatcaataaacggttgttgcatgaatggacagagtggagaaaaacggtcagattaatacagttccaacagatcaatggttgccagagcctgagggtga

SEQ ID NO: 33458 - DNA, 120 bp, synthetic construct
  source 1..120: mol_type = other DNA
ttaccacttgtcacttctccagtgtttccattatctgccaaagagaacctaccagttgtgaatgtctaaactagttagggtcagtgagcaacacctagcctacaagtttgttgcaatgat

SEQ ID NO: 33459 - DNA, 120 bp, synthetic construct
  source 1..120: mol_type = other DNA
tgagccattcaaagagcactgctatctactgaccaagtcctatacgtgctgagcatttaatgaacagctaaacaaacagaggtactcaaaagaccaacttgataaacctgataggggaaa

SEQ ID NO: 33460 - DNA, 120 bp, synthetic construct
  source 1..120: mol_type = other DNA
tcacctcacacctgttagaatggttatcaaaaatatgaaacataagaagtgctggagaggatgtggagacaaaggaagcctggtacactattggtgagaatgtaactttgaacagccaat

SEQ ID NO: 33461 - DNA, 120 bp, synthetic construct
  source 1..120: mol_type = other DNA
caaagctgagatagacctgctgtcaacagccagcaaggaaacaggcattttcccaaaaagcaatgttaacacctgttgaatagggctcaagtccattaaactgattgacctattagatgc

SEQ ID NO: 33462 - DNA, 120 bp, synthetic construct
  source 1..120: mol_type = other DNA
gaatgataagagttctggtcaaaggcaggagtgatgtgtgtcacttccaggtcaggctcatgggatctgccattttctaggccattccatggagtacacagattgaacatgaggatgcca

SEQ ID NO: 33463 - DNA, 120 bp, synthetic construct
  source 1..120: mol_type = other DNA
aaaaaaaaaacccaacaggtctgatttctgactttattcggtcaggcttttattacatgaaaagccatgtggttgtacgtgtatcaaactgcaggtgccctaacctgctcctccaaacaa

SEQ ID NO: 33464 - DNA, 120 bp, synthetic construct
  source 1..120: mol_type = other DNA
acatagggccccaggtcagtgtgaagtgacaggaggacagaagagtagtcacaaaggaatatatggtaattggatactttcgagattgagtgcttctttggcaaatatctgacaagtaaa

SEQ ID NO: 33465 - DNA, 120 bp, synthetic construct
  source 1..120: mol_type = other DNA
gactagttgtatcagttagcattggttgtgtaattaaaccaccccaatctcaatggcatacaatagtaaacatttcccatgggtctgcaagggtcactgatctaggatagcatccattgg

SEQ ID NO: 33466 - DNA, 120 bp, synthetic construct
  source 1..120: mol_type = other DNA
aggaaatgaagacccaaagaagaagttggaattgaatgcttctatactgaactggacaaagaatattaagttataaaaatgtgacaagacaaacaggcttgggctaggcggcccatggtg

SEQ ID NO: 33467 - DNA, 120 bp, synthetic construct
  source 1..120: mol_type = other DNA
gtatataaattcctgcacagggttggctactctaaaaaactttgacagccgtgtctcatggataatttcaagagagtccaagagtgactagatgcaaacttaagaccctaaccaccacct

SEQ ID NO: 33468 - DNA, 120 bp, synthetic construct
  source 1..120: mol_type = other DNA
cctgtgtgtttcttctttttggcctactataccttatcctctttttctcattggatttagggcccagccaggtaatctaagattcaacccattacagacagcaaaggggactccattaaa

SEQ ID NO: 33469 - DNA, 120 bp, synthetic construct
  source 1..120: mol_type = other DNA
agtcagctccggactactttatcaatgccaatttgctagccagcactctcctccctagtctgtagcccttcatgaaccagatatgttcctttgcaatacttcctttctaaaataaatgat

SEQ ID NO: 33470 - DNA, 120 bp, synthetic construct
  source 1..120: mol_type = other DNA
agataatgtctgcagagtagcctaatctccttgggagattaaggctccctctgcaagtgtacattttgatcattatgactatctgtgcctctgtgaaatactgccaaagagaacaagaag

SEQ ID NO: 33471 - DNA, 120 bp, synthetic construct
  source 1..120: mol_type = other DNA
catagcaaaaatatgtaagaactgtgtagcaggatatcagagataagacaaaactcccaggagctagtagttggcagagctaacatatcttatcttcctcacagtagccagtctgttagt

SEQ ID NO: 33472 - DNA, 120 bp, synthetic construct
  source 1..120: mol_type = other DNA
tattgctgaatctttataaatttggcatgacatgtgtctggacaattggcatgtgtatattttttcatcacttcctagcatctcagagtaagggttctccctagtgtatgcacctcccct

SEQ ID NO: 33473 - DNA, 120 bp, synthetic construct
  source 1..120: mol_type = other DNA
taattttcctacaaggtgctaaatgaataatcaagtcacctgatttttaacacaaccactttgaacatatttatggacacttattctatgaaaagcactattctaggtcccataaaagat

SEQ ID NO: 33474 - DNA, 120 bp, synthetic construct
  source 1..120: mol_type = other DNA
tgaaagagatgtttgccctctcaaatgcacagataccaactcaaggctacatgaatcacgaagaatcaagcaaacatgacaccacaaaaggaaactattaaggcttcaataagcagcccc

SEQ ID NO: 33475 - DNA, 120 bp, synthetic construct
  source 1..120: mol_type = other DNA
gcagactcaattatgcagaagaatcagcaaatgtgaagacaggctatttgaaattacccagttagaggaacagaaagtaaaaagaataaaaaagagtaaaggaagcatacaggtcctatg

SEQ ID NO: 33476 - DNA, 120 bp, synthetic construct
  source 1..120: mol_type = other DNA
ggaaagaaggaaagaaagaaggaaagaagaagaaaagaggagaagagaggagaggaaaggagaggagaggagaggagaggtgaactataaaaagaaccaaacagaaatcctggagctaaa

SEQ ID NO: 33477 - DNA, 120 bp, synthetic construct
  source 1..120: mol_type = other DNA
caggactattaacctacccaaagccataatggctctgtgtgtaaggtactattatcatcatctccgtgttgtagaagagaaaaacgaggcacagagaggtaaagtaatttgcctgaggaa

SEQ ID NO: 33478 - DNA, 120 bp, synthetic construct
  source 1..120: mol_type = other DNA
gtaactcagtgctttgaaattgtaaatcctacatcaacacaaacatttcttgtgtcaagaaaatgtctgtttttcttggaccatccaactttattttgggataaaagaaatttgtcttta

SEQ ID NO: 33479 - DNA, 120 bp, synthetic construct
  source 1..120: mol_type = other DNA
tttgttcagaatggcttcacagacataactcaaaacagggtatgtcatgatctgtactctgtgcgactgaaaacaaggtattgccttccaaagccccaaatgttagacaccttcctaatg

SEQ ID NO: 33480 - DNA, 120 bp, synthetic construct
  source 1..120: mol_type = other DNA
gaaaccttccacagtaggtgacagaaagcgtagctgaaagagatgccagatgaaatataggatggctatatttcagacaggcaattaatactttttagtatgtcttggacatgtacttta

SEQ ID NO: 33481 - DNA, 120 bp, synthetic construct
  source 1..120: mol_type = other DNA
agaacctattatcagagtggttttatggacaattaggaaacattttcaagaggattactgccaggctgtttggacctgatagaagcagtaatgggtggtaagtcctggctcagacttgaa

SEQ ID NO: 33482 - DNA, 120 bp, synthetic construct
  source 1..120: mol_type = other DNA
gatactatgttaaaaaaaaaaaaaaaaaaaaaaaaaaaaaacaagatcctgtggagaagaggtgccattcacactaggcctcaaggtctgggaggaaactgagagggcggggcttcctgc

SEQ ID NO: 33483 - DNA, 120 bp, synthetic construct
  source 1..120: mol_type = other DNA
tcacttgtggtggaaacagcagctgtcttcagtggctagggaaacctgggcttttgagaaggagaagactaaagaaataaacttggtgatacaaagagctctctgactaccttaaattta

SEQ ID NO: 33484 - DNA, 120 bp, synthetic construct
  source 1..120: mol_type = other DNA
tctagatctcttgagggtaaattcacataatcaattccttcctgtcttctcccttcttgctcttggaccttgctcttaattactgcttctcaagctttaatgtgcataggaactacctgg

SEQ ID NO: 33485 - DNA, 120 bp, synthetic construct
  source 1..120: mol_type = other DNA
tgattttgtttctccccctcaggcaagaacctgttagttcatggaattctcgcttgcagtagtatcaccagcaacctgatactattagacttccacaatctttcatcatatcattatgga

SEQ ID NO: 33486 - DNA, 120 bp, synthetic construct
  source 1..120: mol_type = other DNA
tattattattccatttttacaagggaacaacccaagggcaaggagaaggtaatgatcacttgcccaagatctttcagccaggaggtagagaagcctgaatgtgaaccttagcaatttcac

SEQ ID NO: 33487 - DNA, 120 bp, synthetic construct
  source 1..120: mol_type = other DNA
ctctgcttagattcctcctccttgcatcatgacctagaaactttctctagacagtaaactggaacaatagtaggcctaacctcatttgtttcctacctttcagggatcactgcccttttt

SEQ ID NO: 33488 - DNA, 120 bp, synthetic construct
  source 1..120: mol_type = other DNA
attgcttttgcaccaacctaatacttctggactcagggaaaattttatggaatagggagcatttgaaaggagacttgcagaatggtagcatttggatgtgcagagacaaggaaggttcag

SEQ ID NO: 33489 - DNA, 120 bp, synthetic construct
  source 1..120: mol_type = other DNA
attagcagagtatcacgagtcacctcacctcgctgtagacatcttttttcccacatgtgaaatggggtggtcaaagaggtctctaaagccctttccagcattaaaatgtattgtttctaa

SEQ ID NO: 33490 - DNA, 120 bp, synthetic construct
  source 1..120: mol_type = other DNA
cccgtattgccctatataattccctctctctgagtatgggctgtggctagagtcttgcgtctaaccagtagaatatagcaaaactgatgcaatgtcacttctgagattaggttacataaa

SEQ ID NO: 33491 - DNA, 120 bp, synthetic construct
  source 1..120: mol_type = other DNA
tatctaaatccatgaaataaataagctcacttaggcagatgctcaatgaaagagaagactcaggactgagatccagggaactaaagtgtttaagggtctggccaagaaaacggtgtcacc

SEQ ID NO: 33492 - DNA, 120 bp, synthetic construct
  source 1..120: mol_type = other DNA
ttggccacatggaagtcagtggtgactggtttcaatggaccagtgtgggtggatgtcaagttgagaacatcaaggaggtaggacagtggagatgaaatgtgcagacacatcttcagtgat

SEQ ID NO: 33493 - DNA, 120 bp, synthetic construct
  source 1..120: mol_type = other DNA
attagatggcatcgtgagagcattgtgcttgagttttgttggctcagggagggaggtaaaaggtaaagaatacagatgagaaactagcccaggtgaaacgtcatctgtatattcaagata

SEQ ID NO: 33494 - DNA, 120 bp, synthetic construct
  source 1..120: mol_type = other DNA
acagaaacacaacaaagggtcttttccaatggcaaagtaagcaataggtctgccaggggtgtggacagcagtcaggtatgcttaactttgtgaactttgatttttttgtcgttgttgttc

SEQ ID NO: 33495 - DNA, 120 bp, synthetic construct
  source 1..120: mol_type = other DNA
aaatttaaaattcagcacctcaggtgcacctgccacattttgggtgctcaaaagccccatccggctaatggctatcatattgggtagtgcagattatagaacatttccatctttacagaa

SEQ ID NO: 33496 - DNA, 120 bp, synthetic construct
  source 1..120: mol_type = other DNA
ggacttctgggcaaataagaacgtgtggtcaccccaactatactgagaaggttggcctaagtggctattaaggttctttccaaaatctaagggtctatcattctacaaatagggacaaat

SEQ ID NO: 33497 - DNA, 120 bp, synthetic construct
  source 1..120: mol_type = other DNA
ttaataataataggtgtctttattatcatagagattgtcatattctttctttcaaagacgacaccatggtttctccagcttggcactactacttgggccagatggttctttcttggtggg

SEQ ID NO: 33498 - DNA, 120 bp, synthetic construct
  source 1..120: mol_type = other DNA
gtcgagggaatactgttccacagattaaaggaaagaaatagcccagggtttctcaacatcagtacgatcaggccagataattttatgttgtgaggataccatgtgctttccaggttgttt

SEQ ID NO: 33499 - DNA, 120 bp, synthetic construct
  source 1..120: mol_type = other DNA
caagcaacggttgggggaaggggagagggtgaatttgtatttagtgggtacagagcttgtgttgcaagaattctagagatctgttgcaaaacaagtgtgattgtacttaacactactgaa

SEQ ID NO: 33500 - DNA, 120 bp, synthetic construct
  source 1..120: mol_type = other DNA
ttttagacatgcaaggaaagctatttcagaatctactaatttaaagcaagcagctgtatacagacagcaaaagaagcaacattttgttacagcttagcacaaggcatccaacacaaacag

SEQ ID NO: 33501 - DNA, 120 bp, synthetic construct
  source 1..120: mol_type = other DNA
gtttcttgtaatattttcacatatacttttatgtgatacattagaacacattagctcatacagattgtaagataatcacacaaaatagtttctttttttaacctccatatttgaagacca

SEQ ID NO: 33502 - DNA, 120 bp, synthetic construct
  source 1..120: mol_type = other DNA
tcaatactgagttgaccaaaaattcaattagaatattccccttccaccagtatttaaattcattagttcatttgtattacataaactaaagaacctagagaaaaatctttcccaataaaa

SEQ ID NO: 33503 - DNA, 120 bp, synthetic construct
  source 1..120: mol_type = other DNA
acgctttcttaaacccaatgaaactcttgctgtgatacatagtctctgttttctggagagagaacaagaaaagtttaagtctgtcaaataaccttttgcctaaataataccaatctgtca

SEQ ID NO: 33504 - DNA, 120 bp, synthetic construct
  source 1..120: mol_type = other DNA
acattaaagcagaactggtcgttttagtcaagttcttcttctttaatacgaggaaatgcagagaaggtccctgaaaggaatgaagccttttcttaaagcattccatttccacctgccagg

SEQ ID NO: 33505 - DNA, 120 bp, synthetic construct
  source 1..120: mol_type = other DNA
caaaaaaaaatttaaaaaaaaagcaactaggacgtcactagaactgaacactggaggaaagacaggaaggattgacgtcaaggaagagctctggggaggtaatgttcaagaagccagccg

SEQ ID NO: 33506 - DNA, 120 bp, synthetic construct
  source 1..120: mol_type = other DNA
ggtcaagaaggcagagcacataggaataggattagtgcccctataaaaaaggccccatagacctccctcaccccttccgcacatggggatataaccagaggttggtcctctgcacccaaa

SEQ ID NO: 33507 - DNA, 120 bp, synthetic construct
  source 1..120: mol_type = other DNA
agttcgtgccacatggcaacccagcctgggcgacagtgcaagatgctatctccaaaaaaaaaaaaaagttatccttttgaggaaaaagtaaaattagatccttacacaccagaggcaaca

SEQ ID NO: 33508 - DNA, 120 bp, synthetic construct
  source 1..120: mol_type = other DNA
acgaagataccttaacataaaggtccataaacattcaaagagatgttccacctgataagtgattagggaaatgcaaattaggaccacagtgagatgccattttacgtctattgtagtggc

SEQ ID NO: 33509 - DNA, 120 bp, synthetic construct
  source 1..120: mol_type = other DNA
ttatcacaggccctttctaaggaacactgtcccaagacggactggaggagcttaaaaatccctctggactcaaatttaattattccagttttccccaacttgatcatcatatgaggactt

SEQ ID NO: 33510 - DNA, 120 bp, synthetic construct
  source 1..120: mol_type = other DNA
tatttcaggcatgtaaaactagacagttacccaagaaataactgtgtatccaccactccgtataagtaaaacagcccagctagagtgaaagcctgctatgtccccttctctggtcccatt

SEQ ID NO: 33511 - DNA, 120 bp, synthetic construct
  source 1..120: mol_type = other DNA
ccattcttgaacacatcgttcttcctaagcacctcgtacttataaaccaagaagtaggaagtggtcaggtggaagagatgagctctgagctgttaatcaaatccgaatttcttgtaggtt

SEQ ID NO: 33512 - DNA, 120 bp, synthetic construct
  source 1..120: mol_type = other DNA
catggtggttcctgggtagttactcttcttacagagtagggatgaaatgaaagcctctattctaaattcagttaaatactggtacaaatatttagtactgggattgtgggatcattttct

SEQ ID NO: 33513 - DNA, 120 bp, synthetic construct
  source 1..120: mol_type = other DNA
ctttatgtaaccttccttctgactaaaggacccagatgactttgaggaatagcctgtttgctgggtgcattctcactcagcacttctggaagtatccattctacagttagtatttcatct

SEQ ID NO: 33514 - DNA, 120 bp, synthetic construct
  source 1..120: mol_type = other DNA
caagtacctctttagtcttagggttcatgggagggatagaacaaaggcccacgcctccccctagcatcgacatttcccttcgtctgccaatgcctaccatagctttgttttctcccgcac

SEQ ID NO: 33515 - DNA, 120 bp, synthetic construct
  source 1..120: mol_type = other DNA
accaaagtcacttaccctttcatgacagttgtgaaataggcaagtactgaacctcccagctggtataaaatgaagaggaagatcctgtagagccaagtgttaacttggcatttttaggca

SEQ ID NO: 33516 - DNA, 120 bp, synthetic construct
  source 1..120: mol_type = other DNA
aaggaattttacacagtatcaagccaagattttagtttaaagtggtcccaggttgatagtaccctcagatttctggcagaagcgatagagggaagaggaattcactttccacatgcctca

SEQ ID NO: 33517 - DNA, 120 bp, synthetic construct
  source 1..120: mol_type = other DNA
tggttttgcagcttcacaggtagcaaagtgataccttagcctctggcatcagggaatgagcttggtaccagtcccctgcctcatgcgggacatttatttatttttattttttattattat

SEQ ID NO: 33518 - DNA, 120 bp, synthetic construct
  source 1..120: mol_type = other DNA
tttttaatgattcatgtgggacatttaaatccctgttattaggaactctcagctgcctctgtctgcttctgcaccctctgcctgcttctgcaccctctgcctgacctaccactttgtgat

SEQ ID NO: 33519 - DNA, 120 bp, synthetic construct
  source 1..120: mol_type = other DNA
atggagcttgacctgtcaaattcacagaaaaatgtccgttacatattccagctgttccttaaacatgctccctaagagctagttccatttgttagctgtcagaacgatgtggaggaattg

SEQ ID NO: 33520 - DNA, 120 bp, synthetic construct
  source 1..120: mol_type = other DNA
tgcctggaaccttctccatgctctagttaacaaatgtgcatttcagcattcaggctgaaactcaactgccagcacaaggcaagtaatgccatttgacttaagaacaatctgcatttaaga

SEQ ID NO: 33521 - DNA, 120 bp, synthetic construct
  source 1..120: mol_type = other DNA
tgcttctgctttagaacaaattaaagagggggacctcagcccatctttatatcccagctttatccatttacctgtcagaaacacaccctgttttcctttgagtttctctacatcccactt

SEQ ID NO: 33522 - DNA, 120 bp, synthetic construct
  source 1..120: mol_type = other DNA
cacttgagagatggtgtccactattctttgtggcattttaaggtcgtgctttctgattctctgctttgtgctgcctccgagtcacctggagcaagctcttagttagttagtgtgtggatt

SEQ ID NO: 33523 - DNA, 120 bp, synthetic construct
  source 1..120: mol_type = other DNA
tcacaaaatgaactttttcccctccttagcaatttcccatcttcattgtgtgataaaggtttttgctaacagccaagtaccacactagacattaggtaggttcatgggcctgtggtctgt

SEQ ID NO: 33524 - DNA, 120 bp, synthetic construct
  source 1..120: mol_type = other DNA
tggataaatcagaactaaaaggaaacatatcaagagaaaatagtgttactgcaaacatgattacaccaggggctcactcatcctgtctatcttccccagctcttccctctgcctagaaca

SEQ ID NO: 33525 - DNA, 120 bp, synthetic construct
  source 1..120: mol_type = other DNA
gaggaatgaaggaatggttgggacaaagggagatgcatttttcactctagctaagagtatagcttgattcccatcccctgccccccaccacatgaattacttttataattaaaaaaattg

SEQ ID NO: 33526 - DNA, 120 bp, synthetic construct
  source 1..120: mol_type = other DNA
gaatctagtcaagagactacactaaactgatacacttaaaattagagaacagcatttagtactcagcattcagccagaggaaaagtcatgagagatacagcgcttgaaggagaaacagga

SEQ ID NO: 33527 - DNA, 120 bp, synthetic construct
  source 1..120: mol_type = other DNA
ttgattgtcgtctgcggtactcctttcattgtttttgtagaaattccctttaattttctaaaggtaccttttcttttatccctcactgttctgttaaccttatataggaatgtcatttct

SEQ ID NO: 33528 - DNA, 120 bp, synthetic construct
  source 1..120: mol_type = other DNA
ttatttatgtattacatgctttgctttgatgcttgtaccctagctatatcccaggatcttttctactgtaagctccgtggaggcaaggagtgttgactgttgtaccctcagtatgtggca

SEQ ID NO: 33529 - DNA, 120 bp, synthetic construct
  source 1..120: mol_type = other DNA
ctgactagtgtctgccctaactctcttcctgcctccatggtgatttttctgaagtataacactggtaaaatgctcaacttaaaccttctcttgatttcttgttgtctatggcagtagcct

SEQ ID NO: 33530 - DNA, 120 bp, synthetic construct
  source 1..120: mol_type = other DNA
tctgattcccagtttttttgtttgtttgtttttgtttttgagacggagttttcactcttgtcatccaggcttaagtacaatggcaatatctcagctcactgcaacttctgcctcccgggt

SEQ ID NO: 33531 - DNA, 120 bp, synthetic construct
  source 1..120: mol_type = other DNA
accataccattattggcagagagtagaatatttaaatatttcctgagtgttctttcaaaccagccgtagaaaatgaaagagtgattcgttttcagaaatgctctgagcatcttttaccag

SEQ ID NO: 33532 - DNA, 120 bp, synthetic construct
  source 1..120: mol_type = other DNA
tgtgcctggctaggatgtttaatactaatgttaataagtattaatagtagaactccttgtcatgtttttgtttgtttggtggagacagggtctcacactgttgcccaggctagtgtccgg

SEQ ID NO: 33533 - DNA, 120 bp, synthetic construct
  source 1..120: mol_type = other DNA
gcacctggccgtaaggatgagttttaaagggtggagcagagaatacactgaaaagatatgggaagagaaaacatggctgtgaagatttacaagcaacacatggttctgaaaatgaccttt

SEQ ID NO: 33534 - DNA, 120 bp, synthetic construct
  source 1..120: mol_type = other DNA
attccccagatttgaaggttcttgttttagtagatgtttctggtccactgacggtgaaacatcaaatcttcttttcaaattagtgtattgtcttgggtccgtgcatggtggctcactcct

SEQ ID NO: 33535 - DNA, 120 bp, synthetic construct
  source 1..120: mol_type = other DNA
cataatataagctggggatggtggaagcatagagaaccagatatccaagtttattggatatgtatgcaaactaaagagacaagcctctgagtgagggcctgcttctctattcccaatttc

SEQ ID NO: 33536 - DNA, 120 bp, synthetic construct
  source 1..120: mol_type = other DNA
ttgtatgtgaacttaatctcaataaagccgtgacaaaagtttccaacatgaactcttatttggaaagcctttctccctgcctcactgtttcctcctctcctttttccctgaactgcactc

SEQ ID NO: 33537 - DNA, 120 bp, synthetic construct
  source 1..120: mol_type = other DNA
tgacattggtggaggtgaatttgtgagactacgttgataaccttcttgaattttgcatgtttttctggcaaagactcaatagggaggaaatccattgcccctctatcctactctgttctg

SEQ ID NO: 33538 - DNA, 120 bp, synthetic construct
  source 1..120: mol_type = other DNA
acggagtgatcacactcagtccttatgcatcgtctatagcagctttgctacaatggccaaattgagctattaatccagcctcaatacacacagctaccactcatcttccattctaaataa

SEQ ID NO: 33539 - DNA, 120 bp, synthetic construct
  source 1..120: mol_type = other DNA
agctctatgctggatcatgtggtaactctatatttaaattttccagtaattactaaactgcttcccacagtagtggcaccattttgcatttctaccagcaatctatcttcccatgtaggt

SEQ ID NO: 33540 - DNA, 120 bp, synthetic construct
  source 1..120: mol_type = other DNA
gagagagaagaaaaaaaagaaaaaaagtccccattcctgaaactctttgtccttctaggtttaaaaatgccccactttcaaggacatcatttgcagtttcggtttttaaacgggcatttt

SEQ ID NO: 33541 - DNA, 120 bp, synthetic construct
  source 1..120: mol_type = other DNA
ggaacatctgaaaagactaccagggttgatacttacagcgactttatatgcagcttctatgtaaaagacaagattctgtatgaaggccacctcatcgagagtgaaaatgatacgtaagcc

SEQ ID NO: 33542 - DNA, 120 bp, synthetic construct
  source 1..120: mol_type = other DNA
gttctaataaccaaagtgggtgacaagactagagatcacatcctatttacatcttgtagcagagactggctagctgttcaccaggctggtttcttttcctctttggcacatgactggatg

SEQ ID NO: 33543 - DNA, 120 bp, synthetic construct
  source 1..120: mol_type = other DNA
tttcattatgaaaccaaaagtcctcaatttgaagactttgagacccagtgaaggatggagggttctgtcctggctgatccagggggtggtgactgctactatgctggctctgttgagagc

SEQ ID NO: 33544 - DNA, 120 bp, synthetic construct
  source 1..120: mol_type = other DNA
aaagatagagtgtgaagaaagaaccctctcctccccaactccactagtgtctagagtgattctgctgctagccagctgacactttccttctcatcaaagcatctgtcatgtatgggttag

SEQ ID NO: 33545 - DNA, 120 bp, synthetic construct
  source 1..120: mol_type = other DNA
ttggtactgtttctttctgggtaacctagaaagtcactccattgctttgagcttcagttttctcttcagcaaagtgaggataacacaaacttttctactaacctcaaggggacaccgtga

SEQ ID NO: 33546 - DNA, 120 bp, synthetic construct
  source 1..120: mol_type = other DNA
aagatactatgaagagacactgggattcttcaatgaagagcaaggcaaggacagcaacgataacttgggggatttgccagtcggcaagagccacttctagagcttttatccattttgaaa

SEQ ID NO: 33547 - DNA, 120 bp, synthetic construct
  source 1..120: mol_type = other DNA
gatatagaaggtaacctggtggctattttggatcaggtcatcaaagaggagatatttaaactgagatctgaatgatgaggaaccagcaataagaagataaaggagggaccaggcgcggtg

SEQ ID NO: 33548 - DNA, 120 bp, synthetic construct
  source 1..120: mol_type = other DNA
tgaggaagagatggacattatgagcctccaaaataagataccctgagaaggatataatgtcatccacgcagtgttcaggctaaaaatgcataacctgagtccaatcacaagagacatcag

SEQ ID NO: 33549 - DNA, 120 bp, synthetic construct
  source 1..120: mol_type = other DNA
ctttttttaaccctctctcctttggtgctctggtacttctgttgtgctcttgagttaactgaccatttgtgaagttctctggcccctcaggtaaaagtttaaaacaggttggtgctataa

SEQ ID NO: 33550 - DNA, 120 bp, synthetic construct
  source 1..120: mol_type = other DNA
gtgagaagtcattttgtgatgtattaaaattctctttagatggtgaatgtgtctccactgtgggtgtccagtggctgacacgcgacaactctctcattgacaaaaagtctttcaaagctg

SEQ ID NO: 33551 - DNA, 120 bp, synthetic construct
  source 1..120: mol_type = other DNA
atcaaaatgctattttgcactgtcacttttaacatctatgttccctcttctgcacccttgtccaaacccacctttaaactcctagactgtgaaggcctcaaggccaaagactatgttttc

SEQ ID NO: 33552 - DNA, 120 bp, synthetic construct
  source 1..120: mol_type = other DNA
aggaggagaactgggatagaatacaggctgcctaaatctcaaaccaacacttttcctacaacacaaagtcctttctttacaagtccttcaacacaggcataaacgtatcctccctacatt

SEQ ID NO: 33553 - DNA, 120 bp, synthetic construct
  source 1..120: mol_type = other DNA
attcagagtgccaagcggaggccctggtagcaacttacatgggtcaggattttcctcaggaatggttaataattaacggtttaccctgcatgtcaaaatgtattacaaataaattcccag

SEQ ID NO: 33554 - DNA, 120 bp, synthetic construct
  source 1..120: mol_type = other DNA
aacccactgtctccggcattttcaaacatatagagggtgagaagttaccttccttgtgtatttattttcgccactagtaacaaagccaaacggagctccaaaacccatgaaacatacatg

SEQ ID NO: 33555 - DNA, 120 bp, synthetic construct
  source 1..120: mol_type = other DNA
gggctggagaaaggtgggtgtggcttaacaagagtaacacaagggatctagtggtgatggaaatgttctatgtcttgactggtggtagatacacaaacctacatgtatgataaaattgca

SEQ ID NO: 33556 - DNA, 120 bp, synthetic construct
  source 1..120: mol_type = other DNA
atttaatctgctgaataaccatgcattcgaaaagagtcactgtaaagattcaaaattgaatctgctctggatgtaggactctcaacaaaatgcaggctgagggcccactgcagccacatc

SEQ ID NO: 33557 - DNA, 120 bp, synthetic construct
  source 1..120: mol_type = other DNA
atacacccctacgggagaaaatggtacataatgacattgtatgtctcatatttccccttggtgatgactggcttggatggcccatctatattctgcttcttaaggaaaacactaacagtg

SEQ ID NO: 33558 - DNA, 120 bp, synthetic construct
  source 1..120: mol_type = other DNA
tgctcagatcccaagctcagggtcatttctaatatgtagttgttcagttactctgtggcctgttacctaaacataggtgtcgtatcaaaatcccgaagcagggaaatggtccaaatgaaa

SEQ ID NO: 33559 - DNA, 120 bp, synthetic construct
  source 1..120: mol_type = other DNA
aaaaaaaaggaggaggagaaggaggtgagagttagcaagatgtgctaacatcatgtattgggggttcacatttcctattatctgcttggctttaggtctagtttccaggaaaacagcact

SEQ ID NO: 33560 - DNA, 120 bp, synthetic construct
  source 1..120: mol_type = other DNA
ctcagaagagatataatacttttggggaagtgctcataatatattaagtggacaagggatcaatatagcagatacaatgtaccagtatgtctaagtctaatatagagaatgccttgggga

SEQ ID NO: 33561 - DNA, 120 bp, synthetic construct
  source 1..120: mol_type = other DNA
tggttaagccactcacagcatgtggtactttgtcacagcagcacaagcaaactaatacaatgggtgtcaggtacagtaaatattcacaccacgctgaaagtcactttgaatctattttgg

SEQ ID NO: 33562 - DNA, 120 bp, synthetic construct
  source 1..120: mol_type = other DNA
gtgagttcccttccaagatgggtggctgctaagatagctcatgtagttttggagtggaagcccttaggatgtcaaaaagcttaactttaaacatctcaatctgattccaacagtgaagtt

SEQ ID NO: 33563 - DNA, 120 bp, synthetic construct
  source 1..120: mol_type = other DNA
tacggggagatggcccccaaacactcagttatcaagatcattcataatatgggtttctttccacccctgacattggtgtaagtgtggaaccatcaggattagcaagatattttaaaacta

SEQ ID NO: 33564 - DNA, 120 bp, synthetic construct
  source 1..120: mol_type = other DNA
tctatttttttttcctgaattttacaaatgaggaactgaggcctagaaggttccatgacttaggcttagagacattgagaggtaaataatggcagcatcaagcccagggctacgttctcc

SEQ ID NO: 33565 - DNA, 120 bp, synthetic construct
  source 1..120: mol_type = other DNA
aggggctgcagagaggagagcatgaggagttactgttcaatggaaacagactttctgtttgtgaagatgaaaaagttctggaagtagatagtggtggtgattgtacaacactgtgaatat

SEQ ID NO: 33566 - DNA, 120 bp, synthetic construct
  source 1..120: mol_type = other DNA
tggttagaacccaaaatgttttctaacttcatccagaataaaatacaaagtcttcacgtccttcagttcttcaaagcccttcgtgattggcctcatctactctctccctttaccaccctg

SEQ ID NO: 33567 - DNA, 120 bp, synthetic construct
  source 1..120: mol_type = other DNA
aacttttccctcactctgtattcagctcttcatcacttccaggttcctggtgcttaccatgaactgcatcacagatcagtagcattatgaaccttatagggtctctgacacacataatat

SEQ ID NO: 33568 - DNA, 120 bp, synthetic construct
  source 1..120: mol_type = other DNA
atttcataccaatacaaatcattttcatctttatgacagtcaggtaacatcaaaaaaaccttgctttcattctgatactttagctgtcaatccagtcaataccggttgttgttaagtctg

SEQ ID NO: 33569 - DNA, 120 bp, synthetic construct
  source 1..120: mol_type = other DNA
ttaggaggtttagaataccaatgaagagaattgttaattcttcaaggctggtttcttatgaggattaaaaaccagcccttagtctcagatgcattccacctagatgtgttcacgaactcc

SEQ ID NO: 33570 - DNA, 120 bp, synthetic construct
  source 1..120: mol_type = other DNA
tcagtacttcccctgttaagataactgagtgccacctagtgttcaatttctgcaactactaagcttacaaattcaatactgctattaaaacccaggttctgaaaacggcattttggaaat

SEQ ID NO: 33571 - DNA, 120 bp, synthetic construct
  source 1..120: mol_type = other DNA
ggatgggagcagacacaggaagcatgatatgattgatcccgttcagtgtgatactgacctaattctcctgagtcaatctggttatagttaaaacatctataaaccacctggagaaatgtc

SEQ ID NO: 33572 - DNA, 120 bp, synthetic construct
  source 1..120: mol_type = other DNA
gactacaggcatgtgccaccatgcccggctgacttgcacttcgtgtttaacccatatgcgcactgacagtctctcgaggaaggaattttaatagatactataacaaaattattcctttag

SEQ ID NO: 33573 - DNA, 120 bp, synthetic construct
  source 1..120: mol_type = other DNA
tttgaaaacaaggcccttaccattacaccacactgagatcaatgacaggaaacctataggcttatgaccctggtctttgtaaccggtctgttagctcagttgattagagcagtgttcttt

SEQ ID NO: 33574 - DNA, 120 bp, synthetic construct
  source 1..120: mol_type = other DNA
aggcagcagcaccatagccccaggtctgaattttgcagtaagttacaatataccctaggtggtatcacttctcttcctgtccacacattttttttcttgcttagcctgaagttcttttta

SEQ ID NO: 33575 - DNA, 120 bp, synthetic construct
  source 1..120: mol_type = other DNA
ggcaaggaatttacactgtgctaagaaacagatgttatggagattaatttgtgactggagaagaaatgtctctgtggtaagagatgagtacaggttctgggcaatccatttgacttttaa

SEQ ID NO: 33576 - DNA, 120 bp, synthetic construct
  source 1..120: mol_type = other DNA
acttcatcctcaagtttgatgtaggccaggcatttctgcttctttccactggacttgactttgcactcaggattcttcttgcagaaatttatatactggagcttaaattctagccccaca

SEQ ID NO: 33577 - DNA, 120 bp, synthetic construct
  source 1..120: mol_type = other DNA
aatcagttcatctcagaaagcacttgtcttttcatgttattcttctacttcccatcctgacgtttttatacaaagattacccagcctttaccaaaaggttgtatgtatacttgtatatta

SEQ ID NO: 33578 - DNA, 120 bp, synthetic construct
  source 1..120: mol_type = other DNA
tttctctcctttttatatggaccagtaaatcaaaagccagagtttttatatagcttgtttaggatgcaattgtgagttagttttaatgttttccttgtttctatgatacttgaatattct

SEQ ID NO: 33579 - DNA, 120 bp, synthetic construct
  source 1..120: mol_type = other DNA
tactctagaaaatgtagcagttgaccttttcaaaaacaataggagaaatatgagaagaaagaaatggcattggctgtatatgcacactcactcatacactgccccccccacaaacacacc

SEQ ID NO: 33580 - DNA, 120 bp, synthetic construct
  source 1..120: mol_type = other DNA
tttgctgtagaggagaaagtaaaaactccacagcggggatctttttctttgcttttgaaaccaccattgaatcactatcgttttgcagactttgcacaactgtacaggagagtggccttt

SEQ ID NO: 33581 - DNA, 120 bp, synthetic construct
  source 1..120: mol_type = other DNA
gtgctaagatgccatagcttgttctgtaactatttttgtaaagtttggtcccaacaggagaaaaattcgtagacttcacatcaagagacggttcttacaaactgtttaaaatgggacttt

SEQ ID NO: 33582 - DNA, 120 bp, synthetic construct
  source 1..120: mol_type = other DNA
ctaaagaaagaaaaaagtagtttgcctatgtcaatacagaagctagaactaaagaaaaaggggagggtgctactggcatctggtgggtggagggagatcagaaatgccactaaacatcct

SEQ ID NO: 33583 - DNA, 120 bp, synthetic construct
  source 1..120: mol_type = other DNA
atgtatactcatatacatgctgatgtgggcagagaaaatctggagtaatggaaaatgataacagtatgcttactgtgagtcatggggctggtggttgagaaatggtatttgggaaagatg

SEQ ID NO: 33584 - DNA, 120 bp, synthetic construct
  source 1..120: mol_type = other DNA
gctaccattatacccactacagtgggagagagtgaaatcttctgatttttaaatggcaactgatttacacttttaaaaagtctgtgcagggactgggtgcggtggtccacgcctgtaatc

SEQ ID NO: 33585 - DNA, 120 bp, synthetic construct
  source 1..120: mol_type = other DNA
aatcacactgcaatcagctgtgactctttgtttttttcttttacctctgttcaggtcacagagatgtttcattttgatatttttcccctcacaggagccagccttcagagggctggtggg

SEQ ID NO: 33586 - DNA, 120 bp, synthetic construct
  source 1..120: mol_type = other DNA
tgctgggattacaggcatgagccaccacacaaggcctggatgtccagtttttctaacacgctctttgaaaagactgtcttctttcttttgtttacctttaaggtgctgaaagtttttttt

SEQ ID NO: 33587 - DNA, 120 bp, synthetic construct
  source 1..120: mol_type = other DNA
gggcagctaccttgtcctcctcttaacctggcttaatgtgaccttagtttgtatttccaaaaacaagcagtattaggttggaattgtatgtgtcttttctctggaggaagcattctgact

SEQ ID NO: 33588 - DNA, 120 bp, synthetic construct
  source 1..120: mol_type = other DNA
acagagcaaatcagagtgttccggaagatcttgtagtaatggctgagcaatacaagttaaatcaacaaaagaggcacagagaaacacgatcaagaaaacctggacaaagacgcaaggagt

SEQ ID NO: 33589 - DNA, 120 bp, synthetic construct
  source 1..120: mol_type = other DNA
aggtttgttaaagaaacacgtgtcatgggggtttactgtacatattatttcgtcacccaggtattaagaccagtgcccaataattatcttttctgctcttctgcctccttccaccctccc

SEQ ID NO: 33590 - DNA, 120 bp, synthetic construct
  source 1..120: mol_type = other DNA
aagatgatttatgtaagtgcagtcggttatcttgggaggtgatatcagaaaaggctgataggggagtggggaagtaaaacagtgagtagcaggaagccaatcaagagagtattattaagc

SEQ ID NO: 33591 - DNA, 120 bp, synthetic construct
  source 1..120: mol_type = other DNA
ccagttagcacctgcccatttacagttgcagaatatagacccagatcaagacatgtagtttggagggattcagtgaagggaacattttatttaggggtgaaaaccagatattccttgaaa

SEQ ID NO: 33592 - DNA, 120 bp, synthetic construct
  source 1..120: mol_type = other DNA
ccagtaaacctatattctttaccgttttccttctgggtttcatctatcagatcggattgccctgaaaaagaacttcagtgtgtcagaaaagcatacctcaagtagccgtaataatgttca

SEQ ID NO: 33593 - DNA, 120 bp, synthetic construct
  source 1..120: mol_type = other DNA
aggacaaggcatttaaaatgcagcaacagaactcaagagagaagctaacagcctacttccacctttccttgattttgattactttcattcttgaccctggagcctcagtcttgtcaccta

SEQ ID NO: 33594 - DNA, 120 bp, synthetic construct
  source 1..120: mol_type = other DNA
gccaaattcctctgaggaaacaggcctaaatcattactttgaaatgggcatttcaggtatgaggccaggacttcacaataaggatataaatactagcttgggcatgagggaagatgtaca

SEQ ID NO: 33595 - DNA, 120 bp, synthetic construct
  source 1..120: mol_type = other DNA
tgatcttcctgtgggtagatcagtggatgagacactacgtttggttcaagcattccagtacactgacaaacacggagaaggtacctctcccttctaaccttttgattttttagtttgaaa

SEQ ID NO: 33596 - DNA, 120 bp, synthetic construct
  source 1..120: mol_type = other DNA
catcactagctagtgaaccaactccttattctgaaaacatgtaaataaaagacaagaatgaagcattgatcctaactccatttcaaacccaatcgccctagttgttaagggaacgctctt

SEQ ID NO: 33597 - DNA, 120 bp, synthetic construct
  source 1..120: mol_type = other DNA
tgtaatggtaacttttcactacatttggtatcctatttactgataatctgatggaaactgtggacctcgagcgggcgtgggaagggttggaatacatttttgctcacacacacaatggta

SEQ ID NO: 33598 - DNA, 120 bp, synthetic construct
  source 1..120: mol_type = other DNA
catatatcccaaagaaataaaaaaagtatttcaaagagaaaaaaaaaaaagaaaactcaaggcctccatggcctacctggggagtcacataactcaccctggctcagccctgggtcccaa

SEQ ID NO: 33599 - DNA, 120 bp, synthetic construct
  source 1..120: mol_type = other DNA
aaatggcacagtacacatcacatctgaagattaaacaactacatttccatctatctgctggaaagcatgattacatcaccctcagtttgatgtgtaattttcctcgcatcacccccatca

SEQ ID NO: 33600 - DNA, 120 bp, synthetic construct
  source 1..120: mol_type = other DNA
tttgtacatgaatatcacatgatcctaaaggaaacgagggacccgctagaaggtacccaccttcaagaagtctacagtgaagacaagaagagatacatgggtatcagaaggtatcaaaac

SEQ ID NO: 33601 - DNA, 120 bp, synthetic construct
  source 1..120: mol_type = other DNA
ttaaattagcccacagatagaaaaatatgcctccgtgcctttatcttctgtgctacaactttcactctcctggggtagtcattgttaatggtttgctgtgtatccttcatgtttcccatg

SEQ ID NO: 33602 - DNA, 120 bp, synthetic construct
  source 1..120: mol_type = other DNA
gcatctgttgagaatatcaggcgtttttttttttgacctattaatttgggccattatttggctccatccttgaattctagagtacccatactgtgccaaggtctgtggtgtgtgtgtgtg

SEQ ID NO: 33603 - DNA, 120 bp, synthetic construct
  source 1..120: mol_type = other DNA
tggagatttttttggggtaaaaattagctggctccctagctttgctccagagaatggtcatgaaattaatggttgctgatactcaacctggagcatgcctgttgttggtcttttgagaag

SEQ ID NO: 33604 - DNA, 120 bp, synthetic construct
  source 1..120: mol_type = other DNA
aaggttttaacagagcaaaatatgaggtgctagaacagatgcttgtacatgaaagttgacagcagctctatgcacagcgcccaaaaggtagaaacaacccaagtgtccatcatcagaata

SEQ ID NO: 33605 - DNA, 120 bp, synthetic construct
  source 1..120: mol_type = other DNA
agtggagcctgtccggacctgaatggctggggctatttttacgaatctggtggggcgcccggcagctggacggcgcctgctagctttaataagaggcacagagggcttctgagaatggct

SEQ ID NO: 33606 - DNA, 120 bp, synthetic construct
  source 1..120: mol_type = other DNA
gatcagttgactctcaagaggaaatttgtcttcctggctccatttctcgccatctcttgtcatcgtcttcacctcaggggctaaagtctgcatggttggacgtagaagaatatgcctgct

SEQ ID NO: 33607 - DNA, 120 bp, synthetic construct
  source 1..120: mol_type = other DNA
gtcgtcgtggcccgggcttcacgtctctgcggcctggaacagaagtgagcgggagggccgtggtcagcttctaggcgcgtctgggcacctgcccagaaacctgcccccagggaagcgcta

SEQ ID NO: 33608 - DNA, 120 bp, synthetic construct
  source 1..120: mol_type = other DNA
catgcagtcgtttaatgatccgcttctctgtggtaaaatacggccacgtaaaaaagccaggcagaagagccagaagtctccctggcagcccttcccagatgaccattcagcttgtctcag

SEQ ID NO: 33609 - DNA, 120 bp, synthetic construct
  source 1..120: mol_type = other DNA
aaggtcattgctttttaaaaatggtttccctgtacataatatatatgaaagtgacttatgaattctgagaaacctctttcagaagaattctgaaagagtgtaatcgtatttagattaata

SEQ ID NO: 33610 - DNA, 120 bp, synthetic construct
  source 1..120: mol_type = other DNA
ttcatccgatgatagacagttggtttttgtctgccttttggctgtcgtgcatagggctgctgtcaacatttgtgtagaagtatttgttttagtgcctcttatattttgctctgttacagc

SEQ ID NO: 33611 - DNA, 120 bp, synthetic construct
  source 1..120: mol_type = other DNA
tagtacacagtaaaggctgtagacaggtttactagcagcagacagtccttgggtgtcagacatgtcatttggcttcccatgtacgccattgattatataataggttggtgcctttatttt

SEQ ID NO: 33612 - DNA, 120 bp, synthetic construct
  source 1..120: mol_type = other DNA
agaccactaactttagaatcaccctgactatctgtttaaaatgcagatggcttgcctgggccccatcccagatttgggaagaagggaatgaaacaggaaatctgcttgtttaacaagcat

SEQ ID NO: 33613 - DNA, 120 bp, synthetic construct
  source 1..120: mol_type = other DNA
tagtacatactgcccttttggtgatcagagatcagaatttttattatgccctggagatacaggcttccttaaaacactgaccacttataaaccaaactccatctcatgcggccactttcc

SEQ ID NO: 33614 - DNA, 120 bp, synthetic construct
  source 1..120: mol_type = other DNA
gagtgacatttagtatattcacaatgtttgcaaccatcaccatcatcttgttccagaacattttcatcatccaaaatggaagccctgtacccattagcagtcactccccaatctctcttc

SEQ ID NO: 33615 - DNA, 120 bp, synthetic construct
  source 1..120: mol_type = other DNA
gtgttgctgtgaaatcagataactgcagactgccttattaatgaatttagcaagcctttatagccctgttttctagccgttagcacttacaaaatgattttctgtcagaatgggcagctt

SEQ ID NO: 33616 - DNA, 120 bp, synthetic construct
  source 1..120: mol_type = other DNA
aagtttgtgggtttacattctacatcacctagcaacctcctgactcagccagatctcttgtctacccttagttctgtttacagactattcaaacggcccttcgaaaccatgaaagatatt

SEQ ID NO: 33617 - DNA, 120 bp, synthetic construct
  source 1..120: mol_type = other DNA
ctagagacctatgtaatcttagagaagtcattttaccttttgggacctcaagttcctcatttgtaaaatagaaggcttacagcatcagaaaaggcccctcaaaggagagtggactttggg

SEQ ID NO: 33618 - DNA, 120 bp, synthetic construct
  source 1..120: mol_type = other DNA
aagttgtttatgaacttctgggcctgtggaaagaaagggtctaatcctaatcaacataccaaagacatggagaactgaaataaaaaccatcacccagaacccaggactacctagtagtgc

SEQ ID NO: 33619 - DNA, 120 bp, synthetic construct
  source 1..120: mol_type = other DNA
ctaattgtatatgcacctaacaacggaggttcagaatacctgaagcaaaaattggcagaaaggaaaggaaaaatagataatccacaattatacttcgcaagcgtgacactactctctcaa

SEQ ID NO: 33620 - DNA, 120 bp, synthetic construct
  source 1..120: mol_type = other DNA
tgccatttacttagcactaattttatgccagataccgtactgtttcctatacattatctcattcagtcttcgtaacagtgccttgaggtcatgttcccccccaccaccaccatttacaaa

SEQ ID NO: 33621 - DNA, 120 bp, synthetic construct
  source 1..120: mol_type = other DNA
caaaaattataaaattaagttgacacattagacgttgggtccctagcacaacaatggtacacattggaaagcttgtctatttggcttggtcagtttctcattgcagcctttgcctctagc

SEQ ID NO: 33622 - DNA, 120 bp, synthetic construct
  source 1..120: mol_type = other DNA
tgctcagtcatattagtgggattaagtttgaaagtctaaaatcatacttcaaatgaggactgtctcaacccaggcacactccttgccctccagaatttatatacatttgatagcagctgg

SEQ ID NO: 33623 - DNA, 120 bp, synthetic construct
  source 1..120: mol_type = other DNA
gattacaattaattaacagaaatcctggtgattaggagtaggcttaagctcttgctcagtaacagtttgatcactatacagatactcactttctttaaacacctccctaccccccccccc

SEQ ID NO: 33624 - DNA, 120 bp, synthetic construct
  source 1..120: mol_type = other DNA
gacctccctaagttacatttcaatgccagttgtacaatactagtattgaactagtgaggataagagtactagaggccattgcttgtgttacagttcacatcccggctttatgacctttgg

SEQ ID NO: 33625 - DNA, 120 bp, synthetic construct
  source 1..120: mol_type = other DNA
atctgagtctccaagttaacttacattgcatttgttcactgtctccatttcctaagtcatattttagtagatgataccatgtagttttgcatttctatccaaatgcattttgcttgggag

SEQ ID NO: 33626 - DNA, 120 bp, synthetic construct
  source 1..120: mol_type = other DNA
tgaggtatagagagaataggcagtttgatcaagcttttaagattggtgaatggaagagtgtgatttgaccccagagctctagtgcctgcatgcttaaacactatattgcacagcttcttc

SEQ ID NO: 33627 - DNA, 120 bp, synthetic construct
  source 1..120: mol_type = other DNA
atttttatttttttttgtggttttagaactgagtccctcagctcctagaggttgatggccattccctgtcacatggctgtctccatgacatggcactttcttgttgaaagccaaaaggaa

SEQ ID NO: 33628 - DNA, 120 bp, synthetic construct
  source 1..120: mol_type = other DNA
attcattgctcaggtaatgattgagaatttttaaaaatgccttgaaccagtaattctcccaacctttgcccagggtttctctctctctctctctctctctctctctctctctgtgtgtgt

SEQ ID NO: 33629 - DNA, 120 bp, synthetic construct
  source 1..120: mol_type = other DNA
cttatttttttcaattttttttttttttttttagattcagggggtacatttgcaggtttgttgcctggctatattgtgtgatgctgagatttgggatacaaatgatcatgtcatccaggt

SEQ ID NO: 33630 - DNA, 120 bp, synthetic construct
  source 1..120: mol_type = other DNA
ggctagttttgtcctccatgggtacaggtctttaagtcattttgtcctcattgtttttactagcttggccatgccagttggcattgtcttgtgctaaaaggcattttgtagtagagactt

SEQ ID NO: 33631 - DNA, 120 bp, synthetic construct
  source 1..120: mol_type = other DNA
actacaacagagttgacaagaggccttatggcctgtaaagctgaaaatgcttactatctggtcctttgtagaaaaaatttgtccctatttctccacatcctctccagcacctgttgtttc

SEQ ID NO: 33632 - DNA, 120 bp, synthetic construct
  source 1..120: mol_type = other DNA
gtaaaccaggactcctcaagaaagggagaaattagattcagaccaaagaaggagtaagtggctttaatctatgaacaagataaagggttcatccttatctgaagcaggaaagaggaaggg

SEQ ID NO: 33633 - DNA, 120 bp, synthetic construct
  source 1..120: mol_type = other DNA
tgttgctttgtaacatagagaacttaaatgccaatcacctattaacaagctaataaatgtcctggctagaagtgtcataaatggtgaagggtcttgacacaataccatgtgaggattact

SEQ ID NO: 33634 - DNA, 120 bp, synthetic construct
  source 1..120: mol_type = other DNA
gttatgctaaaggacatgttcaggaagagctttcctttcttactgcctagtcatacccttaggcaaagaagcagtaattttgaagggacaatgtaaaatagaagaataggcaatcttgga

SEQ ID NO: 33635 - DNA, 120 bp, synthetic construct
  source 1..120: mol_type = other DNA
aggagtctcatcacacttgacacacatcttttaaaaatttgtgtttttctattgctctttcatctcaaagaggcctatagcagagaatgagtagcacgttgcgctgtctttggggtcctg

SEQ ID NO: 33636 - DNA, 120 bp, synthetic construct
  source 1..120: mol_type = other DNA
tcccaagaaccccctcccacataccctcaccaatgtttgctaactactattctactctctacttatataaaatcaacttttttaggttccacataggagtgagatcatgcagtgtttttc

SEQ ID NO: 33637 - DNA, 120 bp, synthetic construct
  source 1..120: mol_type = other DNA
agttcgtaacaaatgccttgggcagattagggcattgccaaaaatcaacatcatgctacttacatttacaatcatctgacagtcatctctcagacgagcatcctcctgattgcctaacat

SEQ ID NO: 33638 - DNA, 120 bp, synthetic construct
  source 1..120: mol_type = other DNA
gtcgggagcttattaaggaaagaatcctagtctctggcattctatttgggccaactttgtcatccttgtaattccctctaaagctttggcatgtgctcacactatatccgtatgaagttc

SEQ ID NO: 33639 - DNA, 120 bp, synthetic construct
  source 1..120: mol_type = other DNA
atgggtgttcccattcattgcattgtgaagttgatatgaatgccattttgatgctacctcattttctggctcctgatgaagaaacagattaatgacaaattcctttcattactaatttct

SEQ ID NO: 33640 - DNA, 120 bp, synthetic construct
  source 1..120: mol_type = other DNA
cttgttcccctacttcctcactttcctattcaattagtcatcaagacttgcacattttgacaactaagatttttcttttgttccatcccctttcagcccatcacagtcccctaagaccac

SEQ ID NO: 33641 - DNA, 120 bp, synthetic construct
  source 1..120: mol_type = other DNA
tcttgttacagtttcgtgggggatggtcccagcttttgtccattcattgtgatgttggctatgggtttgtcatagatggttctcagtactttgaggtatgttccttcaatgcttagttct

SEQ ID NO: 33642 - DNA, 120 bp, synthetic construct
  source 1..120: mol_type = other DNA
gattgtatggttcctttcagagcctaaatatttaataggtgggtcactgagggtctgaactagaatatttgataagcagacatccagggttgagtgttagatgttctgcagggagatgga

SEQ ID NO: 33643 - DNA, 120 bp, synthetic construct
  source 1..120: mol_type = other DNA
cctcacattgttagcctacaaactaagttaaggacacacttaaattccagaagttgatattagtctattcagagttttaatctcttcttgattcagtcttgggagattgtgtgttttcag

SEQ ID NO: 33644 - DNA, 120 bp, synthetic construct
  source 1..120: mol_type = other DNA
agactactcaagggcagctgtgctacctaatacgtgtaatgttgggaacaatatttaactacccgttgacttagtttcttcatctgaaatgtaaaggcaatcagaacttccttagaggat

SEQ ID NO: 33645 - DNA, 120 bp, synthetic construct
  source 1..120: mol_type = other DNA
accacttcccatacatgatttagcttaactaaggtgccgatatctgtgtatgatagcaagttaggtagtaggggggttggcatttatcttaaggagccacagtgacactaataattgatc

SEQ ID NO: 33646 - DNA, 120 bp, synthetic construct
  source 1..120: mol_type = other DNA
tcaaagtatttgatgccttaatattaactgatttgtacagcccattatacattccaagagggcaagggcagtattaaactgcatccctgaacttaacacgttacctgaaacatagcaggc

SEQ ID NO: 33647 - DNA, 120 bp, synthetic construct
  source 1..120: mol_type = other DNA
aagttttgtttggcagacatcttcctttgaaaatgggagacttgtggaggtttcaaagggacttgtgaggaaaaagttttggacagaaccagaaactggctggattgagagacaacattt

SEQ ID NO: 33648 - DNA, 120 bp, synthetic construct
  source 1..120: mol_type = other DNA
cccaggctgtataattttagggttggtcttgcaaaatgggtagttagttgaggcttgggctgagtttatgtcctaacaggtttgaatgggtgagaacaacactacaagaacccatgatat

SEQ ID NO: 33649 - DNA, 120 bp, synthetic construct
  source 1..120: mol_type = other DNA
ggaggcatcacactacctgacttcaaagatagcatcttaaaaggatacattgggcatcagattcaggaactagaggcagaaaatttatgggaaaggattgcaggcactcagaagtaattg

SEQ ID NO: 33650 - DNA, 120 bp, synthetic construct
  source 1..120: mol_type = other DNA
tatgctgataaccttggaatcatggtttggatggtttaaacctctctctccataccaattgaatcattcatcaaatcatatggaatctccctatgtgtaacctcccgtcaagtcctccat

SEQ ID NO: 33651 - DNA, 120 bp, synthetic construct
  source 1..120: mol_type = other DNA
aagaagcagcagcagcagcagcagtaccattggtcgaattagggttcctgtcccatttttctgcatacatttaaagtctaatgtgatatagtaagtactttctcctttgaagatcagcta

SEQ ID NO: 33652 - DNA, 120 bp, synthetic construct
  source 1..120: mol_type = other DNA
gtgtgtgacatctgagagtaagcatgtttagaagtgtctcaagagtacctgacagtaataaaatcaggaaggtaagacaagaattatccagtctttgcagggtcaaaaatgacccttctc

SEQ ID NO: 33653 - DNA, 120 bp, synthetic construct
  source 1..120: mol_type = other DNA
ctaaatatctcagcagtaactcccccattccctcattgccccagcccctagaaaccactaatctgttttctgtctataactttgcccattccatatatttcatagaaatgcagtcatacc

SEQ ID NO: 33654 - DNA, 120 bp, synthetic construct
  source 1..120: mol_type = other DNA
ggcaaagcacaatttgtagaattacaggaataaaactgatggaagcatgtagcatttcattcttccaaagcccagaatggaaccaaatagcagattagttgcaatattgaggttgaaact

SEQ ID NO: 33655 - DNA, 120 bp, synthetic construct
  source 1..120: mol_type = other DNA
atatttctgtagcctggttgggttgccagtgacccagttttatatcctactttcttgtctacaccagctacttctctacctacaactgccattattgtgaaccctctttctctttcctct

SEQ ID NO: 33656 - DNA, 120 bp, synthetic construct
  source 1..120: mol_type = other DNA
gtagaatctctcataagcaaaatttcaagaaatacgtactatcaactcatagcttagccctgaggcttccagtacttaagaaacctccttccttgctccttaggatcgcagagttctcag

SEQ ID NO: 33657 - DNA, 120 bp, synthetic construct
  source 1..120: mol_type = other DNA
gccccaatccagacttacaagaccccatcttatccctcaatttctggttccatttagcggtagcaagatcttaaaactagtatctactggaatatgtcagttctgtaatgctgactgaag

SEQ ID NO: 33658 - DNA, 120 bp, synthetic construct
  source 1..120: mol_type = other DNA
gaattgcaaaacatgaatgccatttgcaaagaatttaagaaaaataacgaagattgttcattaagccacatactgagtgcggctgggggtggtggctctcgcctgtaatcccagcacttt

SEQ ID NO: 33659 - DNA, 120 bp, synthetic construct
  source 1..120: mol_type = other DNA
catttcctgctacgtatttttacatatttgagccaccaagtggaatataagcttttgatggtagtgataaggatacacaaaatgtgtttatcgcctttcttagtctgactttaaggtcga

SEQ ID NO: 33660 - DNA, 120 bp, synthetic construct
  source 1..120: mol_type = other DNA
gtgccccatccttgttagtatttgcctagtgaatttatttactgagagttacagtaaggtcataaaacggtgcaaacttcttttggggctggccatttgacgtctttgaccattgatttc

SEQ ID NO: 33661 - DNA, 120 bp, synthetic construct
  source 1..120: mol_type = other DNA
tggggcatgcttactcataatgacgccagggcaagcttataagaacactgtaatcactaacacgaatcctattttaaagatgaagaaagagatctcctagtcctacgttgggagttatta

SEQ ID NO: 33662 - DNA, 120 bp, synthetic construct
  source 1..120: mol_type = other DNA
actgtcttaacattcaagtcactgctcttcagaatacactctagacccaaaggtgtgctaatcacttcacagtgaccactacagagtactaagaagagaagatcaagggcatgaaattgg

SEQ ID NO: 33663 - DNA, 120 bp, synthetic construct
  source 1..120: mol_type = other DNA
gagtgagtaaaaaagggaaaactaaacccacaaataaggggacttctcggagcccaatccatatttttaaccctggaaagccctaggcagagctataaaactggcttgcctctcatttca

SEQ ID NO: 33664 - DNA, 120 bp, synthetic construct
  source 1..120: mol_type = other DNA
aaaaaaaaaaaaaaaaagaaagaaagaaagaaagaaatatgaggcccaccggtgctaaccagggaacctctctccaaaagaagggcccaccaaaagccctaaccctgtttcaggtctttg

SEQ ID NO: 33665 - DNA, 120 bp, synthetic construct
  source 1..120: mol_type = other DNA
accctcacaactccctgccccttacaaaaggggacccacacgtctcacccttgtggttgaccctgggaggtcctggttgagttctgtctggaaaggcacccagagggagggtctttcact

SEQ ID NO: 33666 - DNA, 120 bp, synthetic construct
  source 1..120: mol_type = other DNA
tgggctatgtgtctagagtcttagacttctaaaatgcatgtggtcactatatgtaggttatctcttcggtgacatacactgcaatttgagagggctggaaattgtttgccttggtaaacg

SEQ ID NO: 33667 - DNA, 120 bp, synthetic construct
  source 1..120: mol_type = other DNA
cttaagtgaaccactgtgtatataaatatgttggaaaacagctgtatacatttttgggcaacggttatgcataatatttaccaggagaatttttttcttaacaagccaacatttaaaatt

SEQ ID NO: 33668 - DNA, 120 bp, synthetic construct
  source 1..120: mol_type = other DNA
gatttagactgcttaggattcactggacttcttaaacctgtgatttagagtctttaatcagctgtggaatcttctccgtcattctctcaacaaatagtgcctcttctccattccctctcc

SEQ ID NO: 33669 - DNA, 120 bp, synthetic construct
  source 1..120: mol_type = other DNA
acacaaaaagccaaaggaaacctaagtgaaggagggtttttaggagttactttcaggatggaaaatctattaataaaatggaatcggccaggtgtgatggctcatgcctgtaatcccagc

SEQ ID NO: 33670 - DNA, 120 bp, synthetic construct
  source 1..120: mol_type = other DNA
atcttaagtcacaaatgcatttaatacacctaactaactgaaactcacagcttagcctagcctaccttcaatgtgctcccaacacttacatcggcctacagttgggcaaaactgtctagc

SEQ ID NO: 33671 - DNA, 120 bp, synthetic construct
  source 1..120: mol_type = other DNA
ataatgttgctgcctacggagaggtttaaaataagagaataatatgctcccttggcttagactcagatgcctcttggggtgggggactctgctaaaacctcctcctccttgaaagagcca

SEQ ID NO: 33672 - DNA, 120 bp, synthetic construct
  source 1..120: mol_type = other DNA
atactctgttccacagcaagaatcatctttctaagcgacaatctgattatgtcacccccaggccaaatcccctgacctctaaattccttaacttgggttttaaaaaccttgcacaatctg

SEQ ID NO: 33673 - DNA, 120 bp, synthetic construct
  source 1..120: mol_type = other DNA
ctgcagtgaataagccttctgctaccagttttccacgcaccaaagtccaatccattctcaaacagtgattcaggcataccagaagaaagtagcagggaatgcctccagctttgttctttt

SEQ ID NO: 33674 - DNA, 120 bp, synthetic construct
  source 1..120: mol_type = other DNA
aagtgtgtaggatgcacacagaaacctcaagatgcaatacagctgtgaacaatgtgacactgtcctgggctaaagcttgggatgactgtgtagtgaaagtatgtatgcagtttaataaag

SEQ ID NO: 33675 - DNA, 120 bp, synthetic construct
  source 1..120: mol_type = other DNA
tgcgagagaacaccctagaaatgactccacacccaatcccgaagggcaaaaaaaaaaaaaaaaaaaaaaaagcccaaacaaacaaaaatccccaccccctgaaatctttgacttctgggc

SEQ ID NO: 33676 - DNA, 120 bp, synthetic construct
  source 1..120: mol_type = other DNA
actagtattaaccctctctgtcaacatttttgctttccttaaagaaatataagaacataaaattttagtctaggtgtggcggctcacatctgtaatcctggcacgttgggaggtcgaggc

SEQ ID NO: 33677 - DNA, 120 bp, synthetic construct
  source 1..120: mol_type = other DNA
aactccttgaccagcatccttcttactttatcctgcttccctcactccctttcacctgaacaaattacttctacaagaagccccatctatctaaatagggctctacttctagggatttta

SEQ ID NO: 33678 - DNA, 120 bp, synthetic construct
  source 1..120: mol_type = other DNA
tcaagccctttcttcttggtactttgaaatatacaacacatcgttgttaactacagtcactctattctgctgtcaaatgatataacgtagtccttctatctaactggatgtttgtaccca

SEQ ID NO: 33679 - DNA, 120 bp, synthetic construct
  source 1..120: mol_type = other DNA
aggcattttaaatatgattttaaattgcaaagggacgaaatcatgggcttcttgtgtttctttggatgccaatcacattacttcgagagctggcataggtcgtggatgtctcaggctacg

SEQ ID NO: 33680 - DNA, 120 bp, synthetic construct
  source 1..120: mol_type = other DNA
gcgagtgctattattactcctattgaacagataaataaatggaagcactacaaaagggagttgttagtaagtggtgaagttccaattcacaccccacacgttgactcccagactctgaaa

SEQ ID NO: 33681 - DNA, 120 bp, synthetic construct
  source 1..120: mol_type = other DNA
atctctttgtctacaagagccatgtggactactatgaaccataccaagaaatgacttgacacatcagcataaacatagttcatccatgttcctttgggatggcaggctggtaggaaatct

SEQ ID NO: 33682 - DNA, 120 bp, synthetic construct
  source 1..120: mol_type = other DNA
cataatcagagaacttcaaagagatatggtatattatacacatcagccttttccttttgaagaaaagcagagagaagacactggaaggggaaacctcctgctactctgggagctcctaag

SEQ ID NO: 33683 - DNA, 120 bp, synthetic construct
  source 1..120: mol_type = other DNA
attctgaagtctatcaacaaggaaactagtgctatgaaaagctaggtaatttgtccacaaatacccagtgctacctgcggacagagctagaaaagtgcccatatggtcatttacttcacc

SEQ ID NO: 33684 - DNA, 120 bp, synthetic construct
  source 1..120: mol_type = other DNA
agagtattatggtggtgatcaaaagctgcagtggtgggtggatggaaaaatgagagacgtttatcaatgggtacaaagttccagttagacaggaggaataagttctggtgttcttttgca

SEQ ID NO: 33685 - DNA, 120 bp, synthetic construct
  source 1..120: mol_type = other DNA
tttgtacacacacacagaaacacacagaaacacacacatgtgcacacaccatctaatgcttatgaggtactgaataaatactagctattatcaataagtacttacccaatatgtggaagt

SEQ ID NO: 33686 - DNA, 120 bp, synthetic construct
  source 1..120: mol_type = other DNA
gtaggttaataatgaccacccctcaatggttctgtacttacacccttttatagacaaggaaaatgaagcacggaatgaagcataatttgcccaaggtcaccaagctaaaaggtggtgaag

SEQ ID NO: 33687 - DNA, 120 bp, synthetic construct
  source 1..120: mol_type = other DNA
actttcctgcctctgtgactctggttctcatgccaccaaatccatcaacacttccttgcagtcctgtttctaaaatagaattcagtgggttaaacaaatcatgattttaaaaagcagaag

SEQ ID NO: 33688 - DNA, 120 bp, synthetic construct
  source 1..120: mol_type = other DNA
tttctggttaatgcactgttcaagtagaaactcttctgtgtggggctgccagaaaagcactggttttccttacaaacaggagctgacacagctggaatatgcttttactttccccatttt

SEQ ID NO: 33689 - DNA, 120 bp, synthetic construct
  source 1..120: mol_type = other DNA
taccgtcatgtggccttctacatttatttttgaaatcttttattgtcatcttggttacataggtagccatgcattctttcatagtgagcaatgatcctattcagccaagtattcaaacct

SEQ ID NO: 33690 - DNA, 120 bp, synthetic construct
  source 1..120: mol_type = other DNA
cagagccagaataaacaagagtaaagctattttcttcagaatatcaagagttaaaactggcatcccagaataaagaatttaaacttgtaatgatagctctttacgagactattaacaata

SEQ ID NO: 33691 - DNA, 120 bp, synthetic construct
  source 1..120: mol_type = other DNA
agatggcactaaatatccaggttttactgacttcatattctactctttccttccctcttccctcccaaaacatactttccagtatctttcaaaattgacatcatctgggccgggcgcggt

SEQ ID NO: 33692 - DNA, 120 bp, synthetic construct
  source 1..120: mol_type = other DNA
caacaggttgtaacatgtaaagtgacaatttagaggctgatacagaagaatagcgaataacaggggtttagtttttatgcatcatttcttcaggaaaacacatcatgaggggaaatagct

SEQ ID NO: 33693 - DNA, 120 bp, synthetic construct
  source 1..120: mol_type = other DNA
ccaaggtaaggaatcaataaaatgatcaacacatttttctcttaggactttgggttttcttttgtaaacaaaggtaggacactcacctgaggatagtgtattccttttttggagtgttat

SEQ ID NO: 33694 - DNA, 120 bp, synthetic construct
  source 1..120: mol_type = other DNA
ggccatcaaaggtaaggagaaggttggtaggaagaaattgcaagtgtataccagagaatcctgatggacaaaactgggataaataatgcaaaatctgatctagagtaaggactccggagg

SEQ ID NO: 33695 - DNA, 120 bp, synthetic construct
  source 1..120: mol_type = other DNA
gcaacagcttaaaagagggacacttcagacaaggccccttctgggtctctttctctttcagtaccgcagagaaaaagatacaatggaagcaacagcagtagatggaatttttatttgaaa

SEQ ID NO: 33696 - DNA, 120 bp, synthetic construct
  source 1..120: mol_type = other DNA
ggatgtatcctaccatgatgtgtctttttcctaggactggcataaaataaactaatctggctcacagacaatttcagtttatcctcatttttatcaccatgtgacctcgggcataactaa

SEQ ID NO: 33697 - DNA, 120 bp, synthetic construct
  source 1..120: mol_type = other DNA
catgtagatacagatgctcacaacatcttttttcatcctactaaggaatcttgctgctaattcaaccactgagacaaataatacgtggacctgcgctggagatttggcttcggtgttcat

SEQ ID NO: 33698 - DNA, 120 bp, synthetic construct
  source 1..120: mol_type = other DNA
cttcatggcccctaaacgctgatatctgctttcagccttaccatataatgctcttatgctcttcctcttgaaacacatgttaagaatgacccatcttccctttggaagagtttaagcagt

SEQ ID NO: 33699 - DNA, 120 bp, synthetic construct
  source 1..120: mol_type = other DNA
ccaatgttcaatctattgatcatgttgaaagaaaaagggtttagatgagctgtacacatacatatatactctcgggatcatgataaaacaagacaggtggcctggcacggtggctcacgc

SEQ ID NO: 33700 - DNA, 120 bp, synthetic construct
  source 1..120: mol_type = other DNA
ctgtagcattcacacaaataggatacagtggtttaccccttatctgtaggggatacattccaagactcccagtggatgtctgaaactgcagatagtactgagccctatataaactatatg

SEQ ID NO: 33701 - DNA, 120 bp, synthetic construct
  source 1..120: mol_type = other DNA
tcgcttatctgtttctttaagactccagtgcaatgatacaattagacttccaaattctcataagtcaaaaggtacaaatccctgaaaactgctgaatgagtattgaagtgttggcagtta

SEQ ID NO: 33702 - DNA, 120 bp, synthetic construct
  source 1..120: mol_type = other DNA
ctcaaagctaaggaaagaacttcacaaaagaattaaaggaaacaatcaccagagctcacacgtggctagtaataccacctgttcccacgagccccagtgaaaaattttatcattcacagg

SEQ ID NO: 33703 - DNA, 120 bp, synthetic construct
  source 1..120: mol_type = other DNA
tatttccagcacatcgactcaagttaaacattagtttatcacaatgtacacaaaagaagaggttcttatcagtacctatcccatacatcattaatttttcctattcttctcaggtattag

SEQ ID NO: 33704 - DNA, 120 bp, synthetic construct
  source 1..120: mol_type = other DNA
atcaatgcgatgtttcatgctttcttcttttattgaagatggggtgggaatactgcatcaagtgagagacttgagtctgggagaggctgagttgtataactgtgaaatcatttgtcctcc

SEQ ID NO: 33705 - DNA, 120 bp, synthetic construct
  source 1..120: mol_type = other DNA
tttcctcgtaagcacaaaaccctaggtatctgctgaggatgagaggagagaatcaaggtggaatttaaatcaaagtgataaaagttcaatagcaattgtggagactgtgaaaggaaactg

SEQ ID NO: 33706 - DNA, 120 bp, synthetic construct
  source 1..120: mol_type = other DNA
caggtggatgctccattagtggttatccttgacaatttattacagcataaagtcgacatttaatcactatctctaccctctttctaaataaaagggcttgtggctgtaactcccctccat

SEQ ID NO: 33707 - DNA, 120 bp, synthetic construct
  source 1..120: mol_type = other DNA
tggttttcaaattttaaaaatttgagacagtttactctagagcacaggaaaataagagagatctgactgggttgttggtgacataggcaaatcgctcatagggagagggaagagggccag

SEQ ID NO: 33708 - DNA, 120 bp, synthetic construct
  source 1..120: mol_type = other DNA
gtctttatagcctccctaaacccgaactttcacaaattattttctacagatgacagtttaaatagtccttccagttgggaacttttggactaatattttgtcatcttcaaagacagagct

SEQ ID NO: 33709 - DNA, 120 bp, synthetic construct
  source 1..120: mol_type = other DNA
ttaatgcactggctcgttttgatatctgcctcggtctcacctcattctaattactgatctacagtgatgccagtaatctcctctcctccttcctctcatcttgggaatgttttgaaaaca

SEQ ID NO: 33710 - DNA, 120 bp, synthetic construct
  source 1..120: mol_type = other DNA
gctgtactgtcactagctcatgtggcaactgggcacctgaaatgtggctggtccaaatttagatgcatgaaattaccaaaatatgtttaattctgaagattaagaaaagctaagaacata

SEQ ID NO: 33711 - DNA, 120 bp, synthetic construct
  source 1..120: mol_type = other DNA
caaggtggttagtagcacggtggcaggtaacatgggaatgggaaaaagaaaggtatctaaagagaatcttaggcagagaaaacagtaggtacaaagaaacagaagcttaagaaagcacag

SEQ ID NO: 33712 - DNA, 120 bp, synthetic construct
  source 1..120: mol_type = other DNA
gttgatgctgtcaccaaggttatgcatctatgcacaaaagtctaaatctctcaaaagaatggaaaacctagctagtaaactcagctttaaacttcatcgcagtctcactgtgccaggaga

SEQ ID NO: 33713 - DNA, 120 bp, synthetic construct
  source 1..120: mol_type = other DNA
ttgtttagagcgagaccgtggagtttagcatgttcttactatctggcactaccaaatgttccaggctcattttctatattccctttcctagtgttagaatcagctgtttctccacagtgt

SEQ ID NO: 33714 - DNA, 120 bp, synthetic construct
  source 1..120: mol_type = other DNA
ttagaatcactgagagaacttttcaaaatgacgtcccagccccattccccaacaattcaatcagaatatctgggaatggagcccaggtattggttctgtaaaaaactatccaaccaggta

SEQ ID NO: 33715 - DNA, 120 bp, synthetic construct
  source 1..120: mol_type = other DNA
tatgtttgacagtaatcatcctgtcgtgctatcaaatactacatcacattcattcaatctaactatatttttgtacccattaatgatccccactgcccccgacccactagcattcccatc

SEQ ID NO: 33716 - DNA, 120 bp, synthetic construct
  source 1..120: mol_type = other DNA
tctttcctagcttaatcctttcactgctcagcaatatgcggcacacctggcaacatgggagagatgagttagttactgcaaaattgtttgcttgttctcttaatgccttacctcaatttc

SEQ ID NO: 33717 - DNA, 120 bp, synthetic construct
  source 1..120: mol_type = other DNA
aggtgtagatcaaacaaaacatatctctgggttccttccagactttccattaacagtttataacgtcttctgaactatctgttcacatacttaaacctgagtcctcgggctgggcatggt

SEQ ID NO: 33718 - DNA, 120 bp, synthetic construct
  source 1..120: mol_type = other DNA
actattccctgaaggtggtgcttaccctttccctgtaaatttaacaagctcagctttgggtgatcaacacctttgactggaggacattacaggtgtttctatggtattcattcataaact

SEQ ID NO: 33719 - DNA, 120 bp, synthetic construct
  source 1..120: mol_type = other DNA
agcgataagatgctctttcaattggaagagtctatatatagaaaggctttacagatatgagattttattgggaaaacgagaccataagcagtggctggatcttcattaatcagcctgtat

SEQ ID NO: 33720 - DNA, 120 bp, synthetic construct
  source 1..120: mol_type = other DNA
cctctccccgcttactgttgtgaagtagcattaagcctgttcagagaatttggaataaaaatatatgggggccaattaggagagcaacatggctgctgaatttaataggtactctttgtg

SEQ ID NO: 33721 - DNA, 120 bp, synthetic construct
  source 1..120: mol_type = other DNA
aagccccttagccaacccccagctaactagagacacacgagtaatcctagcagtaaggtgaagaacttcctggctaacatatgtatttgaaatagtatgttggttgttttaacctactga

SEQ ID NO: 33722 - DNA, 120 bp, synthetic construct
  source 1..120: mol_type = other DNA
tttctaaagctacctttcgtaagacttagtgtttaactcttctgttgtagccactgtattgtaaatgcaactaaggttgtattccttgcccaatatgttcatttgacgttcaattggaga

SEQ ID NO: 33723 - DNA, 120 bp, synthetic construct
  source 1..120: mol_type = other DNA
accacaaaacccatcatcagaatgaacaggcaaactacagaatttttgcaatctatttaccattaacaaaacattcttcccctgcatccttgccgtaagcttcgacctcagccttggata

SEQ ID NO: 33724 - DNA, 120 bp, synthetic construct
  source 1..120: mol_type = other DNA
aaaatagacaaatgaagttgcatcaacctaaacagcttctgcacagccaaggaaataatcccttttcaggtatatggtatacaaatattttctcctgctccatgagttgtcccttcactc

SEQ ID NO: 33725 - DNA, 120 bp, synthetic construct
  source 1..120: mol_type = other DNA
gatacttggaaattggctgggacatgaataaattgctcaaccctattactgtacacactgaagtactattttttagtacttcagcagtaggtcagcagtagaatcctcatatccccaaag

SEQ ID NO: 33726 - DNA, 120 bp, synthetic construct
  source 1..120: mol_type = other DNA
cacatcctgtcatgctagggcagttttccatttacagaagcaagtggctgtaaggttttgtggtagtcaggtagatgtcacagcgcaaacaggaattaactcaatacgtataaaagagaa

SEQ ID NO: 33727 - DNA, 120 bp, synthetic construct
  source 1..120: mol_type = other DNA
gagaagatgcctttataccattggaaggtattgtttacctattagggcatccctgagtttaatgaccacttgtacttagccttgttgtgtttgtcattctcttcttttctagagattcct

SEQ ID NO: 33728 - DNA, 120 bp, synthetic construct
  source 1..120: mol_type = other DNA
tgtcggtaaaatctttccatcacgtatatttagctttcaacagcatctgtaaagcttccaccaagaaagttgtgatgaaatttgatcctggtatgctattgtgtagtgcccacctggctt

SEQ ID NO: 33729 - DNA, 120 bp, synthetic construct
  source 1..120: mol_type = other DNA
gataaaaacagtgctcaggaataagatttttttgaagaagtccaatctcagtctttcccttcttcaggttgtaagctacagagttttacaacttccgtggatgcaaggctgctgcagagc

SEQ ID NO: 33730 - DNA, 120 bp, synthetic construct
  source 1..120: mol_type = other DNA
gtcaatctgaagcacaaaattttgttctgatgagatatataatctttgctatgtgagcaacataccaggtagaatgacaattattaccttgaattagaagtaaagtgtgtcctctaaggc

SEQ ID NO: 33731 - DNA, 120 bp, synthetic construct
  source 1..120: mol_type = other DNA
catccatttagttacatggatctctgtgtggtatttgctgttgaaaaaaaataaggttacaatttatcaaggctaatgaaagaaaacatataagagattcaaagctagtgagatatattc

SEQ ID NO: 33732 - DNA, 120 bp, synthetic construct
  source 1..120: mol_type = other DNA
caccatctcttggccactatcactaagtccaactcaattctggtagagtataggaattagaaacaaatggtttcctagtaatataagctaatcatattttgaaatagtcatttgggatca

SEQ ID NO: 33733 - DNA, 120 bp, synthetic construct
  source 1..120: mol_type = other DNA
agaatggagtgtctcctctcttcccggagcctcccaagactcgcatatctaatctccgctcggagcctcccaagattggagtgtcccatctctgcctggagcctcccaagactcgcggat

SEQ ID NO: 33734 - DNA, 120 bp, synthetic construct
  source 1..120: mol_type = other DNA
atctcatctccgcccggagcctcctgagactggagtgtcccatctccacccagagcttcccaagcctcgggtatccagtctccacctggagcctcccaagactcgtcgagtgtccagtct

SEQ ID NO: 33735 - DNA, 120 bp, synthetic construct
  source 1..120: mol_type = other DNA
ctaagaatttccatttctaataagttcataaatgatggtgattctgctgtccctgggaaaacattgagtggcatttaactgtatggcattcagacaggttggtggagaggaagggagagg

SEQ ID NO: 33736 - DNA, 120 bp, synthetic construct
  source 1..120: mol_type = other DNA
taaaataaaatgaatcttaacacacacacacagacaaaaaagaagggaccagagactagaacagcagaggatccgaatggaaagatcattccatcagaagaagcaaggaggtaacctggg

SEQ ID NO: 33737 - DNA, 120 bp, synthetic construct
  source 1..120: mol_type = other DNA
tacatggtttcataaatgtattttgaatgtttatatgaaatgcctctgtaaatcatgcagaagaattttctttttctaaaggacagtgaaatgaggttgaatgtgttaaagcatcacact

SEQ ID NO: 33738 - DNA, 120 bp, synthetic construct
  source 1..120: mol_type = other DNA
gatagcaaaaaaaaaaaaaaaaaaaaacccaccaccaccaccaacaaaaacaggtcttaacctgagcctgagcaaaccagttagttccagtgccagctgcagctgtgtcaattcaagact

SEQ ID NO: 33739 - DNA, 120 bp, synthetic construct
  source 1..120: mol_type = other DNA
gaatgctgattactatattctacctttcactctaaagacccacaagaggaattgctctcagattgtagagacagtaatagttgtgtgactcctggcaattgattgaatttttaaaatcgt

SEQ ID NO: 33740 - DNA, 120 bp, synthetic construct
  source 1..120: mol_type = other DNA
ccttattgatggacatttgggttgattccagtttttctcctttttttgctatcacaaatagtgccataaataatatacatgcatatacatatacagtagtcccaccgtatctgccaggga

SEQ ID NO: 33741 - DNA, 120 bp, synthetic construct
  source 1..120: mol_type = other DNA
gctgaatctccactcacacaacgactttaggaaggagacacagtctgacagactttatggctatctaaggccaaagagatccagtgtctaaccagaaacaatatattgtccttatgcata

SEQ ID NO: 33742 - DNA, 120 bp, synthetic construct
  source 1..120: mol_type = other DNA
gcaaagctttgagattttcacacagaggccttaaagggctggagggaagccctctgctctgccatgcaggagattaagctgagctgctcaggcagattatatgtcaaagtaaattgagtg

SEQ ID NO: 33743 - DNA, 120 bp, synthetic construct
  source 1..120: mol_type = other DNA
gggagcaaagatgcatctgaatgttgagtgtagatgaggtgatgagccagggcactgacagtgtctgctatagtcccctaatctattccattcatttttctggttttattttttgagaca

SEQ ID NO: 33744 - DNA, 120 bp, synthetic construct
  source 1..120: mol_type = other DNA
ctctttctccactccttttggggcccatttctatttatctttgtattcagaatcacccgagagccacaatatctcttttgttctagaacaaccacctcctaaattgaaaccaacagatgg

SEQ ID NO: 33745 - DNA, 120 bp, synthetic construct
  source 1..120: mol_type = other DNA
gtcttttgaatactgtagcagcagtagaatccctatgttcttgaaaatgcaaaatgtaacatgagttgcacatagactctctagcagtagaaatggaatattctaagtgcagaagtttgg

SEQ ID NO: 33746 - DNA, 120 bp, synthetic construct
  source 1..120: mol_type = other DNA
tcctaggtacttagtctagagaaattcctgcacattgttcaagggagatagacaagaatcttcccaatagcactgtttacaagaacataaaactagcaacaacccaaaatgcacatcaag

SEQ ID NO: 33747 - DNA, 120 bp, synthetic construct
  source 1..120: mol_type = other DNA
gagaactcagatcaagaaacagaacatggtcagaaacctgccactatcctgacgtctacaggctggtgcaaaagtaattgaggttttttttcattgccattggcaaaaaccgcaattact

SEQ ID NO: 33748 - DNA, 120 bp, synthetic construct
  source 1..120: mol_type = other DNA
gtaatacattattccagaactttttggaacctgatggcccgttttttaaaagtcgttttgactggactggcattttggacctctgctctttcccatttccctgtgtgttagtaactgact

SEQ ID NO: 33749 - DNA, 120 bp, synthetic construct
  source 1..120: mol_type = other DNA
tcctcctttttcctctctccttcctccttttcacgttctccctccacttcttccccttctccttcctctttcccttctccctccttctcttcttcctcttctctgtctccctcctcttct

SEQ ID NO: 33750 - DNA, 120 bp, synthetic construct
  source 1..120: mol_type = other DNA
atgatccagaataagcaaatctgtagagccagaaagtaaattagtatttgcctaggactggaggatatggagtgatttgggagcaacagttaaggtatgtagggtttctttaatgttaca

SEQ ID NO: 33751 - DNA, 120 bp, synthetic construct
  source 1..120: mol_type = other DNA
taaaaaatttttcattaacccatcttgctgcacacttaaagatcccactattgtgcttggccaagttcagttccccctgagcttgactgtatgctctctgctcccctactgccttgtttt

SEQ ID NO: 33752 - DNA, 120 bp, synthetic construct
  source 1..120: mol_type = other DNA
caccaccaccaccaccgaagggaacaagctataccgtaaggctaataacaacagctatcattagtatacacaggaagcacaaaggaacttttaatgcataaaagatgtgtaaaatgcagg

SEQ ID NO: 33753 - DNA, 120 bp, synthetic construct
  source 1..120: mol_type = other DNA
gcacagggaaacagaaaggcacctgggctctgggtggtcagcacatgtgttgagagtggggatgcctcccagagaattcttttttttttttttttttttttttttttggattttttggag

SEQ ID NO: 33754 - DNA, 120 bp, synthetic construct
  source 1..120: mol_type = other DNA
tgacaatttgcaggtgaccctggaggtggagctacaaaatggaggaatggaggctacaacatagtccaggaaatgcgacacagccagcttgcagtttgaatttatattttattattttga

SEQ ID NO: 33755 - DNA, 120 bp, synthetic construct
  source 1..120: mol_type = other DNA
agagttttctttctttctgttttttttctcttttctaggtagaagtagaagtcagcaactctatggctgcagtggaaaaaaatggggaagatggtgtaggtgtggtgggtttaccggctc

SEQ ID NO: 33756 - DNA, 120 bp, synthetic construct
  source 1..120: mol_type = other DNA
actgactgctaaagtcaatttgtgttaggaagccacttctggctgtccctctccgtcccttactgggcaaaaaaatttcctactcgatctacttagtaagtgacattgccaagatctgaa

SEQ ID NO: 33757 - DNA, 120 bp, synthetic construct
  source 1..120: mol_type = other DNA
aggagcactggggcagtgaagagatccagagtttagttttggccatgctgagttgcagatatctaccagacattacatggaaatgatgccgaatagacagctagaaaatacaatactaag

SEQ ID NO: 33758 - DNA, 120 bp, synthetic construct
  source 1..120: mol_type = other DNA
tgcactgcaaattctgcttttcaaagtgaaaacttaaaagcagatgtatttgttgggtttgctacttaaaaaattaacgtagttttgtttgccctgttttctgataagcccgaatgcctt

SEQ ID NO: 33759 - DNA, 120 bp, synthetic construct
  source 1..120: mol_type = other DNA
cagaagacccagaatctggaatcagagagatgaaataattcaagtcatgttttacatgtataccattagatgctatgattgtaaccctaccactcctcccaaaatgaacaggatcacaaa

SEQ ID NO: 33760 - DNA, 120 bp, synthetic construct
  source 1..120: mol_type = other DNA
aatagtggtccctgaccattctctatagcagtgataccatagcagaaggttgtattgtttgttgcttttccatacttgtctggtggttggtgattggtaataaaatacttcttaggctaa

SEQ ID NO: 33761 - DNA, 120 bp, synthetic construct
  source 1..120: mol_type = other DNA
gacaaaagctctgcttgctttgaggtgaatgtacataggcacttaccctttttcgatgtttgctttttagggttcattttcttggatatcactacattcctttcagtgaagcaagccagt

SEQ ID NO: 33762 - DNA, 120 bp, synthetic construct
  source 1..120: mol_type = other DNA
gttctgaagaaaacaaagttgtttgaatggaaagacttaaggaaattatctcatatccctccagctctgtctcgttctggctcctctctccctctttacctccctttcataagctagaca

SEQ ID NO: 33763 - DNA, 120 bp, synthetic construct
  source 1..120: mol_type = other DNA
cattgattattgtcattatctttaaggtatatttgtatacaaaacatatcaaacctattgtaaaaaaagattttacccccgtccgggaggtgaggggtgcctctgcccggctgcccctac

SEQ ID NO: 33764 - DNA, 120 bp, synthetic construct
  source 1..120: mol_type = other DNA
ttgacaaaacaaattgtttgacttgaaaattgattaagggcttctattagaaatagttaatgagttcattactgataaatatacatgcctgtcatatggaagttttactttgggacttgt

SEQ ID NO: 33765 - DNA, 120 bp, synthetic construct
  source 1..120: mol_type = other DNA
acccaggccatttagcagcaagctgaagaaagcaggtaagtttaagcagagagaaaatgtgttcttaagaaacaactcagcatcttcaacacaaaagccactgcaagtgaaacagcctat

SEQ ID NO: 33766 - DNA, 120 bp, synthetic construct
  source 1..120: mol_type = other DNA
tgtagccaaatgaaaattgtttttgaagaatttcaaagacacagagaaatcttcatgatatagaattcaagaaagcagctctccctctccctctccctctccctctctctctccctctcc

SEQ ID NO: 33767 - DNA, 120 bp, synthetic construct
  source 1..120: mol_type = other DNA
caaaacaaaacaaaatgctatataagctactgatttttgtagctctatttaattatgttaaagatttgggtcttaagccacatactgtgtggctgtccacgtggaaattactgtagctat

SEQ ID NO: 33768 - DNA, 120 bp, synthetic construct
  source 1..120: mol_type = other DNA
caggagataactcacaagacagctctacactgaaagattccattcaaagcagtgctgcccacagtctgatctaatacgactgacctggggaaaagcttatattagaagtttttgttgaga

SEQ ID NO: 33769 - DNA, 120 bp, synthetic construct
  source 1..120: mol_type = other DNA
cccacttcaagttcacatgcaagggaatgggaagcaaagtaacatttgtttatttatgtgcccttcactgttctaggtgcttcccatgcattatcatcagttaatcttcatggcattgtg

SEQ ID NO: 33770 - DNA, 120 bp, synthetic construct
  source 1..120: mol_type = other DNA
tacaaatatcataaatgtacagcttgatgaattttcagtgaactcaaccagcatccagatcaagaaacagaacatgaccagcacctccgtagctcccatcatgtcccctcccattcacta

SEQ ID NO: 33771 - DNA, 120 bp, synthetic construct
  source 1..120: mol_type = other DNA
tttggttgcttgtgctttaggtgtaataatgaagaaaccactacttaatccaaggtcacaaagatttatgcctatgttttcttttaaaattgcatggtgttaactcatacatttagatct

SEQ ID NO: 33772 - DNA, 120 bp, synthetic construct
  source 1..120: mol_type = other DNA
cctcattacattgcagagtgcatgtctgtaaattcgcctacttggtaaaattcacttataacccccaaatcaacagtcatggcactttcagtcgtttacaggcacgcatgtaatggtgaa

SEQ ID NO: 33773 - DNA, 120 bp, synthetic construct
  source 1..120: mol_type = other DNA
taaaatgtgatttcaaattgcactagctctatagcaggagctcttccacataatactaggagaataaatccagagcctgccccaggaatgttttgtttggccaattcattatgggatttt

SEQ ID NO: 33774 - DNA, 120 bp, synthetic construct
  source 1..120: mol_type = other DNA
aacatacttgtccccatctgtgttattggccccaattactttgccatgctgtgtcatttatatatgtcagcaccacacaggaactgttattgtctattcagcatgacattacacccccct

SEQ ID NO: 33775 - DNA, 120 bp, synthetic construct
  source 1..120: mol_type = other DNA
aaagaaagctattggaagttcaatttgatttacagtagctgccatggtcactgtcttcttcaagccagatgtgaacaagatccgcaaaatgtaaattaatgtcactcactcattttgttt

SEQ ID NO: 33776 - DNA, 120 bp, synthetic construct
  source 1..120: mol_type = other DNA
aggggctggggggtgagaactgagggaatgaggagtacaaaattttagctagacaggaagggtacaaaattttagctagacaggaagaataagttttgaaatccattgcacagtaactgt

SEQ ID NO: 33777 - DNA, 120 bp, synthetic construct
  source 1..120: mol_type = other DNA
gtaagacatcaggatcaaatacaaggatgccagacaagctcctcatgctaacagccaatgagaaaagtccatgctggctcacgtgcaccgcctattgttacattcaacttacaagtggat

SEQ ID NO: 33778 - DNA, 120 bp, synthetic construct
  source 1..120: mol_type = other DNA
gactcaattagaatgggccttgcatacagaatttgaaacagataaacaaatgcaatgagaaaaggcaaaggtatggctctcttggcaaacaccattaaggcaagtgacctgtgggaagga

SEQ ID NO: 33779 - DNA, 120 bp, synthetic construct
  source 1..120: mol_type = other DNA
aagaaaggttatctgcactctcttggataacgatcagcagctctcacaggcgaatctgatagaccatgccaaaaagattctaaagaggatcaatgaaacagaagcagaagtggtgaattc

SEQ ID NO: 33780 - DNA, 120 bp, synthetic construct
  source 1..120: mol_type = other DNA
tctacggtgacagaaatcagaacagtaattgcctctgggtagggaatttgaccagaaatggggagaaaggaactttctgaggtggtaaaaatattctacatctcgatttttgtgttggtt

SEQ ID NO: 33781 - DNA, 120 bp, synthetic construct
  source 1..120: mol_type = other DNA
catttctgctcacaataagaaacagtaaccctacgcatctcccccttagctattgaaaaagcaccaaaataacagatgctttaatgtcctcttgcatgaccaccttcttgccctgttttc

SEQ ID NO: 33782 - DNA, 120 bp, synthetic construct
  source 1..120: mol_type = other DNA
agaatgttcatcttcctctatcctcttcctttcgattaaggcaagggtgagtctcaatttggtagtactgactatacctcccaaatacttgcctataaaaaagaaagcaggcctcaggct

SEQ ID NO: 33783 - DNA, 120 bp, synthetic construct
  source 1..120: mol_type = other DNA
ccctcaggacctgtgtcacatccacagtgttcaggagcctggagcagaacaagggagaaggcactgggattaactggcaggcataacaaaagggctggtagtagactgaagataattaga

SEQ ID NO: 33784 - DNA, 120 bp, synthetic construct
  source 1..120: mol_type = other DNA
taatatgtgcttgcaaccgcatatagttcttggttgcatctttgtgagcctgaacataccagtggggtgtgtaatgtaaagcctgacattatataacttcgcaccctctgtttgaattgg

SEQ ID NO: 33785 - DNA, 120 bp, synthetic construct
  source 1..120: mol_type = other DNA
gtgtatacatatatacatgtatatacatacgtatgtatatgcgtatacacatatatgtatatatatgcatatgcgtatgtatacgtatgtacatatctatatgtgtattccttttccagg

SEQ ID NO: 33786 - DNA, 120 bp, synthetic construct
  source 1..120: mol_type = other DNA
tgctgggattacaggcgtgagccattgctccctgccttccctccatatttctagataatgtgcttataatgctgtttctgtgtccttctcttccctcacagtttatgttgattttttttt

SEQ ID NO: 33787 - DNA, 120 bp, synthetic construct
  source 1..120: mol_type = other DNA
atattctaaatttgttgttatcatttccacagtgttcacagcacctttatcaggagtagattctatttcaagaaactccttttggccaggcacggtggctcacgcctgtgattccagcat

SEQ ID NO: 33788 - DNA, 120 bp, synthetic construct
  source 1..120: mol_type = other DNA
cctcagtcagatcatcttgaccaggaacgtggctcacaagccctaccaaaacttagccgttttcagttctgtatcttattttagagaccacatttttaaagtaagtaccatggcatccta

SEQ ID NO: 33789 - DNA, 120 bp, synthetic construct
  source 1..120: mol_type = other DNA
atcagcgagacacctcattaaatggcagaagtggaaggacaagttgaagaatgctcaccaattttctagctcaggtcactaggtttgtattgctgcttgttgacagtaatggataacatg

SEQ ID NO: 33790 - DNA, 120 bp, synthetic construct
  source 1..120: mol_type = other DNA
gtactgataaagcggagaattccaaaagctacctccttgtcaaactccaatgtcatccttctctgccatgccacccacttcagcacgatgggaaatcagaagaaacatttttaatgaaga

SEQ ID NO: 33791 - DNA, 120 bp, synthetic construct
  source 1..120: mol_type = other DNA
tatttcacaatatcaaaccaggtgacattactccagataaaattgactctggattggtaaacaaactgcatctggactggaggactgagtaaactatgactggctggtaggaagccatgg

SEQ ID NO: 33792 - DNA, 120 bp, synthetic construct
  source 1..120: mol_type = other DNA
gagctacaacaaacagttctaaacatagctaatcaatcatgacaaaccgttctaaccttcactcatcaatcatgaaacaaagaacaggaagccagaggtttgtggcctgggcagctgact

SEQ ID NO: 33793 - DNA, 120 bp, synthetic construct
  source 1..120: mol_type = other DNA
aaaccagacaggattagaaggttgggaatttcatctccatcctcaaaactcctgggaggggagaggagatgaaggttgagttgatcaccaagggccaatgatgatcatgcctctgtgatg

SEQ ID NO: 33794 - DNA, 120 bp, synthetic construct
  source 1..120: mol_type = other DNA
cctccaaattacccttaatcattcctcggcctggcccaagaaaactttgagagacatttgttttatagtttaaaagataatagaccacaggtgtccaatcttttggctttcctgggccat

SEQ ID NO: 33795 - DNA, 120 bp, synthetic construct
  source 1..120: mol_type = other DNA
aatatgacacgtgcaaaacaagcatactacacaggctttaaagatggtttctgaactttgttttcagttcctgggtgtttaaagggaggttccaacaaagcaactgcagtgtaatctcat

SEQ ID NO: 33796 - DNA, 120 bp, synthetic construct
  source 1..120: mol_type = other DNA
ttcttccttcttacagggtctgcatggtgctaaactttctgaatttttacatgtctgaaagctaccctccttcattctcttatttttgattgacagtttgggtgtagaattctaggttca

SEQ ID NO: 33797 - DNA, 120 bp, synthetic construct
  source 1..120: mol_type = other DNA
catattgattacatgttggaatgatgtggtttaaattacatagtaatgcccaccaaagaggatatgatgcaggactcaccacatctgtggaagggatgcctgctctttccacactgtttt

SEQ ID NO: 33798 - DNA, 120 bp, synthetic construct
  source 1..120: mol_type = other DNA
gctactttggctgagggagtagggtaagctcatgatagttatgtggttttaaagacttttgttttaaaatgtcatcctcctcctttctacttacattctgcagtctcttcattacacgga

SEQ ID NO: 33799 - DNA, 120 bp, synthetic construct
  source 1..120: mol_type = other DNA
gccaccagcaccggcctgagcccatttttaatagccaaaaaacatttcaaatgctgctgcagatgcaggcagtttgtatttgggaccagtttgggctgaggtttttttgtttgttttttt

SEQ ID NO: 33800 - DNA, 120 bp, synthetic construct
  source 1..120: mol_type = other DNA
ttggatgctggggcactctagttcctgtctttccttaataccttcagataaccatggaaagttaaagacccagttatctgccttgggtcaggccaagaccttaattttcaaacaaaacaa

SEQ ID NO: 33801 - DNA, 120 bp, synthetic construct
  source 1..120: mol_type = other DNA
gcctgggcaacatagcgagatctcgtccctataaaaaaaaaaaaaagaatgcagacggcaacgagcaagtgccatatcggtgtttagtattatcgttgtactatactgcttctaacgtgt

SEQ ID NO: 33802 - DNA, 120 bp, synthetic construct
  source 1..120: mol_type = other DNA
tccagttcaaggtaggtttctgtcataggtcagcaaaaggcttcctcttgtcatgtttattttttcatttttattcccaattcccacctctgtgggcagctgctctgtcgtgtttgatat

SEQ ID NO: 33803 - DNA, 120 bp, synthetic construct
  source 1..120: mol_type = other DNA
agtaaagactaaagaaaccaataagtaggtggtgtcatttctgaggaggtaatgagtgctggggggataactggcaaggtgagggagttcgggatggttgagattttaaatagggttatt

SEQ ID NO: 33804 - DNA, 120 bp, synthetic construct
  source 1..120: mol_type = other DNA
cagaaaaaaaaaaaaacagaaaaaaaaaaaaaaaaaacccaggacattctgttcgtgcttcttatgtacctgacggctcagtgcagtgtgtactgacttccccattggtccccagcacag

SEQ ID NO: 33805 - DNA, 120 bp, synthetic construct
  source 1..120: mol_type = other DNA
aaaagattacccgtccaatcaagagacacacaactccacaggcacactccacagaaccgggcacatactcaacacacaggcacacataaaacacccctaggcaaatgcacagcaaataag

SEQ ID NO: 33806 - DNA, 120 bp, synthetic construct
  source 1..120: mol_type = other DNA
acttctccctcggaggcaccaggttactcagccccgtctcattcactctcactgtcccactttcataatcagctcctacagatttttttggtttacttcccttcctccctgtttttgtcg

SEQ ID NO: 33807 - DNA, 120 bp, synthetic construct
  source 1..120: mol_type = other DNA
gttgaatgaggataaatgagttaattcaggtaaagtgctcagagcagtgcctggcacacagcaagtgctcaataaatgctggtgaatgttacttgttggcatgagctactttcttttacc

SEQ ID NO: 33808 - DNA, 120 bp, synthetic construct
  source 1..120: mol_type = other DNA
gctcatgagaatgtaaattgacacaatctctggggaccttttagccttattcatccgtacatatgtagaccatatgaggaaacagttctaggaaaacacccaccagaaatccttggctga

SEQ ID NO: 33809 - DNA, 120 bp, synthetic construct
  source 1..120: mol_type = other DNA
gccaataatttgactgttggacttaaaagtccagatcatgtgtattctgaggatataatacggagttcatcaggaaaaacaggacatggcgtgggcacaggacatggtctgtgtaattgt

SEQ ID NO: 33810 - DNA, 120 bp, synthetic construct
  source 1..120: mol_type = other DNA
gcaactcaggtgcacttcagccctgctttaattttgctctacccatgcaaagttgaggggtcagccagagacttaggcagattttatacacagaattaggaatttgctttttttgattct

SEQ ID NO: 33811 - DNA, 120 bp, synthetic construct
  source 1..120: mol_type = other DNA
catccaaatatcccataagtcaaaaaagatatcacaatgaaaatgtattgagtgaagtgatagtgaaaatcgacacatcagaacttgtggggccgggcgcagtggctcacacctgtaatc

SEQ ID NO: 33812 - DNA, 120 bp, synthetic construct
  source 1..120: mol_type = other DNA
cagtagccactttctgtataaataacatttataaaaaacaaaatgaagttgcaaatgaaattatgtcaaatttacagtttctttttttaaacaaagggtcaatgtcatcaacattatctg

SEQ ID NO: 33813 - DNA, 120 bp, synthetic construct
  source 1..120: mol_type = other DNA
aaaaattggccatataagtttgcacctcaggacatacaaaagtgaaaactaccaaagccaaaatttgcttctttgaaagattaacacaattgataaatttagcaagctcaatcaaggagg

SEQ ID NO: 33814 - DNA, 120 bp, synthetic construct
  source 1..120: mol_type = other DNA
ccataagaaggatccgatctgtaaagaccagtctgaagcaatctagcattatatagtaacgttaaaaatacacatatattgggctgggtacggtggcgtgcgcctgtaatctcagcactt

SEQ ID NO: 33815 - DNA, 120 bp, synthetic construct
  source 1..120: mol_type = other DNA
ctgcatgatatgacattcccacccaaagacaatgagagaagcccccacgtggctggcgagtcatcattacaattgctcttatgatacattttatcaagaccacaaaagccttgccaattg

SEQ ID NO: 33816 - DNA, 120 bp, synthetic construct
  source 1..120: mol_type = other DNA
gcaaatgtgaatgagctgaagagtgcacatgaatggaggtgatgttgggcagagtgagagggaatgaaagtgaagagcagaggatgggtgaacgtgggtattgtgaggcagagagtggat

SEQ ID NO: 33817 - DNA, 120 bp, synthetic construct
  source 1..120: mol_type = other DNA
ccaaggatgagtgctatggtttgaatgtgtgccttccaaaattcagatgtcagaaacttaatccccaatgcaacagtgttgggaggtggggcctttaatccccaatgcaacagtgttggg

SEQ ID NO: 33818 - DNA, 120 bp, synthetic construct
  source 1..120: mol_type = other DNA
ttaagccataatctcctgcaacaagagaaaaatgatgggaaaaggagaaaagttgcctgagctattaaagacaccatcctctacccctacccagactatcctgagaggttgtttaggaca

SEQ ID NO: 33819 - DNA, 120 bp, synthetic construct
  source 1..120: mol_type = other DNA
tcatttattcaatgcctggaggtaccctcattccgtcacttcctccatgtattcaaagctctaattaagaaataccagatcactcagagtggggaaggaagggaggatagtgttgtgaat

SEQ ID NO: 33820 - DNA, 120 bp, synthetic construct
  source 1..120: mol_type = other DNA
acacacgtggtaataatttcttcttacagagtgcctgagtgtcactttgtgtcttgagcagagaatttaggaatttcaatttgccattctttgcaatggccagcacctttggaagcagcc

SEQ ID NO: 33821 - DNA, 120 bp, synthetic construct
  source 1..120: mol_type = other DNA
aattaaattgggtttcctttaatacctgcatctagatttatggtgaggtttggcttccaactgacagccctcataccttcaaggccacaaaaggtgcctctttagctggtcatcagcttg

SEQ ID NO: 33822 - DNA, 120 bp, synthetic construct
  source 1..120: mol_type = other DNA
ctggttcatttgcacaatcagctttcacattccctcttttgatgaagatctttcatcaaagtgtttcgcactttgaacttggagggcagcaacagggttgcaggtgtaaaataacgggaa

SEQ ID NO: 33823 - DNA, 120 bp, synthetic construct
  source 1..120: mol_type = other DNA
aagaaagtaaaaaaggaactcacatctgttgctccctgacacatcagcacctcctgggtatacaatttatccactctctcaatgcattaggaggtagaaaatagaaagggctggtccttt

SEQ ID NO: 33824 - DNA, 120 bp, synthetic construct
  source 1..120: mol_type = other DNA
gaggcaaagggcaatggaatggaggtgaatgaacaccagagtggagtggatgtgggccaaagtgagggaatgactatgcatgcattcaattatgaatgaatttgagattatgatgagatt

SEQ ID NO: 33825 - DNA, 120 bp, synthetic construct
  source 1..120: mol_type = other DNA
ggctgggccacgtgcgagtaagccagagtcatttgatgcaggggcgggaaatagaggcaaagataggaaatgagtctgagtgagagtgagtggggtgaagaaggaatatgacatgaaaga

SEQ ID NO: 33826 - DNA, 120 bp, synthetic construct
  source 1..120: mol_type = other DNA
actgactatgctgagtagtttaactaactctaacaccaccaccattattgccttcacaaccatcacctccatctctgccatcaacaccatcactacaatcaatatcatcaccactgttac

SEQ ID NO: 33827 - DNA, 120 bp, synthetic construct
  source 1..120: mol_type = other DNA
aggaccagacagtatggaggttggggttattcataactagccaacatgacaatctagatcatccaggatcagtcaacatgagttaaggttgtacagaaccagctaacatggtgattaaga

SEQ ID NO: 33828 - DNA, 120 bp, synthetic construct
  source 1..120: mol_type = other DNA
atatttgtaaaacgcataaagtgcttggtacataagacagttgtaggtttggagatagaggagtgggatgggagagatgaaaattggcttcccttaaaaagaatcactctcggtggggtg

SEQ ID NO: 33829 - DNA, 120 bp, synthetic construct
  source 1..120: mol_type = other DNA
ccttgcaccccaaccagcctaggtaatcaaatctcacatctccctgtgggtccataaagagtgccaacactttgggtactgatttcttgttttttcttattttctttccttctttccttt

SEQ ID NO: 33830 - DNA, 120 bp, synthetic construct
  source 1..120: mol_type = other DNA
ccacactctagcctgtgaatacagctttgtcagaagtaggtctctggtgggactgacttttctttcaagcctatataccagtcagaaagaaattccaagtacatttctttcctacaccct

SEQ ID NO: 33831 - DNA, 120 bp, synthetic construct
  source 1..120: mol_type = other DNA
ctgtaacggaaaatgatacaagacttgggcacgtctgtgtgggctttgggacctcaaaaagttaggaaggcacatattcatgaggctaaatttcacataggagatgaaaatagaaacacc

SEQ ID NO: 33832 - DNA, 120 bp, synthetic construct
  source 1..120: mol_type = other DNA
gtcatggggtaatgttgagatgcgactgaactcaatattattccccatactattctgtgtgtttgaaacatttcttttttaaaagacatgttgttcttgctaaacactgtttttttttat

SEQ ID NO: 33833 - DNA, 120 bp, synthetic construct
  source 1..120: mol_type = other DNA
cctgtctgtatttcatcaacaataaacagaaccaagctgggagcacgagatgggacgagggtaagttaaaataccacaaagcttactgttcttacggagactcagctggttcttttcttt

SEQ ID NO: 33834 - DNA, 120 bp, synthetic construct
  source 1..120: mol_type = other DNA
aagaataaaagaggttggagggccttggactgtttttttagttccaacagatgtagaagccactgaagaatgaactccacgactaagtacagcaaacctccgcaaatgtgctagtttgga

SEQ ID NO: 33835 - DNA, 120 bp, synthetic construct
  source 1..120: mol_type = other DNA
aaagactcaggctgtttctctcgcaggtgagactgctcccagtgccatgaacggagacgacgcctttgcaaggagacccagggatgatgctcaaatatcagagaagttacgaaaggtgag

SEQ ID NO: 33836 - DNA, 120 bp, synthetic construct
  source 1..120: mol_type = other DNA
ctgtggggtaatgttgagacccgactgtactcagttttgttccccatacttttctgtgtttttgaaatatttcttttttaaatgacatgttgttcttcctaagcactgttaatgaatcaa

SEQ ID NO: 33837 - DNA, 120 bp, synthetic construct
  source 1..120: mol_type = other DNA
caggtttctcctaatttaggcctgtgtaactctcccagtcttgttgagagcattgaataagctaatgcacgtgaagaccctttgtaagctctaaagcactgtagaaatgtcactgatact

SEQ ID NO: 33838 - DNA, 120 bp, synthetic construct
  source 1..120: mol_type = other DNA
actactgaggggaggtctgagtgtttaatttccgattttttcctctgcatttacacacacaccacacacgcacacacacacaccaagtaccagtataagcatctcccatctgcttttctc

SEQ ID NO: 33839 - DNA, 120 bp, synthetic construct
  source 1..120: mol_type = other DNA
ggatcccatataagcttgtagacagctgctgggagagtaaatgtaaaaacatagagaggcgataaaacactgctgggaaagatggtgtggggagatgaatacagggacaggagaggtaaa

SEQ ID NO: 33840 - DNA, 120 bp, synthetic construct
  source 1..120: mol_type = other DNA
tgtaatcactcaagatgtgcaacaactaaaaatcactgtacacttcaaatgggtgaatcttatggtatgtcaattaagctgttaactgtgtgatgaaccatcgatgatttagtccagtgg

SEQ ID NO: 33841 - DNA, 120 bp, synthetic construct
  source 1..120: mol_type = other DNA
ggtatcgaccttctgggctcaagcaatcctcccacctcagcctgggaactacaggggtgagccaccccgcccatgctatttttggttgttcttcttattagtagaaatggggtttcacta

SEQ ID NO: 33842 - DNA, 120 bp, synthetic construct
  source 1..120: mol_type = other DNA
gctggagacaggtggtcctgtaaaagctctgctctaaatgtgggcacattccactcccatgtgtcttcaaaaccttttcgtggaatatatgttttttgcagttgatacatactagaacaa

SEQ ID NO: 33843 - DNA, 120 bp, synthetic construct
  source 1..120: mol_type = other DNA
gttgctgtgaatacttcaggtatataaaaaaacattggttgacaataagccagtgttctgccattcttacctgcttatcaagacaaaacctgctcaagtccctgcccagctgcattccaa

SEQ ID NO: 33844 - DNA, 120 bp, synthetic construct
  source 1..120: mol_type = other DNA
aaaaagcccagggacaaagtccccttcccaggcacatgtattatgcactctgcaccaaggaaacctccagataaggtctagagaccaagggccatgtacttcgggggagaggccagagga

SEQ ID NO: 33845 - DNA, 120 bp, synthetic construct
  source 1..120: mol_type = other DNA
acatacaaaatgagagggagaaaatggaagaggttggagaaagagaacgacatgggtacacatgggtctcaagtggcagacacacttggacacagggttcagagaaaggaagacagctag

SEQ ID NO: 33846 - DNA, 120 bp, synthetic construct
  source 1..120: mol_type = other DNA
tcaaagcacgatttaatcaaggcctgattcccaagtctgtcctctcaatttcacctgcattgacaagtattaattgaaccccaactgtatatgttgcactgtgctaggtactgtggagat

SEQ ID NO: 33847 - DNA, 120 bp, synthetic construct
  source 1..120: mol_type = other DNA
caagatttgggggctcggcatgcttgctgctactagattggtcattgtttctaggccctttcaaaagatggagctaggaaataattgttttttaaagagaagatgatacatcatgggttc

SEQ ID NO: 33848 - DNA, 120 bp, synthetic construct
  source 1..120: mol_type = other DNA
gctacgtagagccccctgaaatgattgggcctatgctggtgagtgcttaaacgttaattcgttgttttctattagcagaaattaatttttgtgacagtattgttgcattagtatggaaat

SEQ ID NO: 33849 - DNA, 120 bp, synthetic construct
  source 1..120: mol_type = other DNA
gtattttgttccaaggtttgtgtcttcctaccatctatgttgctgtaaaaacggaaatgattttgctgaaaatgcttaaaactcaaaggctttactgtaaggtagcttagtactgaccca

SEQ ID NO: 33850 - DNA, 120 bp, synthetic construct
  source 1..120: mol_type = other DNA
cgaactcctgacctcaggtgatccacttaacttaacctttgaaattgccaggattacatgcgagagccaccatacgcgaccaaggcattatatttttaataacacaggtaacaatactgc

SEQ ID NO: 33851 - DNA, 120 bp, synthetic construct
  source 1..120: mol_type = other DNA
caagtgatgcacccacgtcatctcccacagtgctgggattactggcgtgggccaccgtggcgggcccgtcgttgccattgtaaagagttttatttccttttctgattttatggcattgcg

SEQ ID NO: 33852 - DNA, 120 bp, synthetic construct
  source 1..120: mol_type = other DNA
gctccaaaaaccgagtcgctgaatgttggcccccgtttcctttgattgatatttttatatggtacgtttgataaaagctggataaatgaggatactgccatacaggtagctggtttagtg

SEQ ID NO: 33853 - DNA, 120 bp, synthetic construct
  source 1..120: mol_type = other DNA
ggttcagttgaagatggggtgagttttgaggggagcactacttgagtcccagaggcataggaaacagcagagggaggtgggattcccttatcctcaatgaggatgggcatggagggtttg

SEQ ID NO: 33854 - DNA, 120 bp, synthetic construct
  source 1..120: mol_type = other DNA
ttgtaattgtaactgaaatcctacccacgtggtagacttcagatttctcagctgacgcacactgctgttggtactctagggctgaatataagcattatacatgtcctgtggtttatcctt

SEQ ID NO: 33855 - DNA, 120 bp, synthetic construct
  source 1..120: mol_type = other DNA
gatttttctcagcggcctttaggaggtgattaaatccttttatggttagaaaagcaaaaacggaattatcctgagattaacgtgagatggaaataatttctccgagataaaatgttttga

SEQ ID NO: 33856 - DNA, 120 bp, synthetic construct
  source 1..120: mol_type = other DNA
gggcagtcttcggaaaggaggagggtaatatttggaacaccttgttttcctgttttctgctaacggactcctgaaataatgttcctgggattcttatcaacacatttattattacgttag

SEQ ID NO: 33857 - DNA, 120 bp, synthetic construct
  source 1..120: mol_type = other DNA
acgtggtagacttcagatttctcagctgacgcacactgctgttggtactctagggctgaatataagcattatacatgtcctgtggtttatccttagattgtcatttaggagaaaggtcta

SEQ ID NO: 33858 - DNA, 120 bp, synthetic construct
  source 1..120: mol_type = other DNA
ggaaagaaaacaatggaaagaatgcctgaaattgagtggaaaagcgaggaggctatgtagtttgcagcttagcttaggcaaatccctcactatgataaaagttctcgactttatgaatga

SEQ ID NO: 33859 - DNA, 120 bp, synthetic construct
  source 1..120: mol_type = other DNA
tcatctggattcaccaattgttagtagctttcgcttcataggtttcacatctcttccctccgtctcttaccgtgctgcccacacactcacacacacacacacacacacatacggatatat

SEQ ID NO: 33860 - DNA, 120 bp, synthetic construct
  source 1..120: mol_type = other DNA
ggtatgttgaattaaaagttttgagtataaatcctcaaaccagtagctcataattttcaaatgcttttgcaaaggtctgcttttaatcaatacataacacatttgtaacacccatcactt

SEQ ID NO: 33861 - DNA, 120 bp, synthetic construct
  source 1..120: mol_type = other DNA
aacaggaaaacagggttttccaaatattaccctcttcctttccgaagactgccctcagacaactttgttgctgcctttgcacttctttattattctacttctgattgtccttatcatatt

SEQ ID NO: 33862 - DNA, 120 bp, synthetic construct
  source 1..120: mol_type = other DNA
ccagttgtggatgttcagagacaagagtcactatcctgtgttaagtgaccctgcttctctaatatttggggttttagccaggagataggtggtagaacacaagacaggttttactttaag

SEQ ID NO: 33863 - DNA, 120 bp, synthetic construct
  source 1..120: mol_type = other DNA
tggtatctcttacatttatcacttcctttaaattccaaagttagcatcttatatacaggtacttagaatgttctacatgaatcttattcagcaatctcttaactcatcaccccaattcca

SEQ ID NO: 33864 - DNA, 120 bp, synthetic construct
  source 1..120: mol_type = other DNA
gacataacctccaggtccaggttcaactgcaaaccaaactccaggcagctcctcatattctggttcccacaaccagaaaaaatatctcaaaagttgcattatttatgattccagtctttc

SEQ ID NO: 33865 - DNA, 120 bp, synthetic construct
  source 1..120: mol_type = other DNA
ttagtgtcttgcccaggattatgtggctattaagttgtgatgttaggatttgaatggactctatttccacaatctgtgggatctatactaagctgcaaataggttcttactgagtggccc

SEQ ID NO: 33866 - DNA, 120 bp, synthetic construct
  source 1..120: mol_type = other DNA
tagagatgtcccctctcattcctgatagtgataacttgtgttgtctctcttttcagtctgttctgtctggttaggggttgataaattttatggatcttctcaaagaactagctaagcatt

SEQ ID NO: 33867 - DNA, 120 bp, synthetic construct
  source 1..120: mol_type = other DNA
aagggttccctttgcttctatcttctgaaagagattatagaaaactggtacaattttgtctttaaatgtttggtagaatacactagtgaatccatctgggtctagggctttctgtcttgg

SEQ ID NO: 33868 - DNA, 120 bp, synthetic construct
  source 1..120: mol_type = other DNA
tcttcgttttcgtagtttcaccttctgtgtctttctttgatttctgtctcttccagtttctctcttacttactctttccatctatttatctctctctcatttgcactctgtttctctctc

SEQ ID NO: 33869 - DNA, 120 bp, synthetic construct
  source 1..120: mol_type = other DNA
cctcttcctctttctcatcaactgtgggtgttgcccaagtacaatttgtccatgctgagttctttctttacttcagacattctcacagtatagtctgtgagttattgagacccttttagg

SEQ ID NO: 33870 - DNA, 120 bp, synthetic construct
  source 1..120: mol_type = other DNA
gatagagtttcttctttgttgtccttcctgcgtgttagacaccttcaagttttaacctgctgtgaacaggaaccaaagcagtggatcactaaatgaaatgagtgcagggatgagattcaa

SEQ ID NO: 33871 - DNA, 120 bp, synthetic construct
  source 1..120: mol_type = other DNA
ttactaacgaacaacttggaaggaggctttagaggttaggcacattaccctctttgaatgagatagacatacttttctaaaagtttaatggaataagacagtcacggggggaggagccaa

SEQ ID NO: 33872 - DNA, 120 bp, synthetic construct
  source 1..120: mol_type = other DNA
gagaaattccagagcaaaaaaaaaaaaaagacagtcacagttgggccacaaatggcttttgctttttacagcaatgtagctcatggccacttaatacagtcagttgccacttcattttca

SEQ ID NO: 33873 - DNA, 120 bp, synthetic construct
  source 1..120: mol_type = other DNA
aagaaaaaaaaaaatctttcagctctgctcccgggtaccctgtcccatactctgatgcctttgtttactctctcctagattaggagaacttaggtagaaaagtttgagaagtcctacaac

SEQ ID NO: 33874 - DNA, 120 bp, synthetic construct
  source 1..120: mol_type = other DNA
aagttgccttctgagctggaactagcagcatcctatggaattaaagggtgagattcttaaacagttacttttggatatttctccaagctgcccccctaggctatgacttcaaatcatgaa

SEQ ID NO: 33875 - DNA, 120 bp, synthetic construct
  source 1..120: mol_type = other DNA
tgccatactggttgtgagatgtttggattatcactcctgggaacaccaaagggtaagctaaaaagactgggtaactctagaaaataacacgcacagtccacaggatattgtgctaattac

SEQ ID NO: 33876 - DNA, 120 bp, synthetic construct
  source 1..120: mol_type = other DNA
cttctgataaacctgtctcaccacaggccaagggaacaccaaaggaggtattcatctccctttcttcttaaattagataaattgttctttgatatcctggaggtggctgctagcaaagtt

SEQ ID NO: 33877 - DNA, 120 bp, synthetic construct
  source 1..120: mol_type = other DNA
tagagaacagaacacctagccccagagaattattctcaggcctggagaacctgatggaatttgccctgctgggttgccaatttttttttaaacccacaaccattttattccttccatttt

SEQ ID NO: 33878 - DNA, 120 bp, synthetic construct
  source 1..120: mol_type = other DNA
gcatctctctttaggtctggaggatttccattaaaaaataggttttgtggagaggacctacaagggcaacttgttttaatgaagctggggagccctccctagtaggatttttctttcttt

SEQ ID NO: 33879 - DNA, 120 bp, synthetic construct
  source 1..120: mol_type = other DNA
ggcctcctaaatgtacagaaatttgcaactctgctttgagaccaagtaaggattctttccttggagtggagggcaaggagcttcattaaggaaaaggaactactctggtttctttctttt

SEQ ID NO: 33880 - DNA, 120 bp, synthetic construct
  source 1..120: mol_type = other DNA
acaccacataggaggggcgtcagaatgaagctgtattggagtaagaaaacgatacccaatggtaactcaagtacacagaaagaaatggtgagaataaaaaatggtaaatgagaaggttat

SEQ ID NO: 33881 - DNA, 120 bp, synthetic construct
  source 1..120: mol_type = other DNA
agatgtaggttacttgaacaacagtcttgacttataccaatcagacctgacagacatgtatagagcaccttagcctagaactgtagaatacattcctccaaagcacacatggaacatcac

SEQ ID NO: 33882 - DNA, 120 bp, synthetic construct
  source 1..120: mol_type = other DNA
agatgaagaatgagggtgaataacttgcacagggtcgcatggaaaataaatgacagaatttccatttaactctgtctgcctccagatccatgctacactgccttcctacctctttgatat

SEQ ID NO: 33883 - DNA, 120 bp, synthetic construct
  source 1..120: mol_type = other DNA
cataggcttccccgaaacattttacagtgtaaccaagaagcgattttgaaagcatctgaaaaacgtgcaaactgtcttgaaaacagggcctggcaactgagacagtttgcaagcgtgatt

SEQ ID NO: 33884 - DNA, 120 bp, synthetic construct
  source 1..120: mol_type = other DNA
cgctgccgctgccgccgccggggaacagccgaggtgctgggaagagaaagggccgaggcgaggggcggggaaagagaggcgcctccgtctgcccgcgagcccggggagcggagggagaga

SEQ ID NO: 33885 - DNA, 120 bp, synthetic construct
  source 1..120: mol_type = other DNA
gagggcatacagcacacagacgtttctcattcctatctcccatctcctttcccagagacagtttctaaaacaaaactgaggaaaatactaacatcattcgtctaataagagcaatgaggt

SEQ ID NO: 33886 - DNA, 120 bp, synthetic construct
  source 1..120: mol_type = other DNA
tataagtgagatcacttgctatttgtctctctgtgcctggcttatttcacttgacctcacatgctccaggttcattcatgttgccacaaatggcaggatttctttcctttttaaggagga

SEQ ID NO: 33887 - DNA, 120 bp, synthetic construct
  source 1..120: mol_type = other DNA
tcaagtctcaggaattgtggtggagtcacagaaactgtggtgccattcccagaaaaaccttgatcctggtcataatagaggaggggaaaggtattagggtaactcattgaggcacttact

SEQ ID NO: 33888 - DNA, 120 bp, synthetic construct
  source 1..120: mol_type = other DNA
aagtgttttccaaactgtgatatgcaggttgtttgtggccatagacacaagtatattggcacatgaagaaacaacgtgggggctcatgaaatagcagaacatccaatctacggtcatttc

SEQ ID NO: 33889 - DNA, 120 bp, synthetic construct
  source 1..120: mol_type = other DNA
tcctttttaaacacatttctaagtctttccttgacgcttgtcagaaaggaaattcaccttctagtctggagttcatcctaagatgtcatctgaagagccagcatacaaacaagcggcctt

SEQ ID NO: 33890 - DNA, 120 bp, synthetic construct
  source 1..120: mol_type = other DNA
tcagatggttccagtccccagccagtcaggtttctgcagctgaggtcccagactcatgtgaagcaagccatatccactgtgccctttctgaattcctgcctctgaaattccatgcatatg

SEQ ID NO: 33891 - DNA, 120 bp, synthetic construct
  source 1..120: mol_type = other DNA
tcatttacccagggcgaccgaagtggaactgagtttcatataaacatgggataatcagaccgtgtttctcactgactctgccagtatctaccttttcatacatgtttctagttcatttcc

SEQ ID NO: 33892 - DNA, 120 bp, synthetic construct
  source 1..120: mol_type = other DNA
gtagggatattggaactttgttattgtcctaacttcgctgaggatccattcagcttttaatcagtccacgatctctctctctcgctcaggcacagtcagtcctattttctgtttgtttgt

SEQ ID NO: 33893 - DNA, 120 bp, synthetic construct
  source 1..120: mol_type = other DNA
tttctgtcttgcatatgttctaggctggtctggcctatttactagctcctaggatcagccaattctccaaggatttctgtttccttttattagaaaatggtatcagagaccaacgtctgg

SEQ ID NO: 33894 - DNA, 120 bp, synthetic construct
  source 1..120: mol_type = other DNA
tgatggtttcactgccctaaagcattacctgtgctttacctactcatgtcctcctgtaaaagtcccctccacatagcttgcctccttctactcatccttttgaataaagtttctctttac

SEQ ID NO: 33895 - DNA, 120 bp, synthetic construct
  source 1..120: mol_type = other DNA
tccttaacaaggctcaatagtcttgccacactggtggtccagcattctcgctattaagtgtttgcccagtttgcttcaaaacgtacgtgttgtcaaacaaaatacaaatccaggattagt

SEQ ID NO: 33896 - DNA, 120 bp, synthetic construct
  source 1..120: mol_type = other DNA
gatattctagaaaatacctcactagtgaccctgaaaactctcaaggtcatggaaacaagcaaagtctgagaagttgtcccagccaagaggaacctaaggcagtatgatgattaaatgtag

SEQ ID NO: 33897 - DNA, 120 bp, synthetic construct
  source 1..120: mol_type = other DNA
taggacgtcttccattgattatggtgtgcgtgggctcccgcacctgtgagtttcaggtagacgttcatattttcactgcttagattcgagttatgctatttactggtttttaaatgatat

SEQ ID NO: 33898 - DNA, 120 bp, synthetic construct
  source 1..120: mol_type = other DNA
atcatatgcatggaatttcagaggcaggaattcagaaagggcacagtggatatggcttgcttcacatgagtctgggacctcagctgcagaaacctgactggctggggactggaaccatct

SEQ ID NO: 33899 - DNA, 120 bp, synthetic construct
  source 1..120: mol_type = other DNA
atccattccacaagcatttacagtgggtttggaatgtgtcaaacagaatgtgagaaggacttaaggctatggacaaaaagtggagttgggtaaagatgctcaagcgaggttcttagaatg

SEQ ID NO: 33900 - DNA, 120 bp, synthetic construct
  source 1..120: mol_type = other DNA
aattctccactgaagccatctagtcctgcggttttctctgttgggaggttgatgaatactggttaagtctccttatgagttgtcgagatctgctgagattttttatttcttcaggagtca

SEQ ID NO: 33901 - DNA, 120 bp, synthetic construct
  source 1..120: mol_type = other DNA
aaactgtctctgccctcactgtcttgtacctgaagcatgtgcagccctacctcagacccctccagacatcacccagcccttgaacacaccaggacctaggtaggcctggtgttgtcctca

SEQ ID NO: 33902 - DNA, 120 bp, synthetic construct
  source 1..120: mol_type = other DNA
agaggaattcatactcaggtgggttgctgttggggatcttcttgtattccaggtaccttggcatgagaggaaagtaaactttgctgctagccaagcagacctgttgctgaacggatgggt

SEQ ID NO: 33903 - DNA, 120 bp, synthetic construct
  source 1..120: mol_type = other DNA
taatcgcctcctctataaaacatgggtactaacacttccctgacagggttctgcagaggacagggcgaggcagggagccgaagctctgcaaatggcaaacgtgtgcccagagatggctcc

SEQ ID NO: 33904 - DNA, 120 bp, synthetic construct
  source 1..120: mol_type = other DNA
catcctgcacccaccttttccagggtgtacgttgctcgttcaatgatctcagggaaatgttcatcatattctctgatgacatccttcagcatgtctgcaggagggggaagagttggagaa

SEQ ID NO: 33905 - DNA, 120 bp, synthetic construct
  source 1..120: mol_type = other DNA
gcctcagacctaggtgaggctccaatcggagcgctgcagatctcaaacgcgaggactgggcactccaggaagggggcaagcggtcagctcggttcgagtaatctaggagtggttggggtg

SEQ ID NO: 33906 - DNA, 120 bp, synthetic construct
  source 1..120: mol_type = other DNA
atttaaaaatgtacatggaaccagaaaaggagcccggatagccaaggcaatcgtaagctaaaagaactatactgcaaggctacaatgaccaaaacagcatggtactggtactggcacaaa

SEQ ID NO: 33907 - DNA, 120 bp, synthetic construct
  source 1..120: mol_type = other DNA
atagtgtatcccagaccaggctggaggagtttgggtgaaagggcagggcaggacagagaagcattgtgcaaaagtggggggactgagaagagatgattgggtgggtcgagctgcactgca

SEQ ID NO: 33908 - DNA, 120 bp, synthetic construct
  source 1..120: mol_type = other DNA
cactgtccctgttgtctgagctctcccatctgctcccccttcatcccggtccccttctctggcccgtaaatccaaaccctttgtttctctcttccccaatgcattccctttgggactctt

SEQ ID NO: 33909 - DNA, 120 bp, synthetic construct
  source 1..120: mol_type = other DNA
cttccccaacccctctctctggccttgcagaatgagccctgggaactggaaaaccctgtgctggcccagaccctggtggaggcattgcagctggatccggaaacacttgccaatgagacg

SEQ ID NO: 33910 - DNA, 120 bp, synthetic construct
  source 1..120: mol_type = other DNA
gtgggtctcatcgcctctgccagcgtcagctcccacagcgaaggtcttccgtgtgctgtcttcttctgccctcgctcacgagtttggattccttgctgaggagcagttctaacccggaat

SEQ ID NO: 33911 - DNA, 120 bp, synthetic construct
  source 1..120: mol_type = other DNA
tctctcaggcaaatagctgctaaacaggatttctctttccacacctttagaaccaaggacactcccaggctgagtctcctcttggtgattctgggcgtcatcttcatgaatggcaaccgt

SEQ ID NO: 33912 - DNA, 120 bp, synthetic construct
  source 1..120: mol_type = other DNA
ggacttgccaacgcacaggcgcgcatgcacaccaacaaagggtcaggacttgaggaggatgcctggagcacgcttctcctggctgactgtttcttcctctccagtcgtttcctctggtgg

SEQ ID NO: 33913 - DNA, 120 bp, synthetic construct
  source 1..120: mol_type = other DNA
tatgcctgcccttttcctcctcagaatcagaaccgagacccccgggaatggaaggctcatttcttggaggctgtggatgatgctttcaagacaatggatgtggatatggccgaggaacat

SEQ ID NO: 33914 - DNA, 120 bp, synthetic construct
  source 1..120: mol_type = other DNA
actgacattctgggactctgacagaaatccagttccaaagttttactggaacacacacacacacacacacacaatggagtccccttccctttatgtctcctggtttgtggtctgggctgt

SEQ ID NO: 33915 - DNA, 120 bp, synthetic construct
  source 1..120: mol_type = other DNA
attgtggtaaatccttacagtgaaaaagaagaaagatctcaaatcaacagcctatctttgtgtttcgagaactagcaaaggaagaacaacgtaaacccgaagttagcagaaggaaggaag

SEQ ID NO: 33916 - DNA, 120 bp, synthetic construct
  source 1..120: mol_type = other DNA
aacctcaacgtcacaaaagtcctatataaaatactcattgtgaacactgtacacgatggcgaaagagtgaaagcttttcctctaagatcaggagcaagacagagatgcccgcttttgcta

SEQ ID NO: 33917 - DNA, 120 bp, synthetic construct
  source 1..120: mol_type = other DNA
tggcccacaatatggtctatcttggtgaacattctatgagcacttgagaagaatgtgcattctgctgttgatctatgaatatcaattaggccatgctgtctgatagtgttgttcaagcct

SEQ ID NO: 33918 - DNA, 120 bp, synthetic construct
  source 1..120: mol_type = other DNA
gatttatgttacttttcactcaagtttctaaaagtgccttcccatcaagagctgtttggctagggacagaaacgtttgttcagccctatttttctcttccttccttccttccttccttcc

SEQ ID NO: 33919 - DNA, 120 bp, synthetic construct
  source 1..120: mol_type = other DNA
tgatcatacatgtgcatgcgtctttataatagaaaggtttatgtacctttgggtatagtcccagcaatgggattgcagggccaaatggtatttctgttcttaagtccgtgaggaattgcc

SEQ ID NO: 33920 - DNA, 120 bp, synthetic construct
  source 1..120: mol_type = other DNA
ctttctatgaaagttccttgctgcctatgcgccttgctctctaacttctgtccctccacaactgtgaaaggagacgtcgtgacttccttctttcgtgctgactatgacttagccagtagg

SEQ ID NO: 33921 - DNA, 120 bp, synthetic construct
  source 1..120: mol_type = other DNA
catgaaggaaagattagtccagagggttatatttgggttttgtgtgggtggatgatcgtgtgtgcccagattttgtccataacttcctcctcatgcttattcagaacagattacacacat

SEQ ID NO: 33922 - DNA, 120 bp, synthetic construct
  source 1..120: mol_type = other DNA
gtcacctctaaccataccataggttacatattacaggtttctgccttgaggcattagatgatagggtttgaagttcaacaacagcactgtgctagttcctgagtagttgacacaagtatg

SEQ ID NO: 33923 - DNA, 120 bp, synthetic construct
  source 1..120: mol_type = other DNA
actcaatacagtagtgtgtcaattactcaagcggtccgtaagcagccctgtgttgtcctaaaagggccatgaggatcaccactaaagtcgttagtttgccttttcacatattcttaaatt

SEQ ID NO: 33924 - DNA, 120 bp, synthetic construct
  source 1..120: mol_type = other DNA
tcatgtagacctctgaagagactttgacaacagtcgtccaagtgtatgcattaaagatgtttttcaaacacaccctgctttctagtgctacaaggaaagcaagacagtccaaggtccgaa

SEQ ID NO: 33925 - DNA, 120 bp, synthetic construct
  source 1..120: mol_type = other DNA
taatctatctgatgtgcatccactcttttcactaagagcaaggatgcctgtggaatttatacgattcatccagactctcacaaattatggtagagctggtactagaatctgcttcagggc

SEQ ID NO: 33926 - DNA, 120 bp, synthetic construct
  source 1..120: mol_type = other DNA
ttcattatatccagggacagcatgaagctgcaaactatactctcccttttccagccaactttgagcaaatgtttggtatcttttcctaatgttctctttgctcctgttactgctcatggc

SEQ ID NO: 33927 - DNA, 120 bp, synthetic construct
  source 1..120: mol_type = other DNA
ataggcctatatgttgatcgtcctcatcaacacatacttcactctgcaagcagaatactgcgattgggaaaatgcacttgacaggacaactagatttgaccgctttcatggtcaaatgtt

SEQ ID NO: 33928 - DNA, 120 bp, synthetic construct
  source 1..120: mol_type = other DNA
tcactgaccacacaaccctccggaagcctgctggttcctcttcactctcactcacacttcaactcccagttggatctgcctgtggacctacccgccgtgtctcagtagcggagaaagaat

SEQ ID NO: 33929 - DNA, 120 bp, synthetic construct
  source 1..120: mol_type = other DNA
attaaatccacatattcttcagaagggcaactcttccctggattaacagctcagcggaggaccaacacaaactggttagtctaggaagaaaaagaaaagaaaagtgcaggagaccaacat

SEQ ID NO: 33930 - DNA, 120 bp, synthetic construct
  source 1..120: mol_type = other DNA
accttgaaaccgaaaatcattcagagagcaaaggccaagatgcccaaccacctgctacagaatcctgctccaggactgaagtgtatagtctgtatcaaaataaaaactggaggacaggtg

SEQ ID NO: 33931 - DNA, 120 bp, synthetic construct
  source 1..120: mol_type = other DNA
ggtaggtgcatggatacacaaaccaaaatatgcattaagtatgtcttgctcatcaatgaaaatgttagtatctaacagaatgacacagtgtaagaaaatacaacgtaaacgctaacatcg

SEQ ID NO: 33932 - DNA, 120 bp, synthetic construct
  source 1..120: mol_type = other DNA
agagtagaagagcaagtaaatacatatgtcccctttatattcctgaaatgtacaaagctctctacccaagaacctatctttttttcaccctatgttatctctgctctctgacaagtggga

SEQ ID NO: 33933 - DNA, 120 bp, synthetic construct
  source 1..120: mol_type = other DNA
agtctccacccccactttgagaaggttccgtccctggagccgggactgatagaagccacatccgcttcgcttgttccgcctactgttctgacttctaattggccagatggagttcactaa

SEQ ID NO: 33934 - DNA, 120 bp, synthetic construct
  source 1..120: mol_type = other DNA
atcaagctcctggactcaagggatcctcccatctcaggactacagccatgcaccaccctgcccaagctattttttgttttgttttgtttcgttttagtggaaaccgggtttcgatatgtt

SEQ ID NO: 33935 - DNA, 120 bp, synthetic construct
  source 1..120: mol_type = other DNA
tgatgtgcacgtgtactttataaggtgaaatgcatctgtatatacagacagcctttaaatcacatccttcagtatactttatatatgcttttataatttccttgctggtataaaggtttt

SEQ ID NO: 33936 - DNA, 120 bp, synthetic construct
  source 1..120: mol_type = other DNA
ataatacccatttttttttctgcattttcagcaagattttcttgttctaaaacctcaagggctgcgatggtcactcagcagcctagtggattgccaccgtatgtggacccatgttcccct

SEQ ID NO: 33937 - DNA, 120 bp, synthetic construct
  source 1..120: mol_type = other DNA
tccttctaataatttacaaatcaccgagtaatagcctctgaacacgttcatattagcgatgctcatttctcttcaacagaacagaaccccccatccctctgcctgatcagatccatcgcc

SEQ ID NO: 33938 - DNA, 120 bp, synthetic construct
  source 1..120: mol_type = other DNA
ctcgtgttctgtcagttagccatggcatcaaccaggaaggattatcatccccagttcccagatctagcacacaggaagcggctccagctgaatggcagacatgcctagctgagtccctgc

SEQ ID NO: 33939 - DNA, 120 bp, synthetic construct
  source 1..120: mol_type = other DNA
gtattggtttatcaaaaccaaatagtcttctcattcccaaagaaccctgattctccgtaatgagcttggaagagagtttgaaggagtgatcccttatccaacacacagagagctttccca

SEQ ID NO: 33940 - DNA, 120 bp, synthetic construct
  source 1..120: mol_type = other DNA
atgagtcacacacttcagttttcatccatatgaaagccatgtgacttgacacaaatcttctaagttctctgagctccagattcctggtccatgaaatggaagtaaagaattatagttcat

SEQ ID NO: 33941 - DNA, 120 bp, synthetic construct
  source 1..120: mol_type = other DNA
aattccacattgaatgtcggtgccccagtagggtagtatgtcatatctggtactgctttgtttgctgcctagattaatttcggcaaaccatttctttccctctcccttccctgtattcat

SEQ ID NO: 33942 - DNA, 120 bp, synthetic construct
  source 1..120: mol_type = other DNA
tggagcagtcagaacacacacaacattggtcgattcagtttgtcaacttctatgggtgcagttcatggtacccccaaaacaattacacacaacagggtgattatagtcaataataactta

SEQ ID NO: 33943 - DNA, 120 bp, synthetic construct
  source 1..120: mol_type = other DNA
cacatttggagtctgatcaactccacagctgtgttgcagccgctaacgctgcctctgctctgtttgcctctagattcttcttatctgttaaataaagtgaggctgatggagatgtaattt

SEQ ID NO: 33944 - DNA, 120 bp, synthetic construct
  source 1..120: mol_type = other DNA
ctcagcccacatcacttcatggtactgaacctggggccacagttccaaactccatgttcacacatgatgagtctataggaatgaaggagagatctatgttgtgtatctttattattatgt

SEQ ID NO: 33945 - DNA, 120 bp, synthetic construct
  source 1..120: mol_type = other DNA
tacagggagtgtcttcccatggcctccggaagcattcggcagtccacaagccacgcttcagagaagccgctccgggaacgccgcggcgcacctccggaagggatgacctccacgccttct

SEQ ID NO: 33946 - DNA, 120 bp, synthetic construct
  source 1..120: mol_type = other DNA
aagctgttcctgaccacctgggctatggtgattttgacttcctctgtgtcagaagtacccccgtctcatgcctgccatagttgtctttttgttttgttttgtgatttcagatggactcac

SEQ ID NO: 33947 - DNA, 120 bp, synthetic construct
  source 1..120: mol_type = other DNA
atgagcaactccatgggtgtggtttgagaatctctggatgaacctacacataggacggtaaaatgtttcatttcacaaaattgctggagggagaaagagagaaaagagagcgatgactat

SEQ ID NO: 33948 - DNA, 120 bp, synthetic construct
  source 1..120: mol_type = other DNA
tgcgctcccattcaagtctttcccccattttctagttggggtgttgattttcttattgtggagttttgaaaacgcgccatgtgttttggatataagatctgtcaggttggtgattctcaa

SEQ ID NO: 33949 - DNA, 120 bp, synthetic construct
  source 1..120: mol_type = other DNA
agaaacggaatccagcatcgccttccaaatcttccccgatgacagctgcagagacttcccaggaaggtccagcgccctctcagccttcgtactcagaacagccgatgatgggcctcagta

SEQ ID NO: 33950 - DNA, 120 bp, synthetic construct
  source 1..120: mol_type = other DNA
ttctttttaaaagatttatttattttaattttttttaagagaccgggtgatgctctgttgccgacgagagtggagtggcacgatcatggctcactacagccttgaactcaggtgggatcc

SEQ ID NO: 33951 - DNA, 120 bp, synthetic construct
  source 1..120: mol_type = other DNA
gacttgggggtcatgtctgagacaccatactatcccaagttacagactaggatctgcagtcctgtgatgtccacaggtgtccagcatgcgacattctagagtagagaccaaaccaaaggc

SEQ ID NO: 33952 - DNA, 120 bp, synthetic construct
  source 1..120: mol_type = other DNA
aagacagccagagtggggaggggtgttgtctcacccacagggcccctgccggagctgagcaccccaatgggatgagtggcagcacggttaccaagacaacagaactctcgacccctttcc

SEQ ID NO: 33953 - DNA, 120 bp, synthetic construct
  source 1..120: mol_type = other DNA
gaggggatgttgcttactgttgtagaaaaaaatgactgcataccccttcctccgtgacttacggtcacacttgcactacattttttaaatggctttactaaggtataatttgcttgccac

SEQ ID NO: 33954 - DNA, 120 bp, synthetic construct
  source 1..120: mol_type = other DNA
cttgtccttccaccttttgccacgtgaggaaataccaggaagactcttgccagataccagatactggtacctttgttttggacttctcagcatccagggtcgcgagaaataaatttgttt

SEQ ID NO: 33955 - DNA, 120 bp, synthetic construct
  source 1..120: mol_type = other DNA
tacatgtgacttcccttccttcatcatctcaccaatgtcatttcttcaacaggcacttgcccccaggtaaaagaccttgtatcaaaaatctctgcatgaaacaccacagcctcaagtttc

SEQ ID NO: 33956 - DNA, 120 bp, synthetic construct
  source 1..120: mol_type = other DNA
caaaggcagaaattcctgcatggagaggtcaagtaacttccctcagatcacacaaccactcagggacagaattccctcccaggtctccctgactgcagatgaacacacccctggtggcat

SEQ ID NO: 33957 - DNA, 120 bp, synthetic construct
  source 1..120: mol_type = other DNA
acatttttgatgcctacacagatcatctctatcctactgggtctggagcggaagagatacaatttttagcagctttgtaacaaaagaacaggtagtcagtaaagccagcaatgcccactt

SEQ ID NO: 33958 - DNA, 120 bp, synthetic construct
  source 1..120: mol_type = other DNA
gggagtggtggtgaccatttctcactgaggtctgctgaaatacaaaagtcactccaccatttgtgacaccaatctctctttatattgtcacccgttttaattcgcattcatagacgtata

SEQ ID NO: 33959 - DNA, 120 bp, synthetic construct
  source 1..120: mol_type = other DNA
ttaaacgcatgtctagtcgtatttcacattacgaccgtccctctgtcacacgtcggagaaagggtttgtcggacggtttgtttcaataggggcaatgcagtcctccttgaaaaccctcca

SEQ ID NO: 33960 - DNA, 120 bp, synthetic construct
  source 1..120: mol_type = other DNA
gaattttgagcgttagctgcctgtaggtcgccagctaataaaggtccccttaatttgtctcaaaagtgtggcgtttctctataactcgcttggttacaacacattcatgagacaaaagaa

SEQ ID NO: 33961 - DNA, 120 bp, synthetic construct
  source 1..120: mol_type = other DNA
tacttatttgtttagtattggcaatacatgccgaatggtggtgatacccaaagcagacaggtaaaatcaagccactgtatgggcaagtcgagacattcccattttacttgggaagacctg

SEQ ID NO: 33962 - DNA, 120 bp, synthetic construct
  source 1..120: mol_type = other DNA
ttccaaaattatgtcctgaggatcactcaccagatctgaaagctgcttcccacaaaaggtttcagtggtcgtatatgttggacaagtactgcatatagtaataccctcttgtagagtcac

SEQ ID NO: 33963 - DNA, 120 bp, synthetic construct
  source 1..120: mol_type = other DNA
gaaccactcagccatgccattcccagcttcctggcacccagaaactgtatgaaataataaatgtttattgtttaggctcactctcttgggtcagttttaagctaccaaatttgggggtaa

SEQ ID NO: 33964 - DNA, 120 bp, synthetic construct
  source 1..120: mol_type = other DNA
tatggcagtagtagcaattgtgtgtgtatgtgcatgcgtacaagtgtgttggagggcacagaaagagaagatgctagatagacaagtagaagccagattataaagggccttataaggttt

SEQ ID NO: 33965 - DNA, 120 bp, synthetic construct
  source 1..120: mol_type = other DNA
gtgagactctatctcaaaaaaaaaaaagaactgtgtgggggtgcacattaaacaagtttggccagcagctgactgttgttaaaactggtgatggctatatgagggagcactgtagtattt

SEQ ID NO: 33966 - DNA, 120 bp, synthetic construct
  source 1..120: mol_type = other DNA
atgaaagaatgccaagtgaggaggaaagagccctgaggaacacctgaggtcaatctgttcactgtactgaagtctcttctctgtgtggacctaggcttagcttagttatatacacacatg

SEQ ID NO: 33967 - DNA, 120 bp, synthetic construct
  source 1..120: mol_type = other DNA
gctcaggagaacaagttgggtttgaactgcagttcttcctcttagaagcggtgcttttttaaacctctccgagcctcatttcccccaacaataaaaatgggattggcaaccctgtcctta

SEQ ID NO: 33968 - DNA, 120 bp, synthetic construct
  source 1..120: mol_type = other DNA
agaaatgcccagcacaggggcaggcacatagctggaacttccaaaataatttcatccccttcccaacgttttattaaaaaaaaaaaaaaaaaaactccctctccctcctctccctcctct

SEQ ID NO: 33969 - DNA, 120 bp, synthetic construct
  source 1..120: mol_type = other DNA
ttacattacctaatacatagcactcaaatttctccaaatcttttatctggatccacagcccaaccaaggctggtggtgattatctctctagtctacttttctctataagaaatgatcctg

SEQ ID NO: 33970 - DNA, 120 bp, synthetic construct
  source 1..120: mol_type = other DNA
aatgtcaagataataggagaagcagcttctgacaaccaaccaacaggcaacagataagttcccagacaccactaagaacatcattgagaaagggtatctgcctgaaagggtttttcatac

SEQ ID NO: 33971 - DNA, 120 bp, synthetic construct
  source 1..120: mol_type = other DNA
atcacgagtttgtggatatagcaaaaaaaaggtcatgggtgaagaatttcaggatatgaatctcagtgaaattcaagagctaataaacaccacaccagagcaagtaacagaagacgtctt

SEQ ID NO: 33972 - DNA, 120 bp, synthetic construct
  source 1..120: mol_type = other DNA
aaaagaaaccagaggattttctattcaagatggtgaatacagcatctctcctttatcccaaatgctaggggaatggcagatatatagcagttaccggggaccaacagttttcaatggcct

SEQ ID NO: 33973 - DNA, 120 bp, synthetic construct
  source 1..120: mol_type = other DNA
gtcagatcccagacgagtgatgtagtttgatcttttgctaaatacatataggagattgaggactgccagcaccacttgcatatcagaggaagccaataaagttgtcaaatgctaaaggga

SEQ ID NO: 33974 - DNA, 120 bp, synthetic construct
  source 1..120: mol_type = other DNA
gccagcaaaattttccttgccactggtttaaagctgtgttaggcacatggcacatgctagatgcttattaattgctgaatgaggctatcccattgtggtttcttattccatatcagagca

SEQ ID NO: 33975 - DNA, 120 bp, synthetic construct
  source 1..120: mol_type = other DNA
atggtaaacagcttccgaacttcgtaaaactaggactccattctttcttggggttcctatttccatacatttctgctctcttctactgatgaatgggtccatttgtcaggtaacaaggag

SEQ ID NO: 33976 - DNA, 120 bp, synthetic construct
  source 1..120: mol_type = other DNA
ctactagagagcatgtcagtaagaatcaggagccaactttaagagagttccactagccacaagaagggcaatttgaacttcgctaaggatcagaactgcaatgtattgaaacccatcaaa

SEQ ID NO: 33977 - DNA, 120 bp, synthetic construct
  source 1..120: mol_type = other DNA
tggccatattgggagacaaacgataaacatcctggcaactcaggttgaactttgccattgaaccttagacaaagtttttatttggtattgtcactccttcctctcttctcagagatctac

SEQ ID NO: 33978 - DNA, 120 bp, synthetic construct
  source 1..120: mol_type = other DNA
aaacatacttttaaataaacatgggtcaaagaggagatcccacaggaaaacagaaaatatttccattaataaaagtgaaattgtccctctccctctccctctccctcctctccctctccc

SEQ ID NO: 33979 - DNA, 120 bp, synthetic construct
  source 1..120: mol_type = other DNA
aattgcaacataaaacttgggggacgcaaagaaagctctgcttagaggaaaatttaaagtactaaatgtttacattagaaattaaaaatatctcatgagaaaggaatcattacaactgat

SEQ ID NO: 33980 - DNA, 120 bp, synthetic construct
  source 1..120: mol_type = other DNA
caaatgtctatcaactgactaatggataaacaaaatgtggcatatccacaccacagaatattattcagctgttaaaaagaacgaagtggtcggcgcagtggctcacacctgtaatcccag

SEQ ID NO: 33981 - DNA, 120 bp, synthetic construct
  source 1..120: mol_type = other DNA
ttcaaaattaaacaacatacttctatacttcatgggtcaaacaggaagtttcaaggggaatttaaaaatgccttgaggcagcaggaggatcactttagcccaggagctggaggctgcagt

SEQ ID NO: 33982 - DNA, 120 bp, synthetic construct
  source 1..120: mol_type = other DNA
ggacatgtgtcttcatttgatgttctcatcagcaatgtatgagggttccgatttctccatatccttttcaacacttgctggatgtcttctttttaaatctcccacccgatcccttgtctt

SEQ ID NO: 33983 - DNA, 120 bp, synthetic construct
  source 1..120: mol_type = other DNA
ttctgccagatacccaaattcatcattcttaagtttggcctacaacaaagcccttggagacggacaccattcagccaagttctttgccaatttataacaaggatggcctttacttccatt

SEQ ID NO: 33984 - DNA, 120 bp, synthetic construct
  source 1..120: mol_type = other DNA
gggtgggaagggggtgagggattgaaaattacttaatgggtacaatgtacactatttgagtgatggctacgtgaaaagcccagactttaccactatacaatatatccatgcaacaaaagg

SEQ ID NO: 33985 - DNA, 120 bp, synthetic construct
  source 1..120: mol_type = other DNA
tgacaaagtattttccagaatggcagtatcattttacattcccaccagcatttacgggtgatccagcttctctgcatcctctccgggatatggtattatcactattattcaccattgcca

SEQ ID NO: 33986 - DNA, 120 bp, synthetic construct
  source 1..120: mol_type = other DNA
tggtggaatcactaaccaattttaagacttattataaagctacagtaatcaagatagtgtattactggtaaaaggatagacacatagatcaactgaacagaacagagtccagaagtagac

SEQ ID NO: 33987 - DNA, 120 bp, synthetic construct
  source 1..120: mol_type = other DNA
actaggcagatgatcaacagagaaatagaagacttgaacagccctctaaaccaaagaggcctaacagacatatatggaacgctccacccaacaacaccagaatacatacttttctttagc

SEQ ID NO: 33988 - DNA, 120 bp, synthetic construct
  source 1..120: mol_type = other DNA
aaaatatataaaagcacaaagaatgggatttagcatttgcctgaaagaagatagcctacatggcagtaagtatgatgtcttgggtaagcattattactacttagggcagggctgggcgca

SEQ ID NO: 33989 - DNA, 120 bp, synthetic construct
  source 1..120: mol_type = other DNA
cgcctttactaataatcatcaataaggaagtaaaaatcaaaagacaaacccaccaatttaaagtcagcaactgtccaaagctgaaactaaagggaggcaggttgggcgtggtggttcacg

SEQ ID NO: 33990 - DNA, 120 bp, synthetic construct
  source 1..120: mol_type = other DNA
attacaggcatgagccactgcacccagcccaattcactatatttcagtcttctagaatggctagaagccatcggtagacggcaatcagtagatacatatgtgtatgtatgggtatatatg

SEQ ID NO: 33991 - DNA, 120 bp, synthetic construct
  source 1..120: mol_type = other DNA
atacacacatacatataccagaaagatgtatatactaaaatgtttaaagccttgtactcaaagtactggaattttaggtcattctgatgcttgcttgcctgcattatctaatatttctac

SEQ ID NO: 33992 - DNA, 120 bp, synthetic construct
  source 1..120: mol_type = other DNA
ttgagcctaacacatttacacaagccagcaatatttctcaccccatcctgtccctcacacatcagctgaacctctgaaataaatctactctttccttcatcctattcccatcaatacaac

SEQ ID NO: 33993 - DNA, 120 bp, synthetic construct
  source 1..120: mol_type = other DNA
acttgaatccaggtctcctacctctggtgctttgtggggaactgggtggaggcaggatctgtggtagggtattgagggatgagggagaaaaacgacctaattcaggtaggactggcaacg

SEQ ID NO: 33994 - DNA, 120 bp, synthetic construct
  source 1..120: mol_type = other DNA
atgcaactatttattgctgaaaatttccttgctttgaagtctattttgtccaaaactaatacagctaccccagccagctttctttaatttgtgttagcatggtatatctttctctatccc

SEQ ID NO: 33995 - DNA, 120 bp, synthetic construct
  source 1..120: mol_type = other DNA
cagttcccttagagtttgcagtatacatttacaaccaatccaaatccactttcaaataacactatacagctttatgcatagtgcaagtaccttgtaacagagtattcccaattattccct

SEQ ID NO: 33996 - DNA, 120 bp, synthetic construct
  source 1..120: mol_type = other DNA
ggactcaaatggcctgtgggtccaggttccagctgctgctgtgtgtccctggacaagcgactcattctctctaagcctctggctcctcatctacagcacaggcatgaccacagctcctac

SEQ ID NO: 33997 - DNA, 120 bp, synthetic construct
  source 1..120: mol_type = other DNA
gtggggatccagggaaaagcgtgatttggccagtgtggcttctacagccttcaacatggttaacatatgatttaatttcattagcccacccaacaaaccctcccttatcactgatttttt

SEQ ID NO: 33998 - DNA, 120 bp, synthetic construct
  source 1..120: mol_type = other DNA
aaactcaactacaaattacacctccacccaagtctcagactaaccactagatggtacacatgcaggacagacctatatagtactgagaaaggctggaaaattgaattgatgtgggaacca

SEQ ID NO: 33999 - DNA, 120 bp, synthetic construct
  source 1..120: mol_type = other DNA
atcttcccccaaaatacccaggtccagacggtttcactggcaaattttaccattcatttaaagaagaaatagcatcaattctatacaatctctctatgaaactagaagacaggaaaatac

SEQ ID NO: 34000 - DNA, 120 bp, synthetic construct
  source 1..120: mol_type = other DNA
cgtggatattcagtttactgtataaactgaactgcttgtaggcatgtaaagaggcaggagtacccgtgaaaatagtgacaaatgttcgccctacttaaagcaactacatgatggctacac

SEQ ID NO: 34001 - DNA, 120 bp, synthetic construct
  source 1..120: mol_type = other DNA
agagattcacaccctatgcagatggtacacctggtcctaaccggttgtttgtaccctatgtaggtgatcagatactacctccccactagctcatctataaaaacccctgcctttcactgc

SEQ ID NO: 34002 - DNA, 120 bp, synthetic construct
  source 1..120: mol_type = other DNA
ttgtaatgtgtccttttttatttctttttcttttttcttcttttttttttctcgagacagtctccttttatcgccagactggaatgcaatggcacagtctcagctcactagaacctccac

SEQ ID NO: 34003 - DNA, 120 bp, synthetic construct
  source 1..120: mol_type = other DNA
cagggagggtattatgcccacttttgatctcactaaagtgctggaagcaggtttgttattcatttaagatgcaaactattgtatttctattttcacagtattttgtgtgacacagaggta

SEQ ID NO: 34004 - DNA, 120 bp, synthetic construct
  source 1..120: mol_type = other DNA
acactttttcacaagagagacaaaacaaatgtaatactgacttttctatttccttcacttaggccgttctaagcatattctatattcagagtgtcatttcatatcagactatttaaatga

SEQ ID NO: 34005 - DNA, 120 bp, synthetic construct
  source 1..120: mol_type = other DNA
taggtgatcagatactacctccccactagctcatctataaaaacccctgcctttcactgctggatggcaaccgttttttctgggacccctctctgtagtagaaagctgttctctttgttt

SEQ ID NO: 34006 - DNA, 120 bp, synthetic construct
  source 1..120: mol_type = other DNA
tccataggtcatttgcagctgttcaacttaggtcacacagtaacactgtccacaggtaccaagagacaacctatgctcatctttatccaactagaaacatgttaaaagaacttgtgcagg

SEQ ID NO: 34007 - DNA, 120 bp, synthetic construct
  source 1..120: mol_type = other DNA
agagagagagagattgagaaagattgagattgattttaaggaactttctcaagtaattgtagagactagcaagtccaaaatttgcagggcaggctgacagactggagacccatggaagag

SEQ ID NO: 34008 - DNA, 120 bp, synthetic construct
  source 1..120: mol_type = other DNA
gatccatttggaaaaggatacaccctattaaagtaagcctgatacatgaaacaacagctaaaaaagaaaaaaaaaaagtaacacaattgacaacctaaataaagaaaatacttacactga

SEQ ID NO: 34009 - DNA, 120 bp, synthetic construct
  source 1..120: mol_type = other DNA
ttcagaaacaacttccactagatggcaatgtggctccacaaacagcagtcttgtctttcccttcccccattttctttccctctttctgtttttggtgccaaaaaccaaaacaaacaccaa

SEQ ID NO: 34010 - DNA, 120 bp, synthetic construct
  source 1..120: mol_type = other DNA
gaggggcttagcaactgggccagcagctactgtgctccacttctcgcctatctcttctccttaactttcttttataattatgttttctccttcctctttgcttttttcacacgagaaagg

SEQ ID NO: 34011 - DNA, 120 bp, synthetic construct
  source 1..120: mol_type = other DNA
aatggcggtcacgtcttttccttcccccaccttgcctttatctttctccatctgctgccgacagaataaaacaaacgccaaaaacaaaaaaagccaagaaacaacgaaagataccggcca

SEQ ID NO: 34012 - DNA, 120 bp, synthetic construct
  source 1..120: mol_type = other DNA
gatattcagcccagaaaatgcatgagaccgtcaaggacaaattatgccgcccataattagggtctccaggcagacataagaaagcctgatgcgggacatcatacagtgcccatgttggga

SEQ ID NO: 34013 - DNA, 120 bp, synthetic construct
  source 1..120: mol_type = other DNA
tctttttctgtcaggccactcacagggctgccagctgtccagctggggcactctgcattccacttcgctctcaacctcattgctcactctgattctttgtgtactttcggagttttcctc

SEQ ID NO: 34014 - DNA, 120 bp, synthetic construct
  source 1..120: mol_type = other DNA
cttttcctcttcttctttttctgcttttgcttctgctttttcttccctttttcccttcacactcagatctgttcgggcaagtgttctaggagactgctgctgcttttgctttttggtgat

SEQ ID NO: 34015 - DNA, 120 bp, synthetic construct
  source 1..120: mol_type = other DNA
gggttatgctgcttaaaaagggaccccactttggaggaggggcagagacagtccccctggagtcttggctctgtgtgatgctatgagtatctgtggcgcggggtggccttcccaggcctc

SEQ ID NO: 34016 - DNA, 120 bp, synthetic construct
  source 1..120: mol_type = other DNA
agcactccgaaacttttttatttcccggcaagatagaggctttctggccccactgtggccccagccaagggcatcgcggagctgcccacaaaagcgaccagagtaaacggccccgttctc

SEQ ID NO: 34017 - DNA, 120 bp, synthetic construct
  source 1..120: mol_type = other DNA
agaccaggctgcatgcctgtgcgcaccacacttgtccctaggtagcactcttcctcttggggaagggatcaaagttggatggaaagcagccaggtccagcaggcatccgcaccttgttga

SEQ ID NO: 34018 - DNA, 120 bp, synthetic construct
  source 1..120: mol_type = other DNA
aaggttcagcctgcacctgtgtcctctgtagcttctgtaggccgatttgtggatcaaagtttcggtcccactcaggaaagatcccatcgacaagaagcttcctggttgttcgtcctttaa

SEQ ID NO: 34019 - DNA, 120 bp, synthetic construct
  source 1..120: mol_type = other DNA
catatgggatccggcaacccaaactgaaatacacgcgcacacacagacacatgcacacgcagacacaaacgcacacgttaaacacgcccaagtagacacacgcatacatacacaaacaca

SEQ ID NO: 34020 - DNA, 120 bp, synthetic construct
  source 1..120: mol_type = other DNA
ctagggtcccctgagtttggcggtcaacctgggaccaggtggctggttcctttcccttctccgtgtctttcttttattattatgttttctccttcctctttgcttttttcacacgagaaa

SEQ ID NO: 34021 - DNA, 120 bp, synthetic construct
  source 1..120: mol_type = other DNA
ctttgaacatcaatcacgtctgaactatatcctgtcttcatctgtggttgcataggtcctcaggcacatacaagtatcttctccagtaatgacaagcttctgcctagacaccttcattca

SEQ ID NO: 34022 - DNA, 120 bp, synthetic construct
  source 1..120: mol_type = other DNA
tcaggttgatccttctcctctttactctggacctcttctaaggttctttgtgttcctctctactcaatttattctgtgtattttcctctaagccacaagctctctgatagctgttccttc

SEQ ID NO: 34023 - DNA, 120 bp, synthetic construct
  source 1..120: mol_type = other DNA
agagaggatagagagacacacccagtgtgccacaaggcaaacttttccctatagccatgtctggatgtagtctgcgctagtgcctaagtttcccctaggagcctggaagcaatgctggaa

SEQ ID NO: 34024 - DNA, 120 bp, synthetic construct
  source 1..120: mol_type = other DNA
cagctaaatccagtgccatttttaaatgactgattatgattctagctgaactttattcacagccgaaattgacagctgttcgttccttccatgccccatctaccaaacacacccgaactt

SEQ ID NO: 34025 - DNA, 120 bp, synthetic construct
  source 1..120: mol_type = other DNA
gaccttgtgccacaccaatagcagataatacatatcaagaacctggcacatagaagattgtgtaacataatgattagaaggatggactctagagtcagactccctgggttcagaaatcct

SEQ ID NO: 34026 - DNA, 120 bp, synthetic construct
  source 1..120: mol_type = other DNA
agaatatttgatgtaggtccccgatctcttcttccatgtaggatttttgctgagaggtctcttgttagtttgctggacttccttttataagtgacctaccctttctctctagcctttaac

SEQ ID NO: 34027 - DNA, 120 bp, synthetic construct
  source 1..120: mol_type = other DNA
gattcaggaagaaatagaaaatctgagcagacaacgaatgagtaatgagcctgaggctgctatagagtctcaaaacaaaaacaagccaagaatggattattcacagctgaattctaccaa

SEQ ID NO: 34028 - DNA, 120 bp, synthetic construct
  source 1..120: mol_type = other DNA
agctgggagagttgtatatttccaggaacttttccatctcctctatgttttctagtttatgctagtaaaggtgttcatactagccttgtgtgatcttttgtctttctctggtttggttgt

SEQ ID NO: 34029 - DNA, 120 bp, synthetic construct
  source 1..120: mol_type = other DNA
cacctgctgacgcacagcagcagccagggccagaggcccttcaaatgccccctgggtggctgcggctggaccttcaccacctcttacaagctcaagaggcacctgcagtcgcacgacaaa

SEQ ID NO: 34030 - DNA, 120 bp, synthetic construct
  source 1..120: mol_type = other DNA
gagacagaatgatctcagtgatgcagagatagtgtctctcttctctgatgtacctgacagtacttctgctgcattgctggacacagcattggtgaactctggaatcttgactattgatgt

SEQ ID NO: 34031 - DNA, 120 bp, synthetic construct
  source 1..120: mol_type = other DNA
cagataggttaagtgacttgctgagggtcacacaacttgtcagttccagactcaagatcagaatttagatctccaaactcatagtccagggctgtgctctttttgcaaaccaaaaagaaa

SEQ ID NO: 34032 - DNA, 120 bp, synthetic construct
  source 1..120: mol_type = other DNA
atatttgaagatgcataggaagctgctcaagttgcatttctaataatagaactgaggcaagcatctgggtttcccagactgcaggttgggttttaatgtgtaacaacaggtagggctaac

SEQ ID NO: 34033 - DNA, 120 bp, synthetic construct
  source 1..120: mol_type = other DNA
tcttctgtttgcaaatggatgaattttatcactccatcaaggggattagcatttttgtctttaacccaagctatggcaggacagttaaaaggcccccatctggtcatgatgccaaagtcc

SEQ ID NO: 34034 - DNA, 120 bp, synthetic construct
  source 1..120: mol_type = other DNA
ggaggttatagcaagggcccatgggcaggtgtaggtgtgagggacgagctagttgaggcccagattccccaggtgcccttgactctggcactgatagtgatattgacatggtcataggag

SEQ ID NO: 34035 - DNA, 120 bp, synthetic construct
  source 1..120: mol_type = other DNA
ctatgacttcacttacatgagctacctagaataggtaaattcataaagaccagaaagtagaatagagggctgccaggggctgctgggaggggaaaatggagagttattttgttatgctat

SEQ ID NO: 34036 - DNA, 120 bp, synthetic construct
  source 1..120: mol_type = other DNA
tccaagtctgggttatatgaggcaaaaagaaaacccatgaaactcacaatcgtgttgttccttaggtcctgtggaccctagtcaatctgccttctactctgaatttttcatgatgggtta

SEQ ID NO: 34037 - DNA, 120 bp, synthetic construct
  source 1..120: mol_type = other DNA
atagaagaacaaaaccccacaaattgctaaatcaacctcaaaaaaaagtaaaggggaaagatttgctctactaggtattaaaacatactcaaagctgtgggggaaaaaaatcaacaacaa

SEQ ID NO: 34038 - DNA, 120 bp, synthetic construct
  source 1..120: mol_type = other DNA
tatcctgagaccttgctgaattcacttactagttctgggagtgttttgtgggcgccttgggattttctacatagacggtatatcatctgctaatagggatactattatttcttcctttcc

SEQ ID NO: 34039 - DNA, 120 bp, synthetic construct
  source 1..120: mol_type = other DNA
tcagcatcagttgaatttatcatatgatttttgtccttcattcttttgatacgatggattacattggctgacttgcatatgttgaactattcctccctccctaggataaatcccacttgg

SEQ ID NO: 34040 - DNA, 120 bp, synthetic construct
  source 1..120: mol_type = other DNA
aatcttcacaacaaccttatcagttaggtggtactatttccatcttagaaacagagaaactaaactccagcaaggttaattaacttgctcaaagtcatacatctagtaattgatagagtt

SEQ ID NO: 34041 - DNA, 120 bp, synthetic construct
  source 1..120: mol_type = other DNA
agctagcaaaatttttgcctcctgtacctgagaccttatgctctgctgacagaaaggtcttaattcccaagaggggaatatttccatcaggagacacaatatcgattagttgttaggtga

SEQ ID NO: 34042 - DNA, 120 bp, synthetic construct
  source 1..120: mol_type = other DNA
acctctctgttaacccttacagcctgcttcagttgtctgaagcaattttaatggttttctagtctccctagtagatggggttcctgatattttgtaaagagtaagagtaacgctggagag

SEQ ID NO: 34043 - DNA, 120 bp, synthetic construct
  source 1..120: mol_type = other DNA
gaaaccgatttcaatgaggctgctaccctctatcctagagaatacgcagctcccggttacctagttacacacctgttctcgcatgtaacgcccttgagctctgccaggacacattctaca

SEQ ID NO: 34044 - DNA, 120 bp, synthetic construct
  source 1..120: mol_type = other DNA
gttgcctcaggtcttcctgcgatttttttggggggcctagagtctcatcaacattgctcaagttgattcaagagaaaggagggtggtagttataagataaatgacagaccaaatattaga

SEQ ID NO: 34045 - DNA, 120 bp, synthetic construct
  source 1..120: mol_type = other DNA
cttgagatcagggaccggttctactggtctgttccaaccatagttccttaaacattgtgttccattaatattgggtgaattgaaatgaatttataggaagctccttaacctggggtcctc

SEQ ID NO: 34046 - DNA, 120 bp, synthetic construct
  source 1..120: mol_type = other DNA
ccccaggtgttctttgtgcttcttgtatttggatgtctaggcctctatcaaggccagggaagttttcccctattgctcctccaaatatgttttcaaaacttttagaattcccttcttcct

SEQ ID NO: 34047 - DNA, 120 bp, synthetic construct
  source 1..120: mol_type = other DNA
tgtttgtaaactagacagaatcctataaggagaaaatctgtaagatttcattccctccctatgtctcaccatcctttgccctctggttgcagcagtagttaatactttcctgccaccttg

SEQ ID NO: 34048 - DNA, 120 bp, synthetic construct
  source 1..120: mol_type = other DNA
accatagccttttaatatattttgaagtcaggtaatgtaatgcctccagtggtttatttatttatttatttgtttatggctcaggactgctttggctatttgggctcttttttggtgtca

SEQ ID NO: 34049 - DNA, 120 bp, synthetic construct
  source 1..120: mol_type = other DNA
tttttattattcctaggtattttattattttgtataactacaactggatatatttttgtattgcaatgaaattcttgtatgcaaagttcatttggaaaaataaagaatacctgggcaaga

SEQ ID NO: 34050 - DNA, 120 bp, synthetic construct
  source 1..120: mol_type = other DNA
aagctgagtcacattatgccatcagataagggatatgatgatggagagggcattgcaggcagaggaaacagcacaaaaaaacactaggttgtaaaaatgcttggtaggctaagagatcaa

SEQ ID NO: 34051 - DNA, 120 bp, synthetic construct
  source 1..120: mol_type = other DNA
gagctgccctttcctcttcggtgaagtttttaaaagctgctaaagactcggaggaagcaaggaaagtgcctggtaggactgacggctgcctttgtcctcctcctctccaccccgcctccc

SEQ ID NO: 34052 - DNA, 120 bp, synthetic construct
  source 1..120: mol_type = other DNA
aagtaggtggaagattcagccaagctcaaggatggaagtgcagttagggctgggaagggtctaccctcggccgccgtccaagacctaccgaggagctttccagaatctgttccagagcgt

SEQ ID NO: 34053 - DNA, 120 bp, synthetic construct
  source 1..120: mol_type = other DNA
ctttgaaaccaagacagattatttctgcccataggcttcaggaaccaatattttggcaagaagcatcttttctttgtggtcagcaaataggtggtgagttctgtctggatcccaacaatc

SEQ ID NO: 34054 - DNA, 120 bp, synthetic construct
  source 1..120: mol_type = other DNA
ccttgaggttaaagcctggttcaacagttgctgagagagttaactagattgcttgaggacttggcaatttcataaagtattttgtcttatgctgtctctgtctctgtcttgatctctgtc

SEQ ID NO: 34055 - DNA, 120 bp, synthetic construct
  source 1..120: mol_type = other DNA
ctgtcactttttcccatgatactctggcttcacaggtgggaggttcttcaattgaaaacttagaactcagtttctagggtagtgagtgttgtaaggtttggactgtgacctaatattacg

SEQ ID NO: 34056 - DNA, 120 bp, synthetic construct
  source 1..120: mol_type = other DNA
ggctctggctctgctgctgacttaccacctggccttaagcatgtctagttccctctttgtacattaaaatctccattggaacagtaacatggttgtattaaatgatcttgaagattttac

SEQ ID NO: 34057 - DNA, 120 bp, synthetic construct
  source 1..120: mol_type = other DNA
caacacaagcagtaggtagtgagtggttccatgtaccatcatgcctcaatgatatgctcaaagattgtttccatgacaaaactgcagatggaggccacttatattagacagtctacatac

SEQ ID NO: 34058 - DNA, 120 bp, synthetic construct
  source 1..120: mol_type = other DNA
taataaaatgttgagatactaagtgtcaaaaaaaaaaaaaaaagaaaaaaagaaaaagaaacaatagggcttggctggcgagccccactgaggagccggagcttgggccgcacttacccg

SEQ ID NO: 34059 - DNA, 120 bp, synthetic construct
  source 1..120: mol_type = other DNA
gataatacagcaaaggtctgtggtcctagatctacaaatgtgtggtgagaaatatctacaaatgtgtggtgagaaattagaacaaactggagatgggccattgacacatggactctgcct

SEQ ID NO: 34060 - DNA, 120 bp, synthetic construct
  source 1..120: mol_type = other DNA
aagggaaagatctgagctggaaaaataaatctgagagtcattccttccttaagcaaatatgtattgagtgtcatccctaagttacgtgttgtgctggaatctgtgctgtccaatagggcc

SEQ ID NO: 34061 - DNA, 120 bp, synthetic construct
  source 1..120: mol_type = other DNA
gggaacaaatcccatctcaagggcaggaaagaagagaaggactacatgcaaacaaaacttctgtgtgtgaaggttaccagtcagactttgtaaactttcttaagcctcagctacttaagt

SEQ ID NO: 34062 - DNA, 120 bp, synthetic construct
  source 1..120: mol_type = other DNA
tcactactgagaatctacctaaaggaaaagaagtcattacatcagaaaagacacctgcactcctatgtttatcttcacacaattcacaattgcaaagacaggaaatcaatctaagtgccc

SEQ ID NO: 34063 - DNA, 120 bp, synthetic construct
  source 1..120: mol_type = other DNA
ctggggacaaaaactcccacctgctacctcaggtagactcttcaccataacgagtgacatcctaaactcattagtgagtttctatcatcagaatcctattgaataaaggccaaagtaaca

SEQ ID NO: 34064 - DNA, 120 bp, synthetic construct
  source 1..120: mol_type = other DNA
tcaaagagatatctgcatcatttttattgcagcacctattcacaatgccaaaatatggaatcgacctaagtgttcatcaatatataaatgagtaaagaaaatgggccaggcacagtggct

SEQ ID NO: 34065 - DNA, 120 bp, synthetic construct
  source 1..120: mol_type = other DNA
ttaaaagaagggctggtctgagggtagtgagttatctcaactgattgttcacagtcagttacaaatcaaacttcttgttctactctttgcccccttctcactactgcacttgagtagtct

SEQ ID NO: 34066 - DNA, 120 bp, synthetic construct
  source 1..120: mol_type = other DNA
tcatcaattgtaacaaatgtctcacactaatgcaagatgttaataggggaaaccggaggagggggcttgggaggtatatgaggactctgtactttctcctcaatttttctgtgaaactga

SEQ ID NO: 34067 - DNA, 120 bp, synthetic construct
  source 1..120: mol_type = other DNA
ggaccacaggcacacaccaccacacccagctaacattttaaattttgattgaaattgccaaactcccttgaaagagattctgtcaatttctactgcagcaatgcatgagggctaccaatt

SEQ ID NO: 34068 - DNA, 120 bp, synthetic construct
  source 1..120: mol_type = other DNA
tcatttccccactgctctgaaatgccacctttatcagacatgaaatttctgagttcaatctatttctagactttctggtctgttctgttgtttttagaatcatgcatcagtaccacactg

SEQ ID NO: 34069 - DNA, 120 bp, synthetic construct
  source 1..120: mol_type = other DNA
gtctggcccctttaataaagaacttcccaactgtgtcaaagagagaaaaaggtccctgttagcttatgacaaataacatatcaaaaaccatgggtttctctgccaacggagcttcagact

SEQ ID NO: 34070 - DNA, 120 bp, synthetic construct
  source 1..120: mol_type = other DNA
agtacctgacacatagtaggtgcttagtaaaaccttcttgaattaaactgaattgcctttacattgcccaaggtttagcacttgatacaagcctggtaaaggatcatgagggccttccac

SEQ ID NO: 34071 - DNA, 120 bp, synthetic construct
  source 1..120: mol_type = other DNA
tggtctccctacaactcagttctcagatgaattcagggaaagttatgattcagtaaagtatctagccttttctcattattctacttggggaatggtctttccagcttcctatatcttaat

SEQ ID NO: 34072 - DNA, 120 bp, synthetic construct
  source 1..120: mol_type = other DNA
tctgcatttcatttatctgcaactgttgcccattaaaaattgtgcctactgggccaaaaactgtatgagaagtcattgcctctattttcttaggaatttgtagatttgagttttggttgt

SEQ ID NO: 34073 - DNA, 120 bp, synthetic construct
  source 1..120: mol_type = other DNA
agcaaagaatgagggttattctatatttgaaaattccagggttagggtctcaggtccagtctgctcctttgccacaactcctcagccctctactttgactatgcctgggtctaggaatag

SEQ ID NO: 34074 - DNA, 120 bp, synthetic construct
  source 1..120: mol_type = other DNA
ctctctgaccctgtcccttgcccagtgcccggcacagacaaggtctgggtaaccatgttatgggaatggctgatgcatgtgtgtggggaagttccagccctggctgagggcaaatcagaa

SEQ ID NO: 34075 - DNA, 120 bp, synthetic construct
  source 1..120: mol_type = other DNA
agaagcagagcgttctggaaggaagggaccctagaaccagggcccaccccattttttccagatgaggaaagtgggcctagccagggagaagcaagctccagggctgaggactgagactaa

SEQ ID NO: 34076 - DNA, 120 bp, synthetic construct
  source 1..120: mol_type = other DNA
ctttgaagagcaaggacctagatcagtggatcagtggttgacaactggagacaatacccctaccccaggggaacatttgacaatggctggagacattttttttggtttttttttgttgtt

SEQ ID NO: 34077 - DNA, 120 bp, synthetic construct
  source 1..120: mol_type = other DNA
ttataaagtgaggcactaatcatatcttcagtggtttcccattgcacttaattcagtaggtggactcccctgtcttggattcaaggccctccataatatgagcccaacctatttatttgg

SEQ ID NO: 34078 - DNA, 120 bp, synthetic construct
  source 1..120: mol_type = other DNA
ggcctggatagtacttctatgcagtaaactagggcaataattgggcttaccttgtttggttctgttttcttgggggtcacagtcctgtgctacctgttgtgtaatatctgaaataaatga

SEQ ID NO: 34079 - DNA, 120 bp, synthetic construct
  source 1..120: mol_type = other DNA
ttaggataatcaatacaccaactgtgacttgtctcctttaggaagatggcatagcataatagcttaaaagcatggactcttgagctgcctgggttctaatctctgctttaccacttaccc

SEQ ID NO: 34080 - DNA, 120 bp, synthetic construct
  source 1..120: mol_type = other DNA
aggacaatggtgcttgttatgacttcattagtctcttcttggctgcaggaaaagagctgataaagaccttttgaggcccagagacaggtaaagtatccctagatctctaacaacactaaa

SEQ ID NO: 34081 - DNA, 120 bp, synthetic construct
  source 1..120: mol_type = other DNA
ggacattactgagctgaggaggggataattagattagaacaaaggaaagtgtatatgcctcctcactcttcctctcaactactgttttggtctagcaatgaaccttgctcattgatctct

SEQ ID NO: 34082 - DNA, 120 bp, synthetic construct
  source 1..120: mol_type = other DNA
caccagcattcctatacaccaacaacagggaagcagagagccaagtcatgaattaactcccactcataattgctacaaaaggaataaaatgcctaggaatatggctaacaagggacatga

SEQ ID NO: 34083 - DNA, 120 bp, synthetic construct
  source 1..120: mol_type = other DNA
cagtgctagagaagagcattgagggacaatatagtacttccctttgaaagggcagaactcaagtcaacgagggtgagtgccaaaaagccactttcagatcaatgtaagaagaaactttct

SEQ ID NO: 34084 - DNA, 120 bp, synthetic construct
  source 1..120: mol_type = other DNA
tcataccactgtattccagcctaggcgacagagaccctgagtaaaaaaaatgaccataccattttgcatacccttgagcaatatatgagagttcctgttaccatctcttcgtactgttca

SEQ ID NO: 34085 - DNA, 120 bp, synthetic construct
  source 1..120: mol_type = other DNA
aaatttgggaagggtaaggcctaggattctgcattttgacactcatgcctagtgattctgatgtacactgaagtttgagaaccactgacctatagggttctcattcttaggatccttttg

SEQ ID NO: 34086 - DNA, 120 bp, synthetic construct
  source 1..120: mol_type = other DNA
gcgttgcatagaaagagaacttggaccataccaagagtgattggtttaacactccacacatttccagtgaaattgggaaaggcatcttgcatgcctttccataaacctactaaatctcca

SEQ ID NO: 34087 - DNA, 120 bp, synthetic construct
  source 1..120: mol_type = other DNA
ttacagcagaaaactttttgaccatacttttcctactccagtgtaacaataacggaaaaagttttaccctccccaccagcctacagcttcagtgggacctacccagaagttaagattcta

SEQ ID NO: 34088 - DNA, 120 bp, synthetic construct
  source 1..120: mol_type = other DNA
ataaagttaggggatagtgagtgactgaggatatgggctagactgatacgaaatggaatttaacatcctgtcctttgtaagaagttgagggcggcctgtcagcagataataggtagttta

SEQ ID NO: 34089 - DNA, 120 bp, synthetic construct
  source 1..120: mol_type = other DNA
acaacactgagataccactatacacctgatagaatggccaaatccagagcacctcaaatgtaaatagaataaaccttcgaattagaagtcagggatcgattatcaggtctagctgcatgc

SEQ ID NO: 34090 - DNA, 120 bp, synthetic construct
  source 1..120: mol_type = other DNA
ctggaaataactcgttgcctatatccttacacacacatgcacaccttataacttcagatagcctttccttgtttggaatacggtttctcttcctattaactttcacctgcaacttggaga

SEQ ID NO: 34091 - DNA, 120 bp, synthetic construct
  source 1..120: mol_type = other DNA
tcataatctaattttagaacattttatcatcccaaggagaagccccatattcattagcagtcactccccattcccacccctttccctggccctaggcaaccacttaacttacatttcttt

SEQ ID NO: 34092 - DNA, 120 bp, synthetic construct
  source 1..120: mol_type = other DNA
tttagtatgtcctgcacttggagaatcaccagtactacaaatcatcatgagaaaggatgtgggaatactgaagcttcctttaaattctctttgagcctcactggttgggagtttctgagc

SEQ ID NO: 34093 - DNA, 120 bp, synthetic construct
  source 1..120: mol_type = other DNA
tgaggtaggtgttattattaattattgacatagatagggaaacctttgggagtccccaagagctcccctagatcaaatgattcactaggaggactcacaggactcagcatatagtcatac

SEQ ID NO: 34094 - DNA, 120 bp, synthetic construct
  source 1..120: mol_type = other DNA
acacacacacacacacacaaactcttttctgaacagaaaccaaaactaaaagatgaagtgactttccttaaagatacttatatagtaagcgtggcagtcaagattaaaacccagaccctc

SEQ ID NO: 34095 - DNA, 120 bp, synthetic construct
  source 1..120: mol_type = other DNA
ggattacaggcgtgagccaccccacccagccggaagtaaactgttacatcaattttagttgaagctcagatatttaaaaaattacaaacagttggattcccggcatctagaaaacatgtt

SEQ ID NO: 34096 - DNA, 120 bp, synthetic construct
  source 1..120: mol_type = other DNA
aaatatttttctttattttctttattttcaactacaaccccccaggggcctgatttggccagctggcagtagtttacccactcctgctctaggaagaaggtgtggttccttgacaaatta

SEQ ID NO: 34097 - DNA, 120 bp, synthetic construct
  source 1..120: mol_type = other DNA
agagtaccactgtccgattcatagggaccacacttagatgataaaaggcagaagtgcatcttcaattatgtatatagacatcctttcaaaagcaaagaagattatagaaaggttactagt

SEQ ID NO: 34098 - DNA, 120 bp, synthetic construct
  source 1..120: mol_type = other DNA
atacgaaagtattggcaaactcaactaaggaagtttacaggaagaagggtagaacatactataagactggccttatcagtagaggtttaacatataaagactgtggtcaggaaaagcagc

SEQ ID NO: 34099 - DNA, 120 bp, synthetic construct
  source 1..120: mol_type = other DNA
taaaaaggaatccaaagttaaattggaaagtatttggaaccaaattaaaatgaaaacatcctctgccaaccctgattccacgctgattttagcccagtgaactgatttgggactgcggcc

SEQ ID NO: 34100 - DNA, 120 bp, synthetic construct
  source 1..120: mol_type = other DNA
aagctagcagtgctcttcacagcagaaatataggccacgaaagagtgggaagatatattcaaagtgccgaagagaaaaaaccctgccaattaatactttacccagtaaagctatccttca

SEQ ID NO: 34101 - DNA, 120 bp, synthetic construct
  source 1..120: mol_type = other DNA
tccatctaagaaaagctcaggatctgatggtgtcactgctcctaccaaacgtttaaagaactaataccaatccttctcaaattcttccaaaaaatggaaatcatttcacaaaattcaaca

SEQ ID NO: 34102 - DNA, 120 bp, synthetic construct
  source 1..120: mol_type = other DNA
cagcagcagcatcagcagcagcaaagtatccccacagaaaatgaaagcatgtcagaaaaatgtgctcaaaaaacaggtcaaaatcataaccgactatttaaaaatgagctaaacacattt

SEQ ID NO: 34103 - DNA, 120 bp, synthetic construct
  source 1..120: mol_type = other DNA
tgtaaccagttcattgattctgctgtcagttgtcttcctgtttggtgagctgaaaaaaaaaaaaagctctgaaaataagaatctcggtctattgtctccctctccctctccctctccctc

SEQ ID NO: 34104 - DNA, 120 bp, synthetic construct
  source 1..120: mol_type = other DNA
ctcggtctattacattaagtaaagagagctaactatactcagaacctataatctttaagtaatggctacacacaaaaaaattcagacaggttttcatcatcaattttaggtttactacca

SEQ ID NO: 34105 - DNA, 120 bp, synthetic construct
  source 1..120: mol_type = other DNA
ttttcattactatacagcatggctgtcaaagggtggtccctgaatcagcaccatctgggaacttgtaagaaatgcaagccatgggttggagccaagatggctgaataggaacagctccag

SEQ ID NO: 34106 - DNA, 120 bp, synthetic construct
  source 1..120: mol_type = other DNA
cattcccaggtaagcaaaaagtgagagaatttcttgttagccaatctgtcttataagaaatacaaaaggaggttcttcatgctgaaagcaagtgacactagagaataatttgaattcata

SEQ ID NO: 34107 - DNA, 120 bp, synthetic construct
  source 1..120: mol_type = other DNA
tatcacctctctcctaaccccaggctgcacagctcaacaagactccaaaagagaccccttccttccatttaaggagagaaaatcgaagagtggggagaactttgtcttgcatcttggata

SEQ ID NO: 34108 - DNA, 120 bp, synthetic construct
  source 1..120: mol_type = other DNA
aaagactccttttgtttgagaaaagcccaggaaaagtaaagaggactttgtactgcactctaggtaccagcttggctcttggggtccccaaatccaggtgtagcctcttggacagtattt

SEQ ID NO: 34109 - DNA, 120 bp, synthetic construct
  source 1..120: mol_type = other DNA
atggtacatgtaatcttttagttctttgaaatatctgaagcatatggcaagcttaagatttgacaaaactcagtggtaggtacacagatgttcattatattattttctatacttttctgt

SEQ ID NO: 34110 - DNA, 120 bp, synthetic construct
  source 1..120: mol_type = other DNA
ccatggaaagcaacaagggagagagaaagcaacaaaagaaactgttaagaaaactgggagcaggcctgaagaaaacaaggaaagcttctgagtctctaccacctttccaaaaaggaaaaa

SEQ ID NO: 34111 - DNA, 120 bp, synthetic construct
  source 1..120: mol_type = other DNA
gtttatgttacacaagccccccacccaactctccaacgtgcatacatcctattttctagtcagttccttgcttcttgcttcttggtctcctgcatctttaagagaataattttttccctt

SEQ ID NO: 34112 - DNA, 120 bp, synthetic construct
  source 1..120: mol_type = other DNA
agtgagaggttgcagaaaaagtgtcttcgctcggcagaggttacaggtggcatctcagaaagagctttgaggctacaggctgtagtcgggaaggggatcggagaactgtgtgaagggaca

SEQ ID NO: 34113 - DNA, 120 bp, synthetic construct
  source 1..120: mol_type = other DNA
cttttcattctcattacttcagccataatatatctgttaacatcactatctccagccccatacctctcttcagggctccatacctgtgcttctagttgtctgccagacatgtccattttt

SEQ ID NO: 34114 - DNA, 120 bp, synthetic construct
  source 1..120: mol_type = other DNA
tttaaaaattatcatagaaggtttccagggttgaatcaagaaacatggctgtcactttgggtctctggctatagagccagcagaggaacctccattcctgaaaaacagagacatcacaat

SEQ ID NO: 34115 - DNA, 120 bp, synthetic construct
  source 1..120: mol_type = other DNA
catgagccaccgcacccagccagagaaaatttttaacctgagggttaaatgaaagaaggcatgcgtagtacttattagtctctctcacatagccagtactcattaagtgttagaagctac

SEQ ID NO: 34116 - DNA, 120 bp, synthetic construct
  source 1..120: mol_type = other DNA
acagctaaaataagtccagagcataatttaactctggtaggaaaccaccccagggtattcactgaccatcagccggttctttttccatctaggaataggcataaggatcaaacacacaag

SEQ ID NO: 34117 - DNA, 120 bp, synthetic construct
  source 1..120: mol_type = other DNA
acaagccaccagtttgcaacttgtaactaaggccatatggggacccatatagttaagaatcatcttataggtaaaaatgtcttaaggagacacatcagccagatacaatgtatggacctt

SEQ ID NO: 34118 - DNA, 120 bp, synthetic construct
  source 1..120: mol_type = other DNA
tctcccagactacctcaaatggctaaggacaacctgttagctatttctctcttgagcattagctgtcatttggtgcagttagagggtttcctatgaagagtaggattagatagtactgct

SEQ ID NO: 34119 - DNA, 120 bp, synthetic construct
  source 1..120: mol_type = other DNA
ccaagctctcctacttatgagttttgagactttgggcaaataaatctctgtgttgtgccttggtttcttcttctgcaaaatggagcataatgctagtgcctactttgcagagatgatgtg

SEQ ID NO: 34120 - DNA, 120 bp, synthetic construct
  source 1..120: mol_type = other DNA
agattggaaaagtatacaggcagcacagtatcagcctctaggccaaatgaaaagccgtaaagaagtggctaagtctaattttttttttttttgatggggtctcgctctgtggcccaggct

SEQ ID NO: 34121 - DNA, 120 bp, synthetic construct
  source 1..120: mol_type = other DNA
gaaatttaagagtaaacttcacatttcctctgtggacactctgtggttctcagcaggatcatgatggctgtttgacatcacaaccaggttgaaaacattagattccttatgcctgaccca

SEQ ID NO: 34122 - DNA, 120 bp, synthetic construct
  source 1..120: mol_type = other DNA
atgaaacggagttcagtagttgtccatttacctagatatcaatcccaaacagtaggctgtctccaagaagtacacccttaacggggacctccttgcccttttgccctttaatttttgact

SEQ ID NO: 34123 - DNA, 120 bp, synthetic construct
  source 1..120: mol_type = other DNA
caaccagattttttcatgcttcagatgttttctaatgccctctttctctgatttagctgtggccagaagagctccgaagagacaggcgaggtgagtaggagaattaatgaaactttactt

SEQ ID NO: 34124 - DNA, 120 bp, synthetic construct
  source 1..120: mol_type = other DNA
gcatataaaggaggtggtagagggagtatatttacatatgattgtgtctcttgaatttcagatgagagtccggagtgttgtcatgtgaagcctgccatccaggaacctccaatagttatt

SEQ ID NO: 34125 - DNA, 120 bp, synthetic construct
  source 1..120: mol_type = other DNA
ccgaggaaaaggcagacaaagaccaaaaatatagtggagccaccaaggaaaaggcagacaaagaccaaaaatatagtggagccactgaggaagaggaaggcgaaaaccaaaaatgtatct

SEQ ID NO: 34126 - DNA, 120 bp, synthetic construct
  source 1..120: mol_type = other DNA
ccccctcccccgccaggttcccttacgtcctcttgtactgaactcctcgtcttaaccctcagaccctggcaaccatcaatctgttttgtgttcctagagttttgccttttccagaatgtc

SEQ ID NO: 34127 - DNA, 120 bp, synthetic construct
  source 1..120: mol_type = other DNA
tggctgaacaggatatggagggaacccgcttggctgcagctccggagctccaaaggtggcagctgttcatcttgtaggaagatgctggctccaacctgtgaaacagagtaggctcaggga

SEQ ID NO: 34128 - DNA, 120 bp, synthetic construct
  source 1..120: mol_type = other DNA
gatgtgcggagtgcggtggggagggagggggcggacgcagaaatcagtttaacctggacacggatcccaccatctactgtggacctctatttctaggagccacacaaagcattacccgag

SEQ ID NO: 34129 - DNA, 120 bp, synthetic construct
  source 1..120: mol_type = other DNA
cacggcctcgatttgggggcgccaggcagccgcgagggcgagagcaggttcacagatcccgaggtcttcagcttcgagtctgagagcgaattgatagagcagggaaaggtggtgctctgg

SEQ ID NO: 34130 - DNA, 120 bp, synthetic construct
  source 1..120: mol_type = other DNA
ttaggagggttagagataccgcatgtgttttccctttaactgctgcctggtatggcttgtacggtgtttgcttgctggctggcttatctgtctttgaaacacgttctgaatgaacggttc

SEQ ID NO: 34131 - DNA, 120 bp, synthetic construct
  source 1..120: mol_type = other DNA
cttcttcagtgctattctctctccccttcagcaggaactgatggcctcctttgagcaccctggtcctttgagcaacctttcctcctgcagttcactgtccctgtttgtcctgtcactgtc

SEQ ID NO: 34132 - DNA, 120 bp, synthetic construct
  source 1..120: mol_type = other DNA
ttgagcgagaatggactgattcatggagtggaagcagtggtgaaggatccatgaaggatcgaattcgctaaagcagggctgggatctaccctttcacaagaggtgttgttcaagtctaac

SEQ ID NO: 34133 - DNA, 120 bp, synthetic construct
  source 1..120: mol_type = other DNA
aacatgtacaccctaggcccatggtacaccgcatggtcgggcggagccttctggttctaggggatgtaagtgcagaatccgaggctcctcggattagaggaatccatctgggtcccattg

SEQ ID NO: 34134 - DNA, 120 bp, synthetic construct
  source 1..120: mol_type = other DNA
ccaccctccaggccgaaactggccccacaaacggctaccttgtcgggggagctcatggcgccagtctgggcagcctgggctgcggggagacggtcgtcctggtaacggcagaaggggaga

SEQ ID NO: 34135 - DNA, 120 bp, synthetic construct
  source 1..120: mol_type = other DNA
ccacaggtacatttccagatgagacctcttactctgtgggcagaaaagagcatctcctcttcagactccagctagagccgaaggtgtgtgagtctctgcacacgcccaccagccagagtc

SEQ ID NO: 34136 - DNA, 120 bp, synthetic construct
  source 1..120: mol_type = other DNA
tggcccctcactttcaattttctgcacgagtttgtgtaaaatggaagatatgtattcctaggatgtttgtcagaatgtggtggtgaatcctggagttcattcgtggaaagcctttgacta

SEQ ID NO: 34137 - DNA, 120 bp, synthetic construct
  source 1..120: mol_type = other DNA
cctcttttattttgttgttgggctcacatcttgcccaacatcagctgttgtcaacaacacctgtgctcatctaatcatttagctcaggtgtctcaagcactttttacatgccaaacagtg

SEQ ID NO: 34138 - DNA, 120 bp, synthetic construct
  source 1..120: mol_type = other DNA
agtcttggggactgagccttcaacctgtgggatatgatgctatcttcaggtagatagtatcagaattgaactggaagacatctgtgtctactgtagaattgattgcttatttggcgaatg

SEQ ID NO: 34139 - DNA, 120 bp, synthetic construct
  source 1..120: mol_type = other DNA
ccacctgtgaaattcatccattgcactcatctgctcttccatatcttgtctcaaacttgagaaaactgggatcaaaatccagttagttccttttgagctgtaaggggggaaatacaggta

SEQ ID NO: 34140 - DNA, 120 bp, synthetic construct
  source 1..120: mol_type = other DNA
ccctgcacagtaccagccacctagtaggtactcagtcgtgtttcttgaatgagtaaatttatgaaggaatctagtcacatacagccagcttaggcacagatagaatcatttactatgcat

SEQ ID NO: 34141 - DNA, 120 bp, synthetic construct
  source 1..120: mol_type = other DNA
tttatgattctttaattgccctggaatgcagacagggtggaattattattggcctcattttgttaatatagaaagctaagttcagagggaacacacagcgaggtcgtgatgaggcagagt

SEQ ID NO: 34142 - DNA, 120 bp, synthetic construct
  source 1..120: mol_type = other DNA
ggtctgattacaaaggaggagttcaacaaccctgcctgcttttactcactttgaaatcagctttgctcttcctgcctgcttgtattctctttatgacagggtataaaggacctaaaagag

SEQ ID NO: 34143 - DNA, 120 bp, synthetic construct
  source 1..120: mol_type = other DNA
ggacttggattgagagcaagcagattagccacttccataacatactttaaggctgtttcaacagaactacagaactcattagaagacacagccccaagccttataaaagtccaagacctt

SEQ ID NO: 34144 - DNA, 120 bp, synthetic construct
  source 1..120: mol_type = other DNA
cctattcactgaaggaaaagacatctgtagactacagggcagttgatcaagcactttcccattaaattcccagaggcttaaagcttggtcattgctcttaaggaccttataagtgtgggt

SEQ ID NO: 34145 - DNA, 120 bp, synthetic construct
  source 1..120: mol_type = other DNA
ctaaatatgtctcttatcagacacatgatttgcaaatatctactcccattctgtgggttatctttgcactctcttgatagtgtcctttgcagcacaaagttttaaattttgacgaaattc

SEQ ID NO: 34146 - DNA, 120 bp, synthetic construct
  source 1..120: mol_type = other DNA
aagaaatgtgtagaagaatttcagtatttagtcatcaaatgtaatactgagtttatgatcacttgcctgggaaaaatcctggggagaatttgtgcagggacacggtcatgactttggagg

SEQ ID NO: 34147 - DNA, 120 bp, synthetic construct
  source 1..120: mol_type = other DNA
gtgactatagagagaaattttgtgtttcagcagaaaactctgcctcatctatggcacaccactctaggttatcagagtctagtcctattcactgtctttgagctatttggtacctactta

SEQ ID NO: 34148 - DNA, 120 bp, synthetic construct
  source 1..120: mol_type = other DNA
acaagaagccccttcccttccttcctccctcaacatgcaaatttgtattgagtactctgttctacactctgggaataatgatgaacaggacagataatacctcattctcaaggatctttc

SEQ ID NO: 34149 - DNA, 120 bp, synthetic construct
  source 1..120: mol_type = other DNA
ttgcctgatcatgtccttttcccatttttccattaggtagtttatcttttttcaattgactttcaagagtttttcgtgttttgtggatattacccttttcgctctcatatgtatgacaaa

SEQ ID NO: 34150 - DNA, 120 bp, synthetic construct
  source 1..120: mol_type = other DNA
acattatgtagtgggcatgagagccaggtgggtgagctggtgagaacttgggtacacacttgcacaagcaaactttgggtcttttttaaggtgaaagtacggtaactattgtggtattta

SEQ ID NO: 34151 - DNA, 120 bp, synthetic construct
  source 1..120: mol_type = other DNA
gggatgactgcattgtctctggctgcatttgcaccacaatcacagagctgagtagttagatagagaccacatgtgacctacaaccctaatgacaaaaaaagatatgattttctggtcctt

SEQ ID NO: 34152 - DNA, 120 bp, synthetic construct
  source 1..120: mol_type = other DNA
aaattgtaccagatatgaaattccaattctactgatattaatttctagtaaaaatagcaacaaacaaaacactgagctcaaactagaaaacgttgagtaggatgtaggatttgggggagg

SEQ ID NO: 34153 - DNA, 120 bp, synthetic construct
  source 1..120: mol_type = other DNA
tggtaaccattatatacaagacagcaatgacaattcttgcacacatctccttgtgcataggattgggtggttctctaggattagggttgccagagttagcaaataaaagtacaggaaacc

SEQ ID NO: 34154 - DNA, 120 bp, synthetic construct
  source 1..120: mol_type = other DNA
atgaggagaaggaagcttgaatgcgtcactcagcctgagtatgcctagcaagcacactgctctcagcttgggtcatcctctggtggcccctcttcaaaagtgtaaagcattttggccttg

SEQ ID NO: 34155 - DNA, 120 bp, synthetic construct
  source 1..120: mol_type = other DNA
atgaaatttaaagtacatttgcaaacaagaagaagaagaggaagaagatgaaggaggaggaggaggagtcggcggcgaaggtgaagaagaaaagaaagcctgctagaaagtttggtttag

SEQ ID NO: 34156 - DNA, 120 bp, synthetic construct
  source 1..120: mol_type = other DNA
tcgtctaaaaagcatttcgtctttggggagtccatgaagctcatcaccaaagctagtgtgcagcaggagtatctggtgcacaaataggtgtcccacagcaatcccacgctctaggtattc

SEQ ID NO: 34157 - DNA, 120 bp, synthetic construct
  source 1..120: mol_type = other DNA
aattacagtggccagcaccagcgtggttttcaaaggaccagtattctccatgccttagaatggtcctggtgggtatagtgatcataataactagcctaaaattatcttcagttcttagag

SEQ ID NO: 34158 - DNA, 120 bp, synthetic construct
  source 1..120: mol_type = other DNA
tgcaattaatatattgaagccccgacccctaatgggactgtatctggagctagaggctttaggaggcaattaaggttaaatgaggtcataagggtggagccctgctcctacaggattagt

SEQ ID NO: 34159 - DNA, 120 bp, synthetic construct
  source 1..120: mol_type = other DNA
tgttaccaagggaagaaggacgtgttctttttgagggtaggaacatcagagatcaaaaggacaagtgacaggctgagcaaggaaatggtggctccagaggagagccataatgcaaaggcc

SEQ ID NO: 34160 - DNA, 120 bp, synthetic construct
  source 1..120: mol_type = other DNA
atcaaccaccttgacggagcaaatggttgatgggccaccttggactgtgctatgtggcctgcatctatctgatcccacctctcttccagcaggcccaggactcgagtctgcctggccttg

SEQ ID NO: 34161 - DNA, 120 bp, synthetic construct
  source 1..120: mol_type = other DNA
aatagggaaaaatcattctagccagcactaacattgcttccttcattcgtcgggtgttcgctgggggcctgttttgtgtacaccaggatcagttgcaggtactggggatacagcaatgaa

SEQ ID NO: 34162 - DNA, 120 bp, synthetic construct
  source 1..120: mol_type = other DNA
ggctctggtctaggaagcatcagttttcccaccctacttctagttatgattggtgtcaggaggaagaaagaatttggggatgcaccatagggtaaatatattaaaactgtttaatccctg

SEQ ID NO: 34163 - DNA, 120 bp, synthetic construct
  source 1..120: mol_type = other DNA
aactttttacatttttgccaacctctcccgttgccccacacccccttccctccccagcttctggtaaccactactctagtttctgcttctgtgaaatcaactttttaagattccacatct

SEQ ID NO: 34164 - DNA, 120 bp, synthetic construct
  source 1..120: mol_type = other DNA
gcaatcttggtagcttgtatgtgttcaggaacttatctgtttcttctagattttgaatttcttggcagatggttgttcatgatagtctcttatcatcatctccaccgctgttgtgccagt

SEQ ID NO: 34165 - DNA, 120 bp, synthetic construct
  source 1..120: mol_type = other DNA
ggaggggacttcccatgaagattcccagactgatggggaggtcacatgtccacttccagttccctccttccacctcagaaattgtgggtctagagaaattctctgtgagtagcattatgc

SEQ ID NO: 34166 - DNA, 120 bp, synthetic construct
  source 1..120: mol_type = other DNA
tggttatttcctgtgtaattgccaagtatgttcaacgtagcttctcagcaacccatcagctatatgaatcttagcagaaccgaagactagacccgatttcttcagcctttcactgaattc

SEQ ID NO: 34167 - DNA, 120 bp, synthetic construct
  source 1..120: mol_type = other DNA
tactctggcagtctgtagaattacctcaggtgaccatggggagcactggaggaggggcacgacagatgcagttttttccccattacgtcgcaccatcattttaccagtcaaaacaagtcc

SEQ ID NO: 34168 - DNA, 120 bp, synthetic construct
  source 1..120: mol_type = other DNA
gtgtcgctgtaacagaatacatgagactgcgtgatttataaataaaaaaatatttatttagctcatggttctgcaggctgggaagttgaagggcatggccctagcttcaggcgagggctt

SEQ ID NO: 34169 - DNA, 120 bp, synthetic construct
  source 1..120: mol_type = other DNA
acagagccattgtggggagataggtggtacctgtgccatcgaaaaagctgcagagacatgggatctaaagaactccatcactccataattaacagctctgtctgttcagtacctatgggt

SEQ ID NO: 34170 - DNA, 120 bp, synthetic construct
  source 1..120: mol_type = other DNA
taaggaagatgctagctctctcccttcacaaccccaccaccaccaaagctgaccacccccagttcagccgacgtgttgaaagttacatcaaatgccacaaagcaaaaacagtcaagcgtg

SEQ ID NO: 34171 - DNA, 120 bp, synthetic construct
  source 1..120: mol_type = other DNA
gcctgaaaggagggacaaaagaaattggccaagaaatagagaaaagggagagcatcacaagtagaagcccaagacaataccgtgaggttttgcaactgaaaatatgtaggcctggttttc

SEQ ID NO: 34172 - DNA, 120 bp, synthetic construct
  source 1..120: mol_type = other DNA
gtggggtctttaggtttttccaaacataagattatgtcatatgcaaacaaggataatttggctttttcctctgtaattttgacaccctttatttctttctcttgtctgactgctctagct

SEQ ID NO: 34173 - DNA, 120 bp, synthetic construct
  source 1..120: mol_type = other DNA
cactcttcatttcattaattcatgctctaatcagtgtccacttttctcttcgatttgcttaggtttagtttgctctttttcccagggtctcaatgcggagggtaaggttattgacccgag

SEQ ID NO: 34174 - DNA, 120 bp, synthetic construct
  source 1..120: mol_type = other DNA
tctattcattattgaaagcaaggtattgaagtctcaaacaatgattgctgaattatctattccccttttcatttctgtcagcatttacttcaggtattttggtgttctgttgtgcagtgc

SEQ ID NO: 34175 - DNA, 120 bp, synthetic construct
  source 1..120: mol_type = other DNA
taagggaagtctgctgatgatacattgactcagcttttctttatcaggggatagctttacttcatcatcatttttgagggagagtatttctggatggaacattcttggttaactgtttgt

SEQ ID NO: 34176 - DNA, 120 bp, synthetic construct
  source 1..120: mol_type = other DNA
tttggtgctattaatcctgctgtcacttgtttgtttagtgacttttctgaactacttctgtaaagtctgtatcctctgttatgtgtggctactgaatgccctgcttggttggcttagtgg

SEQ ID NO: 34177 - DNA, 120 bp, synthetic construct
  source 1..120: mol_type = other DNA
tttgccagttttctcattgcatttacgaaggggagaatttttagaggtccttacgttgctgatgttgctgactctctgcacgagttttcattatacctatccatgagggtgtctgttgtt

SEQ ID NO: 34178 - DNA, 120 bp, synthetic construct
  source 1..120: mol_type = other DNA
ttaagagtcagacaaattttactctgaatccaggctctgccactttctttcccgtgaccatggataaatgacttagcttccctcaacctcagattcctaacttgcaaaactgaggataag

SEQ ID NO: 34179 - DNA, 120 bp, synthetic construct
  source 1..120: mol_type = other DNA
tttcagagatgccctgcttagagaggaggaatctagagaggcagtcatccttgctgagctgcggtggactccgcccagttcaaacttcccagaggctttgtttacacagtgagggtaaaa

SEQ ID NO: 34180 - DNA, 120 bp, synthetic construct
  source 1..120: mol_type = other DNA
catcatactgaatggagaaaagctgaaagccttttctctaagaacaggaacaagagaaggaggcccactctcaccactcttatttaacatagtactgaacgtcctaccagagcaattagg

SEQ ID NO: 34181 - DNA, 120 bp, synthetic construct
  source 1..120: mol_type = other DNA
ctggaggattttatgttaagtgacacaaggtaggcacagaaagacacaaataccacacgttctcactcatatgtggaagctgaaggaaactgggctcatagaagtagagagtagaattgt

SEQ ID NO: 34182 - DNA, 120 bp, synthetic construct
  source 1..120: mol_type = other DNA
acactatatataaaacaaacataaggctggaagtggagagaagaaagtagaccaactggggacctcagaacgacatggtggtgagttccttgggttttgtttttgcctgatatatcccaa

SEQ ID NO: 34183 - DNA, 120 bp, synthetic construct
  source 1..120: mol_type = other DNA
actaaggccaagaggtaaaattctgttggagagcagaatatccgcatgtcatcgaaatatcctgacagactacttattaatcacaaagggagagaagtaccttcccagtgtagtactctg

SEQ ID NO: 34184 - DNA, 120 bp, synthetic construct
  source 1..120: mol_type = other DNA
caaaataccaagtacatgagttataaatgcatgcacaccaaatatttcacacccaaagggagactaatctgggaaacaagccctggggagcataaagctcaacgatcacttcacgatttc

SEQ ID NO: 34185 - DNA, 120 bp, synthetic construct
  source 1..120: mol_type = other DNA
gagtgcatgtgcatgcctgaaagtggggtctatggtgaagtgacggtaagcaaggagaataatgactgcattgaatgggtatgggatccattccaagagtttcttgggagggggctatgt

SEQ ID NO: 34186 - DNA, 120 bp, synthetic construct
  source 1..120: mol_type = other DNA
gtcaccaatgttgtctaccaagtgtttgtaggaaggagagagctgggggacagggcaatcgaagagctccatggtgagatgagacctgcgactggaggtggggtgaagtggggtggggtt

SEQ ID NO: 34187 - DNA, 120 bp, synthetic construct
  source 1..120: mol_type = other DNA
ttttctatttgtgagactttggacaagtgactttatgtgtctgaacctccatttccctatggatgtactgaggacaatattctatacccatagcattgaaaagggaacgggcacaaggcc

SEQ ID NO: 34188 - DNA, 120 bp, synthetic construct
  source 1..120: mol_type = other DNA
ttctaactgaaaaatcagagtcagtaagttgaatctccttggggccaggcacccaagctcctcagtatgactcccgagatggtagttgagggctgtttattgaatcttcggtttattgag

SEQ ID NO: 34189 - DNA, 120 bp, synthetic construct
  source 1..120: mol_type = other DNA
cccagaggaggaggcctcaatagagcactgcctatttggtatccagtttctgaatgtgcaaaatggttaacgtccaaaacgcttaacgtctttttttaaagccttcaggtgttttataag

SEQ ID NO: 34190 - DNA, 120 bp, synthetic construct
  source 1..120: mol_type = other DNA
gccaatcaggacaagaagaatcaaacaggagaaatgagttagactcagaccctgtttttgaaggacccatgaaatatgaggaagcatcactaccttttatttattctgtgcacaccgcac

SEQ ID NO: 34191 - DNA, 120 bp, synthetic construct
  source 1..120: mol_type = other DNA
aacctgagatagagtctggaagctcctgaaaacgaaagtgcacagcaggtaagagctgcagttatgtaggtagatgccaggggcaacaagacattacaaaaggtttgagaggtcctagaa

SEQ ID NO: 34192 - DNA, 120 bp, synthetic construct
  source 1..120: mol_type = other DNA
ggaattttcctacccctgtcactggaatcccctcttggttttacaagggccaatgtgctgtagcttgtccagtgatctctacaattctcacagaggtatttaggtttatataatgttgtt

SEQ ID NO: 34193 - DNA, 120 bp, synthetic construct
  source 1..120: mol_type = other DNA
ccggttgcccccatttctctagcctttaagaaatctgttgacaaaaaagaaaagagaaatctgttgaatataaccgtgtatggatgggttttgccaattctgagatccctaccactcacc

SEQ ID NO: 34194 - DNA, 120 bp, synthetic construct
  source 1..120: mol_type = other DNA
tctgagtgggcagaaaccaaagcctggtcagagactttggggacctggaaaggaaagtgcatgagagaataggcactgggaaactacacctcttcccaatacgacaagtgccccttcagc

SEQ ID NO: 34195 - DNA, 120 bp, synthetic construct
  source 1..120: mol_type = other DNA
actccccgcacaggattttgtgccaccagcactcaattccattgtcagtctcttctatgccctatattcaattttcccctcacatttcatgctggttcatgctgatttttttcttgtact

SEQ ID NO: 34196 - DNA, 120 bp, synthetic construct
  source 1..120: mol_type = other DNA
tggttggctgtttgttttttaacagcgctggctaggaaatttagtaccagatctaatagcgacagcaaaattgggcttctttgggttgttccggattttaaaaggaatgctgccagcatt

SEQ ID NO: 34197 - DNA, 120 bp, synthetic construct
  source 1..120: mol_type = other DNA
caatctgatgcctagattcacgttgtctcattgctttatctctcagtaatttttttcttgcctaaccacgtagcagttccaaacacttcacccagttacttcagcatgcacctcctaaac

SEQ ID NO: 34198 - DNA, 120 bp, synthetic construct
  source 1..120: mol_type = other DNA
tatgaggaaccttcacactgttttccataatggctctcctagtttacatctggaagattttctctttagcccatggattgagtggcatccttaacactgagtggtggtgaaaatcctgac

SEQ ID NO: 34199 - DNA, 120 bp, synthetic construct
  source 1..120: mol_type = other DNA
atcctcgccaaaacttatctttttgtccttttcataatggccattctaactggggtgagaggatatctcacggtagtttggacttgcatttccctgatgattagtgaggttgagcaatct

SEQ ID NO: 34200 - DNA, 120 bp, synthetic construct
  source 1..120: mol_type = other DNA
tctggatttttccccagttcctaaggtatgtccacctccactgagttaatattcagaaaggtatatttcatctttaataaccaaaaattagtactcctgtgaaagctgttaaaatgacaa

SEQ ID NO: 34201 - DNA, 120 bp, synthetic construct
  source 1..120: mol_type = other DNA
tttgtgaaaaatatttggaggcaattgctcaatattgcagctgcctcaggcaatggataacacttggggcacacaataggctaaccgataccttaaaaggaaatctaggtaacgaggtgt

SEQ ID NO: 34202 - DNA, 120 bp, synthetic construct
  source 1..120: mol_type = other DNA
gcgagactccgtctcaaaaaaaaaaaaagaaatatctcgggtcaataaccttaccctccgcattgagaccctgggaaaaagagcaaactaaacctaagcaaatcgaagagaaaagtggac

SEQ ID NO: 34203 - DNA, 120 bp, synthetic construct
  source 1..120: mol_type = other DNA
taacatcatatttaatggcagaagaccgaatcttttacccttaatgtctgaaacagcacaaggatgcctgatgtagccactactactcaacaatgtattgagggttgtggccatggtacc

SEQ ID NO: 34204 - DNA, 120 bp, synthetic construct
  source 1..120: mol_type = other DNA
tacgagcaaaccaaactcaggagcacattaaaaggatcgttcaccatgactaagcaggatctatttctgggaagcaagcaaggatggttcaacacgtgcaaattaattaatgtgatgcac

SEQ ID NO: 34205 - DNA, 120 bp, synthetic construct
  source 1..120: mol_type = other DNA
gtcttcaatagatttactggttagcagtgtcatacatttaaagaaaacatagtagtagtcccaaaagaacacttttagaaaatacaggagggaacactttccagttcattttatgatggc

SEQ ID NO: 34206 - DNA, 120 bp, synthetic construct
  source 1..120: mol_type = other DNA
gacctgtatgcagaccactataaaatactggcgagagaaagtggagacctaaataaacagagatatataatgttcgttgatcagaagactcaggttaagatgccaattctcaagtaatgg

SEQ ID NO: 34207 - DNA, 120 bp, synthetic construct
  source 1..120: mol_type = other DNA
ttcattgaagtcctgttggtccctaccggcacatcacacactcctggaagcatgatcttcactcccttccttccacctgctgacctggtgagtctggcttccctccgttgtcctggaatg

SEQ ID NO: 34208 - DNA, 120 bp, synthetic construct
  source 1..120: mol_type = other DNA
agtgcctcagaagaaggtgtggggtcagaaattccacggctccaggctcacccagcacttctggtgaacagaagaccattggactgtgcgagtgagcaagagattaagcttgtttttctg

SEQ ID NO: 34209 - DNA, 120 bp, synthetic construct
  source 1..120: mol_type = other DNA
gtaatgagatcatgccagtgagggtcaacgtgggctttgcttgtttctgtgaccctgccagtcaattttattcattcactggccatctttagacacctctagtctcaatcacagaaaata

SEQ ID NO: 34210 - DNA, 120 bp, synthetic construct
  source 1..120: mol_type = other DNA
tccacttttcaaactgcaacctgacaaacacttaaaattataatgataccaatcgggtatcatatactgaggttctgacgctggtagtgtgaattggcacagattcacgctacgcgccaa

SEQ ID NO: 34211 - DNA, 120 bp, synthetic construct
  source 1..120: mol_type = other DNA
tctgacaataagtcctttcagacaccacatgtacatcgcacttctcagaaaacatgaacttcactggcattcctgctgctgctgagtcctgatctgactgtatggagaaagccgcatccc

SEQ ID NO: 34212 - DNA, 120 bp, synthetic construct
  source 1..120: mol_type = other DNA
acctagccaaatgggttactgtcctcgtaccttggagcagtactgcatgtcccccagtcacttttgcaatagcacaatggttgatggacagtaaacatgctactggtttcaaacacttca

SEQ ID NO: 34213 - DNA, 120 bp, synthetic construct
  source 1..120: mol_type = other DNA
gactgggaagtagaggatccagttaagccatacccggatccctgatctacagaactctcagagaaaaactgcttatcattttaacttgatatgcttggggtagttttttatgcagcaatc

SEQ ID NO: 34214 - DNA, 120 bp, synthetic construct
  source 1..120: mol_type = other DNA
aaccagatgttttcaatgtctggactcagagctgtcttcctggaggtgctgaggccttttctccagtccagaaatgaatctgggctggctgaatgtgggtagggcaagggatatgagact

SEQ ID NO: 34215 - DNA, 120 bp, synthetic construct
  source 1..120: mol_type = other DNA
agaagttcacccagacttgctgtaaaatgcaaaaatcaagtgccacacaatacgtgcatcctgagccagtctgtatcttatggccccataaaagacaagcgtatgtttctattagtgcat

SEQ ID NO: 34216 - DNA, 120 bp, synthetic construct
  source 1..120: mol_type = other DNA
tctggctcatccaagagccaagagcagctgctttccaaagagtcactttccactacacgtttactttattactattattttttaatctctcagctgtgaagtccaccaactgaggatcct

SEQ ID NO: 34217 - DNA, 120 bp, synthetic construct
  source 1..120: mol_type = other DNA
gaaagttaattaaggcaaacaaaactttgcagtatgcaaattgaaagctaaatcactgagaaagacaaatagaactggaacacagataccatgggcggcaggttctccctaaccccactc

SEQ ID NO: 34218 - DNA, 120 bp, synthetic construct
  source 1..120: mol_type = other DNA
agcttcctcttcagatcatctacctgaagttgctttgctcagtgcctggcctagagtaagcacttagtgagttttcctttgcgttcgtttcattattatagtgtacatcgcatctacatt

SEQ ID NO: 34219 - DNA, 120 bp, synthetic construct
  source 1..120: mol_type = other DNA
tgatgcatacttgctttgtgccctgatttgcccaatatgagtgtttctgtgataaacatacttgtacatatttcatcacctcccggggttcttatttctccaggactgactaccattcca

SEQ ID NO: 34220 - DNA, 120 bp, synthetic construct
  source 1..120: mol_type = other DNA
ttcctcaggttcacggttgttctatcatgtatgactgccaagatccagccatcactgcaaccacagaaaacagctttacttacccaaagaaggcagaggaggagaggatgagagaatacg

SEQ ID NO: 34221 - DNA, 120 bp, synthetic construct
  source 1..120: mol_type = other DNA
gctgcaggctgcggcgactcgcaccggcgcgctcctggcagcacttgccatcccaggtgacttgaactcgccagttcggatcccctgcgccagctcccgctcgcgcatcgggtctgtgtt

SEQ ID NO: 34222 - DNA, 120 bp, synthetic construct
  source 1..120: mol_type = other DNA
gttcgtgcacttccaaaagcaggaatctgcggagcgggccatcgatgtgatgaatggcatgttcctgaactaccgcaaaattttcgtcgggagattcaagtcgcataaagaacgagaggc

SEQ ID NO: 34223 - DNA, 120 bp, synthetic construct
  source 1..120: mol_type = other DNA
gtgctttgatgagtgaatccttccttgtcaagccaaatctttgctagcatcccggtggtctccttaactgcggacttgcaagatccacatatagacattttaaagacttttcctgtgtgt

SEQ ID NO: 34224 - DNA, 120 bp, synthetic construct
  source 1..120: mol_type = other DNA
ctttaattttcttctggtaacttgtctgctttgtgatttttttttcttgcaatgacgctgaattacttttctgacaacagggaaaaggacaggaagagggcacaggggaatggggtcata

SEQ ID NO: 34225 - DNA, 120 bp, synthetic construct
  source 1..120: mol_type = other DNA
gaagaaagtcagatgtgaccaattcaaaaagagtctgaacaatccttccctctattccttttcattccataaataggggtctcacgtttaccgtgagccagtggggccagatgtttaaaa

SEQ ID NO: 34226 - DNA, 120 bp, synthetic construct
  source 1..120: mol_type = other DNA
ctttttattctttatttttaaagttacgttgtggtcagtttctgccacctgcaaatggaatgtgttctgaccactacacactgtgacaggggcaaaaataaagagccctgtggagcctca

SEQ ID NO: 34227 - DNA, 120 bp, synthetic construct
  source 1..120: mol_type = other DNA
ttctagttccttgagatgcagtgttaggttgttattttgtgagctttctattttttgttgttgttgtaggcatttaatgctatcaactttcatttagtgttgcttttgttgtatcccata

SEQ ID NO: 34228 - DNA, 120 bp, synthetic construct
  source 1..120: mol_type = other DNA
agttttcttatctatacaatgaaggggctggaccagctgctctctgggggcccattagcttccaggtttctataatctccaggaaaaggagacccatacattccttggtaaatggtttct

SEQ ID NO: 34229 - DNA, 120 bp, synthetic construct
  source 1..120: mol_type = other DNA
tcaaattgtcataattggggccaagagcacacgtaataaggggctgagatgaccatttaacaattccccaatttttgtttttgttttcactgttaaagaggaatttttattaaagcaaga

SEQ ID NO: 34230 - DNA, 120 bp, synthetic construct
  source 1..120: mol_type = other DNA
agcagctgtagctgcaagacgtggacccattgtctgtgttgatgaattcaccaaatttttattccagtctattttgagacttctggaaataaaacaccttgataccgtttgccctagggc

SEQ ID NO: 34231 - DNA, 120 bp, synthetic construct
  source 1..120: mol_type = other DNA
ttgcagtaggttctgaacttgatgaacatctgtaattgagagctggcatttatttgaggtacttctgttggctcaaacttatcaaaagaacacaatagtgtcttatctatgaacagcttt

SEQ ID NO: 34232 - DNA, 120 bp, synthetic construct
  source 1..120: mol_type = other DNA
ttcactgctctccggagaaatagtaagagaatgttagctggaaatgaatattgagagaggttgctacgatctcctttagagagaactgaatcaggttagtggcataaatcgatgagggca

SEQ ID NO: 34233 - DNA, 120 bp, synthetic construct
  source 1..120: mol_type = other DNA
tctcaggagctacatttactttaaacttctctgagttagagtgccagagagacctctggagttggcagcttcttctaggccaggcaaaatccttattaccatgaaaaagagttctgaaat

SEQ ID NO: 34234 - DNA, 120 bp, synthetic construct
  source 1..120: mol_type = other DNA
gctgttgggatacttgccaacatgaaacccaagcctaacttcctgaagcagtataaaggtacatgccaggagtcataaatcaggtattttatttcctgagtgtggctagaatatcccttt

SEQ ID NO: 34235 - DNA, 120 bp, synthetic construct
  source 1..120: mol_type = other DNA
tagggctttaaggtagataaaggcagtaatcatgccaccttcccctagtcttctcttctctgggataaacaattctagcatctctaatcttcctacaattccattttcctcataatagtc

SEQ ID NO: 34236 - DNA, 120 bp, synthetic construct
  source 1..120: mol_type = other DNA
gggtagtgtgtgggtggggggtggtggggggaaatgacagttagtggttacaaaaaatcagaaataatgaataagacctagtatttgctagcacatcagactgactatagtaaaaagtaa

SEQ ID NO: 34237 - DNA, 120 bp, synthetic construct
  source 1..120: mol_type = other DNA
aatgaatgtcaggcctcaagagggtaatgtggtaatatcaaacaggtagcaaaaagtatgcattgagcacaaccaggacagtgacaagaaaataatttggggataaatacagatgccaca

SEQ ID NO: 34238 - DNA, 120 bp, synthetic construct
  source 1..120: mol_type = other DNA
caaaaggttgtacaagaaatcaaaaacactctaacagaaatgaagaacgtctttgataggctcatcagtagacaggacacaaaatagaaaagaatcagtgagcttgaagacgtatgtcag

SEQ ID NO: 34239 - DNA, 120 bp, synthetic construct
  source 1..120: mol_type = other DNA
aacctcccaagattgaatgaggaaaaaaacagaaatacagaacccaccaacaatgagttccaaaattgaatcagtaataaaaaacctcgaaacaaacaaacccaaaaaccccagaaccag

SEQ ID NO: 34240 - DNA, 120 bp, synthetic construct
  source 1..120: mol_type = other DNA
caaagtaggactacaccatcacctttcctgggtctccatctcactgatggcagacagtgggacttctcagcctccataattatgtgagctaattcctcaatgtaaataatgtaaataata

SEQ ID NO: 34241 - DNA, 120 bp, synthetic construct
  source 1..120: mol_type = other DNA
aaatcaaacactgtgttttaagaaccacacctagtggtgcgtttttatggtactgtcattctcaggtagagtgagaattaagtaccctgcttggggtatgtggaactatgtaggggcatt

SEQ ID NO: 34242 - DNA, 120 bp, synthetic construct
  source 1..120: mol_type = other DNA
agatgagataaagttcctgtggggaggggtggctgccttctctgtgattcagtcagctcagccattccagcctgccagctttggagagtgcaaatggcccagaggaggaaggacccccca

SEQ ID NO: 34243 - DNA, 120 bp, synthetic construct
  source 1..120: mol_type = other DNA
aggcagtccctctcaaacctggatgatcgtaatacttacttaggaagcataataaaaatatagattccagggctctcttcacatagcacaactttggatggaggtgcagaaatttgtatt

SEQ ID NO: 34244 - DNA, 120 bp, synthetic construct
  source 1..120: mol_type = other DNA
tacagtccaattatccccatccatctccctggtgtatatactcaaaataattgaagacagatattcaaacaaatacatgaatgtttgtaacagcactattcagaagagacaaaaggtaga

SEQ ID NO: 34245 - DNA, 120 bp, synthetic construct
  source 1..120: mol_type = other DNA
ctatgagatatcttcccaccccagttaacttggcttttatccaaagtcagggagtaacaaatactagagaggatttggagaaaagggaactcttgtacactgctggtgggaacacaaatt

SEQ ID NO: 34246 - DNA, 120 bp, synthetic construct
  source 1..120: mol_type = other DNA
gagatgagagactgaggaatttatgtggaaaaggcagattggggcagcagcagcagggaaggagatacaggaacttctcattgccttaaattacactataataatttattattctgataa

SEQ ID NO: 34247 - DNA, 120 bp, synthetic construct
  source 1..120: mol_type = other DNA
aataaaccagccacaagatttataaacacctatttaatcgtgggaaagagataaacttattattaggccttagatttgtgatggcagttattttgctatgtattaactacctcattatct

SEQ ID NO: 34248 - DNA, 120 bp, synthetic construct
  source 1..120: mol_type = other DNA
gaaacactcaagtagaaactgacaacttctggaggccaaatatggattagtttgagagtttaaaaatcctgacatcccagtcttagaggggcccctacactttcctaggttttacctcca

SEQ ID NO: 34249 - DNA, 120 bp, synthetic construct
  source 1..120: mol_type = other DNA
acacggtactgtaccaagaaccttgaactgggagtcagataaccttggttctagtcctaattactaattagatctatgctgttaagcaaactgcaacctcaggagagctcaattttctca

SEQ ID NO: 34250 - DNA, 120 bp, synthetic construct
  source 1..120: mol_type = other DNA
gagggacttgagagattgtgtaatctaattacccacacagtgcaggggattttttccccccagcattcatccatcttctgttcttaacattcccagtaataaattgcttactggatcaca

SEQ ID NO: 34251 - DNA, 120 bp, synthetic construct
  source 1..120: mol_type = other DNA
agggttccgcaatgaaaaagatagctagctgccattcactcaatactgaaatgcatagtggttaaaggcatgggctctagagttaggcttcctgagtttgaactcagacttaactactta

SEQ ID NO: 34252 - DNA, 120 bp, synthetic construct
  source 1..120: mol_type = other DNA
tcacaactgataactaaaattggttaacctgcctaacacacgaaactgattaccagcctaggggtttaaaaaagctggtattcatttaagtaatgtgaacccacagacaaacagtatatg

SEQ ID NO: 34253 - DNA, 120 bp, synthetic construct
  source 1..120: mol_type = other DNA
cagtcctgcggcaaagacaggcacacaggctttctctgtggattaattggtcaggaaagacactttttatattgtcaagtggcacttaagccattaattcttgactgtgaaactgctttt

SEQ ID NO: 34254 - DNA, 120 bp, synthetic construct
  source 1..120: mol_type = other DNA
gtgaattcatcacttgaggctctgtttttgttagcacagctctatttcctggagcaggacttaatatgacaggaagccattctgctactcatgaggagaatctaaaaccaggttacttct

SEQ ID NO: 34255 - DNA, 120 bp, synthetic construct
  source 1..120: mol_type = other DNA
gttccaacctctattttggtttttgtttctatcataacctccagtcaaatacggctttgtgtaaattagaaacatagatgagtggggaaaatcaggaatacgagggtctgctgagtacta

SEQ ID NO: 34256 - DNA, 120 bp, synthetic construct
  source 1..120: mol_type = other DNA
gtatctttagaataaatttagtccaatctccaaccccccacctctgaaatacaaaactaggtccaggagagagttgtttaaaataaaaatgaaatgctctcccctctcccctctccccac

SEQ ID NO: 34257 - DNA, 120 bp, synthetic construct
  source 1..120: mol_type = other DNA
gttgtctcttgtgggggaaaacctacattgtgcagaggacccccttcaagggagaatcaactaagagtctggcatctttttaagtccgataacaaacatttacaacctattttctctgaa

SEQ ID NO: 34258 - DNA, 120 bp, synthetic construct
  source 1..120: mol_type = other DNA
gatagtctaaacagttacagctcattaaccaggcctctgaagtggaatttaggactgggctatttaaaaggccacagaatatgacaaacagaatctttcaataacacccaattctgacac

SEQ ID NO: 34259 - DNA, 120 bp, synthetic construct
  source 1..120: mol_type = other DNA
tcataaaggaaaagtttacaaacatctgctttaagatcactgttgattttctttggacttaactcctgactagagagtatatgattaagaacaggctccaagccttagaaaagcatagag

SEQ ID NO: 34260 - DNA, 120 bp, synthetic construct
  source 1..120: mol_type = other DNA
ttactcagtagaccattacctaaccggcaaaatttgaaattggcttgacgctccttattatttttaattatgtcgtttttcctaatccctggtccgtcaattcccctccagagccccttc

SEQ ID NO: 34261 - DNA, 120 bp, synthetic construct
  source 1..120: mol_type = other DNA
gcaaatgatgaaggaaaagcctccgctccccatcaactggacccaacctgtgtcccagtcctcaacactttaccgtctttatttctctcggcctgatagctattggctcagagctagaca

SEQ ID NO: 34262 - DNA, 120 bp, synthetic construct
  source 1..120: mol_type = other DNA
ccaacctcattctacaaggctattattaccctgattcccaaaccagaaaaagtcacatcaaaaaaaagaaaagtagccagttttcccagcaccatttgttaaatagggaatcctttcccc

SEQ ID NO: 34263 - DNA, 120 bp, synthetic construct
  source 1..120: mol_type = other DNA
agatgactggattatgggggcagtttctcatggtttaataccatccctcctggagctgtcatcacaatagtaattattgtgagaactggttgtttaaaagtgtatagtaccttctgcccc

SEQ ID NO: 34264 - DNA, 120 bp, synthetic construct
  source 1..120: mol_type = other DNA
atagtcttagctataatgataggtgattatttcccttcctggtctcacgcataatactttggtataacccaagtttggtgttgtactccatcctcttctttttccttctccacatttaaa

SEQ ID NO: 34265 - DNA, 120 bp, synthetic construct
  source 1..120: mol_type = other DNA
cttctgtactagttcaaaaatctcactactacttccactaacacaatagcctcctagctggaattccccaccttccatatctcccccattcctcactaccgtcaattatttttcaaagca

SEQ ID NO: 34266 - DNA, 120 bp, synthetic construct
  source 1..120: mol_type = other DNA
tgttgttttggttcctgtagccttacagtattgtctgaagtcacgtagtataatgtctccagctttgttctttttcttagatttgcccttggctatttaggcttgttttggttccatgtg

SEQ ID NO: 34267 - DNA, 120 bp, synthetic construct
  source 1..120: mol_type = other DNA
gtgtgcgcacgtttatgtaataaatcacatttattgattccagtatgttgaacaaatcttgaatcccaggaagaaaacctacttgatgggggaagattagcttttgatgtgcttctggat

SEQ ID NO: 34268 - DNA, 120 bp, synthetic construct
  source 1..120: mol_type = other DNA
gatatttgatacgattttaacttttaaaaatgtgttgagacttgtctgtgtcctaacctatagttaatcctagtgaatacaccatgtgctgattaatgtgtattctgcagccgttggatg

SEQ ID NO: 34269 - DNA, 120 bp, synthetic construct
  source 1..120: mol_type = other DNA
gcttgcttgaccccgccatgcttttttacgtgctctttctctgggcctaaagtgccttttcccatgcttatctagttgtatttatagttcattcattcattcagcagctatttgtgtaca

SEQ ID NO: 34270 - DNA, 120 bp, synthetic construct
  source 1..120: mol_type = other DNA
attctaccttcaacattatccagaatctggtaccttttcaccacttctacttccaccatcctaactaaagccctcagcatgtcttctggagtattgtaattgctttctaactggtctccc

SEQ ID NO: 34271 - DNA, 120 bp, synthetic construct
  source 1..120: mol_type = other DNA
tgtaaacaatattaaatgattgatgaggagacttaggtagaagtattagcttgcatttgatgacctttaagggcacttaaaaaaaaatgaagacatgaattctagtgagattaaaatcta

SEQ ID NO: 34272 - DNA, 120 bp, synthetic construct
  source 1..120: mol_type = other DNA
ttaactgccattgttccaacccccacgagctgaagtggcttccaggagatttaaaggagctgccctgttttgtgagacatttgggaattaaaaacatatatacaggggaatttagaaagt

SEQ ID NO: 34273 - DNA, 120 bp, synthetic construct
  source 1..120: mol_type = other DNA
actgacacccagttggtccccccatatcttacacttgcctcagtccaatcctattgccacagtacagctacggtaatattttaatatacatgcctagtcttgttatatttctccttaaac

SEQ ID NO: 34274 - DNA, 120 bp, synthetic construct
  source 1..120: mol_type = other DNA
ggtagtattccatagtagggatgtgccagagttggtggaaccaaccattcacctgctaaaggacacttgggttgtgtctaattttttgctactatgagtaatagctactatgagctgtta

SEQ ID NO: 34275 - DNA, 120 bp, synthetic construct
  source 1..120: mol_type = other DNA
ggtcttcatgtagattttactaacatcgttttcacccaactctaacccaattcctggttgttggtgattttaattgcagttaaattgtcaatgattttaaaaaatgatttatttggccaa

SEQ ID NO: 34276 - DNA, 120 bp, synthetic construct
  source 1..120: mol_type = other DNA
gcccgacccttaaaacaatctgggtaaaacccaggagcctggcagcaactagaagacaaaacaaggttagagctccttcaaagccacattgtcgttataattgtcattgtttgatttgtc

SEQ ID NO: 34277 - DNA, 120 bp, synthetic construct
  source 1..120: mol_type = other DNA
cagtgatatagatccgtattcttacggctcagatcagcaagcaactctccaaaatatctggggtccaatttttcagggccatcatcctgaattatcacctgaagcaaacatcaatcacaa

SEQ ID NO: 34278 - DNA, 120 bp, synthetic construct
  source 1..120: mol_type = other DNA
ggattctttgtccactacaaggcactgtactgaatggcgaagacaataaattccaccaaacacagcacacatcctagaaagagaacagaaaaataagaattagggtaattgggttgaaaa

SEQ ID NO: 34279 - DNA, 120 bp, synthetic construct
  source 1..120: mol_type = other DNA
aggaacagattctcccctagtggcccgagaagaaatgcagccctgccaaccagttttaaacttctgacctccaggatggtaagataataaatttgtgttgttataagctactaagtttgt

SEQ ID NO: 34280 - DNA, 120 bp, synthetic construct
  source 1..120: mol_type = other DNA
cttctcatttgtttttcccccataccagtctttgttagaaagggaagctatgtgtagctcataatggcagcatttgttctctgtcacctctgtattttcttcatgtatcttatgcccaag

SEQ ID NO: 34281 - DNA, 120 bp, synthetic construct
  source 1..120: mol_type = other DNA
ctatagcaagagcaagaaaaatatcagcataggaaaacaccacagtgtatcatggggaagatgatctgagactattaacaactaaatgcaaggtagtatcctggaccagatcctggaaca

SEQ ID NO: 34282 - DNA, 120 bp, synthetic construct
  source 1..120: mol_type = other DNA
acttcgggtcccaagcatttcagataagggctattcacctgtagtggcagaaacagcattgttaagagtagtagatgctaacattactgagggcttactatgaagcactgttataaatcc

SEQ ID NO: 34283 - DNA, 120 bp, synthetic construct
  source 1..120: mol_type = other DNA
catgagccaccacacctggcccaaggcagcagattttctaacatgtaaacccatgatatgtcaaaaagactgaattgagagattaacacaagcagtcgtgcatacaatagtgaaatagta

SEQ ID NO: 34284 - DNA, 120 bp, synthetic construct
  source 1..120: mol_type = other DNA
tttgtcccatatggattcatgttccttcaaagaaggggcagtgaagctcaataatttagttttctgtttagttaggaagcctcttgattttacagacaggtggactaaatttgggtcatg

SEQ ID NO: 34285 - DNA, 120 bp, synthetic construct
  source 1..120: mol_type = other DNA
gacttgcaaatcgctgtgctccattctacttttctattcttaacctaataggaaaacaattatgcatcagggcacctattcattaaataaaacaatgacctgttagggaagtaataagca

SEQ ID NO: 34286 - DNA, 120 bp, synthetic construct
  source 1..120: mol_type = other DNA
taaggacttactccggccattttgttgtttgatttttggtagtttgtggtattctcctccttcattttttcccttcctgtgttccttttagagaaggtggtttcctctggtgatactgtt

SEQ ID NO: 34287 - DNA, 120 bp, synthetic construct
  source 1..120: mol_type = other DNA
tcttttggaactgcgagctgtgcagcctgtggttaggggagggttgatgtaagcattcccttagctgcctcggttggtgtctaagcaggtttcttttatttatttatttatttattatta

SEQ ID NO: 34288 - DNA, 120 bp, synthetic construct
  source 1..120: mol_type = other DNA
ttattagaccctctttgttactgtgctttcttttggtttgtctctaaaatgagtaccaatagaatccttttgataacaaatgtattttgagatgtacacatacatatcactttgattaaa

SEQ ID NO: 34289 - DNA, 120 bp, synthetic construct
  source 1..120: mol_type = other DNA
ggatctctggtcatactttttattgatacattccctacaaagtggtgtaagggatataaaatccttaatttaggagccccaactattctttgatgcaaagaatcagcaaaatttgttcct

SEQ ID NO: 34290 - DNA, 120 bp, synthetic construct
  source 1..120: mol_type = other DNA
ttatggaatgcttatcagaaaggcaggggaaagactttcccactgttctcaatcctcttctttttgcgggggtttaattcattcttgtttttatagttttctgaagtgcacagtcacatt

SEQ ID NO: 34291 - DNA, 120 bp, synthetic construct
  source 1..120: mol_type = other DNA
gaatgctgattaaaaacaatgtttctttgttggttttctgtgtggacgatcagtcagtttctgtaagtgagacgttgatgtcccctactagtattgtgttgcagtcaatctctcccttaa

SEQ ID NO: 34292 - DNA, 120 bp, synthetic construct
  source 1..120: mol_type = other DNA
gtgaaggatatttttgccagacatactattctagggtaaaaggttttttccttcagtaccttaaatatgtcatgccactctctcctggcctgtaagatatccactcaaaagtgggctgcc

SEQ ID NO: 34293 - DNA, 120 bp, synthetic construct
  source 1..120: mol_type = other DNA
ttctccagtttccataaattttagaagttttgtatatgctcagatgatacaggaagtggtggtgtattttagaaaaagagaggaagtctatcattgttggacatttgggttggttccaag

SEQ ID NO: 34294 - DNA, 120 bp, synthetic construct
  source 1..120: mol_type = other DNA
tttttgttctatcttggccctcagaggatgggatatctacccacattggtaagggtggatctcctttactaagcttactgattcaaatgctaaacttttcctgaaacaccctcacagaca

SEQ ID NO: 34295 - DNA, 120 bp, synthetic construct
  source 1..120: mol_type = other DNA
aaaaaaagagaattcagcaaggattcaggatgccaaatcaatatatggaatcaattgcatctctatataagaacaataaataaatggaaaatgaaacataaaaaaaaaaatcttttgaag

SEQ ID NO: 34296 - DNA, 120 bp, synthetic construct
  source 1..120: mol_type = other DNA
tgctctcctttccatgatccttgctggttaacaagctggtctgtggcttagcttttttctctcatggagctaagttgtaacccctttatttctttcctcgtcactgcttacatctaaaat

SEQ ID NO: 34297 - DNA, 120 bp, synthetic construct
  source 1..120: mol_type = other DNA
aagtgaggacttatttctgtcattttgttatttgttttctgagcgttttgatgtcttttcatgcttctttctctttttcctgtgttttgtcactgaaggtaattctctctggcaacatga

SEQ ID NO: 34298 - DNA, 120 bp, synthetic construct
  source 1..120: mol_type = other DNA
tctgatagttttggacaagatatgggagagttctctggattaccatactgagactcttgttcttttcccttaccttctcccccacaaaatagagtctctttgtctgttctgagccaccta

SEQ ID NO: 34299 - DNA, 120 bp, synthetic construct
  source 1..120: mol_type = other DNA
taagagaatataacatagactggaaaggcaaagagttagaggcagagagatcactcaggaagttcttcaagtagtctagctgagaaagaatacagacctattaaaaagtggcggccgggc

SEQ ID NO: 34300 - DNA, 120 bp, synthetic construct
  source 1..120: mol_type = other DNA
ctgttggttggtgtgtaagataattcaaccatcatggaaaacagtgtggctattcctcaaagacccaaaaaaaatatactattcaactcaacaatccccattagaggattgctgtgttga

SEQ ID NO: 34301 - DNA, 120 bp, synthetic construct
  source 1..120: mol_type = other DNA
gacttcaggacagtgtagatcacctcatgtaaaattacaattttcatggtgaaatataagatgagaattgctcttcaaccagtgctgacagtgacttttttctacatagcctggatgcaa

SEQ ID NO: 34302 - DNA, 120 bp, synthetic construct
  source 1..120: mol_type = other DNA
ccccacaaacctagaattctgtctccaggaaaatttccctttaaaagtgaaggagaaataaaaactttctcaaacaaaaattgaggtaatttgttaccataccagtagacctgcatcgca

SEQ ID NO: 34303 - DNA, 120 bp, synthetic construct
  source 1..120: mol_type = other DNA
gtaagatttgtgtggggacacagagccagaccttattactgggactccagtactatgttgaatcagactggtgagcataggcatctttgtcttgttccagttcttagaatactttcaact

SEQ ID NO: 34304 - DNA, 120 bp, synthetic construct
  source 1..120: mol_type = other DNA
ggatgttactggcctcatagcattatttagggataatttcctcctcctcaactttttgtaacaatttcaggatgattggtgttagtagaatttggctgtgaatacacctgatcatgggct

SEQ ID NO: 34305 - DNA, 120 bp, synthetic construct
  source 1..120: mol_type = other DNA
ccagagtgtctgcttacctcaaaacaaccacactagttccccagaaatagttttagaccaggctgaaatggctgaaatgaccaacatagtattcagaatatggatggggatcaagattca

SEQ ID NO: 34306 - DNA, 120 bp, synthetic construct
  source 1..120: mol_type = other DNA
atcactttctcattaacagtggtctctacagcggttaaaaagttcttaaatggatacacagacacatacacacacacatgtcacatttgtggctaattttcctgaagatataatgtttta

SEQ ID NO: 34307 - DNA, 120 bp, synthetic construct
  source 1..120: mol_type = other DNA
attggaagactacatagtaacaatgcttattaatcataagcccataaaacaagagattgcaaatgcaattatttgcagatttgtagggttacttcaagaactgatgtgcttcaggaaata

SEQ ID NO: 34308 - DNA, 120 bp, synthetic construct
  source 1..120: mol_type = other DNA
tgagcaccttacataattcttattatttataatggtttctcaattgatttttaggtatttcctaagtggcaaatcatgctatcaacaaataataatatttttcctccttttagcatattt

SEQ ID NO: 34309 - DNA, 120 bp, synthetic construct
  source 1..120: mol_type = other DNA
ctgtaagatccataagtcttattgggggataattctatggtatctcttacagtcaggccatacttccaactttcatccctccaaattaaggtatattagttgaatctgctagaacttcct

SEQ ID NO: 34310 - DNA, 120 bp, synthetic construct
  source 1..120: mol_type = other DNA
attacaggcgtaagccaccacgcctggccttgtttttgttttttaatttggttttatagtctcccatttcttcgatgccaaaaattaagctttctctaaaactctacaagtagatcaaca

SEQ ID NO: 34311 - DNA, 120 bp, synthetic construct
  source 1..120: mol_type = other DNA
atactttcagcgagcatgaggcataaatgtgttggtgagaaacagttgcaggaactgagtttttactatgcatagaaaatcttatcttctgtgtttcaaaagcccaaaagtccagtggaa

SEQ ID NO: 34312 - DNA, 120 bp, synthetic construct
  source 1..120: mol_type = other DNA
ttgtctttctcggaaacaacaggtgagaattccccttacagacctgcccatgctttctaaagtggctctcccaaacctacctttgtcctaactcagttgtctgtgattctcaatatagta

SEQ ID NO: 34313 - DNA, 120 bp, synthetic construct
  source 1..120: mol_type = other DNA
gagaaccaatcttaattattgggactaaattctgtcagatatttcagtgtttccaggtgaaagacactaaggtgccatcataatgaacactgcagcaaagatttcttaactctccttccc

SEQ ID NO: 34314 - DNA, 120 bp, synthetic construct
  source 1..120: mol_type = other DNA
gtgtgtgtgtgtgtgtgtgtgtgtttatgtgatataccttcaaaattgggtgtgtactttacactcgaagcatatgtcaactagggcaagccacatttcatgtgctcagtagccacatgt

SEQ ID NO: 34315 - DNA, 120 bp, synthetic construct
  source 1..120: mol_type = other DNA
ttcccttttatgatcatagcagaaccctggtctaggttcctaatgggaacactgaagaaacaaaatgcaataaatatcacagttccttcctgacacctcatccaaaaaccagattcccac

SEQ ID NO: 34316 - DNA, 120 bp, synthetic construct
  source 1..120: mol_type = other DNA
catgtagctgaatttatgagttatataccctgaatagaaatctagagtctgttactctttagcgtcatggtcttgtgcaaatcacctgtcctctatgaatttcagtttcaggaattgcaa

SEQ ID NO: 34317 - DNA, 120 bp, synthetic construct
  source 1..120: mol_type = other DNA
cgtacacctttctggagagaggaatttagaaaattcacctggttaattttctggcgtctgggtaaatttaaggagttgttccttgaaacaagaataagagttgaccagctggggtggttt

SEQ ID NO: 34318 - DNA, 120 bp, synthetic construct
  source 1..120: mol_type = other DNA
gttttcttcagcagcgggtcccgcacgcgagagtgctgccagcacgctttctgcctccttctccaggaggcgagcagtaacttcctaagcttacctccatctctcccccgcccttcttgc

SEQ ID NO: 34319 - DNA, 120 bp, synthetic construct
  source 1..120: mol_type = other DNA
aactctaagattggggcgggtgttgacaaaagagcacgtcccggactcccagactcgcccggctgagagattggagctgaggggcgatgcctctagctgagaaactacccctggcctccc

SEQ ID NO: 34320 - DNA, 120 bp, synthetic construct
  source 1..120: mol_type = other DNA
atgggcccttttgcttcagaatgatttattccgcgttcctctgcttcacccgcctgcggcttagggtgtggggcgctaggctgctcatgtgaagcgcttacgggtgagccctagcctctc

SEQ ID NO: 34321 - DNA, 120 bp, synthetic construct
  source 1..120: mol_type = other DNA
agttcccaaaagctgagtcccgctgcagctgccaggtcgccacactcgccaagcggcgagggagcgcctttgcctaccaggccggagaaccctgttcttcagtcgccttggcaggggcag

SEQ ID NO: 34322 - DNA, 120 bp, synthetic construct
  source 1..120: mol_type = other DNA
ctgttttcctgattgcggacaattccttctttagctttggtagaagggccgcagaatgcagttggagaaggttgcacagggcaagagggaggggcagaggcagggcgtgtagaggcaact

SEQ ID NO: 34323 - DNA, 120 bp, synthetic construct
  source 1..120: mol_type = other DNA
tgtatttgttcactgaagagtccacgaactttaattagtcacctactgtgccagacaatgtgataaatggtgtaattgaacataatggagagaggaattaatttttgttaagaggttgag

SEQ ID NO: 34324 - DNA, 120 bp, synthetic construct
  source 1..120: mol_type = other DNA
cctcctccccattagccaccttgcattctcctatctttcattgacctcaaagaagctaaggggaaagaaaagccactctactttaaacttgcttagatttgccaaattttcgtcatcaag

SEQ ID NO: 34325 - DNA, 120 bp, synthetic construct
  source 1..120: mol_type = other DNA
aaaacatcaaatgacctatgtgtcatggtcccttaagatttattctctatgcaaggttaattgtaaaataaaagtttatcagatagagaaaactattttagggtgaaactgtcttttgat

SEQ ID NO: 34326 - DNA, 120 bp, synthetic construct
  source 1..120: mol_type = other DNA
agaaaaagaaggcatggttatacccattttgtcaatggggagactgaagttcccgctgatgaaatcagctccctaagaatttccagaattaagaggggaagcttcaagaggattgatggt

SEQ ID NO: 34327 - DNA, 120 bp, synthetic construct
  source 1..120: mol_type = other DNA
tcccttggctctgcacgtattatcaatttgactgtattgattcattaaccatcaataactaaaaacctatggcttgtccagcattgcaatactttaaatgttaagggtggcccttaaaga

SEQ ID NO: 34328 - DNA, 120 bp, synthetic construct
  source 1..120: mol_type = other DNA
atcgtagactgctttattttactttgtgacagaggaagaggggaggagaaaggaaatcaaatagagaagaaagagaactaccagagcgttggatgatagggcctgattttctcttcagtg

SEQ ID NO: 34329 - DNA, 120 bp, synthetic construct
  source 1..120: mol_type = other DNA
caatatgtgctggccattttataatggccatgagtgcaaagcaggattacttaagaaagagcatttgaattcactgaaagtcacagacattctgaatgcctcagaactgcatacaggagt

SEQ ID NO: 34330 - DNA, 120 bp, synthetic construct
  source 1..120: mol_type = other DNA
acacattttgcagaacaacaacagcaacaacgaaagacacttggtagagattattttgtatttgctgtctcaaaataaaagtcctcaaagtgggaacaaatggtaaattagacaccatgc

SEQ ID NO: 34331 - DNA, 120 bp, synthetic construct
  source 1..120: mol_type = other DNA
taactttaagtcatttatatttccagcttcagaatcaatttgagtagatcttagaatgagtttaattacaggaaaatattacataactggatgaaattttaatcataaatcacagacttg

SEQ ID NO: 34332 - DNA, 120 bp, synthetic construct
  source 1..120: mol_type = other DNA
aaactattgtaatatccctggctttagtaatttaaaacatgtattaacataactatacaattatacagtagtcaatagtggactaggaaataaggatgttatcagattgaacaagaaagg

SEQ ID NO: 34333 - DNA, 120 bp, synthetic construct
  source 1..120: mol_type = other DNA
tgtttctcagatatagaatctaggttagggataacatttctttgcagaaaaaaatacaaattgtgatgagatattcagattctactgaattagcaatacactgaggtaaatcatgactag

SEQ ID NO: 34334 - DNA, 120 bp, synthetic construct
  source 1..120: mol_type = other DNA
tctgcttggtcagtgtgcttttcactatattgtcctgtcacatctttcaccacagtaaaagggcttatgtacatttttttaaatcacatgtataatgatcatatagcccaaaatagtcca

SEQ ID NO: 34335 - DNA, 120 bp, synthetic construct
  source 1..120: mol_type = other DNA
tgtgaacagacagcatttgatctaacatagttattggtctattaatttttttgtgttcttttctaccagagccatgtattcctactgcatagtatacatttttagagtaaattcttttaa

SEQ ID NO: 34336 - DNA, 120 bp, synthetic construct
  source 1..120: mol_type = other DNA
ctgtgttaggagtgcagaacaccgtgccttgaggaaacataaaagtacatcagttaaactgaatattaaggtttttcttctttcttctggacagcttaattgtaggagaaatattctacc

SEQ ID NO: 34337 - DNA, 120 bp, synthetic construct
  source 1..120: mol_type = other DNA
tgcagtacaaacaaaaacatagatgaacacagatgcatttgcttgataagtacagacaaggaaacagcatggtagaaatttgcccaactagactttcattctagtagctaagctttatgc

SEQ ID NO: 34338 - DNA, 120 bp, synthetic construct
  source 1..120: mol_type = other DNA
tctgttttccttatatcatcagctaatacttaatgaaaccctacccttcaccagagattttgaatagcttattttttacctactccatattttctattttccagaattatctcttgaaaa

SEQ ID NO: 34339 - DNA, 120 bp, synthetic construct
  source 1..120: mol_type = other DNA
ttattcatttttacttaaaacatagaaatgctgttttttaaaaaaaggtttattgctgggcgccctgggcctgtaatcccagtattttgggaggtggagtggggcagagagcttgagccc

SEQ ID NO: 34340 - DNA, 120 bp, synthetic construct
  source 1..120: mol_type = other DNA
aaatggcatttgttatcagtcctccaggtgttacatatgactcccagtcacacttagatgacagtatatgtgaaagatgcttaggagaggcaagagtctgaaaggccaacatatattaaa

SEQ ID NO: 34341 - DNA, 120 bp, synthetic construct
  source 1..120: mol_type = other DNA
cacttagttttgtgcttttcccagatatttggaataaatctttacttattgatgtagtgatttgtatggagaattgcatattagtggaaagtctgactaaatatctatatagaatatatg

SEQ ID NO: 34342 - DNA, 120 bp, synthetic construct
  source 1..120: mol_type = other DNA
tctttcaaattttagttgtataccttaataggtctgtgaccttgggcaagttattgaaacttttagagtctcaattccctcatatgtaaacggaagtcacaataacagtgcatatatcat

SEQ ID NO: 34343 - DNA, 120 bp, synthetic construct
  source 1..120: mol_type = other DNA
catttgcaaatgactattcaatcaacatgtataaaagttgtggatttctttgcttttatgacaaaagtggtattgtatttttaaactgatcactttattaggtcagagagggtatagttc

SEQ ID NO: 34344 - DNA, 120 bp, synthetic construct
  source 1..120: mol_type = other DNA
acaattctcttagacatcttaaattctctaagtggagatttcttatattcttcacagtacacctgtttaaaaattgtagtccacagaaatctgaaactacaaaagaaacttttctcaaga

SEQ ID NO: 34345 - DNA, 120 bp, synthetic construct
  source 1..120: mol_type = other DNA
aataaataaaggtcaacaggaagaatcaataactaaggcagcaactggaattgacaaattaatatcaataagcttgaatcaactaatgaggatggttttgtgtgtgtgtgtctgtgaggg

SEQ ID NO: 34346 - DNA, 120 bp, synthetic construct
  source 1..120: mol_type = other DNA
caacattttcttataaaacatattcttcttctgtctttgccttatctgttcttggcactaacttcttcagtcattcacacttcaaaagctttggactatttcctcttccttatacccaca

SEQ ID NO: 34347 - DNA, 120 bp, synthetic construct
  source 1..120: mol_type = other DNA
aggattaccacttcccatataaaaagtatgattcatagccatttataatacaagcaattacccctcaaagttgaagatttatattagtatcattattatcacttttcatttaatccatac

SEQ ID NO: 34348 - DNA, 120 bp, synthetic construct
  source 1..120: mol_type = other DNA
aggaaataaataccactagccaatggggctaggatcacacctattccatataaataaaactttgaatctatcctgtctactgtttgataagcctatgcagattatcaattttatgtgtta

SEQ ID NO: 34349 - DNA, 120 bp, synthetic construct
  source 1..120: mol_type = other DNA
gcccctctggatcgtgcaaagatgtctttaggaccatgagttatcagtgtactgaaaaattccagaagtgcctattttcagaacaaatacttgttctgaatactacaagcaccctaggta

SEQ ID NO: 34350 - DNA, 120 bp, synthetic construct
  source 1..120: mol_type = other DNA
cttccaagtctctacccagtttttaagttctccatctttgttgtcaccatagttttccccagttaagttttcataacagcttgttgctcagactctatgagtacttcttattttgttagt

SEQ ID NO: 34351 - DNA, 120 bp, synthetic construct
  source 1..120: mol_type = other DNA
ggaaaatattatggctagagagtagatgttggctcggctgaagaggagaggtcatggattataaattaaagagaaagatatttcttagaagcagctaattgaggaccttgaatgctaggc

SEQ ID NO: 34352 - DNA, 120 bp, synthetic construct
  source 1..120: mol_type = other DNA
ttgttgccaagctgggaacaattataaaatcactaactacctaaaacagagcacacagtctttaaaccttataaacataattttaaatctgaagattatatgaaatattcatttgatgaa

SEQ ID NO: 34353 - DNA, 120 bp, synthetic construct
  source 1..120: mol_type = other DNA
tggtaatgactatgtgaacaaaattgattttgcattttctcattaatgtggcacacaacacagaaataaaagtcctatttttttctagcttgttttagtctgtgggcttaattgctagtt

SEQ ID NO: 34354 - DNA, 120 bp, synthetic construct
  source 1..120: mol_type = other DNA
catatatgataatacgaaaagtgttaaatcggtggtattcattaagactgtatccagcactgtggagaacttggaggtcaagggaaagtctgcacaaaagtagaaatatgaggaaatttg

SEQ ID NO: 34355 - DNA, 120 bp, synthetic construct
  source 1..120: mol_type = other DNA
cattttactgtactatttaattttataccttttttgtcccctgcctatgaattggatattctagccatcatttcactgtcctgggtgcaggcatagttgaaggttactgaccttctgatc

SEQ ID NO: 34356 - DNA, 120 bp, synthetic construct
  source 1..120: mol_type = other DNA
cttgtggtgagaaggcatggaatatgctgaatgaaggctaatgataaatcatttttcatttcttaatgagttggagtggggtttgtggttgtcctaagtgagaaacagaaaaaaaaattt

SEQ ID NO: 34357 - DNA, 120 bp, synthetic construct
  source 1..120: mol_type = other DNA
taaaactgatatttatagagaataaattttatatctaaattgttatttttgaagagctcaatctttgtgtattacgtagggagttgtcttgagaaacgtctaatttttaccgctcatctt

SEQ ID NO: 34358 - DNA, 120 bp, synthetic construct
  source 1..120: mol_type = other DNA
ggtagttacccagtaatgggattactggtcaaatggtagttctagttttacctctttgaggaatcactatgctgcttcccactatagttgaactaatttacactcccaccaacattgtaa

SEQ ID NO: 34359 - DNA, 120 bp, synthetic construct
  source 1..120: mol_type = other DNA
tatatctcatttgctttcaactgttgattttactgcattgtaatttgataatttagaccccaacacaaaaaataaattaagtcatgctagaatatgcaccatacgtatataggggagtaa

SEQ ID NO: 34360 - DNA, 120 bp, synthetic construct
  source 1..120: mol_type = other DNA
tacttgttgacaaagtacagtaaaataattattagatactgaaacaagcaatattacattcaccctgaggcaatagaagaatgtgtgatgatagacaaacgttatatttttgccatgaag

SEQ ID NO: 34361 - DNA, 120 bp, synthetic construct
  source 1..120: mol_type = other DNA
tataatgaagaaaaaatttaaaaaatatcaaggaaattatgccttgaaattcttctgacaaagcatttgaacattaattgtgtggtttgaaatttctagaattgcatatagtagatgcct

SEQ ID NO: 34362 - DNA, 120 bp, synthetic construct
  source 1..120: mol_type = other DNA
tgtaccttcagtgtctagaactgtgcttgacatataaaaattgcttaataagtatttgttgaataagtggctaaacctccatgagttcatttcatctcaaactctttattaactagaggg

SEQ ID NO: 34363 - DNA, 120 bp, synthetic construct
  source 1..120: mol_type = other DNA
tgcagctatgcaatgggacagttatttcatataacacattgcttggcataaccagagcacaatatccataacaagttatttatatcatatgtagtcctcctgtttttagaacaattacta

SEQ ID NO: 34364 - DNA, 120 bp, synthetic construct
  source 1..120: mol_type = other DNA
aaagttgcttacttgtactttatattaatagctattcttgtttttcttatccaaagaaaaatcctctaatccccttttcacatgatagttgttaccatgtttaggcattagtcacatcaa

SEQ ID NO: 34365 - DNA, 120 bp, synthetic construct
  source 1..120: mol_type = other DNA
gctcgcattgatcgtgagaaattatgtgctggtatcccaagggatgagcattgcttttatgaagtggaggttgccattttgccggatgaaatatttagactggttaagatacgttttctg

SEQ ID NO: 34366 - DNA, 120 bp, synthetic construct
  source 1..120: mol_type = other DNA
agaaatagataactcagatttgggtatgtgaaatagtacaatgcacttgaatgatcttggaaaatatatgttaatgaaataactaatgtgcatgtttcagatagatatgttcaggggatt

SEQ ID NO: 34367 - DNA, 120 bp, synthetic construct
  source 1..120: mol_type = other DNA
agataaaatcaaaatgagaccttaccaagtttaaatcagatattagcaatagggtctcttcaactgaccatcttgacaaatgtgttgttttaaaacgtagtgctttattcaaagaataat

SEQ ID NO: 34368 - DNA, 120 bp, synthetic construct
  source 1..120: mol_type = other DNA
tgagtttcagagtgataatgtattatgcttatcatcatatgactggtaaatgatagaggtaggaaccagagtgcagttcctgactcctaatcaacagacagattgtagatggatagataa

SEQ ID NO: 34369 - DNA, 120 bp, synthetic construct
  source 1..120: mol_type = other DNA
tttgacagggaagccaacattttcacaaatagaaacatccctcaagcacccagtctgactcagaatatgtatataaaccacagggacttccttcttttctcatggtaggaactcagggga

SEQ ID NO: 34370 - DNA, 120 bp, synthetic construct
  source 1..120: mol_type = other DNA
atctaatgttaaaaagcaaaagagatgacaatcaaatgctaacgactatgaggtttctgaaagctggggttattatcaaagtacacttccactggggaaaaaatgacaacataaaactca

SEQ ID NO: 34371 - DNA, 120 bp, synthetic construct
  source 1..120: mol_type = other DNA
gacactctcttagtgaactgaagtgtgatctttcaatcttagataaaataaattgatggattggtaagatttctgtatcagaggtgatgacaccttgtatgagaagtgatgataaaagca

SEQ ID NO: 34372 - DNA, 120 bp, synthetic construct
  source 1..120: mol_type = other DNA
taagcttcttcaatacaatgaagtgaaattctaaagaatgaaaggctgttctattaaattttgtctagatgtaacaactgactgctaactaatatcttagtctaattccagtaatctaaa

SEQ ID NO: 34373 - DNA, 120 bp, synthetic construct
  source 1..120: mol_type = other DNA
tagttgtggtaattacctaagtctttctattatcttaattctcaaacttgttatctgtgcctacaattcctctcctatataatagagaaaattaaaattatccttatgtagcatgcaggg

SEQ ID NO: 34374 - DNA, 120 bp, synthetic construct
  source 1..120: mol_type = other DNA
ccagggaaatatagcagaataaacagcctgcatcctaaggacagtggaacaaggggagcattgctgtcagtaatgcaaataacaaagtaaatggttaacagaagaacgaagttgtgttct

SEQ ID NO: 34375 - DNA, 120 bp, synthetic construct
  source 1..120: mol_type = other DNA
acctaactgctaaaatgaaagcattttcatatagctagagctctcacacagaaaactagtttacgtgtaaggtaaccagtttaataaaactgataatctctttagctcttagaaattgga

SEQ ID NO: 34376 - DNA, 120 bp, synthetic construct
  source 1..120: mol_type = other DNA
tgacaacagcttttttgttttgtgtttacagtgtgatgttgagagttttgttgtttcctcacaaataactgactgcataactctatgctttcctacatggttagcaattgctatttcatg

SEQ ID NO: 34377 - DNA, 120 bp, synthetic construct
  source 1..120: mol_type = other DNA
aacctgctacgatgaagacttctactttacaattcaactatgcatatcaggattactgatttctttatatgacattacttatgaaaagaagtaattttatgaattactaaacactttcca

SEQ ID NO: 34378 - DNA, 120 bp, synthetic construct
  source 1..120: mol_type = other DNA
acttcaaagtctattacctgagcattgctttaatatccaggattctttgtacatgccattatgttcctgaaagtacatttagcataatatgtatagctaatttatttgaaaacatagcca

SEQ ID NO: 34379 - DNA, 120 bp, synthetic construct
  source 1..120: mol_type = other DNA
attaaaacatgtggctgctcacggattgaaaacaggtttacctatatatgtccttaccaattggtaagcattattcaaagtagatcataaaaaggagacaaaagccttgatattcccaat

SEQ ID NO: 34380 - DNA, 120 bp, synthetic construct
  source 1..120: mol_type = other DNA
tcatacaatgtgtaataatcacatcagggtaaatggggtgtcctcagttctttgtcacctgtggttttagctctgattaagaacttgtcttggaacctaagtcaaagtttgattttaaat

SEQ ID NO: 34381 - DNA, 120 bp, synthetic construct
  source 1..120: mol_type = other DNA
cttctaggattgcaattttcattgtgttggcctagggcttctcaaccttggcattattgacatttgaagctagataattcttccttgtggggtggtgtgagagctgtcttatgcactgca

SEQ ID NO: 34382 - DNA, 120 bp, synthetic construct
  source 1..120: mol_type = other DNA
aagaaaaagataaaaattgacatctagaattaggcaaaggaaaaactaatggaagattcaatatatgaatgagacacaaaagttgatagtggtgtgtgatagaactaattacaagcgttt

SEQ ID NO: 34383 - DNA, 120 bp, synthetic construct
  source 1..120: mol_type = other DNA
acagcgaaaccatatttttctgcccctggcccctcccagaactcatgtcatcacattttaaagccaatcatagcttcccaactgtcctccaaagtcttaacttatttcaacattaactca

SEQ ID NO: 34384 - DNA, 120 bp, synthetic construct
  source 1..120: mol_type = other DNA
acactttcagccatggctgggatgtaggtcatcaagtccccaaactgcacaaagcagcaaggccctggtcccagctcatgaaacaattatttttttctcctaggcctcccagcttgtgat

SEQ ID NO: 34385 - DNA, 120 bp, synthetic construct
  source 1..120: mol_type = other DNA
aactgcctagtcagtcccaatgtgagaacctggataccttagttgatggtgcaggatgcactagctttttttgttcttcttggtgagagctgccaaccacacctgcatctaatcagcttt

SEQ ID NO: 34386 - DNA, 120 bp, synthetic construct
  source 1..120: mol_type = other DNA
atgtaggcactaatagctataaacttccctcttggtactgcttttgctctaccccataggttttggtatgctgtgttttctttattatttgtttcaagaaacttttcaatttacctctta

SEQ ID NO: 34387 - DNA, 120 bp, synthetic construct
  source 1..120: mol_type = other DNA
ctatgtctttcatttcagggtaacaaggtctctctgggaccaggtgggtacagaggtgccatctggaagtgagggactacagtcaaaaaccttagaagtctccctgctgttctattgtac

SEQ ID NO: 34388 - DNA, 120 bp, synthetic construct
  source 1..120: mol_type = other DNA
gccttttaagtttacttagagacctagagcactttggcccttggtggcaaggtttgtgagaattcaaatttggaccactgggatcagtggttccccaccagatagggctggtttaaatgc

SEQ ID NO: 34389 - DNA, 120 bp, synthetic construct
  source 1..120: mol_type = other DNA
gactccctaaatatataaacagtagttatgcttacagaaaattggtggcatttttcctatcaatgagttgttttaagatgagtcagagctaatgaagagtcagaaatcatctcagaagac

SEQ ID NO: 34390 - DNA, 120 bp, synthetic construct
  source 1..120: mol_type = other DNA
tagagaaactgaaatcttcttttggagaaaaggagatttctggactttgatgatagtagatccaaaagaaactggttgaggtcttttatcaatttagaaggtagaaccaatcagagttag

SEQ ID NO: 34391 - DNA, 120 bp, synthetic construct
  source 1..120: mol_type = other DNA
cgggttctgcaataaaccagctgtgtgatcacgggcaagtcacctaaccttactgtgtcttagtgtccttttcataagaggagaagtaaggctagatgatatctgaagtctgttctagta

SEQ ID NO: 34392 - DNA, 120 bp, synthetic construct
  source 1..120: mol_type = other DNA
aatcttcctgagtgcctactcttttgtcaaaagggaaaaacaaagactgttcttaattttgaaatctgacacaatagggaaaaaaaaatcaatgacagaaattcctattctttggactaa

SEQ ID NO: 34393 - DNA, 120 bp, synthetic construct
  source 1..120: mol_type = other DNA
ttagtacttactggcactgtatgcattttctgggcaactgtaccagatttatagctctaaaagtgctgtgttatttattgccttccaataggcaatgaagtggtgtcttgcacatgcatg

SEQ ID NO: 34394 - DNA, 120 bp, synthetic construct
  source 1..120: mol_type = other DNA
ttaaaataaaagacaaaaaaaaaaacccaagtcaacaattatagagtattcctgtgcctatacagactgagaattaagaacaaccaaattctgctcttcttttatcttttaaaataagag

SEQ ID NO: 34395 - DNA, 120 bp, synthetic construct
  source 1..120: mol_type = other DNA
tgtgcaataatgaaaatgttctacatctgcagtgtccaacgtagtagctactggccacatggagctgttgagaacttaaaatatgggtagtgcaagtaggaactgatgttttaaattaat

SEQ ID NO: 34396 - DNA, 120 bp, synthetic construct
  source 1..120: mol_type = other DNA
ttttgcttgctaattttcaaatataaatacgtataacatgaaaatgtttttcttactatataatcaaggaaaagccaggttgattattgctctgagtaaaataggaatagaatgctcacg

SEQ ID NO: 34397 - DNA, 120 bp, synthetic construct
  source 1..120: mol_type = other DNA
ccacaagttactggttttggcaagtgatggtggattgatgccagcaagagcaatggtgctggtaaatgttacagatgtcaatgataatgtcccatccattgacataagatacatcgtcaa

SEQ ID NO: 34398 - DNA, 120 bp, synthetic construct
  source 1..120: mol_type = other DNA
taggactaatcactgtaactgatcctgattatggagacaattctgcagttacgctctccattttagatgagaatgatgacttcaccattgattcacaaactggtgtcatccgaccaaata

SEQ ID NO: 34399 - DNA, 120 bp, synthetic construct
  source 1..120: mol_type = other DNA
gtcactattgaagaaactaaggcagatgatgttgacagtgatggaaacagagtcacactagaccttcctattgatctagaagagcaaacaatgggaaagtacaattgggtaactacacct

SEQ ID NO: 34400 - DNA, 120 bp, synthetic construct
  source 1..120: mol_type = other DNA
cagcaccaagttattccccccatactctaccaggccttcaggtcctcataaagaaaagtgtcgttttcagattaggaactcaaaattattttggtgcatcaaatctacagtcacacaata

SEQ ID NO: 34401 - DNA, 120 bp, synthetic construct
  source 1..120: mol_type = other DNA
gttaagagatgtcgaacatctccacagggtgtgtttttgtttatatttaaccattaaaaagggcactctcattttcaaattcttattgctattctgcttattggataagtttctcaacat

SEQ ID NO: 34402 - DNA, 120 bp, synthetic construct
  source 1..120: mol_type = other DNA
taggtgtcttctttttaaagaaatatcatacaaaatgggagaagtgacagccaatacaatacaaattcattgttccttaaggaaatacttagagtggaataaaatattactgttagcaga

SEQ ID NO: 34403 - DNA, 120 bp, synthetic construct
  source 1..120: mol_type = other DNA
aactttgactctgcatttatattttggtaatgcaaattttaaccatgaagcatgcttggcaaatgaaactcctagaacacaaccatctgattttgataacgtgttatttttcttgtccta

SEQ ID NO: 34404 - DNA, 120 bp, synthetic construct
  source 1..120: mol_type = other DNA
aatgttcaatgatagaaaataattttactaggtttttatgttgattgtactcatgctgttccactccttttaattattaaaaagttatttttggctgggtgtggtggctcacacctgtaa

SEQ ID NO: 34405 - DNA, 120 bp, synthetic construct
  source 1..120: mol_type = other DNA
agggagtacaaaggacccttataatgattacatagcatatgcttcctgaattttaattcaaatgttaattatgtatcattttacctttaaaagtgtgaataggatttggtctgttttgta

SEQ ID NO: 34406 - DNA, 120 bp, synthetic construct
  source 1..120: mol_type = other DNA
tgcatttgcatttttattgcttgtgtcatgactagcctggcctttcctttccttttctgcacacactgaactaagggagaataccttgtttttcttccatttcagtgaacctttccttca

SEQ ID NO: 34407 - DNA, 120 bp, synthetic construct
  source 1..120: mol_type = other DNA
ctgatgagctacagtgtactgtatactttctcccctgcaagcactcaaagaaatattatttgatcaaaatctatagtgcataaattaaacaaaaaatactgaaatatattctcattttat

SEQ ID NO: 34408 - DNA, 120 bp, synthetic construct
  source 1..120: mol_type = other DNA
tgacttagcttcctagaatattcaaagattctgtgataatacaaagctatatttcttgcatataattagtatttttagaaagaactacagtgcattttttcatacatcgtgcgtgttcat

SEQ ID NO: 34409 - DNA, 120 bp, synthetic construct
  source 1..120: mol_type = other DNA
tcaggtagtcaaattgacataataatgaaaatgaactattccaatagattttctagaaatatttgtactttatcccttatcctagaaccttatatgtaccaattatatattgatttactt

SEQ ID NO: 34410 - DNA, 120 bp, synthetic construct
  source 1..120: mol_type = other DNA
atgcactggctcttttgacatgtaaatacagaaatagtctcatattcaaggatggaacaaatacacaaaaatggaatttcatggactctcaacactagtttgtgacctctgaaatgagag

SEQ ID NO: 34411 - DNA, 120 bp, synthetic construct
  source 1..120: mol_type = other DNA
tgtctagaagttaatatacctaattgtgtgtctagaggaaatgtcatattaatttgatgtttaagcagttctaatgtattggtattaaaatgggttagtgtatgtgtgagcacagatatg

SEQ ID NO: 34412 - DNA, 120 bp, synthetic construct
  source 1..120: mol_type = other DNA
aaacatttttgtaaacagctcagtgaggactttggactggcataaatcataggaatatgattatgaggatacatccaattttcagattgggcaatgtatacagtttattatcatttctga

SEQ ID NO: 34413 - DNA, 120 bp, synthetic construct
  source 1..120: mol_type = other DNA
cagacaagataaattaaatatttctcaaactcctactgtgagtaaggcaatgtggagaaggtcaatggttatggtgagggatggggtatagggggctagaaatgtaggatgaccaaggtt

SEQ ID NO: 34414 - DNA, 120 bp, synthetic construct
  source 1..120: mol_type = other DNA
acatgaacagatggagaaaccatgggatatcaaatgtacatatatgtatgtccaaattataacatggcagagctactctgaaaatgcagaaactacatatccctactcaaaactgactat

SEQ ID NO: 34415 - DNA, 120 bp, synthetic construct
  source 1..120: mol_type = other DNA
atatctaaaatgagtctaactgaaaaggtacaataacaatattccaaatatgccttaactctatttctacctcaaatatcactgtgcttatgtatgaaatttcaaatttcatggtccatt

SEQ ID NO: 34416 - DNA, 120 bp, synthetic construct
  source 1..120: mol_type = other DNA
ttctacatgaggtttccccttgcccaaagaaacctaacagtccagaaagatatttatgtaagtttgatttctgtacagatgtatataatactgatattatatataatacatattatatta

SEQ ID NO: 34417 - DNA, 120 bp, synthetic construct
  source 1..120: mol_type = other DNA
gtagtatcctagtctgcctctattatttgacaaatgatggaaccaaggcccagagaaagaactgacctttaatgagcagctattttatgtcaggtaatgtgctaggtaccatacctatgt

SEQ ID NO: 34418 - DNA, 120 bp, synthetic construct
  source 1..120: mol_type = other DNA
caacattaatttttaatattgtcaaagatatacaatgccatactataaatacattttgttccaaagaggcaaagttcatcatttatttaggaagctgcattaactccttacgtccactta

SEQ ID NO: 34419 - DNA, 120 bp, synthetic construct
  source 1..120: mol_type = other DNA
ccagaccattgttgaggtttagctttcctatctaatatatctactgtgaccttggaaaatcaatcatcttctctgtctgagactcaatttcttcttgtgttaaatggggatgatggattg

SEQ ID NO: 34420 - DNA, 120 bp, synthetic construct
  source 1..120: mol_type = other DNA
caggaagtgaatgagcttcagaatcagggaacatggtttgtaacactgactttttagctgctgggccttgcataaaactgtttaagatttctgagccttaggatctttaactataaaaat

SEQ ID NO: 34421 - DNA, 120 bp, synthetic construct
  source 1..120: mol_type = other DNA
ccagttggtaggaattaaataagctaaaacatatgtcatatttttggagcaatgttttcagctactgttgagacacatttaagaagatgttagggccatgttattgacaattttgtggag

SEQ ID NO: 34422 - DNA, 120 bp, synthetic construct
  source 1..120: mol_type = other DNA
cttgctatatgtcacacaaatactatttggtaaagctgttatttaaatacaaatgtttacattccaaattctgtattcttaaacacaagagtagcatttattgcttctatctctactcct

SEQ ID NO: 34423 - DNA, 120 bp, synthetic construct
  source 1..120: mol_type = other DNA
agttttgtaaagaagtaggagttgaggagatggagaacaaatgtgtagatgttttacatgtaaagatggtaaaactctaattccttttaactgtgggactaaagggtgagaagatgggtg

SEQ ID NO: 34424 - DNA, 120 bp, synthetic construct
  source 1..120: mol_type = other DNA
aacaatagtacaggggaaaagaataaatattaaaaagaaaaatatagtgctatttattgtttataatgatcttccaccaagaaactccaagaaaaacttctggtagtataaagagaaaca

SEQ ID NO: 34425 - DNA, 120 bp, synthetic construct
  source 1..120: mol_type = other DNA
gaccagagattcacaacactggctgtgcattaaaattgcatttggaggtcagaatctatcctaagaaattataatagaggtctgagttgaagcctagctatctttgttgtcagcctgaca

SEQ ID NO: 34426 - DNA, 120 bp, synthetic construct
  source 1..120: mol_type = other DNA
gtttttgtacatagttgatcttcagatagagataaggtgaatatggtatttattttttatttgctgagtggattctaaatttctgttacttccccaaagagcaaccattggcacacatgc

SEQ ID NO: 34427 - DNA, 120 bp, synthetic construct
  source 1..120: mol_type = other DNA
attttattgttataagagttatttttacacagtcctcttcaaaacaagctatttgaaatgttttgctccaaaacgtgtatccattaaagtggagtcaaaatttgattgctctcagccaac

SEQ ID NO: 34428 - DNA, 120 bp, synthetic construct
  source 1..120: mol_type = other DNA
caaatttcaagtacgcaatacagtatgattaactatagtcatcatgttgtacgttaggtctccagaactttagattccctgttttgtgacacctgctttaggcttgctgagggtcattgt

SEQ ID NO: 34429 - DNA, 120 bp, synthetic construct
  source 1..120: mol_type = other DNA
cctatgaaaatagttcaatatatacctcatatgactgttaataatttccaacttattttagaaaacctaaaagcggaaccaaaactaacacaatttggaagaatttgaaactatactttc

SEQ ID NO: 34430 - DNA, 120 bp, synthetic construct
  source 1..120: mol_type = other DNA
ttgacagagattgcactgaatctgtagatttctatgggtggtatggacattttaataatattgattcttcagtccatgaacatggagtatttttccatttttttggtattgtctttaatc

SEQ ID NO: 34431 - DNA, 120 bp, synthetic construct
  source 1..120: mol_type = other DNA
caaagtgtgagagggcgaaaggaaaacctaccttcgatcacacatcctgactggggaatctgaaaatccagatcacaagaggatttaaccttacctagaaatgaaatggatttaggaagt

SEQ ID NO: 34432 - DNA, 120 bp, synthetic construct
  source 1..120: mol_type = other DNA
taaccagaggtcctgagtgtgtccatgtgacaacttcatcactagcataaccagcattcaagaaagccagcatactaaacatattaacaacaaagagctctcgcagagtctactttgctt

SEQ ID NO: 34433 - DNA, 120 bp, synthetic construct
  source 1..120: mol_type = other DNA
ttttcaaatatgaagaattgtccacagaatagcatttaggatggtgtagacttaagagggaaatgcatgtaccatcagtacttttccttgggcagtctagctaggatgtcacccacagga

SEQ ID NO: 34434 - DNA, 120 bp, synthetic construct
  source 1..120: mol_type = other DNA
attaaaagcttttctactgaataatccatgtgcatcaccttccaaaatttcacttaaggggcctacacattgacaaaaacacattttattccctttgcttaatttcattagtgggacttt

SEQ ID NO: 34435 - DNA, 120 bp, synthetic construct
  source 1..120: mol_type = other DNA
gtatgaattctcttttacctactcattagcagactcataattttagaaatcttaattgagatccatgtgccagttatactaattagtgtataatttcataatctgagtacttacagaaag

SEQ ID NO: 34436 - DNA, 120 bp, synthetic construct
  source 1..120: mol_type = other DNA
tattcattaacctactgaaggatatcttggttacattcaaattttggcatttatgaataaagctgctataaatatctgcttgctggttttgtgtaaacataagttttaagctcctttggg

SEQ ID NO: 34437 - DNA, 120 bp, synthetic construct
  source 1..120: mol_type = other DNA
aaccctattgtgaactgtgcatgcgagggatctaggttgtgcgttccttgtaatctaatgcctgactatctgaagtggaacagtttcatcccgaaacctacctctgtccatggaaaaata

SEQ ID NO: 34438 - DNA, 120 bp, synthetic construct
  source 1..120: mol_type = other DNA
gcttccttgctcctcagcttgcagatggcccatcatgagacttcaccttgtgattgtgtgattcatgtttcctaataaacttcccttcatatatacatataccctattagttctgtccct

SEQ ID NO: 34439 - DNA, 120 bp, synthetic construct
  source 1..120: mol_type = other DNA
gcacacacacacaaacaaaatttggctttaattggaaacattgtctttgttaaatcaagccatatgcataatttatctcttggctaatttttgacttttaacctatttgagctctctcat

SEQ ID NO: 34440 - DNA, 120 bp, synthetic construct
  source 1..120: mol_type = other DNA
ttttgaaccaaaacagatttccctatctcactaaagtcattatttgaggtcccttgttgccaggcactagctgtatagaacattgattttcagagaaaatgctatgataattgaagaatg

SEQ ID NO: 34441 - DNA, 120 bp, synthetic construct
  source 1..120: mol_type = other DNA
gactttatttttaactattgtagattttaaaagcctattgttatatcagacagccaattgattgaaactaagtaaatacatttttcccaaatatctgtatattccatgtgtaattcttat

SEQ ID NO: 34442 - DNA, 120 bp, synthetic construct
  source 1..120: mol_type = other DNA
gactcacgaagctagaagagctttcatgtccaaatctttcactttatcaatgaggaatcttaggaaaccagagcagtaaaatgactttctctgcttatgtaacgcatctttgatatctat

SEQ ID NO: 34443 - DNA, 120 bp, synthetic construct
  source 1..120: mol_type = other DNA
gtttttccagacagtacactttcggataccctcaaattacatttcaacaattagtggtttgttgtgtgagcaaatttctttatagagggaaattaatggctggtatatcctagctaagga

SEQ ID NO: 34444 - DNA, 120 bp, synthetic construct
  source 1..120: mol_type = other DNA
ctaagtaaattgccaagatcaccagcctaggaagtaatggagctaggattcaggcccagacagtctagctccaggaattttgttttaactatcattactgattatcatggccacgttgat

SEQ ID NO: 34445 - DNA, 120 bp, synthetic construct
  source 1..120: mol_type = other DNA
ggtacaacttgtgaccatcaaaagtgagaagtaggggattagcccttagctagcaaatacaacagagctggtagccctgtcacaagcagtagcacatttaggacttagttttccatataa

SEQ ID NO: 34446 - DNA, 120 bp, synthetic construct
  source 1..120: mol_type = other DNA
agtccacttctacctctgtgttttataattttaggacttatttaaaaacttctagataaaaagaaacacagtattttagatgtgcattatctggtcttttgtcaggagttgagttcagaa

SEQ ID NO: 34447 - DNA, 120 bp, synthetic construct
  source 1..120: mol_type = other DNA
ggagtgaaaataggaagagagtacagtaaagataaagtggagaaacatgggaagagggaaaggggagcaagagagggaaaattcaaaagagaggccgagagagagaaaatgtgttaaaga

SEQ ID NO: 34448 - DNA, 120 bp, synthetic construct
  source 1..120: mol_type = other DNA
agccagagaaaactgtctcctcctttgctactatcagcctcaggagagagaatgggttactcatggaccagatcatcttaaagaagaagcagtgaaataccttagtaaaatattagaaac

SEQ ID NO: 34449 - DNA, 120 bp, synthetic construct
  source 1..120: mol_type = other DNA
ttttaccagcaagaggagaaagcttagttcctttaggcttgggttggaatagcacccataattaaagatgtctgtcaacccttgttatgcttctagtcttaccatttttcccccctgaac

SEQ ID NO: 34450 - DNA, 120 bp, synthetic construct
  source 1..120: mol_type = other DNA
atattggaacatattttcagtttttcatggctatagagataacaaatgtcttactagagaagacccagtacaacatgaagacccagttttcatggacagctaaattattttcttataatt

SEQ ID NO: 34451 - DNA, 120 bp, synthetic construct
  source 1..120: mol_type = other DNA
gcaatatttatccttagtacccctcaattaatggtgcataaagaattagaaagtagttgaacatagagttaaattgtaattggcagttctgtgagatgaaaatttgatttgcctaagtaa

SEQ ID NO: 34452 - DNA, 120 bp, synthetic construct
  source 1..120: mol_type = other DNA
acagattttgtgagtgaggagaggtttagactctgacttttttcattcaactgccatatatataatgagaaggaggacaatagtctgagcactttttctacgtctatagctcaatataca

SEQ ID NO: 34453 - DNA, 120 bp, synthetic construct
  source 1..120: mol_type = other DNA
actggttcttttaaaaatgtgtgagcttctattttgcatatactttcataccatctttccaaaagaaaggtaatagccatgaataaatattgtcttggatctaaagttgctacaacttcc

SEQ ID NO: 34454 - DNA, 120 bp, synthetic construct
  source 1..120: mol_type = other DNA
ttcacaatgaatgacatagaagcaaagattagtgaacatactaataagcagggaatcataagctataatgagtagaataatcaacagaaactgagagctgacacaaatattaggattagc

SEQ ID NO: 34455 - DNA, 120 bp, synthetic construct
  source 1..120: mol_type = other DNA
tgggaggtgattggattatgggagtggatttctcgtgagtggtttaccaccatcccccttgttattgtccttgtgataatgagtgagttctcattagatctgatcatttaaaagtatgca

SEQ ID NO: 34456 - DNA, 120 bp, synthetic construct
  source 1..120: mol_type = other DNA
cgtgatgtaggataatatagtctgaaggcagtctgtgataagttaaaggtatatactattagtagtaaagcaaccactaaaatgaaaaagttgtatctaaaaagacaacagaaataaaat

SEQ ID NO: 34457 - DNA, 120 bp, synthetic construct
  source 1..120: mol_type = other DNA
cagtaacctcaatggaattcaactgtatatcaataagggaaatatacctggaaacatctccaaataattaaaaactaaatagcacatttttaaataaattattggtaccaaaataaaaca

SEQ ID NO: 34458 - DNA, 120 bp, synthetic construct
  source 1..120: mol_type = other DNA
tgatttcaactagatgacattctggaaaaagcaaagtaaaaagattaattgttgccaggggttgtgaggggtctggagttggagtggggaggataaacagttggaacatggaggattttc

SEQ ID NO: 34459 - DNA, 120 bp, synthetic construct
  source 1..120: mol_type = other DNA
tccttgatcacattatgctagaatttgggtgacctactccacacacaacacaggaaattgatggtaacttgtgaagtgagtagaagtgactgaatttaatttggaagagtccccaaaaaa

SEQ ID NO: 34460 - DNA, 120 bp, synthetic construct
  source 1..120: mol_type = other DNA
gtcacatcaatacttaggtcaaaaccatcacatgacacatagtactataagatcatacttaaaatccctcttatctgtaagtctttatattaactgcttagaattgcagctgtctccctt

SEQ ID NO: 34461 - DNA, 120 bp, synthetic construct
  source 1..120: mol_type = other DNA
ttgggacacacaacacaaagaatggataaggaagattttatacatacacatgctgaatcctctccgtggtgaaacggaatactcagagccattttatttagtacactaggatgtgtttgg

SEQ ID NO: 34462 - DNA, 120 bp, synthetic construct
  source 1..120: mol_type = other DNA
acaggaatccctagaaaatgataaaccccaggtatatgtagtacaaagctgatcctgggtaattaatggtcagtcaggaagtgcagttactgcaaagagcatgctacctaagaattcctc

SEQ ID NO: 34463 - DNA, 120 bp, synthetic construct
  source 1..120: mol_type = other DNA
ccaatgtctccttcctaatctaggctcctgagacctctgaaatgttttacattttgttatatgctatatggtatcctgttttaggatttcctagaagcaaatttaaggtacttgctttgt

SEQ ID NO: 34464 - DNA, 120 bp, synthetic construct
  source 1..120: mol_type = other DNA
gtcgagcagaggcctcagaggagcctgaataagagagagtatttgttacaatatacaaatacatacacaaagccagtactttgcagttcagcacttcccatgttattgggtccacagaaa

SEQ ID NO: 34465 - DNA, 120 bp, synthetic construct
  source 1..120: mol_type = other DNA
tgcaatatttgtatttattgtcattctttaatttaattttatttatttcaatagctttcagggtacaagtattttttggttacatggatgaattgtctaatggtgaagtctgggatttta

SEQ ID NO: 34466 - DNA, 120 bp, synthetic construct
  source 1..120: mol_type = other DNA
ttgtaaaacaacctctaccactagagtaaaagccatttgaaagtcaatgcactacaactgctgtttgctatggaacactgtgcaagagagtactatttgaaatatttgaaacactttatt

SEQ ID NO: 34467 - DNA, 120 bp, synthetic construct
  source 1..120: mol_type = other DNA
tggatgccagaaagaaaactcccctaagtatcccgaaaacatcctctacctctctgccatttctgtctataggaaattgggcttcatggtaattcacattgtagcaaactttcgtgaata

SEQ ID NO: 34468 - DNA, 120 bp, synthetic construct
  source 1..120: mol_type = other DNA
atttgtgggatctaaaagtcaaatcaattgaactcatggacttggagagtagaaagatggttaccagagactgggaaggtagtagggagtgtgagggaggtgggggtggttaatgggtat

SEQ ID NO: 34469 - DNA, 120 bp, synthetic construct
  source 1..120: mol_type = other DNA
tttctctatttttgtctgcctgtcttatttcagaaagacagccttcaagctctgagattctatgctctgcttagtctattctgctgtcaatacttgtgtttgcattgcgaagttcttgtg

SEQ ID NO: 34470 - DNA, 120 bp, synthetic construct
  source 1..120: mol_type = other DNA
ggctgctttttggtagagcaggcatgctgcattgaggggctctcttcctcatctggactacctgaattctccaaagctggtaggctgaaggagctgagttggccaaaccacaaagatgga

SEQ ID NO: 34471 - DNA, 120 bp, synthetic construct
  source 1..120: mol_type = other DNA
aagaaatgctaataagacagacctcagtataaagtggcactgttcccactatacagataacacatttttcctagctatcggtagtgtcaatggcagtaataacagattcatactgcctga

SEQ ID NO: 34472 - DNA, 120 bp, synthetic construct
  source 1..120: mol_type = other DNA
acagctgtaccaatttatatccccaacagcagtgtgcaagtgttctctttcctctacatcctcaccaatacttgttatcttttcaaatttgataatgaccatctaaataggtgtgaagta

SEQ ID NO: 34473 - DNA, 120 bp, synthetic construct
  source 1..120: mol_type = other DNA
gcaccatattgttttgtttactatagttttgcaatatactttgaaatcataaaatgtgatgccccaagctttgtcattacaggccaatatccttgatgaacacaaatgcaaaaatcttca

SEQ ID NO: 34474 - DNA, 120 bp, synthetic construct
  source 1..120: mol_type = other DNA
tttcaaaacaaaatcacacccttccaacagtcctccaatgccttaacttattcctgtattaaaccaaaagtccatgtccaaaagtcttgtctgagacaaggcaagccccttctgcctatg

SEQ ID NO: 34475 - DNA, 120 bp, synthetic construct
  source 1..120: mol_type = other DNA
tttgtctggggacacagccaaaccatatcaagcaacatcaaaattaataaatttaggggcaaatttaaccaagggagatgaaagatctctacactgaaaactataatgcatcagtgaaag

SEQ ID NO: 34476 - DNA, 120 bp, synthetic construct
  source 1..120: mol_type = other DNA
cgtgaaaaaaggaagtattttctttacttttgcattcagtaatttaatgtacattcagctctttaaaagaacagaggataaacttaaagttattggaactagaggaaagttatgacaatc

SEQ ID NO: 34477 - DNA, 120 bp, synthetic construct
  source 1..120: mol_type = other DNA
aagaaggaagaaggctttaattgggtgctgcagccaaggagatgggagctcagtcttaaatccctctccttgactgtctaaaattaggtttttatatagtggggaagaaatgtaacaatg

SEQ ID NO: 34478 - DNA, 120 bp, synthetic construct
  source 1..120: mol_type = other DNA
acaaggctgaaaggaaatattactctgattttagtgatgagaaatttatactcagagatttagccttttcacccagctaataaagggtaatgccagaacttgaacaatgtcttctgaatg

SEQ ID NO: 34479 - DNA, 120 bp, synthetic construct
  source 1..120: mol_type = other DNA
tgtctaattcaccatgccacattgaaatattgcaataaaacattgtgatttataacaccatattgttataaatctaaaaatgggtgacttagtttagtcatattttgtaggttcaaatgc

SEQ ID NO: 34480 - DNA, 120 bp, synthetic construct
  source 1..120: mol_type = other DNA
aaaaaagaagaaactgaacaactttgcatactttagtaaaacaaaataattcaattaagcttattcagggcatcttggtgttttagcaaagttgaaaaggacacttgactcttgttaagg

SEQ ID NO: 34481 - DNA, 120 bp, synthetic construct
  source 1..120: mol_type = other DNA
aaaaattaaaaaaaaaaaaaagaaaattgctggtgacagattttaagtgttctcaccacacaaaaaatgataagtatgtgagctaatgtgtgttaaatagcttgatttagccatttcata

SEQ ID NO: 34482 - DNA, 120 bp, synthetic construct
  source 1..120: mol_type = other DNA
tgtaagtggtcagggtttgctcattgagaaggtagaatatggagcccacatttaatgtggtaagggattttgtcaagtaaatatccaggggaataatcttcctgcagagggaataattaa

SEQ ID NO: 34483 - DNA, 120 bp, synthetic construct
  source 1..120: mol_type = other DNA
tgcaagcagagacctactgtagtactcttcaggagagaatggtggcttgcacaaggatggaagcaatgaaggtggtgaaaagtggtcagtttctatatttattaggaaacacctaggatg

SEQ ID NO: 34484 - DNA, 120 bp, synthetic construct
  source 1..120: mol_type = other DNA
tgaaaatctcttttaacaaataaaaagaaaatcacttctaattatatagtctgttggcctcttgtcattgctgtagcatggttgtttattttgtgtttttgcccaggtgcttaattcagc

SEQ ID NO: 34485 - DNA, 120 bp, synthetic construct
  source 1..120: mol_type = other DNA
ccacaacatacaccaagagctgcagcagagcaagttatacctagtcccgttagcctgagtggtctttcgggtccctttcttatgactgtgcttttctctgcctatactcactttgacttt

SEQ ID NO: 34486 - DNA, 120 bp, synthetic construct
  source 1..120: mol_type = other DNA
gtatcagttgtgaatagataaccataataaaattcagtaggtttgttcttgagagtgaggtgtcacaaattctgtttggcaagatatggactatgaaactggcaaaattagccttctggg

SEQ ID NO: 34487 - DNA, 120 bp, synthetic construct
  source 1..120: mol_type = other DNA
tgacagctctaacctgaaccagagtatttatgttattaaaatagtcttggaatcctaggtcaggcaattccatctttctgaactgccctctatacacttctccaccagcaatactcagca

SEQ ID NO: 34488 - DNA, 120 bp, synthetic construct
  source 1..120: mol_type = other DNA
agaaactcacagtacagtgacagtcttacattttgtaaatatttaatagctaactcgacagtgctatgactgacaggttatgtgtgattttatctcactccccattcaatctttgaatga

SEQ ID NO: 34489 - DNA, 120 bp, synthetic construct
  source 1..120: mol_type = other DNA
gtcatgaagctctgtctaaaagagtcccattcaggtgagtttgtacacaccatcaagcagcaagcccctcatcagttagggttaggaaaccaaggttcgattctcaggaaatcacaattt

SEQ ID NO: 34490 - DNA, 120 bp, synthetic construct
  source 1..120: mol_type = other DNA
atgtgctcctgcttgtaccctgtcttgattttagcatcttttttcccccagtcttaggtaagaaggatgaatcgaaggtcagcttcagtccacgtgcaagctgatcttccacagtcatct

SEQ ID NO: 34491 - DNA, 120 bp, synthetic construct
  source 1..120: mol_type = other DNA
tcactccggaggttttcacttttttaataaatattctgctagcttttagtttcaacacctatgtatttattcatttttattagtttaatctctttaagaatatgtgtgaacttttgtcat

SEQ ID NO: 34492 - DNA, 120 bp, synthetic construct
  source 1..120: mol_type = other DNA
tgctatgttttcttcagcagttctatgggttttgtagcaggagagttttctggttatttttccatattaacagaaatggaaatctactaggttttacatgcttaaagtttaatttgtccg

SEQ ID NO: 34493 - DNA, 120 bp, synthetic construct
  source 1..120: mol_type = other DNA
tcccacggggatatataccaccacagtgaggacaacagatgcctcttccctcactttcctatctggcttcattccttatgaatctatttcttttagtgattagctcagagaagcttattt

SEQ ID NO: 34494 - DNA, 120 bp, synthetic construct
  source 1..120: mol_type = other DNA
ctcagctgtctaaaagtttgcctgagcaaatgaattggcaatgtattcaatccaattcactccctaatatcatcatgataaaaaattaactgaaatattttagatagggccaggccaaaa

SEQ ID NO: 34495 - DNA, 120 bp, synthetic construct
  source 1..120: mol_type = other DNA
cacaaaaataattttatctggagagaaaccattcttattcatctttgtatctcccatgatataatggcacttttgttgttgtttttttcatttatgagctgtgaggatatcaaagccaat

SEQ ID NO: 34496 - DNA, 120 bp, synthetic construct
  source 1..120: mol_type = other DNA
actcaatgtgaataagctcagctgtccaaggctacccattcttgggcttccaagaattcacttcttgattcaaatatatatccatttcacagggaaccaactggctgaaggaaccctaaa

SEQ ID NO: 34497 - DNA, 120 bp, synthetic construct
  source 1..120: mol_type = other DNA
ttcagcttcttggatctgtaggtttgtgttttgtttgccagatttgtaaatttttcatctattatttcttcagatacctttttagccctaccctctttcttctctccagaactctgaaga

SEQ ID NO: 34498 - DNA, 120 bp, synthetic construct
  source 1..120: mol_type = other DNA
cctgacttttcactaagtcttctctgataccatctactctggtggggaggaagaagggcacctccttactacagggttgtgcctggcaataaattttgggttctccattcagctttgcac

SEQ ID NO: 34499 - DNA, 120 bp, synthetic construct
  source 1..120: mol_type = other DNA
gacctgtatccgttttgtttctttgtctattcctttgaatttagaaggaacatttttgaaattaattttttcttttatttccaattgttttgttagttgtcacttaagtttttttttaac

SEQ ID NO: 34500 - DNA, 120 bp, synthetic construct
  source 1..120: mol_type = other DNA
ggggtgtagtttggggcagagtttgggaggaataacctatgtttttgaattaaataatttttccttaagtccaacatttaatgagcacttacaatatgctagctattgggtgtagccttg

SEQ ID NO: 34501 - DNA, 120 bp, synthetic construct
  source 1..120: mol_type = other DNA
tctgctgctgtgcttgttccatgtaaactgatcctctacagcattttgccaatcattatacagtgcttggttttttttaagtttttcttggtgaaggcggcagaggaataatacagtatt

SEQ ID NO: 34502 - DNA, 120 bp, synthetic construct
  source 1..120: mol_type = other DNA
attaaccccttatcagatatgtgatttgtaaatatgtcctcctattctgtaggttgccttttcatttagtggtttcctttgctatgcagaaatgttttagtttaatgtagttccaattgt

SEQ ID NO: 34503 - DNA, 120 bp, synthetic construct
  source 1..120: mol_type = other DNA
atatgtggattttcaacagcatggaagttagtgcctctaacccccatgttgcgcaagggtccagctgtattttttaaaatttattgttaattgtattgtctacttaattacttttttaat

SEQ ID NO: 34504 - DNA, 120 bp, synthetic construct
  source 1..120: mol_type = other DNA
cagcagttcagagtaagcaggtgtaaagggacagccttaaaataggagtctaatttttaaaatggaaatataacattggctttcgtcgtcttagctggcaaagtaagtctaggttaatga

SEQ ID NO: 34505 - DNA, 120 bp, synthetic construct
  source 1..120: mol_type = other DNA
ttttgttgtgcagaaacttcttaacttgatgttatcccacttgtccatttttttctttggttgcctgctcttattgtctattgctcaagaattctttgcccagaccaatatcctggagat

SEQ ID NO: 34506 - DNA, 120 bp, synthetic construct
  source 1..120: mol_type = other DNA
tttggattcttttatatttttcttatggctcattgctccagctggaacttccagtgctatgttgaataacagtagtggcagtgggcattcctgtcatgttccagatgttagaggaaaggc

SEQ ID NO: 34507 - DNA, 120 bp, synthetic construct
  source 1..120: mol_type = other DNA
tgtacttactattatcattaggttttgtattttcaggtgattatttattgcttattaatgtccttttctttctaattgaagtactccctatagcatttcctgtaggcctggtctgatatt

SEQ ID NO: 34508 - DNA, 120 bp, synthetic construct
  source 1..120: mol_type = other DNA
gtatactgccagactaccaccaatactcccttatgacccaaggtctcttaagtcaacttattgtgaatgctgcctgccctgggactcacccttcagggcaatggcctctcctctgactca

SEQ ID NO: 34509 - DNA, 120 bp, synthetic construct
  source 1..120: mol_type = other DNA
gggtcagctgaatttgctctggttttgctttctgctttaacaggacagcacttatttcagcgcctcacgattgctgtgttttctctccttcggtgtccagagaagctctctgcaccatgc

SEQ ID NO: 34510 - DNA, 120 bp, synthetic construct
  source 1..120: mol_type = other DNA
tatattaatcagcaacaaaatggcatagaatgagaacagtgttaaggaaaccttgaaaataataaaaagtatgtggcttcttacatatgacatactaaggcaatgccattatcatgctgt

SEQ ID NO: 34511 - DNA, 120 bp, synthetic construct
  source 1..120: mol_type = other DNA
caactgtcatttaaaatagatagcatctaagttgccttataccccaaatgtaaatggaccttcatattttgaacagtgaagccaattacagaaatttgtcatcattcttgtcatctggga

SEQ ID NO: 34512 - DNA, 120 bp, synthetic construct
  source 1..120: mol_type = other DNA
gtatttctgttttaagctctttgagtaatttccattgctttccccagtggctaaactaattgacatttccaccaacagcctataagcattccctgttttctgcaacctcaccaacgtgat

SEQ ID NO: 34513 - DNA, 120 bp, synthetic construct
  source 1..120: mol_type = other DNA
gggagatagtaaaatggcagctggttttaccctagaagacctcttactagataaattccagctgtgaatatatgatgtttccttaaatgggcaaagagaagttatcccatacgtaaaatt

SEQ ID NO: 34514 - DNA, 120 bp, synthetic construct
  source 1..120: mol_type = other DNA
gctttgaaatctttttttttaaagaaagaaaatggtggactttaatctttatttacaggacactgtgagatatgaaattccattgaaatctttttgctggtgaagggtcttgccttgatg

SEQ ID NO: 34515 - DNA, 120 bp, synthetic construct
  source 1..120: mol_type = other DNA
actgcaggatgaatgttttgttagcagtcatgaaaacaacattaatttccttttatatctttttcagaagtgttgggcgaccagttgcattgtcaataagcaaatattttgaaattaatc

SEQ ID NO: 34516 - DNA, 120 bp, synthetic construct
  source 1..120: mol_type = other DNA
ttcctttcatttgaacacttagaggccattttagcgtcattaactggcctactttaaggagtgttgtatctcagaaaataggtaggctgaaggagaaggagagatacatggaaagggcca

SEQ ID NO: 34517 - DNA, 120 bp, synthetic construct
  source 1..120: mol_type = other DNA
tcagactttactagtttgtgaaatatctgcataccaacaaccataacaagcagccaaatggttaggctgagagaactagatgctttagtagctactgtatttggcatttatttgtctcat

SEQ ID NO: 34518 - DNA, 120 bp, synthetic construct
  source 1..120: mol_type = other DNA
tcttcagtggtaagacactgagagtggatggaggaaagtcacagaagctgggctgaagaggaaggaagctggaaacactgcatagggctacttcacaccaggactcattcttggcccccg

SEQ ID NO: 34519 - DNA, 120 bp, synthetic construct
  source 1..120: mol_type = other DNA
aaggccccaaccacggagctgcatagattctcaaaagccactcagcacaaaatggcttaagcctgccagtcttcccgtgggagcgcagccagcatcacagctgctgctgtctgctgtcta

SEQ ID NO: 34520 - DNA, 120 bp, synthetic construct
  source 1..120: mol_type = other DNA
gtgtatatatacacacacacagcacccacacacatagtgtatgacacatataatgtgccttatttgcatattatatttatgtatgaatgtgtctcaatgatagtgtcatttttataataa

SEQ ID NO: 34521 - DNA, 120 bp, synthetic construct
  source 1..120: mol_type = other DNA
tgtaatgctccctgcatagtcagtgtcatcaaaagcttattaactaagagaaacaaaggtaagtgttaaaatttaaagatcacacagtgagggaagtcttggaaaattggcagaaacctc

SEQ ID NO: 34522 - DNA, 120 bp, synthetic construct
  source 1..120: mol_type = other DNA
cccatcatgagcaatgtacacacactcttggttttgccattttcttgtctttttgttgggccagaaggataccattgaaaattactgcttcagtgctttaaagagttaatgtagcttcca

SEQ ID NO: 34523 - DNA, 120 bp, synthetic construct
  source 1..120: mol_type = other DNA
ttgatggacacttagattgctttcaagtcttggctatggtgaacagtgctgcaacaaacatgggggtgcagatatcacttcattatactggtttcctttctttggggtatatatgcagca

SEQ ID NO: 34524 - DNA, 120 bp, synthetic construct
  source 1..120: mol_type = other DNA
gttactatagctctgtagtaaaatttaaagtcatgtaatgttattcctccggttttattcttttttctcaagatagctttgtttactctgggtgtttggtgttcgcatataaattttagg

SEQ ID NO: 34525 - DNA, 120 bp, synthetic construct
  source 1..120: mol_type = other DNA
tgactcactggtaattcagcattttatttaatttccctgtgtttgtatagttcccaaatacctcttgttattgatttctaggcttatcaaatggtgtttttagaagatgcttgatatgat

SEQ ID NO: 34526 - DNA, 120 bp, synthetic construct
  source 1..120: mol_type = other DNA
gaattctaaattcatactctgtgctatcttgaatctctttgagttttctcaaagcagatattttgaattatctgtctcaaagggcatatatctctgtttcttcaggattgatctgtgatg

SEQ ID NO: 34527 - DNA, 120 bp, synthetic construct
  source 1..120: mol_type = other DNA
ataagctgatacctaaggtgtaagaaaagttccctttgcttttccctctgcttttctgaagcagtaggagtctttcatcacagccaccacagctgggaatgtgctgggtctcacctgaag

SEQ ID NO: 34528 - DNA, 120 bp, synthetic construct
  source 1..120: mol_type = other DNA
tgtgtgtagttagttgttagacttttatgttcctgtcaagtggacaatcagtggaggcttctggttggccatttttctctggggtgggacagagattttaccaaagactaattaatgcat

SEQ ID NO: 34529 - DNA, 120 bp, synthetic construct
  source 1..120: mol_type = other DNA
tcttcctaaattttcacattaaaaacgtcaatgtaaggtgacatgtattggtagttagatcagaaaagaagtaaataattctgagttctattccttgaacttctattgattttaatacac

SEQ ID NO: 34530 - DNA, 120 bp, synthetic construct
  source 1..120: mol_type = other DNA
agatttctgtacatcatattatatggctcagattaagacacacactttacaaaatctagcatttctgagtataaaatcttctgacaaaattttttttcttatgagcacctaccatgtgat

SEQ ID NO: 34531 - DNA, 120 bp, synthetic construct
  source 1..120: mol_type = other DNA
acatttaatctatgcataactgaaagcctaaaagatctctagcagatttcctgggttgttatcccataaggctcataatttctaaaatacaccaaagtttatgtttaggaatacacatgt

SEQ ID NO: 34532 - DNA, 120 bp, synthetic construct
  source 1..120: mol_type = other DNA
aggctgaattgagatgaatacattcactgttgtttagaggatttgtttttattttgatttgttttacagaaagatattcagttttaaataccttatagaatagtcttgcccatatctccc

SEQ ID NO: 34533 - DNA, 120 bp, synthetic construct
  source 1..120: mol_type = other DNA
tacacctggtacctgcccttagggagcttgtagtcaaattagtgcagataagaaacaaaggcatataattataaactcaggaaaaaactgattccagaatgaagataaagtctggaccac

SEQ ID NO: 34534 - DNA, 120 bp, synthetic construct
  source 1..120: mol_type = other DNA
gatggtgtgctggagccaacaagtacccacttgtgagagccaattgtgcatctctttccaattctatctagtgatatcatgttgttagcttgaaacaggaaatagtgggagtatttatga

SEQ ID NO: 34535 - DNA, 120 bp, synthetic construct
  source 1..120: mol_type = other DNA
aaaggggaaaccaaatatccacctatgcatacacatgcttacatgaaaaaataaaatctaaaatacaaaaggggcaaagagcaatggtttattttctctttaggatatatcttgagagga

SEQ ID NO: 34536 - DNA, 120 bp, synthetic construct
  source 1..120: mol_type = other DNA
cagcagtgagaaggttttagcaccccagaaaaaaagcaagccttatccagctcaatgaattgtcaaaatcaaagtagctatatgcacaggagccactttggattacccattccttttatg

SEQ ID NO: 34537 - DNA, 120 bp, synthetic construct
  source 1..120: mol_type = other DNA
ttagttattatatttttatactttattattacaaaattaagtttttcttagcaccaatgattgtcagcgtggttttttgtttgtttgttttttcttgacatggagtctcgctttgctgtc

SEQ ID NO: 34538 - DNA, 120 bp, synthetic construct
  source 1..120: mol_type = other DNA
tggattctggagctagaccgtctgggttcaaagtcttacactttgacactctctaactgtgtgaccttggacaagttaactaatcattctgtgcctgtttctgtatcttctaaaatggag

SEQ ID NO: 34539 - DNA, 120 bp, synthetic construct
  source 1..120: mol_type = other DNA
atctcctaggtttgtgatatgagcagtgatatagcaatgatttcaaatacagcatgctttaaattccaagctggtggaaatgtacctgtatattaattaggtgtttactatttatggcca

SEQ ID NO: 34540 - DNA, 120 bp, synthetic construct
  source 1..120: mol_type = other DNA
tctttctctgtctctcaacttacttctgcatttatactaagagaagatacacagaatagacactaaccttgcagacacaaacattctataacatcctaattaatctggtaggtgggatta

SEQ ID NO: 34541 - DNA, 120 bp, synthetic construct
  source 1..120: mol_type = other DNA
gcatctaatattgaagtttgatttacttcaacatttgaaaactctgttaccttaatatctttcaaggacttcaaatactttttgatttattccaagctttcattttattattgaactgga

SEQ ID NO: 34542 - DNA, 120 bp, synthetic construct
  source 1..120: mol_type = other DNA
aacgtatctgcttgtatgtatttgtttaatcctcatagtatgtgtaattcatttctatatacaagtacatgtcatggtatttacacaatacatatggtcaaatagttatgtgctcataaa

SEQ ID NO: 34543 - DNA, 120 bp, synthetic construct
  source 1..120: mol_type = other DNA
cataggtctagtaatatttttcagtataccatattgcttctgagtactcagaatctcattttcaattgtaacagttgtaaaaggcctgtatatgcttacaatatgtgtgcagagtgtaga

SEQ ID NO: 34544 - DNA, 120 bp, synthetic construct
  source 1..120: mol_type = other DNA
ttataaaggcaaattgcatgttacaggagtttgctatatgaattgttttgtcactcaggtaataagcatagtacctgacagacagattttcaatcctcagcctctgcacaccctccaccc

SEQ ID NO: 34545 - DNA, 120 bp, synthetic construct
  source 1..120: mol_type = other DNA
tgtgtcaacttttgatttatttcatttcctgttggcgaattgtaataaaatctttgccagagcctatgtgcagaattgtattgcctcaattgtcttccagagttttcatatgttaggtgt

SEQ ID NO: 34546 - DNA, 120 bp, synthetic construct
  source 1..120: mol_type = other DNA
gcaaattaggaatctgctgtgctggagggactgaaacattccctgtctgcagccacaacactctgatgggttgtactggctaaaacactttcttggggtggtgacagcagaattcatgct

SEQ ID NO: 34547 - DNA, 120 bp, synthetic construct
  source 1..120: mol_type = other DNA
aagcgggtagcttctcatttagttgcaggaggaggagatagctcccagggctttcagaggaaagcatggccttcagcatcagggacattgggggtgcactccaggatctgaggggtaaac

SEQ ID NO: 34548 - DNA, 120 bp, synthetic construct
  source 1..120: mol_type = other DNA
aaggtgagagacagagatcaagtttcattcttctgactacgaatatccagtttttccagcatcatccattgaagaaactgacttttctctagtgtatgttcttggtacctttgtcaaaaa

SEQ ID NO: 34549 - DNA, 120 bp, synthetic construct
  source 1..120: mol_type = other DNA
ctatgcagattaaatctgaagtttctttgttgattttctgtgtggaatatctgtccaatcctgaaagcggggtgaagtctctaactattattgtattagggtatatcactctcttcagct

SEQ ID NO: 34550 - DNA, 120 bp, synthetic construct
  source 1..120: mol_type = other DNA
gcgcagttctggcccttgcccatggccttctcttcagggtggcaagttcctataagcccagtgatgctttcttagagccagggattattctattctactgtgtctaagcttgccctcaaa

SEQ ID NO: 34551 - DNA, 120 bp, synthetic construct
  source 1..120: mol_type = other DNA
tgatgggaaacccaagttccaacaactgggatggcagattcccctctgactagggctggtccaaatgctccttctgtgcatgagtgctggctgagttcggcatttatttatttactgtga

SEQ ID NO: 34552 - DNA, 120 bp, synthetic construct
  source 1..120: mol_type = other DNA
tcttaccatgtttcatccaccttacctaatttatattctctaaatatctgcagagcatttatacaggaagctggaggcaatggaagagcaatatacttgtatgtatgaatatatgcagga

SEQ ID NO: 34553 - DNA, 120 bp, synthetic construct
  source 1..120: mol_type = other DNA
tttttttcttagtgtgcttcaatactcatttttatgttatgtgaaaaaaaatttgttctattcattcacctattgaccactcaatttagcttataggaaaatatagatatttgtgtgaaa

SEQ ID NO: 34554 - DNA, 120 bp, synthetic construct
  source 1..120: mol_type = other DNA
aattatgtgagcaatcttcagtttgttcaagggtattttagttttcttggacttaaataaagtttctatttcagaatcattctgcttctttaaaagaaaaactatccagatccacaaaat

SEQ ID NO: 34555 - DNA, 120 bp, synthetic construct
  source 1..120: mol_type = other DNA
tgggttggaacaggatcagaatcataaaggcatgattacaccaaaagggacaaataaccaaaattccatagcttttgtgggactgagggtaccctcatcaaatatgtaaaatcttcaagt

SEQ ID NO: 34556 - DNA, 120 bp, synthetic construct
  source 1..120: mol_type = other DNA
aggaaatattaatcctagctttaactctattgttgaatgaccatgtagtatatgcaaaattgtttccacttcatgaacttcagtttgctttaatgtagaattagagtagtcaacattatg

SEQ ID NO: 34557 - DNA, 120 bp, synthetic construct
  source 1..120: mol_type = other DNA
acttttacagagaatgtatgcattttaggcaacttttgctctactttttgaaactcaacattagatgtgtgtatacaagttttgttcatttaggtaagttttcttgaaacacgcttataa

SEQ ID NO: 34558 - DNA, 120 bp, synthetic construct
  source 1..120: mol_type = other DNA
gcaaggccctgctctgccctgttccagctctaatacagaaatgaccagaagatagagatggcaggaaacagtgcaatgtagtgcaagaagctctgactgagacccccttgaatgggattt

SEQ ID NO: 34559 - DNA, 120 bp, synthetic construct
  source 1..120: mol_type = other DNA
ccagtgagacttacagatttctgacttttggatctgtaacctaggaaatttgtgttaagtgacaaagtttgtagtaatttgttacagtagcaataggaaacaaatacagatgtctccaaa

SEQ ID NO: 34560 - DNA, 120 bp, synthetic construct
  source 1..120: mol_type = other DNA
ctgaagagtccccctcatattaaataattttcagggcacagaaaacctagctctgcccctgcttgaatacctttcaggaaacttgagagagatctgactccaaaatgaaaacatgtgtct

SEQ ID NO: 34561 - DNA, 120 bp, synthetic construct
  source 1..120: mol_type = other DNA
aacccaggcctacctgacaccacagtctaactcttatgcacttaaggagttgggatgtagagagaaataaaattgaataggttttaaacactaaataaaggttttagtttacagataaga

SEQ ID NO: 34562 - DNA, 120 bp, synthetic construct
  source 1..120: mol_type = other DNA
tgtgagtctgtaaactttgatgtgtgatgaatttgagcctgccatgtttattctgtcaaaaccacagcagtgcttagatgacagacccctagttatggttgacagcctagatcctattaa

SEQ ID NO: 34563 - DNA, 120 bp, synthetic construct
  source 1..120: mol_type = other DNA
gagaaagattttattatacttctacaaaaactctgagagtgcagctcgcatgtagtacttgctcctctagaggatcacaagcacttggttggactaccagtgttagactacctcttgacc

SEQ ID NO: 34564 - DNA, 120 bp, synthetic construct
  source 1..120: mol_type = other DNA
aaaaaaaaaaagccacccagatgccatggctgcctgtgttttttcaccctggaattctgccattactgaacagtatgtgctcagctatgctaaagcttttacaacccccaccctcatatt

SEQ ID NO: 34565 - DNA, 120 bp, synthetic construct
  source 1..120: mol_type = other DNA
gttttttgctattgtctgttgtctttcaataactaatatacaagaacagattgagatagagatttctccgaaacagtgctggatgaatgcctcaaggggctcactcaacctgttttggga

SEQ ID NO: 34566 - DNA, 120 bp, synthetic construct
  source 1..120: mol_type = other DNA
tgggttgtaagaagagaaattacttttgcttattacaattcatcaaaattatgctccaaagctcaaaaacacttctgatttatcagcaagttttgattggaggagccaacacacatctgg

SEQ ID NO: 34567 - DNA, 120 bp, synthetic construct
  source 1..120: mol_type = other DNA
cattattgctcacatagtcatatataattatatgctattagtttcattgaatttataaataaatctctcatggtctcttgaaattagctttatgggagaggaatatctgaaataaaataa

SEQ ID NO: 34568 - DNA, 120 bp, synthetic construct
  source 1..120: mol_type = other DNA
tagagcagaatgatagaaatctcttgtaaaagtgggttccaaaagatcttagagttagttgattgtttaaatttataacctcattagtagtatagacagattcctgcatcttagaaactc

SEQ ID NO: 34569 - DNA, 120 bp, synthetic construct
  source 1..120: mol_type = other DNA
ggctgtgaagtacattctaacaactgtttgcatattccatttaaattcccagatttgactgccagtatggatttgttgtcagacttcctgtcttctctgtggtcagacatgcctatcttt

SEQ ID NO: 34570 - DNA, 120 bp, synthetic construct
  source 1..120: mol_type = other DNA
gcccacttgttctctcttcctaaaggaatacacaaaaaatcagggtgtagaaaaatatcttatttctccctcattttatacactaggacaatgtgagacatttaactgctctatcatgtc

SEQ ID NO: 34571 - DNA, 120 bp, synthetic construct
  source 1..120: mol_type = other DNA
ataccttcatttctattttgttttaattaaataatataaattctttcataaataaacatacggttggtcatagaaaccatcaggctaaaccaaaagatgatgtttgaatttgctcatcat

SEQ ID NO: 34572 - DNA, 120 bp, synthetic construct
  source 1..120: mol_type = other DNA
attttaccaaaacatctctaaaaactgctctcctgtcttaatcatattttgatcttgactttttttgtaacttttctgttagaattatctattcacaccttggctcagtatgtgcttttt

SEQ ID NO: 34573 - DNA, 120 bp, synthetic construct
  source 1..120: mol_type = other DNA
tgggtttttaattttttaaatttattttggggatttttaatagatgatgtattcaaatgatttaaaaattaaaaccatgtaacaaggtacacacgaagaagcctttcttccaagcttgtc

SEQ ID NO: 34574 - DNA, 120 bp, synthetic construct
  source 1..120: mol_type = other DNA
ctttatgatgctgaatccttctacccaagattacatcatgtcttttattccatcctagatttttgtcctaaattatgttaaatatttttcttatgactattgaacaattctggctatgtt

SEQ ID NO: 34575 - DNA, 120 bp, synthetic construct
  source 1..120: mol_type = other DNA
gaatttcagtagacactgtcaaccgaggaaaatgacaagcctcaatcattttaggagatttatttgccaaaattaaggatgcacccgggagacaggtctacgcctttctccaaagatgat

SEQ ID NO: 34576 - DNA, 120 bp, synthetic construct
  source 1..120: mol_type = other DNA
ttctagttattaatgagaaatgaattttttcatgaaaatgtagttgcccctctattagaaactgttcatatgagctgtatctactcatcttaaataaaaatgtaatgctactcgaagaaa

SEQ ID NO: 34577 - DNA, 120 bp, synthetic construct
  source 1..120: mol_type = other DNA
ttgaggaaggtcagtgagtgtataggggttagattcaggggaaggaacagtacttctactttaaccataatacctacctttttatctatttttttttttttgcctcaaaaagtgacattt

SEQ ID NO: 34578 - DNA, 120 bp, synthetic construct
  source 1..120: mol_type = other DNA
cgattacattataacccctgatacaaggtagaatggcttgctgctggatggcagagggcttctcaaaaccataggcatagatgtcacggagaagggactccgagaggttcatgtcatcaa

SEQ ID NO: 34579 - DNA, 120 bp, synthetic construct
  source 1..120: mol_type = other DNA
attcatgacaactggaactgacctctctatccattgatctccaataccaattatcatttattcttaccactactttatattgcagttatctatgtagactagatcaacatgactgtattt

SEQ ID NO: 34580 - DNA, 120 bp, synthetic construct
  source 1..120: mol_type = other DNA
tggtattcatagatcatcttgaaggtatgttttattaaatagcctataatatttatttaattcaaaactgatttctaacttttaaaatttactcatggtggcacattaagttattgagct

SEQ ID NO: 34581 - DNA, 120 bp, synthetic construct
  source 1..120: mol_type = other DNA
gtatttatggtcatgcatgcatactgctgttttaaaacagtagtcttaacggccacaaatgtttcattcatatgcaggtagttggcagccaccttttttcttgagccacagattacttct

SEQ ID NO: 34582 - DNA, 120 bp, synthetic construct
  source 1..120: mol_type = other DNA
aaacaagaggcttttacccaatagcattttggtctacctgtactttttgagagaagaaatagctttgtagtcttgatacatattgtcaggtactttaacatgatatttcataacagtttc

SEQ ID NO: 34583 - DNA, 120 bp, synthetic construct
  source 1..120: mol_type = other DNA
ttttttctaagacctttctcttgatggtatcatatcctatggtattaaataccatttctatgcatatgactctccttttctgctgcaccaaacctagttccttcttcatcatctctattt

SEQ ID NO: 34584 - DNA, 120 bp, synthetic construct
  source 1..120: mol_type = other DNA
ccttttagtcaaaacagtggcattaaaaaattacaatggtaatgcatgcaataaagttattcatattgattatatgtattttaaattcctataaaggtctcaaaaatttgacattgccgc

SEQ ID NO: 34585 - DNA, 120 bp, synthetic construct
  source 1..120: mol_type = other DNA
tttctgattagttcaagacagcaccaaagtaatccttaacaattgaagaggaattgttgctttctaagcacatatgcatttatgttctcctactgtttaatacatcatgacagtcacaaa

SEQ ID NO: 34586 - DNA, 120 bp, synthetic construct
  source 1..120: mol_type = other DNA
gtcatttattggtgttttcattttcctctaatatagatgttaataatgagtgctttccgtaccagccaaaaatttgaataccccaattcctggattcatttgctttattccctccactgt

SEQ ID NO: 34587 - DNA, 120 bp, synthetic construct
  source 1..120: mol_type = other DNA
atgaccaaaaaggtatgcgctaaggctagtaaaatgagggaaacttagaaagacctgttttctcagattcctgtaggcatccctcccttctcttaagagagaggatacttctttccttca

SEQ ID NO: 34588 - DNA, 120 bp, synthetic construct
  source 1..120: mol_type = other DNA
tcattttttgcacagataccctactactacttgaaaagaatatccatggaaatatgtaaaaaaaaaaacccatatacaccttctcattttaggtgtttgttggaatgcaacttcctgtga

SEQ ID NO: 34589 - DNA, 120 bp, synthetic construct
  source 1..120: mol_type = other DNA
ggaggtttggggagttcctggaggactggggagtttcttcagacccccaataaaatcctaaatgggccttgttaagaattcctttgttattttgtcatgttttaaggcctaggaaaggcc

SEQ ID NO: 34590 - DNA, 120 bp, synthetic construct
  source 1..120: mol_type = other DNA
acaatacgttttacaaaacaagcaaaaaaaagacgagagtatgtttagttgccagaaaggtgtaaccgaaaaggggtctcgatccagacctcaaaagaggattcttggatcttgtgcaag

SEQ ID NO: 34591 - DNA, 120 bp, synthetic construct
  source 1..120: mol_type = other DNA
aatttcttcaagtatagtaacagcactctttattgtataggccatgatgattttgtacagtaaaagattctatgtggtaggcatgatttctttttttggtgagaggaaggaaggtactac

SEQ ID NO: 34592 - DNA, 120 bp, synthetic construct
  source 1..120: mol_type = other DNA
gttaaaaaataagcccaagaaaaatgttacttcacatgtgaaaatcttgttgaattcaaattttagttccataaataaaggtttattggaatccagccatgctcattctttttcatactg

SEQ ID NO: 34593 - DNA, 120 bp, synthetic construct
  source 1..120: mol_type = other DNA
agctcaacttcaagcagctttaatggttgccaagtactatgttgtccttagttctagcaggcaatgaagcatataggtttcttctaagatgccattaaaataagaaaaacgttttcatat

SEQ ID NO: 34594 - DNA, 120 bp, synthetic construct
  source 1..120: mol_type = other DNA
cttgtctttgctattgtgaatagtgctgaaagcataatgttctataaaggctttttttaatggtatgttatgaaaactggcatgtcctcagttttactctagcatcagaatctattttcg

SEQ ID NO: 34595 - DNA, 120 bp, synthetic construct
  source 1..120: mol_type = other DNA
aaacttttaatatttactaggctatgttatagaatatggttaactttatgaaaggctgtttgtaaatgactagtagctatagattttatttaggagaggcacagtaaaaatatgttttcc

SEQ ID NO: 34596 - DNA, 120 bp, synthetic construct
  source 1..120: mol_type = other DNA
attccatttttcattgtttatgttatttacctaagtgttaacattgcaaattagtatttcattattagtatgggcccataccttgtctgactgctgggtcagcaagtggaaattgcaaca

SEQ ID NO: 34597 - DNA, 120 bp, synthetic construct
  source 1..120: mol_type = other DNA
tctttatcacccaatacttaactttcaggtttgcctcctcctatactaaaatcctgtatggccagctatcctgatgtcattagtagtagactttcataggtttacataatttagctctga

SEQ ID NO: 34598 - DNA, 120 bp, synthetic construct
  source 1..120: mol_type = other DNA
caagaaaaatgtatgcattttattaggaaacagcagatttaaatttatttttaatattgtcagttataacagtaccaaaactcttagggttaatcagtgccagatatcttcaggcactca

SEQ ID NO: 34599 - DNA, 120 bp, synthetic construct
  source 1..120: mol_type = other DNA
atattctataagcacatctttccgttttctgcaaaacatcattaagcatttgggggttgacttttggacttttgggatatctctgagcaagtcagtattgcagaattaccctgatatttc

SEQ ID NO: 34600 - DNA, 120 bp, synthetic construct
  source 1..120: mol_type = other DNA
ttttattcccagggatcttttcagtgatcattctaatgtatgtttgaaaggaaaacgtcttcactgatttgagccagcaaaagttggcagtacagtgacaaataaacaagggttagagat

SEQ ID NO: 34601 - DNA, 120 bp, synthetic construct
  source 1..120: mol_type = other DNA
tccttgccaacatttggtatggttgtctttttagttgtagccattctaaatgagtttgtaaaagtatgacattattgcttaaatttacattttcttaatgactgcagatgtcaagcatct

SEQ ID NO: 34602 - DNA, 120 bp, synthetic construct
  source 1..120: mol_type = other DNA
aattataatgcaaagtagtagactctttccccaaattaaaaaaaatattaaatcaaatgtatattttcttgtatagcttcagttatccttcatgaacacttcttgattacttggagcact

SEQ ID NO: 34603 - DNA, 120 bp, synthetic construct
  source 1..120: mol_type = other DNA
aataaataaatatacacacacacacacacacacacacagaagacaatcctataaaacagagccgcactgagttttgtatttagcctagaaataataattaattgcttgttagtgatttat

SEQ ID NO: 34604 - DNA, 120 bp, synthetic construct
  source 1..120: mol_type = other DNA
attttgtcagtttttctgggacaatctggtttatgcacattattattgatacggaagtggggcagggaaactctgcgtagagaaaagcatgtccctggctagggctccaccccaaaggac

SEQ ID NO: 34605 - DNA, 120 bp, synthetic construct
  source 1..120: mol_type = other DNA
caggaaatgttaataccatctttccacttcctcaggccaaaaaccttggcattgtcttttttctttcacacactttggctcttttttcaaaatatacctggaaacctctcgctccttatc

SEQ ID NO: 34606 - DNA, 120 bp, synthetic construct
  source 1..120: mol_type = other DNA
ttgtctcttgaagctgctgggtgtgctctttccttaggatctttgcactgactgattctattgcataaatatcacatgatatttatacgatgcaagttcttaccccttcaaatctttgct

SEQ ID NO: 34607 - DNA, 120 bp, synthetic construct
  source 1..120: mol_type = other DNA
ctattagagagctaaaggcccctgttctgcctcaccttaactttatcaaattgtttatcttctactattcctctggtgatcatggtaaataatgatttaattgcactgttaacaacttac

SEQ ID NO: 34608 - DNA, 120 bp, synthetic construct
  source 1..120: mol_type = other DNA
tagcaaactacacttgctttatttgtctgcattgttctgcactgactctaagattttaagcacaaaaataagtacatattacaaaaatatcttaatatctcatggattttgtagctacta

SEQ ID NO: 34609 - DNA, 120 bp, synthetic construct
  source 1..120: mol_type = other DNA
gtttgattataaggcacttatcatgagactccattttggtttgctctactggggcctagtgcaggagctcagcccaaaacaatggccgttcatacattttatttaacagggaatggtttt

SEQ ID NO: 34610 - DNA, 120 bp, synthetic construct
  source 1..120: mol_type = other DNA
tgatgtgaagtgtcttcggtatcctcagctgtggataccatcacctgctctggtggaggtggcaggggaatgaaatggactctgtgagggtccttagttttgattgtttaatgcactatt

SEQ ID NO: 34611 - DNA, 120 bp, synthetic construct
  source 1..120: mol_type = other DNA
tcagtatttgggctgtctcccggctcctgcaggagcaatccacttccttcagagggtctgtggattctcttggctttcttggtatatttctgtaggagttccggagcaaaggttcacgat

SEQ ID NO: 34612 - DNA, 120 bp, synthetic construct
  source 1..120: mol_type = other DNA
cctacattacttctgatgtttgataattatgaccagtgatatatgttattgattttaaagcaatttaaaactggtccatgttcagatttcagtagctatgtgcactgtaattgctttcat

SEQ ID NO: 34613 - DNA, 120 bp, synthetic construct
  source 1..120: mol_type = other DNA
ttccagagacttcacaatcctatactttctgtcatatttcacatggagtgcttgctaataattgccatttatatcatctaagcaatatccatatatcaagacagattatgtaagcagaag

SEQ ID NO: 34614 - DNA, 120 bp, synthetic construct
  source 1..120: mol_type = other DNA
ttattttagtaattttttgtgtgtctcttctataggcaagtatcttaatgatatttaatttcagggaattgtgtggctcttgaaagagtcaaaatcaaaatttatgtgccagattttgcc

SEQ ID NO: 34615 - DNA, 120 bp, synthetic construct
  source 1..120: mol_type = other DNA
ccaaatttatacaacaaaatcatatttgagctaagactgaattttaggggcattcttactcttctgaatgttttcatccacaatcctgctcccaacagatggagactgaaacacaggaga

SEQ ID NO: 34616 - DNA, 120 bp, synthetic construct
  source 1..120: mol_type = other DNA
tcaggacaaggatgaataaactatttcactatcttctctcacttaatagtactaaagataaatttaagggaaaatattaattttatgaatgttttaggattcatctatgcttgtctggcc

SEQ ID NO: 34617 - DNA, 120 bp, synthetic construct
  source 1..120: mol_type = other DNA
attatcagtgcaagccgctgtgtcggcctaaaaacttgatttttaggggttattctttgtgttctagaagccctttcttatacagatactcatttatagcactgaggacaggaagtatac

SEQ ID NO: 34618 - DNA, 120 bp, synthetic construct
  source 1..120: mol_type = other DNA
tgtaaaagcatatatcctcttcttgttcctgatcttagcaaggaagcattattctttcaccattaagtttgagttagctgcagttatttcatagatgtcctttatcaggttgaggaattt

SEQ ID NO: 34619 - DNA, 120 bp, synthetic construct
  source 1..120: mol_type = other DNA
ctagctttaggttgtcactgaaaaactgctttacctaaataatgccaggaaaggcattagtctttcttttcaggagtcttaaaccattaagcaatacagagtatgccttttgctattagt

SEQ ID NO: 34620 - DNA, 120 bp, synthetic construct
  source 1..120: mol_type = other DNA
gtcatgttctttaatgttctctaggctccacactacagatccttagaacagattggcacactttttgcgggtgttgggagtggggagcaaagatcttacagtaactagcagatattttaa

SEQ ID NO: 34621 - DNA, 120 bp, synthetic construct
  source 1..120: mol_type = other DNA
aggaatttgaggctgcagtaagtggagatcctgccactgcactctagccccggcgacggaagggagatcccgactaaaaagaaaacactggggaagcagccaagatggccgaataggaac

SEQ ID NO: 34622 - DNA, 120 bp, synthetic construct
  source 1..120: mol_type = other DNA
ctcaagtggctgaacaggctgagaaccttcagaagtatctatagaggaaggctagataaaggccagagacattatatgtctgtgcctctttgttgattttggcaggagttattgttaagg

SEQ ID NO: 34623 - DNA, 120 bp, synthetic construct
  source 1..120: mol_type = other DNA
taggtttctaatgtctggttttctccgtaattccacatcaagttctacaaatcgtatgattttctaacaccaagggattagcacttttcatgatctgatggacaattttgcgtatagtgc

SEQ ID NO: 34624 - DNA, 120 bp, synthetic construct
  source 1..120: mol_type = other DNA
aaaattgtgtacaaaaatatttctactgcctacaaatcacagtttatttttatgtttgaacagaatattttctaatgtaatatatagattttatttgtgggaaaatctggcaccaactct

SEQ ID NO: 34625 - DNA, 120 bp, synthetic construct
  source 1..120: mol_type = other DNA
tgggctttcatatttttgaactgatgactagatgaagtaagttctactaaatggtctcactagttccaattttggagattatctcttcaaggatttagtttacttattaaatgctactga

SEQ ID NO: 34626 - DNA, 120 bp, synthetic construct
  source 1..120: mol_type = other DNA
cttcccactacagcatttaatgtgctcattcaatcaaccagcaaccctgatactagtgttgcactgtcctgtacgatccagcattatttggacattacctggaacctagaattttcttcc

SEQ ID NO: 34627 - DNA, 120 bp, synthetic construct
  source 1..120: mol_type = other DNA
tacaggcatgtgccaccatgcccggctaatgaattagttacttctaaggctgtatcaataaattccagacttaaaatatctgtttatttttactgttaatcaaggtaggacgtcatttct

SEQ ID NO: 34628 - DNA, 120 bp, synthetic construct
  source 1..120: mol_type = other DNA
taaaacgtagcttctgaagcatcataaaattaaataactgtattttcatgatttaaatgacaactccatttatttcagctttcacttataaatgagtacttacgcactgatgaatatgaa

SEQ ID NO: 34629 - DNA, 120 bp, synthetic construct
  source 1..120: mol_type = other DNA
atcgttaaagccattcaatgaaataaccagaaaggagcaattgacttttaacatttggctccacagaatgtgttttaaccaggttccacttcctaaataacacatcatgccatcatttca

SEQ ID NO: 34630 - DNA, 120 bp, synthetic construct
  source 1..120: mol_type = other DNA
gttaaaagcatagaagttttaccctcctaccatacagaagggcctcacagatggataaaccatgtttgtaactttttaggttcagtaaattacaacacacatcttctgtaacccaattcc

SEQ ID NO: 34631 - DNA, 120 bp, synthetic construct
  source 1..120: mol_type = other DNA
gcctctcttaacagtagaatgaaactgtcatttactgaagccacaacctcctgagaaggaaaataagaaaagtcaaaaagaaaacattcaaggaagatgtctttctaccttttgctatgt

SEQ ID NO: 34632 - DNA, 120 bp, synthetic construct
  source 1..120: mol_type = other DNA
aagtatatgtgttatttatattggtcatgtctaaaagtgaacaaaaactaaataaactgaataatatagttgatttttctatattgatcttatatcctgcaaccttgctggactctcgtt

SEQ ID NO: 34633 - DNA, 120 bp, synthetic construct
  source 1..120: mol_type = other DNA
aaaaaaatcatgtgcattttgtttcttattttattgatttgctatatgatagattttcctatggtgaatcagtcttggatccctggaataaatcccacttgattatggtgtataattatt

SEQ ID NO: 34634 - DNA, 120 bp, synthetic construct
  source 1..120: mol_type = other DNA
caggtcctatgtccagaatggtctttcctgggttatcttccagtgtttttgtacttttaggttttatatttaggtctttattccatctggagttgatttttgtatatggtgttagaaagg

SEQ ID NO: 34635 - DNA, 120 bp, synthetic construct
  source 1..120: mol_type = other DNA
agatgactcatagttttgaagcaggctccttcaatgcctagtttggtgagtgtttctaacatgaagggaagtttaattttatcaaaatccccttctgtatcttttgagatacaaatgaga

SEQ ID NO: 34636 - DNA, 120 bp, synthetic construct
  source 1..120: mol_type = other DNA
ttactccaaagtcattcaggagcaagttgtttaacttcatgtaattatatggctttgaatgattttcttagtattaatttttatttttattgcactgtggtccgagagtgtggtttgtgt

SEQ ID NO: 34637 - DNA, 120 bp, synthetic construct
  source 1..120: mol_type = other DNA
cagcaagtgaaggaaaggcaaagtctacttgcctatgtgtgtgccagcaaaacaatgagagtgtggctgtgggcaagtgcttgctggcaaagagacataagggaggctgcagtggggaga

SEQ ID NO: 34638 - DNA, 120 bp, synthetic construct
  source 1..120: mol_type = other DNA
ctagtattcttcgttgtatcttttccaaggtagaacctccatcacttgaatgggggctgggtagaaaagaaagccctcacctctcagctgcatttacctgaaacttagcctcgacaacag

SEQ ID NO: 34639 - DNA, 120 bp, synthetic construct
  source 1..120: mol_type = other DNA
tggttttgaagatattgttttgatgtggctgtaggacatcctgttgaagatgcttagcaggcagctagaagtatggctcttgaggtatgagagcatttgaacttggagatagaaaggtga

SEQ ID NO: 34640 - DNA, 120 bp, synthetic construct
  source 1..120: mol_type = other DNA
gataaatcaaaagaacactgttttattcctgtgttatgtttaggttatgtctcccaagggtcatctaggttgtcaacctatgtggatggtattaatcagatacctgaaaaattcttccct

SEQ ID NO: 34641 - DNA, 120 bp, synthetic construct
  source 1..120: mol_type = other DNA
aatttttcttgttgatttactatattttactaagactgcacttagcaccagattatgtcagatattcagaaaaacttcctaacaaaattctaaaattattgatagtcatgccacacatag

SEQ ID NO: 34642 - DNA, 120 bp, synthetic construct
  source 1..120: mol_type = other DNA
caatgggtgacaatggcagtgaacaggttttgtgtttttttaaaaaataggagaatacacatttttctcaagtacacttagaacactctccagaattgaccatatgacagccataaaaca

SEQ ID NO: 34643 - DNA, 120 bp, synthetic construct
  source 1..120: mol_type = other DNA
aaattagacaccaataaatggaaagatatactgtgtttatgaactgagtgacttagtgttattaagaagtcaataccccccaaagctgtctacatattcagtgcaacccctatcaatccc

SEQ ID NO: 34644 - DNA, 120 bp, synthetic construct
  source 1..120: mol_type = other DNA
aaaaagaaaaggaaataccaagtgttggtgaagatgtggagataatggaagccttgtgcattgttggttggaatgtaaaatagtgcagctgttgtgaaactgagataatgaatggttctt

SEQ ID NO: 34645 - DNA, 120 bp, synthetic construct
  source 1..120: mol_type = other DNA
tgaggatgataccaatcgttcgatgatttataaagtaggaaataatgcataaaactcacctcatacataaaagacactcagttatggtagactgttttctgctttcaagtcagttttatt

SEQ ID NO: 34646 - DNA, 120 bp, synthetic construct
  source 1..120: mol_type = other DNA
tgttggtttaaaattatttagcataaccaaatttggcatcattgcagtgccaaagaatgccctggccagacgtgtctatgcattgactttttccattggtggtaatgaaactgttccatg

SEQ ID NO: 34647 - DNA, 120 bp, synthetic construct
  source 1..120: mol_type = other DNA
ataatttaattgcttgatttccctgatgctcttatttcctataaaatagtctcttcattaatggctagattattatgtattaacaattgcccatgttttcctagtaacaggagctttttc

SEQ ID NO: 34648 - DNA, 120 bp, synthetic construct
  source 1..120: mol_type = other DNA
aagtacaatgtttgaagaccagatgaagttaatattactatgcaagcctctacaggtttggatttcaatatgtttaaatttgaacgcttaacaatatgttatgatttgagtttccatttc

SEQ ID NO: 34649 - DNA, 120 bp, synthetic construct
  source 1..120: mol_type = other DNA
ggggtgagccaccacccctggcctgaattatttaatcttagagcattgttcttcacttattgcggctgtatgtttttaactgaaaccatatgaagagttgggaaattactcaattaatac

SEQ ID NO: 34650 - DNA, 120 bp, synthetic construct
  source 1..120: mol_type = other DNA
ctcgccctgcatctgctaaaaaccaagcaacttcctttctgaatttttaatctcataatgcccctgtagtcattaaagaaccaatgcatgatagacatttattcactgtgcctttctaca

SEQ ID NO: 34651 - DNA, 120 bp, synthetic construct
  source 1..120: mol_type = other DNA
acttctctaaaactcaatttaccaaactagaaatgagaagaataataattaccttctcagattactgttagcattcagtataatgttagacttaaaagacctcaacatacagtaattttt

SEQ ID NO: 34652 - DNA, 120 bp, synthetic construct
  source 1..120: mol_type = other DNA
atccaaggtaaaggcaaacaattctgtaattgtcacttttgtatcaatcttactgatcaattagttagaggactgggaagctgttaacatccttaaaaaccataaaggaaatccatagtc

SEQ ID NO: 34653 - DNA, 120 bp, synthetic construct
  source 1..120: mol_type = other DNA
attgctgggattacaggtgtgagccactgcatccagcctgccttcattatcttctatgtgaaatgcagataagcacacctaactcagataggattatcaggagagtgaaatgagatttta

SEQ ID NO: 34654 - DNA, 120 bp, synthetic construct
  source 1..120: mol_type = other DNA
atcctgcaggctgagaagcgtgcctcctgcaaagaccagagacaggcactttaaagaagagggattggggtaggagcgttatgctgaacagattggctaaacatacatattcaacaggtt

SEQ ID NO: 34655 - DNA, 120 bp, synthetic construct
  source 1..120: mol_type = other DNA
cagtatttacaatgtactttccattccttattttatacaattcaaaataatcagagaaaaaagttatttttatcatcagtttacagatgatgaaattgaagctgaagggttgagtgtatg

SEQ ID NO: 34656 - DNA, 120 bp, synthetic construct
  source 1..120: mol_type = other DNA
aaggaagagaggtaactataggagttgtcatttacctaccactctaagatgaataaagaatcagtaaaccctcagatccatcttgaatgctggctttcagacctgcctcttcactggtga

SEQ ID NO: 34657 - DNA, 120 bp, synthetic construct
  source 1..120: mol_type = other DNA
ggccaccccaggaatcatggtcttctgtgtaaacctgacaacctgttgctggaaggcaataagttaatttgatggtgtccaaagtacttataaatcaatttggcaatctctttcttccac

SEQ ID NO: 34658 - DNA, 120 bp, synthetic construct
  source 1..120: mol_type = other DNA
agataactcgttgagaaggatagaaactgaacaatcgacatatttggagatggtcttgtacactcctaaacttggcaacattctatgcccaagaattctagaagcaatgactcttaccct

SEQ ID NO: 34659 - DNA, 120 bp, synthetic construct
  source 1..120: mol_type = other DNA
gggtcaagaattcagaagtagcttagcaggaagttctggcttgtggttgcagtcaaaacagcaggtggctgaaatggttggaaactggcaaggaagcattctgttcatgtagatttctgg

SEQ ID NO: 34660 - DNA, 120 bp, synthetic construct
  source 1..120: mol_type = other DNA
attgcatgctttcaaaggccatatcttaaggaactcactatagcgtaaaaataaagagattaatattagacctaaaagtctaacatagtagggtcaaacaatggacttgaaagccctgga

SEQ ID NO: 34661 - DNA, 120 bp, synthetic construct
  source 1..120: mol_type = other DNA
atcatttgaaatttctatttcttgtgaagattaagtgtcagggagtgaatttacccttcacctgaaacaacaaagaaaccaaacaaaatgtatgaaacaatggttctcaacatatcatac

SEQ ID NO: 34662 - DNA, 120 bp, synthetic construct
  source 1..120: mol_type = other DNA
gagaagaaagcttgcacaccaatatcctttatgaatatggatgtaaaaattcttaatgaatatttggtgagtcaaatccaacagtatacgaaaaggatactatttcatgaacaagtgggg

SEQ ID NO: 34663 - DNA, 120 bp, synthetic construct
  source 1..120: mol_type = other DNA
aagggtagtggctggggggaagtaaggatggttaatgggtacacaaatatagataaataaaatgaatatcatctagcatgtgttagcacaacagtatggctacactcaacaataatttat

SEQ ID NO: 34664 - DNA, 120 bp, synthetic construct
  source 1..120: mol_type = other DNA
tcgatgctttcttgagaaatgaaaatgttcaagagtgagagtgaaggattacaaagaggcgcaaggaaactgttgagggtcaggatgtgttcactgtctagactgtagtagtggtttcat

SEQ ID NO: 34665 - DNA, 120 bp, synthetic construct
  source 1..120: mol_type = other DNA
tgtgatgaactcagtttttctcaatttatttgcactgttacatcattacaactataatttaaaataaattgtggtcaataaccctattttccatctttccttctccttgttgctcaatgt

SEQ ID NO: 34666 - DNA, 120 bp, synthetic construct
  source 1..120: mol_type = other DNA
gagggtagaagcatttatgcaacatgtacatgggaggcaacagaaggaattagtttcatgcccttatttttgctaaaaactattagggtttaatgcctactcacaccatgaagtgacaat

SEQ ID NO: 34667 - DNA, 120 bp, synthetic construct
  source 1..120: mol_type = other DNA
agtttgagttgggatctactttaactttgtgctgttctagtttggctgccttggaaagtctccatttgcatttcaggctctgacaatagcattcgctttcagactgtggttgtctcttaa

SEQ ID NO: 34668 - DNA, 120 bp, synthetic construct
  source 1..120: mol_type = other DNA
tgtgccatagattaaggttggcagctgcattgcccgccatttcatacaactgattcatcttgtaaacagacaagataaacttatagtatcgagaaacacaatatagtgctctaaatgaat

SEQ ID NO: 34669 - DNA, 120 bp, synthetic construct
  source 1..120: mol_type = other DNA
atggagcaggcctgagttttccaaacagtgtgaaaatcacacttacaatgagtaacaaaaagcaactactagaaacattgtgcagaaaatttccttaaatgtactttgttggtaaggcta

SEQ ID NO: 34670 - DNA, 120 bp, synthetic construct
  source 1..120: mol_type = other DNA
gacctcaaattcactcaaagttttcaaagtttctaaatatttctcacacttatgagtcacgcaatgcatggacagcttttatctctttgtagctgcatctctttcagtaagaattttgag

SEQ ID NO: 34671 - DNA, 120 bp, synthetic construct
  source 1..120: mol_type = other DNA
aatatgtaatgcaacatgaacaaactgtgtaatagagatatgtattgatatgagggcctacctgattacagagaagaaagtgagtaagtctgtttcagtaatttgagtagattcctaggg

SEQ ID NO: 34672 - DNA, 120 bp, synthetic construct
  source 1..120: mol_type = other DNA
ctgttttctgccttgaattattgttggatttagaccccactacctatcactatctattagagcaaattatattcacttactgagacaatcacccctaattttatacaacatgacattggt

SEQ ID NO: 34673 - DNA, 120 bp, synthetic construct
  source 1..120: mol_type = other DNA
aactccaaagtccaaaatcccaattctcatctggagatgagtttcttctgcctgtgatcctgtaaaatcaagcaagttatttgcttccaaaatacaatggaaaaaccagcattgggtaaa

SEQ ID NO: 34674 - DNA, 120 bp, synthetic construct
  source 1..120: mol_type = other DNA
gcaaatcaaaaccacaataaaatatcatctcacaagagtcagtatagcttttatgaaaaagttaaaaattaatggttgcagggctgcagaggaaagggagtgcttatacacaactagggg

SEQ ID NO: 34675 - DNA, 120 bp, synthetic construct
  source 1..120: mol_type = other DNA
atgtgtaaaggacagccttcaggcaaagtccattttcaaaatgggtttgcaccaaagctgtttggaaggccaatctttaaggtcagattcattttggaaattccatctgccttgtttagt

SEQ ID NO: 34676 - DNA, 120 bp, synthetic construct
  source 1..120: mol_type = other DNA
gaagatcttatccatctggacctttcctcatgctaggcacattattttggcccgttattctagatatagtagggactccataaatgaataatttgtgacttacagactatgaggctaatg

SEQ ID NO: 34677 - DNA, 120 bp, synthetic construct
  source 1..120: mol_type = other DNA
cagagatttccaaatgtttactagttcttttctacttgtcttgatttttgagctctttgaaggaaagagaacttataaatcttattaatcaaacaaaagagaatatgaagatacaataat

SEQ ID NO: 34678 - DNA, 120 bp, synthetic construct
  source 1..120: mol_type = other DNA
tctaaggagaaaatacatagaaatccaattttaaagtaaaatgttgttgttttgaatttccaatgataggttttagatcttctttttctttacttaagtgaagcagcaaatatagatggg

SEQ ID NO: 34679 - DNA, 120 bp, synthetic construct
  source 1..120: mol_type = other DNA
acatggtatccagtaagatctagttattttcagttggtttcctactaattttctgttaattggtggtaaaaaaaactaaggtttattaaatcacttttgagtcattcccttgaattatat

SEQ ID NO: 34680 - DNA, 120 bp, synthetic construct
  source 1..120: mol_type = other DNA
cttcaattgacttgcaaatcaatttttcttattttctccaagtagcataattttgcaatttaatgctatctttgaagacaaatatcatttttgtttatggaccatagagattacatgaaa

SEQ ID NO: 34681 - DNA, 120 bp, synthetic construct
  source 1..120: mol_type = other DNA
ctaaatgtggaatgttctttctacaagtatctatgagcatctgacatgtatgggtattagtgcataattgtagctctgtgcacgtgactatagctggtagagctcatagaaactcaaacc

SEQ ID NO: 34682 - DNA, 120 bp, synthetic construct
  source 1..120: mol_type = other DNA
aatgcatttttgacttaagatagtttcaatttagatgctccttgacttaacaatgggtttatcaggacataaccccttcgtaagtctagaagcatctgtactctttcctggtctcccttg

SEQ ID NO: 34683 - DNA, 120 bp, synthetic construct
  source 1..120: mol_type = other DNA
tgaataccagcacagtgttttggttgtctcccaggtcctgtaggagcaatccactttcttcagggtgtctatggattctcttggctttcctagtatattcctgaagtagttcttggaaca

SEQ ID NO: 34684 - DNA, 120 bp, synthetic construct
  source 1..120: mol_type = other DNA
ttttccttagctcacttcataattctctactgtatatgattcatcccttcatctggaatctgctgtagttgagcttccattgtgttgggtatggaagaggtttgttcacactgacttact

SEQ ID NO: 34685 - DNA, 120 bp, synthetic construct
  source 1..120: mol_type = other DNA
aactcgtgtggctcatagcatagcacagaagataaatctgaaagagaaacagcaaaatgttgtgaacaatagcagcatcgttgaaataaatagtccccatttatactagtctgtagttag

SEQ ID NO: 34686 - DNA, 120 bp, synthetic construct
  source 1..120: mol_type = other DNA
tatagcttcatgttgcaatatagttttgcacatttgtgactgatcactgcaatcagagaaccgtgctatctcatgttaagactgtataaatatatactgtttcacatattttcatataat

SEQ ID NO: 34687 - DNA, 120 bp, synthetic construct
  source 1..120: mol_type = other DNA
tactagggaattgctgtaatcgttggagtagggtctttggccatgtcagttcccatagttatttacttaaagtgaaatcatctttacacagcaattgctattttccagagatgggccacg

SEQ ID NO: 34688 - DNA, 120 bp, synthetic construct
  source 1..120: mol_type = other DNA
taaattactttatttctcctagtgctaaagttaccaatgacacaacctgggtagtcacagacaagaaaaactcctctacctatcatgctcacagatagagacaaaaatatgatcttggac

SEQ ID NO: 34689 - DNA, 120 bp, synthetic construct
  source 1..120: mol_type = other DNA
ggtaactagatcttactatagcaagcaaacaccactattacctaagagcatcatataagatagaatactataggtagtttattccactgtgggtagaagcatttgatgcttctgttaact

SEQ ID NO: 34690 - DNA, 120 bp, synthetic construct
  source 1..120: mol_type = other DNA
tttggctcccagatttccaaaactgctggaaaatatatttcttaaaatggcctgtgttgggccactacaaattcatacttctaactgtatcagggctcttggcacctctgggcagtattt

SEQ ID NO: 34691 - DNA, 120 bp, synthetic construct
  source 1..120: mol_type = other DNA
tctccagagctgttttcatgttacaaaagtgaaactctttacccatgaaacagtgatgccccattcctcctggtacccaagccactggcaagcaccattttactttacgtttgtattaat

SEQ ID NO: 34692 - DNA, 120 bp, synthetic construct
  source 1..120: mol_type = other DNA
taggtcctacatttatgttattgcattttgagtttttctgtatgtgttgtaaggaaagggtccaccttcattcatttgcatgtgagtatcaaggtttccaatatcattggttgaaaagac

SEQ ID NO: 34693 - DNA, 120 bp, synthetic construct
  source 1..120: mol_type = other DNA
tcttacagacagtcaccattgaatatgatattagctgcaggcttttcatatatgatataatgttaaaatagtttccttgtatttgtacttggtttaatgtgttttttttaaaatcataaa

SEQ ID NO: 34694 - DNA, 120 bp, synthetic construct
  source 1..120: mol_type = other DNA
tttttatttcttcagtaataaatgaaccttagctttctatgactcttttacctcgtaaacttttatttttttctaacttttgactctgttgtaatagcacttagcttaagccaaaaacac

SEQ ID NO: 34695 - DNA, 120 bp, synthetic construct
  source 1..120: mol_type = other DNA
ttgaagtctactatttttgtagtactgtctcctttcaattctgttaatgttggcttcatatatttagaagctctgatatgtagtgcatgtatgctaataattatatatttttggtgaata

SEQ ID NO: 34696 - DNA, 120 bp, synthetic construct
  source 1..120: mol_type = other DNA
ggggtgggtgatttgatggcttttgggtaataagggtttaggtacttttgggtaataagggtttaggtacttttgggtatataaggaagacagatttggatcatagtgccaacagaggag

SEQ ID NO: 34697 - DNA, 120 bp, synthetic construct
  source 1..120: mol_type = other DNA
aaccactaattttaagcatgtatcattgatagatcatcaaaaactatattattaatagaacatttattttcagctaaattgaagagacgtagcagggtaataaggcccagcacttagatt

SEQ ID NO: 34698 - DNA, 120 bp, synthetic construct
  source 1..120: mol_type = other DNA
aactgattttttaaacagaagacagtgttcaaacaagtgaactgtattcatttactttcattcatctaaatgaaattgtatcctatttttctaagacttcacagcactcatccttttcta

SEQ ID NO: 34699 - DNA, 120 bp, synthetic construct
  source 1..120: mol_type = other DNA
caattgagccaggttttaaagtgataatccatatcaccatgtgtgaaatgtaattcagatcttgtttatccatatttaaattgtgtataaaatttatgaaaatgtccaaaggcttatcaa

SEQ ID NO: 34700 - DNA, 120 bp, synthetic construct
  source 1..120: mol_type = other DNA
ctttctttaggtaaaataaatagcacctgattcttcctcttttcagtatcactttttgcaaaaataaataaataaataaatcctgtacttatttgtgacaataacttaatgttccattat

SEQ ID NO: 34701 - DNA, 120 bp, synthetic construct
  source 1..120: mol_type = other DNA
ataatctgaaaaaaatatttttactgattttattttaatccttatagtaccatgcaattgtcttagtttttcttcagaacagcatcactctagtatgatcaaattatccacagataattt

SEQ ID NO: 34702 - DNA, 120 bp, synthetic construct
  source 1..120: mol_type = other DNA
tgacatgcctatggctgcctcagccccctccagactttgaccacccacaaacaagggagggaagcagagggggtgctgagggcagctgggcatgggcctgaaggtgccctttggcatgaa

SEQ ID NO: 34703 - DNA, 120 bp, synthetic construct
  source 1..120: mol_type = other DNA
tggcacctgcagctgcccacctcaccacagccagtgtacctggttatgcgcagtggccggaacttgtgcttgctcactcacacacccctctcctccctgcatttgacttgcctttggcag

SEQ ID NO: 34704 - DNA, 120 bp, synthetic construct
  source 1..120: mol_type = other DNA
cacaactccacccacaactatatttaccacaacgttgcttgctactatcttccacactggtgaatattattactggaagatgcaactattttaatttattatttgattatctatgatgat

SEQ ID NO: 34705 - DNA, 120 bp, synthetic construct
  source 1..120: mol_type = other DNA
gcatatggtaatccttagaaagtaatgaccctacatatgattactctttctaatcagagttactggtgatgacagtgaatctaaaggaagattgggttagagtgtattaggtttgaactc

SEQ ID NO: 34706 - DNA, 120 bp, synthetic construct
  source 1..120: mol_type = other DNA
aaagcctaaaatatttactatctcattctttacagaaaaagtttgctgaaccttcagtttaatggttataagaggggtcctagaggatgattagtttatcattcttaaaactgtagataa

SEQ ID NO: 34707 - DNA, 120 bp, synthetic construct
  source 1..120: mol_type = other DNA
ttatgtctctgtagaggtgatcagaagacgacctgaagcttttattttcctcttttcactgtgggttctagatacaaagacaaacagaaaaagggatattgactaggcaaaagcatacaa

SEQ ID NO: 34708 - DNA, 120 bp, synthetic construct
  source 1..120: mol_type = other DNA
aagtgagctacttaaatattttatgcatctattatattttcatatatcttccaataagtttgaagtatgatattcaaatcttttcatagctccatctgaagaaatggctgactgttagac

SEQ ID NO: 34709 - DNA, 120 bp, synthetic construct
  source 1..120: mol_type = other DNA
gatgtacttttagttttctaagcctacatgattgaataaatttgtgttattattcacagtttcagctcactagcaacttacagatacagcaaaaaagtatggttatatttatccacactt

SEQ ID NO: 34710 - DNA, 120 bp, synthetic construct
  source 1..120: mol_type = other DNA
tttctagattttatttttatttttagtagagataaaaaccattgacagttattttctttctgaggaaataagagatcctgactccaatgtaggagagggcatctgaggttttcagcaata

SEQ ID NO: 34711 - DNA, 120 bp, synthetic construct
  source 1..120: mol_type = other DNA
aattttatacttggaataaatgatcaacatttgttctgaagataaaaaattcccctataccttgtgtcactaaactatctttaatttactttgtttagtacagcaaaatgactcctggta

SEQ ID NO: 34712 - DNA, 120 bp, synthetic construct
  source 1..120: mol_type = other DNA
tgaaggactcacaaaatttgcattaaaaactttagttgctcaatcgattttattttaaaatctagatgtctgtgggcaatgataatagtaaagcaaagtatatattttgctgcttattat

SEQ ID NO: 34713 - DNA, 120 bp, synthetic construct
  source 1..120: mol_type = other DNA
tgctagagggatttattaatactgctttaaaaatatagttccctggttgataaaaatctgctgcttaggtgaagaaatcacacaattcattctcttaagtcttttgccaagactattaac

SEQ ID NO: 34714 - DNA, 120 bp, synthetic construct
  source 1..120: mol_type = other DNA
agagaatgcattgctgctatttcactataggtaagttggatctaaaagggtaactactaatatttttacatttctactgatctgctggcatattataattttccagcttcattggaagag

SEQ ID NO: 34715 - DNA, 120 bp, synthetic construct
  source 1..120: mol_type = other DNA
aactcagcctttcataattaaaaacattaggagtcagttgtctaaaagcaaaataaagccatggaaatatttttccctggaaaatattgatatactagtaccttggggaaagcagtgatc

SEQ ID NO: 34716 - DNA, 120 bp, synthetic construct
  source 1..120: mol_type = other DNA
aatagtgttagaaaagtatctatatataaataggttataaagaatggttccacccaagagttcagccatctgccattgttttagagagaataaggtatacttggtagtgacagtagtttt

SEQ ID NO: 34717 - DNA, 120 bp, synthetic construct
  source 1..120: mol_type = other DNA
caataacttgcaactctcatgattgctttcatcaacagaacattcaacaactggtgaatatatcaaggaattcattaaaaaatgaataactatagaccatctgtcttaccatgatttctg

SEQ ID NO: 34718 - DNA, 120 bp, synthetic construct
  source 1..120: mol_type = other DNA
aatgaagggattatacgaatctctagtgccccttctagggtcataattttgtaactattaaaatcccagaatttacatgtgcaggtgttgccttttacattgtctttaaattctagagct

SEQ ID NO: 34719 - DNA, 120 bp, synthetic construct
  source 1..120: mol_type = other DNA
tttggataatgattagaacttgagatgaaagcaggataacttttatagttatataaatgtcctataaaagttatcctgcttttggccgggcacggtggctcatgcctgtaatcccatcac

SEQ ID NO: 34720 - DNA, 120 bp, synthetic construct
  source 1..120: mol_type = other DNA
caaaagaccatgaatttctttgtctgctcccagaaagatttttttttgaaatcagagaattttaatacccataagatttttaaaatacattaaaatgtaagagatgcagatatgtttaat

SEQ ID NO: 34721 - DNA, 120 bp, synthetic construct
  source 1..120: mol_type = other DNA
cagaaaagcattatagaaagtttcgaaggtcagtgcatatttgcttgattcttcaataaagagactttctcttctttctgtatatctgtccacacacacaaatgtgtacatgcacacaaa

SEQ ID NO: 34722 - DNA, 120 bp, synthetic construct
  source 1..120: mol_type = other DNA
agtcacaggaagtagacaaaaaagatgcagataagttttccattgaatgtggggtgctggactgttttatttgaccacttttgcctatatccagaagaatttgtttgttgtgtatgcaat

SEQ ID NO: 34723 - DNA, 120 bp, synthetic construct
  source 1..120: mol_type = other DNA
ttcttgtgtagacatggcagcacaattttgttttacttcatcacaagagtgtttcattgcaaattttaagaatatttttataattttctttacaatggctgtattacatgagaccaagcc

SEQ ID NO: 34724 - DNA, 120 bp, synthetic construct
  source 1..120: mol_type = other DNA
ctcttctttctgctaagtcaagttgtaaatatctcgtttagtctgctactacagtaactcatgaaaagagaaagattgcttttcaatattttacctctgtcctcattttatgtcagtgac

SEQ ID NO: 34725 - DNA, 120 bp, synthetic construct
  source 1..120: mol_type = other DNA
gagaatggtgacaaggagtaaaaatagaaatgcatactttggactttcaaagaaatgtaaggatatttggcagctttagtgtggtaagggcaagttatgatcatgtgtatcatgcctact

SEQ ID NO: 34726 - DNA, 120 bp, synthetic construct
  source 1..120: mol_type = other DNA
tctttgatcactttggagattcagttgtctgacctaaacaagaaaggccataggtattagcctattacgttagaggaaacttcattgaccattttgtcttctcaggccaatccactcatg

SEQ ID NO: 34727 - DNA, 120 bp, synthetic construct
  source 1..120: mol_type = other DNA
taaagtatgtcttgcagaattttctacattaaaaagaatagatatatctcattattttagcggtggcatggtattctaatgactttgatggaccatgactgatttaacctgttcataact

SEQ ID NO: 34728 - DNA, 120 bp, synthetic construct
  source 1..120: mol_type = other DNA
ttaaagttactcttgggtatttacctgttattaaaattgttgagttgcatgttcaacctatctgaagtctctaagtagtacaagagagttgttgctcaacatcccatagccatttgacac

SEQ ID NO: 34729 - DNA, 120 bp, synthetic construct
  source 1..120: mol_type = other DNA
catagagttagatgcatctgaaattaatttgccttgtcaagctcatgtagaagggggaagaaacaccacaaatgtcagtgtttgccaaagttactggaatgcgtgtaataaagtgaaatg

SEQ ID NO: 34730 - DNA, 120 bp, synthetic construct
  source 1..120: mol_type = other DNA
tggtaaacattcccctctcttaattgctttgttaggcttcaagaaagagaaaaattataaagcactattttcttcttgctacaaccattcattctacagataaattctatattggtgaac

SEQ ID NO: 34731 - DNA, 120 bp, synthetic construct
  source 1..120: mol_type = other DNA
cctattgctttctggtaggcatctgttcaggtatttagctggagatagagtgaatcacctttcttagtgcgtacaggaaggggctttgcttgtagtcacactgtcaatactgataattac

SEQ ID NO: 34732 - DNA, 120 bp, synthetic construct
  source 1..120: mol_type = other DNA
cttaagctgaaggtctttctttacatgggataatagttcactgtaacacatctgcctgcagtagttctcttccttttttggctttcagaaggtgagactttgctctcactctattggcac

SEQ ID NO: 34733 - DNA, 120 bp, synthetic construct
  source 1..120: mol_type = other DNA
tggttcttggagcaaacgtttatgatgtgagtctccacatgctgttctgtccttccaagtgggagcagcacatgagtccaccattttgctggattattttttctattcattctttattta

SEQ ID NO: 34734 - DNA, 120 bp, synthetic construct
  source 1..120: mol_type = other DNA
tggtttctgtttaatccttagagaagaaagcctattggtggttagtgagggagtgaaggattataataaggaatgacgccttcccattgagtcatggccagaaactcaggttccaaggtt

SEQ ID NO: 34735 - DNA, 120 bp, synthetic construct
  source 1..120: mol_type = other DNA
tcaggatttatctttgaggacagtgtatacttcttaatttattttagtacagactctcatttctaatcagtaatgctaatttggagagaaaagaaggttttctttgcaagcatggggatt

SEQ ID NO: 34736 - DNA, 120 bp, synthetic construct
  source 1..120: mol_type = other DNA
agcaatcatgcaaataagaattcgaggacacaatttagactgaatatatgttttaactaccaggtgaactggcacaagttgtgaataccacaaataaaatattggcattctataattctt

SEQ ID NO: 34737 - DNA, 120 bp, synthetic construct
  source 1..120: mol_type = other DNA
ataactagagaagtggagttaaaatattcctaacacaaagaaatgataaatgtttgaggtgacttttaccccattaccctaatttgatcatttcccgttctatgcttttatcaaagtatc

SEQ ID NO: 34738 - DNA, 120 bp, synthetic construct
  source 1..120: mol_type = other DNA
gagtgtatttcaatgttcagggagtcctaatacacatgtaatttttgttaaactatatttctgctccttgctcactctaaaggtaaaaatgactggtggaaaagattgtgaaactgttac

SEQ ID NO: 34739 - DNA, 120 bp, synthetic construct
  source 1..120: mol_type = other DNA
aaattttattgatttatgtttttgttttagatagacatggtcttgctcagtcactcaggctggagtgtagtggtacgatcatagtttactgtgacctcaaactcctgggctcaagtggtc

SEQ ID NO: 34740 - DNA, 120 bp, synthetic construct
  source 1..120: mol_type = other DNA
tgtgctatacctatttattttcatgtatttattgatgttattggatttaattctaccattttaataggtgtttcctatttgtcccttctcttttctgtttctctctcccctccctccacc

SEQ ID NO: 34741 - DNA, 120 bp, synthetic construct
  source 1..120: mol_type = other DNA
ctttcatcattttaagataccatctcactattttctggccttcatggcttttaatgagagaacattggtaattcaaattattgttccattaattataatgaattatttttctctagctac

SEQ ID NO: 34742 - DNA, 120 bp, synthetic construct
  source 1..120: mol_type = other DNA
aatgtgattatatcattcctttttatggctgaatagtattccatggtataaaacacaatttatttattcactggttgattgatgggcatttgagttggttatatatttttgaaatcgcaa

SEQ ID NO: 34743 - DNA, 120 bp, synthetic construct
  source 1..120: mol_type = other DNA
accccttactatcctgctttgggtctctctctggctcgtgcagttcgtaggggaacctgggatttgtgtgggttcacatagaattatggagtccctttagttaacatttctgtttctagg

SEQ ID NO: 34744 - DNA, 120 bp, synthetic construct
  source 1..120: mol_type = other DNA
tcaaaggtgactccattttttttcacctaagaaaatagaagtttgcatttttcaaattagagacggtgaagacttgggaagaagaaagtttggagtttagaagaaaaggttgcaggggaa

SEQ ID NO: 34745 - DNA, 120 bp, synthetic construct
  source 1..120: mol_type = other DNA
ttttcatcaatgtcatgaatattgtaataacaatttgtcctgcattatttttggactacatttttaggactgatatgtgtgtttcaaattaaggaaaaatttgcatcgaactatgttttc

SEQ ID NO: 34746 - DNA, 120 bp, synthetic construct
  source 1..120: mol_type = other DNA
catatgagtgcagacaggcacagttttaaattctatttttcatagttactagttttttaaagtttgcaaatgatttaacacctctgatccttagtttgctaatctaaaatataagggtga

SEQ ID NO: 34747 - DNA, 120 bp, synthetic construct
  source 1..120: mol_type = other DNA
gtgtctttgatattccaggcaaaactcttttataacacttcatgccatggccccttccagctacagataggacaggtggttgaatggctagcactccatgagctttattcatgtatattt

SEQ ID NO: 34748 - DNA, 120 bp, synthetic construct
  source 1..120: mol_type = other DNA
agccaaggtcaaggagtgaaattttaaaataataatccacccccagctaacgaaaagctaggacaggtagtgttttcattgcttttgtattcaggcccttctcgtagtatgctgtgcctt

SEQ ID NO: 34749 - DNA, 120 bp, synthetic construct
  source 1..120: mol_type = other DNA
ttaagaattaatactatgcaatttcccatggcaattgattacgtgtttgttcagaagtttggcacagttgcttgattaaaatattaattttccaatttcaattgagcagtttatgaattt

SEQ ID NO: 34750 - DNA, 120 bp, synthetic construct
  source 1..120: mol_type = other DNA
gtagacaggaactttccattgaagatatctgactcttttcatagttgtattttgaaaaggggtatttttttccctagatgataatgctgtgtttgaattaacactattatacaaaggaag

SEQ ID NO: 34751 - DNA, 120 bp, synthetic construct
  source 1..120: mol_type = other DNA
tcatttcatggtcttttaaaattgcattgtcatttaaaactttttaaatgattccaaataatatggcaccattctcttaaagtttctaatgattagtaatttctacaaccatctgtatat

SEQ ID NO: 34752 - DNA, 120 bp, synthetic construct
  source 1..120: mol_type = other DNA
tcatgttgtattactccaaagcatactgtaaatccattaatataaatctggacttggctaatgtagtttagtttaacaaggaatagacaataaatgaactaccttagtttctgcaataga

SEQ ID NO: 34753 - DNA, 120 bp, synthetic construct
  source 1..120: mol_type = other DNA
aagaagtctatcgactcaatctacactgaagttaaaggaacacccacacacacaaatgaggaagaaccaacacaagaaccctggtaactcaaatggccagtgtcatatgtccatgaatga

SEQ ID NO: 34754 - DNA, 120 bp, synthetic construct
  source 1..120: mol_type = other DNA
caattacaggaccaaacgcacacatatcaataccaacattgaatgtaaattggctaaatatcccacttaaaaggcactgagtgacaagctcctgcatagcaaaagaaactgtcaacagag

SEQ ID NO: 34755 - DNA, 120 bp, synthetic construct
  source 1..120: mol_type = other DNA
agagtcgtatattccatcttcaactcagtcaagcacccttgcctacacattgtcctttccttaattctactctaatgacaaaagtaccagacaacacgtatcctgaatgatgtcttttat

SEQ ID NO: 34756 - DNA, 120 bp, synthetic construct
  source 1..120: mol_type = other DNA
tgcacaggagacatctggaatttcaacaaatatcagactatgcataaatatgtaacccagaattcatttgggtttcctaggtgttattgtcaattaatggcatttatgtaattaaactga

SEQ ID NO: 34757 - DNA, 120 bp, synthetic construct
  source 1..120: mol_type = other DNA
taggagaatggagtacagttacatttcagagccgtttttacttgataattatacttaatgacaatgttttgatagctagttttttaaaaaaacaattttattctcttttattatggagtg

SEQ ID NO: 34758 - DNA, 120 bp, synthetic construct
  source 1..120: mol_type = other DNA
gttttcttctaggattcttatagttagaggttttacatttaaaccttcaacttatcttgagttaatttttgtatgtggtaaaaggtatggatctaccattattcttctgcatgtggctag

SEQ ID NO: 34759 - DNA, 120 bp, synthetic construct
  source 1..120: mol_type = other DNA
actatgttgtataacagtggtgatagtaggcattcatgtcctgttgcagttctcaaagggagtgcttccagcttttgtccatttaatatgatgttggctgcatgtttgtcatagatggct

SEQ ID NO: 34760 - DNA, 120 bp, synthetic construct
  source 1..120: mol_type = other DNA
agatcaagtgtactttattttcactagatataggagagaatgttgaattgaattaaattataattaaaaattatgctagctctgaggaattgcttctttctagtaagatacactgctgaa

SEQ ID NO: 34761 - DNA, 120 bp, synthetic construct
  source 1..120: mol_type = other DNA
aaattgtaataaactattaaactgaatattttttatttgtcaccacactattcccagatggttgatcattctcatgaacagtggaagaccaagaaacatcaagcaacagaaactgaattt

SEQ ID NO: 34762 - DNA, 120 bp, synthetic construct
  source 1..120: mol_type = other DNA
ggtaagcacataaccccatttaattccagtagacgctcttttaacagtcacagtcagaatcagaggtaagatggttcatcaaagcaatcagatgaacaggtaaatcattaagaaatgcat

SEQ ID NO: 34763 - DNA, 120 bp, synthetic construct
  source 1..120: mol_type = other DNA
gaagatttcacaacttaccattgtatttacaaatctaaacttaatttttgatcattctaatatctcaagaagtttgtttgcagtttgcccataccttcacagtaacccgactgctacacg

SEQ ID NO: 34764 - DNA, 120 bp, synthetic construct
  source 1..120: mol_type = other DNA
atctgaggttattcatggaactgatatgaaaactgaaggactgtgaagttatattttagttcacataaatgtgtgaattctattgtatattaatattatctgtatttggatatggataga

SEQ ID NO: 34765 - DNA, 120 bp, synthetic construct
  source 1..120: mol_type = other DNA
agtgctgggactacaggcgtgagccaccacccccagcaagtttatatattatataatattaaatatgatctaatatagcacttggagtatttgggtctttcttcttttacttctgtatta

SEQ ID NO: 34766 - DNA, 120 bp, synthetic construct
  source 1..120: mol_type = other DNA
gagcttgtaaagtgattgcaggtatttgcgaatcaggtgaaatttgtgtggtcttttgactcttgctatattaataatattttcaatgaaaactgtacctacttgctttgtgtgcgtata

SEQ ID NO: 34767 - DNA, 120 bp, synthetic construct
  source 1..120: mol_type = other DNA
ccttttcactgagctggaatgagtatcacagggtaattgtgacatattgacccttaaactttcaacatgttttcattaattcaacaaatattatttaaggtggcatcatacccgacacaa

SEQ ID NO: 34768 - DNA, 120 bp, synthetic construct
  source 1..120: mol_type = other DNA
atatgagtacatttctctctgtcttgacacttgaaattctcgtataagatttcaaattataggggaaaaatcagaagaattgattgttgtattttaggaaactcacattgtgttttggga

SEQ ID NO: 34769 - DNA, 120 bp, synthetic construct
  source 1..120: mol_type = other DNA
gcttcctcttcatgtttgtggcactgctttttatgctttgttctttgctgacataaaatatttatcaacatatcatctaagaagattggttctccacagtagatatccaatatgtttcac

SEQ ID NO: 34770 - DNA, 120 bp, synthetic construct
  source 1..120: mol_type = other DNA
ttgggggaacaatgcaatatttatgatagtgaacattattgaaataagttcaaatttttctttatggattttaaaaaacatgctttcatatacaaaaacatgtaaacatctgcctaaaat

SEQ ID NO: 34771 - DNA, 120 bp, synthetic construct
  source 1..120: mol_type = other DNA
atgataacccattctgaatatgcagcacattttctttatccattcatccattggacacttagattgctttcatttcttggctattgtgaatagtgctgcaaaataaacacgggagtgcag

SEQ ID NO: 34772 - DNA, 120 bp, synthetic construct
  source 1..120: mol_type = other DNA
ctaaaaataaaacaaagtatccaggagtaaataaccaaaaacttgaaagatttctacaatgggccaccatcgtcggcaaagcctgagtcctgtcctatctctctcctccccggacagcat

SEQ ID NO: 34773 - DNA, 120 bp, synthetic construct
  source 1..120: mol_type = other DNA
aatcatgcaaaggaacacgctttacaaatcaatttcactgtggacctaaagaccagatacaccaccaagtcccatttaaaaatggccttaatttagaattcaccctctcaagaacagatt

SEQ ID NO: 34774 - DNA, 120 bp, synthetic construct
  source 1..120: mol_type = other DNA
ggggtaaattgcatttagtattcatctaaattggaattttccaaatgtataatctaaaagcactgatctgttgatactccctgcaataaaagttttccttgagcaaatagttttggatat

SEQ ID NO: 34775 - DNA, 120 bp, synthetic construct
  source 1..120: mol_type = other DNA
aaggaggagatatatgcatatgcatagtgatacttacatgcaatattatatttcaattgactctagtagtaaagatatctgattatttctaaacaaatgtctttgaaaatgttttcactt

SEQ ID NO: 34776 - DNA, 120 bp, synthetic construct
  source 1..120: mol_type = other DNA
ccacaaacatcttgggcagtgttgatgctttaaaaatgtcaatgataaacctttaaaccttaattaaaaattactctgagatttagagatacatttcaagatgggcctttagcttacaca

SEQ ID NO: 34777 - DNA, 120 bp, synthetic construct
  source 1..120: mol_type = other DNA
aaaagtgttgtacaatgctcttttattgatccttattagtgcatagaaacattactttcacctctatttttctattctgctttattccatctaagaatttcatgtcttcagttttgtaat

SEQ ID NO: 34778 - DNA, 120 bp, synthetic construct
  source 1..120: mol_type = other DNA
tgctaatataatgttgtagaaataagagaaaatatttattgtgtttaactttattaaaatttctttttagctttcatacctggactaaagaaaggtacagtagaaatcaacacaaaccat

SEQ ID NO: 34779 - DNA, 120 bp, synthetic construct
  source 1..120: mol_type = other DNA
tgcatatgcacacatttctttgttgtccactttatatttggtgatgtttctgtcctattgttccactgttctttataacaataatttatttcactcatacacttttatcttaaactgtaa

SEQ ID NO: 34780 - DNA, 120 bp, synthetic construct
  source 1..120: mol_type = other DNA
gtagctattgtaaatgggataaatttcttgattccttaatgttggcacataaacatgttactggtttttgtatgttgattttggatatgaaatcaatattcatcagtgatattggcctgt

SEQ ID NO: 34781 - DNA, 120 bp, synthetic construct
  source 1..120: mol_type = other DNA
tgcttctgttgcaattgcttttggaattttttttatgaaacttttgccagcgcctgtatccggaatgatactgcctaggttatcttccaggaattttatagttttgggttttatgtttaa

SEQ ID NO: 34782 - DNA, 120 bp, synthetic construct
  source 1..120: mol_type = other DNA
aggctatatgtgtctaggatttgtcaatttcttctggctttttccatttattggcatatagttgctaataatggccattaatcatcttttgaattcctgtggtatcagttgtaatgtctc

SEQ ID NO: 34783 - DNA, 120 bp, synthetic construct
  source 1..120: mol_type = other DNA
atattgaaatataatttgtctgatataagtctagctactaccactcttttttagtttttattggcatggaatatcttttaccatctgtttatttgcaatgtatgagtgcctttaaatgtg

SEQ ID NO: 34784 - DNA, 120 bp, synthetic construct
  source 1..120: mol_type = other DNA
attctgtattttttgtgtatttactattaccagtcagttttgtacctttgtatgaattcttgttgctcattaacattctattctttttaattgaggcactctctttagtatttcctgaag

SEQ ID NO: 34785 - DNA, 120 bp, synthetic construct
  source 1..120: mol_type = other DNA
tgcatttttcagtaccagaatttttacttgattcattctaattatttcaatctccttgttaaatttatctaacagacttctaaatttcttctctgtgttatcattgaatttctttgagtt

SEQ ID NO: 34786 - DNA, 120 bp, synthetic construct
  source 1..120: mol_type = other DNA
tttaggtccaaagtctcttcagtcagcttgtgatgattgatacctggcctgggactcacccttcagaacaatgggctcctctctcacccagggcaggtccagaaatgctgtccaacatcc

SEQ ID NO: 34787 - DNA, 120 bp, synthetic construct
  source 1..120: mol_type = other DNA
gttcttcatagcgtcactggcctgtgtaattcagtatgtttttgtagtggctggtaactgcctttcctttccatatttagtgcttctatcagaagctcttgtaaagcaggttggttggta

SEQ ID NO: 34788 - DNA, 120 bp, synthetic construct
  source 1..120: mol_type = other DNA
gtggtcatttggaggaaagaagacactgtggcttttagagttgtcagagttcttgcactgttctttcttgtctttgtgggctgatgttcctttagtcttcgaagttgctgttttgtgagg

SEQ ID NO: 34789 - DNA, 120 bp, synthetic construct
  source 1..120: mol_type = other DNA
gtgagctagtgcatggccatgggctttgctctgctggagctctctgccagtgtggtgcagtccaccagtgcaggagctatgatgtgggtccccagggcaccagaggttgcaccgcaaaga

SEQ ID NO: 34790 - DNA, 120 bp, synthetic construct
  source 1..120: mol_type = other DNA
gtgaagatgataagccaggtaccaatgtttaacttgcatttttttagcatattttaaaacttcagtgaagtcttgatgtaaatgaatagatgtatgtatataaatctatggttatagtat

SEQ ID NO: 34791 - DNA, 120 bp, synthetic construct
  source 1..120: mol_type = other DNA
gcagtgggtaatgttcctcgtgttgtcacttggccaacagactgtaccttggcatgggaaaatttgtcagctttttcacatgtgacacagatgttgcttttaatgatgcatttaaataat

SEQ ID NO: 34792 - DNA, 120 bp, synthetic construct
  source 1..120: mol_type = other DNA
gatcgaatggtacatctacttttagttctttaagacatctccatactgtttctcaaaggggttgtactaatttagattcccttcagcagtgtaaaagtgttcccttttcaccacatccat

SEQ ID NO: 34793 - DNA, 120 bp, synthetic construct
  source 1..120: mol_type = other DNA
ggaaggcttcatctattttgtaaaaatgttcacatgtttttatacatcataagaagcacatttacaatgaagaataatttggcctttataataatgtaacaagatgacataattgctcct

SEQ ID NO: 34794 - DNA, 120 bp, synthetic construct
  source 1..120: mol_type = other DNA
attttttcatctgaaaatgtgcaatagtaacgtgttagaacaaacatttgtgaaacacttatatcacaaatgctcaatatatattggtttctcattgcaataaatgactgcaaaatcatt

SEQ ID NO: 34795 - DNA, 120 bp, synthetic construct
  source 1..120: mol_type = other DNA
atatgctttctacttttttgtttaatttgaacttgaaaacaaaacacacacaacttcccaattggattagactattaacatttcagaaaggatgtaagaaaggactagagagatagtact

SEQ ID NO: 34796 - DNA, 120 bp, synthetic construct
  source 1..120: mol_type = other DNA
gcataatgatatcttttgttaacctctcaacatcagtatcatctttgtgaagtgagagcgcatcatcagattataagaaatgacaggaggactgtatacttgggaaagttttgttcagtg

SEQ ID NO: 34797 - DNA, 120 bp, synthetic construct
  source 1..120: mol_type = other DNA
tgcagctttgtgggggtgtcttcatgcacaagctaaattgtacctgttccaaatggccagatgcacctatactctgaatgtgggtatacacccacatttaccaagcattttaaaatatgc

SEQ ID NO: 34798 - DNA, 120 bp, synthetic construct
  source 1..120: mol_type = other DNA
ataataacactaagaacaaaaacaacaataacgacataatagtttttgcaaataaaattgatattcaaggcagaaagatatacaactttgtaagcatagtaaagcaatataacccttctc

SEQ ID NO: 34799 - DNA, 120 bp, synthetic construct
  source 1..120: mol_type = other DNA
atcgtagggaatcctaagctgagaatttgacagccaaatgactataattaactacgaaaaggtcaactagaaaaaacaaggcacatacttaagcagactcttgttaagcttgtcttgtgg

SEQ ID NO: 34800 - DNA, 120 bp, synthetic construct
  source 1..120: mol_type = other DNA
gatatcaagaagtcccaaattatttatagcacaaaaatatggtttatgttggcaatagctggcaggaagctccctggttttgaatttaatataggcaaatatgcactaatcggaaaactg

SEQ ID NO: 34801 - DNA, 120 bp, synthetic construct
  source 1..120: mol_type = other DNA
tcttttttcaaactctgaattatgtaaaacaaacatatattttgtaagtatctatttaaaacacagctatatggatgcacattgcatatactaaaaggtcataaatacagatcacactgt

SEQ ID NO: 34802 - DNA, 120 bp, synthetic construct
  source 1..120: mol_type = other DNA
ttgctgggtgctcattttacagttgtttatagagactacagggtgccattctactgtcgacgactctgcgctagatacaaaagtatcactacattgggattgtattttcctatagccaag

SEQ ID NO: 34803 - DNA, 120 bp, synthetic construct
  source 1..120: mol_type = other DNA
tgcagtaccctcacctagaatgcttttccacccattcccatatccctttgcctagttagttctcagtcattagctctaattttgaagttgactcctctaagaagacatatttggccaaat

SEQ ID NO: 34804 - DNA, 120 bp, synthetic construct
  source 1..120: mol_type = other DNA
ttctgatctatcactgaaacttttcttaatagtatggctttgtttcaaataaccattacaatagagaatgatcttgtttacattagaaacaaggctaatataggactaaacagctgtctt

SEQ ID NO: 34805 - DNA, 120 bp, synthetic construct
  source 1..120: mol_type = other DNA
tacaactccacaataataaaaaatataacatgaagtagtgattgtaaaatacccaatgaaagataaatcccttaacttgaatagcagcctatttgttgtttcattcatattgtcatcaac

SEQ ID NO: 34806 - DNA, 120 bp, synthetic construct
  source 1..120: mol_type = other DNA
gaatgaaagaaagaaagaagaaagaaagaaagaaagagagagacctttacctccaaaaggaaggcaagaagtaattacaatttttctctggcatttctaatgctagttctggtcactgta

SEQ ID NO: 34807 - DNA, 120 bp, synthetic construct
  source 1..120: mol_type = other DNA
caacctatcatctcaactgaaataactagagaatcaagagcaagcaatccccaaagctaacagaagacaataattaaccaagatcagagcataactgaaggagacagagatgtgaaaaac

SEQ ID NO: 34808 - DNA, 120 bp, synthetic construct
  source 1..120: mol_type = other DNA
tgttttggcgatctttcacctctctggttacctgtattcctagatatttcattctttttgtggttattgtgaatgttattgcattcttgatgtggctctcagcttagatcttgttggtat

SEQ ID NO: 34809 - DNA, 120 bp, synthetic construct
  source 1..120: mol_type = other DNA
tcatctgtgaatccacctggtcctgggatttttctgtttgttaggcttttcattactgattcaactttagaactccttattgggcttttcatgttgcaatttattcctggttcaatcttc

SEQ ID NO: 34810 - DNA, 120 bp, synthetic construct
  source 1..120: mol_type = other DNA
cctgcctcaatggattatttatcatttgaaaagtgaagagttttgcccacatgagacgttgaccatttattcatattggctatgaaaacaaaaggtctggtattagccactgctctgcaa

SEQ ID NO: 34811 - DNA, 120 bp, synthetic construct
  source 1..120: mol_type = other DNA
attctgatttacaggtgatgcttcatagcagttactttgcatcctttcctctgggcaaataattgttcagctagccaaaaatcaggttcataaaagcttctctgtgcaacttataaaatt

SEQ ID NO: 34812 - DNA, 120 bp, synthetic construct
  source 1..120: mol_type = other DNA
gattcaggttttggggtggatttgatttagtattcctaacaatgcctccttgtgttaacagactgtatcttggatagttctagaaggtgcatgttctcttaatagaactctcctgctttt

SEQ ID NO: 34813 - DNA, 120 bp, synthetic construct
  source 1..120: mol_type = other DNA
tgtagctattgtttttgttgctgttagcattatgattccataaagtgagatacagagaagttaactgcactagatgagaccaaaatccagtcttaattcagtatgtttctacgttgatgc

SEQ ID NO: 34814 - DNA, 120 bp, synthetic construct
  source 1..120: mol_type = other DNA
taaaatatttttagagagccaactaaaatgttttgaggagactgggtttatgaaatatgaaattgagatgagtttctcctaagaagtaaattatttagctaggaggaaattactagaagg

SEQ ID NO: 34815 - DNA, 120 bp, synthetic construct
  source 1..120: mol_type = other DNA
acctgttctttctaaaacaaaacccacaaaactatgcaaattgttattttactggtgatgacaagaagaagcatttccaactaagaaagtaacaacctttatattgtgagggtgctaaaa

SEQ ID NO: 34816 - DNA, 120 bp, synthetic construct
  source 1..120: mol_type = other DNA
ggagtgaaatacccagttcatatggtaactctatgctttaagacctgccaaactgttttccaaagcagctgtgccattttatgttctcaccagcattttgtgaataaggaggcggaataa

SEQ ID NO: 34817 - DNA, 120 bp, synthetic construct
  source 1..120: mol_type = other DNA
cgtgtttcagggagatacatattgagcatatttttcgtttatttactagtcaattctcatttcttattatttcataaagaatatttttgcaaataccctaagttaataagtctagaattc

SEQ ID NO: 34818 - DNA, 120 bp, synthetic construct
  source 1..120: mol_type = other DNA
tgtgaacataattctgcctattgaattgaggggttgttaatccctggcaatcatgtttgtgccaacttgactggtgatcttagactatttccagtcataggaggttgaaaagcatgtgga

SEQ ID NO: 34819 - DNA, 120 bp, synthetic construct
  source 1..120: mol_type = other DNA
agtgtgtgtgtgcgtgcataccaaatttcaaatgtgagttggaattgcatcagagatctctctgaaagccaattcaggctcttgagaaaattgtcaacaattagtagtgacatagctaca

SEQ ID NO: 34820 - DNA, 120 bp, synthetic construct
  source 1..120: mol_type = other DNA
aaaatcttcctgtaagtttcatttactttatccttacctatcatgtggatattgttattagagcttccttagcaataataatcacaaaactatgtgtgtgtgcatgtgcacatatatgaa

SEQ ID NO: 34821 - DNA, 120 bp, synthetic construct
  source 1..120: mol_type = other DNA
tcattctggcaacgtacttaagtataattaattatgactccttctttgctcaagataaaaatatatcattagtgactatgaactcatctatcaaaaagggtattaacctatctgttctaa

SEQ ID NO: 34822 - DNA, 120 bp, synthetic construct
  source 1..120: mol_type = other DNA
aaaaaatgctgaagatcatctgcaccttcaggggatagtaatcttgttgctggtggaaggtcttacctcaatattgatggttactgactgatcagagtggtggttgctaaaggttggagt

SEQ ID NO: 34823 - DNA, 120 bp, synthetic construct
  source 1..120: mol_type = other DNA
tccattagagctcttgactgaccaggtacattggcaatgagcagtaatatgttgaaaggaatctttttttctcagccgcagatctaaacagttgggttaaaatattcagtaaaccatgct

SEQ ID NO: 34824 - DNA, 120 bp, synthetic construct
  source 1..120: mol_type = other DNA
ctttctcactaagcttaatcatttctacctttgatataaagttagatatgcatgactctttttcacttgaacacgtaagatgccattttatggttattaattggcctgatttcaatattg

SEQ ID NO: 34825 - DNA, 120 bp, synthetic construct
  source 1..120: mol_type = other DNA
ccaaaataatgatatttattagtttggatgagtcacctttttttgcatagtactcagcccactggcttctttgaatccctttctagatatacagggaatagttactattagtctagctct

SEQ ID NO: 34826 - DNA, 120 bp, synthetic construct
  source 1..120: mol_type = other DNA
ttatacctcagtaccgtgattctgcctttatcttcattgattttaaacaaaagatctcttttccatcttctcgctttaagttgctctagagttgcgaatcggggtttataatctgaagca

SEQ ID NO: 34827 - DNA, 120 bp, synthetic construct
  source 1..120: mol_type = other DNA
actgctagattttccttcctgaattatgtctttgtttgcaacttgtttttctactttatagacataagaacaatgtaaagaagataaaaataattcaatgtttttgcaaaagtgatactg

SEQ ID NO: 34828 - DNA, 120 bp, synthetic construct
  source 1..120: mol_type = other DNA
caacctgcaacataacatttggtatatggttccagttctatgatcattagcagcctttggagtactgtaggtggcaaaaatgaagtgaagaaaagaagaattttcaaattccttcatgaa

SEQ ID NO: 34829 - DNA, 120 bp, synthetic construct
  source 1..120: mol_type = other DNA
attgtacatttttaaataacttgaaaagtgtaattggattgttttaaattcaaaggataaatgcttgaggggacaaatatctcattccccatgatgagattatttcactttgcatgcctg

SEQ ID NO: 34830 - DNA, 120 bp, synthetic construct
  source 1..120: mol_type = other DNA
aaaaaagaacattcagttgtcttttaaaaatactacctacaaatgcatactgtaactctggtgacaaaatgagaatatcagcattaagacccagaaaataaggtgcatgttaagccctat

SEQ ID NO: 34831 - DNA, 120 bp, synthetic construct
  source 1..120: mol_type = other DNA
acagttcttttctaggtttggtagaaataataatcgaaagttaccttatgtgaggatttaccagaaataaacagtcaaaggacttctctataaaatatcatttcttagcgagcattgacc

SEQ ID NO: 34832 - DNA, 120 bp, synthetic construct
  source 1..120: mol_type = other DNA
tctaaaactgattaccatagaaacaattgtattagtcatgaaattatcagatttagttatcaggttgtttacaaaacttcaagcattgtaaattatcttttccatatggaaagtaatata

SEQ ID NO: 34833 - DNA, 120 bp, synthetic construct
  source 1..120: mol_type = other DNA
ctgacccatttatataatcttccttagttctgagcttttctggatttagtgagagccttatattgtcacagaaataaagtcaattatatttcagagaaaaaatcatgaaagatcatgacc

SEQ ID NO: 34834 - DNA, 120 bp, synthetic construct
  source 1..120: mol_type = other DNA
atattaaaagggatgtaggataagttggggagtaatatatttaacaagaagaaagttctcctccttcatttaaaaaaaaaaaaggagaaggcaaagcaagatggtggaatagaaaactcc

SEQ ID NO: 34835 - DNA, 120 bp, synthetic construct
  source 1..120: mol_type = other DNA
tattcctgaaggtttattaacactgggtgtgtagatgtgggaaggatttctaggtggagaaaacagcttgtacaaaagccctgaaatgaacatgcttagcatgttggaagaaccgacaga

SEQ ID NO: 34836 - DNA, 120 bp, synthetic construct
  source 1..120: mol_type = other DNA
gcatttttaagtttttgtggaagtttcagaatcttctccatattgtttataataattttcatcttaaccaccaacagtgtacgaggtttccctgttctccacaacctctctagcatttgt

SEQ ID NO: 34837 - DNA, 120 bp, synthetic construct
  source 1..120: mol_type = other DNA
ttttaaggcaagagatcactgggtcttgtgttttttctttattctgacatgttatgtcctttcattggagagttcatctatttatttccttgttattattgacaactagagacttactcc

SEQ ID NO: 34838 - DNA, 120 bp, synthetic construct
  source 1..120: mol_type = other DNA
ttacctctttgaatacactttctacccccatctctttctgtacttttctttaaggaaaataacacttagatttacccttttgaggatatttcctagatcttatagttgtacttcattctt

SEQ ID NO: 34839 - DNA, 120 bp, synthetic construct
  source 1..120: mol_type = other DNA
acaaatttacctaatatttcattctactttgtgtaagctggcactcacaccacaatacgaagtccttcctgcttttccctcctctttccacaggcagaggaacccctccctgtggctact

SEQ ID NO: 34840 - DNA, 120 bp, synthetic construct
  source 1..120: mol_type = other DNA
actttggcctacagcagtaaggcttgctaaaaaaactcaagttctgaccactgtaatgggcgattcccttcttgtaaggactggtccaaatgctccctctgtgcagggtactggttgatc

SEQ ID NO: 34841 - DNA, 120 bp, synthetic construct
  source 1..120: mol_type = other DNA
gaattgaataaactgaaattcaacacctattccactgaattttactctacctgatgagtattttggcattgcagagaaaatctctttttttgaaaggaactcattaaatatcacttttgc

SEQ ID NO: 34842 - DNA, 120 bp, synthetic construct
  source 1..120: mol_type = other DNA
acttcctctagacatgtacttctccaatcgtgattgaaagcaaatattacataaaattgacttgcaaaatatcacagtaacatagttcttaatacagcactatattttattcatatcaac

SEQ ID NO: 34843 - DNA, 120 bp, synthetic construct
  source 1..120: mol_type = other DNA
gtgcataagttatgcttggagaaaatataattatattttcctgcataataaataggttttatgaaaaacacagcctttggagaatacaagagaaattattcactatgtttaacaaaacat

SEQ ID NO: 34844 - DNA, 120 bp, synthetic construct
  source 1..120: mol_type = other DNA
gaggcttatttattccaaagaccagtaagaacttactacataagagacatgtagtctatcaaataaggagagtggttaaagtctcgtttttagtatcattgacttcgaaggttaaattcc

SEQ ID NO: 34845 - DNA, 120 bp, synthetic construct
  source 1..120: mol_type = other DNA
catacatgaaagacgagtcttagaaaattcttatctctctgtatatataacacttttttcaataaaaatgtaaatcatattacttgtgttttatcaattctcattttgagaatggatagc

SEQ ID NO: 34846 - DNA, 120 bp, synthetic construct
  source 1..120: mol_type = other DNA
acttaaggtaatatttgttatggaaagatgctatcgaaatgcagattctacttctcacctggagtttctaagggaagattaaattgtaatcttagaaaaaaaaatgtgaatgaatgtctc

SEQ ID NO: 34847 - DNA, 120 bp, synthetic construct
  source 1..120: mol_type = other DNA
ccagagttaatttcggttaacactagcaccttctgaaatgtgagccaatttcaatactgcaatgccaagctttcctttcagccattttgcccttatctcccacaatgctatagaaagtag

SEQ ID NO: 34848 - DNA, 120 bp, synthetic construct
  source 1..120: mol_type = other DNA
catgagtagtgccttttttcctgtggtttatctatttagaacaaaactttaatgatttatttaatctctccctaagatccttttcacgatggcgaaagagagcaaaaaacatctatggtt

SEQ ID NO: 34849 - DNA, 120 bp, synthetic construct
  source 1..120: mol_type = other DNA
aagtgggcatcctttcaagtttcaggtgttagagaatagactttccatttttccccattcagtattatacttgctgaggttctgtcatatatggcttttattgcattgatgtatgttcct

SEQ ID NO: 34850 - DNA, 120 bp, synthetic construct
  source 1..120: mol_type = other DNA
caagaagaggaaatgccacctttctatgccatattttatgcatgccactttctttaaatcagttaaaagacttgcattatttacagctaaacactaaaatttagcctgatattccaggcc

SEQ ID NO: 34851 - DNA, 120 bp, synthetic construct
  source 1..120: mol_type = other DNA
atgcatgctgaataatagtatcagaaagaatcttagagatcatccagttctacatcttcactattaaagaaaataaaattaaggcccacacagcagaagtggtttgctaagtttataagg

SEQ ID NO: 34852 - DNA, 120 bp, synthetic construct
  source 1..120: mol_type = other DNA
gtgaatgagttgtcttttaaaaaggcacatgctcatagaagagttacattgttactaatagcataatataaaagaatatatcaaataatgtttaaactctctgaaaatatggagttcatt

SEQ ID NO: 34853 - DNA, 120 bp, synthetic construct
  source 1..120: mol_type = other DNA
tcatgtgtattgagatgagtgcattgggaaatttatgaaaacagaatcatttgcaggattaagaaaaaagaataaataaaatgctacataatatgatctacatttctgaatgtttatgac

SEQ ID NO: 34854 - DNA, 120 bp, synthetic construct
  source 1..120: mol_type = other DNA
ccatggccttgaagggaaggaaccagttctggcagttagtcataaactgctgactaaagaaaccttgggctctgaataaccagcagtgactcatgtagtgttccatgggtggtgggttct

SEQ ID NO: 34855 - DNA, 120 bp, synthetic construct
  source 1..120: mol_type = other DNA
aggagtccacaaaaaccacagtgttagtgggcttgaagcccaaatcctttcaaatacctggatagccttaccaagaaggacaatcccaggctgtgaaaactacaataaatacctgactat

SEQ ID NO: 34856 - DNA, 120 bp, synthetic construct
  source 1..120: mol_type = other DNA
aaaccattcataagaaatcagcttccgtgatccaatcaccttccaccaggccccacccccaatattgtggattacattttaatatgaggtgtgggcagggacaactatattattctgaag

SEQ ID NO: 34857 - DNA, 120 bp, synthetic construct
  source 1..120: mol_type = other DNA
atcagggggatggcaccaagaaggatggtgttaatccttttatgagaaatcttcccccatggttcaatcacctccctccctggccccatctccaatatatgagattacatttcaatgtaa

SEQ ID NO: 34858 - DNA, 120 bp, synthetic construct
  source 1..120: mol_type = other DNA
gctgggtacacacccaaaagaatgaaaactagtatatctaatagatattggctctcccatgtttgttacagaactgtttacaatagccaatatttggagacaacccaagggtctttcaac

SEQ ID NO: 34859 - DNA, 120 bp, synthetic construct
  source 1..120: mol_type = other DNA
gagaatgcaacagccaactatcaaatcaaaacatgatgaataagtttgttctattaatattttattgaaaatagtgagttatcttaacctcttttagatttgtaattaatgcagaaagga

SEQ ID NO: 34860 - DNA, 120 bp, synthetic construct
  source 1..120: mol_type = other DNA
cattgcaaggcatgcagcagacactgtatttgacatttatgtggcttttaaaaaaatgtcattaatcctttattaagggccacctcaacacacttgtgatttattttgttcatgggttaa

SEQ ID NO: 34861 - DNA, 120 bp, synthetic construct
  source 1..120: mol_type = other DNA
cagtttgtaaccccctgtgaatcaacagaatttctaaacagctaaatgagtcactgttactgaggttgctcctttgaggtgccattacaaaactgtaactcttcactgtatgcaaaagta

SEQ ID NO: 34862 - DNA, 120 bp, synthetic construct
  source 1..120: mol_type = other DNA
aagagcttgatcacatgcttacaatttccatttatgtattataaggagcaatgtatggctgctctgtttactttgtgactttggccaggatacacaaacctaattactattttccattaa

SEQ ID NO: 34863 - DNA, 120 bp, synthetic construct
  source 1..120: mol_type = other DNA
tcgctgtgtgctctcattagaaataaagcttaaaaactaagtcatgtcactatgaaacttcttattgcaaattataaatcagaagtttctctgccatagtcattgattttatcagagttg

SEQ ID NO: 34864 - DNA, 120 bp, synthetic construct
  source 1..120: mol_type = other DNA
tgtgttaggaatgaggaaagtagggttctaggcctgcctttgccatgatttttgagcacttggggaggtgactttactttgccttggttttctattctgtaatattactagatgacccct

SEQ ID NO: 34865 - DNA, 120 bp, synthetic construct
  source 1..120: mol_type = other DNA
tgccctgggaaataaacttccaatgccattaactgttctgtcatattgcaaatggagagtctgctatttcttaaaatcaagaatgaaagtttcagcgaaattagtgaatggtcatctgac

SEQ ID NO: 34866 - DNA, 120 bp, synthetic construct
  source 1..120: mol_type = other DNA
ctgcttttggtattttagataagttaaatattccagaatgcttaaaatataagaaaaacaagtatgccgtttttcatcacttcattctatttggtttgctatattattttatttgaaatc

SEQ ID NO: 34867 - DNA, 120 bp, synthetic construct
  source 1..120: mol_type = other DNA
tagcttttgttttgttttcgttggatgatgttggtctcatagaattagttggggagttgtccctccttttccatggtttggaatagtttcagaaaaagtagtagcagttctcctttgtac

SEQ ID NO: 34868 - DNA, 120 bp, synthetic construct
  source 1..120: mol_type = other DNA
gattgtgctgtggtctgagagattgtttattataatttcagttcctttgtacttgctgaggagtattttacttccaattatgtgatcagttttatagtaagtgccatgtggcaaagaatg

SEQ ID NO: 34869 - DNA, 120 bp, synthetic construct
  source 1..120: mol_type = other DNA
tgatgttgctgctttctgtttgcttgcttttcttttaacagtcaagctcctcttctgtagggctgttgcgattgctgggggtccactccagaccctattcacctgggacactcccacacc

SEQ ID NO: 34870 - DNA, 120 bp, synthetic construct
  source 1..120: mol_type = other DNA
accctgcttttcctcactctctgtgggtcatgccaacaacctagtcagtcccagtgagagaacctggatacttcagttgaaggtgcaggattcactcactgagttcatttttcttggtga

SEQ ID NO: 34871 - DNA, 120 bp, synthetic construct
  source 1..120: mol_type = other DNA
gattctggaattgcatggggcctgtagtccctttgttttggccaatgtcttccatttggaatgagtgtatttatccaatgcctatactcctgttgtatctaggaaatagcaaacttcctt

SEQ ID NO: 34872 - DNA, 120 bp, synthetic construct
  source 1..120: mol_type = other DNA
ggagctaccaaatctctctcaaaaggaagatacataatcgaaatagttctgtgtttattaaagggattaactttgttgttaaaaatattcccctaaagaaaactccagttctagatggct

SEQ ID NO: 34873 - DNA, 120 bp, synthetic construct
  source 1..120: mol_type = other DNA
tcttagaaagtccccacactcaccaagttcttgtctgcctacctatgtaggttccaaattactaacttggtgatgatcgcttaattaaattggtgtccagcaaattccagtagatattgt

SEQ ID NO: 34874 - DNA, 120 bp, synthetic construct
  source 1..120: mol_type = other DNA
atagatagttctcaaaagtaatctaaaggttaaaaacatataagcatttagaaagtagaaaaatatttgtccaaatgaatttaatatcataagagcaaattttccttctgagccgaaaca

SEQ ID NO: 34875 - DNA, 120 bp, synthetic construct
  source 1..120: mol_type = other DNA
caaagagcttgaaataattaaaaggaatcaagcagaaattttggagttgaaaaatacaattgtcatactaagaaagcattagtcttttaataatagaattgatcaaatagaagagagaat

SEQ ID NO: 34876 - DNA, 120 bp, synthetic construct
  source 1..120: mol_type = other DNA
gcagacatgaaagattttcagccattaatctgaagattataagatctgcagcttcctcaattattcctacgataacaccactattgtagattggccttttaagatatatttttctttttt

SEQ ID NO: 34877 - DNA, 120 bp, synthetic construct
  source 1..120: mol_type = other DNA
actacccattgaattctcagtcagaggtccctcctcactttgaatggatcaaagaaaacagggagcaaaggaaattggtcaatattgggtgttcagcaaggtgactaatgtctgttttgt

SEQ ID NO: 34878 - DNA, 120 bp, synthetic construct
  source 1..120: mol_type = other DNA
tcctctactctctttctggaaacaccttttgctgatatggtaaaagcctggaaatttgagatctagactttaccagactttttgaattgagtcgctattggaactgaggataccattaaa

SEQ ID NO: 34879 - DNA, 120 bp, synthetic construct
  source 1..120: mol_type = other DNA
tgtagtgtttatttaaaagagctctaatgaattggcttaatgaataataagcgcttagatcaaatttcagaaagaaactttaacatgttttaggtcatgtgactgataatctttgaaaaa

SEQ ID NO: 34880 - DNA, 120 bp, synthetic construct
  source 1..120: mol_type = other DNA
gtatgccttttgaataaacgacagaaattagaggggggagagagaagacatccagttgttttcaagctgtctttattgagtcctgtttggaaagctgaatctcccctctatcagcaagta

SEQ ID NO: 34881 - DNA, 120 bp, synthetic construct
  source 1..120: mol_type = other DNA
atcttttttcttttgtaacaggaaaaaattggagacactggttattttaccatggcattgaatgaaatggcatacttttagattcttttaaggagtcaaagttgacttatagagccaata

SEQ ID NO: 34882 - DNA, 120 bp, synthetic construct
  source 1..120: mol_type = other DNA
ttatccccatctgtctttctaacaacctatggtttgttgttcacttaagtgctgtattagaactgtgggtgagaatattaatgtttttgtcatacaccagtgagtacgcgcagatggctg

SEQ ID NO: 34883 - DNA, 120 bp, synthetic construct
  source 1..120: mol_type = other DNA
ttcctagctagagcaatcagacaagagaaatacataaagtacatttaaattggaaaggaagaagtcaaattatctttttttgctgatgacataattccatattgggaaaaaactaaagag

SEQ ID NO: 34884 - DNA, 120 bp, synthetic construct
  source 1..120: mol_type = other DNA
gaatagtgagagcctgtggcatttgaatcataatccatatctcgccacacaatttagtgtgacaaaagcttcatcccttccagggtcattcaaaaatgcagaactccttttccctccaac

SEQ ID NO: 34885 - DNA, 120 bp, synthetic construct
  source 1..120: mol_type = other DNA
gacatctcagtgtatgtccatatttaaggccgtaccctctgatgcatgacatcagaggtaacacattcaatgggatatagacttcgccaaatattctagccaagtaacaaaacaagcaaa

SEQ ID NO: 34886 - DNA, 120 bp, synthetic construct
  source 1..120: mol_type = other DNA
ccagaaggcaagaaggcagtgaaataacaaagagtcgtaagaaaaaaaaaaggtaagaaataattttttatccagcaaaatattggtcagaaatgaaagtgaaatacaaaccttcctaga

SEQ ID NO: 34887 - DNA, 120 bp, synthetic construct
  source 1..120: mol_type = other DNA
tcatacacacatacacacacatatacatacccgcacatgtatagtgaaaaatatcataaaaagcattaaaatattacactagaatgtattcacctaatgcaaaagaaagctgcaaggaga

SEQ ID NO: 34888 - DNA, 120 bp, synthetic construct
  source 1..120: mol_type = other DNA
aaattaacaaatatttagaaattaaacaagatcttcctaagtaataaattggttaaagaagaaacaacaagagaaattccaaaacatttaatggtgaaatactcaatgcttttcccacaa

SEQ ID NO: 34889 - DNA, 120 bp, synthetic construct
  source 1..120: mol_type = other DNA
atagtctttccacaagtggcattgggattgctggatatccacatgcaaaaggataatttttagataccttccttacaaaatgcatagaaataaccactccaaatggatcattgaccttaa

SEQ ID NO: 34890 - DNA, 120 bp, synthetic construct
  source 1..120: mol_type = other DNA
cttgggtaataaaaaaagaactgaagtactgatacatactacaacatgaatgaaattcgaaagcattatgctaaatacaacagaccacttacccaactgtccgaataaaggattgcattt

SEQ ID NO: 34891 - DNA, 120 bp, synthetic construct
  source 1..120: mol_type = other DNA
ctagtggttgcaacccaaagttaagaaaatagtgaagattatatggacagtttctttctctaaaaataaccaaattcttccttcctgttctgctcttctcttaataccatgcacctgaac

SEQ ID NO: 34892 - DNA, 120 bp, synthetic construct
  source 1..120: mol_type = other DNA
tgctgtttaacttgcacataaaaatttctacgataacatacgttttcaaatattttgcataaatatgcaggactggaattgctgggttttttttctgtttttgtttttcaagtgtatgtt

SEQ ID NO: 34893 - DNA, 120 bp, synthetic construct
  source 1..120: mol_type = other DNA
aggttgactccatgtctttgctattgtgaacagtgctgtgtcaacatgcaagtgcatgtgtctttttggtagaacaatttgttttcttttggagataatactcagtaatgagagtttctg

SEQ ID NO: 34894 - DNA, 120 bp, synthetic construct
  source 1..120: mol_type = other DNA
taagaatagcaacccctgttcttgtgttctgtttccactgtagatctttctctagatctttactttgagtctatggatgtttatgcatgtgtgttgggtctgttgaagacagcagactga

SEQ ID NO: 34895 - DNA, 120 bp, synthetic construct
  source 1..120: mol_type = other DNA
taatattcctcaaaaacattgcttatttcttaaaattcttttcttctttatttttatctggctatgttatttcaaaatactggtctttaagctctgaaattatttcttctgcttggtaca

SEQ ID NO: 34896 - DNA, 120 bp, synthetic construct
  source 1..120: mol_type = other DNA
tgcctagagatatgcctgggtgtggagcagagagagatgcctgtttgtgaagcagagagaaccacccttcaccaagatctctgcatagtaggggtgaggcagctccaggttgctgaacca

SEQ ID NO: 34897 - DNA, 120 bp, synthetic construct
  source 1..120: mol_type = other DNA
aaagaaacaaaatattctccctcctcttgggttgctcagatccccagtagaaaggtgagtcacagagggaggctctctgtctctctcatgtactggggcttcacttacttttatcaactg

SEQ ID NO: 34898 - DNA, 120 bp, synthetic construct
  source 1..120: mol_type = other DNA
ctttccccataaattatagcatcagcttgttgatatctgcaaaaacagaagatccatctaagatttcctttttatttagattatgttgactttacggatcaattgtgggaccactgacat

SEQ ID NO: 34899 - DNA, 120 bp, synthetic construct
  source 1..120: mol_type = other DNA
agatgattccagcaaataaaggataccgaaatcacttatttttgaaataattatgactatattttattcttgaaactaaggcatatcttagagttcaataaactatacttccaaatttat

SEQ ID NO: 34900 - DNA, 120 bp, synthetic construct
  source 1..120: mol_type = other DNA
gaccattgctctctgccacagccctccagtgacacagaccatcgcattgtgccacagcccaccaccgatacaggtgtctgctctccaccacagtcctcctctagtgcaggctactgcact

SEQ ID NO: 34901 - DNA, 120 bp, synthetic construct
  source 1..120: mol_type = other DNA
taaagaatatgtataaactgtacagatctagatctacaacctatttctctactctttagtagagttcgagacacagaagtgcaataactgccctaattaagcaactatttgttaaaaagg

SEQ ID NO: 34902 - DNA, 120 bp, synthetic construct
  source 1..120: mol_type = other DNA
tgagaaagtttcttttcatgtgcccagcaggttaagtagcgttttcagaatatacattattcccatccattgtaaagttccttaagtcatatttgactgggcgtgcagaataacttctta

SEQ ID NO: 34903 - DNA, 120 bp, synthetic construct
  source 1..120: mol_type = other DNA
cacattacaagttatttctctgactgaatagacagtggtataggttgacacagcacacaagtggctattgtgatgtatgatgtatgtagtcctacaactgcaaaacgtcttactgaacca

SEQ ID NO: 34904 - DNA, 120 bp, synthetic construct
  source 1..120: mol_type = other DNA
tttctgcaagaacctttctatattatgtgccaattaccacaccagatcaattttatgcagaggccttaaaatattctttcacagtagctttcttacactaaccgtcatgtgcttttagta

SEQ ID NO: 34905 - DNA, 120 bp, synthetic construct
  source 1..120: mol_type = other DNA
aggatttctctgtacaaccataggagatccaggtgaaataagtttctggagatggttgataatatttgtggaacaaaataactttactcctggctttgttttcactttggctaaatggag

SEQ ID NO: 34906 - DNA, 120 bp, synthetic construct
  source 1..120: mol_type = other DNA
ccatttcgagtatctgagaatcaacacatgcatgaaaacaaccgaagtttaatttgtgcactagcttaactcctttcttatctgttaaagtattctaaagttaattggggtaaaacagaa

SEQ ID NO: 34907 - DNA, 120 bp, synthetic construct
  source 1..120: mol_type = other DNA
tggtacgtcccactagcaatgaaaatttcggaaatcatggcaaacagtggaagatccagagaacctattgagaccaaggacgaatataatctgataggtcaacttttattcttgctgggc

SEQ ID NO: 34908 - DNA, 120 bp, synthetic construct
  source 1..120: mol_type = other DNA
gtaggcataccaccatcaagaagttgaaatgtaacttcccgttctttaagtgtgggctgcacatagtgacttttttcccaaagagtacagtacggaaatgggaggagaataatcttagag

SEQ ID NO: 34909 - DNA, 120 bp, synthetic construct
  source 1..120: mol_type = other DNA
gactgtaaatcattctgtcagcttcatagtaacatttaatttcaacctacccagtccctaattggccaaactgttataaaaccaaattacgcagcagtgaggaaaatagaaacttgaatg

SEQ ID NO: 34910 - DNA, 120 bp, synthetic construct
  source 1..120: mol_type = other DNA
gtaagaccagatgaattcatttttgtgtacaccccagaatgtagtttatctttgcatctttaatggcaaggtattctaagactgcaagagatgctattttaactgttaagatttgtagat

SEQ ID NO: 34911 - DNA, 120 bp, synthetic construct
  source 1..120: mol_type = other DNA
gggggaatagtatccactaagtatccacttgtcttctgaggcaaggcactgcttttctactgcctacagttaggttagtgctgaatggtatatttaagtataaagtaaccccaggtcaca

SEQ ID NO: 34912 - DNA, 120 bp, synthetic construct
  source 1..120: mol_type = other DNA
gctgggggtattctctgaccttgtgatatgctttggatcttcaaaaacttttctgtcagtttatgtgcttgatgagcaatgatgttgctttctcctgggaaggagatgggttattatgtg

SEQ ID NO: 34913 - DNA, 120 bp, synthetic construct
  source 1..120: mol_type = other DNA
ttatctctcacccacctcccaacatccgcccacttactttgagtaatgatggtattttgatggaagttgcaatgaatttatagatagcttttttttttcaaacaggtcttagtttattcc

SEQ ID NO: 34914 - DNA, 120 bp, synthetic construct
  source 1..120: mol_type = other DNA
attttcagcctatgtgtgtcttgcaggtgaaatatgtttcttgttggaagcatatagttgggtcatgttttttagtacattcagccagtctatatcttctaagtgggcaatttaattggt

SEQ ID NO: 34915 - DNA, 120 bp, synthetic construct
  source 1..120: mol_type = other DNA
aaggaaccttagaggatcatctaatttaatcactttttctaatgcagcggcacgttgtataatacccctgagaggtaaatgtccaatgacatggaattccttactttgtctgggctcctg

SEQ ID NO: 34916 - DNA, 120 bp, synthetic construct
  source 1..120: mol_type = other DNA
aagtacttttctatggtacctatgcatactttgttaaccatttcttgattgctgactcctccagaatgttggttattctctcttacttattataatttgtcaatgccccttctaaaatgt

SEQ ID NO: 34917 - DNA, 120 bp, synthetic construct
  source 1..120: mol_type = other DNA
aatccaggcaacactaatgtggaatggactctaatggcttcaggactatgacctcagcactgatctcaacaacctgcattcagtttgggtgaaaattcgtggctttgtatatgttacata

SEQ ID NO: 34918 - DNA, 120 bp, synthetic construct
  source 1..120: mol_type = other DNA
gaagcaggtagtcgtcttgttgtgaaacagtgttcatttatcgcatctagtttgtcaaaacattgtttgacagtattgaatataaattgttttctacctgtttgttcttcgtgacctttt

SEQ ID NO: 34919 - DNA, 120 bp, synthetic construct
  source 1..120: mol_type = other DNA
ttgctgcgaaaaggaattctagaagcactaaggaaatcctagatacagagattcctttgtcttctagtaaggaggaagcatactgggtcagttaacatccacatgtctgtgaggcaaatg

SEQ ID NO: 34920 - DNA, 120 bp, synthetic construct
  source 1..120: mol_type = other DNA
tatgaaactctttatgccattagggcatttgccccatctataccttttctggttcctattttaaccagggacatgaatttgtagcctggccagctatagttataggtattggctacagaa

SEQ ID NO: 34921 - DNA, 120 bp, synthetic construct
  source 1..120: mol_type = other DNA
tactgtgcaatagaacaccaaaatttattcttactatctaattgtaactttgtacctattgaccagcctctctccatccttcccttcctcttcccctctccagtctcaaccactggtcta

SEQ ID NO: 34922 - DNA, 120 bp, synthetic construct
  source 1..120: mol_type = other DNA
ggggtggcaattagggtacaagttatgatgctaaaaggaatcaaaggctttgctatataaatgctatggaaatacacgtcctctgcatctaacaaaggagtagcaggaagagcacagact

SEQ ID NO: 34923 - DNA, 120 bp, synthetic construct
  source 1..120: mol_type = other DNA
taccctcattaaacttccctgtgtcaaggggccttaaatcagtaattggtgactgtccagttaggctattcacactagtgtttcttaagcactttgctgttgttctctgctgtgcacttt

SEQ ID NO: 34924 - DNA, 120 bp, synthetic construct
  source 1..120: mol_type = other DNA
cattgttcatggggtattgggcaaaccagagaatacatagtattcctgaaaagctaatcatccattcaaatcttgacattttgaaatggaagatgctctattattcttcagggatcttat

SEQ ID NO: 34925 - DNA, 120 bp, synthetic construct
  source 1..120: mol_type = other DNA
tctccttcccatggactactgcagtaatcttttagttctcctgagcttagtcttagcactctctaaactgtatgctgctgccagatactgttttctaaaacgtaggtttcattgggacat

SEQ ID NO: 34926 - DNA, 120 bp, synthetic construct
  source 1..120: mol_type = other DNA
gaaatcaacaaaggatactcagaaagaaaaaaaaattagggaagaagagaagcagtaaaaagtggtacctaagagctgggcatggaggcacgtgcctgtaatcccaactggcaagaggaa

SEQ ID NO: 34927 - DNA, 120 bp, synthetic construct
  source 1..120: mol_type = other DNA
aaagaaaagtagttagaagacaatgaaaagataaattgtgtctcttttagagattctgacaggaaacgctagacacaccaaagatcttgaatggaattgtcaatcactaataattatgcc

SEQ ID NO: 34928 - DNA, 120 bp, synthetic construct
  source 1..120: mol_type = other DNA
ggcaagttgaatgctgtccacacagattgtaagcattatagattatccctttttcacttttttcctgcttcccgtactttatggtcctgaggctttttgcgcactactttcctcactttg

SEQ ID NO: 34929 - DNA, 120 bp, synthetic construct
  source 1..120: mol_type = other DNA
tgtggagattgaatacatttttgatttttaacaaacgttcaatgtgctcttactaaagcttggcaatgacctagatcaggggtttgccaactatggtcagtgggccaaatccagcccatg

SEQ ID NO: 34930 - DNA, 120 bp, synthetic construct
  source 1..120: mol_type = other DNA
atttaatatacgtaaattttatgtgacacaggaaatttaattaggaaataaagacccaaagaaacaggaaaacctgtgtgttcttttttttttttttttaaattggcattcatgttgctt

SEQ ID NO: 34931 - DNA, 120 bp, synthetic construct
  source 1..120: mol_type = other DNA
cagccaaagcctggcttcaggtttgtcacagctatcggttatgataaacaatattaccatcacttcctggttgtagtctgcatgaatttgaaaactaaaatttgcagtgttcgggagtgg

SEQ ID NO: 34932 - DNA, 120 bp, synthetic construct
  source 1..120: mol_type = other DNA
tgttctacacctgtatgcccagtcccattgagcaaattcacattaaaggtttagtggaacagtttcaatgctgtggtccaaagggacttgctactgttttcacaagaaagcactgaatat

SEQ ID NO: 34933 - DNA, 120 bp, synthetic construct
  source 1..120: mol_type = other DNA
gttgtttttgtcttttcttcaccacttcaaattaggattgaaccagattagtcttgttttaaatccactgcagccttttgagctggggagtacggtctctttgagaaaactgttttcttt

SEQ ID NO: 34934 - DNA, 120 bp, synthetic construct
  source 1..120: mol_type = other DNA
ttctccttcctttattgaatataacattctccttccttcattaaatatagtgattctgggttcccacctctaggaatgttctcagagaagggttactgaaaattaaggaatttgggccct

SEQ ID NO: 34935 - DNA, 120 bp, synthetic construct
  source 1..120: mol_type = other DNA
acctagccaaagccactggtagggagaggtcgataggacagaataaatatgattatggggacttataaaagaacaggctaggttactgaagataattcaggatgtgctgacaagactaag

SEQ ID NO: 34936 - DNA, 120 bp, synthetic construct
  source 1..120: mol_type = other DNA
gattatgttcctgcaatttactcattgcatttctcttctctaccccactttgtgtaactggtttcagtagaatgaaggaaacactgttggggcaagtacttcaggaatgacagagggaac

SEQ ID NO: 34937 - DNA, 120 bp, synthetic construct
  source 1..120: mol_type = other DNA
aacattgttacctctggagagtgggataagcaggaacagaagatttatatgttaccttttattgagtcaagtaataaaaatgtagtcccatccctaagcacagcaacacttctaggtaag

SEQ ID NO: 34938 - DNA, 120 bp, synthetic construct
  source 1..120: mol_type = other DNA
cctctctaaagagggcagcagctacttagctccagacagtggttgcgatatggaaccatgacagtgttatcaggtttcctgattcttcaagagaagcaagaaatagcttttaaaaaatca

SEQ ID NO: 34939 - DNA, 120 bp, synthetic construct
  source 1..120: mol_type = other DNA
aattgaacatgcatttcacaggggtgaaaatgcaaattggcaacatcttcccagagagcagttgagcagtatgtctcaatagcctcaaaagcattccttctcttttaccctggaacttca

SEQ ID NO: 34940 - DNA, 120 bp, synthetic construct
  source 1..120: mol_type = other DNA
ctgcaggccttgaattctgtagcacccatgagactcccctaagtatccctcctatttgatagagaggtatgtttccatgacagcagtgttttcaagttgtgtttgttttttcttttttac

SEQ ID NO: 34941 - DNA, 120 bp, synthetic construct
  source 1..120: mol_type = other DNA
atttgtcatttatctgaaactcaaagtcagttgggcattctgtactttttctggcaaccctagccctagagaatatcagggcattgggtcacaaagaagctggaatcagagataaggaaa

SEQ ID NO: 34942 - DNA, 120 bp, synthetic construct
  source 1..120: mol_type = other DNA
acaatgaaatacctacctcacacccactaggatagctgtaaacaaaaaacaagcattactggtgggaatgtaagatgttgtagccactttgcaaaacagtctggcagttcttcaagaggt

SEQ ID NO: 34943 - DNA, 120 bp, synthetic construct
  source 1..120: mol_type = other DNA
tccctaggcctattccactatttcctcccacaaatctgcccatagtccctcaagggacaaatcttcataatatatattgttaggtgaagtgattaagcagtgtttgtaagattgggggca

SEQ ID NO: 34944 - DNA, 120 bp, synthetic construct
  source 1..120: mol_type = other DNA
tgaattagccagtaatgtaaatttcatagggtcactacttatattcttacaatcaacaaacattttttgagcatcagatatgttccagccaatggactatttggtttgggtaaccctgag

SEQ ID NO: 34945 - DNA, 120 bp, synthetic construct
  source 1..120: mol_type = other DNA
ttacatgaaaggagatctctgtgtggcttcaagaaacagaggtagatatagggcagtatctcgtaacaggtagagcagactcatgacggaataaaggactttcagaggtgatatatttct

SEQ ID NO: 34946 - DNA, 120 bp, synthetic construct
  source 1..120: mol_type = other DNA
caaggcaaggcctgagaaaagaaagactagaattgctttttttttcaaagtcacagaagataagataaatttttatgaccatcaaaaaggtggcaaattgtaattgtagaccacaaggta

SEQ ID NO: 34947 - DNA, 120 bp, synthetic construct
  source 1..120: mol_type = other DNA
gccaagaagatagtcttctaaacttctcagggatacacactcagaggaaacccattcagtggaaattatactatgaaatgacattcctcccttatgaaggattctaaacatgcatcagca

SEQ ID NO: 34948 - DNA, 120 bp, synthetic construct
  source 1..120: mol_type = other DNA
ataacaaagtttgttaccagtgaaatgtgtatcttctctcttactgccatgctgtcaggtagaaagccagtggtatgagagaaaaggcagttacacagtgttaccttggattggggagag

SEQ ID NO: 34949 - DNA, 120 bp, synthetic construct
  source 1..120: mol_type = other DNA
agcttgtccatatatgtgccgataagtggccaaggtgcaagccagagcatcctggttcagagcctatgtcccagacaataatgctgtgatatgtctcagacatagtctactcaccagtcc

SEQ ID NO: 34950 - DNA, 120 bp, synthetic construct
  source 1..120: mol_type = other DNA
cagaactccactgaggcagatattggactttcagttcccaatttcctagacggtgaatataatttttcaaacattgtcccactggggtctgtaaccaagggaactaataaggatatggag

SEQ ID NO: 34951 - DNA, 120 bp, synthetic construct
  source 1..120: mol_type = other DNA
cagaggttatgtgacttgtccaacctcatccatctgtagctcttggtatatcatctatagcccttgctttttttgtggtgtttcactgcctaccggagggatttttgttcgtttatttgt

SEQ ID NO: 34952 - DNA, 120 bp, synthetic construct
  source 1..120: mol_type = other DNA
tctgtagcatgtttgcaattttttggtaaatagaaaacttgtaaacaatagttctgttgtttaggtaaaaggagcaatcaaggccgtgcgtggtggctcgcgcctgtaatcccagcactt

SEQ ID NO: 34953 - DNA, 120 bp, synthetic construct
  source 1..120: mol_type = other DNA
tagatattctcacttcattttgttacaaggaaaatgttaacgatgaaaatgtgtggcgacatcttcggaggatgccaatgatgggagtaggggtggaggtggaatggagggttagaggaa

SEQ ID NO: 34954 - DNA, 120 bp, synthetic construct
  source 1..120: mol_type = other DNA
gtgttataggatatataatatttacaattatacacacagtacactgttctgcaacttttctgtacagatatagtaatttgggagaggagagagaccagtgcccagtttgccatgatgcaa

SEQ ID NO: 34955 - DNA, 120 bp, synthetic construct
  source 1..120: mol_type = other DNA
tcttagcccagtggtgcatcgtcagagggacggactgggtgagggctatgctggtccagggtggcacttaaaagtaaggggatcgtggtggatactgctttgagagtgacacatagcacc

SEQ ID NO: 34956 - DNA, 120 bp, synthetic construct
  source 1..120: mol_type = other DNA
atgcctttgtgctcaaagagactgagcaatgaggtgtcactaaagacagcattggcgaagcaggctccactgggaaaagtgcatgcggagctgtctgcagggaaatcccctttgaaatca

SEQ ID NO: 34957 - DNA, 120 bp, synthetic construct
  source 1..120: mol_type = other DNA
accacaggtagtggggatatggaagaaaggaggttgctccaaagggagcagcggccaaccctctcactctgccaggaagtagcgctggggatcccaaggaagagagaaggagggctggaa

SEQ ID NO: 34958 - DNA, 120 bp, synthetic construct
  source 1..120: mol_type = other DNA
caataagagtgtggtcctggattgagccctggaactttcacccaatgaggtggtgattggctaaggctggatcttcagtagcaccctctgcagattctttgacatctgcaaaccaagcgc

SEQ ID NO: 34959 - DNA, 120 bp, synthetic construct
  source 1..120: mol_type = other DNA
atagtttcaaaatcaaaccaaatatcaggctcctcctcatccagctcctggtcatcgtcccactcctcttccccctcctcctccagcttctcactgtcatctcttcctatggtcagtttg

SEQ ID NO: 34960 - DNA, 120 bp, synthetic construct
  source 1..120: mol_type = other DNA
actgccttttctcttccacagcttgcaggcagcctattgtgggacttcgtcttgtaattatgtgaaccaattctccctaataaactccctttcatgtatacatatagcccattggttctg

SEQ ID NO: 34961 - DNA, 120 bp, synthetic construct
  source 1..120: mol_type = other DNA
agaatttagcagtgaggtcataaggtctcgggctttgctttactatagacggagactatttattaaggctttactgtgttacctgttattggtctgctcaggtttcggatttcttcgtgt

SEQ ID NO: 34962 - DNA, 120 bp, synthetic construct
  source 1..120: mol_type = other DNA
acaatatgaatttaaaaccaggcactgtgattgctcacctgacttttggttctcatgatgatgcttttctgtatgcagatagtggttgcaatttggtgttcctgcagggggtacacaagg

SEQ ID NO: 34963 - DNA, 120 bp, synthetic construct
  source 1..120: mol_type = other DNA
agaattgagctgaaagaacccaaaccaaaatgtaggattcctctcaggcttatggtcttgcccctttaccacacagcttctgtggctagccctttaaaatgattcttgatttgcatattt

SEQ ID NO: 34964 - DNA, 120 bp, synthetic construct
  source 1..120: mol_type = other DNA
gacttctttgatttcagtaaaggaagtgccactaattccccttcccctcgaggcctgtttgaagaccctagttgttcctttgagaacctttgagccctggtacttaatcctttcaactga

SEQ ID NO: 34965 - DNA, 120 bp, synthetic construct
  source 1..120: mol_type = other DNA
aatttgatccaacctcttgaacactgaaacggggaaaaaatatgaagttgaattacgtgtgtttctctggtggccacttggggtcactgctagtaagcagaatggcacaattcatacttc

SEQ ID NO: 34966 - DNA, 120 bp, synthetic construct
  source 1..120: mol_type = other DNA
atttggaaactactgttttaggagcaggtttcagctttagagccatctagtaagattcgtgtggtatctataaggagattttagccttcatcttgtgtgtagcccctgaggtaggaagag

SEQ ID NO: 34967 - DNA, 120 bp, synthetic construct
  source 1..120: mol_type = other DNA
acatgatgctcaaaggaaatgctcattgcggtatacaagtatgctgcaaatattccaaaatccaagaaatccgtaatctggctaggcgcagtgtctcacgactgttaagttccaacactt

SEQ ID NO: 34968 - DNA, 120 bp, synthetic construct
  source 1..120: mol_type = other DNA
tgctttgtcagtggttctcttgatcttcatacttcttagattttcctttgtctgttgccaaggatgggttacctgaaggaagtttttaccaaaacacaggtctcgtagcatctccctcat

SEQ ID NO: 34969 - DNA, 120 bp, synthetic construct
  source 1..120: mol_type = other DNA
ctggaattgggtgactgagtggataaaggacatgaggggaaaggaattaagaaggactacagtacacaccagatagataatagttgaactttcacaggttagattgttgtgttggaggag

SEQ ID NO: 34970 - DNA, 120 bp, synthetic construct
  source 1..120: mol_type = other DNA
gtgtcaggaggtataactgtccttagttttgccatcaactcactctatggccttgggtcactggccacagtaccattattcataagttgaaataggactgtttgtttttaaggcttcttc

SEQ ID NO: 34971 - DNA, 120 bp, synthetic construct
  source 1..120: mol_type = other DNA
ctccaggtaagattcatagatctctgttagagagggaaatgtgtggtatttgggacataggtaatatcaatactattattgcttattcttcatcacaaaccacacaaaggcccttggaaa

SEQ ID NO: 34972 - DNA, 120 bp, synthetic construct
  source 1..120: mol_type = other DNA
tcctttgggagattgatggcattccattcccccaaacaaacaaaaatctcatgtatacggtttacccaaatgagcagagaggtcagtgaataactcggttaatgcaaaactttggtgagc

SEQ ID NO: 34973 - DNA, 120 bp, synthetic construct
  source 1..120: mol_type = other DNA
tctttccagaagatcacgaataagagagatcaaagctaggcagcttgagttgaagtagagctggaagaaggagttttgaggactgtttcaaaaccactggactagatgatctctaaaggt

SEQ ID NO: 34974 - DNA, 120 bp, synthetic construct
  source 1..120: mol_type = other DNA
tggccttttcattcatatagattccatcggcaagtcaggccagacctttcagactctgacttgtaaaaaagtcttgtgtaaggaaaacttaccagtttgcaactagtgtttggtcactgc

SEQ ID NO: 34975 - DNA, 120 bp, synthetic construct
  source 1..120: mol_type = other DNA
aataacactgaacaaggcagtccaagttgggactagtaagcattccatttatccccatctctggtgtcagtgatgcccagtggaaagttgaacctttacactcatccaaactcaatgaag

SEQ ID NO: 34976 - DNA, 120 bp, synthetic construct
  source 1..120: mol_type = other DNA
tctaaagccaggctgttacagaaaaacactcaacggtatgggagtatgcttgctgagctagtgttagagcaacaaaaaggaggctagtgtggctggagaaaaatccatttattcattcaa

SEQ ID NO: 34977 - DNA, 120 bp, synthetic construct
  source 1..120: mol_type = other DNA
agtggtccactctccagtccactctctatgtatcccttatcttcacgtgtgattaggttcaattgtatggctaatcacttcatgttctctctttgcaatttctcaggcaggttttctctt

SEQ ID NO: 34978 - DNA, 120 bp, synthetic construct
  source 1..120: mol_type = other DNA
gtggaatgtctctcaatttgtgtttgtctcatgttttcttatgattagattgaagttgtgcatttgtagcaagcacacctgttttattctcctccctttcccagtggcgagggagggatt

SEQ ID NO: 34979 - DNA, 120 bp, synthetic construct
  source 1..120: mol_type = other DNA
atgtgcatcattactatgatccaaagagtcagggttatacaaaaacctatactcggagaaatgtcactccttcgtcatcccttctaccctgttcccattccccatttctttccacttctt

SEQ ID NO: 34980 - DNA, 120 bp, synthetic construct
  source 1..120: mol_type = other DNA
tatgagaatgacaatttccccacagcctcactaacagaacatgttgccttacttttgaaacttttttctacgggttaggcgagaaatggtgtctcgctgtttctgtaatatacctttgtc

SEQ ID NO: 34981 - DNA, 120 bp, synthetic construct
  source 1..120: mol_type = other DNA
gcctcatagtagcttttatctgcattttcctgatgattaatgatgttgagcactttttcatacacctgttagtcagtgtgtatgtcttctttggagaaatgtctattcaggtcctttgcc

SEQ ID NO: 34982 - DNA, 120 bp, synthetic construct
  source 1..120: mol_type = other DNA
tggagtcctcaggaagggctgatgggtacataatttcctaagttcctgtctgtttttctataagctgtgatattagtgaaggatcggctgagctggatatcaaatcagtacttcagacgt

SEQ ID NO: 34983 - DNA, 120 bp, synthetic construct
  source 1..120: mol_type = other DNA
tcttgcagcttttcttggtctgtctttgcttgccacaaagactagtgatgagagcatgacagatcttgtgctgggatttcatgccttttctccttttactcactactaaagatttggcat

SEQ ID NO: 34984 - DNA, 120 bp, synthetic construct
  source 1..120: mol_type = other DNA
tggcctaacagtctcccaaaggtggttgacggtgaatgctgaggatctctgtgaggttgttggtccaacacttggggtcaccttaaggactctaatgtcttacagaggtgattatggaat

SEQ ID NO: 34985 - DNA, 120 bp, synthetic construct
  source 1..120: mol_type = other DNA
aagtaggtcaggcttgtttgagtgaagtcagcacccttttggcacagaagatccaccaggacagacttagtctatctaaaatccttttaaaatcctgtaaggggagaaacttctcaactt

SEQ ID NO: 34986 - DNA, 120 bp, synthetic construct
  source 1..120: mol_type = other DNA
acctactggtgtctttatcagtatattgctatctcctttcctaggtctcagaagcctggggttcagtttgcccttatttcacacagattcaccaaagatctgttattagctaggtactgt

SEQ ID NO: 34987 - DNA, 120 bp, synthetic construct
  source 1..120: mol_type = other DNA
aaacaatttggcaggtttgcatgaagttaaaggtacacttatacagcaatcgcactccagggtatttacccaagagaagtgaaatccttcttcccaggaaaccttccagcaaaacgttct

SEQ ID NO: 34988 - DNA, 120 bp, synthetic construct
  source 1..120: mol_type = other DNA
catgtgcgggccaggtagtaaatagagttctgaccaagatctactagtgagttcgcagtttctgcagacctaattggaattcatttactggcttgcaaatgtgtaactcggatatacata

SEQ ID NO: 34989 - DNA, 120 bp, synthetic construct
  source 1..120: mol_type = other DNA
gtgtccttactattaccagtgacttttgtaccttcgggtgataatttattgctcattaacgtccttttctttctgattgaagtacacccctcagcatttcttgtaggataggtctggtat

SEQ ID NO: 34990 - DNA, 120 bp, synthetic construct
  source 1..120: mol_type = other DNA
tcccaggaatttatcgatttcctctgggttttctagattatgtgcatacaggtgttcataatagtcgctgaggatttttgttgttgttgctgcatttctgtggggtccgcagtaatgtca

SEQ ID NO: 34991 - DNA, 120 bp, synthetic construct
  source 1..120: mol_type = other DNA
gagtttatgtcccgaatatctttgttagttttctgccccagtgatctagcactgtcagtggggtgttgaagcctcccactatgattgtgtggttatttaagtttctttgtaggtctctaa

SEQ ID NO: 34992 - DNA, 120 bp, synthetic construct
  source 1..120: mol_type = other DNA
tgcttttagtggttttcctttcaccttgaccttggagaatcttatgactatgcatcttggggatggtcatcttctgtagcatctcactggggttatctgactctcctgaatttgcctctc

SEQ ID NO: 34993 - DNA, 120 bp, synthetic construct
  source 1..120: mol_type = other DNA
actctgatgggatgttccggccaaagtacttccgtggggcagcggtagggcagcaagggcccccaaatgcatgggctcaccagcgaagcagtgcaggaaggctatgagtgagagtgcatc

SEQ ID NO: 34994 - DNA, 120 bp, synthetic construct
  source 1..120: mol_type = other DNA
tctgcatctggtcagccatctttgccccaaagccttcagtaatttttaaatctgagaatgtgttaattttccccttcatttttgaaggatggttttgctggatatgtaattcctgcttga

SEQ ID NO: 34995 - DNA, 120 bp, synthetic construct
  source 1..120: mol_type = other DNA
gggaacaggacaaggatgcctgcttttgtcacttctaactcaacatactattgaaagctctagacagagtaattaggcaagagtaagaaatagaaggcatctaagatggaaaagaagaag

SEQ ID NO: 34996 - DNA, 120 bp, synthetic construct
  source 1..120: mol_type = other DNA
ttttccatctgttttttcccagtttggcaagaattgtgttttggtttgtttttgtgtgttccgtgaacaggcactggattttatcaaatgattttaccctgtccattaaaatgatagccc

SEQ ID NO: 34997 - DNA, 120 bp, synthetic construct
  source 1..120: mol_type = other DNA
agctcttggcgccctaatagtactctgcttcaataagttagctgtggtcattgcaaattatgtcagcagaagttgagtggttaaacatgggctttaccttcagagaaacggaacaattct

SEQ ID NO: 34998 - DNA, 120 bp, synthetic construct
  source 1..120: mol_type = other DNA
cccccccccacttcattattaggggttttctggtgggagcataaaaagcatttgcactcagtattcctgaagtaatcagaagtaaattgatagattctctaatgttccactaccctttca

SEQ ID NO: 34999 - DNA, 120 bp, synthetic construct
  source 1..120: mol_type = other DNA
agttatgcaaaaaaaaaaaaaaaaaaaaaaaggaaggaccccagcaccccagggagacttaagcatggcaccaagttgcctaacagtcattgtttttcaggcatgggtaccacagttgct

SEQ ID NO: 35000 - DNA, 120 bp, synthetic construct
  source 1..120: mol_type = other DNA
caatgtcatctcaatatcgggcatcatgaacataactcttccggcctgtcacagaaatgaagcaaataaactgatggaaaaaaaaccataaagaaacccacaataccagccacaagtcaa

SEQ ID NO: 35001 - DNA, 120 bp, synthetic construct
  source 1..120: mol_type = other DNA
gaggcctgagcccagccaggaaggtgaggaatgtatattgtgtaggtaaacaaaaatgtcacctgcaggtacagactcaaattatatataccgctatgagcatagtaaccacaatattca

SEQ ID NO: 35002 - DNA, 120 bp, synthetic construct
  source 1..120: mol_type = other DNA
aatggaagctcttaataaagacgttgtagtatcacatagacaagatatgtaatgtgttattgctcatgttttgccttagtctgcatctacactgtgaaatgagcttaatcgtgttcactg

SEQ ID NO: 35003 - DNA, 120 bp, synthetic construct
  source 1..120: mol_type = other DNA
tgtttaatttaacaacgtcgcaaccgttctgatacttaggggagttctgagtaagtaagttctagaaaggggagttccagtactcccctttctctcttttctgtgttaggtaaagccacc

SEQ ID NO: 35004 - DNA, 120 bp, synthetic construct
  source 1..120: mol_type = other DNA
tcatatagatgacctactgtttagggtcatgtggatgctatggtcatgtccactgctcccactcacccctccccatggccacagtgttaggctcattcctctctgtcacgtgaagattgt

SEQ ID NO: 35005 - DNA, 120 bp, synthetic construct
  source 1..120: mol_type = other DNA
ctgtcctctgcccctcctcagaccatgttgttattaaggacactcgagactgcctagatcccagtttgtatagacgattccagacccaatcttaatttctgtctcttatttgattatgta

SEQ ID NO: 35006 - DNA, 120 bp, synthetic construct
  source 1..120: mol_type = other DNA
aatacatttttttttttcctgaaagatcggaaacgggaacttaagctccctactgaatccttccgcataacctgtttcatgctctgagctttctgttttggttccctgaacccatatgtc

SEQ ID NO: 35007 - DNA, 120 bp, synthetic construct
  source 1..120: mol_type = other DNA
tgcattcatttaacaaatattaattaggcccttattctatgccagacactaccagcccaaagtgactcctaatctgaaaacccatggcccaaacagattacacccatctggtccaagaca

SEQ ID NO: 35008 - DNA, 120 bp, synthetic construct
  source 1..120: mol_type = other DNA
agttggtttctggacatcctccaaatgtcaccaataggggtctttgttgttgttgttgctgttgttgagtattgttatggactcataactttttaacatactgatgggctccaaaccgcg

SEQ ID NO: 35009 - DNA, 120 bp, synthetic construct
  source 1..120: mol_type = other DNA
tgttacatcggacccacctgtcattaaagctcgtactgcactggcaaagaggtatagcttgctgattgttcacagaatgcatttggggattggatttgggaggtgcgagagagcttgtct

SEQ ID NO: 35010 - DNA, 120 bp, synthetic construct
  source 1..120: mol_type = other DNA
caagcaagatttgggttgctgtaagggaggctttgtccaccgcatagatccaaattgtcttttgatttcaggaaaactttactggatctgagaccctaaagcatttagtcctgcaattcc

SEQ ID NO: 35011 - DNA, 120 bp, synthetic construct
  source 1..120: mol_type = other DNA
tctcagaactcccccagcttccctgctttcgttcctttcctttccttcctcttctttcttccgtgttttcccacccccactctgccttcaaaccaccctgatctgacctaggtccatgcc

SEQ ID NO: 35012 - DNA, 120 bp, synthetic construct
  source 1..120: mol_type = other DNA
actctgtgattcagtgcctttttctgaaaattggaataagactatccacttccttgggctgttgtacagggtaaatgcgttggggttggatctaaaaatctagtgaagctggtagacagt

SEQ ID NO: 35013 - DNA, 120 bp, synthetic construct
  source 1..120: mol_type = other DNA
ccacgttcatagattggaagacttaatatcattacgatggcagtaccacccagaacaatctacagattcattgcagtccctgacagaatcccaactgacttctttgcagaaattgacaag

SEQ ID NO: 35014 - DNA, 120 bp, synthetic construct
  source 1..120: mol_type = other DNA
gagatatacaaatgaccaagaagcacgtgaaaatcttctcaacatcgttagtcattagggaaacgcatatcgaaaccacagtgagttaccacttcatacccactacgctagctttagtcc

SEQ ID NO: 35015 - DNA, 120 bp, synthetic construct
  source 1..120: mol_type = other DNA
atagcacagaatctcaccttatggtcagttctcaacaactggcatttagcagttcctaattgcaggcaagagttgaacgaaacgtttgcacaatttattgtccacactcctgtgatgctt

SEQ ID NO: 35016 - DNA, 120 bp, synthetic construct
  source 1..120: mol_type = other DNA
ggcaatgtaattgttctgtggtgctgcaccttcatctttgttgggaacaaactggttgacatacagtttaaagggggactgtaaaaagctcgggagcagtctcagatatgtaacattatt

SEQ ID NO: 35017 - DNA, 120 bp, synthetic construct
  source 1..120: mol_type = other DNA
agccacaatgtatttttttggactaatggtaatgaacatttttgtttttcctacagctttgctctcacagacaatgctgaaggtaccacgattacagatgaggccatgtacggacatgcc

SEQ ID NO: 35018 - DNA, 120 bp, synthetic construct
  source 1..120: mol_type = other DNA
atcagttggaggcaagttctgggacaaactattaggagtgcagactaatacacaggagccagaggtattctgagggaaggcacaaaatttacttggagatgagggatagaaaagggcatc

SEQ ID NO: 35019 - DNA, 120 bp, synthetic construct
  source 1..120: mol_type = other DNA
atttaaacttccaagattgtctcctaatggaccatttgcagatgatgatgatgatgatgatgtgtgtgtgtgtgtgtgtatagaggtagagcgcacgagagatgagagagtgagttcagg

SEQ ID NO: 35020 - DNA, 120 bp, synthetic construct
  source 1..120: mol_type = other DNA
tgctgggtcacatgtaccaatatgagcactattgtaacaatgaaaaaaggcctggggaaaaccaaaacgcccatccctgacattaatgcccactagaattcaaatcagaaacatagcggt

SEQ ID NO: 35021 - DNA, 120 bp, synthetic construct
  source 1..120: mol_type = other DNA
tttagatccaaccccaacgcatttaccctgtacaacagcccaaggaagtggatagtcttattccaattttcagaaaaaggcactgaatcacagagtggtcgaataagttgatcaaggtca

SEQ ID NO: 35022 - DNA, 120 bp, synthetic construct
  source 1..120: mol_type = other DNA
ggatggagctgaggtcatgctgagttttgggcaacgcactgagggagtccacaatgtcacgttttgtgcgcctcagcagttcccccttcaggtctgtagaggagaggagaagcaaggaat

SEQ ID NO: 35023 - DNA, 120 bp, synthetic construct
  source 1..120: mol_type = other DNA
cattatcctgatgtgtcctgccctccacccaaagttgatctggctcccccttctcaccttatttttggagagattcagggtcttgactttgggagccttctctgtaatgtcagaaaggcc

SEQ ID NO: 35024 - DNA, 120 bp, synthetic construct
  source 1..120: mol_type = other DNA
ggcacacaccttttggttctcatcatcataaatcttataactgacatccttcaatgcggaggcagcgctagcatcctggacaaagaagcatgcccgatttcggacgtagtggaactacag

SEQ ID NO: 35025 - DNA, 120 bp, synthetic construct
  source 1..120: mol_type = other DNA
aacagacctcgaccaatttcaaaatgtacaccttgtctcagggcactcttatgaataaaatttcggtcactgctgacctctctgcaatatactgattatggccaggcctcagatgaactt

SEQ ID NO: 35026 - DNA, 120 bp, synthetic construct
  source 1..120: mol_type = other DNA
acattattggttatgggcctaggatttgtggtcagatccatcaggatttcaatcctggtgctaaattctatgatccaaggcaactaagtgacctcgctgtgactcaagttctttttgctt

SEQ ID NO: 35027 - DNA, 120 bp, synthetic construct
  source 1..120: mol_type = other DNA
tcctaatgacttgcatttatgcacatattgtctgccaccaccatggtatcagatgcatgcttggcggtatctctgaagagtaaaaaagtacaaagattcaagcaggagagactgactgat

SEQ ID NO: 35028 - DNA, 120 bp, synthetic construct
  source 1..120: mol_type = other DNA
ctgtatttttattctgcctgtgtctccccagaaaggatagagaaaagagaaggagagtacacattgcagttgttgttaatcgcaatttcacgaccacctgttttgctggtttgtgtggga

SEQ ID NO: 35029 - DNA, 120 bp, synthetic construct
  source 1..120: mol_type = other DNA
aatgaaaatgggatttaagcatcccacagtggatgcctgttgaggttcttccaaaacatatactgcacaggggagagctctcatgctttgtaaccgcctattcatgaattcaatataggt

SEQ ID NO: 35030 - DNA, 120 bp, synthetic construct
  source 1..120: mol_type = other DNA
ctacttcttggaactgccccaactctaaaatagtgcacttttatattttattgtggcaaccttcttgtaactctgaacatcgtgctttatgtatttcttggctatgtttttgagtgcatg

SEQ ID NO: 35031 - DNA, 120 bp, synthetic construct
  source 1..120: mol_type = other DNA
gacaaaattttccatcatgatcctcaatttggcgtgagaattaaataaacttagatatagctctgcatagaataagggctaagtggtttagcactgtgggagcagctgagtgccaaacgc

SEQ ID NO: 35032 - DNA, 120 bp, synthetic construct
  source 1..120: mol_type = other DNA
tacggccacatttacaggttcagggtggacaggaatttggcgggggccactatatgactcagtaaatgcctcaatttttaaaaaccatagaagagtatcctactttccattcatttcagt

SEQ ID NO: 35033 - DNA, 120 bp, synthetic construct
  source 1..120: mol_type = other DNA
acaacgtcaagaaaactaccaggaacacggggaaaattccactaaacattcaaggagtagataattaattccaagttcatacaaacttcaccaaagaccaagataaaagcttacactccc

SEQ ID NO: 35034 - DNA, 120 bp, synthetic construct
  source 1..120: mol_type = other DNA
cgagagtgcctaagtttatgtcctcagagcaggaaagactttttcgcaaaattaaccacaacccatgaacacaggacatctttccacttatttatgtcttctttaatttcttcaagcagt

SEQ ID NO: 35035 - DNA, 120 bp, synthetic construct
  source 1..120: mol_type = other DNA
gttgtggctttggcagactttggtatcatggtaactaacattggccttatggaatgagttaggaagtgttccctcttcttcaattttttggaagagatttagaaggaatggtggtaattc

SEQ ID NO: 35036 - DNA, 120 bp, synthetic construct
  source 1..120: mol_type = other DNA
aaccccaagcctcaccacactcctctctgtggctttagtgtttgctggctgctggacctggacgcagcagggcaatcttggccatgggatagggtcagtctgatctgagtgtcccgctgt

SEQ ID NO: 35037 - DNA, 120 bp, synthetic construct
  source 1..120: mol_type = other DNA
gcttagatccaaacacccaggtcctctgaaatatttgaaaagccttctgacgaaggacggctacaaataagcccagacagtgaagactacaattaatacctaacagttcacatactcaga

SEQ ID NO: 35038 - DNA, 120 bp, synthetic construct
  source 1..120: mol_type = other DNA
acggtcctactttgggtggaaatttaaccttctttggaggtttacttctatgattattaaatcacaagctttctctgccatcctgtgccaggagttgaaagtctccgtataatcccaagg

SEQ ID NO: 35039 - DNA, 120 bp, synthetic construct
  source 1..120: mol_type = other DNA
agcatcacgacacagaaaataaaagacatgcttaatagatctttatgtccaccacggagggcatgtgacgctagagatgacaaagatggtcttttccaatttatctgtctttctggtgcc

SEQ ID NO: 35040 - DNA, 120 bp, synthetic construct
  source 1..120: mol_type = other DNA
aatgaggcctgcactttagcaagcttgtatgtccaaactgccatgtgattgccattgttcatagcaatggacagggacaggataaatcacatgcttcagctccatcaacgctgttaagtg

SEQ ID NO: 35041 - DNA, 120 bp, synthetic construct
  source 1..120: mol_type = other DNA
ctctagaaggctacacactccaataaaagcaggactgttgtctttttcgccaatatgtcgacagacttatcttagtgtctgcacgtctgcacatggttgattgactgactgactgactga

SEQ ID NO: 35042 - DNA, 120 bp, synthetic construct
  source 1..120: mol_type = other DNA
ctgtctgtgtgtgtatacacacacatatgtatttagataagataaaatgccatttgaaatcagctgtaagtcagcataaggcaatgtcgaccacccaggcacctgcctcccaatgtttca

SEQ ID NO: 35043 - DNA, 120 bp, synthetic construct
  source 1..120: mol_type = other DNA
ggagaagcatgctttgccactttggtaatgatggggaaaagaaacaaaaggggaaaatgaagaatcttgcaagacataagagaaccacagaatcagagcactcataacttctttgtccgc

SEQ ID NO: 35044 - DNA, 120 bp, synthetic construct
  source 1..120: mol_type = other DNA
gcaccaaataacataggaaccacctttgtaatgccaaaaggtatggagacattgaagcacagtaataataggagatttaatacatggcaagtctcagtacaaggcaaatccagtggtaca

SEQ ID NO: 35045 - DNA, 120 bp, synthetic construct
  source 1..120: mol_type = other DNA
ggacaaactcactaggcagattaatgaaggaagaaagggagagagcacaaatatacaaaataataaacgacaaatgataatcatttaaacagaaaaaattaggttgcttttcaaacctgt

SEQ ID NO: 35046 - DNA, 120 bp, synthetic construct
  source 1..120: mol_type = other DNA
gattttagcgcctactgctaccaaaaccaaaaatgggtcactatgtgacataatgggttatgttaatttgttccactatagtaactattttactatccatacgtgtcccataacaccgtg

SEQ ID NO: 35047 - DNA, 120 bp, synthetic construct
  source 1..120: mol_type = other DNA
cgtgaaaaagaaaatctatgagaggggacttatgatatcagccagaaaagcacactataaagcctctgtaattacgacattgtggcactggtgcaagaatagactaatagcccagtggac

SEQ ID NO: 35048 - DNA, 120 bp, synthetic construct
  source 1..120: mol_type = other DNA
gtggactggagagtggaccactgagcaatccagccggatttgcctttcctatgaatccctaaaccttgaccctaggtaatgtaggccaaaaaaggcctagtttatataaaatttatagaa

SEQ ID NO: 35049 - DNA, 120 bp, synthetic construct
  source 1..120: mol_type = other DNA
cccgttgggagggggactgtctataaccattatcctatgtccatgtcaccactgtaataaaaaagaggtaactttattttctagttcgcagggccactgatgaaaagaaatttagcctca

SEQ ID NO: 35050 - DNA, 120 bp, synthetic construct
  source 1..120: mol_type = other DNA
atctagtccagtggttttgaaacagtcctcaaaactccttcttccagctctacttcaactcaagctgcctagctttgatctctcttattcgtgatcttctggaaagatttcgttttgtga

SEQ ID NO: 35051 - DNA, 120 bp, synthetic construct
  source 1..120: mol_type = other DNA
cagttaggctccacatctgtttcttgtgcttgagctggatggatgatgtgttttaggatctcagcatagtatgggccaaatacctgctgattatgatgcatcagattgagaaacttccag

SEQ ID NO: 35052 - DNA, 120 bp, synthetic construct
  source 1..120: mol_type = other DNA
cttgaattttaaacatactgggctgtttatcaaggagttcctggaatttagcttgttcatactggatggaatgttcctgcaggtagggtcgaaagctctggatggtatagttcaccatgt

SEQ ID NO: 35053 - DNA, 120 bp, synthetic construct
  source 1..120: mol_type = other DNA
tgaagtcaggaggagtactcaatagctgttctttcagatggttccaaaaagcattgtacattgcctccgcaaacctgccttctacactataagaagggttaaatgagcagattgctcttt

SEQ ID NO: 35054 - DNA, 120 bp, synthetic construct
  source 1..120: mol_type = other DNA
tgccaagtagtattccaccatatggctttaccacagtttatttatccattcacttattgatggacatttgggctgttcagagtttggccattataagtaaagcagctatgagcatttgtg

SEQ ID NO: 35055 - DNA, 120 bp, synthetic construct
  source 1..120: mol_type = other DNA
ttcgtagacttccccatcccattttttatgttctatgctaatttctcaagaaaaataggcccggcaccgcctctgcgcacaaccttgctggtctggcccaggcggggggcggggccagca

SEQ ID NO: 35056 - DNA, 120 bp, synthetic construct
  source 1..120: mol_type = other DNA
tataggcacaaaatagtttgggagcagacacaagaaatggtacatgacaccactgtcagtgattgtttaagaaggtaaaaaaaagattggtgagggaggagtcagtgatgactcccaggt

SEQ ID NO: 35057 - DNA, 120 bp, synthetic construct
  source 1..120: mol_type = other DNA
ccgttccacgctcatggctaggaagcatcaatatcattaaaatgatcatactgcccaaagcaaattatattaatagattcaatgctatgcctattaaactaacactgacattcctcacag

SEQ ID NO: 35058 - DNA, 120 bp, synthetic construct
  source 1..120: mol_type = other DNA
cagaaagtgctacaagagcaaagaaaagggaatgaagtgaggtggggaaggcttgagaaatccttgtggaaagaatgatttctgatctatatagatctataccaccatacatggggtgca

SEQ ID NO: 35059 - DNA, 120 bp, synthetic construct
  source 1..120: mol_type = other DNA
gtatagtctgttctagcatagattagctttctcaacctgctatataaaattaccagcaagaaaaaaaggtgcaagaataagatttatggctgaagtggcttggtgtcttgattctctatt

SEQ ID NO: 35060 - DNA, 120 bp, synthetic construct
  source 1..120: mol_type = other DNA
ctagaaggcttagcactgcagggctctgggcgggaaggctaacctggtgcggagccagcctgggtctcagccccgcgtacggcctttcacgagtcttcaagccttcaggtgagtacctgc

SEQ ID NO: 35061 - DNA, 120 bp, synthetic construct
  source 1..120: mol_type = other DNA
tgatcctagttagctgtcccttcttacagcgtttacaaaccagtgccacaaggagctattatgagacgtgtattgtagtgccttaatgtactgtcgtctttggggatttaaaatagatag

SEQ ID NO: 35062 - DNA, 120 bp, synthetic construct
  source 1..120: mol_type = other DNA
ttttacacaaagtaagcaataattagagtaccatggtatttaatgcaacagttaaaactatcaaatagttttcttctggttctcacatgatgggcccagtagtgatgggggaataaaaaa

SEQ ID NO: 35063 - DNA, 120 bp, synthetic construct
  source 1..120: mol_type = other DNA
tccttaagttcctttttaaacttcccattggtatgtaaattccaaatggcagatgctgtcaataaccttgccatggatgacctttgtgtaggtagtccttgcacctcatgcaggataagc

SEQ ID NO: 35064 - DNA, 120 bp, synthetic construct
  source 1..120: mol_type = other DNA
cccccaccagaatctgaccctgctggacgtcgacttgagatttcttgaatctagaactgtgagcaagtaaatttatgttgtttaagtcattcagtctacagtattttgttacagcagcct

SEQ ID NO: 35065 - DNA, 120 bp, synthetic construct
  source 1..120: mol_type = other DNA
atgccctgccttacctcaccctttctaagggctcacattcttaaataatcagtgggattacatgaagtgaaagctgttttctctgctgcagcttaaagtttcaaaagcaaaacagtaggt

SEQ ID NO: 35066 - DNA, 120 bp, synthetic construct
  source 1..120: mol_type = other DNA
ggcagtaccagggctttgttatagcagttgtatttatagggaaaggaaaaggctggagttaaatgattgtcttcttttatgcattaacatcccttgaaaatcactggtcagtggctttac

SEQ ID NO: 35067 - DNA, 120 bp, synthetic construct
  source 1..120: mol_type = other DNA
atgtctgatatataactggatactttatgtgtggaaacaacactgagatctctgcagcaaagttttggtgcagaaagcttgtattagggatttccagagttataaaaccaataggatatc

SEQ ID NO: 35068 - DNA, 120 bp, synthetic construct
  source 1..120: mol_type = other DNA
ttgactgtgaagactggattgggcagactggattgggaatagtgacgggggatggtattctgagcagaggttaaaataagagcaaatatgtggatgcataaagtgcaggatatttttgaa

SEQ ID NO: 35069 - DNA, 120 bp, synthetic construct
  source 1..120: mol_type = other DNA
tcagggcctttgaaactctatcctcatctgcagagcccacattcacatagactttatagtttataatgagattttaatgtctgaacaccacccacctcagtggtcagtgacttggcttat

SEQ ID NO: 35070 - DNA, 120 bp, synthetic construct
  source 1..120: mol_type = other DNA
aaagtgctgggattaataggtgtgagccaccacgtctggcattgttcttcccatttcttctctcccctacagataacttaaaatcctttatctctccaaaagaccaagtaccatttagca

SEQ ID NO: 35071 - DNA, 120 bp, synthetic construct
  source 1..120: mol_type = other DNA
aaccagctaatctgttcctaggtgactaaggatttcaagtgaacaaccagccacaccaatagtgtatctagctttagagaaggactatgcgaattcattaggatagcagagtgtgtcttc

SEQ ID NO: 35072 - DNA, 120 bp, synthetic construct
  source 1..120: mol_type = other DNA
tctcaaaatagcttcgccctgcaacccaaaacactcctgaattattttgcactcatatctacccttcctaccatcccttaataagggctcagagaatgcagactcattaacatcagccta

SEQ ID NO: 35073 - DNA, 120 bp, synthetic construct
  source 1..120: mol_type = other DNA
tgattgccctggccagaacttccaacgctatgttgaatagtagttttaaaaataaattaatcctttataaaactgttaagaccgtcacagacatttacaatatgtttaaacttttagttt

SEQ ID NO: 35074 - DNA, 120 bp, synthetic construct
  source 1..120: mol_type = other DNA
gataaggatgtaatcatatgttatagaaatggtacccaatggaatcagtggcagcatgcttaggtgatcagagatggacaactttgggctaggatacaaggatacaaagccctaggcaat

SEQ ID NO: 35075 - DNA, 120 bp, synthetic construct
  source 1..120: mol_type = other DNA
ggaatgcagttacttaactcaggtcttatgcttgactacattcagcttttcagaaacagctgtattaggtcatccagaaaccctgattttttttttaaaggtatcattaagtggtgagaa

SEQ ID NO: 35076 - DNA, 120 bp, synthetic construct
  source 1..120: mol_type = other DNA
ttctaaactttcacctgtagtttggattgttgagtccaaggagaggaagatttttgggtcagaagattctgcaaaactgcctgcatatgcttgccttctattcacaaatatccctctctc

SEQ ID NO: 35077 - DNA, 120 bp, synthetic construct
  source 1..120: mol_type = other DNA
aataaatattaaaaggaccccattaatgctgcatagctaaattgagtaagtacacatctggttatagaggttatacatgctggggatgagtagatggttattccaacctgttactgttct

SEQ ID NO: 35078 - DNA, 120 bp, synthetic construct
  source 1..120: mol_type = other DNA
ttaatcatttatcttgtgtctgtaagggttttgtattatcttgtgaaatgatttttgtcatcttttatgtagagttttgtttttgtttttagtcaaaccattttaaaagcaggtagggct

SEQ ID NO: 35079 - DNA, 120 bp, synthetic construct
  source 1..120: mol_type = other DNA
aagtataataataatataaaaaaagaaaaagagagtatttgtgtggcacactggatatcacggcagactagccaggggctctggctacatctgaccctgctaaaccactccaaggactga

SEQ ID NO: 35080 - DNA, 120 bp, synthetic construct
  source 1..120: mol_type = other DNA
ggtgagaatggtcaggctttagcagaagtagttgaaattgctatatgatacccagattatacagtttcccagctgatccagtaaatgatcctgaggcctccttacctatttctaggaaca

SEQ ID NO: 35081 - DNA, 120 bp, synthetic construct
  source 1..120: mol_type = other DNA
aattcattgtctttcctctgttttttcacttcccccatttgcttctgccaatctttcctgtgctcttggctgatttcccttctcccattggtggatctagctacttactaacaccaatac

SEQ ID NO: 35082 - DNA, 120 bp, synthetic construct
  source 1..120: mol_type = other DNA
cagacctgtttatcatggacttgttccatttgcaaaaccacttttgcattgtagctaatgatggcaaagcacctggtcgatttggttgattcagtctactggtgagtcactttaacagga

SEQ ID NO: 35083 - DNA, 120 bp, synthetic construct
  source 1..120: mol_type = other DNA
tacaggtgtgagccactgggcccagcccccgttaccattcttaacacttgcataataaaacaaccctattaagttagctgcttttattattctcattccacgcataccaaaaactgagat

SEQ ID NO: 35084 - DNA, 120 bp, synthetic construct
  source 1..120: mol_type = other DNA
tggtgaatatgcaaacaacacctctcctcctgattattgtagacagctctagagtccctggttggagacttttcacacattaggggtaatctcttaacccattggcatttgaatatgatg

SEQ ID NO: 35085 - DNA, 120 bp, synthetic construct
  source 1..120: mol_type = other DNA
agggagtaaatggagtaagtatgagactttggctctgtaaggaagtaagaaaagtgaaagacaaaattgagcagaagtagaagctgaccgataatgtagttgcctacggcctcagcagat

SEQ ID NO: 35086 - DNA, 120 bp, synthetic construct
  source 1..120: mol_type = other DNA
caaaatacattcatgtggataaagtaaaatgtacgtaggcttgctcacacactaaacagagagggcactatgcagaagctgtttgctttggggagattagataggagatgttatacgata

SEQ ID NO: 35087 - DNA, 120 bp, synthetic construct
  source 1..120: mol_type = other DNA
ggtgcctgaagaaattaatgatatctaaggaatcgcagtccttagcataactttggtttatttaaaatgtgctgatctgtaaaaccaaaccactagggtttgaagaagactggctgtatc

SEQ ID NO: 35088 - DNA, 120 bp, synthetic construct
  source 1..120: mol_type = other DNA
taaatccagagctactgcaatcaaagcttatatgagtgaatatggtagagttgcctgctaaaaggcaatgtaatataattgcagctagaaccctacagtggagaatgaggaattttaaac

SEQ ID NO: 35089 - DNA, 120 bp, synthetic construct
  source 1..120: mol_type = other DNA
aaagagtgaaacccaggttttagatatacctctaccagttacttgctatatgattttgggaaaactatttttttgtctctgagctttaatgccattatctgtaaaatgcagtgttacaat

SEQ ID NO: 35090 - DNA, 120 bp, synthetic construct
  source 1..120: mol_type = other DNA
tcttggccttaaggagttctcaatctagtggggaaacagatgtgcataagtagaattgcatcgcaatatgagaactgccaaaagagggaaaaaggaaaatgatttttcttgtggcaggac

SEQ ID NO: 35091 - DNA, 120 bp, synthetic construct
  source 1..120: mol_type = other DNA
atattgccatttgcttagtcaggtcaccatcatctcttgcttgaactagggcaatagcttcctacctggtcttgattcaacattcctatacctagtttacccaaagagcaatagaaatgg

SEQ ID NO: 35092 - DNA, 120 bp, synthetic construct
  source 1..120: mol_type = other DNA
gctagactatataccatctctataccaccaataacactgtgaaaatctctttgcagttttttgtcctttcttcccctttcccagaggtgtagtggaagagaaagggtgggatcactaaca

SEQ ID NO: 35093 - DNA, 120 bp, synthetic construct
  source 1..120: mol_type = other DNA
atactttcacccttgtcttgaatagttatagcccaaggagctcagccttacataaaaggaaattttatgagcctttattttatgcgcgtgcgtgtgtgtgtgtgtgtgtgtgtgtgtgtg

SEQ ID NO: 35094 - DNA, 120 bp, synthetic construct
  source 1..120: mol_type = other DNA
gacataggtcttttattaagccaaaatattaagctagtctcattcaccaagcacttacctacattatgtgaactcgaattcttaaaatgttttgaattggtttctgaattctgtgagaat

SEQ ID NO: 35095 - DNA, 120 bp, synthetic construct
  source 1..120: mol_type = other DNA
ttactgcattggacaaaagccaggagaaaagcagagagcaggcttctcactaatgtatggagatagaaggccactaaaaatcttcaatttgcttctcataaggcaaccatattcaaggcc

SEQ ID NO: 35096 - DNA, 120 bp, synthetic construct
  source 1..120: mol_type = other DNA
tggcttagttttttaaaagaccacctcctgcagcaggcatgacagacacatattccaatttcctacccctattcattgtgtgtgccctcacaatattccttgttggcatattttgtcctt

SEQ ID NO: 35097 - DNA, 120 bp, synthetic construct
  source 1..120: mol_type = other DNA
ggcacactggccacatttcaaatgctcagtagtcatgggtgactaatgaccactgttaatggacagttcagatacagaagatttctatcactgcagaaagttttgttgtacattgctgct

SEQ ID NO: 35098 - DNA, 120 bp, synthetic construct
  source 1..120: mol_type = other DNA
aaaacagagcagccatgtaagtctacagatggaagaaaacttgaacccctgctaatacccctgaaaagagaatttaagatcctggccccatgagaattttcaggtgatacttcctgaatg

SEQ ID NO: 35099 - DNA, 120 bp, synthetic construct
  source 1..120: mol_type = other DNA
acatttaggtgtttgatcaattttgagttaattttgtatatggtgtgaaatttggactccaaccttattgttttgcataggtatatccgcttgtcccagcaccatttgttgaaaagactg

SEQ ID NO: 35100 - DNA, 120 bp, synthetic construct
  source 1..120: mol_type = other DNA
acacacaccatacaaaatataattctactgtgtctcaaatttgatgttggcaatgatgtttgtcctattgaaatttttatttaaaaggaaggcctaaaccaacagttctctgcttcacta

SEQ ID NO: 35101 - DNA, 120 bp, synthetic construct
  source 1..120: mol_type = other DNA
tgaccttggtgtagatctcaattgctatgatgttatacagaaagactaaagatatctaaaggagacactgggtaacttgatattcagagactgacaactgtattatgcgactcttgtgga

SEQ ID NO: 35102 - DNA, 120 bp, synthetic construct
  source 1..120: mol_type = other DNA
aggaaacctacaatcatgccaggcacgtcttatatggtggcaggcaagagagacaatgtgtgcaggaagaaatgtcaaacacttataaaaccatcagatctcgtgggaactatctcattt

SEQ ID NO: 35103 - DNA, 120 bp, synthetic construct
  source 1..120: mol_type = other DNA
tcatgatcaagtgggatttatcctagggatgcaaggatagttatacataaatcaatcaatgtcctacatcctatcaacacaatgaaggacagaaagcatataattccaattgatgctgaa

SEQ ID NO: 35104 - DNA, 120 bp, synthetic construct
  source 1..120: mol_type = other DNA
tcttataggtcagccttatttacataatctggccaaaagcaaaatagtggtatatctgtttactagtaaaatattagagaggacagagaaatcaggaaagatccaaaattgacaccctaa

SEQ ID NO: 35105 - DNA, 120 bp, synthetic construct
  source 1..120: mol_type = other DNA
aaataaataaataaataaaatattagagaggacaaggaggattttgatgtttaatatgtctctcatggaaatgcagacaggtcaaattcaaatgaattttcttttacaatgtccaggaac

SEQ ID NO: 35106 - DNA, 120 bp, synthetic construct
  source 1..120: mol_type = other DNA
tcagagggatcagtgctttctctgtgtattgctggagtctgaaagtgtgactctcatgtcactgattcatttctgaagtgttaaattcagaataaatttttgataatcaaaatgaactta

SEQ ID NO: 35107 - DNA, 120 bp, synthetic construct
  source 1..120: mol_type = other DNA
aactagtgcagttgtttggaggtaaggtgacactctggttttttgagttgccagagttcttgtgctggttctttctcatctgcgtgagctgatattcctttaatctctgaagttgttttc

SEQ ID NO: 35108 - DNA, 120 bp, synthetic construct
  source 1..120: mol_type = other DNA
tggatgggtagtagattaagttatgggggcaagatgagtttgctcagggacagagtgttaattgagaaaaggatggacttctgaggaatactcacatttaagagatgagtagggaaagag

SEQ ID NO: 35109 - DNA, 120 bp, synthetic construct
  source 1..120: mol_type = other DNA
aagagaccattagtatgaggttttatgttaatctggccaggagttgggctgtgcttaatgtttgatgtagctgtaggtgtcagaagtttctgtttcttctactgtctttttgtctccctt

SEQ ID NO: 35110 - DNA, 120 bp, synthetic construct
  source 1..120: mol_type = other DNA
agtgctccacttttgctggagtggtgtgggtaaggtccagtgggaagctgaacatacaaacacacccaccccttgtactacatgtcaaaaaagagatgcttgatgaaaaaaaaatatgaa

SEQ ID NO: 35111 - DNA, 120 bp, synthetic construct
  source 1..120: mol_type = other DNA
tggaaaatgtgtaacaaagaagttggggttacgagataatgtctcacctcttagctcaaagcatccagatagatggtcctcttcaggtggagaggtcacaagacattacacaatgtcaat

SEQ ID NO: 35112 - DNA, 120 bp, synthetic construct
  source 1..120: mol_type = other DNA
tactgacagcacaatcctgggaaagtcacagaacctctctaatccttatgttcctcaacctctaagcttctgtatttccgacattgttcagggaagccaactgcttaaagattaatctca

SEQ ID NO: 35113 - DNA, 120 bp, synthetic construct
  source 1..120: mol_type = other DNA
aaaagtattttgagatgaaaatgtgacgttttcttcagtggatatgtactgtgcatcatcatatgccagccactgggctaggtgttttggatttgattgcaacccggcactttcagtcca

SEQ ID NO: 35114 - DNA, 120 bp, synthetic construct
  source 1..120: mol_type = other DNA
tccttaatcagggcaatttagctccacccttgcaggcagaaaatattaaagatacacttacacagcaattggcaagcatgtgcatatggggagagagatgtgtttctttctttatacccc

SEQ ID NO: 35115 - DNA, 120 bp, synthetic construct
  source 1..120: mol_type = other DNA
tttacggagttaatagctaagtcagtggaggatgacagttaacttctgcagaatatttgcattgggttccttctggagttccaatatctgagaggaagggtctgactctaatttcaggct

SEQ ID NO: 35116 - DNA, 120 bp, synthetic construct
  source 1..120: mol_type = other DNA
ctagaggctaaggttgggagggagtggggagatgctgttcaaaggatacaaaggctcagttagacaggaggaataagtttttgagatctattgcacagcatgatgactatagttaataat

SEQ ID NO: 35117 - DNA, 120 bp, synthetic construct
  source 1..120: mol_type = other DNA
catgataatttctaccaaaacctgctgtgatttggattaggattgtgttgaaactatagatcaatttggggacaattgacatcctaacaatattgagccttccaatccctgaacacagta

SEQ ID NO: 35118 - DNA, 120 bp, synthetic construct
  source 1..120: mol_type = other DNA
taaagtcagatactttacatctattcagagtactggtctgaacaaccacaaataactcatgtaatggagagttcgctgcttcacccctcacaggtataggtcactgacagaacctttgtc

SEQ ID NO: 35119 - DNA, 120 bp, synthetic construct
  source 1..120: mol_type = other DNA
tcctagtaactgctcttaattccccattactggaagtgatacatctcttgtgttcatattctctttagaaagaaccagacatactggaaaacctaacaacatggagagtaggagagaaca

SEQ ID NO: 35120 - DNA, 120 bp, synthetic construct
  source 1..120: mol_type = other DNA
cacagtgttacaaaatcatgcatagggaaaagatcccttcaaagggcaagatagatcgagtttaatgtaattgaataaaaaaagctagtttttttatttttattttttatttttatttta

SEQ ID NO: 35121 - DNA, 120 bp, synthetic construct
  source 1..120: mol_type = other DNA
ggacaatatccagatacttgagtttttaaaacataaatttccccacttatcattgttttgctagggagatggtccacagaggtcctcacactgccattcacaaagtcatctctcccatgg

SEQ ID NO: 35122 - DNA, 120 bp, synthetic construct
  source 1..120: mol_type = other DNA
agggcttcagacccaataaacctaacagacatttacaaaacatcctacccaacaactgcaggttatacatcctgcagttatacatggaccattctccaggatagatcatgtgttaggtca

SEQ ID NO: 35123 - DNA, 120 bp, synthetic construct
  source 1..120: mol_type = other DNA
tgcaattgtttgtttaagaagagcaaaagcagggcttcataaaaaatattggctctcatttcctaggcgcctgggacaaaacagtagaattggtgaggggagtgatcactatgcaattgg

SEQ ID NO: 35124 - DNA, 120 bp, synthetic construct
  source 1..120: mol_type = other DNA
aaagtgtgaatttgtgtgagcgtagtacaacgtgatggcatgtcctaaacctgtcttttgctatatctgctactccgggcaccttatctggaaattccaggtcttccaatgacaattctt

SEQ ID NO: 35125 - DNA, 120 bp, synthetic construct
  source 1..120: mol_type = other DNA
agttatcaccacccaacatattatatatttgtttcaccatggagctaaaatgtaagctccataaaagcaaggtctttgattttttcactgccatccatagggttgagagccctccataaa

SEQ ID NO: 35126 - DNA, 120 bp, synthetic construct
  source 1..120: mol_type = other DNA
ttgatacaggaaagcttttccaagaaaatcttccctggcatcataatttcatgcagtgggcaaaggtattggttccatgaagttagcacccatgtaataatttctgcgggacagggttgt

SEQ ID NO: 35127 - DNA, 120 bp, synthetic construct
  source 1..120: mol_type = other DNA
tgtaaagggccagatagtaaatgttttaggctttgtgaaccatgctgtgtctgccacaactactcaactctgctattgaagcacaaaagcagctacagataatgccagtatgtgagtgaa

SEQ ID NO: 35128 - DNA, 120 bp, synthetic construct
  source 1..120: mol_type = other DNA
gtaccttgaaaggtgtgtcttgaatggctctttgactcttcagaaacaatctgggagcccattcattctgttctcacttgcctgcttcctttaagggccgatagcaaatttctaatttta

SEQ ID NO: 35129 - DNA, 120 bp, synthetic construct
  source 1..120: mol_type = other DNA
tgtcctgtttctaatgttgtcggggggagcatttagtctttcaccattaagtattagattaggcatagtaattttaggtgccctttatcaggctgaggaagttccctacatcaggttgag

SEQ ID NO: 35130 - DNA, 120 bp, synthetic construct
  source 1..120: mol_type = other DNA
caaagtgctgggattacaggcgcgaggcactgagccctgcctctctattgtttttcttttccatttcattgatctctgctctttattatttcattttttctgcttgccttgggtttattt

SEQ ID NO: 35131 - DNA, 120 bp, synthetic construct
  source 1..120: mol_type = other DNA
acttaccagttgagcatccctagtctgaaaatctgaagtgcttgaatgagcattcttttgagcatctctttaatactcaaatttgacccagccatcccgttactgggtatatacccaaag

SEQ ID NO: 35132 - DNA, 120 bp, synthetic construct
  source 1..120: mol_type = other DNA
aagcattttctcccattctgtgggttgtcattgcatttgcttgattgtatcctttgaggcacaaaatattttaattttgataaagtctaatttctctatttttgatttggctgcttgtgc

SEQ ID NO: 35133 - DNA, 120 bp, synthetic construct
  source 1..120: mol_type = other DNA
aatggtgttcattctgttctggccaataatatccctgtgcgattagctcccacccctgctaccacctctggagcctcattctatcaattaatcacttatgtacctggatattctttttct

SEQ ID NO: 35134 - DNA, 120 bp, synthetic construct
  source 1..120: mol_type = other DNA
ctacttagagacaaaaatgcactttgcattacttgaatacaaaaggagacaaaactatccttttcccccaagccatgttgggaaatattgctgacctcgtcctttgaagcctgcaggatg

SEQ ID NO: 35135 - DNA, 120 bp, synthetic construct
  source 1..120: mol_type = other DNA
gtgcctattcatcaaacctaagggtagagaggaagaacaaaagacacaattatggttaaggaaggaggaaaggtgccttattttggtgagggctgttactcaaaagaaaagtttcaattg

SEQ ID NO: 35136 - DNA, 120 bp, synthetic construct
  source 1..120: mol_type = other DNA
catattatccaattctggaaaaaaaaaaaagaaagaaaaaggaaaaaggaatatgtaaaaagagaaaggaagagaaaagcaagaagctgaaaaaagaagtaggagtcaaagaaagtacaa

SEQ ID NO: 35137 - DNA, 120 bp, synthetic construct
  source 1..120: mol_type = other DNA
gactgattttcctaaatttatacttcaaatttggggtgggagagattgaagtaaaaagtgtttaaatataacaattctgagaaaatgaatggacctgaggccgtgctggactggtacaaa

SEQ ID NO: 35138 - DNA, 120 bp, synthetic construct
  source 1..120: mol_type = other DNA
ccagatggcctgaatttgaatcccagctccaccaccaactagctgtgagacctcaggcaaatcacttaacgtttgcatcctttcatttctccatctatcaaatagaaacaataaaagtac

SEQ ID NO: 35139 - DNA, 120 bp, synthetic construct
  source 1..120: mol_type = other DNA
attagaaagaatgagatctaaaatcacctgatgcaccctatggtacactaccctgctcctgcactcctttgaaattaaattcaaaacagatcaagcttctcctctgtgccaggcactgtg

SEQ ID NO: 35140 - DNA, 120 bp, synthetic construct
  source 1..120: mol_type = other DNA
ctagccaattcaaagcttgtcttccctgtagatccaccctgttcttcaagaattgctcaattctcatctcctactgttccagaccacagtagtttctaccacacagcctgatattaataa

SEQ ID NO: 35141 - DNA, 120 bp, synthetic construct
  source 1..120: mol_type = other DNA
gttagacccctgacagaagagaaaattgtgttcatgaaactaccactatgtgatactaaaaggtttgaggatccagtgagaccacagacttggaagtcataataggtcattgttgctggg

SEQ ID NO: 35142 - DNA, 120 bp, synthetic construct
  source 1..120: mol_type = other DNA
atgctctgggtctgggtcatgcctcaaccttcttcccagggaagaacaatctttacacagaagtttagataagttcctatgacattagaccacttttggagacttctgaggaataaaaag

SEQ ID NO: 35143 - DNA, 120 bp, synthetic construct
  source 1..120: mol_type = other DNA
gtgagccactccacccggccgcaaattttacagtcttgatcagtgtctcctaaagtgtaacttaggaaccacctgcaacagagtaacctaaagtcattctgtgtttgtaattttgcaaaa

SEQ ID NO: 35144 - DNA, 120 bp, synthetic construct
  source 1..120: mol_type = other DNA
agccttacacctcaccatctccctcatgagtaagactgaaataaaactctgctgcaggaaagatggaagaaaagacagtcaaatggggtgggggttctttacctttcaaatgaatagaaa

SEQ ID NO: 35145 - DNA, 120 bp, synthetic construct
  source 1..120: mol_type = other DNA
aatagacggctggagaaattaagaagaactttcctctggagggtatgggcagatgatctggcattgaacaattgcaagacattcataattcctgtcatctgaagaggctccttaaaacac

SEQ ID NO: 35146 - DNA, 120 bp, synthetic construct
  source 1..120: mol_type = other DNA
ggatcatagccagtgtgactacacagctcggattttctaagactgttccaattgtaaatattctgtcccatggtctgtgtaataactcttgaacttgtctcaatttgggttcagaaaagc

SEQ ID NO: 35147 - DNA, 120 bp, synthetic construct
  source 1..120: mol_type = other DNA
tacagaaatattgcacctccatgtgtatatcatgataacacttcctgaatagctctgaatttttaatcctggtttgtgttgcattggtttatatgggatgtgtcctgagtcattgccagg

SEQ ID NO: 35148 - DNA, 120 bp, synthetic construct
  source 1..120: mol_type = other DNA
aggagggaacatagctttagaagtgggagggatcttttaaagcctgatgtttgcctgggacttcaactttgcaaagactgtgtggagacaatttttagatagcattaagaaacttagtga

SEQ ID NO: 35149 - DNA, 120 bp, synthetic construct
  source 1..120: mol_type = other DNA
tgtcctcttcagtatcttgcctcagtgttttatagtataaattgtagaagtctttcacttctttggttaagtttattgctagctatttgatttgtacctatggtaaatgagattgctttc

SEQ ID NO: 35150 - DNA, 120 bp, synthetic construct
  source 1..120: mol_type = other DNA
acatttgaccatccttctgtttcagggcaggactttgttaaatgagttccaaattttacctgctatttttttccaattataaaaatacatggaggatatcagtgtctatagcattgctag

SEQ ID NO: 35151 - DNA, 120 bp, synthetic construct
  source 1..120: mol_type = other DNA
aactggctagatcctggcaagcaggccccagactactataaaaaaagtataagaggcttcctgtcagagacagaagttgtctggtttataaatcttcttgtctttggagccttgtgtcaa

SEQ ID NO: 35152 - DNA, 120 bp, synthetic construct
  source 1..120: mol_type = other DNA
tgattccaactaataaggaggctgaggcaggaaaattgcttgagcccacaagcaagtttgagcaagacccccatctcaataaaaaagagaaggctattgtttcccccttgttaaaaagca

SEQ ID NO: 35153 - DNA, 120 bp, synthetic construct
  source 1..120: mol_type = other DNA
tgttttaatttttcggaaagagtgtgactgtatgtgcatgtttgtgtgtgtgtgcatgtgtgtgtatttgcacatgcatttggggggctgattctgagactgagtatactaaaccagagc

SEQ ID NO: 35154 - DNA, 120 bp, synthetic construct
  source 1..120: mol_type = other DNA
tagtagccctctggagttggaaggatgccatagggaaaggaaggactgagtcatcctaggagtgagaaaggattgagactaaatggagacatttagatgttttgatactttattgtagtt

SEQ ID NO: 35155 - DNA, 120 bp, synthetic construct
  source 1..120: mol_type = other DNA
taatttatgaatttgtgttaccaattcataagcaagcttgctataaggtaagtaattaccttgttattgtccctattttacagatgagaaaactgagactgagaaggattatgtggcttg

SEQ ID NO: 35156 - DNA, 120 bp, synthetic construct
  source 1..120: mol_type = other DNA
agcattactaccacccaccatctagtacttgcaaattaataattgctacctactgacttccacaaactactgtctcgaagtgttgcgtgtatagtctttacagtagctaatgtggccctt

SEQ ID NO: 35157 - DNA, 120 bp, synthetic construct
  source 1..120: mol_type = other DNA
gaaggccaaattcagttatagcgcttgagatgatgttgctctgacaaggacagaggaaggagaggagtgattattaaggtatataagaaccagcaaatgtcactcaaatgacaaagtcat

SEQ ID NO: 35158 - DNA, 120 bp, synthetic construct
  source 1..120: mol_type = other DNA
actatgaagactatataacgggttctgacaccagcttgtaggttctcctccctacagaatgagtgtgactttgttttggtgtctgacattgttcttacctttctctgaatccaattgcac

SEQ ID NO: 35159 - DNA, 120 bp, synthetic construct
  source 1..120: mol_type = other DNA
ttattccatgtttctatacaattttctatcccactactcacctacgtgaatattcagcctcattctggaccggtttttccctattgtccatcctactatttctgcccccatacctgctgt

SEQ ID NO: 35160 - DNA, 120 bp, synthetic construct
  source 1..120: mol_type = other DNA
gtagggctccaaagcagagaaaattacattcacaccagaaatgggaaatttcttctctgagaagatctaagctgtcattaggagagtgggtgggtggctgtgacttttttttttcttctg

SEQ ID NO: 35161 - DNA, 120 bp, synthetic construct
  source 1..120: mol_type = other DNA
agaataaagggaattttctacagtattcactgtgaggacctagtagagctcctggtaataaaacttacaaaaatgtggaagccccatgacagagtcgccctggagtttttaacccttgct

SEQ ID NO: 35162 - DNA, 120 bp, synthetic construct
  source 1..120: mol_type = other DNA
tgttttcatgattacatgaaatttcagatgtaaaagaaatacagtattaggcccaaaataaacactctgtaagtcatggtagtggtggtggtgatggtggtggtggtggtggtggtggtg

SEQ ID NO: 35163 - DNA, 120 bp, synthetic construct
  source 1..120: mol_type = other DNA
attttaaaagctaatgttctgcacagagtcatgtcccattgcaaccccagctattgttttgacaccccaagtgccaatgacaatagcatcctgaatacagaggtcatcaaagacacagaa

SEQ ID NO: 35164 - DNA, 120 bp, synthetic construct
  source 1..120: mol_type = other DNA
caccagggtgaggctaggtgacaatgatttgaaaaagttatatgacacagaacacagatataacatatattttcatccctgtaactctagcctcgccagggaattgctcctgggattaca

SEQ ID NO: 35165 - DNA, 120 bp, synthetic construct
  source 1..120: mol_type = other DNA
tcaccaagctggaagtcaccttagtcaccaactactccaggggtgagcacctcattctcatgcagactatgtcagaaaagatagaaatgtttataagcaccgtcattatttttctattca

SEQ ID NO: 35166 - DNA, 120 bp, synthetic construct
  source 1..120: mol_type = other DNA
aatcaccagtggtctatatgctggtacaatttaagcaagaagacagttgagaggaagagataggcttgcaaatcaaggtacagaattgccccagataacttttttcatgtgcgtccctgt

SEQ ID NO: 35167 - DNA, 120 bp, synthetic construct
  source 1..120: mol_type = other DNA
caaaaatggataaccaaggatatggtaagaggcagatgccgatttggtggttttgatatttacggtagctcttctaaagagaaactcctgttaagtgcttagacatatgggactggccag

SEQ ID NO: 35168 - DNA, 120 bp, synthetic construct
  source 1..120: mol_type = other DNA
ttctatctactatctagacaaccttttaggaaaagttgacttgagttcatcccttctcaatattcataggtttagagaattgatttatattcctaaagggggcactaaagcaaatgaaat

SEQ ID NO: 35169 - DNA, 120 bp, synthetic construct
  source 1..120: mol_type = other DNA
accaaaacaaaaaatttcaattactattgcatataaagagcaattataatctgtcaatgactacaagccagccatcttaacatcaactgagaacaaaattctaaaaacaaattattctta

SEQ ID NO: 35170 - DNA, 120 bp, synthetic construct
  source 1..120: mol_type = other DNA
attgagggctaagaagcaggatgggaccttttggtttcccttaccattttttctgtcacttattttcagacctcccagagaaagagatgtctgtgttgtctggtaaaatttatgggacag

SEQ ID NO: 35171 - DNA, 120 bp, synthetic construct
  source 1..120: mol_type = other DNA
gataggttcaacccagtgctagaaaattgacctgaaacaatgaactctgagataaatctgagacactggatttttcaatataaagaaaaaatcctcggggtttccaaagcaaaaagaggg

SEQ ID NO: 35172 - DNA, 120 bp, synthetic construct
  source 1..120: mol_type = other DNA
atatgtatactttgaattatgtcctagtctgtccactaagagggcctagcagcagtgtcacatgcgtagcaatgagcgaaaacagaaacagaaactccttggggaaatagtcaatttcag

SEQ ID NO: 35173 - DNA, 120 bp, synthetic construct
  source 1..120: mol_type = other DNA
atatccaggatacaatttaaaattgcttgacataaaatatatccagaaaaaagactaacagataccaacctcaaattaccaagatgttgcaactgtcagccaaagcttctaaagcagcta

SEQ ID NO: 35174 - DNA, 120 bp, synthetic construct
  source 1..120: mol_type = other DNA
tattcaaaccaaagaatagaaacactgaggaaaaatgaacaatgcctcaagaacctgtgggattcagccaaattacagaaaatttgtgccattagagtcccaaagggagaggagaaaaag

SEQ ID NO: 35175 - DNA, 120 bp, synthetic construct
  source 1..120: mol_type = other DNA
caaataaatagacaataaaatgtcaaaaaaaaaccacacaaaacaacaacaacaacaaaccacttgctgagtgtggtgcctcacacctgcaatcccagcaccttggaatgcggaggcagg

SEQ ID NO: 35176 - DNA, 120 bp, synthetic construct
  source 1..120: mol_type = other DNA
ttaaacattcttattggtttaggagctcagatcacacccattttccttgtggccgattggcatgtttttgtctgagttgacgcatctgtgtgtaagtgcaactacctcaagaaatggcta

SEQ ID NO: 35177 - DNA, 120 bp, synthetic construct
  source 1..120: mol_type = other DNA
ccaaccggttaagtatgttaattggaatttggaaggatttgagaactggaagggagagaactaaaattgttgactagtaactttgtaaagccctagacaacaatcaacccatttcatctt

SEQ ID NO: 35178 - DNA, 120 bp, synthetic construct
  source 1..120: mol_type = other DNA
gagggtttgggaatggatctagaaagtgtagatccatcatattttccactgtcatccctggggattttcaaggattccatcaaaagttactcactggagtccaagttgtcctaaatgttc

SEQ ID NO: 35179 - DNA, 120 bp, synthetic construct
  source 1..120: mol_type = other DNA
atgtgccacagagttttacaattttttctcagaaatatggttcagtatttccagagagctaaattaattgctagaaactcctctgacaacccaaccaaacacaagctgttatgaagccca

SEQ ID NO: 35180 - DNA, 120 bp, synthetic construct
  source 1..120: mol_type = other DNA
atctgtttctcaggctgtagacatacaccttcattccttggctaaccttttttcttccttcaccagaactgaggcccttctcttgtgatagagtgccaaagtcaatccattattacaact

SEQ ID NO: 35181 - DNA, 120 bp, synthetic construct
  source 1..120: mol_type = other DNA
caccatatatatacacaccatatagatacacaccatatatatacactacatatatacaccatatatatacaccatatatatacacaccatatatataccgtatatatacacaccatatat

SEQ ID NO: 35182 - DNA, 120 bp, synthetic construct
  source 1..120: mol_type = other DNA
atatacaccatgtatctataccatatatatacaccatatatctataccatatatatacgccatatctataccatatatatacgccatatctataccatatatatacgccatatatatacc

SEQ ID NO: 35183 - DNA, 120 bp, synthetic construct
  source 1..120: mol_type = other DNA
gaagacagtatttttcttggaggtttctttctgcacatccactacacagtttgaagatttcgggccgtactaaaatctaagccaggaggtaagggaagtgggaagggaaaggaaaataat

SEQ ID NO: 35184 - DNA, 120 bp, synthetic construct
  source 1..120: mol_type = other DNA
cctcaattgataacagcatcagccacaaagaagaattaagtattgatacatgctacgaaatagataaacctcaaaaacattagctaggtgaaagaagccagacccaaaaagtcacaaatt

SEQ ID NO: 35185 - DNA, 120 bp, synthetic construct
  source 1..120: mol_type = other DNA
atttgggaaatttggtatgaatagtcttccctgtgaacacagatcataaaatcatatatcaagcagacaaataagtagtagtcacttatatgcttatacttgtaacttaaagtaaaagaa

SEQ ID NO: 35186 - DNA, 120 bp, synthetic construct
  source 1..120: mol_type = other DNA
tttatccaaggatacgcaacttgcagccagcagtccaaatttgatccctcaattatctagcaccaaagtccctggtggtaatcactatgttttaattccgctcctaaaaccagtttcatg

SEQ ID NO: 35187 - DNA, 120 bp, synthetic construct
  source 1..120: mol_type = other DNA
ttgtaaggaatgtatacttggttttgctcccatttcctatacacagctcctaaaactcttacacgatctcttaagtggtaagtatccctttgcatgctaatgaatgactggtggctggga

SEQ ID NO: 35188 - DNA, 120 bp, synthetic construct
  source 1..120: mol_type = other DNA
ataatatcaagacattactaatctacacatttttcatgcttctttatgttcgttcccctccaaataaaagattatttagttaaattacaaagtaatattagaagctccctcagggaattt

SEQ ID NO: 35189 - DNA, 120 bp, synthetic construct
  source 1..120: mol_type = other DNA
agatatacaccctgaagaacagggtatatatttatgaagtagtggaaaacacagaggaaaaccaaagggacaaattgtgcagggactcaaaaaggcacccatgggaagaagcaggcttaa

SEQ ID NO: 35190 - DNA, 120 bp, synthetic construct
  source 1..120: mol_type = other DNA
taaagctagaagtcaagtcagaaaagtgtagggccttgaatgctgtcctaaaaaggtgggacctccttttgcatggaatgtttataagatccgctcttcaggagattatcaggagattag

SEQ ID NO: 35191 - DNA, 120 bp, synthetic construct
  source 1..120: mol_type = other DNA
tgctctttcattgtgccatctggttaattatatatggattattagaagtggaggtctcgggatagtcggaaaaccatgtttcaaaggtgtggaagctagttaggagtacacatgtgtggg

SEQ ID NO: 35192 - DNA, 120 bp, synthetic construct
  source 1..120: mol_type = other DNA
ttgacattttaagctgcataactcttgtgttgtacatacaaggaaggggtcatatccattgtaagatatttagaagcatccccagcctctacgcactgtatgccaggtgcttccagttat

SEQ ID NO: 35193 - DNA, 120 bp, synthetic construct
  source 1..120: mol_type = other DNA
agtgagacctaaggaacagaagatatttgaaattacttgtgaacatcaaactttattcacaggaaaatatatactcaagtggttacaaccctcaggacattagcctttttctcaataaat

SEQ ID NO: 35194 - DNA, 120 bp, synthetic construct
  source 1..120: mol_type = other DNA
agcccttttcagggtagtaaatacagattttgctgggtctgctctttacttgttcttctcaagagcataggtttattataaattgtttgtgtagctttagcaagtaattggaagtgaaag

SEQ ID NO: 35195 - DNA, 120 bp, synthetic construct
  source 1..120: mol_type = other DNA
caaggattccagcgagtaatgataaacatctttgtctgcagaaagaaccgccaaaaaagagcacaaggaatactctccaaggttcacaaagggctggaagtcgtttctattcaaaccatg

SEQ ID NO: 35196 - DNA, 120 bp, synthetic construct
  source 1..120: mol_type = other DNA
gatcccaaggcaatttcaaggcattggtagcaagaggagtgacaatggtgacagtgggggtggcagatgcctaaaaccctgtaaaagaggaacctttctccttggtcagagaagcagtga

SEQ ID NO: 35197 - DNA, 120 bp, synthetic construct
  source 1..120: mol_type = other DNA
atctgtctcagtatttatcacttactggctatgtgaacttgggcaagcctcctaatctccctgagcttcagcgtccttatctataaaatggagataacaattcttgccttttgtacctca

SEQ ID NO: 35198 - DNA, 120 bp, synthetic construct
  source 1..120: mol_type = other DNA
taatagtaataaaataaaataaaaaaataaaataaaataaagacagggaactgaagctcggagagtttaaggcctcaccatgagtctagtaactatgatttgaacccacatctgaatcca

SEQ ID NO: 35199 - DNA, 120 bp, synthetic construct
  source 1..120: mol_type = other DNA
aaaaagactggcatatggctaaatgcaaagactctggagctagacttcctgcatttgaaccctggatccatgcttatttactgtgtggccttagacaatttacttaatctctctgtgcct

SEQ ID NO: 35200 - DNA, 120 bp, synthetic construct
  source 1..120: mol_type = other DNA
gaaaaaaagcattgttaccataggaaatgacagctccatgcacgttattgccctgaagaccttccagtgagataagatgtgtaagtggaaggcagtgaaattgattatcctaaccctgtg

SEQ ID NO: 35201 - DNA, 120 bp, synthetic construct
  source 1..120: mol_type = other DNA
aatagatgttgacagcaagatgacagcgatgttagaattatctgacaaagattttaaagtagccatcataaaaatgcttcattgagcaattatgaaaacatttgaaaccaagagcctcag

SEQ ID NO: 35202 - DNA, 120 bp, synthetic construct
  source 1..120: mol_type = other DNA
aaaggtgccctatgatgaaagctttggaaagaaaaaatgaacttttgaagctctcattttggtttgtcgggttttctttaaaaacataccaccaatactcaaatatgtctacatgtaact

SEQ ID NO: 35203 - DNA, 120 bp, synthetic construct
  source 1..120: mol_type = other DNA
tgggatgctaaggtgggaggatggctgcattccagcctgggcaactgcgagaccctgcttctaaaaatcagttaatcaaaatgaggtccaaagattattaatgtgtaattttatgtagct

SEQ ID NO: 35204 - DNA, 120 bp, synthetic construct
  source 1..120: mol_type = other DNA
caaactgtagatagaacaaacaaggtccatctctcatggagcttacattctagtgggacagggaagagacaaaaaataagcaagtaaataaggtcatttcgaacgataagtgcaatgaag

SEQ ID NO: 35205 - DNA, 120 bp, synthetic construct
  source 1..120: mol_type = other DNA
ccttgaaggctgagtggggaaccaatagtatggcccacctgcaatgcattagaaaggctctgaatgtattaaagaaccaaaatgatggtaacgatcttatccatcaaggaatgaaattta

SEQ ID NO: 35206 - DNA, 120 bp, synthetic construct
  source 1..120: mol_type = other DNA
gcctcacttttgtagcaggctggtctgtgaaatatatggctatggtgtaggaacctcaagcattgaaaactaaccattggaatgaagagcaacatgatttctgtactgagaactcatctc

SEQ ID NO: 35207 - DNA, 120 bp, synthetic construct
  source 1..120: mol_type = other DNA
ctgtatttccaagtagggtttaggaaaaaaaatcaagtgagaggggctatgatttgtacataaacatgttcccccacctgtgggacatgcttgtggagttgcttttcttgagttgggcat

SEQ ID NO: 35208 - DNA, 120 bp, synthetic construct
  source 1..120: mol_type = other DNA
cagggagggagtatgcccatatttatgtgcagcagagcattacatacccagatggtctggatgctgtgaataggcatgttctgtagtgaaatagacctaaaacggacattagttataaca

SEQ ID NO: 35209 - DNA, 120 bp, synthetic construct
  source 1..120: mol_type = other DNA
ctgcataaatgtcttcttttgagaagtgtcaatgaacatgctttcaatcattcactgtatattgactgagagagacagagagaatatttgcacgtgtacctttgtgggtacatgcatgtg

SEQ ID NO: 35210 - DNA, 120 bp, synthetic construct
  source 1..120: mol_type = other DNA
aagttcctgctgcaagccagcatagaggccatggatggggaactggaagttacttgttttttttttgtttttgtttttgttttttttttgtgtgtgtctcctctctcaggcttgcctctc

SEQ ID NO: 35211 - DNA, 120 bp, synthetic construct
  source 1..120: mol_type = other DNA
ttataaaagaagactggattgtttgttgtcccttctgctttcattagagattacaagaaaagttaaatagtacagggtggccaggtgcagtggctcttgcctgtaatcccagtgctttgg

SEQ ID NO: 35212 - DNA, 120 bp, synthetic construct
  source 1..120: mol_type = other DNA
ccttcacttcaaaaagctgtcaaatttccatgttacccagggaagaggcatagacatgattctattctttataatttagcggagaacctaaaggtgctggcaaatgacagtggggtaggt

SEQ ID NO: 35213 - DNA, 120 bp, synthetic construct
  source 1..120: mol_type = other DNA
tctcccctccctcctctcctcctcctttcctctttgctctcatttgatagcaaaagaaaacaatacaaggatgtaactggtgggaaaagatagctatttccagacaagccaaacatttta

SEQ ID NO: 35214 - DNA, 120 bp, synthetic construct
  source 1..120: mol_type = other DNA
ttcgcttccttctctttttcttactgacttctagggtgtctatgtatgctctagatacaagttctttgctagtcgtatgtgttgcagataccttctcctactctggcttgcctttttgcc

SEQ ID NO: 35215 - DNA, 120 bp, synthetic construct
  source 1..120: mol_type = other DNA
tctttttccatggcaggaacttgcagtatcttctgagcttcaaatccaactggaaccacagcaaataacacacaagcaataaggaaccccagcgatattggggtatgttgtttatggaat

SEQ ID NO: 35216 - DNA, 120 bp, synthetic construct
  source 1..120: mol_type = other DNA
aaagcacaaagagtagagagatctagacagcaggtatgggtaaaaactcacatttgtacccagcaatgtttatatgggtcacctatacactggataacttatgccatcacagggtacagc

SEQ ID NO: 35217 - DNA, 120 bp, synthetic construct
  source 1..120: mol_type = other DNA
catagaaaggcaagcagagactttgtgcctatgataactctccttgaggtcttgatgtaactgaatgaactattgtaaagtggggttaagtagattctggaatccccttgccactccaga

SEQ ID NO: 35218 - DNA, 120 bp, synthetic construct
  source 1..120: mol_type = other DNA
atcattgcatttaacccttgagcttagactgtcctgtctgaaattctttgtagcatacttgccttatttccctaaccaaatcctaaaagccctgaggcttttagcaggcactctgttgac

SEQ ID NO: 35219 - DNA, 120 bp, synthetic construct
  source 1..120: mol_type = other DNA
gacttcgcatttggcagcctgaaatcagccatagtgggagtactgatgctgttgaaattggtaaatgctacaattcagcccttttttattttcccccagagaaccagttgttaaactttg

SEQ ID NO: 35220 - DNA, 120 bp, synthetic construct
  source 1..120: mol_type = other DNA
ctaaggatcagaaggtttcatgtaaacacttatttctggccaatctttacaaactggaaaatctgccagatctggaccccaaagtcctgaccagaaaaattaggctgaagcagagtagtg

SEQ ID NO: 35221 - DNA, 120 bp, synthetic construct
  source 1..120: mol_type = other DNA
atgggctctggaggcagacaaatttggcttcagatcctgttcctctgattagctttgcaccatggataagtttcctcttctttcaatgaagatgctagaacctcactattaggattcatt

SEQ ID NO: 35222 - DNA, 120 bp, synthetic construct
  source 1..120: mol_type = other DNA
gaaaatctcaatcggagaagaaaaaagaatccacttggccaagaggcatgcattaatgcatagtgaattcatggactttccttattcccaccaaggcttgtggcttcaggggtatgaata

SEQ ID NO: 35223 - DNA, 120 bp, synthetic construct
  source 1..120: mol_type = other DNA
cagtgctagaactgtgagtcgccgcctgcaacgttcttctggtgtctagactcagcaacagtgtatccacttagagacctcctctcttgcttttctgcttcccgctatttgctgtgggtt

SEQ ID NO: 35224 - DNA, 120 bp, synthetic construct
  source 1..120: mol_type = other DNA
ttcgaatagatggagatgattaaacatgctgcctcacatttcctgcttctgtcagtttgtatgtgtttatttacaagggtccttgaaaggagagagatgatggctattctctggcagtgg

SEQ ID NO: 35225 - DNA, 120 bp, synthetic construct
  source 1..120: mol_type = other DNA
gtcgggttactattgcctctgtagttgactgaatactcctagtaagcaggggtaaaaggcaagggaggatgaggcagttgccaagaataagcaagaacctaccaatgagggttttgaatc

SEQ ID NO: 35226 - DNA, 120 bp, synthetic construct
  source 1..120: mol_type = other DNA
ttttgtttttagtctcatcataatgctgttgccctaggcaggttgtttctcctgctgcctctgtgaaagcctttccccatcgggtgatacagtactttttaattacggaggtttttaaca

SEQ ID NO: 35227 - DNA, 120 bp, synthetic construct
  source 1..120: mol_type = other DNA
aaggtaagagtttagggtcataacctacatgtagctgattatttcctgggtcacagaatgaataggtggtctggttgtatgtgcagattcctaacttggttcctgtacattcatagtagg

SEQ ID NO: 35228 - DNA, 120 bp, synthetic construct
  source 1..120: mol_type = other DNA
gcctggccttaaataatttagtacacttgaaccctcttataaccctgctcctccctgcattaacttgaatacttctaaggtaagactgaaccccaccatgactctacacagaaattgttc

SEQ ID NO: 35229 - DNA, 120 bp, synthetic construct
  source 1..120: mol_type = other DNA
agcaggcccaacccacagcaaatagcgggaagcagaaaagcaagagaggaggtctctaagtggatacactgttgctgagtctagacaccagaagaacgttgcaggcggcgactcacagtt

SEQ ID NO: 35230 - DNA, 120 bp, synthetic construct
  source 1..120: mol_type = other DNA
caggtcaggctagactcttacctgtggtaatttgaaatacctttttatttatttgctcaggctgtgataataaatttgtaggtcagtggatccaaaggagtatttgcaaaaaaggaagaa

SEQ ID NO: 35231 - DNA, 120 bp, synthetic construct
  source 1..120: mol_type = other DNA
ctagcatcttcattgaaagaagaggaaacttatccatggtgcaaagctaatcagaggaacaggatctgaagccaaatttgtctgcctccagagcccatgctttgtcaagtttaattcagc

SEQ ID NO: 35232 - DNA, 120 bp, synthetic construct
  source 1..120: mol_type = other DNA
tatctttttctgtttgggccagagtaaaatatgtgtgacgaaacatagacatcagctactctgcttagcacccaatattaaactggcaaggcttaaatttgtccttagatggctcccgtc

SEQ ID NO: 35233 - DNA, 120 bp, synthetic construct
  source 1..120: mol_type = other DNA
tctacaatgagcaggtggcaaagccagccaggcctgtgtccttccctccaggtcagtgagttcccccaggccccaggtgggtctagaagtatcatccaggagtcagggactagagtcaaa

SEQ ID NO: 35234 - DNA, 120 bp, synthetic construct
  source 1..120: mol_type = other DNA
cgggggatgtaatgccaacaggcatgaaagcagtactccaacatataataaaagcctccactaaaatatgtagctacattttgttccttctaagagccagcctctggcaacacaattcaa

SEQ ID NO: 35235 - DNA, 120 bp, synthetic construct
  source 1..120: mol_type = other DNA
accttgaatgtttcagtccctcttccaaaatctaccaactatgtgcctatttctctctcagaagtagaagggacagccttccaagtttacagtttatcatgtctgaaaagaaatggtgga

SEQ ID NO: 35236 - DNA, 120 bp, synthetic construct
  source 1..120: mol_type = other DNA
gcagtgtacagttttcatccacaggtgaggaaagggtagggggaaagttcactgcttttcattttgcagaagggccaaatcaatcgtggaaagaccacacacctaaaattacttaaaaat

SEQ ID NO: 35237 - DNA, 120 bp, synthetic construct
  source 1..120: mol_type = other DNA
ttccttttgtaactcacgagcttggatatcagggtgcttgtggaactgaaggtttcagtcaaatgatcacaccaaccttgtctgcctagcactagaaaagcttgttgcttttgtttttac

SEQ ID NO: 35238 - DNA, 120 bp, synthetic construct
  source 1..120: mol_type = other DNA
atagagttaagtaagaaaggaatagctgggcaccttcctactggttttcacaacagttccatggccctcacgttgctgctgcttgatcatttccacagggacactgtatttccctttttt

SEQ ID NO: 35239 - DNA, 120 bp, synthetic construct
  source 1..120: mol_type = other DNA
gtgaactgctaggttttccgagccgagaggagcaccggaggcgagcaggaggctgggatgctgcaagggggtgaagagtcgaggcttttcggctcgctgctctggactttgccatggcgt

SEQ ID NO: 35240 - DNA, 120 bp, synthetic construct
  source 1..120: mol_type = other DNA
atacaacaccaaccagaacaccaccgagaagcccttccatttgaattaccacgtagatcacttggattcctccaatagtttttccgtgacaaatgcttgtaagtagatctgcttttcctc

SEQ ID NO: 35241 - DNA, 120 bp, synthetic construct
  source 1..120: mol_type = other DNA
gaacacagaaagaaaaatctgcaggttgtcattggtaaggggctatatttctggttggaggagcctattctggttcaggataggccactatcatgaacttctttaaagttccagctaagt

SEQ ID NO: 35242 - DNA, 120 bp, synthetic construct
  source 1..120: mol_type = other DNA
catggcctcaatataaacaccatgagggttttgtgtgtccaatgactaaaatctaacatgctatggaaaagtatggtgccttaaaattcgaaagcaaagaggaccaggagcctgacacct

SEQ ID NO: 35243 - DNA, 120 bp, synthetic construct
  source 1..120: mol_type = other DNA
tgtgaaatgtatttcaaaccaatgtctgctaataaattatcccacaggccataggtttcacaggtattagaaaatgcatgagatttgggccggatgcagtggctcatgcctgtaatccca

SEQ ID NO: 35244 - DNA, 120 bp, synthetic construct
  source 1..120: mol_type = other DNA
agaggagtagcaagcaggggtgggggagaatcaagagatccattttggccatgctaagttggagatacctatgagatatctaagtggagatatcagttaggtagatggataaatgaatct

SEQ ID NO: 35245 - DNA, 120 bp, synthetic construct
  source 1..120: mol_type = other DNA
aaaatcaatggcattcttatcctaaagctgtctccatatgtaaggttggccatcactaagataacattgattctttaaaatggctggttggtacaacccaggaactgagcctggaatcca

SEQ ID NO: 35246 - DNA, 120 bp, synthetic construct
  source 1..120: mol_type = other DNA
ttccattttatctaagtatttcgatctcctacatcactttttctcaaaccattaccagtcagaagccaagcagaatttcaccttatagccctaataccactcatgctaaggtggcagcaa

SEQ ID NO: 35247 - DNA, 120 bp, synthetic construct
  source 1..120: mol_type = other DNA
aaatattagcaaataacatcaaaagttatctagcctttattgctcatgtgccagtaaccttctgacctagaagagggctttgtggggaggagaaggggaaaggcgctgtagagaagtatg

SEQ ID NO: 35248 - DNA, 120 bp, synthetic construct
  source 1..120: mol_type = other DNA
accctctaaggaataaagtacataaataccacaggctttcagtggaaagaaatttgtaggcatcgctatagatcagagatccgcaatctgtggcttgtttttgtactgtccaggagctct

SEQ ID NO: 35249 - DNA, 120 bp, synthetic construct
  source 1..120: mol_type = other DNA
tcacaagtgagtttgtcaagatttctaaaaacttaaggtgttgaaaacttaaattgtaaggttaatttaagcactgctgtaatatttatcttagaatcaggcaatctccatgaaggggaa

SEQ ID NO: 35250 - DNA, 120 bp, synthetic construct
  source 1..120: mol_type = other DNA
gctcttcagtcgtagagatccagaggaggatggaatgatgaaaagaagaggaagacaaggtccaaatgccaaccttgttaagacattggtttttttctttctagaaagtgaggttagttg

SEQ ID NO: 35251 - DNA, 120 bp, synthetic construct
  source 1..120: mol_type = other DNA
ttttctctcagttgtgatgtttctatgataaacttgtgttgacttacttccccagccatattgccttaaatttggccagatctaggtattgaatgacaaagttcatttgtgggttttgtt

SEQ ID NO: 35252 - DNA, 120 bp, synthetic construct
  source 1..120: mol_type = other DNA
gtgtggtagatacagtgaaattctgtacagatttttctctaaggagaatatgacatgcttatgcttaccaagatcaagtgcattgaggggcagttttgtttgcctgaataaacgtaaagg

SEQ ID NO: 35253 - DNA, 120 bp, synthetic construct
  source 1..120: mol_type = other DNA
tctgtggtaccagagaagctacatccaggaggaagattccaaaatccttcaggggtcattccccttaggagacagcagaagccacagccagggagaaggttcagagaggtcccaaagaat

SEQ ID NO: 35254 - DNA, 120 bp, synthetic construct
  source 1..120: mol_type = other DNA
aaggtccagagaggccccaggacactcccctgggggacagcagaagtcatatcaaggaagaaggcccagaggggccccagaggattgtcctccagggagacaacaggagctatagccagg

SEQ ID NO: 35255 - DNA, 120 bp, synthetic construct
  source 1..120: mol_type = other DNA
aacaacctggattatgcaggcacttcctctctgttccacatgaggcaccagcaactttgcctcattggtttccctttcctgatttctttctttctttctttcttttttacaatagtaaaa

SEQ ID NO: 35256 - DNA, 120 bp, synthetic construct
  source 1..120: mol_type = other DNA
gtgttattttatctgaagcttgcaaaaaaatctaaggacaagagaaagttgttttttcagttatgtagagagcagaagacaaccaaggaaggcagaggtctgctgcttggggcaggtggt

SEQ ID NO: 35257 - DNA, 120 bp, synthetic construct
  source 1..120: mol_type = other DNA
catctagatcttctgaacatagagaaacttaaagccaaatgttccagaggcatgtgtcaggaatacagctgtcataactagaaagaaggctctaccagtttacccaggggaaaggaaaca

SEQ ID NO: 35258 - DNA, 120 bp, synthetic construct
  source 1..120: mol_type = other DNA
aacgttagacctaacaccataaaaaccctagaagcttcccttttctataacaccagaagatacacatttgtgtcttataatctcagaaagggaagaaataagtgaattaagccacagtca

SEQ ID NO: 35259 - DNA, 120 bp, synthetic construct
  source 1..120: mol_type = other DNA
agaaccacagaattatactgcaggactgcgttccatctgaatgcacaatgattacctgggtggggttggtgcagttttttagtttggtaccacataatgaatctttatctactgattggg

SEQ ID NO: 35260 - DNA, 120 bp, synthetic construct
  source 1..120: mol_type = other DNA
attacaaagttcaggtaatgaatggattgtcttggctctcctcaattccaaattcaatcaagcaccttggaactcaaggtaggctgaccccatgtacagaagctcttcctcttcttaacg

SEQ ID NO: 35261 - DNA, 120 bp, synthetic construct
  source 1..120: mol_type = other DNA
ataatgtatacttcaagattcctctcctctcctctcctctcccttctcttctcttttctcccttcccttcctttcccttcctttcccttcccttttttttcttttcttttctttcttttg

SEQ ID NO: 35262 - DNA, 120 bp, synthetic construct
  source 1..120: mol_type = other DNA
atcatgatcaccacctcctggaaatttccttctgtttgttctcttccgtgattacttttcagtcacctacgctggcctttctcctctatgaactcctaatacataagtgttgccatggtt

SEQ ID NO: 35263 - DNA, 120 bp, synthetic construct
  source 1..120: mol_type = other DNA
tcctttttacatgttgtgttattctgcccctttctctgtcaccttctgggactcacattatgcatgtgttgatatgcttgatgttgtcccacacatctttgaggctctgtttagtgtgtg

SEQ ID NO: 35264 - DNA, 120 bp, synthetic construct
  source 1..120: mol_type = other DNA
ctatgcatcttaatacataaaagaaaatgtgaaaaaaaaaaaaaaaaaaaaagcaaaaacaggaagcaaccaagtgaactaaaaatgttccacaaaagcaactaagttctcctatgcaga

SEQ ID NO: 35265 - DNA, 120 bp, synthetic construct
  source 1..120: mol_type = other DNA
taggtgccaaaagtcagattcaggcctagagtttgacaactggctggttagtacactatgcaagttaattgcatttacttgcaaggaaatcaactctaggtagaaagtttaggaacaggc

SEQ ID NO: 35266 - DNA, 120 bp, synthetic construct
  source 1..120: mol_type = other DNA
tagcccacaaatgctcatggacgccacacaacagttctatggcattgtcttaaaatcatcccagatttgttcagatatcctcgctcctccacttatctatatgcttcaagaaagactaca

SEQ ID NO: 35267 - DNA, 120 bp, synthetic construct
  source 1..120: mol_type = other DNA
acttgttagagaggcaaaatcttgggccccacctcagaccaactgaaacagaaactcaaatgtaggatccagcaatttgtttctcaacaagccttccaagtaattctgatgcatactcaa

SEQ ID NO: 35268 - DNA, 120 bp, synthetic construct
  source 1..120: mol_type = other DNA
ggagatggtccccctgggggaaagccacagccacagcctgaagaaagatctagttgtgcccaaggagctggtccccctgggggacagcaagagtcacaggatgaagaaagatccagtgat

SEQ ID NO: 35269 - DNA, 120 bp, synthetic construct
  source 1..120: mol_type = other DNA
ggttcagcagaatccacagcctgaagaaagagttagtgatgcccgaggagatggtccccctgggggacagcaacagccacagcatgaagaaagatctagtgatgcccaaggagatggtcc

SEQ ID NO: 35270 - DNA, 120 bp, synthetic construct
  source 1..120: mol_type = other DNA
tgagaccttctggaaacacaggtatggcagagttggaaaagtggtggaaacagaaagaccaggattctgctacttcactagttatataactttggggaaattatttttttccacctgcaa

SEQ ID NO: 35271 - DNA, 120 bp, synthetic construct
  source 1..120: mol_type = other DNA
gtatgtctgagatttgcttcaaaataatccaaggaggggaaagataactggggatatagacagaacaggactggttgatggttgttagaaacaggtgataagtacttcggggctcattat

SEQ ID NO: 35272 - DNA, 120 bp, synthetic construct
  source 1..120: mol_type = other DNA
atggctgtgcttattaaaaacaggggcagcagagagaggtcagtgaagaatgggatttaataagcatagaagcagagatgtgttgaggagtagatgtggtggtagaaaatgattagtttt

SEQ ID NO: 35273 - DNA, 120 bp, synthetic construct
  source 1..120: mol_type = other DNA
aacgaagccatgaagggttcttctagcaccagtagctctcaatccttaaaagactttagaatcccttagagaacttcaaaaaatactgatgcttggacctaatatctgccacagctggag

SEQ ID NO: 35274 - DNA, 120 bp, synthetic construct
  source 1..120: mol_type = other DNA
tgatccctatggctgggcttcagatattccagggacccactggaactgtgtgctgactgctaagtatctgcatttttctggggggaaaagatccataactctcaacagcatctcaaagac

SEQ ID NO: 35275 - DNA, 120 bp, synthetic construct
  source 1..120: mol_type = other DNA
caatcgtgtttctgcccgaacacacagctcattagaatagtgattctgaaccaaagaaggccaagtgtccaaattttcagctggtcatatgtggtttgaaaatgtccccaagtgattcta

SEQ ID NO: 35276 - DNA, 120 bp, synthetic construct
  source 1..120: mol_type = other DNA
aaaatgcagctccagatgtgcctcaagatttggactatcttcccacaaggtaaaaatacagcagccagaggatgtggagtctctactcctagacaatgtaagaatgaaaatagatcacca

SEQ ID NO: 35277 - DNA, 120 bp, synthetic construct
  source 1..120: mol_type = other DNA
ctgttaattagcaacagtgggcttcagataggaagtggcgctcctgggacaaaatcatgatagaaaattgagaggcaaagatttaagtggatgctccatcttgaggatcttgtgaaaatg

SEQ ID NO: 35278 - DNA, 120 bp, synthetic construct
  source 1..120: mol_type = other DNA
acattccggcttttgctaagtactcacacagtggtcagaaacatggctgcctgtattctatttttagagagttacccatcattccctcaatggtctatccttttcttaaactcacgaggt

SEQ ID NO: 35279 - DNA, 120 bp, synthetic construct
  source 1..120: mol_type = other DNA
agaaaagaaaaacctacaatgcttttgctcttttgtaccccacagggtcaacaaaacaggaatttaggtgaacatatgtcaaatgaaatctcagattaattgtaggagaaagtaaagaca

SEQ ID NO: 35280 - DNA, 120 bp, synthetic construct
  source 1..120: mol_type = other DNA
agaatgtgcaaaaaaccaccaaaaactccctcacaaactcacttttgctccaggaggcaatccttctagttctttaggctttataaatgtacgatgctgcgccttatgttcagctttctc

SEQ ID NO: 35281 - DNA, 120 bp, synthetic construct
  source 1..120: mol_type = other DNA
ggtgtgagccaccgcgcccggcctgctttgcctttatttcatcatcagtgaggttgaacatctgtttatagatttgcagcccattatttttctttgtaaattgtctattcatatcctttg

SEQ ID NO: 35282 - DNA, 120 bp, synthetic construct
  source 1..120: mol_type = other DNA
acagaatagcagtgagctgcgagacaacttcaaggggcctaatatatgcctaattggagcaccaaaagacaggggaagagaacagaaaaaaattaaataaggggagaaaatttttcacat

SEQ ID NO: 35283 - DNA, 120 bp, synthetic construct
  source 1..120: mol_type = other DNA
aagcatccatggacaaaagacacattatgtacagagaaacacagataaagataacatcacatttcttgttggatacaatgcaagcaagaaaatggtggaacaacatctgagagaggacaa

SEQ ID NO: 35284 - DNA, 120 bp, synthetic construct
  source 1..120: mol_type = other DNA
aaactgccctgttaactctgggtagctctaaccagccacagaaacctatgccaaatcaagtgttttcaaatagcattcaaatataattttcctttgtccagggtggactgcagtcttgct

SEQ ID NO: 35285 - DNA, 120 bp, synthetic construct
  source 1..120: mol_type = other DNA
ccacaattatattcttggtgcctagcaccataccttgagcgcccaaatgaattaatccttaattggatgggggtagatgactcattcttttaacccatgtaatgaaagacctgacagctg

SEQ ID NO: 35286 - DNA, 120 bp, synthetic construct
  source 1..120: mol_type = other DNA
cagaataacatattagtccatttccctgacttattaagtagatgactgaggattttccggaggtttggagccacaatttgcaaaaggacattaataagagtacctaactcacaagactgc

SEQ ID NO: 35287 - DNA, 120 bp, synthetic construct
  source 1..120: mol_type = other DNA
gcagagtagaatggtggttaccaggaagtggttgggggatgaggagttgaggatattatggtcaaagggtgcaaaatttcagttagaaaggaggactaaattcaagagatctattgtaaa

SEQ ID NO: 35288 - DNA, 120 bp, synthetic construct
  source 1..120: mol_type = other DNA
tattaaggtttctgatacatattgacgaattgctctccagaagagctgtatcaaattatagtcccagcagcagagtctatgagtaggagatgaacttgagagtgatgtcaaggacggagt

SEQ ID NO: 35289 - DNA, 120 bp, synthetic construct
  source 1..120: mol_type = other DNA
ctgctaggcattcgtgttttgctactccactaccttgcttctcggcaggatggccttcaatagacttttaaaagagagtatgtatacatatgtaactaacctgcacaatgtgcacatgtt

SEQ ID NO: 35290 - DNA, 120 bp, synthetic construct
  source 1..120: mol_type = other DNA
atgtctctggtttcatcctctctgctcagccccagatatgtgtttataacttgcttcatattaatagcctgcttatctgtgagtacatcaagtgcaataaccctcaaactagggaggtag

SEQ ID NO: 35291 - DNA, 120 bp, synthetic construct
  source 1..120: mol_type = other DNA
agggtaggtagtagggagccaggaaagcattttaagaagaagagtgatgtgatcaggttggtgttttcagtagatttctttgggagtaatgtagatgatggatgaggggaatcaatttgg

SEQ ID NO: 35292 - DNA, 120 bp, synthetic construct
  source 1..120: mol_type = other DNA
aaatcactttcccctgattcctgcgatcctaagtgaattcaagtcaaatttgctgctgaggtcaatgacaatgaacactgtaattttgagagagagagagagagagagagagagagagag

SEQ ID NO: 35293 - DNA, 120 bp, synthetic construct
  source 1..120: mol_type = other DNA
ttagaacttcacagaaaggaaaatgttactgccgcaattcaatgctgtaaatgagattaacacatgtgaaaacctaatggaactgaatgcttaactcttcaactaaatgctctacagtca

SEQ ID NO: 35294 - DNA, 120 bp, synthetic construct
  source 1..120: mol_type = other DNA
gtaagaaagtgctgaagaattccatatttcctctcagaaactatcatataaatgtatacaaattgtataatttaaatgatggcatgaaggactgctgtggctagtaactaaagactggtg

SEQ ID NO: 35295 - DNA, 120 bp, synthetic construct
  source 1..120: mol_type = other DNA
aacttaagtcacgagaattcctggttctcagtgatcacactgcagtgttacacaaatatttttcctgcttcctacctttcagtattactaagcagcactaactgttcccccaaaactggc

SEQ ID NO: 35296 - DNA, 120 bp, synthetic construct
  source 1..120: mol_type = other DNA
gcatcttgaacctcacagcctaaaatatttatatttagccattcacaagaaagttcaccgaccttggttctaaatgatttcaaaaaatgaaattctccaacgctttcaggagtaaagcac

SEQ ID NO: 35297 - DNA, 120 bp, synthetic construct
  source 1..120: mol_type = other DNA
tgtgtgtgctaaatcacaataattggggtcttttccccataaatgtacccctaagagagaccataagcttctttttacacccaccaatgtgaagcaaggcagaaagtcacaaggatcttc

SEQ ID NO: 35298 - DNA, 120 bp, synthetic construct
  source 1..120: mol_type = other DNA
cttattgctccccatatttctcttggagagggaaactactgttctcattttacagatggggaaatgagggtggagaaaggttgagtaatttaacttgcacaacttcatgaagctagcagg

SEQ ID NO: 35299 - DNA, 120 bp, synthetic construct
  source 1..120: mol_type = other DNA
cttccctaagcagccactaacactaatctgctttcttgtccctgaatttgccttttctggacatttcatataaattgaatcatatcgtaggtagccttttgtgtctgccttttttcattt

SEQ ID NO: 35300 - DNA, 120 bp, synthetic construct
  source 1..120: mol_type = other DNA
atagtattttccattaggtttaggtcccaattatgaattaggaacagtcatgtcatttgataaaatatacagtgaggctaaaggaaagaatgctttgtagaatcattgtgctgtgaaggt

SEQ ID NO: 35301 - DNA, 120 bp, synthetic construct
  source 1..120: mol_type = other DNA
aagacccctgcttagagtgtcagcaatgtgaagctgaattcagcaagtggggcaaaactgtcatcatctggatgatactgttttggtaaacatttggataagcaggtttccttatccaaa

SEQ ID NO: 35302 - DNA, 120 bp, synthetic construct
  source 1..120: mol_type = other DNA
tacctttcccaaacattcttttaacatgaaagaaaacaaaacaaaaacaaaacagagaagacaaggagtacttaccacggagaccttgctcacgacatctcccgcaaccgctaagccttg

SEQ ID NO: 35303 - DNA, 120 bp, synthetic construct
  source 1..120: mol_type = other DNA
ctctgatgtacaaatggggtgcggctaatgttcgtttattttcagttgctcataactcagcttcccatagaaaatgttataaatggtagataggtgctcaggccagccctcagcttattt

SEQ ID NO: 35304 - DNA, 120 bp, synthetic construct
  source 1..120: mol_type = other DNA
ggaattaggaagaagtgggcacataaccctggagagttcagaagtgactcaatgaaagaagtatcatttgagatgcttggagccactgaagctcaaagcacaggaataactctaatcaaa

SEQ ID NO: 35305 - DNA, 120 bp, synthetic construct
  source 1..120: mol_type = other DNA
gacagaaagtctacgaagacaatagatagtaaagcctttcaaccacaccagtgctataaataatgctagattgctgcctaatcttggggataacacaggagaatcagttgagggcaggta

SEQ ID NO: 35306 - DNA, 120 bp, synthetic construct
  source 1..120: mol_type = other DNA
ttctccagtcccacgcaaacttggaatgagccaattgtccttattttgttctcactttgacatttatttcctttccaatacaagacaggtgcactggtccttgtagtatagggtgatgaa

SEQ ID NO: 35307 - DNA, 120 bp, synthetic construct
  source 1..120: mol_type = other DNA
ttctgagacagccagtagagatgaatacagctcagttggggaccaaggaggaagagctttgctttggtccagcgtggtttcagtcttacatctgtctttatctatttcaaaaagtttatt

SEQ ID NO: 35308 - DNA, 120 bp, synthetic construct
  source 1..120: mol_type = other DNA
ttgtcatgttctttccttgggagaaattgttagaggtggagctgctagtttctggctacttcaagtgacctccttgacaatgagactgtgctaatggctctcatttcttcaacagaataa

SEQ ID NO: 35309 - DNA, 120 bp, synthetic construct
  source 1..120: mol_type = other DNA
aaatcaacctataagaggaattcttaaattatgtggaagatgagagtgggtggataggaagaaaaaaaagtgaggaattgtggggagagaagtacctctccctcagagaaggtggcatgg

SEQ ID NO: 35310 - DNA, 120 bp, synthetic construct
  source 1..120: mol_type = other DNA
aattttaactttctatttcaaaagttagtttcttcattgcactagagtctgccaggcatcttaaaaataattttctggtgtttacagagggggatggaagtggagacatttcagcatctg

SEQ ID NO: 35311 - DNA, 120 bp, synthetic construct
  source 1..120: mol_type = other DNA
aacaatcaacaaatatatacaacatgctttttttcccctagatgttgggaatacaacaatgaacaagacagacaaggtctgtgtgcccttattgtgctctcagtccagtggggagtctag

SEQ ID NO: 35312 - DNA, 120 bp, synthetic construct
  source 1..120: mol_type = other DNA
agacttttgaggttgttcttagccagcatccttgcttgctaaccctctttgtattacagtgatgccagacaaatcaggtatcctgaaaaattggcaggagttcttcaagttttaaggggt

SEQ ID NO: 35313 - DNA, 120 bp, synthetic construct
  source 1..120: mol_type = other DNA
attaaagcaaaggagaatattattccaagtggtttaaaattacgacatccaaaaagactgcatggccctctccctgagataaggaattgaaatgagctgagaatggagagccacccaccc

SEQ ID NO: 35314 - DNA, 120 bp, synthetic construct
  source 1..120: mol_type = other DNA
tgactcatctctggatccctctgactccaaggaaactgcctgagtgctaatgtttaatgagttgaactacagccatcttctgggtttaaagaaactgttaccttatcagtagttcactga

SEQ ID NO: 35315 - DNA, 120 bp, synthetic construct
  source 1..120: mol_type = other DNA
tgcttcatcagttacctaaatttgtggcgcttgtttcatataggccttttattcttgttgcttgaagtattttaaagcagacctcagacttcgtatcactatacctccatgtagttgagt

SEQ ID NO: 35316 - DNA, 120 bp, synthetic construct
  source 1..120: mol_type = other DNA
taaagcaacagtggtggaacagtaatggaagtagaaaaaagtggtgaattgatttgattcttctcagtttgtccaactagatatatgcttctctgcagggctgtgtgttccagaaggctg

SEQ ID NO: 35317 - DNA, 120 bp, synthetic construct
  source 1..120: mol_type = other DNA
ttttctcactcagtatgatggtgagatttatccacacataactctgtatcctaaattctgtctcttctgttgtgtggccatggagtgtaggaggttggctgttattggcctctgctcctg

SEQ ID NO: 35318 - DNA, 120 bp, synthetic construct
  source 1..120: mol_type = other DNA
attgccataagcagccctgtagatgcaaggatgagatgtagctctgcagggccagagtctaaatacataagtcagtgtcagaatctttttggcactgtctgttccttaaataggtcaata

SEQ ID NO: 35319 - DNA, 120 bp, synthetic construct
  source 1..120: mol_type = other DNA
cttgtcattctggactcaaaacttactctgtagtattggtgaatgagacaagaattgatagacatgtccatggaccaacgaagagattctagaaatatactcatgcatatgtgaaactca

SEQ ID NO: 35320 - DNA, 120 bp, synthetic construct
  source 1..120: mol_type = other DNA
gtgttggtgcaaaataactttgagcctacaattctacttctagccagacattcaagttcgaggataaattagcatacaaggtgttcaagtgtgggttccctggaaatagaccctgaggca

SEQ ID NO: 35321 - DNA, 120 bp, synthetic construct
  source 1..120: mol_type = other DNA
tcctcagcacgtggaatttcaagaacctcctcctctccaggtctcccatagcagctggaactttattcatgtccctatcattactttctctatggaacgggatgagtagctggttaggtt

SEQ ID NO: 35322 - DNA, 120 bp, synthetic construct
  source 1..120: mol_type = other DNA
aaatcgccttagaaagaggtaagaaatagccttctctggcaaacttcactaagtcagactcagcctcctctgcagggttcaaactctgttggcagagaagctacaggtagattccagcac

SEQ ID NO: 35323 - DNA, 120 bp, synthetic construct
  source 1..120: mol_type = other DNA
agatcctgaaccattccagcaacctgagaaaggatctggttttaaggcaattcacaccaaatctgactactttgctttgctttgtgcatctacctaaacagtattgggcctcattcagaa

SEQ ID NO: 35324 - DNA, 120 bp, synthetic construct
  source 1..120: mol_type = other DNA
caaagctgagaaggaaacaatacacatggaaaggtggaaagagaggaaaacatggaataaactctgtattcctgggctggatactggaggtttacgtgcaacctcaagtttgccaacaga

SEQ ID NO: 35325 - DNA, 120 bp, synthetic construct
  source 1..120: mol_type = other DNA
tgagatgatcaaggaccattcattatcaattgtgggaaagagccttggcataacacatccctgaggcaaaatattcaaaatgaaccgcttggtctgccttatgaaagcaaagcagttctg

SEQ ID NO: 35326 - DNA, 120 bp, synthetic construct
  source 1..120: mol_type = other DNA
tggctcacagaggctcatgtacagcagagtcgactttctatggttgttggtgttgtttaaaaatcaacagagaggtcttagtgcattgctcaacaattttattcctaaggaaccagtgat

SEQ ID NO: 35327 - DNA, 120 bp, synthetic construct
  source 1..120: mol_type = other DNA
ataatctatcaccccatttcttccatgtacgctagtaatgcagacctgtgagtataaataatggaaatgattatggaaaagcccaataagcactgtaaccagctttgcacctcctcaccc

SEQ ID NO: 35328 - DNA, 120 bp, synthetic construct
  source 1..120: mol_type = other DNA
ctcttccgtatgaatacaacggatgggcttcacagaagttgccttgatgtttgagatgcctggctcagtggaatattcaacttctaacaagtcacccttataaggcacaaaatctaaaac

SEQ ID NO: 35329 - DNA, 120 bp, synthetic construct
  source 1..120: mol_type = other DNA
actttctttgttaacaaaatacaccgataagttatcttccctctccaaattgtttaggacaatgaatatggcctcagggtctttacacggttctatgtggccaggagaaaacctgcggga

SEQ ID NO: 35330 - DNA, 120 bp, synthetic construct
  source 1..120: mol_type = other DNA
tttacagtaacgtcaatttcctccgttcttacataagactgagtgggcagccagtgtggaggcaagccacatctcataatagtcattttagttcctcatgagaaccacactacaaaaaac

SEQ ID NO: 35331 - DNA, 120 bp, synthetic construct
  source 1..120: mol_type = other DNA
taacagttgcattatgggaaggatttattgatccacaccattttcctggattttctacgctccctgtggtatagagatgggtcaatggcatagtgttttaacaaaggccaattccaccct

SEQ ID NO: 35332 - DNA, 120 bp, synthetic construct
  source 1..120: mol_type = other DNA
ttctatgttatatactttcagagagagataaaactaacttactctgttagaagtcgggatagtggtttctcttggggggatgcaaggtagtggacagaagaggacacaaggagatgtctg

SEQ ID NO: 35333 - DNA, 120 bp, synthetic construct
  source 1..120: mol_type = other DNA
gtgattgctccaggtgttattatacacaaattaccacagtctactcgttctcattattttactaatttgagtggaatatagaaactttatctctcattatattcccttaccctcctctat

SEQ ID NO: 35334 - DNA, 120 bp, synthetic construct
  source 1..120: mol_type = other DNA
tggtgtttccctgtttgttgctgttgttgttgttgttaatgtggtgcattacatttatcgattatcaaatgttaaatcaatgttgcctttctgcaatatactccaccatgatgtatgtcc

SEQ ID NO: 35335 - DNA, 120 bp, synthetic construct
  source 1..120: mol_type = other DNA
taagtaagcctgtcctcacgtcctcctcatgctcctgcctcatcccctccagagaaactgtccttgtcaaggttaacagtttcggctgacattgccattaacttctcagcagcatttgac

SEQ ID NO: 35336 - DNA, 120 bp, synthetic construct
  source 1..120: mol_type = other DNA
ctccacagaaggctctgcccaaccagcagcagctcctggggctccctctgctgctgttgcccacaggcctgtggactgcttccttaccactagcccaacactgtatgtttcatttgctca

SEQ ID NO: 35337 - DNA, 120 bp, synthetic construct
  source 1..120: mol_type = other DNA
gtttcagcaaagataggatgatgcagaaacctggtagcaatgcacctgtgggaggaaacgttaccagcagtttctctggagatgacctagaatgcagagaaacagcctcctctcccaaaa

SEQ ID NO: 35338 - DNA, 120 bp, synthetic construct
  source 1..120: mol_type = other DNA
agactatggagacttccattttcaccatagtctgaggtgcgcattgtccctcaattgacactctttgtatttgctagactacctctttttaaaaaatttgtgtaggcacatagcagatgc

SEQ ID NO: 35339 - DNA, 120 bp, synthetic construct
  source 1..120: mol_type = other DNA
tctctttcttttcagatgtatgagacgagactttgttaagcaccttaagaagaaactgaaacgtatgatttgagaatacttgtccctggaggattatcacaccccaaatgcataatctcg

SEQ ID NO: 35340 - DNA, 120 bp, synthetic construct
  source 1..120: mol_type = other DNA
gtagggtggtatatccaatatatataataaaggtagttcctagataggattggcctgataacaataatttggagcttcagtagcagtccctttaagactgttgtctccagatatgacttg

SEQ ID NO: 35341 - DNA, 120 bp, synthetic construct
  source 1..120: mol_type = other DNA
ggggtgtatatgtaatatgtgtaatgtgtataatgtgtattatatgtataatgggagattacaaagtgtgtgtgtgtaggtatatataccccctaccaacacacacacacacacacaggt

SEQ ID NO: 35342 - DNA, 120 bp, synthetic construct
  source 1..120: mol_type = other DNA
cttcttaaggtgcttaacaaagtctcgtctcatacatctgaaaagaaagagacatgtcattaaccaaaagatagctaaagaacctatgctgtaggaagcactgtgatggatagaaagatg

SEQ ID NO: 35343 - DNA, 120 bp, synthetic construct
  source 1..120: mol_type = other DNA
aaggaagcagtccacaggcctgtgggcaacagcagcagagggagccccaggagctgctgctggttgggcagagccttctgtggaggtacccttgggcagggcttgaaggaaaaagcagag

SEQ ID NO: 35344 - DNA, 120 bp, synthetic construct
  source 1..120: mol_type = other DNA
actcttttctttggacatggcagagcctgcaataaggctgtctcctgctccttgtttccttgccaacagggccatcctctgccttttctgatacgaaggactgtcacattccctgggacg

SEQ ID NO: 35345 - DNA, 120 bp, synthetic construct
  source 1..120: mol_type = other DNA
tggcattgggtgagtcaaagatgtttcttaaaataataaaaagcactatccataaataatacactaattaataaaattaagagaatctgttcatctacaacacattattgagatcgtgta

SEQ ID NO: 35346 - DNA, 120 bp, synthetic construct
  source 1..120: mol_type = other DNA
atcagtacccaaggaagagtccaccagaggttgagataaagcccccgacagtgaccccacagggctacgatcatgtgtccggggcacagccacccccaccacgttccatgagcacagata

SEQ ID NO: 35347 - DNA, 120 bp, synthetic construct
  source 1..120: mol_type = other DNA
acttctattataaaaagagaagtgctttcttcttacctgaacagacatttagtctagatatggattttccttcccacttgcagtgcttttgagaaaaccaatgtttgtatctcggcttcc

SEQ ID NO: 35348 - DNA, 120 bp, synthetic construct
  source 1..120: mol_type = other DNA
tatgaatgagaacacgcagtatctcattttctgattatcagattttgcttctgcgtttcacttaaaagtgaagttttcaccggacacagtggctcacgcctgtaatcccaggatttggga

SEQ ID NO: 35349 - DNA, 120 bp, synthetic construct
  source 1..120: mol_type = other DNA
ttaacaatctggtagtctggcatgtcaagatggtggttataaggtgaacagcaagttcttacatcttgcctttcttactactaaataaggaacatgaaacgagttgcataatagatgctt

SEQ ID NO: 35350 - DNA, 120 bp, synthetic construct
  source 1..120: mol_type = other DNA
cacgattgaaggggtatcactttgatcttcctcaaatagacacttattctgcatatggattttcattcccacccatggaacttcaaggaaatcggtactgtggtatgaggaaaggctgta

SEQ ID NO: 35351 - DNA, 120 bp, synthetic construct
  source 1..120: mol_type = other DNA
ttctagggaattatttatttcataaatgggaggatacaccagggagaaatcccaggcctgacaaacggaggccaggacacataatacaataaaaccacctcttattttctggccctatga

SEQ ID NO: 35352 - DNA, 120 bp, synthetic construct
  source 1..120: mol_type = other DNA
caaacactctgttctcaggaaaagaaacctaattttaatgtacacaaagtaaaacagaagaaagatggtataaccaaatcaatcagaatgcttgtggaataagcagctgtcatcaaccaa

SEQ ID NO: 35353 - DNA, 120 bp, synthetic construct
  source 1..120: mol_type = other DNA
aaagactctttctgaggaaaaaggacactttccagggcgaaattaaagcatccagggaaaaactgcccactcacagtcctgaagtcctgaccttgctggaggagagacggcggcacctca

SEQ ID NO: 35354 - DNA, 120 bp, synthetic construct
  source 1..120: mol_type = other DNA
aagtctgagaaaaaaaaaatatgtggacaggcctgtccaaacggacatacaatgtgaagatattggggtctcatgagagttctcagcaaagggtatcctcagcagagcagaattttaata

SEQ ID NO: 35355 - DNA, 120 bp, synthetic construct
  source 1..120: mol_type = other DNA
cgatgtttgtacaaagaggacatacaattaataaagtggtcgaggaacaggtttctgctttaataccaaaaactaacatagaaacctgtaaaggtgtccaagtatagtaatccttttcct

SEQ ID NO: 35356 - DNA, 120 bp, synthetic construct
  source 1..120: mol_type = other DNA
ttccaactgcagctgctgtactacaagtggttttgttgtgtcagcaactgtgacatccctcggaacctgatatacaatactgattaggtgaatgtttggctttctttcagtaattgtcgt

SEQ ID NO: 35357 - DNA, 120 bp, synthetic construct
  source 1..120: mol_type = other DNA
tctgcttaggatctcacaaaatcaaagttagggtatcaaccaggctgctgactaactaaggactcagagagaacctgttttcaagcacatttgggttacgggcaggtctaacttcttaaa

SEQ ID NO: 35358 - DNA, 120 bp, synthetic construct
  source 1..120: mol_type = other DNA
aaacagacattcttatattacttactttgtccaacgcatcggagttccttcactaatttacgttttatatcagcattaatttctcgttggcttttgggagaggaggctgtttctctgcat

SEQ ID NO: 35359 - DNA, 120 bp, synthetic construct
  source 1..120: mol_type = other DNA
actgtcaaatgctgctgagaagttaatggcaatgtcagccgaaactgttaaccttgacaaggacagtttctctggaggggatgaggcaggagcatgaggaggacgtgaggacaggcttac

SEQ ID NO: 35360 - DNA, 120 bp, synthetic construct
  source 1..120: mol_type = other DNA
gacatacatcagccatggtggagtatattgcagaaaggcaacactgatttaacatttgaaaatcgacaaatgtagtgcaccacattaacaacaacaacaacaacaacaacaaaaacaggg

SEQ ID NO: 35361 - DNA, 120 bp, synthetic construct
  source 1..120: mol_type = other DNA
acgctcacccccagtgctctattgagcccaagtgcttaaagaaattggacagttcctatttctacccaccttgctgcttccttgatgatggattcaaaaaatcgtttcctgactgcagta

SEQ ID NO: 35362 - DNA, 120 bp, synthetic construct
  source 1..120: mol_type = other DNA
cacctcagcaatcatgcttcagaggctgaaatgttttaaatgcttaaatcaagatacctgcacatacaaaacctaaataataaaaaagacacctgcacatacatacgaatgtaactcctt

SEQ ID NO: 35363 - DNA, 120 bp, synthetic construct
  source 1..120: mol_type = other DNA
tcaaattcacttacaaactgccatgttttactaagctggaagccagacaacttggacacacctcaaccagcctcctctctacatcaaacatattctgagaaaatagaggtggccattact

SEQ ID NO: 35364 - DNA, 120 bp, synthetic construct
  source 1..120: mol_type = other DNA
cttctattataaaaagagaagtgctttcttcttacctgaacagacatttagtctagatatggattttccttcccacttgcagtgcttttgagaaaaccaatgtttgtatctcggcttcca

SEQ ID NO: 35365 - DNA, 120 bp, synthetic construct
  source 1..120: mol_type = other DNA
ccctccacataaacctcatgaatgacagatctggaaatcaaactgagaagttgagctgtgagatacgtgtgtttcatcacccctctgggtacatctatgtgctcctcagtttctagggaa

SEQ ID NO: 35366 - DNA, 120 bp, synthetic construct
  source 1..120: mol_type = other DNA
gaccaaagctgcttcgcagtcggttctgagtgcttaggagtgttgaggatgggtgttcaggagcgacatggcatcacgtgatttacatgccaacatcatgacccggctgcagggttggag

SEQ ID NO: 35367 - DNA, 120 bp, synthetic construct
  source 1..120: mol_type = other DNA
tatccattcaacaatttactggaggttccaaaaagtgccatatcatcaggaaaatacaataggtttaaaatttggaaagaaataaaactgtcattattcacagatgacattgttctgtac

SEQ ID NO: 35368 - DNA, 120 bp, synthetic construct
  source 1..120: mol_type = other DNA
gtgaaaacaagaataaagttaatcatgcagttcaaaagacaaatgctcgatcactgtgtaagtctccaccagctgtgtcacctgtgtaaccacagaggagaaatggaaaaggagtgacag

SEQ ID NO: 35369 - DNA, 120 bp, synthetic construct
  source 1..120: mol_type = other DNA
tagattggtgggaaagggagactggcagaaaataacctgacatacacataattgggcataaaaaagtcaggaattagaacaaaagaaataaggctgcagtacaagaaagtctgtgatagc

SEQ ID NO: 35370 - DNA, 120 bp, synthetic construct
  source 1..120: mol_type = other DNA
gttctaattgggtatttcttgaaaactaaaatcaaagtcccatagatccagcaccaaaagagccaagctgtctctgtctgtcagatatgccttatgcccatcaagcacaaagtcttgcca

SEQ ID NO: 35371 - DNA, 120 bp, synthetic construct
  source 1..120: mol_type = other DNA
atcctagagtatctcgaaattagggggaaaggtatctctgaattagagttaatgagcccaagatcagaggttaccatgccaattgacttgctgtgttatatagtcacaggctgacttcct

SEQ ID NO: 35372 - DNA, 120 bp, synthetic construct
  source 1..120: mol_type = other DNA
tgcagacatccagagagtcctatgaaaagacaaggccattatgcacaggttgaattctgagtaaacagcagataacttgccaagttcagttttgtttctttgcgtgcagtgtctttccat

SEQ ID NO: 35373 - DNA, 120 bp, synthetic construct
  source 1..120: mol_type = other DNA
gtggttaaggaaggagtgggagttgtttaaaatgctatttcctggaatcaacagccagagaatttgatgtagcaagtcaggtgtgtggcccagatgtctgtagtctttctttctttcttt

SEQ ID NO: 35374 - DNA, 120 bp, synthetic construct
  source 1..120: mol_type = other DNA
catgtgtctgtaagggttttccagatgagattagcatttaaattagtaggtggagtagagcatattgcctgcctattgtgagtgggcttcatccaatctgctaaggacctgaatagaaca

SEQ ID NO: 35375 - DNA, 120 bp, synthetic construct
  source 1..120: mol_type = other DNA
tctgaattcctcttgcatttaggctctagattctggaaccactaacttggacacctaaccatacactgctaaatgctgttaaattccactctttcacacatacatgctgcctctgtccaa

SEQ ID NO: 35376 - DNA, 120 bp, synthetic construct
  source 1..120: mol_type = other DNA
gccaagtaggtatcagcttgttatcaaaactagtagccaaaaccaaaagccaagttatcaaaatatggcttatggatctcaagataaaatgtatcatgttggctgggcgcagtggctcgc

SEQ ID NO: 35377 - DNA, 120 bp, synthetic construct
  source 1..120: mol_type = other DNA
tagttatgtgctgacagaaaatttctgtaaaacagaccatcaggaatagtgatgaattgtgggatggtagcttaagaaataaacgttagacctaaaaccatgaaaaccctagaagaaaac

SEQ ID NO: 35378 - DNA, 120 bp, synthetic construct
  source 1..120: mol_type = other DNA
ggtcttcgattgtcacacattaaaatcacaggaagtaaacaaatcagcaaaagtgtaaccctgcatttgacaggtaaacatactgaacatctgaggcatcttaacatgaaccaaccccct

SEQ ID NO: 35379 - DNA, 120 bp, synthetic construct
  source 1..120: mol_type = other DNA
taaacacaaaagttacccatttttaaattgcattgaggaaaaggaggaaactctttcctccctgtctctcctgtagcataaggctcctttctaacaagaccaagaactccacccagtgtc

SEQ ID NO: 35380 - DNA, 120 bp, synthetic construct
  source 1..120: mol_type = other DNA
tttctggctaggtgatctgtctaatgctgagagtggggtgttgaatgccccactattattgtattgcagtctatatctctctttagatctagtaatattggctttatggtcctgggtgct

SEQ ID NO: 35381 - DNA, 120 bp, synthetic construct
  source 1..120: mol_type = other DNA
tataagagattcccaaatcatgggcctcaagggtagcattcagtgaggcttcacagcattatcacatggctgcatgtcaatgccaatgattttgccaaaattacctcccttttgtttacc

SEQ ID NO: 35382 - DNA, 120 bp, synthetic construct
  source 1..120: mol_type = other DNA
tttgaaggctacacagagtgtccgatacccatcctaggagtaaagtaggagatctgtagttattctaataatagttggaaaaaaaaaaaaacacactctgtaaatactcttgctttagcc

SEQ ID NO: 35383 - DNA, 120 bp, synthetic construct
  source 1..120: mol_type = other DNA
tggcaaaagactaatatccagaatctataaggaactcaaacagtaagaaaaaaaatcaactccattaaaagctgggcaaagggcggggtgcagtgactcacttctgtaatcccggcactt

SEQ ID NO: 35384 - DNA, 120 bp, synthetic construct
  source 1..120: mol_type = other DNA
catcaccagactctttctctctgtgctttgagaagcaaatttcactatctgattttttttacctaagggttcctttaatatgcacatttagggctatctagctgacaattgcctagggca

SEQ ID NO: 35385 - DNA, 120 bp, synthetic construct
  source 1..120: mol_type = other DNA
gatatttattacacgtctgggtcatttccaatttttttaattataggaaaacatttttctgtaaaaaagaaatgtgatcttaaaggaaaatactttttgtctaattcgaagcttatctaa

SEQ ID NO: 35386 - DNA, 120 bp, synthetic construct
  source 1..120: mol_type = other DNA
ggataattcacatctccgccaataaataaatgtagccacactagcgtgggggatttgaggtgagacatcgaaaatactaagtcatggtgagggctggaagacaaaagaatgaatcactta

SEQ ID NO: 35387 - DNA, 120 bp, synthetic construct
  source 1..120: mol_type = other DNA
gtacactgcatcttaaatatttatgttactgttttaataacctcagcagtgtttaatcaagataagcatgctttagaaatgtgttgatatccgcaagtgtgaatagtcaaaatcgccacg

SEQ ID NO: 35388 - DNA, 120 bp, synthetic construct
  source 1..120: mol_type = other DNA
ttaggatagttaatacgggatcacattctttagccttaggcattgcagaggaaaagcaaacaaacaaaaacaaaccaaaactaagctgagagaggtggagcaagaaaagcagaatagaag

SEQ ID NO: 35389 - DNA, 120 bp, synthetic construct
  source 1..120: mol_type = other DNA
tgtttctcatgcccctaagaaggacactaaagtgttttaaagagagttggatctgaaggtgccctgtggttgggcttgagggatgacatgaaaatgttctgcatgaatcagccatttagg

SEQ ID NO: 35390 - DNA, 120 bp, synthetic construct
  source 1..120: mol_type = other DNA
atgcaagaaaaaaaaaaacgctcctcactattccatctcctcaagtggaaggagggggtcttttatggagccgctagctgggcagtctggggctagggcaggggtgacaccagcactcac

SEQ ID NO: 35391 - DNA, 120 bp, synthetic construct
  source 1..120: mol_type = other DNA
tcaatcatttcatcacaagcaatgctttcctgccgtttacttactcctacatctactatcttcttttgtattgtgctttgtgttttacagaacatttacgctttataaagcatctatttc

SEQ ID NO: 35392 - DNA, 120 bp, synthetic construct
  source 1..120: mol_type = other DNA
tatggggaagaagaagaggagcgtgggtagggtcacctgtgagtccaaactgcaccattttgtcagttctttgctattttgcagaccttggtcaaagtgaaacatcccatgggggttcag

SEQ ID NO: 35393 - DNA, 120 bp, synthetic construct
  source 1..120: mol_type = other DNA
ggaaagactattataaataatttccctttaattatagacaactttatacaaatcatttatgacagcttggactttctgttttatcccttcctctttctttattcctttgagatacagtct

SEQ ID NO: 35394 - DNA, 120 bp, synthetic construct
  source 1..120: mol_type = other DNA
ctttaatgtctcgtgctgggtggaaatagtagtttgcaatgaggaataccttcaattgtacatatcaaagagtaagaaaaaaagcattgggattttttgtttttaccttgtggtccgaca

SEQ ID NO: 35395 - DNA, 120 bp, synthetic construct
  source 1..120: mol_type = other DNA
ctcctacagttccttcacatgcacctcgaagaccatttacttttgggctactgctgagatgaatggtaattctaagtttttgactaaaacagttattagaacagagagtattcttggatt

SEQ ID NO: 35396 - DNA, 120 bp, synthetic construct
  source 1..120: mol_type = other DNA
tctttgtttatgtaagatttagtaagtaaggaatttaatattgtttggttaatgaaaatagctaaatcctgagttattgccaaaaaaacaaaaacaaacaaacgaacaaaaaaacgaccc

SEQ ID NO: 35397 - DNA, 120 bp, synthetic construct
  source 1..120: mol_type = other DNA
tttaaacccaaagtttaacttttatcacatctcaccattttcggtttactctcctcttttaaaaggtgaaaataataactctctctttcaactcattttcagctcatataagttttttct

SEQ ID NO: 35398 - DNA, 120 bp, synthetic construct
  source 1..120: mol_type = other DNA
ttataaaatttcaaaaaaacaaatttcatttgcccatcctgtttttaattagggcttattgtttgggatattaagcctcctctctcaaagaataaagattttcacctttttttttttttc

SEQ ID NO: 35399 - DNA, 120 bp, synthetic construct
  source 1..120: mol_type = other DNA
ccatttcaaaaagagaaaaaaatatacacccctgatttgaaacaagactaggatacacggtaaagaatgtttattcactaaagttttgacagactgaaggccattatttcagattggaaa

SEQ ID NO: 35400 - DNA, 120 bp, synthetic construct
  source 1..120: mol_type = other DNA
ttgtaaataaggcctgggggaggactgattcctaaagaaaattttcttcttaaaattttatctcacaggaagtggagatgtgtatatgttcacgcaactgtacccggcagcacatagttc

SEQ ID NO: 35401 - DNA, 120 bp, synthetic construct
  source 1..120: mol_type = other DNA
gagagttcaggggtgttggagagatcattaggtaaaacaagaaggtcttctcaggatacatgagggagttaaatagaaatgcaggagcaattacaattttagttatttgtaactgttgtt

SEQ ID NO: 35402 - DNA, 120 bp, synthetic construct
  source 1..120: mol_type = other DNA
atcagctattatgctgattacctgggtgatgaaataatgtgtacaccaaacccatgtgacacgcaacttccctttataacgagcctgcacatgtacccctgaacctaacataaaagttaa

SEQ ID NO: 35403 - DNA, 120 bp, synthetic construct
  source 1..120: mol_type = other DNA
aggtgttcatcaatgagaatagtttgcatctcatcttctctattctgcagaaaggcccttgaagagcatattgcatcattttcttcatggccaagaaaatcaagaatcactgatctggcc

SEQ ID NO: 35404 - DNA, 120 bp, synthetic construct
  source 1..120: mol_type = other DNA
taatcaagatgaaaactctgtggagctttcatcaaaggaaaaacatgatgtggcttaaaatatattgtaggagatcaaggatagaagaaataacccattgtcattattacattaccaaat

SEQ ID NO: 35405 - DNA, 120 bp, synthetic construct
  source 1..120: mol_type = other DNA
caggggtacatgtgcaggctcgttatatagggaagttgcgtgtcacacgggtttggtgtacacattatttcatcacccaggtaatcagcataatagatgataggtagcttttcaaccctc

SEQ ID NO: 35406 - DNA, 120 bp, synthetic construct
  source 1..120: mol_type = other DNA
caaactttattgtcattgcccaaggttgagagatgtagcttcttgctactttgcaggtatttcaaccattatttccatgaattcctcctcctccatttggagggggttgattctgttctt

SEQ ID NO: 35407 - DNA, 120 bp, synthetic construct
  source 1..120: mol_type = other DNA
ggccattattaaaaccaccattgacaagtaaattttggttacttctgtagcatacaacaatttaacataaagtttataattaataacatacagaagttatttcagaattatgagtttccc

SEQ ID NO: 35408 - DNA, 120 bp, synthetic construct
  source 1..120: mol_type = other DNA
aggtaaaaagatacgaaaaacagatcaccattactagggacttggaggaggctgttagttgactacaaaggtgaggcataggggattcaacccaaattgctgtgcatgtcaatagttgat

SEQ ID NO: 35409 - DNA, 120 bp, synthetic construct
  source 1..120: mol_type = other DNA
tcatgacagaagaagggaggaggtgccagctctctagggaataaataggaagactttgagaaggacaaggggaaacgccacctcagaggacagactcccagagattcccagcatgctcct

SEQ ID NO: 35410 - DNA, 120 bp, synthetic construct
  source 1..120: mol_type = other DNA
ccatcatccacatccctgctcacacatttacctcctgctcctaaggaagacgttatgcctgtgttttgaaatgttcctagcggcaactttgagaaagacttccagaaccaaactgtgata

SEQ ID NO: 35411 - DNA, 120 bp, synthetic construct
  source 1..120: mol_type = other DNA
tctggggggttccatgacaagtcagcagggagagttgcctccagttggcagagggaagattcccaggccctgctggtgataagagtgaggacggagaggtcccacgtgcatcagaacaga

SEQ ID NO: 35412 - DNA, 120 bp, synthetic construct
  source 1..120: mol_type = other DNA
tcagctttgaggaagacttccagaacccgagtgtgacagaggacttggtagatgcacaggattccatagatgaggaggaggaggatgcctcctccacttcctcttcctctttccactttt

SEQ ID NO: 35413 - DNA, 120 bp, synthetic construct
  source 1..120: mol_type = other DNA
ctgagggtgaggatgtccagtctcctctgcagaatcctgcgagttccttcttctcctctgctttattgagtattttccagagttcccctgagagtactcaaagtccttttgagggttttc

SEQ ID NO: 35414 - DNA, 120 bp, synthetic construct
  source 1..120: mol_type = other DNA
agttcccctgagagaactcagagtacttttgagggttttccccagtctcctctccagattcctgtgagctcctcctcctcctccactttattgagtcttttccagagttcccctgagaga

SEQ ID NO: 35415 - DNA, 120 bp, synthetic construct
  source 1..120: mol_type = other DNA
ataggcatgagccaccgtgcccggccaatacagatctttttaaatgcccttctacatattcacatgctccaaacaccaagtccttttcttcctctcctgttagataaaattttaagaaga

SEQ ID NO: 35416 - DNA, 120 bp, synthetic construct
  source 1..120: mol_type = other DNA
aaagtcattattttgggtgaatagggtagagactggatagcaaggggggctttatgagaaggaatgcaggttgaggaaggggtttgtgccagagaagaacaaggtggaatcatagggtag

SEQ ID NO: 35417 - DNA, 120 bp, synthetic construct
  source 1..120: mol_type = other DNA
aggcggacacaggtccaactaaagaaactttcctatggtatcttgctgggcaaagttccaagaaacaccacaatgacatcccactggaaaaaggaccaaacagcctgatcataaaaacat

SEQ ID NO: 35418 - DNA, 120 bp, synthetic construct
  source 1..120: mol_type = other DNA
aaactgcaatcagtcagctgtgaagggaaatcatttacaaccctaaggcatcagaggatgctgctccgaactgttggaaacaaggacattagcttttgtgtttgtttttgttctcccttt

SEQ ID NO: 35419 - DNA, 120 bp, synthetic construct
  source 1..120: mol_type = other DNA
tcacatgagccagcaattcctcttctgggtatatactcaacacaattaaaagcagagtcttgaagatatatcagtacacccatgttcatagcaaccttactcacaataggcaaaaaggag

SEQ ID NO: 35420 - DNA, 120 bp, synthetic construct
  source 1..120: mol_type = other DNA
ggtatacataggatgatcaggagctgtgagcagaccactgggacaattcagtatggcaaaggtgaccagtgagccacagaagcctaatgaagatgtggacgaacagaccccatcaacctc

SEQ ID NO: 35421 - DNA, 120 bp, synthetic construct
  source 1..120: mol_type = other DNA
cataatggtaggtatgaggtacaccccaccctatgatataagcaactaaatgcccttcaaagggccaaatatctctaaaagttaccagcagcacctgaaataatggttactagatgccac

SEQ ID NO: 35422 - DNA, 120 bp, synthetic construct
  source 1..120: mol_type = other DNA
aagctcctaaggatgtggtatttcttgcagtgcactttgggccataagccatggtcctgtatgacacacatacaccagcatttaaacaatatttctaaaacaataatagtacagtcattg

SEQ ID NO: 35423 - DNA, 120 bp, synthetic construct
  source 1..120: mol_type = other DNA
gactgtactattattgttttagaaatattgtttaaatgctggtgtatgtgtgtcatacaggaccatggcttatggcccaaagtgcactgcaagaaataccacatccttaggagcttgctt

SEQ ID NO: 35424 - DNA, 120 bp, synthetic construct
  source 1..120: mol_type = other DNA
ttttaaaaaatatatagtcaagtgaaagtatgaaaatgagttgaggaaaggcgagtacgtgggtcaaagctgggtctgaggaaaggctcacattttgagatcccgactcaatccatgtcc

SEQ ID NO: 35425 - DNA, 120 bp, synthetic construct
  source 1..120: mol_type = other DNA
agcccacctctcgggggcgggctcccggcgctagcagggctgaagagaagatggaggagctggtggtggaagtgcggggctccaatggcgctttctacaaggtacttggctctagggcag

SEQ ID NO: 35426 - DNA, 120 bp, synthetic construct
  source 1..120: mol_type = other DNA
acaaaggtataccctccatcttctcctctaccaaaatcttctttccatgctctcccctaacaaaattctaacctctttcacctcccctcacaaagacctaatcttctttcatggttacct

SEQ ID NO: 35427 - DNA, 120 bp, synthetic construct
  source 1..120: mol_type = other DNA
ctgcctggtattctataaccttcttgtacttgtatattgatatctttgtctaggtttgggacatcctctgttattattgctttgaacaaacttttaccccatcaccttctctacctcctt

SEQ ID NO: 35428 - DNA, 120 bp, synthetic construct
  source 1..120: mol_type = other DNA
atttaaatagcaaaggaatgtgtgtctttcttgcttaaaaatatttcccagctgcctttggggaccctccccaggagcatacaagaggtttggaaaagctacagactggttagatgttga

SEQ ID NO: 35429 - DNA, 120 bp, synthetic construct
  source 1..120: mol_type = other DNA
gaaacacggaaacaaacaaaagaatatccagggaactgtttgcagatccctttgtctggttgcatgacacagaatgtagcagaaagccatgaactagctgaaagtaagaaggatttggct

SEQ ID NO: 35430 - DNA, 120 bp, synthetic construct
  source 1..120: mol_type = other DNA
ggaaagaattctcatatccctattacccagattcctatgttgacatttgtaccacattgcttccttcttccctctctcacaaatatatacatatatgcacctcctacacacaaacatatg

SEQ ID NO: 35431 - DNA, 120 bp, synthetic construct
  source 1..120: mol_type = other DNA
gccaatcgttccaataatgtcctttagagcaaaagaaaatccagggtcacatggtgcattgggttattatgtttcttaagtctcctttaatctgggacgttcctcgctctgtctttgtta

SEQ ID NO: 35432 - DNA, 120 bp, synthetic construct
  source 1..120: mol_type = other DNA
tttgatttatctaaatgagttgctttcataggaatgggaagattttctctgtgagtgtgtggggctggccctcacttgatatctgactacaggttcactttttatactccatccccaagc

SEQ ID NO: 35433 - DNA, 120 bp, synthetic construct
  source 1..120: mol_type = other DNA
gttgtatagcatacagcgtttctggctagggtaacattgaatgcctttccacctagggctctttaaaaccctgtgaaggattagattaaaaccttgtgaaggttgtagatttccttccta

SEQ ID NO: 35434 - DNA, 120 bp, synthetic construct
  source 1..120: mol_type = other DNA
ccttattctctgcacctttgctcattcccctctcaaggtgattcgcatgtcaggcagtgaacgcttcaaaaagaggtccttgactttatcatttccatgtcctagtgactggcttataat

SEQ ID NO: 35435 - DNA, 120 bp, synthetic construct
  source 1..120: mol_type = other DNA
tgagcttgccaaattttcctaaggacttaatatatttttggaagttctccactgcatcaggggcagccacctgggagcagagaaaacaaaatttggcagcctgttcaagctgtgaattaa

SEQ ID NO: 35436 - DNA, 120 bp, synthetic construct
  source 1..120: mol_type = other DNA
cacttcccatgcactttttctccttacaagcaatcccatgggtttcatcatcattatagtgtacagaagtagaaacccagctcagagacattgagtgagttgctcaaagtggcacagtaa

SEQ ID NO: 35437 - DNA, 120 bp, synthetic construct
  source 1..120: mol_type = other DNA
cagaaacatctgtttacatatgtgatggaactagaaaaagctatgtgtttttaaaatcaacacccaaataagggccacccttacaatgacacagcagagcacagctgtgcccttcctgca

SEQ ID NO: 35438 - DNA, 120 bp, synthetic construct
  source 1..120: mol_type = other DNA
catccagatttatcagacaatttctcccctatcttgcttattaatttggtggaaactgagacatgctttgttgtttcttgcctctggaggggacagacccttaggtagaaaggaactgta

SEQ ID NO: 35439 - DNA, 120 bp, synthetic construct
  source 1..120: mol_type = other DNA
ttatatgaaggagaaaacagagagtattatcttgacgagtcatcttcctgtttcagttcgagaaatttggcaaagctgtgaattatgctgatgccgccctctccttcactgaatgtggca

SEQ ID NO: 35440 - DNA, 120 bp, synthetic construct
  source 1..120: mol_type = other DNA
gtgtttttaaactttattttgaggtaattgtagttgcacatgcagttgtaagaactaatacagagagttcctgtgtattcttcacccagtctcccccaatgggaacatcttgcttaacta

SEQ ID NO: 35441 - DNA, 120 bp, synthetic construct
  source 1..120: mol_type = other DNA
tttcactgcctttttgtcatttcactgtcttctgtgcctagaccccttagcttggacatctcctcatcccactcctaccttaagaataaatctttctatcaagaagtgacgaagtagctc

SEQ ID NO: 35442 - DNA, 120 bp, synthetic construct
  source 1..120: mol_type = other DNA
ttcagtttggggtatgtgccacctaacagtgagctgtggaactgcaacacactcggcaaattcaaaaaagacaaggacatcttcgttgatttttaagacataccatagatagggtaaacc

SEQ ID NO: 35443 - DNA, 120 bp, synthetic construct
  source 1..120: mol_type = other DNA
cagcttttgtgagctgccctgcaccaggcagagggggcccccaggcctggcacagggtctgacacatggcaaatgctacagaaatagctgtggaccgcctgactgcaagatcgtattgaa

SEQ ID NO: 35444 - DNA, 120 bp, synthetic construct
  source 1..120: mol_type = other DNA
aaaaagttttaaagtttgtttgcttttcactatccccatattggcattaaagagagccagtttatcaggcagcatttgaggtaaggaatgtccgtctctgggaccctatagatcctgggt

SEQ ID NO: 35445 - DNA, 120 bp, synthetic construct
  source 1..120: mol_type = other DNA
gcccgttctgggagaaagctggccagggctgccatgaacacatcagggccagggcgcaccttgcacccaaggagaaggccacccttgaaggtcaagctttcccatgagtggaaaaccaga

SEQ ID NO: 35446 - DNA, 120 bp, synthetic construct
  source 1..120: mol_type = other DNA
tgtgattagcagaaccaaactgtgatgtgcacatgtgtgttactgataagaccaggcctcccagctcttcttggtttccaatgcctgctaagtacatgaccttcttagggccattaacca

SEQ ID NO: 35447 - DNA, 120 bp, synthetic construct
  source 1..120: mol_type = other DNA
aagaacagacaatcattgtctcgcagttctggaggatggaagtctgaaatcaaagtggtggccaggttcgtttgttctgtgggctgtgaaagacaatctggtctgtccctttctcttagc

SEQ ID NO: 35448 - DNA, 120 bp, synthetic construct
  source 1..120: mol_type = other DNA
caatgtcggttttggacacagtgccacgggatgtgggccgcagatgtgggaaagaaaggcagggcagagagcagctaggtctggggcaggaacgctgtagctggtgatgccactcacaga

SEQ ID NO: 35449 - DNA, 120 bp, synthetic construct
  source 1..120: mol_type = other DNA
gttctattaggtgccacgtactgggctgggtgctcttggtgccttatctcccttcctcacagccatgtggaaactgaggcatctcaagagtctatgactgggctgaggttctggtttcga

SEQ ID NO: 35450 - DNA, 120 bp, synthetic construct
  source 1..120: mol_type = other DNA
cttctgtgcttccgcaggctacgggaggcccggggcgcttgcgaagatgaagtttggctgcctctccttccggcagccttatgctggctttgtcttaaatggaatcaagactgtggagac

SEQ ID NO: 35451 - DNA, 120 bp, synthetic construct
  source 1..120: mol_type = other DNA
tgtcattttgctgatgctgtcttactctctattgattgtgactttgagtaactgtgttgtcacatgggcaggccttgggctatggaagtgaaaggcattcatgtgtatctctctttgtgt

SEQ ID NO: 35452 - DNA, 120 bp, synthetic construct
  source 1..120: mol_type = other DNA
tttttttttggtgatttagcaaagtttctagttgttatccatgaggatgatgggcatttccccccaggtattgactgcagtggcccttctcttctgagccaggatgttatggtggttgta

SEQ ID NO: 35453 - DNA, 120 bp, synthetic construct
  source 1..120: mol_type = other DNA
ctagcaagtccaaaatgccttcagtcagagtaggcgtgcccaataaatactgtccacaaaattctagagtctcggtatcagggcaaccagtggcttaactcatcatctgctgtatttgtc

SEQ ID NO: 35454 - DNA, 120 bp, synthetic construct
  source 1..120: mol_type = other DNA
gagcacagctgactatggtatgaggaccagtggccctgtggaaagcggtctcagtgctgactcgctgcagcttctttgtagctatgcagcaatcaagaatagtgctgagctcttgatggt

SEQ ID NO: 35455 - DNA, 120 bp, synthetic construct
  source 1..120: mol_type = other DNA
ttaggaggggaatttctgagcaccatccgtctgtttgcgtgttctgtccccagcttcagataacaaactcaataaaatcctactacaaatatgcaactgactgcgaaaatactctctcaa

SEQ ID NO: 35456 - DNA, 120 bp, synthetic construct
  source 1..120: mol_type = other DNA
tcctctgctatgttatcttgtcccaattcacaaaataacagggatttccccatgtgactcaaaagcaagaatcttactcctaaataacataaacagcaatatgtgtgactactgtcattc

SEQ ID NO: 35457 - DNA, 120 bp, synthetic construct
  source 1..120: mol_type = other DNA
aaatgagagcatgcctcatgccattcctgcctggggccacctggggctgagaacaggtgacaccagtgtctgtgaggtcctttcttttttgagagcgtggaggtaccttcttaccttcag

SEQ ID NO: 35458 - DNA, 120 bp, synthetic construct
  source 1..120: mol_type = other DNA
aacgataccaagccccttccctcggtcagcccaggatgcagatatcacgatccgcttgcctgaccgccatgcccggaacttcccagggtccactgcaggggcagtgactccctctatggg

SEQ ID NO: 35459 - DNA, 120 bp, synthetic construct
  source 1..120: mol_type = other DNA
agcgaggcccccgctactctctgacccccagtgtgggagtcactggccgtacatccgggcacctggggcttccctgggttgacaacaggggcggaaccagattctgccgcgggagagttg

SEQ ID NO: 35460 - DNA, 120 bp, synthetic construct
  source 1..120: mol_type = other DNA
agtcccctctcaggagggttctcctcctggctcctggctctttgatgaagtgatgtgtgggagatgatctgtttatgtcacctttgagcatttgcccagctgcacgcgttgcagagaatg

SEQ ID NO: 35461 - DNA, 120 bp, synthetic construct
  source 1..120: mol_type = other DNA
atctgtttatgaatctaggagagcgagcctgggagaatgagttaaacaattgcccattttggatgcattggaagagttgagataagatggtgattcattttcccttgccacttggctgaa

SEQ ID NO: 35462 - DNA, 120 bp, synthetic construct
  source 1..120: mol_type = other DNA
ggcactttttaacccaatgacaaagccagacgtgatctcatctgtatgtaaagtgaagatcctgttatataaaggcaccgccatgacaaggaatggccagtaacacagagtcattgtgaa

SEQ ID NO: 35463 - DNA, 120 bp, synthetic construct
  source 1..120: mol_type = other DNA
tgactgacactcggaagcacagaacaaagggtaggacggtgcccatgggtcaggctgtagccacgccaccctttccaccctgtcctagccagaggcagcaatgtgctccatacagatcct

SEQ ID NO: 35464 - DNA, 120 bp, synthetic construct
  source 1..120: mol_type = other DNA
agaggaaggcggagagagtgcgtcccagtccacttaagctctgtccccggaagtggcatctaatctggcatttcgatatttaatttgggaggtgggagcacatacttcccagggctctgg

SEQ ID NO: 35465 - DNA, 120 bp, synthetic construct
  source 1..120: mol_type = other DNA
gagggcggtagtcatgcacgggttggccaggagggggcctgaactcatggagccaccttaaagccactttcccagtcccactactcctctctgtaggctactggagtgtcagctcggtgc

SEQ ID NO: 35466 - DNA, 120 bp, synthetic construct
  source 1..120: mol_type = other DNA
aagagggaacatcagcaccgccagaaaaaggcaggaaaccacctatccctggggaaagctcgaaatgagcttttatgtccctcttcagagctcggcaatagcctatccacttgaaaagtt

SEQ ID NO: 35467 - DNA, 120 bp, synthetic construct
  source 1..120: mol_type = other DNA
ccgggaaatgggacacaactgtcaccctgtgcacacacacaagatctcaccccaacagactctcttcacaggcaacattcccacaacctgctgggggtactttggcaacacaaatgggaa

SEQ ID NO: 35468 - DNA, 120 bp, synthetic construct
  source 1..120: mol_type = other DNA
tggttgtagtttgtcttccctaacctgtaatggcgttgagcatcttttcctgtgctttttcgccatgtgtatatccccttcgcaaattgtcaactcttttgccaatttttaggtgtttct

SEQ ID NO: 35469 - DNA, 120 bp, synthetic construct
  source 1..120: mol_type = other DNA
agtgttctggtaattccttctgtctccttttccccctccttaaatggtgatgctccgcagagccacaaactcagtcttctctcccgactaggaagacagacacacaaacacacatatttt

SEQ ID NO: 35470 - DNA, 120 bp, synthetic construct
  source 1..120: mol_type = other DNA
gagcttcccaaaagttctcagtacataggtacatggggaatttagtaattcctccatagacctctaggccaaaagaaatccctaatgtggctgggaatgccaacagttgcactgatttaa

SEQ ID NO: 35471 - DNA, 120 bp, synthetic construct
  source 1..120: mol_type = other DNA
tgggaggttgtcaagctcatggtagcagatacaacttttcaaaaattctggttttcccatgaaagatcaaattttaccatttacaaaaaataccatgagttgttttccttgaagttttgc

SEQ ID NO: 35472 - DNA, 120 bp, synthetic construct
  source 1..120: mol_type = other DNA
gatgtcagatttgtgtattggagtcacgtggagaattctagaatgggagctgttgactccttagaacaaacacccggaggagtttgccataaaactgctggcactgggaacttttcaagt

SEQ ID NO: 35473 - DNA, 120 bp, synthetic construct
  source 1..120: mol_type = other DNA
aaatatcgaaatgccagattagatgccacttccggggacagagcttaagtggactgggacgcactctctccgccttcctctgccccctcgttcaccccgcagaccagaaccagtactgga

SEQ ID NO: 35474 - DNA, 120 bp, synthetic construct
  source 1..120: mol_type = other DNA
gctagttcctatacgtcccactggatcctcacagccccgggaagcaggtgctactactcttatccccgggaggagacagaggccgagagaggttaagtgacgtgcccaagtcacacagct

SEQ ID NO: 35475 - DNA, 120 bp, synthetic construct
  source 1..120: mol_type = other DNA
aagtacagttttctcatgtgtttcttggactttatgcatatgcctccagagtttgaatcatgcaaagatgctgccacttaaaaacctctttcctacaaacttacacccctccgatcgtgg

SEQ ID NO: 35476 - DNA, 120 bp, synthetic construct
  source 1..120: mol_type = other DNA
ggaacagaatatggcaaagatgtaaatgctacttaaattaaatacagagtgagtgccttaactgtcattgccaaagtgacaaccaagctcaggttgctgtgctctgctccccaaatcaac

SEQ ID NO: 35477 - DNA, 120 bp, synthetic construct
  source 1..120: mol_type = other DNA
ctaatctggactctgctgtgttcgataccttcaaaacacatggcttctccaaatctcttgctgctgctcagcctcttccgtgtaaaaataaatcttttaggacaaaaggtttgcaaagtc

SEQ ID NO: 35478 - DNA, 120 bp, synthetic construct
  source 1..120: mol_type = other DNA
gaaggaggactcccaggatcagcaggacccaaggtgtgcccccttcatgaggaatggaggtacccccaacgcagaaagaagccaccccacagagtctaggtgaactctgttcttagatct

SEQ ID NO: 35479 - DNA, 120 bp, synthetic construct
  source 1..120: mol_type = other DNA
aatttagacatctcttactgtacttccgaggaaaccctgggcaggtgtgggcagatgttggttggggcatgtccttctgttccatatcagggatgtgagctcctgatctgagagactctc

SEQ ID NO: 35480 - DNA, 120 bp, synthetic construct
  source 1..120: mol_type = other DNA
atgttccaagaagcactgaaattgaaggtggctgagttggttcatttcctgctccacaaatatcgagtcaaggagccggtcacaaaggcagaaatgctggagagcgtcatcaaaaattac

SEQ ID NO: 35481 - DNA, 120 bp, synthetic construct
  source 1..120: mol_type = other DNA
aagttatctcaggtgggatttgaccaattgtgagcaaaggctagatttcgagtgttaacaaaataagtgaaaacagagtctcggatccaaaagcaggtgggagagaggaaaggagttgat

SEQ ID NO: 35482 - DNA, 120 bp, synthetic construct
  source 1..120: mol_type = other DNA
attgacttcgggcctttcggcttgtctgatctacttaaagatctaacttttgattccatcagtattatttattgtttttctaaaacttctgaaatctcaatttcattaatttttctcttc

SEQ ID NO: 35483 - DNA, 120 bp, synthetic construct
  source 1..120: mol_type = other DNA
tgctttcttcagccattttctgcttacaaagacaacttcttctgctcagatcattggaacactcattgtacttgagtaaggttgtaagtctgagagtctgaccatgtgggcctattctgg

SEQ ID NO: 35484 - DNA, 120 bp, synthetic construct
  source 1..120: mol_type = other DNA
ataggagctcacaataattgttctgttatcactgttctaatgtggagccatgtccaaggatgctaaaccccactgagctcctggtgacatagaacttgcctcatccaacatgtattgagg

SEQ ID NO: 35485 - DNA, 120 bp, synthetic construct
  source 1..120: mol_type = other DNA
cagtgtacattctgtgacttaaaacaaaggacaatggtcgctaatggtcctatagaagccacatgacatagtgtgactaaatcaaatcaataccagctcttggctgaatgccaccgtgta

SEQ ID NO: 35486 - DNA, 120 bp, synthetic construct
  source 1..120: mol_type = other DNA
gtcacatttacatcttcggctactacctggatggaaggcacagggattcttagtagtctggtttactcagataatggtagtgtaatgtctttgtacaatatctgttactacgctctgttg

SEQ ID NO: 35487 - DNA, 120 bp, synthetic construct
  source 1..120: mol_type = other DNA
gtctacaaaaaactttgctgagattttgatgagaactgcattaaacctacaggtcaattcaagaattgacatctttactatgttgagtcttctaggcagtaaacatagtatgtctcctct

SEQ ID NO: 35488 - DNA, 120 bp, synthetic construct
  source 1..120: mol_type = other DNA
ggatacatgcacaggagtctttatttcttacaaaagcattttgtaactttctggatgcagatcctatacacattatattatattaaatatctaagtattgcattttctatgcagcagttg

SEQ ID NO: 35489 - DNA, 120 bp, synthetic construct
  source 1..120: mol_type = other DNA
attttatttctggccattttgatcatcacatacttttccatgtatatgtcagtcaaatccatccccttctttctaaaattatcaccccgtgcttgctcagcacccactccacccacagtg

SEQ ID NO: 35490 - DNA, 120 bp, synthetic construct
  source 1..120: mol_type = other DNA
cttccagaggaatgtacttcttgctctatctcagcatcccttatctcatctcttattgtgacagctacagagacttcaactaatttgagttatagtgagaggattttgatctagaaagtg

SEQ ID NO: 35491 - DNA, 120 bp, synthetic construct
  source 1..120: mol_type = other DNA
gagatgggatttcacatgaagtctctaagcgcaacactacggtttttttcctattattctaaatccatctaaagagtggaatgtattaaggaagacaacttaaatgtgaactcttcacaa

SEQ ID NO: 35492 - DNA, 120 bp, synthetic construct
  source 1..120: mol_type = other DNA
ttctaaggagggcagcctcaggcctgccatgttaattcttctgcacacttttcttttatagcttctgagctttctatcccaattaggaagatcttccctactcagacttctaaggaatta

SEQ ID NO: 35493 - DNA, 120 bp, synthetic construct
  source 1..120: mol_type = other DNA
ggagtagcatttcctaacatggcaccacaaagagaataggggtcgggaggccattgcctatggcccgactgaaatttacaacttgatgagggtctttctcaataataaataatttttatt

SEQ ID NO: 35494 - DNA, 120 bp, synthetic construct
  source 1..120: mol_type = other DNA
ctttccatctttcagtattaagtcgttcagtctttcatgcaggtttatttaggaatagccaatttattatctaaccattactggatatgacctctttggacctagataagaggtggttag

SEQ ID NO: 35495 - DNA, 120 bp, synthetic construct
  source 1..120: mol_type = other DNA
aactatttgtgtctttatatttaaggtgagtttcttttaggccacatatagttggttctttcttttgtctccaaactgacaatctctgccttctaattggggtgtttagatcatttacat

SEQ ID NO: 35496 - DNA, 120 bp, synthetic construct
  source 1..120: mol_type = other DNA
tcccaaagtgctaggattattggcccaaagtatattcttaatctgccagttcttaactgccttacagctataagcctagctcaagcccctactgtctcacactcctactgtctcacatct

SEQ ID NO: 35497 - DNA, 120 bp, synthetic construct
  source 1..120: mol_type = other DNA
aacaaaaaaaaaacaaaaaaatacacacatacaatcattgctgttggagaaagcataaccaacaggaagatgggggtcactgtgtgcagccagatcaacagagaggtcccctccgctatg

SEQ ID NO: 35498 - DNA, 120 bp, synthetic construct
  source 1..120: mol_type = other DNA
tgtggttactactggaaatattaggtcttttgagctcaaccacattccttaaaaattgtagataactttcacaagaattatacaatgtgcatgaagtttttccaatagtttcttttcata

SEQ ID NO: 35499 - DNA, 120 bp, synthetic construct
  source 1..120: mol_type = other DNA
tctctttcccttcttataaagccactagtcccactcccatgataacctactaatccattcacctattaatccatgaatgggttaattcattcatgagggcagaaccctcatgacccaatc

SEQ ID NO: 35500 - DNA, 120 bp, synthetic construct
  source 1..120: mol_type = other DNA
cttttgcttcttgctatgagaataactgggatcagacccgcctttccactgtaaatcataaaatgaacaaaacccatgaggcaaaatcagcactgaacaagaaagtagtgagagcctgca

SEQ ID NO: 35501 - DNA, 120 bp, synthetic construct
  source 1..120: mol_type = other DNA
cctgagctcacatattttccaccagctgggttcgcttctattgtcaggaagcttggagcataattcacgttcaattacagtgtttcccttaatccctttttctgatggggacataggata

SEQ ID NO: 35502 - DNA, 120 bp, synthetic construct
  source 1..120: mol_type = other DNA
tactgctcatctccccttgctattatgcccatctggaacccctcttagatatatactgtgccttcccattttgtccttcatgtctcataacctcttgtttcatattttctaacccatttc

SEQ ID NO: 35503 - DNA, 120 bp, synthetic construct
  source 1..120: mol_type = other DNA
actgagcacagatggagtgatcatttgtgtggctgaaaacatctcttctcttcttggacatttaccagtaagttctttctacttttgggaaagtggatcattctggtttgttgtttaggg

SEQ ID NO: 35504 - DNA, 120 bp, synthetic construct
  source 1..120: mol_type = other DNA
gaaaaagagaggagttagggatgacgtgagcaactgggaggataatgttgcattaactaagatgggaaaaattatgggaagaactcgcagcttagggatgttttcttccttctttccttc

SEQ ID NO: 35505 - DNA, 120 bp, synthetic construct
  source 1..120: mol_type = other DNA
ttgtttatatgcatggtatccagcatagttcagggcaaatagcaattgttcccaggcccgacttccagccttgaaagataattattttccaagaatctcatctcttttctgtccctctcg

SEQ ID NO: 35506 - DNA, 120 bp, synthetic construct
  source 1..120: mol_type = other DNA
catgaatgtgaattccttagggtgcttccaaaaacaggagtctgcctgatctgttggacattgcctttttggtagcccgaatatgaggaattcaggacaggaaagtgtctttttgtcaag

SEQ ID NO: 35507 - DNA, 120 bp, synthetic construct
  source 1..120: mol_type = other DNA
actttccactgacttctcaaccccaccgtgttctgttgctctctctctcacttgctctccttccctccctcctttctgtctcacatttacacacacacacataacacacacaaaatcaat

SEQ ID NO: 35508 - DNA, 120 bp, synthetic construct
  source 1..120: mol_type = other DNA
gagcacatggagcggtaaaggaattaatagtatcactggagtcacaggccagaaggaagcttaataaatagcataaaatatccaagttagtctgggtgcagtggcttatgttgtaatccc

SEQ ID NO: 35509 - DNA, 120 bp, synthetic construct
  source 1..120: mol_type = other DNA
aaatcctaaagaccccaacaaacaattgtcagaactaataaatggactcagtaaagttgcaggatacagaatcaacgggaaaaattcagtaacatttctacacactatttaaaaaataca

SEQ ID NO: 35510 - DNA, 120 bp, synthetic construct
  source 1..120: mol_type = other DNA
aaagtcaaaatttcttcttgatcaatgggctgaagaatggatgttgtattgtaaggatgaaaacaacattcatcttgcacatctccatcaaagctcttgggtgaccaggtgcattgtcaa

SEQ ID NO: 35511 - DNA, 120 bp, synthetic construct
  source 1..120: mol_type = other DNA
cataccttccagcccctggtaaccaccattctactctctgcttctgtgaaatcaccttttttagattaatccacatgtaagtggcatcatgaggtatctgtctttctctgtatgccttat

SEQ ID NO: 35512 - DNA, 120 bp, synthetic construct
  source 1..120: mol_type = other DNA
ggcatagttaacattgtactaccgtcattatcagaattcccattgggtgactctaagtaaaaagtttataggtctctatgtacttcccatgagtttattatttgcgacttcccatgagtt

SEQ ID NO: 35513 - DNA, 120 bp, synthetic construct
  source 1..120: mol_type = other DNA
acttgctaacaaccaagctgtctgttatctggtggtgttaagcaacctttcctgaaaccattcacactgaaaacagatgaccatatgtactgggtgataagactgccatcacatgattgt

SEQ ID NO: 35514 - DNA, 120 bp, synthetic construct
  source 1..120: mol_type = other DNA
cccttcacatacatcttccccccaggaagagactacctggaccattacatttcagaatgagataatcaccttgtgtgtatttaacagtattatgccccatcttattctcagtgactttag

SEQ ID NO: 35515 - DNA, 120 bp, synthetic construct
  source 1..120: mol_type = other DNA
ttgaatagattccatttaagccatgtcagttatcctgctcaaagccctttaatcagtcccactctttctagaataaagaccaacagccttataatggcccactccagcaatcccttcaaa

SEQ ID NO: 35516 - DNA, 120 bp, synthetic construct
  source 1..120: mol_type = other DNA
agaattagctgaataatgctgcatggaggattcatagaagggagaaaaacacacatgcactcacacgtgcacgcgcacaccatatccagtgtacaaaatggaaattatttcaaggaagca

SEQ ID NO: 35517 - DNA, 120 bp, synthetic construct
  source 1..120: mol_type = other DNA
aaaaaaaaaattctttcaacagaacacaaagactgaaataggaggtcactacaaccgcgggagctgccgccccgccctgcagggagcacctggcctgggacccgcaggcattctctacaa

SEQ ID NO: 35518 - DNA, 120 bp, synthetic construct
  source 1..120: mol_type = other DNA
gctttgcccctggtatcaagtcacggaagctccgggaatggcggccaggcacgtgagtcctgaggttcacatctacggctaagggagggaaggggttcggtatcgcgagtatggccgttg

SEQ ID NO: 35519 - DNA, 120 bp, synthetic construct
  source 1..120: mol_type = other DNA
gatttccttgacttctttgagaatgcaagcgaaattaaatctgaataaataattcttcctcttcactggctcgtttcttttccgttcactcagcatctgctctgtgggaggccctgggtt

SEQ ID NO: 35520 - DNA, 120 bp, synthetic construct
  source 1..120: mol_type = other DNA
aattttatggaagaagcttctgtttggggctaattattccatgtcctattgagctgtatattctctggtaagtcctggagaacaacgacagcaacaacaaaatcccggagtgttagggcc

SEQ ID NO: 35521 - DNA, 120 bp, synthetic construct
  source 1..120: mol_type = other DNA
ttgatacctgaaatcagactttcacagggcgtccttttggaattcgcctctgaatacatgcacagataaatggtcaaagagcaaaccatccctcatgagtactagatgagaaaaaccttg

SEQ ID NO: 35522 - DNA, 120 bp, synthetic construct
  source 1..120: mol_type = other DNA
atgttcactttattttcatcaccatggggcacactctttggggtgtaaaatgtactctacaccctgttggctatttatctggggttagacctctggagacttttcagatagacttgaagt

SEQ ID NO: 35523 - DNA, 120 bp, synthetic construct
  source 1..120: mol_type = other DNA
gcacaaagagtgaagcttaatgtatgtaaagtttaaaagtaacttaagaggttggagaatcacgggacggcaggtagaatgttccacacacacacacacacacacacacacctagttgta

SEQ ID NO: 35524 - DNA, 120 bp, synthetic construct
  source 1..120: mol_type = other DNA
gtgctctgcttcccaaatcaaccctgtaaatttatagaatggaaacagaaagtaaaacaccagtatcagcaagaaaatctacacaacaaaacagggaaagcccagagtgagactggagac

SEQ ID NO: 35525 - DNA, 120 bp, synthetic construct
  source 1..120: mol_type = other DNA
agcacgcggatcctgacgttcacatgtacggctaagggagggaaggggttgggtctcgtgagtatggcctttgggatgcagaggaagggcccaggccctcctggaagacagtggagtcct

SEQ ID NO: 35526 - DNA, 120 bp, synthetic construct
  source 1..120: mol_type = other DNA
atagaaatctgccctgcccctgcggttacttcagagaccctgggcagggctgtcagctgaagtccctccattatcctgggatctttgatgtcagggaaggggaggccttggtctgaaggg

SEQ ID NO: 35527 - DNA, 120 bp, synthetic construct
  source 1..120: mol_type = other DNA
tctactctagtggaagttaccctgggggaggtgcctgctgccgactcaccgagtcctccccacagtcctcagggagcctccagcttctcgactaccatcaactacactctttggagacaa

SEQ ID NO: 35528 - DNA, 120 bp, synthetic construct
  source 1..120: mol_type = other DNA
gtttaggggtaagagtcctgttttttattcagattgggaaatccattccattttgtgagttgtcacataataacagcagtggaatatgtatttgcctatattgtgaacgaattagcagta

SEQ ID NO: 35529 - DNA, 120 bp, synthetic construct
  source 1..120: mol_type = other DNA
ttaaaaaggcattctaactaggttatctcaagtgcaatttgaccaattgtaagcacgggctagattctggatggtaacaaagtggatgaatatagtggtttggatgggaaagcagctggg

SEQ ID NO: 35530 - DNA, 120 bp, synthetic construct
  source 1..120: mol_type = other DNA
gaagccatatgatgtcaaaaacccttttgtataaaaactcacacggggacagtgacgcttagacacttggttaccactctggttgtcttcaacacactctctaatcgttttctgaatggg

SEQ ID NO: 35531 - DNA, 120 bp, synthetic construct
  source 1..120: mol_type = other DNA
agagtggagagcccctgccaaaccgcatcagaacttatttgcacataaaataaacttctgttgtgtcaagccattcatggttgttctgttgcatcagctagcaattacttaaactgacac

SEQ ID NO: 35532 - DNA, 120 bp, synthetic construct
  source 1..120: mol_type = other DNA
tatccctacccctacccccaacaccatcttcatgcttacctccacctccatctggatccccatccaggaagaatccagttccacccctgctgtgaacccagggaagtcacggggccggat

SEQ ID NO: 35533 - DNA, 120 bp, synthetic construct
  source 1..120: mol_type = other DNA
cctagagtcagcagtaaaataatacacaacattgttaattgtggtgacctctgcgggggggcggggggtgttgttaactgtggaggagctttgtaaaaaaaaaattgtgaattatctaca

SEQ ID NO: 35534 - DNA, 120 bp, synthetic construct
  source 1..120: mol_type = other DNA
tctaatactcatgagagacggtttgctctttgatcatttatctgtgcatgtattcagaggcgaattccaaaaggacgccctgtgaaagtccgatttcaagtatcaaggtggttccaaatc

SEQ ID NO: 35535 - DNA, 120 bp, synthetic construct
  source 1..120: mol_type = other DNA
tcttccataaaattcagttaagtatttcctcttagagaatgcacttcaaaatttggttgtgcgggagttttgcccagccaggtgcagctcaaagctcctagaatgtgagtcaaagaccaa

SEQ ID NO: 35536 - DNA, 120 bp, synthetic construct
  source 1..120: mol_type = other DNA
caaattgccccagctcagggcatttatactcaccactctcacctggaaccccacaccctcacccctgtcttacatttccactacatcctagaggacttctcgccaccttaattacatgac

SEQ ID NO: 35537 - DNA, 120 bp, synthetic construct
  source 1..120: mol_type = other DNA
gcatgagcagcttcctgggatgtgcgaagacactgtcctccctcccctcaaacacctccaacatactcagctcctcccagattttctcctcaggggcacagtcgccctctattgcgatta

SEQ ID NO: 35538 - DNA, 120 bp, synthetic construct
  source 1..120: mol_type = other DNA
atgcttggcagatcctagaaccactgcatctgtcgaccagatgggggcccctgtgttgacctgagtcaccttctgaaaacaaggtcatcaactccctgagatctggaaacagaagtgagg

SEQ ID NO: 35539 - DNA, 120 bp, synthetic construct
  source 1..120: mol_type = other DNA
cctcatccaattagttgaaggtgttaagagaaaagaccaaggtttcctggaaaaggaattctaccacaagactaacataaaaatgcgctgtgagtttctagcctgctggcctgccttcac

SEQ ID NO: 35540 - DNA, 120 bp, synthetic construct
  source 1..120: mol_type = other DNA
cgtttttcagatatcttggtgtttggttttgagtttaattatattatggcctaagaagaggctatctattatttctattcttttcaatttgtaagctttgtttgatggcccagaatacca

SEQ ID NO: 35541 - DNA, 120 bp, synthetic construct
  source 1..120: mol_type = other DNA
agatgccttctccccaggcccaaacactgtcatggaggtgaggatgctcccaacaggatgcttcctgtattggaccccacacgtccccatcagtttaacaaggaaagctgccacctgcac

SEQ ID NO: 35542 - DNA, 120 bp, synthetic construct
  source 1..120: mol_type = other DNA
atcctccctcacgggctgagggtctcctgtctgctctcattacctggctcctcttcagtctcaccaaatccttctcaaagcagagaagaaatgtcctgtccacatttcagaattttaaat

SEQ ID NO: 35543 - DNA, 120 bp, synthetic construct
  source 1..120: mol_type = other DNA
attcgaaagaaactgctcagagttgctttccattccaggcttttctcccacactctgagaatctggctctgggcccacccaacttcattagagtcagctccttcagaaggaactgaagtt

SEQ ID NO: 35544 - DNA, 120 bp, synthetic construct
  source 1..120: mol_type = other DNA
ttgctcagggcgagaatctcgcggtcttctgacctccaatgcgcaagtcagtggcgtcacatcctggcaacggtactaccctgggttccgggcaggggtggaactggattctgcctggat

SEQ ID NO: 35545 - DNA, 120 bp, synthetic construct
  source 1..120: mol_type = other DNA
gttctagaagagatgagataagatggtggttagttttccctgatcatttggtagaattggcctccaatactgcctaacctggaatgtttgaaggtggcttgagctttgaacattgtacag

SEQ ID NO: 35546 - DNA, 120 bp, synthetic construct
  source 1..120: mol_type = other DNA
tctgtcgttgaactttaagaattcgtgtatgttgtagagatatgttctttatcacatatgtgtaccaccgatgttttctgctagtctgtggcttctgttttcattctcttaacattgtcc

SEQ ID NO: 35547 - DNA, 120 bp, synthetic construct
  source 1..120: mol_type = other DNA
tcaggggactggtgattttgctcccagtcttagaaacagtgtggaaccatcaggtgctgactgagaattgaaggctgatgtgggccaagtgggattagagaccaatgagtgttgcctgga

SEQ ID NO: 35548 - DNA, 120 bp, synthetic construct
  source 1..120: mol_type = other DNA
gatctcagggtaggaaacgctgtactacggtttgaacgttgtgtccctgccaaaattcatgttgaaagttagtccctaacgcagcagtgttaaggggtgagacctttaggaggcaatgag

SEQ ID NO: 35549 - DNA, 120 bp, synthetic construct
  source 1..120: mol_type = other DNA
gtggaggcagggagaacaggaggcagggcgggccaaggaccacggagatgagaagggtagcagtcttggagcagagtcaacaaaatccaatgatgggttagatttgggagtgaggaacaa

SEQ ID NO: 35550 - DNA, 120 bp, synthetic construct
  source 1..120: mol_type = other DNA
caatatgtggtataagccgtgacaagtctaacactaaaggttcgatagacagacactctcacagcagaggtaaagagcagcagtttgcctgaatgagaacaagcagtcttggccctcaag

SEQ ID NO: 35551 - DNA, 120 bp, synthetic construct
  source 1..120: mol_type = other DNA
tgtcatctgcgagatgaggaggaaaggagcaaaggagattcacagaagaggaaccaggaacggccagtgagaggatgcacgacctcgccaccgctcggggaaacgcaaggcacacagcga

SEQ ID NO: 35552 - DNA, 120 bp, synthetic construct
  source 1..120: mol_type = other DNA
acaaattgagtagcccactccgcgcggactacctttccaggcacacactcaggcagagacccagactcgggacttgcggctgcaaaacggacgaggcccgggcatacttgggtgctgggt

SEQ ID NO: 35553 - DNA, 120 bp, synthetic construct
  source 1..120: mol_type = other DNA
acccggaccaggagggaccctgccccgggaaaaggtatcagacccacccggggagggggacgctgggtcccgggagactccgccgcccctcgcctgtccgccctaacagaactgaagcag

SEQ ID NO: 35554 - DNA, 120 bp, synthetic construct
  source 1..120: mol_type = other DNA
tttgaggtctggctagaccacaccaccgaaatgctgcatgtgtggcagggggtctcggaaagggagaggaggaggaggctgctggaaggcttgcgtgggaccgccctgcagctcgtgcac

SEQ ID NO: 35555 - DNA, 120 bp, synthetic construct
  source 1..120: mol_type = other DNA
ctgtgagcttcctgggagcccaggttgtgctcactgctctcccgtatcgtgagcaccacctctgctttccctgcgtagatctaggccaggggctgcttgtttttgtggagccgtgtgtgt

SEQ ID NO: 35556 - DNA, 120 bp, synthetic construct
  source 1..120: mol_type = other DNA
gccttttgttgtgcagaagcttttcagctgtatgcactgtatttgtctatttttggtcgtttttgctgcctgtgctttcaaagtcttaggaattctttgcctagaccggtgtcaaagaga

SEQ ID NO: 35557 - DNA, 120 bp, synthetic construct
  source 1..120: mol_type = other DNA
taaagtaggcataaaaagacaaatatcacatgtcctctattatatgtgggagctaaaacatctgatcgcgtggagctagagaatggagaggtagagaatggagactgggaagagtgagtc

SEQ ID NO: 35558 - DNA, 120 bp, synthetic construct
  source 1..120: mol_type = other DNA
gggtgaggaacaatgggcaaaggctgccagagcccttgctgtactacagactctttgtgagatcatataattgaatgtggtttcctacagtaactttactgaaaattatctctcgtttca

SEQ ID NO: 35559 - DNA, 120 bp, synthetic construct
  source 1..120: mol_type = other DNA
acagacattcaagcaaatacatgtgtatgaatgtccctaacagcaccatggacaacagccaaataggagcatcccacattaccaccaacagataaatggatgaacacaacatgatggatc

SEQ ID NO: 35560 - DNA, 120 bp, synthetic construct
  source 1..120: mol_type = other DNA
tgttcaacattgctcatcatcaaggaaacaccaatgaacaccagggtgagatagcaccttaccccggccagaatgaccacgattaaaaactcaataaacaatagatgttggtgcaaatgt

SEQ ID NO: 35561 - DNA, 120 bp, synthetic construct
  source 1..120: mol_type = other DNA
tgacaaccaaggtaaacgtttctttcctggcggcagacacacatcgcaaggatatttacagagcggacagctggaatagctgtaggaacgtcaagactagtaggtgtctgctatcgatgt

SEQ ID NO: 35562 - DNA, 120 bp, synthetic construct
  source 1..120: mol_type = other DNA
aattgttcactaattgcatcctctactgatgcatgcaattagtgaacagaataaggggaaaactggaccgataccaattctcacccaatggtgctacaagtgcactgcaaaccctaggaa

SEQ ID NO: 35563 - DNA, 120 bp, synthetic construct
  source 1..120: mol_type = other DNA
atctcatagatcccggtatgcggaagtagatcaatatttgcacatcgtgatctagctggatctgcaatatagacaggtaaaggtaaacctagacagacatagatgtagacctgtctagct

SEQ ID NO: 35564 - DNA, 120 bp, synthetic construct
  source 1..120: mol_type = other DNA
aaactaaatggagaagaaaacagcatttgtactggaagcagaaacatttgcaggaatgtgtagaggcagtgagcatggattctatgcatcaatgccaggctccttgagtttccaacgtgt

SEQ ID NO: 35565 - DNA, 120 bp, synthetic construct
  source 1..120: mol_type = other DNA
attgttaaaattaggagaaggccttgggtttgctgtgtaataaagcttctgtggaccttctgtatgatcccaaatacttgccatctgtctatccctctgtctaagactcacttgtcacgt

SEQ ID NO: 35566 - DNA, 120 bp, synthetic construct
  source 1..120: mol_type = other DNA
aagcgccctgcgaggttacaggtcttgggcgcacagggccattgcccctaccccaggctgcctgtacagtgacaggtcacgggcgcacagggccattgcccctgctcgaggcaccaagca

SEQ ID NO: 35567 - DNA, 120 bp, synthetic construct
  source 1..120: mol_type = other DNA
cctattgcagatgccctgcgccgtgacaggtcaccagtgcgcagggccattgcccctactccaggcactctgagcggttacaggtcacgggcacgcacggccattgcccctactccaggc

SEQ ID NO: 35568 - DNA, 120 bp, synthetic construct
  source 1..120: mol_type = other DNA
gcattgcccctactccatgtttactgtgcggggacaggtcatgggtgggtatgggcattgcacctactccaggcgccctgcttggtggcaaatcaaggaaatgcagggccattgctatta

SEQ ID NO: 35569 - DNA, 120 bp, synthetic construct
  source 1..120: mol_type = other DNA
gggccattgctcctactccaggcgccctgggtgatgacagctcaacggccattgcccctactccagggaccccgcgaggtgacagttcgccagcaaacacggccattgcttctactccag

SEQ ID NO: 35570 - DNA, 120 bp, synthetic construct
  source 1..120: mol_type = other DNA
catggccattgctcctactccagttggaatgcaagcacatgtgttgcaaagcccccgagcctgccaggattccctgacgctttcgcggcatgtttgtgagaaaaaggggaagaaaagggc

SEQ ID NO: 35571 - DNA, 120 bp, synthetic construct
  source 1..120: mol_type = other DNA
tttccggggctctttcctggactattatgccgcagacatcagctacccaatcaggagagccatccaagagggagacctgcagattgactttccaaaggtgaattatggcgacctggaaga

SEQ ID NO: 35572 - DNA, 120 bp, synthetic construct
  source 1..120: mol_type = other DNA
ttcatcgcaaactcgtgaagagctattttgttaaacgattgcaaccccttgcgattccctcaacgtctttggatgtgtagttgtcccgataggtttgaaagacaagagcattgattttca

SEQ ID NO: 35573 - DNA, 120 bp, synthetic construct
  source 1..120: mol_type = other DNA
ggggccggcccttggtggaataatattaaacagatgcaattcagacctaagttgtgaagcccacagattgctaggctaacttgaaacaagatggtttttgaggataagtgttatggaaaa

SEQ ID NO: 35574 - DNA, 120 bp, synthetic construct
  source 1..120: mol_type = other DNA
gaagaccgacttcaggtgacatagaaacagacgggaatgtggtgactcaggtgacaacctaatctttaaggtaacaaggatgcactgcttccctctgtcagtgagaaattctcaccagtg

SEQ ID NO: 35575 - DNA, 120 bp, synthetic construct
  source 1..120: mol_type = other DNA
aaaaattgcttgtcttacctaacatccatcccgctaactttcatcgctctgacaagcgcgaagtttgaataggaaagatcacagcacagaagagaaatacggtttctgtttgggtgggaa

SEQ ID NO: 35576 - DNA, 120 bp, synthetic construct
  source 1..120: mol_type = other DNA
agttcataggcccagagcttattgatggaagtggaggtcagaaacactcagccacacattctcccagaaaacctgtggctatttaccaacataaataatgcagttctgtctaaagttctt

SEQ ID NO: 35577 - DNA, 120 bp, synthetic construct
  source 1..120: mol_type = other DNA
gcaagtgagatcagtgtgagggtggtccaacacgaaaatcagacaacgtaatacaccacattaataaaatgaaggaaacaaaccacgtgattatctcaaatggtgtggaaaaagcatctg

SEQ ID NO: 35578 - DNA, 120 bp, synthetic construct
  source 1..120: mol_type = other DNA
aagacagtgtggtactgccacaaatctaggcatacaaatcaatggcatagaattgagagtgcagaaataaacacctccatgtttgatcattgattttcagtaaggctggcaaggctaccc

SEQ ID NO: 35579 - DNA, 120 bp, synthetic construct
  source 1..120: mol_type = other DNA
ctcctggaaaagggtctcaattcccggtaggccctgttttccagcacaggctgtagggtgcagcgccaaggctggacccaggcttttgttacatttgtccctcctgcttcacccacagct

SEQ ID NO: 35580 - DNA, 120 bp, synthetic construct
  source 1..120: mol_type = other DNA
ttgctgtcaccatctccttagcttactctgtcaaggtaatcataaaacttacagttgatactgtttacagactcggaaactggggtaagaagtcattgggcgccttggtggcagtataaa

SEQ ID NO: 35581 - DNA, 120 bp, synthetic construct
  source 1..120: mol_type = other DNA
acggaaaggatcccataacataatcacatctagcagtatatacaataaaaatgtggtcacatctaaagtcatttttagtcacattacactgttacctgcttcgtaatagacatccatctc

SEQ ID NO: 35582 - DNA, 120 bp, synthetic construct
  source 1..120: mol_type = other DNA
tttggaacaatccagaagaaatccactttgcttctctagtatggggagagtggggattgttgactgagctcattatcggaaaactctcactattgaatgtttccttcattgagagcaacc

SEQ ID NO: 35583 - DNA, 120 bp, synthetic construct
  source 1..120: mol_type = other DNA
ctaaaacagtaataataataatggatattacatgaatttaattacaaggacgtttacaatttaattacaaggctgtgggctccaggtcggggaggggacctggcggcctggaaggggacc

SEQ ID NO: 35584 - DNA, 120 bp, synthetic construct
  source 1..120: mol_type = other DNA
ccataggaaaggagtgccaaggagctgaagggagagacggtggatccagaacacaccccccatcccgttccgctccccaaggggcttggttggaaggtgggaggggacagagacaaagct

SEQ ID NO: 35585 - DNA, 120 bp, synthetic construct
  source 1..120: mol_type = other DNA
tgagggggaacgagtaccccaaagggtagggatagatcatcaagagccatgaaacagaacctgctggcacctgggttctaaaactggcactctattttttttttattttttttttttgag

SEQ ID NO: 35586 - DNA, 120 bp, synthetic construct
  source 1..120: mol_type = other DNA
atccggttccaggcctcggccctaaatagtctccctgggctttcaagagaaccacatgagaaaggaggattcgggctctgagcagtttcaccacccaccccccagtctgcaaatcctgac

SEQ ID NO: 35587 - DNA, 120 bp, synthetic construct
  source 1..120: mol_type = other DNA
gagtgtgttcactgctagcgaatgacctctcattccacggagtccctcagcttcctggggaagagctgggtctgtctttacatttgaagccgaaaggaggcaacatactgacacacccaa

SEQ ID NO: 35588 - DNA, 120 bp, synthetic construct
  source 1..120: mol_type = other DNA
gatgcttcagtgcactcttttcaaatgtcggggtgggttttttttttttccacaaaacttcaagcatctactaaagtagagggaggagtgtaatgaactccggtacccatcactcagctt

SEQ ID NO: 35589 - DNA, 120 bp, synthetic construct
  source 1..120: mol_type = other DNA
aggggtgagatttatctgtctctcctggccatagccaggaaatccccatttttcttaagctagcttgagttgggcttttctaacacacagctaaagaatctcttgataaaccttgggact

SEQ ID NO: 35590 - DNA, 120 bp, synthetic construct
  source 1..120: mol_type = other DNA
ctaatgacctcatttaaacttggtcatttctgtaaagaccctatctccgaaaacggtcacattctgaggtattggggttaggactccaacatatgaatttgggtggggacacaattcaac

SEQ ID NO: 35591 - DNA, 120 bp, synthetic construct
  source 1..120: mol_type = other DNA
atcatgaacagtaactcctatgtgtgacagaaggtgacagaggtgggtagtggtcttcccctcaagggggtgagttgccactagctggggaatcttctggaaggcaaatgcatatgagct

SEQ ID NO: 35592 - DNA, 120 bp, synthetic construct
  source 1..120: mol_type = other DNA
catatactgaagggttctggaggcttccatctgaacactcacattaaattcagctcccttgagtcaaacataccctgagttcctactcttgagtcaggctctgcccggggacagccagtt

SEQ ID NO: 35593 - DNA, 120 bp, synthetic construct
  source 1..120: mol_type = other DNA
acttttggtccacggatgcccttggccatctgggaagcctgtggaccccatctcaggagaatttttgcaaacgcataaaatgagacccataggattacaaaggcagcaaattatactgaa

SEQ ID NO: 35594 - DNA, 120 bp, synthetic construct
  source 1..120: mol_type = other DNA
taaggcaaatcacttcctttctctgggcccctctgagcgtgcaatgtctatcaatgtatgaatgtggctgcaacataggaaaggctctgtggtccccgaacctctggaaacatatttatc

SEQ ID NO: 35595 - DNA, 120 bp, synthetic construct
  source 1..120: mol_type = other DNA
aggattaaccaaaatcctacccaacggttttgttttgggttgatgaaaatgttctggaagcagaggtggtgactgccacagaattgatcacttcaaattgggtaatctcatgcaacatga

SEQ ID NO: 35596 - DNA, 120 bp, synthetic construct
  source 1..120: mol_type = other DNA
tggttcttttctgttagcagtgggagccctttcagggtgctggctttcctatatgaagctgcctgtgcccacaattggatgggcatgcctgccaagctctctctagaggagtctgtgagc

SEQ ID NO: 35597 - DNA, 120 bp, synthetic construct
  source 1..120: mol_type = other DNA
gaagtgacgcgcatggtggtggtgatgatctttgcgtactgcgtctgctggggaccctacaccttcttcgcatgctttgctgctgccaaccctggttacgccttccaccctttgatggct

SEQ ID NO: 35598 - DNA, 120 bp, synthetic construct
  source 1..120: mol_type = other DNA
tgacccctgtttcctgactttcatgaggatcttttttaggtttctggaatcctaaactatcttgccaagtactgtctttactggattatttccattctcctttccagaactccccctgga

SEQ ID NO: 35599 - DNA, 120 bp, synthetic construct
  source 1..120: mol_type = other DNA
tgtccaagcgttccttttcttatcaggacaccagtcattcgattagggcccaccctgctccagtgtgacctcatcttaacctgaacacatcttttgggggacccacttcaacccagtgta

SEQ ID NO: 35600 - DNA, 120 bp, synthetic construct
  source 1..120: mol_type = other DNA
catggtgcaggtgcacaggcgtgagctgatcagtgacgaggggcaggcacacaaggtggagacaaagaccaagaggacggttgccagtgagaggcgcggactcaggaacttgaacaacat

SEQ ID NO: 35601 - DNA, 120 bp, synthetic construct
  source 1..120: mol_type = other DNA
ccactccaggtctgcctgggaacaccccaaacacacaccagccacacgcacaccaatattcatatatattttatatgtagttactcttttgtaacagctttacaaaaatagccacagact

SEQ ID NO: 35602 - DNA, 120 bp, synthetic construct
  source 1..120: mol_type = other DNA
actgaataagctgacagctcatttgttgaaagccaatttgtcaaaagctggttcctcgcagcatttcaaggaatattccatttgtctctgccccaggtccctgttaagaagagagtcggt

SEQ ID NO: 35603 - DNA, 120 bp, synthetic construct
  source 1..120: mol_type = other DNA
gagtatattcttggtcatttctgagaatttgcttttggcaaattgagctagagcctaatcatggcccacaacttggaggaaaagtctgagacggagaaacagctgtaggaggggtcaata

SEQ ID NO: 35604 - DNA, 120 bp, synthetic construct
  source 1..120: mol_type = other DNA
tactacagccaccttagaaaaccacttgacagtatcacaaagttgaagatatacctaccaaatgatccagcaactgcattcataggcgatattcccaggaggcaagtacactgatgttct

SEQ ID NO: 35605 - DNA, 120 bp, synthetic construct
  source 1..120: mol_type = other DNA
aaataataatatgttcaattgatggatttaatggcagatttgatatggctggagagactgttggtaaattgtacagaggagctaaagaaagtatccaggccgggcgcggtggctcacacg

SEQ ID NO: 35606 - DNA, 120 bp, synthetic construct
  source 1..120: mol_type = other DNA
acatttttagacatgaaggagttcagtacaccactgacaaatgtaagaattcaacaactgtttaaaaagcaagtcttgccagggcagtggtgtgcacctgtggtcccagctactcaggat

SEQ ID NO: 35607 - DNA, 120 bp, synthetic construct
  source 1..120: mol_type = other DNA
aattaagagatcagatggtgtaggatttgggagcttttaaggtgaagaggcccgggctgatcccactggccggtataaagcaccgtgaccctcaggtgacgcaccagggccggctgccgt

SEQ ID NO: 35608 - DNA, 120 bp, synthetic construct
  source 1..120: mol_type = other DNA
tcaggcccaacagaaagctgaaagctctcatcagggcagcccgagtcctgccattgggagttgcccaatccgaaagttttgcacgcaggccctcaaagaagctgaggacaccagtgaccg

SEQ ID NO: 35609 - DNA, 120 bp, synthetic construct
  source 1..120: mol_type = other DNA
tgattcttggaagcaaatccaagacatcacacccttccctctgtaaatctttactatgttcctctaggagaaaagggctcttctcaatacataaccacaagtcatcatcacaccgacaag

SEQ ID NO: 35610 - DNA, 120 bp, synthetic construct
  source 1..120: mol_type = other DNA
gtaatctgccaaaaacaatgttatgacgaaggtccttccaacacaaaaggtgtagagccctagcaaactcctacagaagaaaaaggagaaataattcgtttgtagtcccagctacttggg

SEQ ID NO: 35611 - DNA, 120 bp, synthetic construct
  source 1..120: mol_type = other DNA
ttagactaaagacatttttagacatgaaggagttcagtacaccactgacaaatgtaagaattcaacaactgtttaaaaagcaagtcttgccagggcagtggtgtgcacctgtggtcccag

SEQ ID NO: 35612 - DNA, 120 bp, synthetic construct
  source 1..120: mol_type = other DNA
gaggatcgcttgagcccaggagttcgcattcagcttggcaaacagtgagaccctgtctctaaaaaaataaagtaaaagaaaccgggaattgagtacgaattggaacaaaaatgagctgtt

SEQ ID NO: 35613 - DNA, 120 bp, synthetic construct
  source 1..120: mol_type = other DNA
gtgggtttctatttccctcctcccctttactctcacttaaacagggtcaaggttgacagtctgtctcaggaaaaaaaaaaaaaaaaaaggatttagggcaggtctggagaagatggggta

SEQ ID NO: 35614 - DNA, 120 bp, synthetic construct
  source 1..120: mol_type = other DNA
aggtgttatccatgggcctggccctgaggtcacctgagatctgaaggggaggtcaggaccagcacacatggtagaacaagtgaccgcagagcaggacacaagtagggggatgtggctcag

SEQ ID NO: 35615 - DNA, 120 bp, synthetic construct
  source 1..120: mol_type = other DNA
acataggtcccatgaggagggcagggactggctgctgtggcccagaagtacccaatcgctgtctgctcaatgaacggagaatgggctgctttcctggaacagcagattctaggatcacgt

SEQ ID NO: 35616 - DNA, 120 bp, synthetic construct
  source 1..120: mol_type = other DNA
gcctcctcattcccttttggctctccttttctaagttctgatcagaagtacaaaggtgtcaaggagtaggtttgacaaagtgtgacagcgcgttgttctatgtgaacaaagaaccactga

SEQ ID NO: 35617 - DNA, 120 bp, synthetic construct
  source 1..120: mol_type = other DNA
gatgtgctgccctccctcttggtttcaggaagtagactctgagatgcagattagcggggaggaagtttagcatgctctcaggaccagtactgggaagggaaaggagggacaggggaagaa

SEQ ID NO: 35618 - DNA, 120 bp, synthetic construct
  source 1..120: mol_type = other DNA
tactagagatcgctgtcatgggcccactcccccgccttctttgctggactgtggtccgagatgttatgtggggctctgtgctgacaagtcacatagtctgtaggcttcagagagtggctc

SEQ ID NO: 35619 - DNA, 120 bp, synthetic construct
  source 1..120: mol_type = other DNA
aagtgaagctgatgtgtttggtgttattttcttgcagaaagtgaggggcattagtgtaaaggattttggaagtgtttaaagaaacaaaagggagtgttgagacgccatccacccctgaga

SEQ ID NO: 35620 - DNA, 120 bp, synthetic construct
  source 1..120: mol_type = other DNA
agctgtgtggcccaaggctccccccataaatcgtgtcattagcacagaccgcctggtttcagggtctttgtgtgtgggcttggctgatcgcaggatcctggcgatggtagtcaggaaggg

SEQ ID NO: 35621 - DNA, 120 bp, synthetic construct
  source 1..120: mol_type = other DNA
cttcgggcaggggtttgagtgcagtgtgcctgccgagaggttctgcagttcccagtgtttaacaaaattcagtgtccactcttgatctgcacaaactctcccatcctggcggccccgggt

SEQ ID NO: 35622 - DNA, 120 bp, synthetic construct
  source 1..120: mol_type = other DNA
acctgggtcccagccggctctccgcactctgtgaccctttgatggagtttggattatttccttaggaggcattctgggggccccgagcccacacccacagtgtctagttctctggaagga

SEQ ID NO: 35623 - DNA, 120 bp, synthetic construct
  source 1..120: mol_type = other DNA
gcagggatggggccgaggcccggtctgcattgagctcagtgcttgcacgcccaggtgggcagtctctcatttttggaacagcagtctctcctgaccccctccactgagactgcttttgct

SEQ ID NO: 35624 - DNA, 120 bp, synthetic construct
  source 1..120: mol_type = other DNA
ccttggcgtgccttttcagtctcctttaatctagaacagttcccctgcctttctgagctgtttgtgaagttcacagttttgaacagtgcagggtagttccattgtattattactattatt

SEQ ID NO: 35625 - DNA, 120 bp, synthetic construct
  source 1..120: mol_type = other DNA
tgaaccttgagaatgggtagacctgccttagacttgccttagacctgtgtcaggctgcagctgcgacagctcagggaagctgtggggagatggcaaccccaggatgttgctctcaggagt

SEQ ID NO: 35626 - DNA, 120 bp, synthetic construct
  source 1..120: mol_type = other DNA
tccttagggaatgcagctggaagatctcaaacagcagctccagcaggccgaggaggccctggtggccaaacaggaggtgatcgataagctgaaggaggaggccgagcagcacaagattgt

SEQ ID NO: 35627 - DNA, 120 bp, synthetic construct
  source 1..120: mol_type = other DNA
tgaccacaggagacggatggctcctggtgttctgggttagggctcactgtggtccctctcctctcacctgagcttccaagagctgctttgacactagtccagccaaggagctttacagaa

SEQ ID NO: 35628 - DNA, 120 bp, synthetic construct
  source 1..120: mol_type = other DNA
accttacgcttcagctgttgatccgctggtcccctcttttggggtagatgcggccccgatcaggcctgactcgctgctctttttgttcccttctgtctgctcgaaccacttgcctcgggc

SEQ ID NO: 35629 - DNA, 120 bp, synthetic construct
  source 1..120: mol_type = other DNA
ttacaggtgtgagccactgcgccccgctgggctgctcatatcttttatccgtttttctactgggttatcttttgttgctcagcttttagaaactctttgtccatgagcaggattgggttt

SEQ ID NO: 35630 - DNA, 120 bp, synthetic construct
  source 1..120: mol_type = other DNA
ctgcacttaaatcctaatcttgcaatttttctacaagagcactttacattttttttttggagggagggtgtatgagtagacggtggctgctgtaacaaaggactgcacacttggggctta

SEQ ID NO: 35631 - DNA, 120 bp, synthetic construct
  source 1..120: mol_type = other DNA
ccttttcggctttacttaggttgagcttccagaacaactggttggattactcttgggagggaaccagcctgcctgccctattggctgcggccccttgatccacaaacgaagcccatccct

SEQ ID NO: 35632 - DNA, 120 bp, synthetic construct
  source 1..120: mol_type = other DNA
ccgcgggcctctgtgcctgtcctcctcttttgacaagaacaccggagatacacaaaggtacacaaaagcgggcctttgttcaagctggcaaaagagatcttcttcagaaacccctgcttg

SEQ ID NO: 35633 - DNA, 120 bp, synthetic construct
  source 1..120: mol_type = other DNA
tgacctcgtccatcttcaaggccttgatgctgatgacagatttctgtcttccagtcctgatctgttccttcacgaaaatgagcccagtagcccgtccaagccagaaatggacttttagcc

SEQ ID NO: 35634 - DNA, 120 bp, synthetic construct
  source 1..120: mol_type = other DNA
agtcttaggtagtcctttatagcaatgcgagaacggattagtaccgtcaatattgatgagaatgttgagctatgtgtatgtacgctgacacattatggtggaagcgaaaattggctcaaa

SEQ ID NO: 35635 - DNA, 120 bp, synthetic construct
  source 1..120: mol_type = other DNA
tatacaataaataattacctatagtccctctacggtgctatcaaacactagaacttaatccttctatgcaactatatgtttgtccccattaacctccccaccctccccacctttcccagc

SEQ ID NO: 35636 - DNA, 120 bp, synthetic construct
  source 1..120: mol_type = other DNA
gtccgggacgatggccgcacagtcccggccccgtgttcccaggcccgtcttgctcctcgatgtgagggagacccgggggatgggacaggctgggccccgcagtgcctgactccctgcagg

SEQ ID NO: 35637 - DNA, 120 bp, synthetic construct
  source 1..120: mol_type = other DNA
tgaagtagcacaaggtaacgggaggcaatttgggaaatgggggaaaatgaaaagccactgggtcccgccattcagcattaactactgtggacattttagaatattttcctcaatatactt

SEQ ID NO: 35638 - DNA, 120 bp, synthetic construct
  source 1..120: mol_type = other DNA
atacaggtgtgggccaccatgcccaacccatatcacatgcttaacagtgatatgataatgctggttctatgcatctattcaagtacgttttcaaagaatttttcccaagtaaaaaagctc

SEQ ID NO: 35639 - DNA, 120 bp, synthetic construct
  source 1..120: mol_type = other DNA
aactgacatagtcagtatgttgccggacacagtgaactccttcagaagcacccctggcacgggaagcggtggggcatcctgggccaggctcctgcgggccagctctgcttccatgggtgt

SEQ ID NO: 35640 - DNA, 120 bp, synthetic construct
  source 1..120: mol_type = other DNA
tctaggcctggcccaggtggacaggcgggacctgctggacctgaggctgggtcgggcctggctcctgggttcggcagtatcagtccctgccctggtcgctcttgcctggtagggagctgg

SEQ ID NO: 35641 - DNA, 120 bp, synthetic construct
  source 1..120: mol_type = other DNA
tcttcctcctttgtgcagtgagggatcttggaaatgtaagcagtggagtctggcttcctagctccttcaaagatatccacttcactgcccagctctagactaaaggaataatctggagtg

SEQ ID NO: 35642 - DNA, 120 bp, synthetic construct
  source 1..120: mol_type = other DNA
cctcccagaacaatgggaatacaggtgtgggccaccatgcccggcccatatcacatgtttaacagtgaaataatgctggttttatgcatctattcaagtacatgtttttgaagcattttt

SEQ ID NO: 35643 - DNA, 120 bp, synthetic construct
  source 1..120: mol_type = other DNA
ggtgtaccaggtctctgttctgagaccttgtgtttgggtgttctgagatctctagctttctgcccctccggggaggcggatcccagcccccaacccaccaccctcatccgcccagcgcct

SEQ ID NO: 35644 - DNA, 120 bp, synthetic construct
  source 1..120: mol_type = other DNA
ctggccctgccccccacctcttgaccctgttgtctccgtctcacggcccccacctcgccaccagaacctcctagaacagaacagaacaggatacaactcaagcaggcggctgtccggcct

SEQ ID NO: 35645 - DNA, 120 bp, synthetic construct
  source 1..120: mol_type = other DNA
tctaactgggctcagcagcctccgtccctgtcctggtcgcccagctggtggggtagctggaactgcatgtctggtgggcgtggcctcgcgccagccaaggtctcccaggcgccaggtcca

SEQ ID NO: 35646 - DNA, 120 bp, synthetic construct
  source 1..120: mol_type = other DNA
ctgggactacaggcgtgagccaccatggctggcccctttggaggacttgtacacagaatatataaagaactctcaaaactcaatgtaagaaaacaaacaacctgatttaaaaattggcaa

SEQ ID NO: 35647 - DNA, 120 bp, synthetic construct
  source 1..120: mol_type = other DNA
gccccaaagggagtgtgcatgccgttcttatagacgtcttgagctgcaagcctgttatgtgtatcgttaggtgctttggttaggtgttttttaacttcagaagtttaacgtcatttcaaa

SEQ ID NO: 35648 - DNA, 120 bp, synthetic construct
  source 1..120: mol_type = other DNA
gaaactcaaatctgcttagccacaataaaagcagattcttatctgcaaggtatcctaagcccttccagttttgaaaaaaaagtcatgaaaggcccagggcgctggatcatacctgtaatc

SEQ ID NO: 35649 - DNA, 120 bp, synthetic construct
  source 1..120: mol_type = other DNA
gtatagtaacaataaaaaaaaaagaaaaaagaaaaagaaaaaattataactttttcttctgttggattattttggttctcttcatcgaagaaatcattctgtgcctcctgcatctaccat

SEQ ID NO: 35650 - DNA, 120 bp, synthetic construct
  source 1..120: mol_type = other DNA
cagaaaacagagctaccaggaaatacataaaatgaaagtttttgtagagtcctccagtctcccccagtttcttgctgtgtcatgctagaaaatcatggagtggcttgatcattctgtgac

SEQ ID NO: 35651 - DNA, 120 bp, synthetic construct
  source 1..120: mol_type = other DNA
taccaggaagaagaaacacattcttattgccagagatggggagtccaggcttgagggaaagctgcaccaaaaaaccttgttacacaactcttaccttcttagtgacttttccacaattaa

SEQ ID NO: 35652 - DNA, 120 bp, synthetic construct
  source 1..120: mol_type = other DNA
tgtgaaaatcaatttatataatacaccatattaacagaatgcatggcggagcgggggcgggggagggggctcatggtcatcttaatcatgtacaaaaaggatcatttgacaaaacgcagt

SEQ ID NO: 35653 - DNA, 120 bp, synthetic construct
  source 1..120: mol_type = other DNA
ccgaattaaaaaatgggcaaagggcttgaatagacattcctccaaagcagaggtacagagggccaagaagcacatgaaaagatgtcttagtctgttttctgttgccataattgaataccc

SEQ ID NO: 35654 - DNA, 120 bp, synthetic construct
  source 1..120: mol_type = other DNA
ggcctcacatttggtcgtataattccatctataggaaatctccagaacaggctaacctctatggacagaaagcagatggactaggggttgccagggactatcgggaacgtgtgtatgggc

SEQ ID NO: 35655 - DNA, 120 bp, synthetic construct
  source 1..120: mol_type = other DNA
ttaaacaccctccccccacaacccaggccccaaagtcttgggccttcattaattctgtcaataaaatgtttcaaggaagccatctgcccgcttcagtcactttgccttggggtgggggtg

SEQ ID NO: 35656 - DNA, 120 bp, synthetic construct
  source 1..120: mol_type = other DNA
gctaccggctggtatcgaacaagctgaagaagcggttcctgcggaagccgaacgtggcggaggccggcgagcagttcggacagctgggccgggagctgcgcgcccaggagtgtctgccct

SEQ ID NO: 35657 - DNA, 120 bp, synthetic construct
  source 1..120: mol_type = other DNA
taggcctctggtccaaactccttgcgtcagggaggtgaggggaaggataaccagacggtcaggtagtgggtatctgagcataattctaggaaacactaaaactcctcgttttccatttgc

SEQ ID NO: 35658 - DNA, 120 bp, synthetic construct
  source 1..120: mol_type = other DNA
gtgaactaagcattcacctccagattgtaggaaacaaaccaaaagaaaggaaaatagaatttttaaagttttgaacagagattgatgaactagaaacagctctttcaaaaccacgtttgg

SEQ ID NO: 35659 - DNA, 120 bp, synthetic construct
  source 1..120: mol_type = other DNA
ttacccaatcctgcttccttcactcccccatgggtgttgatccagaggatccccctcctataaactttctgcatgcaagaaaaaaaagagagaaaaaaggagaaaaaagcagacaataat

SEQ ID NO: 35660 - DNA, 120 bp, synthetic construct
  source 1..120: mol_type = other DNA
gccaatctatagtcacagaggaagaccttcacaccccttcacaggatctcgcagcagattggctgaaaagtctccttgaaactgcagacctctctcaaggagacccactgagttgggcaa

SEQ ID NO: 35661 - DNA, 120 bp, synthetic construct
  source 1..120: mol_type = other DNA
atggagggccagcctccaaggtgctgtatatgtatgaattcaaagatgattctgtgtccccactaagaagattacatggggtttgggaatcaaagagtggcagcaaaagaactctgatta

SEQ ID NO: 35662 - DNA, 120 bp, synthetic construct
  source 1..120: mol_type = other DNA
gttttcagtcatttaacattattatgcccttccacattcaccaactcatccctagtttgctacctttctcctttttccatatcatatccttggttccactacgtctatcctaccccctct

SEQ ID NO: 35663 - DNA, 120 bp, synthetic construct
  source 1..120: mol_type = other DNA
ctcacaaggagaaactctacctgagagagccaaatgtcattactgaaactcaatgcactctaggtttaactgagcagtgatgaagtgattgttttaacgataaaggaatatccagccaaa

SEQ ID NO: 35664 - DNA, 120 bp, synthetic construct
  source 1..120: mol_type = other DNA
aagtttgtggtaatttgttacacagcaatagaaaattaatacagcatgcttcttgtttctagacctatcctgggtagacagagatgtgcggttgtcattcaagtgtaggcagtacagttc

SEQ ID NO: 35665 - DNA, 120 bp, synthetic construct
  source 1..120: mol_type = other DNA
ccagttgctagagacaaacatggacattcttaatctcatgtactccatcatctatggacagagagatatagggaagcaaataatctcattatatgtaaagttacaactgtgatgggtaca

SEQ ID NO: 35666 - DNA, 120 bp, synthetic construct
  source 1..120: mol_type = other DNA
cttcttttgtgaagaaaacttcagacccatatagtattactggtgaattctatcaaacacataaaaagcaatagacgttggcgtggatgtggtgaaaagggacggtgcatacactgctag

SEQ ID NO: 35667 - DNA, 120 bp, synthetic construct
  source 1..120: mol_type = other DNA
cattttatagacgacggacaccaaaaccacacatgaggagtacaagagtagctttatcatggatttagggctgtggttacaaggaagctgtaaggaataaaatgactcccatgaagacgt

SEQ ID NO: 35668 - DNA, 120 bp, synthetic construct
  source 1..120: mol_type = other DNA
ccaggagtacttctccagggtctgggcgtgctccggcagcagcttggcgggcggtggttgcaggaggagcagcagcagcacgcgggacacctcgcagcggaccagcacgtccgagaaggc

SEQ ID NO: 35669 - DNA, 120 bp, synthetic construct
  source 1..120: mol_type = other DNA
tattttcatgttattcattgctagggtgtagaaatacaaccgactgttgcagattgatcttggatactgcaactttgctgagccgaatatgctttgctgagcatactcagacagggttgg

SEQ ID NO: 35670 - DNA, 120 bp, synthetic construct
  source 1..120: mol_type = other DNA
ctgttaatatggtgtattatataaattgattttcacatgttgaaccaaccattaatatggtgtattatatacactgattttcacatgttgaaccaaccttacatttgtgggataaatcct

SEQ ID NO: 35671 - DNA, 120 bp, synthetic construct
  source 1..120: mol_type = other DNA
ggttagggaatttctcatagatgatatcctgaaatgcgttttccaaattggttccgttttccccatctctttcagggacaccaatcagtcttagattcgctctctttacgtgatcccata

SEQ ID NO: 35672 - DNA, 120 bp, synthetic construct
  source 1..120: mol_type = other DNA
gtgaaagtgggattattgtctatgaatggtcagctagactgtgtgtgtgtggaaagggtgagggaattaacatttattgagcaaaagggcatgctagttaaaatcattgtctctggggac

SEQ ID NO: 35673 - DNA, 120 bp, synthetic construct
  source 1..120: mol_type = other DNA
atcatggactacacagtgtgtgacctacaaacactttcaaagaaatgggaaccggtgatgaaaaccaaagaaaattacatatctagcagcaagaaggtacggtgactgaccaacagtcct

SEQ ID NO: 35674 - DNA, 120 bp, synthetic construct
  source 1..120: mol_type = other DNA
tctaggaactccctgcaaacatcagattaggctctattctctatctgaatactgactttgctttgctttgtaactcctatcttcactaataatgccttttcccccctcttgtgtgcatcc

SEQ ID NO: 35675 - DNA, 120 bp, synthetic construct
  source 1..120: mol_type = other DNA
aattaagcagacttttggaaactaagatgtgcatagccctgtagtaggctaagtggaagttacaaaggcagtagtagctttttttccccctctcgttatctcatgaggatacagaggact

SEQ ID NO: 35676 - DNA, 120 bp, synthetic construct
  source 1..120: mol_type = other DNA
cttttgaaattaaacaaacttttggaaactaagatgtgtatagccctgtagtaggctaaatggaagttacagaggcaacagtaggtaatgggccctgcactggaggagcttctgtttctc

SEQ ID NO: 35677 - DNA, 120 bp, synthetic construct
  source 1..120: mol_type = other DNA
tctaaggatacgggatagaagttaagttccaactgtttctctcatcttatgatatgatattttaagtctttactggccaaaggtcatggaagcactggggaaagcgctgagctttctcct

SEQ ID NO: 35678 - DNA, 120 bp, synthetic construct
  source 1..120: mol_type = other DNA
gaaaaagtacacaaatcgtaagcttgatgaattttcatgatgtaatcgcatccatatcactagcacccaggtcaataaacagatcattaccagaaccccagaaccctcccttatgcccct

SEQ ID NO: 35679 - DNA, 120 bp, synthetic construct
  source 1..120: mol_type = other DNA
cctggagggagaatggagtgaggaagcacagtcttcaccaggctgttgacacccattgtcatttccagaaacttctagtgctgggttaggcatttgtgaaaatattatttaatttactta

SEQ ID NO: 35680 - DNA, 120 bp, synthetic construct
  source 1..120: mol_type = other DNA
atccttcttcttagttgacagacaagtatttcccaagagagctccataattgagcagacgatgcatttgatggatttgtgtattgtggtgtaagtgaaagctggtgggctttcagatagg

SEQ ID NO: 35681 - DNA, 120 bp, synthetic construct
  source 1..120: mol_type = other DNA
aaccaccacgggatatcatctcatacgccttaggatggctattattaaaaagacaaaagataacaatgttgatgaggatgtggagataagtgaacccttgcacactgttggtgggaatgt

SEQ ID NO: 35682 - DNA, 120 bp, synthetic construct
  source 1..120: mol_type = other DNA
aaatagacagaagaggaggaattctctctctctgctcatcctatctcccttctgcagccagatttctttcctcctcctgtccttggacatcagactccagtttcttccacttttggactc

SEQ ID NO: 35683 - DNA, 120 bp, synthetic construct
  source 1..120: mol_type = other DNA
agagaactccgggccagacaatttcactcatgaattctatcaaacatttaagtaagatgtaatacaaattttacagtctctttcagaaaattaaggagagaaaatgaccccactcatatt

SEQ ID NO: 35684 - DNA, 120 bp, synthetic construct
  source 1..120: mol_type = other DNA
aaaacacctaggaatacatttaatcaaggaggtgaaagatctctacaagaggaactacaaaacactgatgaaaaaattgtgtatgacacaaataaatgaaaacacatcccatgctcatgg

SEQ ID NO: 35685 - DNA, 120 bp, synthetic construct
  source 1..120: mol_type = other DNA
caacaactcaacaacaacaacaacgacaaaaacaaaaacaaaaaacaagtaacgccattaaaaagtaggcaaagggcatgaatgggtgttttttgaaagacatacaagtggccaacaaac

SEQ ID NO: 35686 - DNA, 120 bp, synthetic construct
  source 1..120: mol_type = other DNA
tacattgttgatgacagtgtaaaatggtacaagtactttggtaaaacttgttgcagttatttatgaaactaagcattcacctactctatgacccagcagttccactcctaggtatttacc

SEQ ID NO: 35687 - DNA, 120 bp, synthetic construct
  source 1..120: mol_type = other DNA
taatgcagggactaccaaactatggttgatgagtcaaatctggtgcttggttttgtaatgcctgtttcagaacacatgctgtccatgttgttacatattgtctatagctccattcactca

SEQ ID NO: 35688 - DNA, 120 bp, synthetic construct
  source 1..120: mol_type = other DNA
tatgtcagtagcttctggggctcaagtggtttttggttacatggatgaattgtatattggtgaagtcagagatttcagtgcacccatcacccgagtagtgtacactgaaactgatatgta

SEQ ID NO: 35689 - DNA, 120 bp, synthetic construct
  source 1..120: mol_type = other DNA
attgagattttgtggctgagggcaaagaggagagcacagaaactcctctgctgataatctgggttacatttatttcttcactgtctcttgtttccaacctcctacctacagatactgtct

SEQ ID NO: 35690 - DNA, 120 bp, synthetic construct
  source 1..120: mol_type = other DNA
aggtgcaaaggagtaagaagttaaccatgcctgaggaaagtggtggagctccacatgactagtgttctttgaagaaggtttcattgttttatattaacttaaaaataaaactgattgtaa

SEQ ID NO: 35691 - DNA, 120 bp, synthetic construct
  source 1..120: mol_type = other DNA
gcaaatccataggcacagaaagtagattagtggttgtctgatgctgggagtagtaatgaagactgactgcagatgggcaaggaagatgtcactgacgtgatgcaaatgttttaaaattag

SEQ ID NO: 35692 - DNA, 120 bp, synthetic construct
  source 1..120: mol_type = other DNA
catatcagccactccttccctagaacctacaggtatggagcaggctgggttttttcaagagcctcttatcctgtaaatctttacacagggcaatggcaggtgcatgtacagcccatatga

SEQ ID NO: 35693 - DNA, 120 bp, synthetic construct
  source 1..120: mol_type = other DNA
tagtttcctctgctaaaacaattggtgtgttttctgtctcctgactggaacttgattgacacaagcaatttacaggcacaccagcagtgtaaaagcatgtcctttgttccacagtcctta

SEQ ID NO: 35694 - DNA, 120 bp, synthetic construct
  source 1..120: mol_type = other DNA
gtgaaatgcatctgttggtttttgtaaattttgcctgatgttctcaaaaggggacattgcaatgggagagatttctggctgaagtttgtcagaaatgctgccaaagtgtggaatcagcca

SEQ ID NO: 35695 - DNA, 120 bp, synthetic construct
  source 1..120: mol_type = other DNA
tggggagagtcaggaaaacctatcagatcatatacctaagatgcaagaacatagtgcatgcctataactaactcttaatcagaacaacagaggccacaccccaaactaccatcaagctaa

SEQ ID NO: 35696 - DNA, 120 bp, synthetic construct
  source 1..120: mol_type = other DNA
catccctaaatgaagccctgtactcatttgcagttgctcctcaactctcagacctaagcaacaattaattcccttttcttcttcataaatttgcctattctggacatttcgtataaatgg

SEQ ID NO: 35697 - DNA, 120 bp, synthetic construct
  source 1..120: mol_type = other DNA
aatcaaggctgtgcatggtagctcatacctataatcctaatacttatactttgggaggccaaagctgaaagatctctaaaatccagaagttcaagaccagcctaggcaacaaagtgagac

SEQ ID NO: 35698 - DNA, 120 bp, synthetic construct
  source 1..120: mol_type = other DNA
ttttcagtgcagaggaaaagcagagaacttcccctcagatggccatacccccttgtcgctgtacccaactctccggtcctactttgtagctctcaggtgtcacatgtggatcctgcccta

SEQ ID NO: 35699 - DNA, 120 bp, synthetic construct
  source 1..120: mol_type = other DNA
ggacctcagtctctagtctccctacttttacctccctaccttcattccctggaccgactgtagtctcccttccttcactctcttgacgcctctccagatctgacttgcccgtgtaccaca

SEQ ID NO: 35700 - DNA, 120 bp, synthetic construct
  source 1..120: mol_type = other DNA
cacttgagtcatgtgaaatgcacttcagtcataccaggaaggactccaataagatgctgggaaaagcttccagcagcagactgtgaaggaaagggaaagcaagatttagaaaccacctag

SEQ ID NO: 35701 - DNA, 120 bp, synthetic construct
  source 1..120: mol_type = other DNA
tgagtgtgagtgtgccttctgtgtgtgtgtgtgcacgtgaatgtggtgagtgtgtctgtgtgttaacacaagtgtgttcaagagtgtgttatatgagcatataatgcatgtgtgtattct

SEQ ID NO: 35702 - DNA, 120 bp, synthetic construct
  source 1..120: mol_type = other DNA
agcaggtgacacaaacctccaaggcccatcacaaaccttccactttggcccagggcactaaagggcgcacctttgccaggtgggtttggggggagcctcctggcactgaggctgctcaca

SEQ ID NO: 35703 - DNA, 120 bp, synthetic construct
  source 1..120: mol_type = other DNA
catccttgtgggagggtcagtggatccttggcagcaagtctggtgctcagggagacactgggtggggtgggagccacagaccttctgctgatggcaaagacagggttcctggagtgctgg

SEQ ID NO: 35704 - DNA, 120 bp, synthetic construct
  source 1..120: mol_type = other DNA
ccttggggctctcactgcctctgggctcctgctctgcctggtcccctggtctccccggatcacatgatggcaccacagctgaggagtgggctctgcacttcccccccttccacccatgtt

SEQ ID NO: 35705 - DNA, 120 bp, synthetic construct
  source 1..120: mol_type = other DNA
ccttggaaatctgtggccctggaggaggaacaggagggccctgggaccaggctcccggggaacctgagctcagaggatgtgctgccagcagggtgtacggagtggagggtacagacgctt

SEQ ID NO: 35706 - DNA, 120 bp, synthetic construct
  source 1..120: mol_type = other DNA
gccttactgaggcacctttctagagattaaaaggggcttgatggctgttccaaagtgttgatggctgggagaaggggccagaggaggagtgaggggtggggtttgtccagccctgggctt

SEQ ID NO: 35707 - DNA, 120 bp, synthetic construct
  source 1..120: mol_type = other DNA
aggactttagtattatcataagaccagggtcattctcctggccttgtgcacaagcaggtgatggagtcaactcccgtcagtaagacttatggcgggatgctgcttatcttagtttatttc

SEQ ID NO: 35708 - DNA, 120 bp, synthetic construct
  source 1..120: mol_type = other DNA
aagtgagtttgccgttctcatggtaacagctggaaattactgcccctttccatggcaatgacctgaaagttaccaccccttttctagaaatttctaaataacctcctccttaatttgtat

SEQ ID NO: 35709 - DNA, 120 bp, synthetic construct
  source 1..120: mol_type = other DNA
attcaactcataaactttccctgagtgggccctggagagctggttctgggctggaacctgagagtgaagccactggaggctgtgtaatttgtaggtgagtcactcagtcacctaagcctg

SEQ ID NO: 35710 - DNA, 120 bp, synthetic construct
  source 1..120: mol_type = other DNA
atagttaatacatttcatctaatataggaatgagaatgcttataaagcagacgtcattttatgtaccattacaaatacactgccaattaaacagactttctcaacaaaagactgttgttg

SEQ ID NO: 35711 - DNA, 120 bp, synthetic construct
  source 1..120: mol_type = other DNA
tttggccgggccccctaatggcagccgtggagaatccctgaaaattagcgtttggatttttccatgccgtgattttggaaatttcaactgacatggagcccaccatcccgtgccccgacc

SEQ ID NO: 35712 - DNA, 120 bp, synthetic construct
  source 1..120: mol_type = other DNA
tgtagtagcccacgcctatattctcgacactacaggaggctgagtgggaaggattgcttgagccgaggagttcaagaccagcctgggcaacaaagcgagagcccagctcaacaaaaaaat

SEQ ID NO: 35713 - DNA, 120 bp, synthetic construct
  source 1..120: mol_type = other DNA
agggaggacagacaggctcaccccacggggacctcagaacagcctgcctcatactcagagtccaaaaaagaaaaggaacgtacacatctcctcccaagttaaacacgagaggtttgtcct

SEQ ID NO: 35714 - DNA, 120 bp, synthetic construct
  source 1..120: mol_type = other DNA
tgagctgagattgtgccagtgcacttcagcctgagggacagagtgagactccatcaaaaaaaaaaagcacctgtgtcctagattttagtgcccaagggtccagaagaaaacgtgtccatc

SEQ ID NO: 35715 - DNA, 120 bp, synthetic construct
  source 1..120: mol_type = other DNA
aagtgattctcctgcctcagcctccctagtagctggtgttactggcatgcaccaccacatccagctaattttgtattttttttcttttttttttgagacagagtctcgctctgtcaccca

SEQ ID NO: 35716 - DNA, 120 bp, synthetic construct
  source 1..120: mol_type = other DNA
aaagagtatccatagtaaaggagtaagaaaaaaagttagaaaaaaagtagagaaaaatatttactagagtatttactagaacccaccactctcagatcaattttctagtgttctgttgac

SEQ ID NO: 35717 - DNA, 120 bp, synthetic construct
  source 1..120: mol_type = other DNA
tcaagaatggcttaatttcaaaggctgtcaagttaattataagctaagattttccagttgcaccaagggtatattttatttggcaaaagaaacatccactggcttttgtcaggatgagtc

SEQ ID NO: 35718 - DNA, 120 bp, synthetic construct
  source 1..120: mol_type = other DNA
tcaccaaagatagacattacaggccaggtagctctttgtccccccagaggactgtcctgtgccttatgcttagcactcctggcctctgcccattggatacttctagcacctcccccccaa

SEQ ID NO: 35719 - DNA, 120 bp, synthetic construct
  source 1..120: mol_type = other DNA
actttcgtaacagcctttttggagcccttcttgggagcaggagcggatttcgctggatccggcatttttgcgcgaaaaaagagaacagagacttaaagaagtaatccgaactaccgcaaa

SEQ ID NO: 35720 - DNA, 120 bp, synthetic construct
  source 1..120: mol_type = other DNA
aaggctcggccggaaccacaaggaccatgcctctgcggctttctctactgccggccaactcacggctgggctttgggttctgtaacgtcacccaccacgagtgcccctggcccctgaccg

SEQ ID NO: 35721 - DNA, 120 bp, synthetic construct
  source 1..120: mol_type = other DNA
gaaaaaattgatcttatttacttgaccttggaacccagccaaagccatttcatgtgggtagtgtgctgacctatattgacctgatattagagcctctgccttcctttagtcttttctccc

SEQ ID NO: 35722 - DNA, 120 bp, synthetic construct
  source 1..120: mol_type = other DNA
gttatccctctctgtggtagttttgtaataatgccttacagacagcaggcactactcagtgtttaaagttcttctacatacactttatcatttaatccctactctgtgaaatagatctta

SEQ ID NO: 35723 - DNA, 120 bp, synthetic construct
  source 1..120: mol_type = other DNA
tgaagtgtccttcagcagaaattataaggctgtgcagcttgaatactgagaacagaaatttcattaggtagcacgggggaatagacaagagaagattaaaatttacctaacaagaaataa

SEQ ID NO: 35724 - DNA, 120 bp, synthetic construct
  source 1..120: mol_type = other DNA
caccccacccccccaaaaaaaatcactgccagtaaggaacaaacagccaagacgaagaagtactaagatgtaaagagatgtaaaataggccgggcgcggtggctcacgcctgtaatccca

SEQ ID NO: 35725 - DNA, 120 bp, synthetic construct
  source 1..120: mol_type = other DNA
tccagagtcttcctttagtcactatactacactactaatatcaaataagtaagatgttgatgcaacattgatagtaatttaaaagattagaaacaaccaagagccggggtgtagtggccc

SEQ ID NO: 35726 - DNA, 120 bp, synthetic construct
  source 1..120: mol_type = other DNA
cacttgaacctgggaggcagaggttccagtgagctgagaacataccattgcactccagcttggacaacagcgggagactctgtctcaaaaaaaaaaaatgagattttattcatgcttcat

SEQ ID NO: 35727 - DNA, 120 bp, synthetic construct
  source 1..120: mol_type = other DNA
gaacaaatagaacatttagatgtgtgaggcattattctacatgctctgaatattccaattcaaccctcatagccacccttcgctgtagctactacccctctcttacaactaaggaaactg

SEQ ID NO: 35728 - DNA, 120 bp, synthetic construct
  source 1..120: mol_type = other DNA
ttaaaacatgcagtagtgggtgttatgataaagagctgttaagagaaaataaagttagtttgattcaggttggtcttggtctatctgtgtttcttttttatttgctaagggcttacaagt

SEQ ID NO: 35729 - DNA, 120 bp, synthetic construct
  source 1..120: mol_type = other DNA
aaggctgcaagttcccagaaagtcagtgggcatacttgtagccacgcgtcttatgtaaaagctgtcataaaagatggggaagaataaagaacaaaacccaaaactttggaccttaagaaa

SEQ ID NO: 35730 - DNA, 120 bp, synthetic construct
  source 1..120: mol_type = other DNA
atgtgcaaagcccccaagacattataggctggtttttgttcttctcccttatactgctcaaaaaacaactccccattgtctgataagccaagttcaaactcatcagtcttgcatagaagt

SEQ ID NO: 35731 - DNA, 120 bp, synthetic construct
  source 1..120: mol_type = other DNA
tatgccgctcatgcatctggctgggagttgggaacctaatggaactctggagtcagaatgggatgaggaatttgctggttactgccaagtttcctgctcttgtaccttacctttctgttc

SEQ ID NO: 35732 - DNA, 120 bp, synthetic construct
  source 1..120: mol_type = other DNA
ggttccatatgacctcaaaggaaaatctcggttatctcccacttcctattaaagcatttcagtattaacggctcaacagtgaacttattgtaaattcagagggcgcagtggcacacgccc

SEQ ID NO: 35733 - DNA, 120 bp, synthetic construct
  source 1..120: mol_type = other DNA
cctatggtatatcagccttgggtctggggagtaacacagagatctacatgttttgtggctgtccaagaccatgcttctgttcgtaagttcccctgataaattccaatgtaccaacaaact

SEQ ID NO: 35734 - DNA, 120 bp, synthetic construct
  source 1..120: mol_type = other DNA
ggcacagtaagagattaacaataactgagctaatcttagcaacctcagcatacagtattttttctttccttattaaatcgagaacttttcacttaatagaagcactttacagcctttttt

SEQ ID NO: 35735 - DNA, 120 bp, synthetic construct
  source 1..120: mol_type = other DNA
ctaccccacacacatacccttcccagctgctggtatctctcattctactctctacctccatgagattcaccttttttagctcccacatatgagaatatgtgatatttttctttctgtgct

SEQ ID NO: 35736 - DNA, 120 bp, synthetic construct
  source 1..120: mol_type = other DNA
ttacatctcttggtacaggttaaataagccttagaaactattttaaatttaccactggtctgctgctgtatcacttgccaaatcatgacctaccaccagtgcttctccagccccagaaag

SEQ ID NO: 35737 - DNA, 120 bp, synthetic construct
  source 1..120: mol_type = other DNA
tgctttctcataggaatccccatccagaactagtaaagtcactgaattcccactctttctgaccagatccacaacctaggagggaagaagaaaaaggtaactttaataaccctctgccaa

SEQ ID NO: 35738 - DNA, 120 bp, synthetic construct
  source 1..120: mol_type = other DNA
tcataatttccagatttggggagggggtgatcgtggcaggaaaagttgtatgtttggtagttgcatatggtgatttttgatttttcaatgctggtaggtaagtaaggaggtctctgtacc

SEQ ID NO: 35739 - DNA, 120 bp, synthetic construct
  source 1..120: mol_type = other DNA
aagacatccagctagcacgccgcatacgtggagaacgtgcttaagaatccactatgatgggaaacatttcattctcaaaaaaaaaaaaaaaaatttctcttcttcctgttattggtagtt

SEQ ID NO: 35740 - DNA, 120 bp, synthetic construct
  source 1..120: mol_type = other DNA
tttagtaccatacaattgttcattactgcagcttaagaacgtttcctgcggtatcattgtgtctatcaacaatacccttggacgacaatataaggacacccatagaacttagattctggt

SEQ ID NO: 35741 - DNA, 120 bp, synthetic construct
  source 1..120: mol_type = other DNA
tgagaggcaagtgtgaggaggtcttgaacagaggctgccataactacctagataaaataggtgacacatgcttatcaatatgattatatggcaatgttagcccacccaagacagtatgtt

SEQ ID NO: 35742 - DNA, 120 bp, synthetic construct
  source 1..120: mol_type = other DNA
tacttatccaggtaaccctaaggcaagctcgtatcttccctacactactgcagctgatgcaactcttgaaagaatcaactgctggctggagaccaaccagcaaacttatcaaaaatacag

SEQ ID NO: 35743 - DNA, 120 bp, synthetic construct
  source 1..120: mol_type = other DNA
tggttgaacaggcccaggagcctgggattttctttccctacgcaaatagtaaacctgcattactgtatttctaggggaattacagggatcgatgccatgattaaagacatgaaagatgca

SEQ ID NO: 35744 - DNA, 120 bp, synthetic construct
  source 1..120: mol_type = other DNA
attttgtattttctcaaacgttaaaattttttttcaggccaggcgcagtggctcatgcctctaatcctagcactttgggatgccgatgtgggtggatcacctgaggtcaggagttcaaaa

SEQ ID NO: 35745 - DNA, 120 bp, synthetic construct
  source 1..120: mol_type = other DNA
ccaacatggtaacacctcgtctctactaaaaatacaaaaattagccaggcgtggtggcaggcgcctgtaatcccagttactcgggaagctgaggcaggagaatcgcttgagcccaggagg

SEQ ID NO: 35746 - DNA, 120 bp, synthetic construct
  source 1..120: mol_type = other DNA
atgtccagctaatttcttgatttttttttggtagaaatgggtctcactttattgcccagtctggtcttgaagtcctacactcgagcagtcctctcaacttggcctcccaaagtgctggga

SEQ ID NO: 35747 - DNA, 120 bp, synthetic construct
  source 1..120: mol_type = other DNA
tcgcttggtcgcccaggctggagtgcagtggtgcaatctcagctcattgcaagctccgcctcctgggttcacgccattctcctgcctcagcctcccgagtagctgggactacaggtgccc

SEQ ID NO: 35748 - DNA, 120 bp, synthetic construct
  source 1..120: mol_type = other DNA
tttttttttttttttttttttgagaccaagttttactcttgttgcccaggctggagtgcaatggtgcgatctcggctcatggcaaccttcgcctcccaggttcaagtgattctcctaccc

SEQ ID NO: 35749 - DNA, 120 bp, synthetic construct
  source 1..120: mol_type = other DNA
caacataacgaaaccgtgtctctatcaaacatataagaaaattagcctggcgtggtgccacacatctgtggtcccagctacacaggagcctgaggtgagaggattgcttgagctgagatc

SEQ ID NO: 35750 - DNA, 120 bp, synthetic construct
  source 1..120: mol_type = other DNA
aagttcaagcggttctcctgcctcagcctccagaatacgtgggactacaggtgcgtgccaccatgcccagctaagtttttgtatttttagtagagacggggtttcgccgtgttagccagg

SEQ ID NO: 35751 - DNA, 120 bp, synthetic construct
  source 1..120: mol_type = other DNA
aaaatatgagaaccaaaatgcaaggaaatatgccgttagaagacgcgtttctgttggtgattacaatatataaataataacagatttcccttttatatgcttttctaccgatgaaacctt

SEQ ID NO: 35752 - DNA, 120 bp, synthetic construct
  source 1..120: mol_type = other DNA
gcacactgatttgggcctatgatgcattgaaaaactaagtttccacaaaaaacattcaataaagggaacctatccttctcactgtgttcaacattgtctaaaggcataaagacatcaaaa

SEQ ID NO: 35753 - DNA, 120 bp, synthetic construct
  source 1..120: mol_type = other DNA
ccagctactcgagaggctgaaacaggagaatggggcgaacccaggaggcagagcttgcagtgagccgagttcgcgccactgcactccaggccgggagacaaagtgagactccgtctcaaa

SEQ ID NO: 35754 - DNA, 120 bp, synthetic construct
  source 1..120: mol_type = other DNA
gcctcaaactcctgagctcaggtgatcctctgcctcagcctcctgagtaggtaatatgaaaggcgcatgccacgaggcctggctaatttgttatttaacctttttgtagacatgaggtct

SEQ ID NO: 35755 - DNA, 120 bp, synthetic construct
  source 1..120: mol_type = other DNA
tgcctctggattggcagaagagttaaactccaaagctatatgcatagaggaagaaaagaaaaagagatgcaatcattgataaaaatttatcaactcgtttattcggctgctgcatttagg

SEQ ID NO: 35756 - DNA, 120 bp, synthetic construct
  source 1..120: mol_type = other DNA
tttgctgtctgaatatagatacacctgaattgttgactgcttttgtaactaaacactcctctcctgtcttccaacgagtggtcatttttgtccgcaacttgatcacagcaatccctgggg

SEQ ID NO: 35757 - DNA, 120 bp, synthetic construct
  source 1..120: mol_type = other DNA
ctactcaggaggctgaggcaggagaatcactggaactcaagaggcagagactgcagtgagccaagatcgtgccatggcactcctgcctggacaacagagcaggactccatcccaagaaac

SEQ ID NO: 35758 - DNA, 120 bp, synthetic construct
  source 1..120: mol_type = other DNA
atcaccatttttcatttattactttcatggagcaactttgaatctatggttacagcaggtgaggcaccttgtataaaataaagctaatacatgaaataaaaccatttaaaattctattgt

SEQ ID NO: 35759 - DNA, 120 bp, synthetic construct
  source 1..120: mol_type = other DNA
gattcctacaaaagcaagaagggagaaaggaccatgtgacactagagctatttctggtaaaggaaaggtttgggaaaagatcttttgatcacctttattttaacagaatgtttttttttt

SEQ ID NO: 35760 - DNA, 120 bp, synthetic construct
  source 1..120: mol_type = other DNA
gttttgctgctgtcgcctaggctggagtgcaatagcaggatgtgggttcactgtaacctccgcctcctgggttcaagtaattctgcctcagcctcctgagtagctgggattacaagcacc

SEQ ID NO: 35761 - DNA, 120 bp, synthetic construct
  source 1..120: mol_type = other DNA
ctgttctgaatatttgtgtaaagtttttgaattaacgtggtttttaaaaattactctgctgtaaatgcccaggagtgaaatcactgagtcataaagtcattgcctgttaaactgtttgtt

SEQ ID NO: 35762 - DNA, 120 bp, synthetic construct
  source 1..120: mol_type = other DNA
cgacaggacagagcggggaggggaaaagcgggccgagggacagggtgaaaggtgagaaacgagggtaagaggaaagagggcccggggcgctggggagttggggagacgatggagcgacag

SEQ ID NO: 35763 - DNA, 120 bp, synthetic construct
  source 1..120: mol_type = other DNA
gcccactgctgtcacgtggcctccatccgtgcgctttattggctggtgctggctttacggggttgaattttggacgctgcctgccattcgtgggaccgagtttcaggcagctggaataaa

SEQ ID NO: 35764 - DNA, 120 bp, synthetic construct
  source 1..120: mol_type = other DNA
agcaatgtctttcttgtattaaaatacagccccatgctcacaaaaaaaaaaaaaaaaaattttggagtgtaaacatatacatcatcttaatttgagtccttatgtgttgacggtgtgcag

SEQ ID NO: 35765 - DNA, 120 bp, synthetic construct
  source 1..120: mol_type = other DNA
acctacatttcccggaaggttaacagcccccttctcagttttcctggtaaagtgtttttatattggtagaataccttctgtcacactctatatttttcttatctcaagtagaaaaaattt

SEQ ID NO: 35766 - DNA, 120 bp, synthetic construct
  source 1..120: mol_type = other DNA
agatcttaatcttaagtagtaaatggttttattataaccactatacaaaatagaaacactaacataaaaaggttaaataatctgtttaaattatcttggattatcaacccaatcagctgt

SEQ ID NO: 35767 - DNA, 120 bp, synthetic construct
  source 1..120: mol_type = other DNA
aggtattttagtggaataagaatgtgatatatgaaaacagaaaaataaatatcttcaatgttacttaaagaaacagaattaacaaagatgtatcatggaagagaggatagttctgtaaaa

SEQ ID NO: 35768 - DNA, 120 bp, synthetic construct
  source 1..120: mol_type = other DNA
ttaactccaaataatgaagtgtttggttgtagggtattagatctttcatggaagaaagtagtcccgtaagtctaagtacaaatttcaaatgtaaaataaaactgatcaagccagagacca

SEQ ID NO: 35769 - DNA, 120 bp, synthetic construct
  source 1..120: mol_type = other DNA
cggattgagaatctggataataagaaaatattctattgatcctggtgatttgaatgtacgataggagctggttgtcaactgatttaatcagtgggtatttcagtatgaggcatagttggt

SEQ ID NO: 35770 - DNA, 120 bp, synthetic construct
  source 1..120: mol_type = other DNA
atatccttaaacactgctgccctgtgcatcagaacatactcactccgatattggacctgttgctggttagaaatgtcttgacaaatgggatctaattaaactaaagagcttctgcacagc

SEQ ID NO: 35771 - DNA, 120 bp, synthetic construct
  source 1..120: mol_type = other DNA
gtaacaagcctgcatcttctacacatgtataacttaagtatcataaaaagaaagaaatgttttcattaataatatttctcaccttttctagatataaatttaattcacagttgggcaggg

SEQ ID NO: 35772 - DNA, 120 bp, synthetic construct
  source 1..120: mol_type = other DNA
cttgaattcccaggagtgaaacaaatttagcaatatttgcatgactattggagaaccagaccacttaacaggtatacatatgcccctctgactacctcctagatattttctgccacgtca

SEQ ID NO: 35773 - DNA, 120 bp, synthetic construct
  source 1..120: mol_type = other DNA
tttctgagggacaatagcatttctctaggatacatctatgtacatgcaactgaagaaaatagcttttaaatttactttatctcttgtagtagttttatagctacataagagtattgtaat

SEQ ID NO: 35774 - DNA, 120 bp, synthetic construct
  source 1..120: mol_type = other DNA
gacgaaataaatccagcttggatgggagtgtagttaggcaaaggttttcatgcgaaatcaggaaaaaatacgagaacgtattttattaacggaaagaatgcagatttgaggacccgcccg

SEQ ID NO: 35775 - DNA, 120 bp, synthetic construct
  source 1..120: mol_type = other DNA
actggaacaggaacagcaacacacgggcacaccgcagccggagccacagcccccacagccggagccacaaccccccttggatcccccacaagaaccgcagccccccttgcagcctccaca

SEQ ID NO: 35776 - DNA, 120 bp, synthetic construct
  source 1..120: mol_type = other DNA
atggaaggaggtgtgtgcatggatggtgagctagagcaggtgcaggtgcctcagggaggatgtgtgggacgaactgactcagggaaccataagaaatgctttcaccaaacaggagaaacc

SEQ ID NO: 35777 - DNA, 120 bp, synthetic construct
  source 1..120: mol_type = other DNA
tagcagctgcactgggagcagccacaagaaccgcagccccccttggagcccccacgaaatccacagacccccttggaacccccacaggagccacagctggaggagcagcagacgggcaca

SEQ ID NO: 35778 - DNA, 120 bp, synthetic construct
  source 1..120: mol_type = other DNA
cttccatcacagacctgacagcacattcgagaaaagtgcgaggaaaacaggagttatttataaaaatgtaaagcagaagagaatactgggaccagtggcacaagcaggaaccaggaagtg

SEQ ID NO: 35779 - DNA, 120 bp, synthetic construct
  source 1..120: mol_type = other DNA
ctcactggcttcatccactccacaccagtgctcccgaaactgactgaggaccccttctggctcattgcctactacttctcctgaacttcctctccctgctcctcactcatttaagatcca

SEQ ID NO: 35780 - DNA, 120 bp, synthetic construct
  source 1..120: mol_type = other DNA
agtgtaagatctgaggctctggactcaggtctcatgtgagtcctgctaaccccattttccgaagctgtgacctgtccttcatcgttgagccccaaaccactgctcagggtccattcctca

SEQ ID NO: 35781 - DNA, 120 bp, synthetic construct
  source 1..120: mol_type = other DNA
cttcttctttttcctttgtccctttctcaggtaaaaggtccaggagttgggctgcttggaatttccaaagggggtgagctctgcctttccatggcctctttcctgaagggcatcacggct

SEQ ID NO: 35782 - DNA, 120 bp, synthetic construct
  source 1..120: mol_type = other DNA
aggagaattgcttgaacccgggaggcagaggttgcaatgagctgagattgcactactgccctccagcctgggtaacacagcaagactatgcctcaaaaataaataaattaattaaataaa

SEQ ID NO: 35783 - DNA, 120 bp, synthetic construct
  source 1..120: mol_type = other DNA
cagcagcagcctgttcatggagtgcggctttacgcgcatttgaagaaccagcttaggttctacttgttacaatacaggctctatttctttggtctggggtgcggcctgggagtctgcatt

SEQ ID NO: 35784 - DNA, 120 bp, synthetic construct
  source 1..120: mol_type = other DNA
tccctgctctccaggcacctaacttgataggacgcaggattcaatgggtttaacacggttagaaccatgttagctactattaatatgatcaaatgttccccaagttgctgaagtttcagc

SEQ ID NO: 35785 - DNA, 120 bp, synthetic construct
  source 1..120: mol_type = other DNA
actcaacaaatggtgagcccacgtgaaccccaggactttagtacgtccgtgaattcactcataaaagaacactgtacaaacgacacgagtttaagacggcagctatttcatcaagaagca

SEQ ID NO: 35786 - DNA, 120 bp, synthetic construct
  source 1..120: mol_type = other DNA
acattttaaaataattagaactacctcatagatgcacggtaccttctaggttgctaaagccctcttcgtgtctctgaggctgaaatacacacgaaccactgctttaagtgccctgtgaga

SEQ ID NO: 35787 - DNA, 120 bp, synthetic construct
  source 1..120: mol_type = other DNA
actgttacaaaggatctagagaaagggacccttgctttatcactccggctctccagtcatgcttcacattttcacttcttacactctttcacatgaagtcaatttacagacctccatcat

SEQ ID NO: 35788 - DNA, 120 bp, synthetic construct
  source 1..120: mol_type = other DNA
tttttttttttttattttttatttctttgcttttttgagacagggtcttgctctgttgcccaggctggagtgcagtggtgagatcagggctcactgcagcctccatctcctgggctcaag

SEQ ID NO: 35789 - DNA, 120 bp, synthetic construct
  source 1..120: mol_type = other DNA
aggctggcagcaggtggtggcccagcagcagggcctgcacaccacagccgtgcacgacgaggggcagcaggtgatggggcggcagcagccttcctgcagggagcaggggtcgcagcacac

SEQ ID NO: 35790 - DNA, 120 bp, synthetic construct
  source 1..120: mol_type = other DNA
gcagtaaaaaccatcaggttgtagaatgtgtttgcaaagtccaccccaggaattcttaaaggtcgatttactatccataatgactaaggctgatgtagacacctgaaaatgtgggtgagg

SEQ ID NO: 35791 - DNA, 120 bp, synthetic construct
  source 1..120: mol_type = other DNA
tgtgcatcttctggccaattaagtgaagatttagcattgactaatggtattttggtcactcttcacctcatacatattcatgtacatacaccacaaatattcgctcattttcttgtattg

SEQ ID NO: 35792 - DNA, 120 bp, synthetic construct
  source 1..120: mol_type = other DNA
tgtgtccagctgctgcaggccccagtgctgccagtctgtgtgctgccaacccacctgctgtcgccccacctgctgtgagacgacctgctgccaccctaggtgctgcatctccagctgctg

SEQ ID NO: 35793 - DNA, 120 bp, synthetic construct
  source 1..120: mol_type = other DNA
caatatgcaggaggtttattgaagcatgctcttgggattaacactggggaaatgaggggaggggaggggaggggaggggaggggaggggaaagtgaagggagagaaggggaaggggaagg

SEQ ID NO: 35794 - DNA, 120 bp, synthetic construct
  source 1..120: mol_type = other DNA
ttatccacatactatacatttttattttagttgtttaatgaacataattgtaattcttttcatttttgccaaattctgtttcttatgcatgtgtcttatacaagtacctgcaggaaaatg

SEQ ID NO: 35795 - DNA, 120 bp, synthetic construct
  source 1..120: mol_type = other DNA
tagaatggaactcatgtttccaatgagcccatcaccatttcactgactctttgagaacattctgattcattttaaactccctcccttgctttctttttcttccggtggtggcaccaaatg

SEQ ID NO: 35796 - DNA, 120 bp, synthetic construct
  source 1..120: mol_type = other DNA
tttaaaatcttggaaatctgcttgagggagggcagaatacttcatcctgattctctttttccttacaccttgtggatcatgtgccagcttcatctgttctcaagtttgagtcatggtctc

SEQ ID NO: 35797 - DNA, 120 bp, synthetic construct
  source 1..120: mol_type = other DNA
cacctctgaacagaactccaccctctacccctgacaccatgacccactgttgttccccttgctgtcagcctacgtgctgcaggaccacctgctggaagcccaccactgtgaccacctgca

SEQ ID NO: 35798 - DNA, 120 bp, synthetic construct
  source 1..120: mol_type = other DNA
aggtggtcatgcattattaccttcatttttcacctgaaaaaaaattaatatgtgatgttatgtagctaataaaggacagattctgatccaagctgaggtcctctctttctgcccaaggac

SEQ ID NO: 35799 - DNA, 120 bp, synthetic construct
  source 1..120: mol_type = other DNA
ctttatggaaaggcccctttattactttctaccccgacagctatcaaagtttctggaatctctagttggatacatcactcctgagtaaaactgtgagaaggtcccgaagaaccaacaaca

SEQ ID NO: 35800 - DNA, 120 bp, synthetic construct
  source 1..120: mol_type = other DNA
cgcagttacacaagtggttcgacagccacatcccccggtgggcctgtacccctcctggctatgtatttttatgtgggccacaaaaaaataaactgccctttgatggaagtcctaagataa

SEQ ID NO: 35801 - DNA, 120 bp, synthetic construct
  source 1..120: mol_type = other DNA
agcattcttgtgagccactggagaacttaaaattccacttcaagtgaaaagataagtaaagccttctctctgttcacccaaaactaaagtcaatctcagtacggggaatcttggttgcgg

SEQ ID NO: 35802 - DNA, 120 bp, synthetic construct
  source 1..120: mol_type = other DNA
tagagcatttatagagtcaggaacacatgcacacaatggccgaggtatacactagagcattcacagtgagtcggggacacacgcacacaatggccatggtacattttacagcatttatag

SEQ ID NO: 35803 - DNA, 120 bp, synthetic construct
  source 1..120: mol_type = other DNA
cgaggtacactctagaacactcacagtgagtcgggaacacacgcacaaaatggccgaggtacactctagagcattcacagtgagtctggaacacacgcacacaatggccgaggtacactc

SEQ ID NO: 35804 - DNA, 120 bp, synthetic construct
  source 1..120: mol_type = other DNA
agcaatctacccaccttggtctccatttctaagggtaaaaaagagctcccgatgtgtagacaagagagggtggggagtgggccagagccatagaaaggcacaaaggcagagggatggcac

SEQ ID NO: 35805 - DNA, 120 bp, synthetic construct
  source 1..120: mol_type = other DNA
cccaccacactctaatgatctcggggtgccagcctgggctcccctgaatcagagcccacctaccacgctctaatgatctcagggcaccagccaggctcccctgaatcagagcccacccac

SEQ ID NO: 35806 - DNA, 120 bp, synthetic construct
  source 1..120: mol_type = other DNA
tctaatgatctcagggtattagcctgggttccccaacatcagagtccacccaccatgctctaatgatctcagggtgccagcctgggctcccccagatgagggttccatgaccactctcta

SEQ ID NO: 35807 - DNA, 120 bp, synthetic construct
  source 1..120: mol_type = other DNA
tggtaccatttatcctgtaactattccaaacaattgaaaaggagggactcctccctaactcatcttgtgaggccagcatcatcctgatacccaaacctggcagagacacaacaaaaaaag

SEQ ID NO: 35808 - DNA, 120 bp, synthetic construct
  source 1..120: mol_type = other DNA
taatatataatgagataattacacaactcactataaggtagaatctgtgggggtcctgagcttgttttcccgcaactagatggtctcatctgagggtgatgggagacagtgacagatcat

SEQ ID NO: 35809 - DNA, 120 bp, synthetic construct
  source 1..120: mol_type = other DNA
gcttttactattataagtatttcccaagtagattttttttaatttaattttttttttcagacagggtctcactgtcccccaggctggagtgcagcggtgcgatcatagctcactgcagcc

SEQ ID NO: 35810 - DNA, 120 bp, synthetic construct
  source 1..120: mol_type = other DNA
ccagctaatttttgtatttagtagagacgagatttcaccatgttggccaagatggtcttgatctcttgaccttgtgatccgcccgtcttggcctcccaaagtgctgggattacaagtgtg

SEQ ID NO: 35811 - DNA, 120 bp, synthetic construct
  source 1..120: mol_type = other DNA
ctaaatatttttgatccatagttggttgaatccacggatgtttggatccagcccctggatacggagggctgactttaatcttcccccatccttaagtatcctgtgaagttataaatgatg

SEQ ID NO: 35812 - DNA, 120 bp, synthetic construct
  source 1..120: mol_type = other DNA
gcatcggcagtcagatccttcctgtctgtgagaaagacacccagcttaatactaagagagaaaaatggccaaccgatggggctagcacactttttagaaggtttttaaagatattactat

SEQ ID NO: 35813 - DNA, 120 bp, synthetic construct
  source 1..120: mol_type = other DNA
acttgacatttagcagtaaaacttaccacactgatgacagcaaggggcaaagagcatctgaaagtcatgttcacagtactttcttccttcaaactgaaagagagggtaccaccaacttac

SEQ ID NO: 35814 - DNA, 120 bp, synthetic construct
  source 1..120: mol_type = other DNA
tcgtcttgaacacttgggctcaagtggtccttctacatcagcctcttgagtagctgggattacaggcacacactaccttgtccagattaatgtatttggtttttaaacagaaagaataaa

SEQ ID NO: 35815 - DNA, 120 bp, synthetic construct
  source 1..120: mol_type = other DNA
tgatgcctccattcacacctctggagctcctctcctgccctcttctgctgtggtacattggcctctcctgctcctgtccatcttcacaactgtcatttgcccatccctaaatccatcatc

SEQ ID NO: 35816 - DNA, 120 bp, synthetic construct
  source 1..120: mol_type = other DNA
atttcaaagttactgtaggttggggaaaaaatctgtaaaattctcatcatcgcccagctttgccgtaagccagatgattgtggcagttttacaaaactctggaggggtttgtgcttcttc

SEQ ID NO: 35817 - DNA, 120 bp, synthetic construct
  source 1..120: mol_type = other DNA
taagcctccaagagaaagaaatatccacacgtgccttgcatatttgccacaagacttcatcaacaatgccgtgcttttcactctggagggcataagaggcttttggagaccttgtaaaac

SEQ ID NO: 35818 - DNA, 120 bp, synthetic construct
  source 1..120: mol_type = other DNA
taccccgaccaccccggggcgcatgttgtcaggacctcctgaggctgtgtcatgggtgcgtcattaactttggcaaaatacatgttctaaattgagtaagacttgtctcatatacttttt

SEQ ID NO: 35819 - DNA, 120 bp, synthetic construct
  source 1..120: mol_type = other DNA
ctgagtgaagaaggttgtttgtatgtcgtgaataaggatctgtaacagtgtggccatggaaagtttaggtggtggtcaggtgcagtggctcacgcctgtaatccctgcactttgggaggc

SEQ ID NO: 35820 - DNA, 120 bp, synthetic construct
  source 1..120: mol_type = other DNA
tgggaggcagaggttgcagtgagcagagactgcatcagagcagcctgggtgacagagtaagattctgtgaaagaaaagtgaagaaaaaagagaagagaagagaagaacaaaaaattctaa

SEQ ID NO: 35821 - DNA, 120 bp, synthetic construct
  source 1..120: mol_type = other DNA
ccaagatggcaccactgcattccagcctgggtgacggagcgagaccctgtctcaaaaaacaaaaacaaaaaccagcaaagatgcaaataaatatgaaaaatagaatggctaattacaaga

SEQ ID NO: 35822 - DNA, 120 bp, synthetic construct
  source 1..120: mol_type = other DNA
caacatggcaaaaccccatctctactaaaaatacaaaaaaaaaaaaaaaaagaaattagtcaggtgtggtggcacgtgcttgtagtcccagctagttggggctggctgtggtggcttaca

SEQ ID NO: 35823 - DNA, 120 bp, synthetic construct
  source 1..120: mol_type = other DNA
acaatcaattttagaacattttcatccccccagaaagaaacgctgtgcccattagcagttgctttccatgtcccccattaccctcctagccctaggcaactactatgttactttctgtct

SEQ ID NO: 35824 - DNA, 120 bp, synthetic construct
  source 1..120: mol_type = other DNA
aggtataacaatacattatgcaccatggtccaacaatgacaataaagtttttcaccactccgggcattttatccacaccaatgtaaatgtccttgggtcccatagcaccaagagactctg

SEQ ID NO: 35825 - DNA, 120 bp, synthetic construct
  source 1..120: mol_type = other DNA
tcagtaacctctagggagtatttcttctaacaattatgggtggaattgggcagttcccctttacaagatatgttttatgtactgccacctttgtgcagctcaaccgatttggaatttgcc

SEQ ID NO: 35826 - DNA, 120 bp, synthetic construct
  source 1..120: mol_type = other DNA
gctgaggcacaagaactgtttgaacccaggaggcagaggtttcaggcttcagtgccactgcactacagcctgggcaacagtgtgagaccctgtctcgaaaaaaaaaaagaaaaaaaaaaa

SEQ ID NO: 35827 - DNA, 120 bp, synthetic construct
  source 1..120: mol_type = other DNA
agacattgatcctgtctgacacaacgaagtttggtggtcaatcatgccagtctagaggctgtttctgggggaggagaagtaatttccaaggccctttccaggtctaatattctttgacta

SEQ ID NO: 35828 - DNA, 120 bp, synthetic construct
  source 1..120: mol_type = other DNA
aggtgagtaattaattgatcacttatttttttttcatatattcttttcctactttctaagggtctcgctctgtcatccaggctggagtgcaatggcacaatcacagctcactgcagccac

SEQ ID NO: 35829 - DNA, 120 bp, synthetic construct
  source 1..120: mol_type = other DNA
tgctgggattacagtcatgagccactgggcctggcccgttacttgtaaagacaaagctagcagccgaaaacttacttggaacgttccttggacataaaatcaccatttcttaaaaggatt

SEQ ID NO: 35830 - DNA, 120 bp, synthetic construct
  source 1..120: mol_type = other DNA
tcactacaaatcatgggtatctgcaaccccctcaggttcgataatttctttcttgggggttgggggagtttaggagcagaggtttaataggcaaaagaaagaaaaacgagaacagatctc

SEQ ID NO: 35831 - DNA, 120 bp, synthetic construct
  source 1..120: mol_type = other DNA
tttttaaatggctaattggtgaaggcagagttttctcattcacagaagcagaagggggcccagtatttggtttggtttgattctaaaatggaggccaagagcctcgaaatcaaaggacag

SEQ ID NO: 35832 - DNA, 120 bp, synthetic construct
  source 1..120: mol_type = other DNA
tggagattccaaaggtcttagaagctcttgtgtcaggaaccaagaccaagtattctaataaaagatgtttctatcacccctgtcactcaggaaattacaagggtttctggagatctgtgc

SEQ ID NO: 35833 - DNA, 120 bp, synthetic construct
  source 1..120: mol_type = other DNA
ccagcaggtctttttccagaagtccagatggcaggggaacctcttcacgttgttgacccttctccctgtaattttttccccaataaaccttttcattatgttgctgtatttatacccaaa

SEQ ID NO: 35834 - DNA, 120 bp, synthetic construct
  source 1..120: mol_type = other DNA
gcatactagtcctttgttagatatttacattgcacatatattctctcagtctgttaaccatcttttcattttcttaatggtgtctttcaaaaagaagtttttaattttgatgaagtccaa

SEQ ID NO: 35835 - DNA, 120 bp, synthetic construct
  source 1..120: mol_type = other DNA
ttgattttttaaaattctaagtacatatataaatacattaatgtttacagagcattaagagaagtgaaaaaggtcgggcgcagtggctcacgcctgtaatcccagcactttgggaggccg

SEQ ID NO: 35836 - DNA, 120 bp, synthetic construct
  source 1..120: mol_type = other DNA
acacttcaacatttatggtaaccacctggaggatttgttaaagcggactgctagacccatcctcagagtttctgattcaacaggcctgtgatggggctcaagaatttgcttttttttttt

SEQ ID NO: 35837 - DNA, 120 bp, synthetic construct
  source 1..120: mol_type = other DNA
aggcaggagaatcacttgaacccgggaggcagatgttgcagtgatccaagatcatgccactgcactctagcctggttgacagagcaagactctgtcacaaaaacaaaaacaaaaagtaaa

SEQ ID NO: 35838 - DNA, 120 bp, synthetic construct
  source 1..120: mol_type = other DNA
ggatggtaaacaaagtacttggacatgtttctggtaagtttctctatgagctgggacataagttttacatttaatcctattttctatgttaaaggaggataagtgagttttacccattga

SEQ ID NO: 35839 - DNA, 120 bp, synthetic construct
  source 1..120: mol_type = other DNA
atgatgcttgactaactctgaatacttcctggcacttgtaagataaacttggtcatgataaattaagtgatcagttattgctcccaaggtttctgtcatctgggtttagggtcagaggtg

SEQ ID NO: 35840 - DNA, 120 bp, synthetic construct
  source 1..120: mol_type = other DNA
ggctctaaaaaccatccaaatgttgacagctccctagtttatatctgggaaataataggagggtttagagtaaagaagtgacccgatacatgcgtgattaacacatgcttaaaggatcag

SEQ ID NO: 35841 - DNA, 120 bp, synthetic construct
  source 1..120: mol_type = other DNA
gctccatgaaatcgggtttttatctgttttcgttcctgctctatcattcctagcactcagaatagtgcctgtcacaagaaatggagggcactcaacatatatccattgaatgcataaaac

SEQ ID NO: 35842 - DNA, 120 bp, synthetic construct
  source 1..120: mol_type = other DNA
cagttgtgtctcttttccaactttctataaatgaaatcatctgtataaatcttgcatctggcttcttttgctccatattatgtttgtgaaattcatctatattattgaatataataactg

SEQ ID NO: 35843 - DNA, 120 bp, synthetic construct
  source 1..120: mol_type = other DNA
tgggtggtaagggtcatttcttttttaatcgtcaactttttaaaaaaattatttttatactttaagttctgggatatatgtgtagaacatacaggtttgttacataggtatacaagtgcc

SEQ ID NO: 35844 - DNA, 120 bp, synthetic construct
  source 1..120: mol_type = other DNA
gacagcgagactccgtctcaaaaaaaaaaaattagctgggcatggtggcacacgcctgtagtctcagctactcaggaggctgaggcaggagaatcacttgaaccctggaggcagaggttg

SEQ ID NO: 35845 - DNA, 120 bp, synthetic construct
  source 1..120: mol_type = other DNA
caccacaaatagaatgaagtgcataatactacctcaccttctgtttacactgggtaactccaaccgggttctttctatttaatcatggccctgtcccagtaaaaacacaccctatactac

SEQ ID NO: 35846 - DNA, 120 bp, synthetic construct
  source 1..120: mol_type = other DNA
gcgcacgggacgcgagaacagccatcctgcttttacagctaaacaaatggctcaacaacggagtgactgtcacattcacgtttctgttggggaaggacaataaaatttaaaaacgtgagc

SEQ ID NO: 35847 - DNA, 120 bp, synthetic construct
  source 1..120: mol_type = other DNA
cgcctggctaatttttgtatttttagaagagacagggtttcaccatgttggtcaggctggtgtcgaactcctgacctccagtgatctgcccgccttggcctcccaaagtgctgggattac

SEQ ID NO: 35848 - DNA, 120 bp, synthetic construct
  source 1..120: mol_type = other DNA
agcatcttctgttctgctaagttaataagctctcatctatttgctttccatcttttctttttttgtaatcttttgtcctctgttatctcctctactgtcttttcccttttatggcttttc

SEQ ID NO: 35849 - DNA, 120 bp, synthetic construct
  source 1..120: mol_type = other DNA
gggcggggacgtagaggaggcgcgagggcggacttcgggtcgggggagatgcgcggaacggaggggttggtgcaatgtctcaacccgggagggtttttttttttttggtttttttttttt

SEQ ID NO: 35850 - DNA, 120 bp, synthetic construct
  source 1..120: mol_type = other DNA
ataatttggactttgaggttgaccaggcctgatttttgaataaattcacaaacttacctccatacattatggtagaaaggtcaataatctggactttgaggtcgaccaggcctgattttt

SEQ ID NO: 35851 - DNA, 120 bp, synthetic construct
  source 1..120: mol_type = other DNA
atttcccagcaccccccccaaaaaaaaaattgctcctaggtggacacactaatcaaagacttcctgagaaatgcaggaagaagttttgtcctctgaccacgctacgccctttccttgatg

SEQ ID NO: 35852 - DNA, 120 bp, synthetic construct
  source 1..120: mol_type = other DNA
cagagacctttcacatgtcatataattacacgtacagttggatttactttccttgctttgttgtgtcttttttattcttccctttttgattttaaattacatacgtttagcataccattt

SEQ ID NO: 35853 - DNA, 120 bp, synthetic construct
  source 1..120: mol_type = other DNA
ggaatgtcatcctcacctccaggtgagcatcggacagcctggaacagaattctcaagccccaggtgaggatctgacaacctggaacagaaccccactcttccaggtgagaatctgacagc

SEQ ID NO: 35854 - DNA, 120 bp, synthetic construct
  source 1..120: mol_type = other DNA
agggttgcatgatacccatttcaggacagggccgcccacaggacaatgcatggacattctagtgtccccttcactgtttcatcctcataggctggctcacagtagatgcccactagtgtt

SEQ ID NO: 35855 - DNA, 120 bp, synthetic construct
  source 1..120: mol_type = other DNA
ttaactgatcgaattagatattgatccatcaaaatgaaagatttagggatagggtgaaagtccaggactcattcactgattcccttcacaaacatggagttttactaatatgtgtccttc

SEQ ID NO: 35856 - DNA, 120 bp, synthetic construct
  source 1..120: mol_type = other DNA
actctcccggggggcaggatacagctccacgcataagtttttgagtatgattgtgtggctcagcaggttctccagggtggccatggagatgggatttccacagaagctgaaggtgttgag

SEQ ID NO: 35857 - DNA, 120 bp, synthetic construct
  source 1..120: mol_type = other DNA
agcatggcagcctctccatagcatctcccctagctgatccctctgcctctattgggagggttgcatgatacccatttcaggacagggccgccaacaggacaatgcatggacattctagtg

SEQ ID NO: 35858 - DNA, 120 bp, synthetic construct
  source 1..120: mol_type = other DNA
acagtggggggaaaagttctgtgggcagctcctccagggtggacatggccaaggcttggtccctcagcaggctccgccccgcaagctccaggagtctgggtggagtccggatgctcatct

SEQ ID NO: 35859 - DNA, 120 bp, synthetic construct
  source 1..120: mol_type = other DNA
aacaaaaataaaccaagcttgcaacacattcagcattcatcaggaggtcttcttgctctctgacctggttcctcatggttgccgcaacctactgttccaaaatcatatagaccttagatt

SEQ ID NO: 35860 - DNA, 120 bp, synthetic construct
  source 1..120: mol_type = other DNA
aatctgcacatgtcagaaaatcagctttgtgccccacagttccgtgaacatgaatgatcccatctctaattccctgttgtaaaagtttcttttgagctccaggtaaattaattacctagg

SEQ ID NO: 35861 - DNA, 120 bp, synthetic construct
  source 1..120: mol_type = other DNA
ctcccgtggggcaggatacagctccaggcataagtttttgagtatgattgtgtggctcagcaggttctccagggtggccatggagatgggatttccacagaagctgaaggtgttgagctc

SEQ ID NO: 35862 - DNA, 120 bp, synthetic construct
  source 1..120: mol_type = other DNA
cctaggtaattaatttacctggagctcaaaagaaacttttacaacagggaattagagatgggatcattcatgttcacggaactgtggggcacaaagctgattttctgacatgtgcagatt

SEQ ID NO: 35863 - DNA, 120 bp, synthetic construct
  source 1..120: mol_type = other DNA
aaaaaaaagacaggatacacttctgtgccatcgtaggctgcactgtcaacatcccagaccagctgactgtaggtcagatgggagtgtccttacagaaattagtgacttaccagatctgga

SEQ ID NO: 35864 - DNA, 120 bp, synthetic construct
  source 1..120: mol_type = other DNA
gcttccagaagccttatttggtggatgtcagcttcactgcacaaggagccactctcttcccactgccctggaaggggatgtccatattgtgtattagctggagactctgggcagcatcaa

SEQ ID NO: 35865 - DNA, 120 bp, synthetic construct
  source 1..120: mol_type = other DNA
atatccagtgtacagccaatatatcagcaaatcccttggagaaaggaaaatatttctgaggaggggtttcacatgaagttcagaaaattcctgtgtttgaagcagtccaaatgacatttg

SEQ ID NO: 35866 - DNA, 120 bp, synthetic construct
  source 1..120: mol_type = other DNA
aattcatttgtaaaaaatgttgtctttcctgtctcagtattcttcttgctgtttcccattgttatgttgatttcttttttctcactggggcaccatctttgcttttcattacactctaga

SEQ ID NO: 35867 - DNA, 120 bp, synthetic construct
  source 1..120: mol_type = other DNA
ccagggtccctgctctgcacactacactgctacctctacaatgtctcatgtgccatctttcttcctcttcaggaataagagcctgtgccccaggaagcagcacttccctctcactgggac

SEQ ID NO: 35868 - DNA, 120 bp, synthetic construct
  source 1..120: mol_type = other DNA
acataatagtagtcctgtttatggctctccttgaattggttcatctgtgctggtgactggtatttgttaccaaaccttgtctggtgagcacaagaaaaggaattttttaaaatctgctat

SEQ ID NO: 35869 - DNA, 120 bp, synthetic construct
  source 1..120: mol_type = other DNA
tgagggccctttttctgtgctggctgtcagcggggagacagtctactctgactccagaggccacgtgctttcctccttacctgtctgtttcatctttcaaccaataacaactcatggagt

SEQ ID NO: 35870 - DNA, 120 bp, synthetic construct
  source 1..120: mol_type = other DNA
tgtgtgcacacttgtagttaggtttagcagtgggggcacccgatggagcctggaagtgagaggaaggtgaggtccgtatttcttccctctccctccctgctctggcactgagtatctggc

SEQ ID NO: 35871 - DNA, 120 bp, synthetic construct
  source 1..120: mol_type = other DNA
taaagtaagaaaaattaataaagtattgaaaagaaagaattgaagctgtctttattcacagataatgactgtgtttgttaacaatgctagaaatctacaaaaatctaccagaactaatca

SEQ ID NO: 35872 - DNA, 120 bp, synthetic construct
  source 1..120: mol_type = other DNA
aggctgtctttttggcaatgttcttagtaagtgtcggtgagtgagtgatttatctttccagagtttctctctctccatctgcaaaggcagacaaattgtctcttgcaagggtctgaagca

SEQ ID NO: 35873 - DNA, 120 bp, synthetic construct
  source 1..120: mol_type = other DNA
gtgtcattcctgcaggcaggacctataggcgcctgaagatttgaatgaaactatagttccatttggaagcccagacataggatgggtcagtgggcatggctctattcctattctcagagc

SEQ ID NO: 35874 - DNA, 120 bp, synthetic construct
  source 1..120: mol_type = other DNA
tgattaaattcagcctaaacgttttgccgggaacactgcagagacaatgctgtgagtttccaacctcagcccatctgcgggcagagaaggtctagtttgtccatcaccattatgatatca

SEQ ID NO: 35875 - DNA, 120 bp, synthetic construct
  source 1..120: mol_type = other DNA
atttagttttttaatgttataaacaagattttttttttcaagtcagaaataattttcttcactaaagtgaaaatattttaagctgtgatgacagtaaagcttaacaataggttgtttgga

SEQ ID NO: 35876 - DNA, 120 bp, synthetic construct
  source 1..120: mol_type = other DNA
ctggttgtagtttaacgcaagacacttatttactcactgatggtgtgtgtgtgtgtgggaggggagattagcatgaggggtgggaatggggagatttgatgaagagaaaactaacatttt

SEQ ID NO: 35877 - DNA, 120 bp, synthetic construct
  source 1..120: mol_type = other DNA
gtgatttgttcatatgtgaagtatgaattgcttaatgtgacctgcttctctgaatttatttacagaaaatgaaagtgatgatgaggaagaggaagaaaaaggaccagtgtctcccaggta

SEQ ID NO: 35878 - DNA, 120 bp, synthetic construct
  source 1..120: mol_type = other DNA
tttactcatttgaggaagagcatatcagcttcgccctttacgtggacaataggttttttactttgacggtgacaagtctccacctggtgttccagatgggagtcatattcccacaataag

SEQ ID NO: 35879 - DNA, 120 bp, synthetic construct
  source 1..120: mol_type = other DNA
cggctcccgtgaaagatacatttgcggaatgtactcaaattagaagcatcatgtaaaccctataatgtagcaatagtgcatcaacttccctacactatagaaatatctgcggtgtagaca

SEQ ID NO: 35880 - DNA, 120 bp, synthetic construct
  source 1..120: mol_type = other DNA
caaaaggacttgcttccattgtttgttcaattgtttgtgtttgttaaataaataaaacgattttcatgtatctttgaaattactttggcgctactattttatgattgcaaataatgcggc

SEQ ID NO: 35881 - DNA, 120 bp, synthetic construct
  source 1..120: mol_type = other DNA
ccacttcggaattaataaaaaaagaagcagattcagttatgctttctcttgtttctggtggaggccatgtagcagctgctacaatatctgttgcaaagcgaacaagtgggagtggtgctg

SEQ ID NO: 35882 - DNA, 120 bp, synthetic construct
  source 1..120: mol_type = other DNA
atggggctaaaatcaaaaggttgaagcacctccagtttgacctacttaacaattttgcttagccttgaactcttggcctctctgataattagttttctaatttttttttttttttttttt

SEQ ID NO: 35883 - DNA, 120 bp, synthetic construct
  source 1..120: mol_type = other DNA
gcagatactgacactagaaataagtgtcagagaggtctgatatcacttcagtttcagactgaccccagagcaacccttgaggacagcagtgtgtaagctcaaaaaagattgttctaattt

SEQ ID NO: 35884 - DNA, 120 bp, synthetic construct
  source 1..120: mol_type = other DNA
cggagaagctgaaaggctagggaatgagtgaaaagaaagcaaacactaggaagaagcttgctttacaacaactcactctctcaggaactaatccagtcccacaagagtgagaactcattt

SEQ ID NO: 35885 - DNA, 120 bp, synthetic construct
  source 1..120: mol_type = other DNA
ggacccatttctctggggacataggcttagaaaagataccttaatttgtggtatggctgtacacacctgtgctttatgtgaatttgggtctgtttgtcactagcaaaagtcaacattttt

SEQ ID NO: 35886 - DNA, 120 bp, synthetic construct
  source 1..120: mol_type = other DNA
ctcacacactcctaaccaaataatgaatttctcagcttcacaatgtttaagtgacatgagtcccatgcccaattcttggtcattttaattggtgcatggaaggaacgtgtgccttctgct

SEQ ID NO: 35887 - DNA, 120 bp, synthetic construct
  source 1..120: mol_type = other DNA
acttgtagaactgttgagaaggctagagagccagatcaaagctaggcagccaggaaatgtaccccaaaccatgctgtagaactcatccagggaggaaaccactgtcaccaccagtaagaa

SEQ ID NO: 35888 - DNA, 120 bp, synthetic construct
  source 1..120: mol_type = other DNA
ctactcatttgttatacaacaagttcttttaagagaaggatgtagaacaggatattatggcagtatatataaggcattcaatgtacccgtggagagtggcgatcagagaaaaatgatgtc

SEQ ID NO: 35889 - DNA, 120 bp, synthetic construct
  source 1..120: mol_type = other DNA
ctgccacatatacatcaataatatctctccttctagacatcgtggacaaccaattacataggctgaatttcttttaaaattgcattcacgtaggttataatgcctaagcaatctactttt

SEQ ID NO: 35890 - DNA, 120 bp, synthetic construct
  source 1..120: mol_type = other DNA
cctataggtcctgcctgcaggaatgacatctctcggcttagtaagagctgcttattgtgggaatatgactcccatctggaacaccaggtggagacttgtcaccgtcaaagtaaaaaacct

SEQ ID NO: 35891 - DNA, 120 bp, synthetic construct
  source 1..120: mol_type = other DNA
aaaggcatttttccttcaagagaaataaaactatccttctaaatacagggtggagggtgactgctctggggacacagcaaaaatgggcagcatgtgctcagtacatttgccacagatgag

SEQ ID NO: 35892 - DNA, 120 bp, synthetic construct
  source 1..120: mol_type = other DNA
ttcatacttcacataggaacaaatcactgtccagtcatagcacaaggacataactattctcagtgcaagaataaggattctgacaggaatattctagggtgtcctagattaactttggtg

SEQ ID NO: 35893 - DNA, 120 bp, synthetic construct
  source 1..120: mol_type = other DNA
cacctcctgcactcaggtgactatgagattgtcacacttgcctggggttgagtaacttgatactggggactggcagacaaaggcatgacattagctgagaaggacaaaaaaactccctga

SEQ ID NO: 35894 - DNA, 120 bp, synthetic construct
  source 1..120: mol_type = other DNA
atataaatggtagaatcagcttgtaaatttctaccaaaatgccgcttggaattattattagaattgcattggatctggagatcaatttacgaagaactgactttttaaacataacaactc

SEQ ID NO: 35895 - DNA, 120 bp, synthetic construct
  source 1..120: mol_type = other DNA
ctgtgggttcttcaaatctgcccttaatggggttggaagtgttgccttctgttctcatcatgctgagcattttctggggtttgtttttataaatcatgaaaaaagttttcaattttgcca

SEQ ID NO: 35896 - DNA, 120 bp, synthetic construct
  source 1..120: mol_type = other DNA
cagcaaggatgtggggtaaccagagtatccctgctaaatggtacaaccactttgggaaaacgttcaacaatatgtaatactaagttttatcattcatatacctctaaaaccaacaatgcc

SEQ ID NO: 35897 - DNA, 120 bp, synthetic construct
  source 1..120: mol_type = other DNA
aaaaacaaaaggggaaactagtgaaaataaagctgtctctttgaaaagatcaataaacttgacaaagaaaaaaagaagtcagcttatgaacatcaggatgaaagagggactacactcatt

SEQ ID NO: 35898 - DNA, 120 bp, synthetic construct
  source 1..120: mol_type = other DNA
ctaaccaaaattattattattacagaatggtgaatattttattaaagactcaatcacagtgccagctggagacaatggcttataaggttgtactcatgctagaggatgtggtggtgtatc

SEQ ID NO: 35899 - DNA, 120 bp, synthetic construct
  source 1..120: mol_type = other DNA
ttcttactggtggtgacagtggtttcctccctggatgagttctacagcatggtttggggtacatttcctggctgcctagctttgatctggctctctagccttctcaacagttctacaagt

SEQ ID NO: 35900 - DNA, 120 bp, synthetic construct
  source 1..120: mol_type = other DNA
tagcagaaggcacacgttccttccatgcaccaattaaaatgaccaagaattgggcatgggactcatgtcacttaaacattgtgaagctgagaaattcattatttggttaggagtgtgtga

SEQ ID NO: 35901 - DNA, 120 bp, synthetic construct
  source 1..120: mol_type = other DNA
tgttctgctttatccagatcaaacaccctctcacagcaactaaagcagcagcagcaattgcaatgccagttatcatttactgagcacttagtatattcctggctttatgccaagtaccac

SEQ ID NO: 35902 - DNA, 120 bp, synthetic construct
  source 1..120: mol_type = other DNA
acaacaattaattatctggcccaaatgtcaatggtgctgacgttgagaaaatctagcttagaaagactttgtgggtatactaatctagcccctacgatcagctagaggcagacgaaagaa

SEQ ID NO: 35903 - DNA, 120 bp, synthetic construct
  source 1..120: mol_type = other DNA
gtatgactgcagaatgcatgagtcattaattccctgcacaagcactggttctttagcttaccaatatgactgccaccttcctacatgcaaggcagcagagcatgatgatgtgaagagatc

SEQ ID NO: 35904 - DNA, 120 bp, synthetic construct
  source 1..120: mol_type = other DNA
gatagttggtcgtcttaggtgctgcccactgtaaggaagatagaatttggcattcaaagcctgccaagttagaggggcttgataaacatcttgggtttcccatggaaaccccagaaaggc

SEQ ID NO: 35905 - DNA, 120 bp, synthetic construct
  source 1..120: mol_type = other DNA
agtgagaaatgtcaagaccccattccggagaggaaaacattaaatacaaacaaataaataaaccaaattatatttcaaacaaataatataactacattgaaggtctggagattgagggat

SEQ ID NO: 35906 - DNA, 120 bp, synthetic construct
  source 1..120: mol_type = other DNA
tgagcgcccaggccgtctggctactacagataagcaccccagcccgggagcacagacgctgaacgcagccgcctgaccagaatgcagacaccagggcagataccattctgaagctgtgga

SEQ ID NO: 35907 - DNA, 120 bp, synthetic construct
  source 1..120: mol_type = other DNA
gaaacattttgattgattgaatggctttctctcaatctgcacggcaactgatcagtttaccaagggacaaatagttcaacaattcaagtcaaaagcagagaaaccttttttctttactta

SEQ ID NO: 35908 - DNA, 120 bp, synthetic construct
  source 1..120: mol_type = other DNA
tccattcctctacaaagttcttcactatactctcttgacattctgccatatatcatttaaaaattaagttaatcaccctcaataagccctgttttaaaaagagggataaatggagaggaa

SEQ ID NO: 35909 - DNA, 120 bp, synthetic construct
  source 1..120: mol_type = other DNA
tgatatcataatggtgatggacaaactagaccttctctgcccgcagatgggctgaggttggaaactcacagcattgtctctgcagtgttcccggcaaaacgtttaggctgaatttaatca

SEQ ID NO: 35910 - DNA, 120 bp, synthetic construct
  source 1..120: mol_type = other DNA
gtctgactgatcactcccggcatgtgctgcacagttatgtgaacgtgtcacacctaacgtgggtccattgtcttcagactgagcacaggttgccactggcatggtttgagaataggaata

SEQ ID NO: 35911 - DNA, 120 bp, synthetic construct
  source 1..120: mol_type = other DNA
aactaccatcatgacttgcagcacagagaactgacacagggcttcaactactttgcataaattgggttgaattttacatgcagcattcaagtgaagagagttcttgacgcagtgcagaca

SEQ ID NO: 35912 - DNA, 120 bp, synthetic construct
  source 1..120: mol_type = other DNA
gcctgagtcaaagttaaacaaaattttttccccaaaaaaatctccaaaaattggtcaaacaattttctaagagtgctgctgcgatacggacttatatcaccaggtaacatggacattaaa

SEQ ID NO: 35913 - DNA, 120 bp, synthetic construct
  source 1..120: mol_type = other DNA
gggttgagtaacttgatactggggactggcagacaaagtcatgacattagctgagaaggacaaaaaaagtccctgatatctgtttagaaacccatcacagttttttattcaaatgaattt

SEQ ID NO: 35914 - DNA, 120 bp, synthetic construct
  source 1..120: mol_type = other DNA
tagaatcagcttgtaaatttctaccaaaatgccggttggaatttttattagaattgcattggatctggagatcaatttacgaagaactgactttttaaacataacaactcttctgatcca

SEQ ID NO: 35915 - DNA, 120 bp, synthetic construct
  source 1..120: mol_type = other DNA
agaattcgattctttctgttagggaattaagagtgtgtgggtgtagttaatgcttctttggaatcgcatctactggtctatctggtctatctgtacacgtatattctacaggctgtctcg

SEQ ID NO: 35916 - DNA, 120 bp, synthetic construct
  source 1..120: mol_type = other DNA
caattttcatgtcaataaatacttgctggctgaaataaatcttatttactgtgtgtgtatctgctgtttgtgcaggccctcctctactccaccaaaaaaaaaaaggcaaaaagaagtagt

SEQ ID NO: 35917 - DNA, 120 bp, synthetic construct
  source 1..120: mol_type = other DNA
ccctctgattttgttctagcattatcttaatggaaatgtttactgaaatggaaatacatgtagtggacatcgtggtggtgtctcaagcattcagtgttccctgctctcacacactcctaa

SEQ ID NO: 35918 - DNA, 120 bp, synthetic construct
  source 1..120: mol_type = other DNA
gcagtggaatatcatttcagaaatttgtgccaaacataaaattagttttctagtagtaaaaagtaattaaactctttaaattattattacccctaatatactggggaatgggtgtgtgtt

SEQ ID NO: 35919 - DNA, 120 bp, synthetic construct
  source 1..120: mol_type = other DNA
gatacaccaccacatcctctagcatgagtacaaccttataagccattgtctccagctggcactgtgattgagtctttaataaaatattcaccattctataataataataattttggttag

SEQ ID NO: 35920 - DNA, 120 bp, synthetic construct
  source 1..120: mol_type = other DNA
tggatcagaagagttgttatgtttaaagagtcagttcttcgtaaattgatctccagatccaatgcaattctaataaaaattccaagcggcattttggtagaaattttcaagctgattcta

SEQ ID NO: 35921 - DNA, 120 bp, synthetic construct
  source 1..120: mol_type = other DNA
caaattttaggatatcactacacacctggcatagtttaaaagactgaaaatattaagtgtgtgggaatgtagagcaactggaaatggcctacatctttcatagaaatgtaaaacaataca

SEQ ID NO: 35922 - DNA, 120 bp, synthetic construct
  source 1..120: mol_type = other DNA
gaggaagataaactctgaagacaggctctataaacacaaattcatttgaataaaaaactgtgatgggtttctaaacagatatcagggagtttttttgtccttctcagctaatgtcatgcc

SEQ ID NO: 35923 - DNA, 120 bp, synthetic construct
  source 1..120: mol_type = other DNA
tacaattaaaaccttttgcctatcactctggacttttggattgttttttacattcagtgttataatatttgattatgctgattggttttggtgggtactgatgtgaattaataaaaacat

SEQ ID NO: 35924 - DNA, 120 bp, synthetic construct
  source 1..120: mol_type = other DNA
actaacataaatgaaacacacagtaacaaatgacttgaaaacataaaaagaccatcggcatcaaaactttaaaccccccagtatagggctaaatggaatccctgaagggcgtgtagtgga

SEQ ID NO: 35925 - DNA, 120 bp, synthetic construct
  source 1..120: mol_type = other DNA
aatacaacctgaggactacatatacatatacataatgaactaatgcctactaggtgaggggctgccttgtgagcaaacccaaggtccttggcttatgaagcctttgtctagaaggatgga

SEQ ID NO: 35926 - DNA, 120 bp, synthetic construct
  source 1..120: mol_type = other DNA
ggagacttctcaccgtcaaagtaaaaaacctattgtccatgtcaagggcaaagctgatgtgctgttcctcaaatgagtaaaacacacttctgtagtgctggaatgagtcaggtagttcaa

SEQ ID NO: 35927 - DNA, 120 bp, synthetic construct
  source 1..120: mol_type = other DNA
aaaggcatttttccttcaagagaaataaaactatccttctaaatacagggtggagggtgactgctctggggacagagcaaaaatgggcagcatgtgctcagtacatttgccacagatgag

SEQ ID NO: 35928 - DNA, 120 bp, synthetic construct
  source 1..120: mol_type = other DNA
tctgagaaacaactgcaacccataaatttttattatccttcttctctgtttgataaatatttgtgtgtagcaaacctgccatggcaattcctgcccttcccctggcccagcttagctctt

SEQ ID NO: 35929 - DNA, 120 bp, synthetic construct
  source 1..120: mol_type = other DNA
atactttattagtatgagaggcagcattaagatttagattagttgtgttaatttagaaacagcataagattagtttgtgttaatttagaaacatcagaatgaagaactaatagatagtgt

SEQ ID NO: 35930 - DNA, 120 bp, synthetic construct
  source 1..120: mol_type = other DNA
ggacacggccattgtgggcaacaaggacccaccttccatctgtgccaccgtcccagggaaaaccttcctcaacatcacgccagctgaggttggtgtcctggttggcaaagactggtcaag

SEQ ID NO: 35931 - DNA, 120 bp, synthetic construct
  source 1..120: mol_type = other DNA
tgtaaccagttgcagaagtcaaaactctcttcctccccagttcatctgtgtctcgttactgagccacgagaaatagcagcccgcccctcaggttggtctggaaacacacatacagatcat

SEQ ID NO: 35932 - DNA, 120 bp, synthetic construct
  source 1..120: mol_type = other DNA
ctcacacactcctaaccaaataatgaatttctcagcttcacaatgtttaagtgacatgagtcccatgcccaattcttggtcattgtaattggtgcatggaaggaacgtgtgccttctgct

SEQ ID NO: 35933 - DNA, 120 bp, synthetic construct
  source 1..120: mol_type = other DNA
tggggaacgatatttccaaatacaaaggcaaggctgccagcttccttaaacaggcatagaaactccatggacattgttcagggacagatgacttaatcacagatgacaagagatactgaa

SEQ ID NO: 35934 - DNA, 120 bp, synthetic construct
  source 1..120: mol_type = other DNA
tgaaacacaggcaccctactctcacctgagggtcaccaccaatggggatcattccttcagcattcactctcagtattcgtgtacccttgtgacaatgccacagacccgtgtctttcccaa

SEQ ID NO: 35935 - DNA, 120 bp, synthetic construct
  source 1..120: mol_type = other DNA
aatcaagttagactccctcctcgcacataaaaattaactcaaaatggatcagagacctaaaggtaggtggtaaaattataaatcacttagaaatagtaaatctttgtaatgtgggataag

SEQ ID NO: 35936 - DNA, 120 bp, synthetic construct
  source 1..120: mol_type = other DNA
tgccaggggaagcaaagcagattctttgaggcagaaagagaaagagaaaaaaatatcctcacagaactagtaaatttggtattcacatggctggctttttgttgtcattagtctaagtag

SEQ ID NO: 35937 - DNA, 120 bp, synthetic construct
  source 1..120: mol_type = other DNA
ccattcgtggtcatgatctgcagtttaaaaaacaatggactaaagcatgcagtaaagaatgtggctttgcaattagacaggcccaataccactttttttttttttttttttttttttttt

SEQ ID NO: 35938 - DNA, 120 bp, synthetic construct
  source 1..120: mol_type = other DNA
ttgccccggtttctatcacataagtgctcaataatatatgttttacataaatgctgaatgaggaacatatatatctatataaactggggagcagtgcaagactggaagaatgtcttggtg

SEQ ID NO: 35939 - DNA, 120 bp, synthetic construct
  source 1..120: mol_type = other DNA
ttctttccctttttattccttttaggatttcctttttatcactggttttgatggatttgattaaggcgttccttggtgaagttttcttcatgtttcttgttcttagaataatcatatttc

SEQ ID NO: 35940 - DNA, 120 bp, synthetic construct
  source 1..120: mol_type = other DNA
ggacaggtagagcagagatgagtgtgctacaacatgctggtagagggtacccccaattgtgcttggggatttcctattcctcatggaaaaatgtgtcttccttaatttttcccataagaa

SEQ ID NO: 35941 - DNA, 120 bp, synthetic construct
  source 1..120: mol_type = other DNA
acttcacgtgcctataggtcctgcctgcaggaatgacatctctcggcttagtaagggctgcttattgtgggaatatgacttccatctggaacaccaggtggagacttgtcaccgtcaaag

SEQ ID NO: 35942 - DNA, 120 bp, synthetic construct
  source 1..120: mol_type = other DNA
cctgcaaataaattcagatgggccctcttacattaagcagtccttccttgcacacagaaacattcctctgtccaatcctaacacagggacatcagtcttgtcagtgtgagaacaggagac

SEQ ID NO: 35943 - DNA, 120 bp, synthetic construct
  source 1..120: mol_type = other DNA
agacacaaggaaaatagaggctacctgggagaatgtttagagcatcctgacattcatcatgagaggattctctgtctacaaccagagttgagttgacttcgtcttcctcaaatgtgattt

SEQ ID NO: 35944 - DNA, 120 bp, synthetic construct
  source 1..120: mol_type = other DNA
ctgattagttctggtagatttttgtagatttctagcattgttaacaaacacagtcattatctgtgaataaagacagcttcaattctttcttttcaatactttattaatttttcttacttt

SEQ ID NO: 35945 - DNA, 120 bp, synthetic construct
  source 1..120: mol_type = other DNA
actccatgagttgttattggttgaaagatgaaacagacaggtaaggaggaaagcacgtggcctctggagtcagagtagactgtctccccgctgacagccagcacagaaaaagggccctca

SEQ ID NO: 35946 - DNA, 120 bp, synthetic construct
  source 1..120: mol_type = other DNA
atagcagattttaaaaaattccttttcttgtgctcaccagacaaggtttggtaacaaataccagtcaccagcacagatgaaccaattcaaggagagccataaacaggactactattatgt

SEQ ID NO: 35947 - DNA, 120 bp, synthetic construct
  source 1..120: mol_type = other DNA
tgtaacgaatggaccacactaatacaacatactaataggggaaactgtgtgctggaggacaggggagcctaggagaactctctgtactatccactccatttttctgtaaacctagaactg

SEQ ID NO: 35948 - DNA, 120 bp, synthetic construct
  source 1..120: mol_type = other DNA
tattggagagagacgcactactgtaaaactatatactgtttccatggggtacaaccccttcttcctcctctgaaacacattattcctctggcccactgttgccagaaacactgagtcttg

SEQ ID NO: 35949 - DNA, 120 bp, synthetic construct
  source 1..120: mol_type = other DNA
tgtacacgtatattctacaggctatctcgctgagctttcgctaggttatgctacagtaacaaaagccccaaaatcttagcagcaacacatacaaaggtttatttttcattgacatttcct

SEQ ID NO: 35950 - DNA, 120 bp, synthetic construct
  source 1..120: mol_type = other DNA
gagatgtaacagctggagatactgaaacacagagaaataagagcatcattgaagaccacaaacgtggttattgttggaagatagttttgggatgggcttctgtgctagaagccaaaacat

SEQ ID NO: 35951 - DNA, 120 bp, synthetic construct
  source 1..120: mol_type = other DNA
tggtagttcaaatggaaccttctgaaatggaagtgtggaacatttgaaagtatacaaaaaggggacttttcagatcaggaatatgattaaaacactgctttatgtaatttctaaatttaa

SEQ ID NO: 35952 - DNA, 120 bp, synthetic construct
  source 1..120: mol_type = other DNA
caggtctgttggagtttgctggaagtccactccagaccctcaaacagggatttcttggtgttgcctattctctcccatgtgtttaaatccagggagaggtgtatatatgctttcttccta

SEQ ID NO: 35953 - DNA, 120 bp, synthetic construct
  source 1..120: mol_type = other DNA
aaggcaataaatttttttttttacctcattaatggatctatcctttttcttttctaaccacttccttatgtgacttctgaaatctagtggggctctgtggtgtctgattttccctggctg

SEQ ID NO: 35954 - DNA, 120 bp, synthetic construct
  source 1..120: mol_type = other DNA
cctattgtttcgaccacatttcttattttgctttaagaggactggaagcctaacttgactgcttaccattctttaaacacatagactactagctaacatttgctgtctgttggatgttta

SEQ ID NO: 35955 - DNA, 120 bp, synthetic construct
  source 1..120: mol_type = other DNA
ttgatggacctacaggtgaacttgtgactggatcactttaatcaggatgttttaatcaggataactattaaactttggacttccagtaagctcagagacttctagagttagaaaattccc

SEQ ID NO: 35956 - DNA, 120 bp, synthetic construct
  source 1..120: mol_type = other DNA
gtttttttttttttttttggagggggttcaaatataaaatatatgggaaagaaatataatgaacctccatgtacccaacacccggattaaacagttatctcaattttgccagacttgttt

SEQ ID NO: 35957 - DNA, 120 bp, synthetic construct
  source 1..120: mol_type = other DNA
aggcagtcaatattgagataccgctgccttgtgagttttgggtagaaataaagcaagtaagaaatatagttccatcctgcttggagttttctatttagttagggactttgaagtccctaa

SEQ ID NO: 35958 - DNA, 120 bp, synthetic construct
  source 1..120: mol_type = other DNA
aaagcaacattgtttgatcagattggcagatacttaaagatgggtggacaggagccattgctggcaaaggtttgggtaaggggcacttgagtatgctgctagtgacagggaattctacgc

SEQ ID NO: 35959 - DNA, 120 bp, synthetic construct
  source 1..120: mol_type = other DNA
tgaactccagctggggtgacagagcaaaacatcgtccaaaaaaaataaaaataaaaatgaaaaagaggtgccatgtgtacaaaaatcaatgcatatttatgaactttatttcaaatatat

SEQ ID NO: 35960 - DNA, 120 bp, synthetic construct
  source 1..120: mol_type = other DNA
taaaatttaagctttcctgtggactttgaaaaacttgttccttctactgtaggcttggcagcttttcaatacttaaaggcgtgttaaagaaagattggtggttaaactaaaagtgatttt

SEQ ID NO: 35961 - DNA, 120 bp, synthetic construct
  source 1..120: mol_type = other DNA
gtctgtataataaggactgaaggaagcaaccaaacaaattaagagactttctctaaaggcagagtaatgctaagggcagtggcagtgacaaaagcggaggaaaaagtctgtgatcatttg

SEQ ID NO: 35962 - DNA, 120 bp, synthetic construct
  source 1..120: mol_type = other DNA
ttatgatgtcttccccctcaaaactcatatgctgaaatcctcagtcttaatgtaatgatattaaggggtggggcctttgggaggttgaaattagcacccacataaaagagaccacagaga

SEQ ID NO: 35963 - DNA, 120 bp, synthetic construct
  source 1..120: mol_type = other DNA
ccagaggcatgggcttctcacacctagagagcatggaagcagtaaaagaaaagctattccatgtccctcactcttcagtggtaggagcttttgcctacaaggcccttccagcatcaaagg

SEQ ID NO: 35964 - DNA, 120 bp, synthetic construct
  source 1..120: mol_type = other DNA
cattttacgtaggagtaatcagtaagatgttaacaactacttttattttatggtatttgtatcagaagtgaccagttttttttttttattcttagttgtagaaataagaagaagcaactg

SEQ ID NO: 35965 - DNA, 120 bp, synthetic construct
  source 1..120: mol_type = other DNA
ttttgatgcctttatgcctttagacaatgttgaacacagtgagaaggataggttccctttattgaatgttttttgtggaaacttagtttttcaatgcatcataggcctaaatcagtgtgc

SEQ ID NO: 35966 - DNA, 120 bp, synthetic construct
  source 1..120: mol_type = other DNA
cgctgagatcacttatgcaaggtttttttcaaaatacaagtctgcaaacacatgtatcttcccatctccactttccctctgtctctaggcactgagaagccttttaggaaaatcgggatg

SEQ ID NO: 35967 - DNA, 120 bp, synthetic construct
  source 1..120: mol_type = other DNA
aaggtttcatgggtagaaaagcatataacagggaaatctgttattatttatatattgtaatcaccaacagaaacgcgtcttctaacggcatatttccttgcattttggttctcatatttt

SEQ ID NO: 35968 - DNA, 120 bp, synthetic construct
  source 1..120: mol_type = other DNA
tatcattccttttttgggagtaggagatattgtaattttaaataacttactgttaggttccctcctaaattttggtggaagtgtggttcttggtaattgtagcttttttctctgggatta

SEQ ID NO: 35969 - DNA, 120 bp, synthetic construct
  source 1..120: mol_type = other DNA
tattttcctttaagcatttcatgtatttaggctaactacctcctttgtatatattttttccaattttgctttatagtttatttttcttagaaaagaagtttcaaagaagtgaaaaacaca

SEQ ID NO: 35970 - DNA, 120 bp, synthetic construct
  source 1..120: mol_type = other DNA
tgtacctttggaaaaattagaacttaacagataaggctaagtttgagccttccagtcctttccttctctgcatactcttcagaggtaactgggatcatgttctgggagcatgtcattcca

SEQ ID NO: 35971 - DNA, 120 bp, synthetic construct
  source 1..120: mol_type = other DNA
aaaatatgagaaccaaaatgcaaggaaatatgccgttagaagacgcgtttctgttggtgattacaatatataaataataacagatttccctgttatatgcttttctaccgatgaaacctt

SEQ ID NO: 35972 - DNA, 120 bp, synthetic construct
  source 1..120: mol_type = other DNA
aaaaaaatagaaggggaaaaattaaaaatcaatgcaggtgtactggtctaagcagcctagcatctgaataacaagactatcagtaaaaaagtaacagagaaaataaaaaaaaattctcaa

SEQ ID NO: 35973 - DNA, 120 bp, synthetic construct
  source 1..120: mol_type = other DNA
tacgagtaatttcacaaggtgtacaaactctgacataaggggtgacatccctctaggacattatggataatatcaaaaggaacataccccgtgtgacaataaatgcaacctcccattagg

SEQ ID NO: 35974 - DNA, 120 bp, synthetic construct
  source 1..120: mol_type = other DNA
tttgcctaggacttcccagttttattcttaatatgcatgaaataaaagtaaaatggaaagtgcttaacgatgagtttatttcacatctctctctcatacacagataaaattaattcaaag

SEQ ID NO: 35975 - DNA, 120 bp, synthetic construct
  source 1..120: mol_type = other DNA
gatgttacattcttcatcatgttagggtgttgtaaaaataaaagaacaaagttctgaaatttgtttttgcctctattccaaaaggaaagattagctataagctaatcaagaaggcagata

SEQ ID NO: 35976 - DNA, 120 bp, synthetic construct
  source 1..120: mol_type = other DNA
ggtggtgtcagtacacgtggcacagacagtggccgatgcgtgcaacctgcataagccttggaaccacgaatgtcactgacagcctggtgtttcccggcaaacttcctgggagtcagccga

SEQ ID NO: 35977 - DNA, 120 bp, synthetic construct
  source 1..120: mol_type = other DNA
accagaataggatactaatttggttaattacttgttattccttctactcaagggtttcccactacattaccacatattcactgccagtctggttcctcagaggcctcctaaaattgatct

SEQ ID NO: 35978 - DNA, 120 bp, synthetic construct
  source 1..120: mol_type = other DNA
tgaaacgatacaattatacctacactttcaggtacattttaaagattacaggtagcgttgtactgtattttattgagtctaagatgatcattgtctccatgttttaacatttcttacact

SEQ ID NO: 35979 - DNA, 120 bp, synthetic construct
  source 1..120: mol_type = other DNA
gccagtgaagatgccgttagggaggagatgccctccattggctcaaatattgctgacagattaaataaaatgaggtggaagaaaagtgcctagatttattacagaaaaaaattagtgata

SEQ ID NO: 35980 - DNA, 120 bp, synthetic construct
  source 1..120: mol_type = other DNA
gatatcaaaaacatgatggtgctcactgaaacatgaaaaccaaagtttgccacaacacaaggagcagagtgaaactgctgaggtgcaagcatggaattccagaaaattagatgctcccca

SEQ ID NO: 35981 - DNA, 120 bp, synthetic construct
  source 1..120: mol_type = other DNA
ttttgtgatcaaaaattccttacttttatttttttatctacggtaggaccacccagagcaggggtccacaactcccaggtcacagactggtaccagtccatggactattatgaaccacac

SEQ ID NO: 35982 - DNA, 120 bp, synthetic construct
  source 1..120: mol_type = other DNA
taccagaataggatactaagttggttaattacttgttattccttctactcaagggtttcccactacattaccacatattcactgccaatctggttcctcagaggcctcctaaaattgatc

SEQ ID NO: 35983 - DNA, 120 bp, synthetic construct
  source 1..120: mol_type = other DNA
ttagttcttaaaagaactatggaataagagggctgaggtgaaaacaaaaacaattttctaaaataatctatttcttactttggttttcaaaaactttaagccaaagaaatcttgaaattc

SEQ ID NO: 35984 - DNA, 120 bp, synthetic construct
  source 1..120: mol_type = other DNA
gtgctaaattcttacatatatttgggtatttctggatttcctattctgttctgttcacttatgtcttttcagctgttagtaaacaatttgtggaaataacacacgcacattttgatatct

SEQ ID NO: 35985 - DNA, 120 bp, synthetic construct
  source 1..120: mol_type = other DNA
agtgggatgaatgtctaggtgtgcagtcactggagtaaacgtcactgggacatgctgtgtaattctttgtgtacattgctgagttctactgctaatgttagcccattgcattcatgaaac

SEQ ID NO: 35986 - DNA, 120 bp, synthetic construct
  source 1..120: mol_type = other DNA
ccaagtgaagatgccgttagggaggagatgccctccattggctcaaatattgctgacagattaaataaaatgaggtggaagaaaagtgcctagatttattacagaaaaaaattagtgata

SEQ ID NO: 35987 - DNA, 120 bp, synthetic construct
  source 1..120: mol_type = other DNA
aacattccagtttgttgcttttcacactttttatgctgtaaacattttaaaaagtagaatcacaatacatggtcttttgtcacttactatattttaagcatgtttctatgggagaaatat

SEQ ID NO: 35988 - DNA, 120 bp, synthetic construct
  source 1..120: mol_type = other DNA
catgatccaggtgaggacaagtatatacctccagtcacctctacgtcgctgtgtgactgagccagaggaggcgtaaccagggctgcactagaatgcagaataggggtgtggccttcatgc

SEQ ID NO: 35989 - DNA, 120 bp, synthetic construct
  source 1..120: mol_type = other DNA
gacctgatctcttatcctctgtttaatgataccttccagttgaaaggtgtttcctctgtaatcacgggtgccaaaggaaatacaacatgtattcattaggtggatatccactaaaccacg

SEQ ID NO: 35990 - DNA, 120 bp, synthetic construct
  source 1..120: mol_type = other DNA
gaggtgtggggctggcccaggaatttgcatgtctaacaagttcccacgtgtttctgatgctgagggtctaaggactacaatgcatgaatccgtggtttagtggatatccacctaatgaat

SEQ ID NO: 35991 - DNA, 120 bp, synthetic construct
  source 1..120: mol_type = other DNA
aatgttagagttcatcagaaacatagaattttaaactgtgagttccactgaatacattttaatgtctgtaggaagaatcaaaacacctatttaaagatggcaatatataataatcatttt

SEQ ID NO: 35992 - DNA, 120 bp, synthetic construct
  source 1..120: mol_type = other DNA
tttacatcaacctatttcctgctgtgagcaattggctgtgataatttaaggagccactagaggtcattcaagcactagaaaaaaagttgtgcaagttttaagaatttgtttcaacttctg

SEQ ID NO: 35993 - DNA, 120 bp, synthetic construct
  source 1..120: mol_type = other DNA
tctcatcctctcggatctcttcatgtggcttttctttctccaagaaggtagccaattcttatttttggcttccagaagcacagaaatggagctgccaggagttcttaaggcttagacctg

SEQ ID NO: 35994 - DNA, 120 bp, synthetic construct
  source 1..120: mol_type = other DNA
aagaatcctcctttagttttattttttaaatctagtggtttttctttttcctttttccttatgtcttaattatttccccctttttgtttgttttgcttttcccagtttagtggatcaatg

SEQ ID NO: 35995 - DNA, 120 bp, synthetic construct
  source 1..120: mol_type = other DNA
tttaaagcttttaaagcaaaagccggcccctcttctcttccagagtgggaggcctctcccctctcttagagtgggtggggagagcggttgccatgggcagctttccttgtgagccacagg

SEQ ID NO: 35996 - DNA, 120 bp, synthetic construct
  source 1..120: mol_type = other DNA
ttccccattagacagaggtcttgtcctgctaccctcattgtaaaggggtgcctgggaaggggtggtagggacatggtggcggtggagactccggccccacttctccaggctttgctgaca

SEQ ID NO: 35997 - DNA, 120 bp, synthetic construct
  source 1..120: mol_type = other DNA
aaaatgattattatatattgccatctttaaataggtgttttgattcttcctacagacattaaaatgtattcagtggaactcacagtttaaaattctatgtttctgatgaactctaacatt

SEQ ID NO: 35998 - DNA, 120 bp, synthetic construct
  source 1..120: mol_type = other DNA
gtcggcaaagagggcagcaaaagaagagccatgctgcatgctctggggtccctccaggtgaggcctgggcacccaagctccctatttgtcccaggcaccagggacccccagcccctttct

SEQ ID NO: 35999 - DNA, 120 bp, synthetic construct
  source 1..120: mol_type = other DNA
tcccgctccattactgggccgtcatctcctgccgccccaagcttgatctccgtgggctctttgggctctcatctccaaggagccaggccccaccctcgccagtcatccttgggtgacttt

SEQ ID NO: 36000 - DNA, 120 bp, synthetic construct
  source 1..120: mol_type = other DNA
tgtctcgcagaagacacccctcctcccaccctagaagacaggttcaatttcttgcccactgccctgggtctgctcatggtggggcagtatgtgtgggagagcccctcaatcctcaggggt

SEQ ID NO: 36001 - DNA, 120 bp, synthetic construct
  source 1..120: mol_type = other DNA
aacaagtccagctagagcgggacgaatatgctaaacacataaaaggagagagggcccggtggcaggagaggatgtggaaaatgtcggtggaggtgaggtctgacccttcagcccccactt

SEQ ID NO: 36002 - DNA, 120 bp, synthetic construct
  source 1..120: mol_type = other DNA
atactccttacagcatattcaagaattggagcgggctctctgtgctgtgtctacacagcagcaggaagaggacagggtgagtccaaccagctgccccatcccctggcagcctggcttccc

SEQ ID NO: 36003 - DNA, 120 bp, synthetic construct
  source 1..120: mol_type = other DNA
actttccctgccccactttgccaccttcctctgtggtccctcccagagcccgttatgctcttggttttcccaccttctgatttctctggcccctcaccccttccgggagccagtggtcag

SEQ ID NO: 36004 - DNA, 120 bp, synthetic construct
  source 1..120: mol_type = other DNA
cgtcctataattatcaaattaaaaaaatgctaaaagatgccagagtgaacatgagagaaagacccactctcatttaactttttacaaataaatttaaattataaattagaaacacaaata

SEQ ID NO: 36005 - DNA, 120 bp, synthetic construct
  source 1..120: mol_type = other DNA
ctgtagctgtgtaacattctgtattgtacctagcggaggttgcagctggcatatgaggaagaggttcttataattattcgcggctgggaaacttatttattgctagcataggagcgagga

SEQ ID NO: 36006 - DNA, 120 bp, synthetic construct
  source 1..120: mol_type = other DNA
tgttgaacatttttggaaaaatctctgttttttaattggccgacgtagtacatttgcctttttagcacactgatacttcttactatttcttttcctttttattttttttttgagacaggg

SEQ ID NO: 36007 - DNA, 120 bp, synthetic construct
  source 1..120: mol_type = other DNA
acttaatgaataatttaattattactactggactttttgtagactgcacagagcattcaaaacaaatgaaggagaataaaaaatatgtattacatgttgtaaaataaatgtgatgtggtt

SEQ ID NO: 36008 - DNA, 120 bp, synthetic construct
  source 1..120: mol_type = other DNA
cttctcttaaaaaaaaagaggagaaggatgctcttgcctgttagagcaggggcagagtcacagcaccccctctgcgtgaggtctgtacatggagtttgcgagatcccagagggccggccc

SEQ ID NO: 36009 - DNA, 120 bp, synthetic construct
  source 1..120: mol_type = other DNA
ggcgagtggagaggcagaaaaggaaatctgacttgcctacgtttacaatattcctgggatgttagtctttcttgacatccacaaggcgagcgcttttccaaataagagactccataagcc

SEQ ID NO: 36010 - DNA, 120 bp, synthetic construct
  source 1..120: mol_type = other DNA
agctcttcttgcagcaccctgatctcttccctgcacaacacttgccataatttagcagcataaatgtatttgtcttttttgtctttttttaaaatcttgttattttattttttaattttt

SEQ ID NO: 36011 - DNA, 120 bp, synthetic construct
  source 1..120: mol_type = other DNA
tcactttacccacatctgtcttctctgttgtgttcccaacacactgctgagtgtcaaacaacagaaaagaaaagtctagagacttacttccctcgttaaaaggtcactgactcaagcttc

SEQ ID NO: 36012 - DNA, 120 bp, synthetic construct
  source 1..120: mol_type = other DNA
aacctaatattaggatttcttccattttgtctcaaaaaaaaaaaagctagtgctttattttgataggttttgtattttgtttccaaatgacaaagtaagactgaatttcccgctgcaatt

SEQ ID NO: 36013 - DNA, 120 bp, synthetic construct
  source 1..120: mol_type = other DNA
ctttctggagagagcttcgtccaccctcctctccagccagcagctccagaactcctacagccttggaagagagcacagtaactcaagcagacagcttcagaatccctgcactgtcggaaa

SEQ ID NO: 36014 - DNA, 120 bp, synthetic construct
  source 1..120: mol_type = other DNA
tcaggcaccttagatttgagaccagctatgttgctgctgaccagctgtgtgaccctgggctggtttccttccacacaatgggagtgccaatggctgcatgcatgcaaagaccgtctgagg

SEQ ID NO: 36015 - DNA, 120 bp, synthetic construct
  source 1..120: mol_type = other DNA
gagagatacattctttagactccccaagggatgcagctgaaaaaaatcccaaagttagttttaagccaaaaagacttgatttaggattttgacactggagaaacccatcaaagatgtcaa

SEQ ID NO: 36016 - DNA, 120 bp, synthetic construct
  source 1..120: mol_type = other DNA
acactttactgcattgtctgaatattgacaatcagtatgcattatgaagctacctggctaacattgtgtactcactgtgtgtgccaggccctgggttcaatgctctacatgcacttatat

SEQ ID NO: 36017 - DNA, 120 bp, synthetic construct
  source 1..120: mol_type = other DNA
cctcagacggtctttgcatgcatgcagccattggcactcccattgtgtggaaggaaaccagcccagggtcacacagctggtcagcagcaacatagctggtctcaaatctaaggtgcctga

SEQ ID NO: 36018 - DNA, 120 bp, synthetic construct
  source 1..120: mol_type = other DNA
tgcactcactcaccttcctcaggtactcgcatgggcatgtcactgactttacatgctgctgcagctccttggtgagctggctctggtcatgcgacaggaactgtggggtcaggacaatag

SEQ ID NO: 36019 - DNA, 120 bp, synthetic construct
  source 1..120: mol_type = other DNA
atgcaaataagtttacttttatttttggtaacactttactgcattgtctgaatattgacaatcagtatgcatcatgaagctacatggctaacattgtgtactcactgtgtgtgccaggcc

SEQ ID NO: 36020 - DNA, 120 bp, synthetic construct
  source 1..120: mol_type = other DNA
cctgggctgcacgaataacctccattgttcgagaccccaaactctgctcacatcttcctttccctgtctctgcttgggctatgatcacggtgactctagcaacccttcatggacattata

SEQ ID NO: 36021 - DNA, 120 bp, synthetic construct
  source 1..120: mol_type = other DNA
cctatagagggagggttctaggtatggggcaggcatgagcactgcttataaccaagcaaaacactccctctgtgccaacataggtggggcaggtcactctggggtctgtttgccctgtct

SEQ ID NO: 36022 - DNA, 120 bp, synthetic construct
  source 1..120: mol_type = other DNA
taaacagtgtggctccggagcccacatgcattgattcgacaagtgtttattgagcacctgccacggacaaggccttgtgtgattaaatagggttataattagtaatataaaaatgagaaa

SEQ ID NO: 36023 - DNA, 120 bp, synthetic construct
  source 1..120: mol_type = other DNA
ggtgagctggccctggtcatgggacaggaactgtggggtcaggacaatagagagcttcaccatttgcagaatgagaacaggggctcatgatgagtgccaacctattagataatttaaaaa

SEQ ID NO: 36024 - DNA, 120 bp, synthetic construct
  source 1..120: mol_type = other DNA
taaacagagcattcaaaacaaatgaaggagaataaaaaatatgtattacatgttgtaaaataaatgtgatgtggttaactcttttattcaaagttatagaacatatatatgtactataga

SEQ ID NO: 36025 - DNA, 120 bp, synthetic construct
  source 1..120: mol_type = other DNA
agctggcacgctggcctcacctgcagcacactcacctgcgtgtagtgggtgcaggtggcgttgcgagcacactctcctgccgcgtggctgtaccgctgcccctctgcaaaccacaggctg

SEQ ID NO: 36026 - DNA, 120 bp, synthetic construct
  source 1..120: mol_type = other DNA
gagatgggaggcgggctggggcagagcctgtgagggccacagcagggccagagctggctcctcggacctggcatcccagtgggaggaggtggcttggggaaggggtgtcaggagaggccg

SEQ ID NO: 36027 - DNA, 120 bp, synthetic construct
  source 1..120: mol_type = other DNA
accaggatagtaatgatgacactgaagatgtttcactgtttgatgcggaagaggagacgactaatagaccaagaaaagccaaaatcaggtaggaggagagaagttgcatgagctgtgtta

SEQ ID NO: 36028 - DNA, 120 bp, synthetic construct
  source 1..120: mol_type = other DNA
tctttaggtttttctgttgtccagtcttctttggcttgcatttctttgaatttcttctgttactttatgctccaaagtatttagtacatactgctcacagttttgatacacgtttctttt

SEQ ID NO: 36029 - DNA, 120 bp, synthetic construct
  source 1..120: mol_type = other DNA
tcggctgaggtcagccagggagcagcccatgtctgggtgccagatcttaccctctttggcactgctggtgaccaagaagctgcaagcatggcatgtgggtggacactgtagagtggggca

SEQ ID NO: 36030 - DNA, 120 bp, synthetic construct
  source 1..120: mol_type = other DNA
caatatggtttcatcatctgtaaattggggataattaaagtcttgatcctgatatttgactctcacagcagaagtagcaagctcagccaagtcacttcaacaagaggagacgttccttgt

SEQ ID NO: 36031 - DNA, 120 bp, synthetic construct
  source 1..120: mol_type = other DNA
tgaacacctgctctgccgggtgcacgtgaaaggggcaaggatgagaaagctgtagataaagaagacaggacgcagggggtctgtctaagctctatcccctgccttcagcactgagggatg

SEQ ID NO: 36032 - DNA, 120 bp, synthetic construct
  source 1..120: mol_type = other DNA
tgggccgaccaagcccaggtggcagcatctccccatcccctgttccccggcccgaccccactaccaggagatgaccgggaagcccagcgcccacccagttccggccaccctgtcgtggcc

SEQ ID NO: 36033 - DNA, 120 bp, synthetic construct
  source 1..120: mol_type = other DNA
acacaagcaaaaccctctgcccaaggggggtcatcccagggccatggctggggctcaggcccagcctcatgggcagactgggccaggacccgacttgagagggctcagggaagcctcaag

SEQ ID NO: 36034 - DNA, 120 bp, synthetic construct
  source 1..120: mol_type = other DNA
gctgggtattctccaacattttgctgaagttatggatgaataaaagggattccatctaaatgtgaatttttctgattactcatgaatttaatttagtatctttatatgtttattgaacat

SEQ ID NO: 36035 - DNA, 120 bp, synthetic construct
  source 1..120: mol_type = other DNA
gttaggtacagaattttttattggggctcatatcatgaatgtttcggctttcttcttcagagacatgggaacaacgctagtcccacttacaacacttaagaacattctcatgatgactgt

SEQ ID NO: 36036 - DNA, 120 bp, synthetic construct
  source 1..120: mol_type = other DNA
aaaacagtagaaaatttaaaatacagtataattatgtacataccatttacactgtattaggtacttagagtatacctgaggctgtatacaaacattatgtcatttcataaaaaagacctc

SEQ ID NO: 36037 - DNA, 120 bp, synthetic construct
  source 1..120: mol_type = other DNA
agccatgttatgattaggacaattgtgaaaatgtgtatacggaccgcatagtagacaatgataatatgaagttccattgagtgatgatagtcctctggttatgtcggagaatgccttggt

SEQ ID NO: 36038 - DNA, 120 bp, synthetic construct
  source 1..120: mol_type = other DNA
aaggctgaggtgtatgctttgttcttttattgcagtgtatatttcaggatttttaaaggatcctcgctttcagatctctgtgaattgaaaccaagtgaatcccactagactattttaaga

SEQ ID NO: 36039 - DNA, 120 bp, synthetic construct
  source 1..120: mol_type = other DNA
attgcttaaccgctgctctcctcccattttcgcttcaccctctttacagcagcctgtccctctcccgatctcagtgatgatgctctaagtggttaagagttgattccggagccaggctgc

SEQ ID NO: 36040 - DNA, 120 bp, synthetic construct
  source 1..120: mol_type = other DNA
agaatgaatcttcactcctcttttttccatctgccagcatgtttggtcttctggcacctggtgttctatacagtacaacatgcttctttgtgttacattgagacttgatccacgtaccat

SEQ ID NO: 36041 - DNA, 120 bp, synthetic construct
  source 1..120: mol_type = other DNA
cctagaccctctgtgagatgtgtcaccatttcttggacaccatgtgagacattccccctcagattagagatgctcagcttgcatcaacttacctaaagcctacatctggctactctggga

SEQ ID NO: 36042 - DNA, 120 bp, synthetic construct
  source 1..120: mol_type = other DNA
ggaggtgcctgctctccatcatcatggaagcaggaaaacttgccttgttggaaataagtaaaacttcagaaaaggagttgtatggcaatcaatcttagatatcaaccaaattttgggaga

SEQ ID NO: 36043 - DNA, 120 bp, synthetic construct
  source 1..120: mol_type = other DNA
actaaaaaatgttgtaacttcaaagtcactgtatgaatccccatgaagacttgagggatctgaatcagtaagggcatcttggtgtcaaaggtcaacaattaccaggcagcagaaccagtt

SEQ ID NO: 36044 - DNA, 120 bp, synthetic construct
  source 1..120: mol_type = other DNA
agatggcagaatatgcctgccatataataggtgtctggcttatgtttgatgactaaacggattgaaagaatggataaacataggttggaagttcaatatttttaaaagaaaactcctgtt

SEQ ID NO: 36045 - DNA, 120 bp, synthetic construct
  source 1..120: mol_type = other DNA
ctattctgttctgttcatttatgtcttttcagctgttagtaaacaatttgtggaaataacacatgcacattttgatatctggaaaagcaagtctttttccattctgttacaaaaaatcaa

SEQ ID NO: 36046 - DNA, 120 bp, synthetic construct
  source 1..120: mol_type = other DNA
aacatggaatggaatacctcatggtaattattttatgcatctcgggttaggtggaaactactggttgttttcactctagcagagttagggtggcaggaagtgcccatcagcagatgctac

SEQ ID NO: 36047 - DNA, 120 bp, synthetic construct
  source 1..120: mol_type = other DNA
aagcatggctgacagaaaatcctaaaggcccaagattctatagtggctgtttgcaagggagacgaggctataagtaactgccacactggatcctcttatgtgagaagaaagaaagaaagt

SEQ ID NO: 36048 - DNA, 120 bp, synthetic construct
  source 1..120: mol_type = other DNA
caacttagacatccccttcctttctccccaaggatattgtgtatgtactgtataattataaatgcatactattacatattatgaaatgtaacatataaaatataaatgttaattatatta

SEQ ID NO: 36049 - DNA, 120 bp, synthetic construct
  source 1..120: mol_type = other DNA
gggtgtctgtgtggcccaaggagccagaggtagcaaactgtgggcaaaagaattgtgaccaaaggctagaagagggaaggtctgcagtcagccttgtcttctacctctctgctgtttgct

SEQ ID NO: 36050 - DNA, 120 bp, synthetic construct
  source 1..120: mol_type = other DNA
cgtctacattaaacatgctgagcttttaaaagagacctgttagacatgctgagtattttgagataatatcattgttgtattgaaaactattgaaaactttaattttaaaatgcaaacatt

SEQ ID NO: 36051 - DNA, 120 bp, synthetic construct
  source 1..120: mol_type = other DNA
cagtgctcatacagttaagagcccagaatccagggcacagaactaatcaattacgttgcctagcaagactttcctgtttgctgataaactatattttttctgagacagggtctcactctg

SEQ ID NO: 36052 - DNA, 120 bp, synthetic construct
  source 1..120: mol_type = other DNA
aatccatctcccttaggaaaatagttgctacaccaggggtctccttagttctcctaacagtgtctacgggttgttacaacaagctttctgtcttttcttggcagtacgatctgaagtgtg

SEQ ID NO: 36053 - DNA, 120 bp, synthetic construct
  source 1..120: mol_type = other DNA
aatctgtcttccttaggaaaatagttgctacaccaggggtctccttagttctcctaacagtgtctacgggttgttacaacaagctttctgtcttttcttggcagtacgatctgaagtgtg

SEQ ID NO: 36054 - DNA, 120 bp, synthetic construct
  source 1..120: mol_type = other DNA
atacaaaatgtcccaactgtaggagatagttttaaaagtaaaaagtaatattccagagataattctgtgtactctgttggcaatatttctttccttacgattctataaaaataggtactt

SEQ ID NO: 36055 - DNA, 120 bp, synthetic construct
  source 1..120: mol_type = other DNA
cttacttcttttaccccaataagatagaaggatttgatctaaatgatgctgatgctgttgttagtgtctatgcttataaaatgatatttagaagaacaaggaaaagaaattttaaaaatg

SEQ ID NO: 36056 - DNA, 120 bp, synthetic construct
  source 1..120: mol_type = other DNA
tttgttttaacttttattggttctggtcaattttgttacacttattatattaagccaatcggatgttctgattagcacactgtgtgtgtgtgtgtgtgtgtgtgtgtgtgtgtgttttat

SEQ ID NO: 36057 - DNA, 120 bp, synthetic construct
  source 1..120: mol_type = other DNA
tgtagaatttcaatgcataatcaagctccttctgggagcttgattcaatgcataatcaagctccttccgggaagaatgggtaggcttggatttattactgggttgaacccgacataagac

SEQ ID NO: 36058 - DNA, 120 bp, synthetic construct
  source 1..120: mol_type = other DNA
ctaaatattgttgacgataagaggattttaaaaaaaattcttttaaaacagaagcttatatacaacttagaatctaaaaccaatagatttatggtaaaccttaaaactgaaccaaaacaa

SEQ ID NO: 36059 - DNA, 120 bp, synthetic construct
  source 1..120: mol_type = other DNA
aagacagtgaaattaaagaagaagaacatatttagacagagtaacagaccaagtttagtttcgggagaattaagcagctgctctaaagactgtgtgtatgtgctggcggaagacacagac

SEQ ID NO: 36060 - DNA, 120 bp, synthetic construct
  source 1..120: mol_type = other DNA
agacctcatgttttagactaatatttaaaatccagctgcttattactggggagaaaaacttatcagtaatatttatctttggaagcatcttcaatgctttttcagcttcaaaaatctgga

SEQ ID NO: 36061 - DNA, 120 bp, synthetic construct
  source 1..120: mol_type = other DNA
gttctcaacaaacccatctgatcagctccaaatctgtggagtcccaacaagggtgaaggccgtgattatacaggacaatgaggaaaagtctagatactgaaccatgagttccccaatctt

SEQ ID NO: 36062 - DNA, 120 bp, synthetic construct
  source 1..120: mol_type = other DNA
aggggggcgagggaggtgagtatgaggagtggagtggagctggacccttacaaagggacagcgacaaacacctcatactcaaaacaaggggactttccgtgtcatttgcgccgtcgggcc

SEQ ID NO: 36063 - DNA, 120 bp, synthetic construct
  source 1..120: mol_type = other DNA
tggctgcttacatactacaagattggagttgagtggttgcagcagagattgtatgcctgtaaagccagattagtaatctcctcctttttgtagaaaaagtttactgattgctagtttagg

SEQ ID NO: 36064 - DNA, 120 bp, synthetic construct
  source 1..120: mol_type = other DNA
agagatacctataaacataattactgagacaaaggacatgaacatctttaagtcttgcaaattgccaaaatgacagaaagattatacctcttcatgcttccagaagcacataaccttttc

SEQ ID NO: 36065 - DNA, 120 bp, synthetic construct
  source 1..120: mol_type = other DNA
gggtaggtactttgttgttaaagttaagcacaatttttctttcttttaatgtttagcttgatgcagactctttgtgggatactaatgttgggatataaacgatgctttgtgaacaccccc

SEQ ID NO: 36066 - DNA, 120 bp, synthetic construct
  source 1..120: mol_type = other DNA
gtatgagataacagcagtttttagcagctgggtagcccttagcaaagtattaataactgtggctgtatgaaatgaagtacttaccactacaacatgcatgttaaagaatgccagtttaag

SEQ ID NO: 36067 - DNA, 120 bp, synthetic construct
  source 1..120: mol_type = other DNA
tttcattttattgtgtacctctgtaaggccgaatcaatagattttgaacaatctcacacttaacctttaaaaaaaatctaataggcccagtttcctctcaacaatctttgaagaaccttc

SEQ ID NO: 36068 - DNA, 120 bp, synthetic construct
  source 1..120: mol_type = other DNA
agaaaatgtttgttccattcaagatacggttacacgaaaaggcatctagttgtgaccttcaaattattacttatatacctacagaaaattcctataaatagtctgggtgcgatggttcac

SEQ ID NO: 36069 - DNA, 120 bp, synthetic construct
  source 1..120: mol_type = other DNA
aagaatggagggagaagaggcagtggctgtgaagaatatgaagaggttagtattctcccccagtttggcagaggctggccatctgtgaactgcccatgctttctagaatgtcggagtttt

SEQ ID NO: 36070 - DNA, 120 bp, synthetic construct
  source 1..120: mol_type = other DNA
agtacaaaccgtaacatgtattcttttttttaaaatcaatgccttttctcattttcttctttgaaataggtaaaaatatgtccttagtagttcttcctaagtgtattctggaataaggga

SEQ ID NO: 36071 - DNA, 120 bp, synthetic construct
  source 1..120: mol_type = other DNA
gacatttgtttaatgaatgagagtattactgttgagaaggctttttctctcaagtatgagatagaactttttaaaagcactcatagtggtttttaaaaaaatgtttaacatagagtcaaa

SEQ ID NO: 36072 - DNA, 120 bp, synthetic construct
  source 1..120: mol_type = other DNA
acatactacagggttggagttgagtggttgcagcagagattgtatgcctgtaaagccagattagtaatctcctccttttgtagaaaaagtttactgattgctaatttaggctgtccattt

SEQ ID NO: 36073 - DNA, 120 bp, synthetic construct
  source 1..120: mol_type = other DNA
ggggagaatctggaccatgatggggtgacttgggggcctgaggggaggaccctgaggaagataaaaagctggtgccaccctaggcagtttcacagtgtggcttagggctgtgggtgacag

SEQ ID NO: 36074 - DNA, 120 bp, synthetic construct
  source 1..120: mol_type = other DNA
aaaatgaaatagtcaatttgatacagtggaaaataactaagcatacacaatactggtgaggctggtgaaacagggatgttgaatgcactcttgtcgaaagcctgcattgccatgatttgt

SEQ ID NO: 36075 - DNA, 120 bp, synthetic construct
  source 1..120: mol_type = other DNA
ttagcagctgggtagcccttagcaaagtattaattactgtggctgtatgaaatgaagtacttaccactacaacatgcatgttaaagaatgccagtttaagcaaagtaccttttgactggt

SEQ ID NO: 36076 - DNA, 120 bp, synthetic construct
  source 1..120: mol_type = other DNA
agattttattgggtttttgaatctgtggatagatatccttcaacagttctgaaagatttccagccattctcttcatatattatctgtgctgtattctcgtctctccttttagaacttcga

SEQ ID NO: 36077 - DNA, 120 bp, synthetic construct
  source 1..120: mol_type = other DNA
ggtatcattattcaaactttacagatgatgaaacaggctcacagttgacaggtaattttttcagaaatcacaaagtcaaattggcttctggagtctgctgctctatcatgatgcctccgt

SEQ ID NO: 36078 - DNA, 120 bp, synthetic construct
  source 1..120: mol_type = other DNA
ctttaccttctcttaatttaatctttggtcttggaacctaataattttagaatcaaaaatcttaatttgatgatacccatacttctaatagtaacatggtcttatctattacactgtact

SEQ ID NO: 36079 - DNA, 120 bp, synthetic construct
  source 1..120: mol_type = other DNA
tatctctgtgctgaagtggaacaatgaagaaacatttagaaaagcaaggcatctggcaataggtaaagcacacccacactgaggcacaatattttttaaaagcagagaaagaatgtattg

SEQ ID NO: 36080 - DNA, 120 bp, synthetic construct
  source 1..120: mol_type = other DNA
accagagcacaccttcatttaaaacacatcaagactccgtgaaatgtcaattgctcctacaagtggaagacttacctgaaatgctatgagatagcacaatgcagccagctcagaaagagc

SEQ ID NO: 36081 - DNA, 120 bp, synthetic construct
  source 1..120: mol_type = other DNA
gtattccagaaatctcttctcctaccatgtgtaagcctctatgggaaagaataagtaagtacttaggatctattaaggcactgaggattcccgggtccatgtactgttctctctacagat

SEQ ID NO: 36082 - DNA, 120 bp, synthetic construct
  source 1..120: mol_type = other DNA
cacaagcactgcaatactccaacaactgatctgataactgagatggctagtatgtaactagcgggtggggagcacatacagcatgaatatgttggacaaagggatgattcgtgtcctggg

SEQ ID NO: 36083 - DNA, 120 bp, synthetic construct
  source 1..120: mol_type = other DNA
caggcaaatgccttgtttaaagatatacagctagaaaggagcacagcccatgttatgtaaacaggacaatatctgatgcaagcagtacttctttacatgacagcagatgtcactataagc

SEQ ID NO: 36084 - DNA, 120 bp, synthetic construct
  source 1..120: mol_type = other DNA
aaaactccgacattctagaaagcatgggcagttcacagatggccagcctctgccaaactgggggagaatactaacctcttcatattcttcacagccactgcctcttctccctccattctt

SEQ ID NO: 36085 - DNA, 120 bp, synthetic construct
  source 1..120: mol_type = other DNA
gtccttaagaaaaatgtaaaaggaacttgtgaccaaaaaatttgagtatacaaagaacacaaaataaaacatcctacatgttttctaaaataatcttaaagttatgttagttcttttaga

SEQ ID NO: 36086 - DNA, 120 bp, synthetic construct
  source 1..120: mol_type = other DNA
gtattccagaaatctcttctcctaccatgtgtaagcctctatgggaaagaataaataagtacttaggatctattaaggcactgaggattcccgggtccatgtactgttctctctacagat

SEQ ID NO: 36087 - DNA, 120 bp, synthetic construct
  source 1..120: mol_type = other DNA
aggtggctagtatgtaactagcgggtggggagcacatacagcatgaatatgttggacaaagggatgattcgtgtcctgggtaggacggagcaggaggccgtgagatttttatcatgttat

SEQ ID NO: 36088 - DNA, 120 bp, synthetic construct
  source 1..120: mol_type = other DNA
agctagaaaggagcacagcccatgttatgtaaacaggacaatatctgatgcaagcagtacttctttacatgacagcagatgtcactataagcaaatacctgaattcacttaagctgccaa

SEQ ID NO: 36089 - DNA, 120 bp, synthetic construct
  source 1..120: mol_type = other DNA
ttttagctagaaaagttagttttggatttgtgtattcagtaacagaacatgttgaagtttttattagatgcaagaaaatgtctctaaagtaaaatcctttgtgttgacattagatttttt

SEQ ID NO: 36090 - DNA, 120 bp, synthetic construct
  source 1..120: mol_type = other DNA
tggtgcttgccagtgcatctgagaatctagggactttctgaaatagtacttccttgctatgaggactgaagttggattagaatccttttcaatgaagatcagatgtcctgagtagaattc

SEQ ID NO: 36091 - DNA, 120 bp, synthetic construct
  source 1..120: mol_type = other DNA
agtcattggggggaaacagaagcaaacaaacaaaaaggcaacataatagatattaatattaatacaagaattttaaaagcacagagttctataataataggaaaatagagggaatgcttg

SEQ ID NO: 36092 - DNA, 120 bp, synthetic construct
  source 1..120: mol_type = other DNA
gcagtctacacattctatacaatacctaccaaagtaccaatgtcattcttcacagaattattttaaaatgctgacattcatgtagaaccacaaaagagcctgaacagcaacagacatacc

SEQ ID NO: 36093 - DNA, 120 bp, synthetic construct
  source 1..120: mol_type = other DNA
atgactggcttctggtcatattcttcaggtagacctgacaagatttactgaaagattagatatgaggtgtcagagggacagatgagtcaagaatgacaatgacatttttggcagagcaat

SEQ ID NO: 36094 - DNA, 120 bp, synthetic construct
  source 1..120: mol_type = other DNA
caccacatgattttccccggtaagagaagaacagggtctagtcaactcaaaatccaacttgatcttgttacttgtttatcttccaccttcccatccagacactctagatttgaaagcaga

SEQ ID NO: 36095 - DNA, 120 bp, synthetic construct
  source 1..120: mol_type = other DNA
cttttctataatgtatagaacattgttttaaaatctgtagattaaaaataatctgctgcattgacttaattaattttgcaagttaaatcactttaaaacagtctattagtgttctatgag

SEQ ID NO: 36096 - DNA, 120 bp, synthetic construct
  source 1..120: mol_type = other DNA
ttctggttaagatgatgtatcaaaaaaaaaaatcttcgtgagagctattattaaccaagtcatcataaccaaaactttaaatccacaattctggaatattaaaaagtttctttttgaaca

SEQ ID NO: 36097 - DNA, 120 bp, synthetic construct
  source 1..120: mol_type = other DNA
gagagaaagatcagtcaagaataacactgaggtttttggcagagcaactggaagagttgctgttaaccaaagtaggaaagactacatgaggtgtagatttcaggaaggacatcagtagcc

SEQ ID NO: 36098 - DNA, 120 bp, synthetic construct
  source 1..120: mol_type = other DNA
acagttctttaaggacaacatacttaacgctcatgactgagaatgatgtaattttcatccacagtcatggaaaagtgatagacaagaaatagtagcttccaaattttacataacaggtgg

SEQ ID NO: 36099 - DNA, 120 bp, synthetic construct
  source 1..120: mol_type = other DNA
agctgacatgggagatgaaaaccctacttttatttttttttttttaggttccacgaagaagttgcaagttggcattctctaatttttaacatacatactaacaatatattttgtacacaa

SEQ ID NO: 36100 - DNA, 120 bp, synthetic construct
  source 1..120: mol_type = other DNA
gaatgacactgacatttttggcagagcaattggaaaagttgcccttaaccaaagtaggaaagactacatgaggtgtagatttcaggaaggacatcagtagcccaattttggatctgacac

SEQ ID NO: 36101 - DNA, 120 bp, synthetic construct
  source 1..120: mol_type = other DNA
tctcaattaaaattggagaatttgcatctctttctgtttggtgttgatttcggctcctaataatttaaatggtgcctacaatccagttaggaatcttttagaaaagcacttcagtgcact

SEQ ID NO: 36102 - DNA, 120 bp, synthetic construct
  source 1..120: mol_type = other DNA
tcctttctattcctgaagccgcacagtgtgtcatcctctaaatctgactgtttaatgtaaaatctaggtggtaaagacagaagacacattttgcatctttgtctttttatttgcgtgttc

SEQ ID NO: 36103 - DNA, 120 bp, synthetic construct
  source 1..120: mol_type = other DNA
ccagtcatatcttgtacatctgagccactgtcatctgcagtctagatgagtgtcatagactgggaattgatcgtcctggcttttaaaaacttcccttttcatcaattcttaactcagtgg

SEQ ID NO: 36104 - DNA, 120 bp, synthetic construct
  source 1..120: mol_type = other DNA
atgtgccagacatatgtgatgaggagtgaaagctttagaaagaaaggaggcaggatttaatgtaagcatgcagagtgagaagaatttttcagggaaagaagcagaagaatgacatttggc

SEQ ID NO: 36105 - DNA, 120 bp, synthetic construct
  source 1..120: mol_type = other DNA
aaatttatgagatcattttgttttcaaacaaaatcataagtaataaaaattgctattttgaattataaataatgacatttagatattttaaaaataaggatacccccccccaatagtttg

SEQ ID NO: 36106 - DNA, 120 bp, synthetic construct
  source 1..120: mol_type = other DNA
cgtgtgactgatggcagccacggagactgcagctcgacaggagtggtaggagggtgcccgcgggggcaaggtggtaggaaccttgtagggtgggctgctgcattgacggcgacagcaact

SEQ ID NO: 36107 - DNA, 120 bp, synthetic construct
  source 1..120: mol_type = other DNA
tctcaattaaaatttgagaatttgcatctctttctgtttggtgttgatttcggctcctaataatttaaatggtgcctacaatccagttaggaatcttttagaaaagcacttcagtgcact

SEQ ID NO: 36108 - DNA, 120 bp, synthetic construct
  source 1..120: mol_type = other DNA
agaacacctgaaagccagcaatttcctgacactgagaatgaagagtatcacaggtaagcctatggcaacattgaacaggaggtaactttgtgctgccaaactaatcctaatttgagctaa

SEQ ID NO: 36109 - DNA, 120 bp, synthetic construct
  source 1..120: mol_type = other DNA
aacccacatcttagccaagaattagctgagaccttcatggtaagagatcctttgaggccgttgttggtcttttctctagcagatattaggtgggcttgttctaaagggtcagaggggttc

SEQ ID NO: 36110 - DNA, 120 bp, synthetic construct
  source 1..120: mol_type = other DNA
ttaatgtaaaatctaggtggtaaagatagaagacacattttgtgtctatgtcgttttatttttgtgttcccacgagtcaaatggggtaaattcatatataagattctgaagagtttttgg

SEQ ID NO: 36111 - DNA, 120 bp, synthetic construct
  source 1..120: mol_type = other DNA
ttaattttagaagaaatcatgatatgtcattctattgagtgctaactaaaagttccctttgtttacttagctttctcttagtcataagaaagaagaagatctcttgcgtgaaaacagcgt

SEQ ID NO: 36112 - DNA, 120 bp, synthetic construct
  source 1..120: mol_type = other DNA
gtctgaataaacattttcctctgtagtctctcaaagtggaagtttgcttttagacagatgtctgtggtcctagggcatacatccctgatgtcctcaactacttcacagcacttggtatga

SEQ ID NO: 36113 - DNA, 120 bp, synthetic construct
  source 1..120: mol_type = other DNA
atttattttttttaatacgtgcacccatgctcttcaggtctgatgaagtatccaaaatcaagctcctgaccatccccaaacctgccccttctgcagggtttacctcgctagtcggcgcca

SEQ ID NO: 36114 - DNA, 120 bp, synthetic construct
  source 1..120: mol_type = other DNA
agggatggccccaccatcaattttattggccaccacgatgcatgggatctctggcctgaactcccgaagctctgtataccaggtgctcaggttcctataggtgactttcctctgtacatc

SEQ ID NO: 36115 - DNA, 120 bp, synthetic construct
  source 1..120: mol_type = other DNA
acatatcatatgattctgtttatatgaaatatccagaataggcaaaacatgctaaacaaaaaaagccagtcacaggagaccacatatcgtatgattctgtttatatgaaatatccagaat

SEQ ID NO: 36116 - DNA, 120 bp, synthetic construct
  source 1..120: mol_type = other DNA
tccagagtgactggtgtccttttatgaaggggagattataacaaagacacagacagagggaagactgtgagaggacacagagaacaggtggccatctacaaggcaaggagagaggccttg

SEQ ID NO: 36117 - DNA, 120 bp, synthetic construct
  source 1..120: mol_type = other DNA
aacacaagaccccggagatattctaggatttttgtaggaatgttaaagtttccccctcttactatgaggtctctgatggattgtgcactgctttctaggtgggactgagctgtgtgtgtg

SEQ ID NO: 36118 - DNA, 120 bp, synthetic construct
  source 1..120: mol_type = other DNA
ttaatatacccagtcctcagatggacatgctgcagagttgaatttcccaagctcttggtcttttaagtgcaagaggcacatgtgaactcggggatgagtggaaggttaatgccatgagct

SEQ ID NO: 36119 - DNA, 120 bp, synthetic construct
  source 1..120: mol_type = other DNA
actcttctggatcctagcagtgtccagaagaaggccatggacagaacggagactaggttccgtaagaggggacagattacgggaaagatcacgaccagccgtcaaccgcaccgccagaat

SEQ ID NO: 36120 - DNA, 120 bp, synthetic construct
  source 1..120: mol_type = other DNA
gaaccgcagagacggcagcatgaccagaccctggccaggtttggggaggctgctgggctgagacttgggctgaacttccgctgcaggtcgacttattcccatcagcaccaaagctgctgg

SEQ ID NO: 36121 - DNA, 120 bp, synthetic construct
  source 1..120: mol_type = other DNA
actcttctggatcctagcagtgtccagaagaaggccatggacagaacggagactaggttccgtaagaggggacagattacgggaaagatcacgaccagccgtcaactgcacccccagaat

SEQ ID NO: 36122 - DNA, 120 bp, synthetic construct
  source 1..120: mol_type = other DNA
ctccatcaaaaaaaaaaaaagttgaactagatttggtctgatgcagttacagatttacaaaccgcgtcccaccctcctgccaacaccttccactcctcattcttgagggattagggatgg

SEQ ID NO: 36123 - DNA, 120 bp, synthetic construct
  source 1..120: mol_type = other DNA
aacaaaagaagtggaaccgatacttccggaacaaggctatctgagagcagttcttcctggccctcgggttcatgtaacggcataactggaaccaaagctcactgagcaagggtatatgag

SEQ ID NO: 36124 - DNA, 120 bp, synthetic construct
  source 1..120: mol_type = other DNA
tgacagcacaagaccccgactccaaaaagaaaaaagaaaaatcacaaagaattgcatggcagagtgcctgtctttcacagcttgaactgttgcaggaactttctttttttttttttcttt

SEQ ID NO: 36125 - DNA, 120 bp, synthetic construct
  source 1..120: mol_type = other DNA
ctggaacagggctatctgagagcggttcttcctggccctcgggttcatgcaacggcataactggaaccgacggttacggaccaagggtatgcgagagcgggtcttcccatacaggaagta

SEQ ID NO: 36126 - DNA, 120 bp, synthetic construct
  source 1..120: mol_type = other DNA
caccccacccctgctccttggaggacaacgtgatcactgtattcagctccatcaagaatggtccaggttcttctagatgatctgcacaaatggttcctctcctccttcctgatgtctgcc

SEQ ID NO: 36127 - DNA, 120 bp, synthetic construct
  source 1..120: mol_type = other DNA
agtggcgtgagcaccacaagggggacccgtgcataggtggcaacactgagctcaagagcaggggagcagcagggccccaggagagcttgggtgccccactggctgggctccgggcaggag

SEQ ID NO: 36128 - DNA, 120 bp, synthetic construct
  source 1..120: mol_type = other DNA
ccccatgtcccttgatctttctttggaaacgtgcacccccttggagtgcgcagcaggaggcccctgaatagagagaataaagctaaggggtagtggacagctgcggctagcagccgtagg

SEQ ID NO: 36129 - DNA, 120 bp, synthetic construct
  source 1..120: mol_type = other DNA
cgtgatcaccctgcctcggcttttctttgctgtggctctttcccctctaaactgttctagattcccaggcgccctgctaggaacaggtgtgggccaccctggggtgagctgcctcccaga

SEQ ID NO: 36130 - DNA, 120 bp, synthetic construct
  source 1..120: mol_type = other DNA
gggaccacctggagacgccccgtgtctatgagctgctgttgtgaggagcctggagccagtggacgctgggagggaggaggctttagagtggggggcaaccgggggaggaaggaggttggc

SEQ ID NO: 36131 - DNA, 120 bp, synthetic construct
  source 1..120: mol_type = other DNA
ttcaacacggctacatttaacactaggacacatagggccacacttaagagtcttcaagggaagaaggtacgacccaagaattctatatctggccacagtgtcaatcaagtatgttacaaa

SEQ ID NO: 36132 - DNA, 120 bp, synthetic construct
  source 1..120: mol_type = other DNA
tatttcccagcacccccaacaaaaaaaaattgctcctaggtggacacactaatcaaagacttcctgagaaatgcaggaagaagttttgtcctctgaccacgctacgccctttccttgatg

SEQ ID NO: 36133 - DNA, 120 bp, synthetic construct
  source 1..120: mol_type = other DNA
actgccgtcgcacgtccaaaaccactcactatacaatgtcttgaccatctctcttttctggcaaatataaattttcggaatgtcatcagttagtctctcggtgattccattatttcccca

SEQ ID NO: 36134 - DNA, 120 bp, synthetic construct
  source 1..120: mol_type = other DNA
tctctgtcttcctctggatttccacttgcagacactttaggcactaagaaaagctgaggttggagaaagaacatgtgagacaccagtcttgtgcacaattttcagatcaatctgtgatga

SEQ ID NO: 36135 - DNA, 120 bp, synthetic construct
  source 1..120: mol_type = other DNA
caaaatgacttaggagagggagaaatttagcagctcaatctgatattttactaacgtggtatctaaaattcttgcaatcatggtttatattagtctttgttagttgcaatatctctgatt

SEQ ID NO: 36136 - DNA, 120 bp, synthetic construct
  source 1..120: mol_type = other DNA
tacacaagtatatagtatagtgtatatactagtataatacactagtatatagtatagtgtatatactaatatatacactagtatacagtatagtgtatatactagtataatactctagca

SEQ ID NO: 36137 - DNA, 120 bp, synthetic construct
  source 1..120: mol_type = other DNA
ctctgtggtgatctttgcttttctatttttccattgctagaatgtgagctgctgtttccctagcacctcagatgtcattcaacattgtatagcactggtgttgagaattgagagaatcta

SEQ ID NO: 36138 - DNA, 120 bp, synthetic construct
  source 1..120: mol_type = other DNA
gagcatttgctaatttatttcctcattaataatttatgccttaataattttaggtttgaataaatgttccaaaagactaatattcaaaagattttttgaaaagtagaacaaagccagaca

SEQ ID NO: 36139 - DNA, 120 bp, synthetic construct
  source 1..120: mol_type = other DNA
actcagcaactgctctctgggagcgtgtgtccctggggacaggatggaggggaggggaagctcagggtgactccaactaaagccgagagaagccaagtgcaggatgagcaagttccaggc

SEQ ID NO: 36140 - DNA, 120 bp, synthetic construct
  source 1..120: mol_type = other DNA
tagatatatactaagtaatgggattgctgtgtcaagtagtgcttttattttaagtgttttgagaaatcttcagactactttccactatagctgaactaatttatatttccactagcagtg

SEQ ID NO: 36141 - DNA, 120 bp, synthetic construct
  source 1..120: mol_type = other DNA
aaacctggatgggagggccttcaacaagaggtgttgagagggtagggttaggtgtagtctagggcaggagacaaggattccgtgagagctgccacatgaccatgacagagagctctgtgt

SEQ ID NO: 36142 - DNA, 120 bp, synthetic construct
  source 1..120: mol_type = other DNA
cggacaagagcaggaaactccaaaccctttggtgggcaggacagagggtgtgggtgatggttccagtgctgtgggctggtccagcctggtaggaatgagaatccatatgctaggagctga

SEQ ID NO: 36143 - DNA, 120 bp, synthetic construct
  source 1..120: mol_type = other DNA
cagaagggctcatggccctttgaaggtgaagacccaggatgcagggtgatctgcacttggccctcaatgccaaggtcagcctgtggctgggccaggtggtgatcctggctctcacttgca

SEQ ID NO: 36144 - DNA, 120 bp, synthetic construct
  source 1..120: mol_type = other DNA
ctgcttgagttctctttgtctagcaaattaaaacctaataccttagaccaggattccagtaccaactctccactaagacttctgtaccagacacctactcatctataagattctcacctt

SEQ ID NO: 36145 - DNA, 120 bp, synthetic construct
  source 1..120: mol_type = other DNA
tccttaagtctgaatatgaagggtcacagagaaaaatctgagcaaacaggccttgctaagttcttcccagtttattattagatcatactgttttatctaattatgcttctccattactat

SEQ ID NO: 36146 - DNA, 120 bp, synthetic construct
  source 1..120: mol_type = other DNA
gactcagtttactcctaatccgctaatttttcaatgtggatgaattgtgttcattactatgcaagttcagatttcacattacccattcgcaaagtatttactaagttctgttacttgcta

SEQ ID NO: 36147 - DNA, 120 bp, synthetic construct
  source 1..120: mol_type = other DNA
accaagaagcgatgcaagatgccttttaatggagagggtcttcttactaatcctatgtgtatatcctgattttcttcaatatgtactttttaaattttaagttccagggtacatgctcag

SEQ ID NO: 36148 - DNA, 120 bp, synthetic construct
  source 1..120: mol_type = other DNA
tctcaaaagtatcaagtttttgtctataaaatggcaaaactggctatgatgaaataaactgatatttgctatttctaataaaagcatacaatatatttttctttcttaccagattcaaat

SEQ ID NO: 36149 - DNA, 120 bp, synthetic construct
  source 1..120: mol_type = other DNA
ctatattctggttattaataatctcacttcttaccagggtctgctaatccagtggtctctaacagtatgtaatcaaatttccccttcttttgcatcaaattctcaatagctctaaggcca

SEQ ID NO: 36150 - DNA, 120 bp, synthetic construct
  source 1..120: mol_type = other DNA
ttaaattggtgaactgtatcatatgtgaaatttatctcaataaagctgctattcttaaaagaaataaacacctatctgtgcatcaaaatggggtgcctgtgtacatttgtagagaaacac

SEQ ID NO: 36151 - DNA, 120 bp, synthetic construct
  source 1..120: mol_type = other DNA
tgttttacctgtgtctagaaacaagttcaataaaagacttctaatagtatagaaatgagtagatcttatcctgtaggccaggggaaacttctgaggtagaatgcttttggctgcaaatac

SEQ ID NO: 36152 - DNA, 120 bp, synthetic construct
  source 1..120: mol_type = other DNA
tattctacctaatgccctattaattatggggatttctggtatagcccatggcaaccacctctattcatggttgtatgtgaacatgcactctcagtgagagtaatattgtccccaaaacga

SEQ ID NO: 36153 - DNA, 120 bp, synthetic construct
  source 1..120: mol_type = other DNA
taacaaggaaaggtgaatgcttattttttgcaccagctctaaataaattatattttagaaaaaaagttttcattgccaaaacatatttttaagctatgcttaacttcacttttcttcaat

SEQ ID NO: 36154 - DNA, 120 bp, synthetic construct
  source 1..120: mol_type = other DNA
ttttgggtaactttctttgtaaaattagtggcttctctattagccaacttgttggtctattttactataagttaaggaaagcacttcctatataattccaaatttaaagataaaattgta

SEQ ID NO: 36155 - DNA, 120 bp, synthetic construct
  source 1..120: mol_type = other DNA
aacaacaacaaaaacacattcacagacatctatctcactgaaaacgatatacagatggcaaataagcatataaaacatgctcaatattattagacatcagggagacacaaattaaaacca

SEQ ID NO: 36156 - DNA, 120 bp, synthetic construct
  source 1..120: mol_type = other DNA
ctctgcaatttttgtatttcttttataccccctcccttgatataacatgtaatataaaaatgaggagtcaaataaccaatgtacaaaatattaagttactctaggaccctgatcttcacg

SEQ ID NO: 36157 - DNA, 120 bp, synthetic construct
  source 1..120: mol_type = other DNA
cttacaaggaaaaaaaacatcattggtcagattcaagatttttttttctttaatgcacaaacatataagaaaaaacatctcctttatcttaggactgaccaactgtgcctgctttcttta

SEQ ID NO: 36158 - DNA, 120 bp, synthetic construct
  source 1..120: mol_type = other DNA
tcaaggcatacgactagaaaactaatttccatggcatcaaattaatttcctcctttggagataaaaccatgagatcttttccaaagcattaaaatcgccaagaaaaaaaaaaaaaaggaa

SEQ ID NO: 36159 - DNA, 120 bp, synthetic construct
  source 1..120: mol_type = other DNA
gaaaaggattctaatccaacttcagtcctcatagcaaggaagtactatttcagaaagtccctagattctcagatgcattggcaagcaccatacactgaagaattcacagaagattttagt

SEQ ID NO: 36160 - DNA, 120 bp, synthetic construct
  source 1..120: mol_type = other DNA
agtgatagaagctttaactatttatagcaaaagggaattatagtgatagaaccttttactatttatacccattccatttccatctctcttgttatttcctttaaaaaagaccaattctaa

SEQ ID NO: 36161 - DNA, 120 bp, synthetic construct
  source 1..120: mol_type = other DNA
catccttgaatgaaaacattaacaccttcaattccatgttctcctttatttggaaggaaacaaagatgtatataataaatattattcaactttttgatcctaatattaaagtatagttca

SEQ ID NO: 36162 - DNA, 120 bp, synthetic construct
  source 1..120: mol_type = other DNA
ataaaaaaaaagaaaaccaatatgcatttcaagaataacctcaaaaagaacttctgaaaaagaggcattgcaatctacatgagaaaattgtttctgctcaaaagaaagcttacaaaataa

SEQ ID NO: 36163 - DNA, 120 bp, synthetic construct
  source 1..120: mol_type = other DNA
aaaaaacagtaagattgaaaaacttctataaagactgacagacaaaaaaagatgagacaaactatgaatatgagaaatttaagtggatatcactacagatgctggagacatcaaacgaat

SEQ ID NO: 36164 - DNA, 120 bp, synthetic construct
  source 1..120: mol_type = other DNA
ctacgttactgactttgggaatgaaatagtaaatagcctttatttgtagccctatttgaaaataatttaaaagtgctttcttaaaatccttatctgcaatgattattgtacacatcatgg

SEQ ID NO: 36165 - DNA, 120 bp, synthetic construct
  source 1..120: mol_type = other DNA
tatagcttttaaaaattttatcctttgccttattttaaaaaagaagcctgcttatattgattctgtaagtattgtctctttcaaacttgtgagatataatttcttattttcttttcccaa

SEQ ID NO: 36166 - DNA, 120 bp, synthetic construct
  source 1..120: mol_type = other DNA
ttgaagcactggtcaactcccaaggagcaatgggcaagagacaaggtggccaagcagaaagtgacaggacagctatgaggctgggtcacgaagcaggggtctctgtagactcatcacaat

SEQ ID NO: 36167 - DNA, 120 bp, synthetic construct
  source 1..120: mol_type = other DNA
aaattagagaggattaacatctttacattactgagtcttcatatccataaatgagaatttacacagatctccttatatacctcatagtaatgttttaacctttcttttcccatgtagctt

SEQ ID NO: 36168 - DNA, 120 bp, synthetic construct
  source 1..120: mol_type = other DNA
aatcagaccagccaaatatttcttgttctcatgtctaatctatattaacatccttatgaatattttgtttgtttgaatgccacttcctgtcatagtactaacaacctattttagatgaat

SEQ ID NO: 36169 - DNA, 120 bp, synthetic construct
  source 1..120: mol_type = other DNA
aggaacaattctaaaactactcatcagctgattgggactccttataaaattaatttaaatgcaccaaaagccatattgcatttatactatagaaggtaaaactggtacagccatttcata

SEQ ID NO: 36170 - DNA, 120 bp, synthetic construct
  source 1..120: mol_type = other DNA
tacataaagtattttgcaacaggtttcaaaggatgctttaatcttatcctctaggatattctatactaaaataatatatgaaaaatagcatgcaaattctcaaaaacgttaggattcttt

SEQ ID NO: 36171 - DNA, 120 bp, synthetic construct
  source 1..120: mol_type = other DNA
agaaggtaaacatatggtctttatcctcatgtattttatctgtgaaaataagtgtgcttaacttctcaactcaaatattaaactgtagtaaaaaaaaatagctctagacacaatacttct

SEQ ID NO: 36172 - DNA, 120 bp, synthetic construct
  source 1..120: mol_type = other DNA
ttagaattggtcttttttaaaggaaataacaagagagatggaaatggaatgggtataaatagtaaaaggttctatcactataattcccttttgctctaaatagttaaagcttctatcact

SEQ ID NO: 36173 - DNA, 120 bp, synthetic construct
  source 1..120: mol_type = other DNA
aatatattagaaactttcttagttaagcgactatgttttctccctttctctttccctttttcacctttttaaaaaccagtcgaaattttcttactttttcaaaagtaataatcattaaga

SEQ ID NO: 36174 - DNA, 120 bp, synthetic construct
  source 1..120: mol_type = other DNA
aatttggttacttttattgttatgtaccttttttccccatagttaacaggaatgatttgcacaattgcatccatgatttaagcttcctgccattcctttggcttacaagaccattcttaa

SEQ ID NO: 36175 - DNA, 120 bp, synthetic construct
  source 1..120: mol_type = other DNA
tatgatatggaagaggatagtaatggagaagcataattagataaaacagtatgatctaataataaactgggaagaacttagcaaggcctgtttgctcagatttttctctgtgacccttca

SEQ ID NO: 36176 - DNA, 120 bp, synthetic construct
  source 1..120: mol_type = other DNA
accttatgctataaaaatagttttaaaatagagtatgtttattaagatttaaaaataagtatagtcatgcactgcataacagcgttttagtcagactgcataagattacgatggagctga

SEQ ID NO: 36177 - DNA, 120 bp, synthetic construct
  source 1..120: mol_type = other DNA
ttctattactagtaacagtggagattaaatatctcatgtttttgggcgttctagagcccaacacatcacctgttcctttccatactaccacaactgacactctctggaaagtgccacctc

SEQ ID NO: 36178 - DNA, 120 bp, synthetic construct
  source 1..120: mol_type = other DNA
tgaggtgtatgtttttataatgttatgcttagcccttgtgtattttcatctctgagtttgaaatttggggttatattggcaaagggaggtttgggttttaattaggtgacctgttacagg

SEQ ID NO: 36179 - DNA, 120 bp, synthetic construct
  source 1..120: mol_type = other DNA
ctctgggacaagcaaggatgtcaggagccaggggagatttgctgtgtgaccccagctcagctgctgggcccttgtaagtcgccacctttccccagggagcagtcctggggctacgtgtat

SEQ ID NO: 36180 - DNA, 120 bp, synthetic construct
  source 1..120: mol_type = other DNA
gagagtttaattaaacactattcagcttttcagaggaagaaagaaaaactaaagatcacagagaaagcttttatacaaattgtagttataaaaaatgttaatgtttcttgcttctaactt

SEQ ID NO: 36181 - DNA, 120 bp, synthetic construct
  source 1..120: mol_type = other DNA
tctcacttataccatgagccattcctcagtatctgtcctcttcctgttagtgttctacaattcctttctccttaatttttctccgctttacaaaatgtcacacagacaagtgcatgatac

SEQ ID NO: 36182 - DNA, 120 bp, synthetic construct
  source 1..120: mol_type = other DNA
aatttggttacttttattgttatgtaccttttttccccatagttaacaggaatgatttgcacaattgcatccatgatttaagcttcctgccattcctttggcatacaagaccattcttaa

SEQ ID NO: 36183 - DNA, 120 bp, synthetic construct
  source 1..120: mol_type = other DNA
aaggtgagaatcttatagatgagtaggtctctggtacagaagtcttagtggagagttggtactggaatcctggtctaaggtattaggttttaatttgctagacaaagaaaactcaagcag

SEQ ID NO: 36184 - DNA, 120 bp, synthetic construct
  source 1..120: mol_type = other DNA
agattacgatggagctgaaaaattactgtcacacaaatacttaccattgtgttattatttcgatacactgttcagtacagtaacatatatgctgtacaggtttgtagcctaggagcaaca

SEQ ID NO: 36185 - DNA, 120 bp, synthetic construct
  source 1..120: mol_type = other DNA
taagattcttatttatataacaaattttttttattcctctgtagtgctactttagtctctgagctaattttcatgaagccaatctaaaaatcgtgttatttctaaggatgtggagcgagt

SEQ ID NO: 36186 - DNA, 120 bp, synthetic construct
  source 1..120: mol_type = other DNA
ttcatatctgaccaccattggtatctaattggttttcttattgtctaccatccccaggtgatatctgatcactctggcatggcttcagcaagaattctgtgaggtcagtttagccagatt

SEQ ID NO: 36187 - DNA, 120 bp, synthetic construct
  source 1..120: mol_type = other DNA
gatgagatggatggatgggtgaatagatggtagatgatgggtaggtaggaagatgaatagatggatgcatggatgagatggatggttgggtgaatagatggtagctgatgggtacatagg

SEQ ID NO: 36188 - DNA, 120 bp, synthetic construct
  source 1..120: mol_type = other DNA
cgcttcttacacggtttgtttcttcatgcaatcttgctagcacatacaccaagtaccaagaactggattctacctacttaggtttcactgtcaaaataccttttcggttatagaaaccta

SEQ ID NO: 36189 - DNA, 120 bp, synthetic construct
  source 1..120: mol_type = other DNA
taggaattgaaaacccaggcgaagaagtcactgtggcatgaacagatggttcacttcgaggaaccgtggaaggcgtgtgcaggtcctgaggtagggcagaatcacagtgtgcagggtctg

SEQ ID NO: 36190 - DNA, 120 bp, synthetic construct
  source 1..120: mol_type = other DNA
ccacgtgacaactcaatctcaactcctcctgacctgcagaccctgcacactctgattctgccctacctcaggacctgcacacgccttccacggttcctcgaagtgaaccatctgttcatg

SEQ ID NO: 36191 - DNA, 120 bp, synthetic construct
  source 1..120: mol_type = other DNA
cagctttagagacatgaattgataagatttaaagttgaaagaccatgactctagtacttcctgagtaatcaactgaagtatgctttacacatgtgttttccaaattgctgactgttaatt

SEQ ID NO: 36192 - DNA, 120 bp, synthetic construct
  source 1..120: mol_type = other DNA
attaaaagttttgagtataaatccttaaaccagtagctcacaattttcagatgcttttgtaaaggtctgcttttaatcaatacataacacgtttgtaacacccatcacttggtgtgaaaa

SEQ ID NO: 36193 - DNA, 120 bp, synthetic construct
  source 1..120: mol_type = other DNA
cgaggtgccgggatccccgacgacacagggcagattccctgaatggggcccccggcgggggcgaggcgggcggtgaagaaggggcctggcacctgggaaggctgcggcctggcgagtgcc

SEQ ID NO: 36194 - DNA, 120 bp, synthetic construct
  source 1..120: mol_type = other DNA
aatcaactgaagtatgctttacgcatgtgttttccaaattgctgactgttaattgtaagtgcttgtgacttgaaaggaagcacttgatgttcagggaggaaattccttttaaattctgca

SEQ ID NO: 36195 - DNA, 120 bp, synthetic construct
  source 1..120: mol_type = other DNA
cgaggtgccgggatccccgacgacacagggcagattccctgaatggggcccccggcgggggcgaggcgggcggtgaagaaggggcctggcacctgggaaggctgcggcctggcgagcgcc

SEQ ID NO: 36196 - DNA, 120 bp, synthetic construct
  source 1..120: mol_type = other DNA
catctggattcaccaattgttagtagctttcgcttcataggtttcacatctcttccctccgtctcttaccgtgctgcccacacactcacacacacacacacacacacacatacggatata

SEQ ID NO: 36197 - DNA, 120 bp, synthetic construct
  source 1..120: mol_type = other DNA
gggcagtcttcggaaaggaagagggtattatttggaacaccttgttttcctgttttctgctaatggactcctgaaataatgttcctgggattcttatcaacacatttattattacgttag

SEQ ID NO: 36198 - DNA, 120 bp, synthetic construct
  source 1..120: mol_type = other DNA
gtttgtaacacccatcacttggtgtgaaaaatgctgaagcactcatgcgggttctaataccagctcttacagccttggcgagattctgagtgagtcctttcccttctaaacctatctttg

SEQ ID NO: 36199 - DNA, 120 bp, synthetic construct
  source 1..120: mol_type = other DNA
cagataataattttaaaaacccagcaccaagagaaagcatccatccagtaagcgtccacaacggggataagcagaaccaaagaaaagccaacacattgtaactgagagcgagcaacatcc

SEQ ID NO: 36200 - DNA, 120 bp, synthetic construct
  source 1..120: mol_type = other DNA
atgcagaaccttctcacccagcgggatgaaatcgcctgggtaacatagtgagaccccggctctacaaagcaaccaactaatcaaaaaagaaagaaagaaagaaagaaagaaacacacaaa

SEQ ID NO: 36201 - DNA, 120 bp, synthetic construct
  source 1..120: mol_type = other DNA
ctgcagccttctgtttctgagctttcatggttgatgctgagaacatcctcactgaggggtgtgaaaagccattactctgctccagacactggggatcaggaggaaaggggctgctcgttg

SEQ ID NO: 36202 - DNA, 120 bp, synthetic construct
  source 1..120: mol_type = other DNA
agtctagctatctgttcagtatttaaggttgttgttgcatagatatttatgacttgaaattttgcatagatatttatgacttttgtcaggggaggggttggtggattggtcctttcatca

SEQ ID NO: 36203 - DNA, 120 bp, synthetic construct
  source 1..120: mol_type = other DNA
acatagaattaatgagtattcttttttgctttttctcttctgagccaagagctttcttttcataatttatgttggaggtgttccagactatgttatgttactactgcaagaaggtccttg

SEQ ID NO: 36204 - DNA, 120 bp, synthetic construct
  source 1..120: mol_type = other DNA
catttgagaacagtgagtcacagagggattaagtatcttactcaagatcttgcaagtgtttggtttgaacccaatcttttcactctgcagaactcagagtcactcttatttggaaacttt

SEQ ID NO: 36205 - DNA, 120 bp, synthetic construct
  source 1..120: mol_type = other DNA
attcgccaaataccaacaattttttaggggaaactttacatcctcaatactatacacttccagctacaccaccacctaacagggactttaaaaagaatacaaagtacggtatgccttctc

SEQ ID NO: 36206 - DNA, 120 bp, synthetic construct
  source 1..120: mol_type = other DNA
ttagttttataagcagttaaaaagaatccctttcactgaaatacaatctgtggtgagacttctagcttttctcgatcttacgctgccagatttatgtcactgccaaagctatgcaatggg

SEQ ID NO: 36207 - DNA, 120 bp, synthetic construct
  source 1..120: mol_type = other DNA
catccagggtttgttgctacagtcaaaagaataaataaatcaatgaagaaataccttcattgtctgtggttttcatgcagatatactcatggaggttgtatctctccaaaaacagacaaa

SEQ ID NO: 36208 - DNA, 120 bp, synthetic construct
  source 1..120: mol_type = other DNA
caaatctgatttaagcttcacacatgtaagtaaaacattaccatccccattttacagatgtgaaaagagaggcccaaagagctcgagcaattttccctaaaccgtgtccctcgcagttgg

SEQ ID NO: 36209 - DNA, 120 bp, synthetic construct
  source 1..120: mol_type = other DNA
tcaacacttttttttttaattgtctaataggttggcactcatcatgagcccctgttctcattctgcaaatggtgaagctctctattgtcctgaccccacggttcctgtcccatgaccagg

SEQ ID NO: 36210 - DNA, 120 bp, synthetic construct
  source 1..120: mol_type = other DNA
gaagggcatgagcctgagaagagcctaggtgttacagcctggctgtctgggtttgaatcctacttcctggctgtgtgaccttggacaaattcctaacctctctgggccttggtttcctca

SEQ ID NO: 36211 - DNA, 120 bp, synthetic construct
  source 1..120: mol_type = other DNA
cttgacgtctttgatgggtttctccagtgtcaaaatcctaaatcaagtctttttggcttaaaactaactttgggatttttttcagctgcatcccttggggagtctaaagaatgtatctct

SEQ ID NO: 36212 - DNA, 120 bp, synthetic construct
  source 1..120: mol_type = other DNA
agtggttcaaactttgcagtttttttattgccagtcactaataccaaggttaaaaatttattttcctttttgatctctgacttcagtttctatgttcagggagagaatgcgttataaaat

SEQ ID NO: 36213 - DNA, 120 bp, synthetic construct
  source 1..120: mol_type = other DNA
tccaatacttctgtttcatttctaatataatacaaatcaataaaagcaaccacataagcatatccatgctggtatgtcaccatatttatgtccatatggtatcaacatgaagagagcata

SEQ ID NO: 36214 - DNA, 120 bp, synthetic construct
  source 1..120: mol_type = other DNA
tgtaagagttgagtgattatgacagagactggatggctcacagagcctcagatgttttctatctgcccctttatataaacagtttgctgaccattgctctaaggcatccttttccatcct

SEQ ID NO: 36215 - DNA, 120 bp, synthetic construct
  source 1..120: mol_type = other DNA
atcttgtgaaatgcactaaatctctcttttttttttttttttcaggcttttggagacatattacacaggtgagtgtgtacctagattttagcatatgttctttaagattccacgactatc

SEQ ID NO: 36216 - DNA, 120 bp, synthetic construct
  source 1..120: mol_type = other DNA
gggagcaccgagtgtttcctctacacagtcatgtcctatgatcgctacttggccatcagttacccgctcaggtacaccagcatgatgagtgggagcaggtgtgccctcctggccaccggc

SEQ ID NO: 36217 - DNA, 120 bp, synthetic construct
  source 1..120: mol_type = other DNA
atggcgccgactagcgaggtaaactctgcagaaggggcaggtttggggatggtcaggagcttgattttggatacttcatcagacctgaagagcatgggtgcacgtataaaaaaaataaat

SEQ ID NO: 36218 - DNA, 120 bp, synthetic construct
  source 1..120: mol_type = other DNA
tgtgccaagattctttacagaaatggaaagagtgtgacccataaagtgaggacattcagcttcactagagccagaggtcaggagggccccttgctggggccaggctcccagaccctcaag

SEQ ID NO: 36219 - DNA, 120 bp, synthetic construct
  source 1..120: mol_type = other DNA
aagttggtactaaaatgtcctaaacatactgaaaatactactgccaatcattaaataaagacctataagccaatagaaaataagaaaatagaaaaataaggaaaagaaacaaatccttta

SEQ ID NO: 36220 - DNA, 120 bp, synthetic construct
  source 1..120: mol_type = other DNA
ctggtgagttgaacttacagaaagtcagctgtacactttttatacaccttagtgatatagtatactgtaaaacattaacattaaaaatcagacttatatatgttattgtttataaagctg

SEQ ID NO: 36221 - DNA, 120 bp, synthetic construct
  source 1..120: mol_type = other DNA
ataaagcgaaatgaggtggtggctttgatggatttcttttacaaaccctaggaaactgattcagcgattgttttcctttttcttacccagcacagagtagtgacacagcagttaattcat

SEQ ID NO: 36222 - DNA, 120 bp, synthetic construct
  source 1..120: mol_type = other DNA
gattatcactgcagtaagaggtgcctgggacggacttagttgaggtaggctgtggattgagagaatatagagactggggtatgtgaaatcggaaagcccacaactgtagcagactagagt

SEQ ID NO: 36223 - DNA, 120 bp, synthetic construct
  source 1..120: mol_type = other DNA
ggccggtcctggctgtgattcggggcagctccgtttctgcgtgttaccgagcttgtgtgtgcgttggtggctgttccgtggctgtggcaggtgacccaatggtgcttccccttcccctcc

SEQ ID NO: 36224 - DNA, 120 bp, synthetic construct
  source 1..120: mol_type = other DNA
agagtgtctcccccaaacccccgtcttccccggcagcccagcctggaagcacgggtgcgcgacatcgccatagcaaccaggaacaccaagaagaaccggggcctgtacaggcacatcctg

SEQ ID NO: 36225 - DNA, 120 bp, synthetic construct
  source 1..120: mol_type = other DNA
ctcctgctcttcatggatgaagcagacgccttccttcggaagcgagccactgtgagtgtcactaagcctctgtctggccacaggagggtggtcgggtgggcgcggctgtcatcctgggcc

SEQ ID NO: 36226 - DNA, 120 bp, synthetic construct
  source 1..120: mol_type = other DNA
aggccgcactgtcagctggccggtccaagcctgtggctggagctggggtctgtttacctaataaagtcccacaggtgcctcattgccctgtctgtctcttggctggcacggggtggggtt

SEQ ID NO: 36227 - DNA, 120 bp, synthetic construct
  source 1..120: mol_type = other DNA
cagtggaacctccgtgcttcccaagtgcagagtggaagcagtaaagggagcagctctcaggccagaaggtcagattcttactgctttcacccacagctcagcagttttccaagcatcagt

SEQ ID NO: 36228 - DNA, 120 bp, synthetic construct
  source 1..120: mol_type = other DNA
cttagcaattagccagcactggaaaaaggctgggctcaaatacctcgagcacagtaaggcttccttggcccacggctgtgtgtggacagggagcacactgaacgttcaggcgtcattcgc

SEQ ID NO: 36229 - DNA, 120 bp, synthetic construct
  source 1..120: mol_type = other DNA
tctcatcatctttacatgctgtgtacccagccctggctgctggcaaacatcgctgcacacgcccttccgcttcagactcctctcttcctggagcagcttgcaagctttctgtggactcac

SEQ ID NO: 36230 - DNA, 120 bp, synthetic construct
  source 1..120: mol_type = other DNA
cacacgtgagcatctgacagcctggaaacccccccactgcttccaggtgaacatctgatagcctggaacagaaccccaggcctcccagtaagcatctgaaagcaaggaacagcactctca

SEQ ID NO: 36231 - DNA, 120 bp, synthetic construct
  source 1..120: mol_type = other DNA
gaaacagcaccccacaccccaggcaaaaatctgacagcatggaacaagaccactgctcccaggtgagcatttgacaacttgggaaagcaccctccacccacacgtgagcatctgacagcc

SEQ ID NO: 36232 - DNA, 120 bp, synthetic construct
  source 1..120: mol_type = other DNA
ttagaacacctagtctcattccgctcagtccccacctcacttggtcactttgtcctgatttccttcagtgaagccttgacttagtcttgagatagatcacaccctcagtggttcctttct

SEQ ID NO: 36233 - DNA, 120 bp, synthetic construct
  source 1..120: mol_type = other DNA
tattaaaaatttacagtgacatgaatttttatttcttgacatttgaagttatttgtttttgtgcccttcaattacagttcatagacttggtgttattgtgattctccaagtatgctttca

SEQ ID NO: 36234 - DNA, 120 bp, synthetic construct
  source 1..120: mol_type = other DNA
attgaaaataatatacctgaatagtattcaagagctggaaattcgcaacatgtcctggccacgtctgataagaaagcttcgttgttacctgaaggagatgaagaatcttcgcaaactcgt

SEQ ID NO: 36235 - DNA, 120 bp, synthetic construct
  source 1..120: mol_type = other DNA
tttctgctaaaagatgaaaaaaaaaaggctttagagattttatggccttgaaccaatcacacaagcaatggtgaaagggctgaggctaaaatgggacagcccctgaacgatcagggtcct

SEQ ID NO: 36236 - DNA, 120 bp, synthetic construct
  source 1..120: mol_type = other DNA
gtctcaaataaaagaatgggaggaaactggttacaataaccaaatttcatttaaatgccttgattttcttgggctgcatcttattgattggacaactcagtcagtgccttttgttttttc

SEQ ID NO: 36237 - DNA, 120 bp, synthetic construct
  source 1..120: mol_type = other DNA
ttgggcctcctcacttcacatgacccagctgttccttcagttggacacctgggccctccccaccagcccacctgggccacctcacctgggacgaaccccttgggtaagcagtgcatccag

SEQ ID NO: 36238 - DNA, 120 bp, synthetic construct
  source 1..120: mol_type = other DNA
ctgttacgacattagacagaaaaataaaatctgaaagtagtgttgttaggagatctttggccacatcaaaatataaaaatgctttctactttaaaaagctttataaaaacagaggagtca

SEQ ID NO: 36239 - DNA, 120 bp, synthetic construct
  source 1..120: mol_type = other DNA
aaagtcatctattagccaaacttcatcagtatttggggaataaatgaatgaatgagttttggactttcaccctattatttattcttttacttccataaatgtgtatctaattcgatcaat

SEQ ID NO: 36240 - DNA, 120 bp, synthetic construct
  source 1..120: mol_type = other DNA
aacaagcaagggttgatgctgcccagagtctccagctaatacacaatatggacatccccttccagggcagcgggaagagagtggctccttgtgcagtgaagctgacatccaccaactaag

SEQ ID NO: 36241 - DNA, 120 bp, synthetic construct
  source 1..120: mol_type = other DNA
gtaatggatggagacctttttgcccaagtccagggtcattctgatggcctgatggtcaacacttaggatgatgtgtgatgaagagctttgccaccgaggtcaattccactttagacccgg

SEQ ID NO: 36242 - DNA, 120 bp, synthetic construct
  source 1..120: mol_type = other DNA
acccatagaaggaggcaggtgaggtattcatccagagtcctgttcttgagccaaagttctacgaacacagtcaagggctgccgtcctttcatccttggacagtcctccactggttttttg

SEQ ID NO: 36243 - DNA, 120 bp, synthetic construct
  source 1..120: mol_type = other DNA
acctcacctgggacgaacccctaggttaagcagtgcatccagcccatcgagcacagcttggaaggcctccagacaaggcatctttatcagaggcctcagagggaggcggcggaagggcca

SEQ ID NO: 36244 - DNA, 120 bp, synthetic construct
  source 1..120: mol_type = other DNA
agactgtctcaaaacaaacaaacacaaacgaacaaacaaagaaaaaagctggaaaaataaattctgaaagaatttccatctctatgaattcatcttcagaagtgatagcatttcctgctt

SEQ ID NO: 36245 - DNA, 120 bp, synthetic construct
  source 1..120: mol_type = other DNA
cttcaatctcaccttctattcctgataatagggaggcagcagaaacccacggcaggcaatgggactcaacttctacacaccaccaccaccacttaatcgtgattcccccaaacagcagag

SEQ ID NO: 36246 - DNA, 120 bp, synthetic construct
  source 1..120: mol_type = other DNA
ttgacccatagaaggaggcaggtgaggtattcatccagagtcctgttcttgagccaaagttctacgaacacagtcaagggctgctgtcctctcatccttggacagtcctgcactggtgtt

SEQ ID NO: 36247 - DNA, 120 bp, synthetic construct
  source 1..120: mol_type = other DNA
agcgtctcctgctgaaggcctccatgaacagtggggggaaaagttctgtgggcagctcctccagggtggacatggccaaggcttggtccctcagcaggctccgccctgcaagctccagga

SEQ ID NO: 36248 - DNA, 120 bp, synthetic construct
  source 1..120: mol_type = other DNA
tttgaaataaagacagaactgcatttagaggaaaacattcaagcttcaaattgttcatatgaaaaaaaaaaggacaggatatagctctgtgccatcgtaggctgcactgtcaccatccca

SEQ ID NO: 36249 - DNA, 120 bp, synthetic construct
  source 1..120: mol_type = other DNA
caaacacaaatgaacaaacaaaggaaaaagctggaaaaataaattctgaaagaatttccatctctatgaattcatcttcagaagtgatagcatttcctgcttggcatttttcgcctacat

SEQ ID NO: 36250 - DNA, 120 bp, synthetic construct
  source 1..120: mol_type = other DNA
cttcatagggagagaggggaggtgttatgagaaaatctctcatcaatctgacctagctccccaaaaagatgtaacttttaaaatgtcagatggaaatatttaaaaagtgttacatgcctg

SEQ ID NO: 36251 - DNA, 120 bp, synthetic construct
  source 1..120: mol_type = other DNA
gtaggcgtccctgccatgcctgtatcatcagcaaaccatctatcactttcaccattctttgtgcctgctccctgaccctctgtttcagaatcatgcattgcctaggtaattaatttacct

SEQ ID NO: 36252 - DNA, 120 bp, synthetic construct
  source 1..120: mol_type = other DNA
tcctagtatgacaacctctctatagcatctcccctagctgatccctctgcctctattgggatggttgcatgatacccatttcaggacagggccgccaacaggacaatgtatggacattct

SEQ ID NO: 36253 - DNA, 120 bp, synthetic construct
  source 1..120: mol_type = other DNA
gctgggtttttaatgggaacctgggagtgaagcaagacttgcaggtcacattgggcaggcttccaaattcaccacctatggaaggtctttcgcttggcttacatcctgtccctgagtaaa

SEQ ID NO: 36254 - DNA, 120 bp, synthetic construct
  source 1..120: mol_type = other DNA
ttatatgaacaatttaaagcttgaatgttttcttctaaatacagctctgtctttatttcaaaaaagttgatcgttctttggttgatgtcgtttcaaaattcttgaagggagcagtgactc

SEQ ID NO: 36255 - DNA, 120 bp, synthetic construct
  source 1..120: mol_type = other DNA
gtcctttttttttttcatatgaacaatttgaagctttgaatgttttcctctaaatacagttctgtctttatttcaaaaaagttgattgtgctttggtttaggtcatttcaaaattcttga

SEQ ID NO: 36256 - DNA, 120 bp, synthetic construct
  source 1..120: mol_type = other DNA
cacgacaaaattgcatttagaaaaaaaaatcaaagcttcaaagtgttcatatgaaaaaaagaaaaaaagacatgatatagttctatgccatcgtaggctgcactgtcaccgttctagacc

SEQ ID NO: 36257 - DNA, 120 bp, synthetic construct
  source 1..120: mol_type = other DNA
tgaattccactctagacattcagattcccattttcgactctacaggatacacgttcccaaagtcccatcgaatccatggcaacatttcccccaagtcctgcccctgcttgatcagcattc

SEQ ID NO: 36258 - DNA, 120 bp, synthetic construct
  source 1..120: mol_type = other DNA
tccagagtcctgttcttgagccaaagttctacgaacacagtcaagggctgccgtcctctcatccttggacagtcctgcactggttttttgttcctcttggcattgaggaagcacccacgg

SEQ ID NO: 36259 - DNA, 120 bp, synthetic construct
  source 1..120: mol_type = other DNA
gctgcactgtcaccatcccagaccagctgactgtaggtcagatgggagtgtccttacagaaattaatgacttaccagatctggatgtagtttagaaggtgctcagacctcaggaagaacc

SEQ ID NO: 36260 - DNA, 120 bp, synthetic construct
  source 1..120: mol_type = other DNA
tgtcctctggaagttttccctgcagattcatgaagatgagcatccggactccacccagactcctggagctggcggggcggagcctgctgagggaccaagccttggccatgtccaccctgg

SEQ ID NO: 36261 - DNA, 120 bp, synthetic construct
  source 1..120: mol_type = other DNA
tcccgaagaccattcaatacattgagatttttattctgatttcctagggacgactcctctgtttttataaagctttttaaagtagaaagcatttttatattttgatgtggccaaagatct

SEQ ID NO: 36262 - DNA, 120 bp, synthetic construct
  source 1..120: mol_type = other DNA
tgggatggtgacagtgcagcctacgatggcacagagctatatcctgtccttttttttttcatatgaacaatttgaagcttgaatgttttcctctaaatgcagttctgtctttatttcaaa

SEQ ID NO: 36263 - DNA, 120 bp, synthetic construct
  source 1..120: mol_type = other DNA
agacgtggtctcaaaagaaaaacaaaaaaatgtggaagtgggcaggatccaaggggaaaacagggtgaagaaaagtcagagagagggacaagaagcagggaggggaggagctgctctcca

SEQ ID NO: 36264 - DNA, 120 bp, synthetic construct
  source 1..120: mol_type = other DNA
cactagaatgtccatgcattgtcctgttggcggccctgtcctgaaatgggtatcatgcaaccctcccaatagaggcagagggatcagctaggggagatgctatggagaggctgccatgct

SEQ ID NO: 36265 - DNA, 120 bp, synthetic construct
  source 1..120: mol_type = other DNA
caggttactcatcttgtgtggcaacaacatatatggtctacttaacagagaagaagactctgtaaaaaaaaaagtttattatgaagtaagcaaagaagtggcaatagatgcgagattatt

SEQ ID NO: 36266 - DNA, 120 bp, synthetic construct
  source 1..120: mol_type = other DNA
agaagccttaacctaagcactgagaccactcacgccctcagtagcacctctcctccaccagaacgagcatgtaatctgctaccttaggttatataaaatcccaaagaccattgaatacat

SEQ ID NO: 36267 - DNA, 120 bp, synthetic construct
  source 1..120: mol_type = other DNA
gggatggtgacagtgcagcctacgatggcacagagctatatcctgtcctttttttttttttttatatgaacaattggaagctttgaattttttcctctaaatgcagttctgtctttattt

SEQ ID NO: 36268 - DNA, 120 bp, synthetic construct
  source 1..120: mol_type = other DNA
tcctcacaataactaactgtgtgcttttggaatcagacttgaagcatctatcccagtgcccgagtatcagtcaactaaagaccctggacctgagtggcatcagactgaccaattatagtc

SEQ ID NO: 36269 - DNA, 120 bp, synthetic construct
  source 1..120: mol_type = other DNA
cttagttggtggatgtcagcttcactgcacaaggagccacactcttcccactgccctggaaggggatgtccatattgtgtattagctggagactctgggcagcatcaacccttgcttgtt

SEQ ID NO: 36270 - DNA, 120 bp, synthetic construct
  source 1..120: mol_type = other DNA
aacattttcagtcctatgttgattacaagtggataaagtgagcatttttgtctgcttgtagttcctagcaggaatactttcaacgtttcttcattcaatatgatgttgcatgtggatttg

SEQ ID NO: 36271 - DNA, 120 bp, synthetic construct
  source 1..120: mol_type = other DNA
tacgcagccttggctgtgccctttctctgtgtttccctgcagaagtgacagttgagaagcaggtacacagcagctctgaccaaccccgcacaaacaaacccaatgctcctgggtgtggtt

SEQ ID NO: 36272 - DNA, 120 bp, synthetic construct
  source 1..120: mol_type = other DNA
gttacctttcctggagttcaaaacaaccttttacaaacagggaatcagagacaggatcattcgtgatcactaagccggtgaggacagacgttctattgtgaaatggacaggtttgatgcg

SEQ ID NO: 36273 - DNA, 120 bp, synthetic construct
  source 1..120: mol_type = other DNA
ctttttgatggatcctaggggcaaagataaatcccatgatctgagcaaaactgcactcttgagattggtgtgtgggatacctttaaggattttatgaaaatgaaagcatacttggagaat

SEQ ID NO: 36274 - DNA, 120 bp, synthetic construct
  source 1..120: mol_type = other DNA
aaagctgtgtatatcgaatggtcacctgtgttttatgctatctaacatagcagatcatatgcacattcaggtagaagaaaggaaccactgagagtgtgatctatctcaagactaagtcaa

SEQ ID NO: 36275 - DNA, 120 bp, synthetic construct
  source 1..120: mol_type = other DNA
gaggtgggaggatcacctgagcccagtgagacttctacttcccacgccccactttgtaaacctgaggctgagggtgagctcaacaccaataatggttgtgagaatctgtgttcactgagc

SEQ ID NO: 36276 - DNA, 120 bp, synthetic construct
  source 1..120: mol_type = other DNA
gaagaagctcagatcttcatccacggatttttccttgaggcaaacatccatgaacaccttcaagggctgcttctctcctgtccttggacagtcctccactgtctgtctcttactcatggc

SEQ ID NO: 36277 - DNA, 120 bp, synthetic construct
  source 1..120: mol_type = other DNA
tggacaaaggaagcatcctctggagactcatggtgaagagaacaaatgaagtaactggcagaaattataggtcctggtagaacaaaatagaatcccacaatgagaacatacagcatgtat

SEQ ID NO: 36278 - DNA, 120 bp, synthetic construct
  source 1..120: mol_type = other DNA
gtgcaatgtaccagctcttgagtcaaaatgaaacttggttctacacagaagcatcagctattatggcttttgtgggtgaaaagtcagccatttatctagaaaacataccaggaacatgac

SEQ ID NO: 36279 - DNA, 120 bp, synthetic construct
  source 1..120: mol_type = other DNA
aactaccatcatgacttgcagcacagagaactgacacagggcttcaactactttgcataaattgggttgaattttacatgcagcattcaagtgaagagagttcttgacacagtgcagaca

SEQ ID NO: 36280 - DNA, 120 bp, synthetic construct
  source 1..120: mol_type = other DNA
actgaatcgaagctaggaggcctgacagatactgcctgtgcacctcctgcactcaggtgactatgagattgtcacacttgcctggggtcgagtaacttgatactggggactggcagacaa

SEQ ID NO: 36281 - DNA, 120 bp, synthetic construct
  source 1..120: mol_type = other DNA
atatattttgttgagatgacctaacaccattgattttgggttgcattccactaacagaacatggcaagatcaaggttatggtcacggttggttggtgatcctcagtgttgcagtagaagg

SEQ ID NO: 36282 - DNA, 120 bp, synthetic construct
  source 1..120: mol_type = other DNA
tcaaagtttaaatggagcccagcaagccagatgtcctttacttctaggttccctcaacagtttctcctccgctttagagaccgcattgaaaatattcttgttctgctgttgtgttttggc

SEQ ID NO: 36283 - DNA, 120 bp, synthetic construct
  source 1..120: mol_type = other DNA
atactaaattactgcaagcattagcggcgtaaaataagaatgatttattttcttgcagtgtccacagatcagaagttcaggcctggattcgctgggtcttcttctcagggcctcacaggc

SEQ ID NO: 36284 - DNA, 120 bp, synthetic construct
  source 1..120: mol_type = other DNA
gcagggcaccaatgaggagacagctgatcaaaggtgcagctctcaaagtctatgtggggttccatatgcatccttatcaaggactggactgtacctgcacaaggaaaagactaacagatt

SEQ ID NO: 36285 - DNA, 120 bp, synthetic construct
  source 1..120: mol_type = other DNA
gatcgcatggcagtggacatgagccataattagttgctaagaatatattgacactgaactctcctttatccatgttaaaattgtagataaacaacaattgacaaagaatagacaaaatat

SEQ ID NO: 36286 - DNA, 120 bp, synthetic construct
  source 1..120: mol_type = other DNA
gtgactatttccaggacatctttattacaaaaacagaccagaagcctgatgtgccccactgtccacagtttgctaaccctggtctagatggagcttttgaaaatcagaatgtgtaggaaa

SEQ ID NO: 36287 - DNA, 120 bp, synthetic construct
  source 1..120: mol_type = other DNA
catcaactctgaggagctgtttgtgcatccactctggaaccgctcgtgtgtggcctgtgggtgagtgaatgctccggtctggaacccaggggctcctctacttgtccctccatgacccac

SEQ ID NO: 36288 - DNA, 120 bp, synthetic construct
  source 1..120: mol_type = other DNA
cgccagtggcacagttcatggaggctcctcttgaatgctgtttggacagggtctcattcagttatctccatgtggggacattgataaaccaaggcacagaatctggcccctcacatctca

SEQ ID NO: 36289 - DNA, 120 bp, synthetic construct
  source 1..120: mol_type = other DNA
aattttttttttttttttaattttcagtagaggcaaggtcttgctagcttgcccagataggtcttgaactcctcaggtcagctgaccttctcagctggccgcacacagtgctgggattat

SEQ ID NO: 36290 - DNA, 120 bp, synthetic construct
  source 1..120: mol_type = other DNA
catatatcttcttttctgaagtatctattcaagtcttttgagaaattgtttcattgtgctgtttatcttatcagactgcattatatatataccattaaaaaatcttttgttggagataaa

SEQ ID NO: 36291 - DNA, 120 bp, synthetic construct
  source 1..120: mol_type = other DNA
taggtagaaaaaattattgttataccatgcacaatattgagagaaagaggacttgatgccatgcgatttcggggatacgattatgcctcaaaacctatgtttacttggccactacacata

SEQ ID NO: 36292 - DNA, 120 bp, synthetic construct
  source 1..120: mol_type = other DNA
gctcccatgtgattctaatatgtggctaaagatgagaaggacccctggtctactatgacctcaggttaccaacatggaagtgccacatatgtgtggctactccacagaaaaggctgagcc

SEQ ID NO: 36293 - DNA, 120 bp, synthetic construct
  source 1..120: mol_type = other DNA
tttctgctattatctgtattatttccttccatttgctttaggtttttttttttttttgtagattcagtctcattcccatggcgcaggccggagtgcagtggtgcgatctcagctcactgc

SEQ ID NO: 36294 - DNA, 120 bp, synthetic construct
  source 1..120: mol_type = other DNA
ggggtcgctccgggcccccgagggggtgtgtcttctgcccctttaacctggcaggggcggttcaagtggccctggaaatcagcgatttgtagggtcaagggctggtgctttaaaagagag

SEQ ID NO: 36295 - DNA, 120 bp, synthetic construct
  source 1..120: mol_type = other DNA
gcaacacatgaggcgcgtttgtagccatcactgaatcacctcatgactagcggggcaggcctctaattcaccgcaggatttccggtaggttggattgtggggttggtgtttgcactccaa

SEQ ID NO: 36296 - DNA, 120 bp, synthetic construct
  source 1..120: mol_type = other DNA
atctcaaagtgttgggattacaggcataagccatcaccgctggccattttagttttaataatttttatgtttttctaatttaaaagatttactaaaatctcttacagctattatttatga

SEQ ID NO: 36297 - DNA, 120 bp, synthetic construct
  source 1..120: mol_type = other DNA
atgggccacagtggaattcttggttccccaggaccttgtggtggatgtcttctttcactgagcattcatggggtgactattaggcaccatgccctgctctgggctagagaccccataacg

SEQ ID NO: 36298 - DNA, 120 bp, synthetic construct
  source 1..120: mol_type = other DNA
gataaaattgctgcaagtacttatgtgcaggattttgaatgaacttaagttttccaaagtgactgtacacttttgatttccactagctatggagagttctggttgttcctcatcttcgac

SEQ ID NO: 36299 - DNA, 120 bp, synthetic construct
  source 1..120: mol_type = other DNA
gcttctagtaatctgtcaataccatttaagtgctcctcccacttgctgtccccagtagcttctcttccctgtgagctgtgactccttgtgtgttagcctgtgtttctcatttttaaggtg

SEQ ID NO: 36300 - DNA, 120 bp, synthetic construct
  source 1..120: mol_type = other DNA
gaaactgaacaaacagcttatctgcctctaatgtgaaatgatgggacagacatagaataacaactacagtgattctagttcaaaatgagggaacatggaggggataaagaagtcactaac

SEQ ID NO: 36301 - DNA, 120 bp, synthetic construct
  source 1..120: mol_type = other DNA
tggtaaaaccttttcctctggggaggtaaataaatgatttgtttcttcttggtagcccttgaagataaggatggtcaaacaaaataatatcatacctggagaaactcagatcttgctaag

SEQ ID NO: 36302 - DNA, 120 bp, synthetic construct
  source 1..120: mol_type = other DNA
tgaaaggctgatgaactgcaaaggggtacaagaaactttggggcatagggaatttcctctatcttggttgtggcagtagttccgttagtgtatccatttgtaaacgtgcattgaattaca

SEQ ID NO: 36303 - DNA, 120 bp, synthetic construct
  source 1..120: mol_type = other DNA
agatccgtggtcaattccccatcctgcagcagtgagtccaggaccacagtatatttctggccccccagtgtcagcccattcatgacaaagcttgaccagtctttgccaaccaggacacca

SEQ ID NO: 36304 - DNA, 120 bp, synthetic construct
  source 1..120: mol_type = other DNA
acctgttgggaaactgtttctgccttgatgatgttgtacagacaagagataaacagtgaggaatgtgcttagatgtattgggaaagacacgggtctgtggcattgtcacaagggtacacg

SEQ ID NO: 36305 - DNA, 120 bp, synthetic construct
  source 1..120: mol_type = other DNA
ggcattttgtgaaagataaaacatgagagttttcagtacaatgctgaaccatacatagatgttcatgtctctgtgcacgttgggctgactgtgcttgcagaatgtgaagtgggaaatatc

SEQ ID NO: 36306 - DNA, 120 bp, synthetic construct
  source 1..120: mol_type = other DNA
tgagacgatcctcccacgctcgttcactcctctcaggctagactctctctccttttcattggcttgtcttagctattaataagaagtctcggcctggcgcggtggctcacacatgtaatc

SEQ ID NO: 36307 - DNA, 120 bp, synthetic construct
  source 1..120: mol_type = other DNA
acctgtcttggcctcccaaatcacagattctttttaaagcaagagttgttcaaatttatctatcagtcgtgtttcatgtatagatgcctctaaacatttaatgtccatgttacctggtga

SEQ ID NO: 36308 - DNA, 120 bp, synthetic construct
  source 1..120: mol_type = other DNA
agtttgctggaagtccactccagaccctcaaacagggatttcttggtgttgcctattctctcccatgtgtttaaatccagggagaggtgtatatatgctttcttcctatttgttggtagt

SEQ ID NO: 36309 - DNA, 120 bp, synthetic construct
  source 1..120: mol_type = other DNA
agtccagggaaaacagtacatgctgaaaataatgattttgtcttgtcagacaagtctgaattacgcctactacattgctttttggttctcattagagtaaatgtttaggtttccatttct

SEQ ID NO: 36310 - DNA, 120 bp, synthetic construct
  source 1..120: mol_type = other DNA
gacctggctaaagaaaatcacctgagggccacagtgttccctagccctggtgtttaggggcaggattatgggtgagatttttgagtctctaagttgacccctacggctctgaagtgtatg

SEQ ID NO: 36311 - DNA, 120 bp, synthetic construct
  source 1..120: mol_type = other DNA
ttcttatgggaaaaattaaggaagacacatttttccatgaggaataggaaatccccaagcacaattgggggtaccctctaccagcatgttgtagcacactcatctctgctctacctgtcc

SEQ ID NO: 36312 - DNA, 120 bp, synthetic construct
  source 1..120: mol_type = other DNA
gaaatatgattattctaagaacaagaaacatgaagaaaacttcaccaaggaacgccttaatcaaatccatcaaaaccagtgataaaaaggaaatcctaaaaggaataaaaagggaaagaa

SEQ ID NO: 36313 - DNA, 120 bp, synthetic construct
  source 1..120: mol_type = other DNA
aatttctgtctaaattactgtgaaaagaagatataacatgtcatacttttaacattttttgagaattctctttttctccatcttctggccaaaactgggaagtacttgcctaccatttcc

SEQ ID NO: 36314 - DNA, 120 bp, synthetic construct
  source 1..120: mol_type = other DNA
tccttgttttcttttgctttgcaatgggaagtgactccctgattttgctgcctgctagataatttctcagctgaattcttctcttgcttaaacaaaatcggagtaattttctttcagatg

SEQ ID NO: 36315 - DNA, 120 bp, synthetic construct
  source 1..120: mol_type = other DNA
tttttttgagatttttttcattgagttggatattgcaaacttgtactggattgagagaatatgtacatttagtaaagtatatttgctttttttttttttgaaccaagagagtcccctgaa

SEQ ID NO: 36316 - DNA, 120 bp, synthetic construct
  source 1..120: mol_type = other DNA
tgctatctttgtagctctgctgtcttagtggtgtattgggggagcattgtggtgtgttgtcacacttaatttgtgtgcttcccttggcatcatgtggtagcaagtacagggtattctcct

SEQ ID NO: 36317 - DNA, 120 bp, synthetic construct
  source 1..120: mol_type = other DNA
ttatagacttattatagtttaaaactttattttaatttatctcccatttcaagatccacatttgctatatgtgtcagataataaaaatgccataaggaaaacagaggagtgatctttttt

SEQ ID NO: 36318 - DNA, 120 bp, synthetic construct
  source 1..120: mol_type = other DNA
tttcatggctgaaggtgaagagggagcaggtatgtaacatggcaagagaggagggagcaagagagatgtcagtctctttcaaacaaccagctcacatggtagcgagaattcactcattac

SEQ ID NO: 36319 - DNA, 120 bp, synthetic construct
  source 1..120: mol_type = other DNA
ggggagcaggggctttgggtgtgtattattatatggggataaaagagtaaggatgaaggaaaatgtaggctagttcttggcttaagagcattttttttttcctttttctccaaccatcta

SEQ ID NO: 36320 - DNA, 120 bp, synthetic construct
  source 1..120: mol_type = other DNA
tcagcatttccccttttccttcaccttcttgtgagtgcattcagggaggcacaggggcattgtcagatcaaagaaatagacagggaaaaatatcaactgttaaattactttctctttctt

SEQ ID NO: 36321 - DNA, 120 bp, synthetic construct
  source 1..120: mol_type = other DNA
ccttctatatgccagtcattgtgttaggcactgggagtatgagaattaataattttagtctgttgacagataatcataataagggctaatgagtaacacaggctcagggttattaagaac

SEQ ID NO: 36322 - DNA, 120 bp, synthetic construct
  source 1..120: mol_type = other DNA
agctttggtgtccttttcagtgctataggggttcagaccatttggtttctgagatcactgctgaaattctgtgattgtatgagtataatgtaaaagttgtctcaatcaaggaaacttgga

SEQ ID NO: 36323 - DNA, 120 bp, synthetic construct
  source 1..120: mol_type = other DNA
actattaagcatagaagcaccactaaaaaggtgaagaagcctggaaataaccctatactgaggaatacgccaaaccattgaatcctggaaaaaagaaaacaaaaggcccacataactatc

SEQ ID NO: 36324 - DNA, 120 bp, synthetic construct
  source 1..120: mol_type = other DNA
cactcctgtatttgtttgcattttaagggttaaagacagaaatagaaatgtaaacaactttattttgaaaatatttcaacactgcaaatatctctgggtctgatattctagtaatctaat

SEQ ID NO: 36325 - DNA, 120 bp, synthetic construct
  source 1..120: mol_type = other DNA
cttatcccacattacaaagatttactatttctaagtgatttataattttaccacctacctttaggtctctgatccattttgagttaatttttatgtgcgaggagggagtctaacttgatt

SEQ ID NO: 36326 - DNA, 120 bp, synthetic construct
  source 1..120: mol_type = other DNA
aatcactgatggaattgggcagtgcatggagatggctcagcaggatgagggtaaatgcaggggcaagtccaggtcatactgagagacaatgagtggcgctgatgaggacaaagataaaat

SEQ ID NO: 36327 - DNA, 120 bp, synthetic construct
  source 1..120: mol_type = other DNA
ttgctctcttcctagtctcaggccatgcccgtgccaacctggactgactgtcacgacattgaactcaaggcaggtgtggcaaactcacaccaaactatgcagcacatgcccaggagttgt

SEQ ID NO: 36328 - DNA, 120 bp, synthetic construct
  source 1..120: mol_type = other DNA
tccagggaaaacagtacatgctgaaaataatgattttgtcttgtcagacaagtctgaattatgcctactacattgctttttggttctcattagagtaaatctttaggtttccatttcttc

SEQ ID NO: 36329 - DNA, 120 bp, synthetic construct
  source 1..120: mol_type = other DNA
tgtctgctgttgcaaaaagaagaaaacattctctgcctgagttttaatttttgtccaaagttaattttaatctatacaattaaaaccttttgctatcactctggacttttggattgtttt

SEQ ID NO: 36330 - DNA, 120 bp, synthetic construct
  source 1..120: mol_type = other DNA
tactcttttcaaaaatgatggagaggatcactatgatgatgaatgattccactggtcacattattgatagagcaatcagtaaatccaggcacatcctcgggatattactgacctcctatt

SEQ ID NO: 36331 - DNA, 120 bp, synthetic construct
  source 1..120: mol_type = other DNA
tcgtgggtccccctcgtggggagcagggtctggcactcaccagggcgcaggactaggacttgtcgaatgaatccatccttttagcttttagtcctttgaagagccttgagaatggaaatc

SEQ ID NO: 36332 - DNA, 120 bp, synthetic construct
  source 1..120: mol_type = other DNA
gcttctttctttgacaaaataaatgttttctttaaagaactcttgattgatcctggaccattgtagaaactgaagtcctatcaatgcaaaaaaatatgacaacatgagctgcttatcatg

SEQ ID NO: 36333 - DNA, 120 bp, synthetic construct
  source 1..120: mol_type = other DNA
gatgtaacattatagtacattttaatttattaggttaattttggttgcaaacaatcaaaattcaaaatggcttgtataataaagagattttgaacaatagtataggctcaagatagttta

SEQ ID NO: 36334 - DNA, 120 bp, synthetic construct
  source 1..120: mol_type = other DNA
gaactatagtatatttttaaagagtcagttcatatttgtgagctcaacataaacatctgacaaattttccattaaaaaaatttttatgtgttcattgattcacatacatcttagcacgct

SEQ ID NO: 36335 - DNA, 120 bp, synthetic construct
  source 1..120: mol_type = other DNA
agctcttcctattggctatgggccccatcggtcgatagaaaacgggcggtgattggtaaaggggtgggctctacttcccggcggggtcctgcggagttggcggaggcggcggaggctcct

SEQ ID NO: 36336 - DNA, 120 bp, synthetic construct
  source 1..120: mol_type = other DNA
ggtgggggagttgactgattgatagcttcagttgaactgggattgagagaggtgtggttgtgagttattattgaggtcttggcctcttgtcactgttcataatccaggcctgtttttgta

SEQ ID NO: 36337 - DNA, 120 bp, synthetic construct
  source 1..120: mol_type = other DNA
cttgatttttgcctccctataaaccacctgcttgcatgtgccctgaggaactcctgaggcttcagccccaaccctaccccagagtggttttatgaggggtgtgcctccttagtcaacctg

SEQ ID NO: 36338 - DNA, 120 bp, synthetic construct
  source 1..120: mol_type = other DNA
cctattgtttcgaccacatttcttattttgctttaagaggactggaagcctaacttgactgcttaccattctttaaacacatagactactagctaacatttgctgtctgttggatattta

SEQ ID NO: 36339 - DNA, 120 bp, synthetic construct
  source 1..120: mol_type = other DNA
gtggccctgggtaagtctctaacctctcctggcctcaagcctcttcagatataggatgaacatataattcctacatctaggagttgctgtgttgactaaatgaagtaatgcttgtgtatc

SEQ ID NO: 36340 - DNA, 120 bp, synthetic construct
  source 1..120: mol_type = other DNA
tgggtagaacggcaagtgcagggacctaagatgtgaacaggcttggcacggtgcgtaagcaccgtaaagatggtcagagtagctggagcatggtggagcccagaggagcaagtaatagtc

SEQ ID NO: 36341 - DNA, 120 bp, synthetic construct
  source 1..120: mol_type = other DNA
cgttactggggtagggaacgtgctggggtgtggtcaggatggggtgtcaagagttcaggttcgggcatgttaagttctaggtacctgttagatggctatgaggaaatggtaagtcagttg

SEQ ID NO: 36342 - DNA, 120 bp, synthetic construct
  source 1..120: mol_type = other DNA
ttgtctttgtaggagtagcagcagcagcagcgcctaaggcagcacatttttccctggatagaacaactgttctgtcttggagctgtacgcctaagagtgagagtagttagaatttccctt

SEQ ID NO: 36343 - DNA, 120 bp, synthetic construct
  source 1..120: mol_type = other DNA
ttctctgagctgaaaatcagtctggctttggcatactgcttcctgtgagtgccaggtctcttgtcagtaacaaatgcagtgctgcatttgaggcaaatctgtttgcatctatagctgcct

SEQ ID NO: 36344 - DNA, 120 bp, synthetic construct
  source 1..120: mol_type = other DNA
catctcaaaaaaaaacaacaacaaaaaacagaggtgagtgatgagaatatggcttatgaagacttcagtgctgcctcttcttgatccccatcccctagtccccaagcacacataccgagt

SEQ ID NO: 36345 - DNA, 120 bp, synthetic construct
  source 1..120: mol_type = other DNA
ggccagccctgtctctaagcaagccatcttatggattgagacccttgccagtttctcctaagcctgctcctaggttctccttgccattctccctgatcacctcttttgcatttagcgaac

SEQ ID NO: 36346 - DNA, 120 bp, synthetic construct
  source 1..120: mol_type = other DNA
tgctcttaactctgagaccttggacaatgacttctttctgtgcctcagttccctaaactttaaaaaaagagtgtggtctatgtgatctccatggtgccttccaaattcaggataccacag

SEQ ID NO: 36347 - DNA, 120 bp, synthetic construct
  source 1..120: mol_type = other DNA
caaggtccagaggactacgagactcacttgtccaaggttatgctgcaaattagggtcctgtcaggaaggtatccagctccccctgacatctggcccatttttaaaaatatgtgatgcaaa

SEQ ID NO: 36348 - DNA, 120 bp, synthetic construct
  source 1..120: mol_type = other DNA
tgaaatagcgcttaattaaataatgtcattttatccttatgagtcttcttcctcctaaccacctcacagccctctagggtgtgtttaaccgttgaattgggagtcaagaactgagaactc

SEQ ID NO: 36349 - DNA, 120 bp, synthetic construct
  source 1..120: mol_type = other DNA
aaaaggtggcagcatgacaagtcatgaagtaaaaggaccaggtgataaaatgaggtctccaaaatccaaagcatcaaagttctcagttagtggtcagggctgcaaagtgccataattttg

SEQ ID NO: 36350 - DNA, 120 bp, synthetic construct
  source 1..120: mol_type = other DNA
gataccaaacagaaatctgaacctacacaaagaaatggagacgactgaaaatcgctatgtacgtacttggatgttggggtttataacatgtccaaaatcaaattccctgacaacactaac

SEQ ID NO: 36351 - DNA, 120 bp, synthetic construct
  source 1..120: mol_type = other DNA
aaaaaacaatccagaagtccagagtgataggcaaaaggttttaattgtatagattaaaattaactttggacaaaaattaaaactcaggcagagaatgttttcttctttttgcaacagcag

SEQ ID NO: 36352 - DNA, 120 bp, synthetic construct
  source 1..120: mol_type = other DNA
acctaaacatttactctaatgagaaccaaaaagcaatgtagtaggcataattcagacttgtctgacaagacaaaatcattattttcagcatgtactgttttccctggacttggcatctcc

SEQ ID NO: 36353 - DNA, 120 bp, synthetic construct
  source 1..120: mol_type = other DNA
agctgagctgacagacagctcctgggcatgtgctgcatagtttggtgtgagtttgccacacctgccttgagttcaatgtcgtgacagtcagtccaggttggcacgggcatggcctgagac

SEQ ID NO: 36354 - DNA, 120 bp, synthetic construct
  source 1..120: mol_type = other DNA
tatttttttcttttttaagtggcggagcgagggctactgcacagctagcagagtcgtggcgaggaggacagcacctgcatcgagctctccgcctcccccacccgccagcccaggcggccc

SEQ ID NO: 36355 - DNA, 120 bp, synthetic construct
  source 1..120: mol_type = other DNA
agtggagcatcttttcctatgctaactgaccattcatgtatcttcttttctgaagtatctattcaagtcttttgagaaattgtttcaatgtgctgtttatcttatcagactgcaatatgt

SEQ ID NO: 36356 - DNA, 120 bp, synthetic construct
  source 1..120: mol_type = other DNA
tgacctccagcctgcagaggagaggtgccacaggacctttacacgcacgccgctgttcccctcacccatgcatttcttaatgccttggtgaggagaatgcctctgggtcttccttgatgg

SEQ ID NO: 36357 - DNA, 120 bp, synthetic construct
  source 1..120: mol_type = other DNA
tctttttggctactttgtttttggaagcatgtatcctaaggcgtccagttgaaaaacctttgtctactgtgtccagacattcctggtggtatttcagataagacactcttgggttgctgc

SEQ ID NO: 36358 - DNA, 120 bp, synthetic construct
  source 1..120: mol_type = other DNA
aggactccatgagttgttattggttgaaagatgaaacagacaggtaaggaggaaagcacgtggcctctggagtcagagtgtctccccgctgacagccagcacagaaaaagggccctcagc

SEQ ID NO: 36359 - DNA, 120 bp, synthetic construct
  source 1..120: mol_type = other DNA
taaaataaatcttacacgtaaatgtaaggtgcaaaaccataagaatcctaggagataacataggagaaaatctgagggatcctgggttcaatgatggcttcttagatacaaaaccaaaag

SEQ ID NO: 36360 - DNA, 120 bp, synthetic construct
  source 1..120: mol_type = other DNA
aaaagatagaagtagtaaaacgatgagtggttgtcaggggtggaggagaggaggaggcacgaaatggtgaagtacagggaattttcagcagtgaaactattttgcatgatgctgtattgg

SEQ ID NO: 36361 - DNA, 120 bp, synthetic construct
  source 1..120: mol_type = other DNA
cgcccacccagctaacaactttgaaaacttgaaattttatctaaggcaaatgcttgcataactttaggtcgtgccattattattattgttattattattattattatttgaaacggagtc

SEQ ID NO: 36362 - DNA, 120 bp, synthetic construct
  source 1..120: mol_type = other DNA
actctgttagaaggaagcttgggtctttcgtgtttactttcaaaagggaaagtttatattgatattgagcaagttaaagcatgaatatttactatttgatgtttgttcctgtgtttgagg

SEQ ID NO: 36363 - DNA, 120 bp, synthetic construct
  source 1..120: mol_type = other DNA
ccattcttttttattcaatacccaaacaaaactatacacttcatcacagtcttctaacttcaggagaataagattattcagaactctgccaaatgccaaaagatcacagcattccctgcc

SEQ ID NO: 36364 - DNA, 120 bp, synthetic construct
  source 1..120: mol_type = other DNA
gccctcaggcccttggctttaagcacttacatcaataaggtcagataggtcatggatgtagtacttgaagacagatgcattggttgcctccaaagccagcaagtactcattccgggcttt

SEQ ID NO: 36365 - DNA, 120 bp, synthetic construct
  source 1..120: mol_type = other DNA
tctcttctccaagcccgcagcctgcctcgtcactgaggtttggctttataaaactccaggaagccagtgcaaagctctctctgctcaaactggtccctcttactgggggcatttaggact

SEQ ID NO: 36366 - DNA, 120 bp, synthetic construct
  source 1..120: mol_type = other DNA
aaaatgatactgaagtattttccattgtttccaagaagaatatctattttatcagtcaacacgtcctgcatttagtgtatctctaaagtaaagttttttgtgactctttcaagaattttt

SEQ ID NO: 36367 - DNA, 120 bp, synthetic construct
  source 1..120: mol_type = other DNA
tgttttttatatcatatttttgctttctgtatttttaaattttctataacatacatctactataaaatttaaaagattattcaaaagaatagagaaaaggaagggagggaggaaacaagg

SEQ ID NO: 36368 - DNA, 120 bp, synthetic construct
  source 1..120: mol_type = other DNA
tcataatttttgcagtgaatcattaagttttatagattaaaaaaagatttttaaaaatgttgacttttgctagtgacaaacagacccaaattcacataaagcacaggtgtgtacagccat

SEQ ID NO: 36369 - DNA, 120 bp, synthetic construct
  source 1..120: mol_type = other DNA
ttgggaaatgactgaggcagacagtctggctcacccctggtagttcattctagagaaataaatacctgtctgtgccaaagtggaatgacgtcactcagaaatccacacacttatcaaagc

SEQ ID NO: 36370 - DNA, 120 bp, synthetic construct
  source 1..120: mol_type = other DNA
tgatgtcttaaacaaaaatgaataactgtttatcttttaaaaaaataaataaataaaaaataaataaataaataaatgggataagcagggacagcagacctgccctgcctaacacacatg

SEQ ID NO: 36371 - DNA, 120 bp, synthetic construct
  source 1..120: mol_type = other DNA
tatcctaaggtcttacatcaagcatattacatgagctgctggtaaacagtacagacaatcatggcctacagctgagcagatgctgatgctgatgctgatgctgatgctgatgctggattc

SEQ ID NO: 36372 - DNA, 120 bp, synthetic construct
  source 1..120: mol_type = other DNA
agtatgaaaagggtgaagtataaagcaaatgtagtaatatgttaacattttggggcaatctggataaaatggtagtatacaaaaattctttgtgctattcctgcaatttttctgtaagtc

SEQ ID NO: 36373 - DNA, 120 bp, synthetic construct
  source 1..120: mol_type = other DNA
tatttatttacagcatcacaaaaaatggcctaatacactgtgtatttgtatgcacatgtatctaggactctgtggtaagaaaggacacacatttccacccattaccggagaaaacaggag

SEQ ID NO: 36374 - DNA, 120 bp, synthetic construct
  source 1..120: mol_type = other DNA
cccgatttcccccatttcaattataaaaacacgtatggcagagactgtcttttcttcttatcttgtaaacccttcccacttaacacagtcagctcccaataagatgacacagcttttgcc

SEQ ID NO: 36375 - DNA, 120 bp, synthetic construct
  source 1..120: mol_type = other DNA
gactcactggagtgaatgttctgtttggctcgggtatagtggaacagaaacaagaaataaggttggaaacctgtttgaggctttccagatgtagaggggcttaaagaccaagccaaaaag

SEQ ID NO: 36376 - DNA, 120 bp, synthetic construct
  source 1..120: mol_type = other DNA
gcggcgtgactctcaatcccacccaggctttctctcctgctactgaagcatgagacttggagtgacctattcaatcagcagtcatgtcaacaacaagtacagagaagtggaggcttcaag

SEQ ID NO: 36377 - DNA, 120 bp, synthetic construct
  source 1..120: mol_type = other DNA
tggccttcttgccattcctcaaatacaccaagcacacttgagccttagggctccaccttaaggcctttaaactggctgtttcctctgcctgaaatgcccttcccccaatatccacgtggc

SEQ ID NO: 36378 - DNA, 120 bp, synthetic construct
  source 1..120: mol_type = other DNA
atcaactgaatgaagggatagaaaaaaaaaatccaagaaattgggaacaagggaagtctgcaaagctcctggtcccacaacgtctacactcccaagcccaatatcccgttgtagaagcac

SEQ ID NO: 36379 - DNA, 120 bp, synthetic construct
  source 1..120: mol_type = other DNA
tgcactcatgaatacgagtaattgggaatttatcaaccaacaaaaccaactggcattctaagaatgaagaataataatctcattttaagtagcatatgcagtgctgtgcgaccctttaaa

SEQ ID NO: 36380 - DNA, 120 bp, synthetic construct
  source 1..120: mol_type = other DNA
gcacaatgcacgattctaatgtggtaactcaataagtacccaatttaaaggcaaagaagcaagattttacacaacactcttcctttcttttctttggaagcaacttgggtgggggctatg

SEQ ID NO: 36381 - DNA, 120 bp, synthetic construct
  source 1..120: mol_type = other DNA
actgaagaagagtgacatccacatatggcctaggcgtgaacaaattctgcttgcttgcatgcgtgcatggctaggacgctagcatttcaaggagccagctccatgagtttacagccaaac

SEQ ID NO: 36382 - DNA, 120 bp, synthetic construct
  source 1..120: mol_type = other DNA
aaagaagatggcagtaaggtcaaggaatcaacatcaaggactcatcaagctgaggtatgcagcaaagtaaagatggaggccagggatggccaccagctgttaagagttagacactgggga

SEQ ID NO: 36383 - DNA, 120 bp, synthetic construct
  source 1..120: mol_type = other DNA
gtttcaattataaaacttggggtttgctcatttttcagaactgggatcttcaacacctttgggattcattcatcagatatggaattcagactgcttaaagccttggagaactgcaactag

SEQ ID NO: 36384 - DNA, 120 bp, synthetic construct
  source 1..120: mol_type = other DNA
cacagcaactcctagatgtaggaattatatgttcatcctatatctgaagaggcttgaggccaggagaggttagagacttacccagggccacatagttgatggcaagggtcagagctacca

SEQ ID NO: 36385 - DNA, 120 bp, synthetic construct
  source 1..120: mol_type = other DNA
cttccagctctgtggtgcacacacactgttctcctaagacattaaaaaaaaaaaaaagacaagacccctaatgttctcgagaaagaaaatgtgactgctcagcatacagtgccaccctgt

SEQ ID NO: 36386 - DNA, 120 bp, synthetic construct
  source 1..120: mol_type = other DNA
ttaaaatattaacccattcatctttgcaatagctatggtaagtaatagggcagtcataaggaaggctaggtgaattgttacaggttagacccaagtctagaatagaatcatgtttttcct

SEQ ID NO: 36387 - DNA, 120 bp, synthetic construct
  source 1..120: mol_type = other DNA
cctaaccaaataatgaatttctcagcttcacaatgtttaagtgacatgagtcccatgcccaattcttggtcattgtaattggtgcatggaaggaacctgtgccttctgctaatcaaatca

SEQ ID NO: 36388 - DNA, 120 bp, synthetic construct
  source 1..120: mol_type = other DNA
gcagtggaatatcatttcagaaatttgtgccaaacataaaattagttttctagtagtaaaaagtaattaaactctttaaattattattacccctagtatactggggaatgagtgtgtgtt

SEQ ID NO: 36389 - DNA, 120 bp, synthetic construct
  source 1..120: mol_type = other DNA
gccatagagaacttcccatgaagacataggtatagattctattattcctacctgctgatgaagcaggatagttaattggaaaacacttatttcatgataagcagctcatgttgtcatatt

SEQ ID NO: 36390 - DNA, 120 bp, synthetic construct
  source 1..120: mol_type = other DNA
tgcatcgcaggcacatctcaaattaaaaatcttcatcttggtctctgtcatttccattttaaactgggactgaataacctgttttaccactcaaaataatagccagtgtctctttcttat

SEQ ID NO: 36391 - DNA, 120 bp, synthetic construct
  source 1..120: mol_type = other DNA
cgcctctttgagcttttaaagtattcatgcattgtcaatcactagataaatggggaagattttatcttcctggagtcctaagccactaatttgtgacttatccatgtcaagggccagccc

SEQ ID NO: 36392 - DNA, 120 bp, synthetic construct
  source 1..120: mol_type = other DNA
aatcacaaaactgagggaaagcatcaggccgttggttggtaacagtggtgaagcaagtctttccaaagggctggtttgttgttaacccttagggaaaaaaaaaagccttttttttttttt

SEQ ID NO: 36393 - DNA, 120 bp, synthetic construct
  source 1..120: mol_type = other DNA
gctacatatggtaaacatagcctacaatgtggaagagattagaaaataaacatggaaatgaaatgtttttattaattcgcatcagtacccaccaaaaccaatcagcataatcaaatatta

SEQ ID NO: 36394 - DNA, 120 bp, synthetic construct
  source 1..120: mol_type = other DNA
accgatgtcctgcaaataaattcagatgggccctcttacattaagcagttcttccttgcacacagaaacattcctctgtccaatcctaacacagggacatcagtcttgtcagtgtgagaa

SEQ ID NO: 36395 - DNA, 120 bp, synthetic construct
  source 1..120: mol_type = other DNA
cagcaacgcaacggccaggtggacacctccatctacagcctcgtggcggacgggacctgttaggacacggccattgtgggcaacaaggacccaccttccatctgggccgccgtcccaggg

SEQ ID NO: 36396 - DNA, 120 bp, synthetic construct
  source 1..120: mol_type = other DNA
caaaatcatttgttgtgagggaattgcacattaaaacaacgagatatcactgtaaacctatcagaatggctaaaacacaaaacggtgaacacaccaaatgctgtcaaagatgaggaacaa

SEQ ID NO: 36397 - DNA, 120 bp, synthetic construct
  source 1..120: mol_type = other DNA
agagcagggcatggtacctaatagtcaccccatgaatgctcagtgaaagaaggcgtccaccacaaggtcctggggaaccaagaattccactgtggcccataaattctaagtcctacagga

SEQ ID NO: 36398 - DNA, 120 bp, synthetic construct
  source 1..120: mol_type = other DNA
ccccccctgccagcacccactcaagtgtacagattggtaagagtttaaatcagctgagtaactgaacatttaaaggggaaattttggaaatgagggaaatgcagaaggactaatatccaa

SEQ ID NO: 36399 - DNA, 120 bp, synthetic construct
  source 1..120: mol_type = other DNA
tccttcttgttatcctttttctcctgctccttctccagccttattgcactgactaaaaccttcagtacaaagttgaatagaagtggtaggattagtcatcctactgttattcctgctctt

SEQ ID NO: 36400 - DNA, 120 bp, synthetic construct
  source 1..120: mol_type = other DNA
tttttaaacttccatcttggggattaattgggaatttttcattattccatttgatatcgtttgttgacttattagctataactcctttttctgttattttagtatttgctgttaaagcat

SEQ ID NO: 36401 - DNA, 120 bp, synthetic construct
  source 1..120: mol_type = other DNA
gaatataataatagacacaggcagggaggattaataaatgataaaatgtttagaggatgatcattagaatacaggatatttatactcttgaaaaccactttcccaagtacttcattgtaa

SEQ ID NO: 36402 - DNA, 120 bp, synthetic construct
  source 1..120: mol_type = other DNA
tcagactgcgcacaggttgccactggcatggtttgagaataggaatagagccatgcccactgacccatcctatgtctgggcttccaaatggaactgtactttcattcaaatcttcacttg

SEQ ID NO: 36403 - DNA, 120 bp, synthetic construct
  source 1..120: mol_type = other DNA
cttgatcccaccgatgtcctgcaaataaattcagatgtgccctcttacattaagttcttccttgcacacagaaacattcctctgtccaatcctaacacagggacatcagtcttgtcagtg

SEQ ID NO: 36404 - DNA, 120 bp, synthetic construct
  source 1..120: mol_type = other DNA
tggggaacaatatttccaaatacaaaggcaaggctgccagcttccttaaacaggcatagaaactccatggacattgttcagggacagatgacttaatcacagatgacaagagatactgaa

SEQ ID NO: 36405 - DNA, 120 bp, synthetic construct
  source 1..120: mol_type = other DNA
aaattactacatgctgcatgtttccatttgtatgaaatgtccagaagaggcatttctggaacagaaactttacccaattgcagtccatatgttttctgggatcccggagttccctttcaa

SEQ ID NO: 36406 - DNA, 120 bp, synthetic construct
  source 1..120: mol_type = other DNA
aatgatatagggatatcacatatcatcagcctgtggagtacagaggtagtttacaaaggataaaccttcattgtttggaaaggaaagatcagagagctctttatgaagtttaaacaaaat

SEQ ID NO: 36407 - DNA, 120 bp, synthetic construct
  source 1..120: mol_type = other DNA
tacaggagtgaagacagatgtattttagttatttcttctacaagataaagtggatagtaatattatgttaagaaaatacttatttagtatctagaatgatagcattatctattctttatt

SEQ ID NO: 36408 - DNA, 120 bp, synthetic construct
  source 1..120: mol_type = other DNA
tgccaggggaagcaaagcagattctttgaggcagaaagagaaagagaaaaaaatatcctcacagaactagtaaatttggtattcacatggctggctttttgttgtcattagtctaagtcg

SEQ ID NO: 36409 - DNA, 120 bp, synthetic construct
  source 1..120: mol_type = other DNA
gacctacaaggaccacctataaaactgcttccctttagaagaaagagtccttagagaacttaaccacatactcccatgtccttttgagtcctggcaggtgacagagtatcaggtgtatgg

SEQ ID NO: 36410 - DNA, 120 bp, synthetic construct
  source 1..120: mol_type = other DNA
gtcggcactgcagctgctcctcattaaagctcctctttactccctctgggctagtttccagcagaaaattctttaaacagaactctgctttcaacccactttcttcttgcactgggcctc

SEQ ID NO: 36411 - DNA, 120 bp, synthetic construct
  source 1..120: mol_type = other DNA
accttctcatggctaagccctaaaatttcattgtatgaacttaaatgttatttcctgtgaaaaacagccttgacaccccctctgttcttataaccctgagcctgtgttactcattagccc

SEQ ID NO: 36412 - DNA, 120 bp, synthetic construct
  source 1..120: mol_type = other DNA
cctactgccatgccagtgagttagaaagctagaatttgaatccagagactctgcccttaaccaccaagatacactgcttcccactacctgaaatttctcaggattggcagggtggatatt

SEQ ID NO: 36413 - DNA, 120 bp, synthetic construct
  source 1..120: mol_type = other DNA
ctcataaacagtgatctcatttgatccccacaacaacactatgaggcatgtaaattggtattagcaccattttacacaagaaactgcaactcaaagaaataaggggcttgcccaaagtca

SEQ ID NO: 36414 - DNA, 120 bp, synthetic construct
  source 1..120: mol_type = other DNA
aaacgccactgatgatatgaaaaaacattcaatatcactgtaatgagagaggcatattaagattaagtaatatttaccacttatcaaatggtaaagatttttaaaaataaaacctagtgt

SEQ ID NO: 36415 - DNA, 120 bp, synthetic construct
  source 1..120: mol_type = other DNA
atagcagctttcttctctgtactaagtgaggccagcaagtaggaggcatttccaagggggaaaaatgaccacaggatctagccaaagcaacctgtctctaatactctcaaaaaacaaaca

SEQ ID NO: 36416 - DNA, 120 bp, synthetic construct
  source 1..120: mol_type = other DNA
catctgaaagaaaattactccgattttgtttaagcaagagaagaattcagctgagaaattatctagcaggcagcaaaatcagggagtcacttcccattgcaaagcaaaagaaaacaagga

SEQ ID NO: 36417 - DNA, 120 bp, synthetic construct
  source 1..120: mol_type = other DNA
actacgagtcactggccccgtccgcatccttctccagcggccccgggggccgccgcgccttaactcgatcagggctgcagcggctcgctggcttgaccagtgcagaaggggcgtggaggt

SEQ ID NO: 36418 - DNA, 120 bp, synthetic construct
  source 1..120: mol_type = other DNA
ctctcagagccgacaagctgtaaaaaactctcaaaataaaactctgttttattttctgttttgccccggtttctatcacataagtgctcaataatatatgttttacataaatgctgaatg

SEQ ID NO: 36419 - DNA, 120 bp, synthetic construct
  source 1..120: mol_type = other DNA
ttacatatgttaggctcattctgaaatgcaggagcattttagattttcatgtagaagcctgacaagcaaactacatctaggatatactttgataactttgagttgagagccaaatttttt

SEQ ID NO: 36420 - DNA, 120 bp, synthetic construct
  source 1..120: mol_type = other DNA
aaaactgagaggctgaggaattcctcaaacacagaaacaaacatcaaataataaatattcatgctttaacttgctcaatatcaatataaactttcccttttgaaagtaaacacgaaagac

SEQ ID NO: 36421 - DNA, 120 bp, synthetic construct
  source 1..120: mol_type = other DNA
tatatttacattttcctgtgtttgggactttatgtagtggactattgtgttcgttttgtgacaagtagagaagagattgcattctagggatggtttttgggggaacataatagtagtcct

SEQ ID NO: 36422 - DNA, 120 bp, synthetic construct
  source 1..120: mol_type = other DNA
agatggtcatagaattgtttcagtgcttgtgagtgcagcaacccaagagtgtcttatctgaaataccaccaggaatgtctggacacagtagacaaaggtttttcaactggatgccttagg

SEQ ID NO: 36423 - DNA, 120 bp, synthetic construct
  source 1..120: mol_type = other DNA
tgtgtgcacacttctagttaggtttagcaatgtgggcacccgatggagcctggaagtgagaggaaggtgaggtccgtatttcttccctctccctccctgctctggcactgagtatctggc

SEQ ID NO: 36424 - DNA, 120 bp, synthetic construct
  source 1..120: mol_type = other DNA
gtggggagcggtggagtggaaggaacaaaggaggtcagtactgggaacgctgaaggtgggaggccatttcataacattacttgttgatgaaattgccatggataccttctttgcccatca

SEQ ID NO: 36425 - DNA, 120 bp, synthetic construct
  source 1..120: mol_type = other DNA
atatattgaaattaacttaagatgtgaaagttaaaattagaaaccttgtaaaggaaaaataggaaatagtttcatgaacttgacacaggaaaatatttcttagactagatactgtagcac

SEQ ID NO: 36426 - DNA, 120 bp, synthetic construct
  source 1..120: mol_type = other DNA
agctgggccaggggaagggcaggaattgccatggcaggctcgctacacacaaatatttatcaaacagagaagaaggataataaaaatttatgggttgcagttgtttctcagagccttgtt

SEQ ID NO: 36427 - DNA, 120 bp, synthetic construct
  source 1..120: mol_type = other DNA
ccgtctcaaacagaaaacaaaaaaccaaaaaagaaaaaaattaaaaaagcaaaatgaaatcttttgtgctacacagaaacattggccactcatggggtaaaaatctcagggccaagcctt

SEQ ID NO: 36428 - DNA, 120 bp, synthetic construct
  source 1..120: mol_type = other DNA
ttcggcaatgttcttagtaactgtcggtgagtgaatgacttgtccttcctgagtttctctctctccatggcagacaaattgtctcttgcaagggtctgaagctttcaaatgtgggaacac

SEQ ID NO: 36429 - DNA, 120 bp, synthetic construct
  source 1..120: mol_type = other DNA
gctctcttcctagtctcaggccatgcccgtgccaacctggactgactgtcacgacattgaactcaaggcaggtgtggcaaactcacaccaaactatgtagcacatgcccaggagttgtct

SEQ ID NO: 36430 - DNA, 120 bp, synthetic construct
  source 1..120: mol_type = other DNA
gtgacattctgtgattatcatcctgcccctaccttggtttttatccattgtggtttagatccataatgaaatatattaacgctcatgagctattcaaaagtgaatgtcacagtcatcact

SEQ ID NO: 36431 - DNA, 120 bp, synthetic construct
  source 1..120: mol_type = other DNA
ggagaatacttccttgtgctactaaatggcaatatttgacaattacggatgacacaattgagcaacagctttcactgtttaacaagcagtgtctctggaacactaggttagtgctgtcgg

SEQ ID NO: 36432 - DNA, 120 bp, synthetic construct
  source 1..120: mol_type = other DNA
atttatagtcttgtgggtggaactagacaataaagaggtaaatatataaataaataattgccaattgtgatcattgtcatcaaggagtgaacaggttgctgtgatagagaaaaatgccga

SEQ ID NO: 36433 - DNA, 120 bp, synthetic construct
  source 1..120: mol_type = other DNA
ccaatcttggaaatgcagaattgctgggagatggggaggcacggaccatggaagtatcctctggagactcatggcgaagagaacaaatgaatgaagtaactggcagaaattagaggtcct

SEQ ID NO: 36434 - DNA, 120 bp, synthetic construct
  source 1..120: mol_type = other DNA
aactcaggcaaagaatgttttcttctttttgcaacagcagacactagtaaaaacaaaggcacagtaaaaattgagacccaaaatttgcagcgtagagatatgaatataataatagacaca

SEQ ID NO: 36435 - DNA, 120 bp, synthetic construct
  source 1..120: mol_type = other DNA
atgagggagtcaaaggacactctgtatttgtgctctcaggacacacagtgaacagtgatcatgaaaagcatggcctcaataattttgcataaaatgtgctcaagtttccctgcagtcacc

SEQ ID NO: 36436 - DNA, 120 bp, synthetic construct
  source 1..120: mol_type = other DNA
gcatcctgacatccatcatgagaggattctctgtctacaaccagagatgagttgactttgtcttcctcaaatgtgattttgatgttcttgtgaggctggatggagtcacaagggccgtgg

SEQ ID NO: 36437 - DNA, 120 bp, synthetic construct
  source 1..120: mol_type = other DNA
ggattttttatgaataaaaaagattctactaaaaaaaatcaataactgtacatatgtgggcatattgtttgaatctgtattcttttgctttgatatatttatgaatacttacaccattac

SEQ ID NO: 36438 - DNA, 120 bp, synthetic construct
  source 1..120: mol_type = other DNA
tgacctccagcctgtagaggagaggcgccacaggacctttacatgcacgccgctgttcccctcacccatgcatttcttaatgccttggtgaggagaatgcctctgggtcttccttggtgg

SEQ ID NO: 36439 - DNA, 120 bp, synthetic construct
  source 1..120: mol_type = other DNA
atatcctttataaaataaatcttacacgtaaatgtaagcgcaaaaccataagaatcctaggagataacataggagaaaatctcggggatcctgggttcaatgatggcttcttaaatacaa

SEQ ID NO: 36440 - DNA, 120 bp, synthetic construct
  source 1..120: mol_type = other DNA
ttaacaggaacatgctaactagttattagagagagacgcactactgtaaaactatatactgtttccatggggtacaaccccttcttcctcctctgaaacacattattcctctggcccgct

SEQ ID NO: 36441 - DNA, 120 bp, synthetic construct
  source 1..120: mol_type = other DNA
ctgtaatatgaaatatttagctataaatactacaagtgcaaatgaatttttttttctacttctgcattcaacttttctcttctccctttacggaaaacacttttgtgtaaaggcctccaa

SEQ ID NO: 36442 - DNA, 120 bp, synthetic construct
  source 1..120: mol_type = other DNA
cgcttgttcgagcttttaaagtattcatatattgtcaatcactagataaatggggaagattttatcttcctggagtcctaagccactaatttgtgacttatccatgtcaagggccagccc

SEQ ID NO: 36443 - DNA, 120 bp, synthetic construct
  source 1..120: mol_type = other DNA
agctgaagcaaaggacatgaaaaccctcactgtgcatcctctctagtctggccagaatcattcctaggtcggtggtctcttatcaggagggaatgctgcttgcttgttttgtcaaaatca

SEQ ID NO: 36444 - DNA, 120 bp, synthetic construct
  source 1..120: mol_type = other DNA
attcagatgtgccctcttacattaagttcttccttgcacacagaaacattcctctgtccaatcctaacacagggacatcagtcttgtcagtgtgagaacaggagactttgagagaaatat

SEQ ID NO: 36445 - DNA, 120 bp, synthetic construct
  source 1..120: mol_type = other DNA
aattttctaagagtgttgctgcgatacggacttatatcaccaggtaacatggacattaaatgtttagaggcatctatacatgaaacacgactgatagataaatttgaacaactcttgctt

SEQ ID NO: 36446 - DNA, 120 bp, synthetic construct
  source 1..120: mol_type = other DNA
cagtcagcccaacgtgcacagagacatgaacatctatgtatggttcagcattgtactgaaaactctcatgttttatctttcacaaaatgccctggcatggtttcctggtccatcgggcaa

SEQ ID NO: 36447 - DNA, 120 bp, synthetic construct
  source 1..120: mol_type = other DNA
agacctcttttcaaggtatcaagtgatcaaagtcatttatatagaggtctcctgaaaacatgtgtgaccatctatcttgggaagttttgtaaacctgatgctattttgttgtttccattt

SEQ ID NO: 36448 - DNA, 120 bp, synthetic construct
  source 1..120: mol_type = other DNA
aagaacctgctaaatttcgagtttctggttaggtggctagaataggtttataagacttccttacttacctatgactgctgaagtttgaattcttagcagtatgattccttttcttgtaag

SEQ ID NO: 36449 - DNA, 120 bp, synthetic construct
  source 1..120: mol_type = other DNA
gcccctcctttagcttctgctaaagactttacataatgaaagctcatgaagtgtctggattactaacagttacttatccaaaaagatgagacatggttcattgatttgattctattagtt

SEQ ID NO: 36450 - DNA, 120 bp, synthetic construct
  source 1..120: mol_type = other DNA
aaaagaaaaccatctctaggcactattcccctttgtggaaatgaagagaatattttctgaactccacctgggacatatgaacaatgagcatgaaatcttacaaactgtataaataacatt

SEQ ID NO: 36451 - DNA, 120 bp, synthetic construct
  source 1..120: mol_type = other DNA
ctgcttacttagcacattactcccccctacagttttccttcttttgtttttgtactaaggatatttgtataaaaacaggatctttgtggcttagtaattcatctgattcagctgcttgta

SEQ ID NO: 36452 - DNA, 120 bp, synthetic construct
  source 1..120: mol_type = other DNA
tctggactgcactgctctttctctcaaatgcatttgttactgttgttgttcacttggttttaaacaacttccttcctgtaactgactccaaaatacactgttccagtcccatatgttcag

SEQ ID NO: 36453 - DNA, 120 bp, synthetic construct
  source 1..120: mol_type = other DNA
tcagtgacttctacttactctctcttctctagcattggaactctgaaagaacatacttcgcagatgaggttgtgaatacagagaaaggtttggggagcatttttccattttaaactctat

SEQ ID NO: 36454 - DNA, 120 bp, synthetic construct
  source 1..120: mol_type = other DNA
tttacgtgaaggcaaaaaactggatagaatgctctagttgaatgtgttcgctgaataatatcacccatcacttaaataatgcctttcttagtctttattttcacttttctttcataaaac

SEQ ID NO: 36455 - DNA, 120 bp, synthetic construct
  source 1..120: mol_type = other DNA
ctagaaaagctattatgaaattatctcacagccttcctcaaacaaacaaaacgtcttggctagagtagatggttggagaaaaaggaaaaaaaaaatgctcttaagccaagaactagccta

SEQ ID NO: 36456 - DNA, 120 bp, synthetic construct
  source 1..120: mol_type = other DNA
aattgaagctcatgaactctttcttggaagttattaagatgtccatctcttatgatagttaatgtataaatacctgaaagcaaaactgagaagttcccccctccaagtttcctctaacca

SEQ ID NO: 36457 - DNA, 120 bp, synthetic construct
  source 1..120: mol_type = other DNA
gtaatgagtgagttctcgctaccatgtgagctggttgtttgaaagagactgacatctctcttgctccctcctctcttgccatgttacatacctgctccctcttcaccttcagccacgaaa

SEQ ID NO: 36458 - DNA, 120 bp, synthetic construct
  source 1..120: mol_type = other DNA
acactgtgtagtttttccttttatttttctcttattaaagacttcagaaaaaaattcaatttatgcatgggttaaatttcaatacctggatcttggagatgagactaatgcattcagctc

SEQ ID NO: 36459 - DNA, 120 bp, synthetic construct
  source 1..120: mol_type = other DNA
acagcgcccctcagcccgatactcaccatgcgcgggggtcgcgcagcacagccagagcgccagcagcgcccacagcagagcggggcgcagggcgggcatcttctcggtcgcctcctccgc

SEQ ID NO: 36460 - DNA, 120 bp, synthetic construct
  source 1..120: mol_type = other DNA
caccttcttgaacaaatttattcccaggcatattattcttacaagtgctattataaatgaaatcattgtgtcaattttcttctcagattgttcattgctaacacaactgattgtttactg

SEQ ID NO: 36461 - DNA, 120 bp, synthetic construct
  source 1..120: mol_type = other DNA
ccaatcttggaaatgcagaattgctgggagatggggaggcacggaccatggaagtatcctctggagactcatggtgaagagaacaaatgaatgaagtaactggcagaaattagaggtcct

SEQ ID NO: 36462 - DNA, 120 bp, synthetic construct
  source 1..120: mol_type = other DNA
actttggacaaaaattaaaactcaggcagagaatgttttcttctttttgcaacagcagacactagtaaaaacaaaggcacagtaaaaattgagacccaaaatttccagcgtagagatatg

SEQ ID NO: 36463 - DNA, 120 bp, synthetic construct
  source 1..120: mol_type = other DNA
aagtcagccatttatctagaaaacataccaggaacatgacggacagatgagctaaaacaagcgaacttagaagacacagaaaatgggaataaattcagtgaaacctgggtcacatctttc

SEQ ID NO: 36464 - DNA, 120 bp, synthetic construct
  source 1..120: mol_type = other DNA
tgacaggaatattctagggtgtcctagattaactttggtgagaattagatgaccctgctttccagacccacaggccaaaatctccctctacgtgtagaccataatgccatattccctgcc

SEQ ID NO: 36465 - DNA, 120 bp, synthetic construct
  source 1..120: mol_type = other DNA
cgaagctaggaggcctgacagatactgcctgtgcacctcctgcactcaggtgactatgagattgtcacacttgcctggggttgagtaacttgatactggggactggcagacaaaggcatg

SEQ ID NO: 36466 - DNA, 120 bp, synthetic construct
  source 1..120: mol_type = other DNA
caagacaagcaacttggatggagcccaggagacaggcccacggtccctgctctgtacactgcactgctatctccacacattctcgggtgcgaactttcttcctctttagcaacaagactc

SEQ ID NO: 36467 - DNA, 120 bp, synthetic construct
  source 1..120: mol_type = other DNA
ggacacggccattgtgggcaacaaggacccaccttccatctgggccgccgtcccagggaaaaccttcctcaacatcacgccagctgaggttggtgtcctggttggcaaagactggtcaag

SEQ ID NO: 36468 - DNA, 120 bp, synthetic construct
  source 1..120: mol_type = other DNA
tgtaattcaatgcacgtttacaaatggatacactaacggaactactgtcacaaccaagatagaggaaattccctatgccccaaagtttcttgtacccctttgcagttcatcagcctttca

SEQ ID NO: 36469 - DNA, 120 bp, synthetic construct
  source 1..120: mol_type = other DNA
agttcatctgtgtctcgttactgagccacgagaaatagcagcccgcccctcaggttggtctggaaacacacatacagatcattgtgcagacacagtgtgtaaattcccaggaatggaatg

SEQ ID NO: 36470 - DNA, 120 bp, synthetic construct
  source 1..120: mol_type = other DNA
atatccccaagtctgtgctcatattcggaaaagacagctcagcgtaaagcactcaaccaggagtcaagatattgttattttcaactgttgttccaacagttgtattataaagggctagtt

SEQ ID NO: 36471 - DNA, 120 bp, synthetic construct
  source 1..120: mol_type = other DNA
cttagcaagatctgagtttctccaggtatgatattattttgtttgaccatccttatcttcaagggctaccaagaagaaacaaatcatttatttacctccccagaggaaaaggttttacca

SEQ ID NO: 36472 - DNA, 120 bp, synthetic construct
  source 1..120: mol_type = other DNA
aatcaaaagtgtacagtcactttggaaaacttaagttcattcaaaatcctgcacataagtacttgcagcaattttatcataattgtcaaaacttggaagtacccaagacgtctttcacca

SEQ ID NO: 36473 - DNA, 120 bp, synthetic construct
  source 1..120: mol_type = other DNA
cagcaaggatgtggggtaaccagaatatccctgctaaatggtacaaccactttgggaaaacgttcaacagtatgtaatactaagttttatcattcatatacctctaaaaccaacaatgcc

SEQ ID NO: 36474 - DNA, 120 bp, synthetic construct
  source 1..120: mol_type = other DNA
tagaggcctgccccgctagtcatgaggtgattcagtgacggctacaaacgctcctcatgtgcatcctggacttggtacacccggcttgcccatcaccagcctggagaaaccgccaggagc

SEQ ID NO: 36475 - DNA, 120 bp, synthetic construct
  source 1..120: mol_type = other DNA
aaggcaaagggggaagcaaggtaccttcttcataaggcagcatgaaggaaaattaatgcaggaggaactaccaaacacataaaaccatcagatctcgtgaactcgctcattatcaggaga

SEQ ID NO: 36476 - DNA, 120 bp, synthetic construct
  source 1..120: mol_type = other DNA
gtttcttcatctgcaaaatggggataataatgactggggtgcctatttcccacgattgttttgaggatcaaatgagataatataattaaaagtgtttttggaaggtctaaatcactgcgc

SEQ ID NO: 36477 - DNA, 120 bp, synthetic construct
  source 1..120: mol_type = other DNA
acatgttgttgtgtctattatgtctgttagtgggtttgcggcaagagagagtgctgtgttcttagtcccgaatgccaagcctgaactaggacaagttatggtggaaatatcttccttgga

SEQ ID NO: 36478 - DNA, 120 bp, synthetic construct
  source 1..120: mol_type = other DNA
ttattttcttactggtttgaaaaagctctttaaatattaagggtgttagtcttttgtcttaaatatgtcacaatatgtatggaaataattagcagtatataacataacatcaaattgcta

SEQ ID NO: 36479 - DNA, 120 bp, synthetic construct
  source 1..120: mol_type = other DNA
gactttacttgtttcctttagtccttaaaatagatgttaggattcttgtttacagaaaagttaaggaatgttcatccagatcacctagccagtcagtggtaaagaacggtcactggaacc

SEQ ID NO: 36480 - DNA, 120 bp, synthetic construct
  source 1..120: mol_type = other DNA
ctgccttttgataaaaaacagtgtgtttttttctaaatcttgttgtgtttgactagagtctgattaaggtaccttttgggaaattaaggttctatagaaattactgggctcaatctagtg

SEQ ID NO: 36481 - DNA, 120 bp, synthetic construct
  source 1..120: mol_type = other DNA
tttttaaagcatgaacggttcctcaagtaaatacatatttatacattatataaatgtctggctattaaaccatgtatgcatatgttaactctaagtaaagcttattatatgttttttagc

SEQ ID NO: 36482 - DNA, 120 bp, synthetic construct
  source 1..120: mol_type = other DNA
aggcgtgagccaccgcgcccggccggatatcaggtttttctaactgcgtatttacagatgtagtgagtgaaaggaatgttgggtcagtaggtaaaagacttgtgctctggtcctggttca

SEQ ID NO: 36483 - DNA, 120 bp, synthetic construct
  source 1..120: mol_type = other DNA
cttttttttgggttttttttttccttttaatcaagacaaatttcaaggaggaagacagatgtttctccgcttcgtttttatttaaatgtaccacttgggatttgaagcttccgcacttct

SEQ ID NO: 36484 - DNA, 120 bp, synthetic construct
  source 1..120: mol_type = other DNA
ctattgtatttcttaaaagttctttttggagtgattccaagattggtattaagagggtatgccaagggtatatattggcaatttttattttgtttgtatttatcttagagtcatttggtt

SEQ ID NO: 36485 - DNA, 120 bp, synthetic construct
  source 1..120: mol_type = other DNA
ccagctagtggtgcgatgccccataaagaggccacttattctctctggcctctactattggtaaatgggtataataatatccaccctgccaatcctgagaaatttcaggtagtgggaagc

SEQ ID NO: 36486 - DNA, 120 bp, synthetic construct
  source 1..120: mol_type = other DNA
atttagttttttaatgttataaacaagatttttttttcaagtcagaaataattttcttcactaaagtgaaaatattttaagctgtgatgacagtaaagcttaacaataggttgtttggat

SEQ ID NO: 36487 - DNA, 120 bp, synthetic construct
  source 1..120: mol_type = other DNA
tcagcatttccccctttccttcaccttcttgtgagtgcattcagggaggcacaggggcattgtcagatcaaagaaatagacagggaaaaatatcaactgttaaattgctttctctttctt

SEQ ID NO: 36488 - DNA, 120 bp, synthetic construct
  source 1..120: mol_type = other DNA
tacctattactcccctttcttcccatgtccataatgctgcttagcttcctggggtgtgaaggataattctatacctcaggatgactattaggttgatttggcctgttattctaccagaca

SEQ ID NO: 36489 - DNA, 120 bp, synthetic construct
  source 1..120: mol_type = other DNA
tgcctttttatttggttaaaaatgcctacttaaatattaacagatttttaaatatccctttgaactcttccccattcctgtacctcctttccctttttctgttgtaatgtcagccacctg

SEQ ID NO: 36490 - DNA, 120 bp, synthetic construct
  source 1..120: mol_type = other DNA
cgacttagactaatgacaacaaaaagccagccatgtgaataccaaatttactagttctgtgaggatatttttttctctttctctttctgcctcaaagaatctgctttgcttcccctggca

SEQ ID NO: 36491 - DNA, 120 bp, synthetic construct
  source 1..120: mol_type = other DNA
gatgtttctaaattaacacaaactaatgctgtttctaaattaacacaactaatctaaatcttaatgctgcctctcatactaataaagtatttgggcatatttccttcatggccttattgt

SEQ ID NO: 36492 - DNA, 120 bp, synthetic construct
  source 1..120: mol_type = other DNA
ttcagtatctcttgtcatctgtgattaagtcatctgtccctgaacaatgtccatggagtttctatgcctgtttaaggaagctggcagccttgcctttgtatttggaaatattgttcccca

SEQ ID NO: 36493 - DNA, 120 bp, synthetic construct
  source 1..120: mol_type = other DNA
tctgggtatttgatgagagaaagcttaatattgaagtatctctcctatgaggtgttagaactatttgcctacaatttattggggaaaaattgctcatttgtgtacataaacctaggacag

SEQ ID NO: 36494 - DNA, 120 bp, synthetic construct
  source 1..120: mol_type = other DNA
aggtctagtttgtccatcaccattatgatatcaggactggttacttggttaaggaggggtctaggagatctgtcccttttagagacaccttacttataatgaagtacttgggaaagcggt

SEQ ID NO: 36495 - DNA, 120 bp, synthetic construct
  source 1..120: mol_type = other DNA
ctagtgttgtcagggaatttgattttggacatgttataaaccccaacatccaagtacgtacatagcgattttcagtcgtctccatttctttgtgtaggttcagatttctgtttgatatcc

SEQ ID NO: 36496 - DNA, 120 bp, synthetic construct
  source 1..120: mol_type = other DNA
cactaggagccaggccaaagtcatctcctttggtctccaatggaggccagaactcggttcacctgcaacgggaggacctggcccagaagaggtggccttcatcttcatggtgccttcaga

SEQ ID NO: 36497 - DNA, 120 bp, synthetic construct
  source 1..120: mol_type = other DNA
aatatgacaacatgagctgcttatcatgaaataagtgttttccaattaactatcctgcttcatcagcaggtaggaataatagaatctatacctatgtcttcatgggaagttctctatggc

SEQ ID NO: 36498 - DNA, 120 bp, synthetic construct
  source 1..120: mol_type = other DNA
caaaagcctatttagctgtcaagactattaggtgtccaacacacaagcaacaaagtccaaggctaagcacacaataacatatcctgggtgaataaatcagtcaccttttgtcagacttgt

SEQ ID NO: 36499 - DNA, 120 bp, synthetic construct
  source 1..120: mol_type = other DNA
gtctttcgtgtttactttcaaaagggaaagtttatattgatattgagcaagttaaagcatgaatatttattatttgatgtttgtttctgtgtttgaggaattcctcagcctctcagtttt

SEQ ID NO: 36500 - DNA, 120 bp, synthetic construct
  source 1..120: mol_type = other DNA
attaccccaaaaatatgacctgctgaatttctgctgtcatgaattgactaacatattttgggcctaataccttcacatttagaatgtttttgttttgtattggaaaatattgtaagtcct

SEQ ID NO: 36501 - DNA, 120 bp, synthetic construct
  source 1..120: mol_type = other DNA
aaaaaatttggctctcaactcaaagttatcaaagtatatcctagatgtagtttgcttgtcaggcttctacatgaaaatctaaaatgctcctgcatttcagaatgagcctaacatatgtaa

SEQ ID NO: 36502 - DNA, 120 bp, synthetic construct
  source 1..120: mol_type = other DNA
gtgacctaagccagaagagtgactggagccagactcatatgggccacggctggaagaccaccctgagccagacccatatgggctgtagctggaagactgcccagaaccagacccatgtcg

SEQ ID NO: 36503 - DNA, 120 bp, synthetic construct
  source 1..120: mol_type = other DNA
acccatgtcggccgtagctgggagactgccttgacccagacccacgctggccgtggcctggagactggccagatccagagccctgtcggccatagccagaagactgacttgagccagagc

SEQ ID NO: 36504 - DNA, 120 bp, synthetic construct
  source 1..120: mol_type = other DNA
catctcaaggggagctgagaagtctgaggcagctgcaagtgcctcagtagttgcaaaaggggcaatgaggtgtgcagacctgtgaaggaaaggcaagacagggaatcatggttccccaga

SEQ ID NO: 36505 - DNA, 120 bp, synthetic construct
  source 1..120: mol_type = other DNA
aatggtgtctgggcgatggaatgaagtgaaagaaatagccaagagctgggcactgagggaacaagctggggggccctgggcgtgggttccctggatccagggagtgtgaggatggctttc

SEQ ID NO: 36506 - DNA, 120 bp, synthetic construct
  source 1..120: mol_type = other DNA
gtggcttaccgtgatgatgctgtggctgtactgcatccctcgatcccaggagcctagccgcacactctgctcccagaacttggagcccacacaggcctctgaggcaaagagcatggtgtt

SEQ ID NO: 36507 - DNA, 120 bp, synthetic construct
  source 1..120: mol_type = other DNA
agagcagacacgcaaacccctaatagatcgtggaaaaataatagcaacaaagatttatttattgagcatttactgagctctggactctaaaacccattctttgtgcacattacctaattt

SEQ ID NO: 36508 - DNA, 120 bp, synthetic construct
  source 1..120: mol_type = other DNA
aaggctcctgcttgtttgacagagatgtgacagggagcgttaacaagttaggttgtaagctgggttttgtgtgacagttaagaaattgtcagacaatgctatggtctagaaactgggaca

SEQ ID NO: 36509 - DNA, 120 bp, synthetic construct
  source 1..120: mol_type = other DNA
ccctgcaatcagggacttttggggacctcctggtgatcaccaggagggaaccacatatgaagaagtgcgtgtaagaatcaggaatctcctcccaactcaacttcccagtgtgagtgcagg

SEQ ID NO: 36510 - DNA, 120 bp, synthetic construct
  source 1..120: mol_type = other DNA
aggaggcctggaaaccccttgatttgctgaggaatctgcctctgtggagggatggggtggagtggccaggctcagctgtctgtggaacactaggaggaggtttgggcttgagaaaattct

SEQ ID NO: 36511 - DNA, 120 bp, synthetic construct
  source 1..120: mol_type = other DNA
tcatcaagtattatgtactgtacaaaattgtgtgtggcatatttttatgtgactggcaatgctgtaggtttatttacaccggcattgccacaaacatgtgagtaatatattacactgcta

SEQ ID NO: 36512 - DNA, 120 bp, synthetic construct
  source 1..120: mol_type = other DNA
catatttaaagcacttgtattagtcaatgtttcgtgttccgcattatttgaaccatttgcccttacagaaagagaaatacttgtttgtgttttaaataaaactgatgtaggaaagtcttg

SEQ ID NO: 36513 - DNA, 120 bp, synthetic construct
  source 1..120: mol_type = other DNA
tgccctggtggcttatccctccccggctttgatcccctttgatgtacagggaggtgccccggccgggggtctggggccacgtcgggggctaggtcgggagggctccctcgggctggccgc

SEQ ID NO: 36514 - DNA, 120 bp, synthetic construct
  source 1..120: mol_type = other DNA
ggtaaagcaaaatgtggactaggagaaaccaagtgacctgtcttctcatctagtcgactgacttgactcatgaataagagcccttactcagatagcgttttttaaaccagcagttcccat

SEQ ID NO: 36515 - DNA, 120 bp, synthetic construct
  source 1..120: mol_type = other DNA
gccagctaatgaacaagttcttttaaaggcagcctggggagtgtgggagaggctgagttcagcaaaacatgactaggtggtgctggtgctgtttcggggtgtggaggcagaagtggttga

SEQ ID NO: 36516 - DNA, 120 bp, synthetic construct
  source 1..120: mol_type = other DNA
tctgtgatttccagtttcagtttaagtgaaccaagttcttaaatacatttgagaaatgaagggcagaattcttccagatttttaagctccaccactacaaccttttactgttgtcttgcc

SEQ ID NO: 36517 - DNA, 120 bp, synthetic construct
  source 1..120: mol_type = other DNA
ccaaagacctatcaaactgcagatcttttggctttgtaatatattcagttccacatttattcattcaagatttttgtgtcctcattatgtgccaagtactgggttggacactaggtgaca

SEQ ID NO: 36518 - DNA, 120 bp, synthetic construct
  source 1..120: mol_type = other DNA
caggccttcttcggtaatgggtggttgtgtcttagtgggcctaaatgctgccaccagttgattgcttttgttcgcatgtattactttggtaaaaaaataaatgtatgaatgggatttcag

SEQ ID NO: 36519 - DNA, 120 bp, synthetic construct
  source 1..120: mol_type = other DNA
gaaagtaagaatttagtggatgggttttatgcagagtgaatagaaaagagtgatggatgaattctcaatagaaaaaaaaggaatccagaaaaaaatggatttatatcttcaaaataagga

SEQ ID NO: 36520 - DNA, 120 bp, synthetic construct
  source 1..120: mol_type = other DNA
attctaataactttataaatattaactcataaaaactctgtgaggtagatactgttattaacaaaattttacagaatagggacattcttgcatagagagagaagtaatttgcccaaggtc

SEQ ID NO: 36521 - DNA, 120 bp, synthetic construct
  source 1..120: mol_type = other DNA
tcgcttctgtttaaatccccccctacccaaggtctcaagaggtccatgctagattttactgatttcttcctctcttaatgtagtctgggaccattattttggcacttaggatgccagtct

SEQ ID NO: 36522 - DNA, 120 bp, synthetic construct
  source 1..120: mol_type = other DNA
gcatactgctgaggtaagaggttatgactggggatagctagcagaatcttcggagtaaaagtgattgtgggagagatgaaagtatatgaattcagggaagagaaagaggagaacaaagaa

SEQ ID NO: 36523 - DNA, 120 bp, synthetic construct
  source 1..120: mol_type = other DNA
tggtttgatcaagagcagtggtaaagtattatgcgagggtaggaagcctttctagggaagatgttcttgcattttctttggctccttgaagagcataaatgtattcctatttgttgctga

SEQ ID NO: 36524 - DNA, 120 bp, synthetic construct
  source 1..120: mol_type = other DNA
gaagtggacaaaggtagatgggtttgtattgtggagggccttgactcttgattagggatttggctctatgcaatagacactggaaaccactgatggtttaaataggtatgaactctgatt

SEQ ID NO: 36525 - DNA, 120 bp, synthetic construct
  source 1..120: mol_type = other DNA
taagaaagggttggcttcttaggtgtattgacttcctcccctccttctcctctctcactcctttttatacattgactggatttgtcagtcttgttcttgctcctgttttctccggtaatg

SEQ ID NO: 36526 - DNA, 120 bp, synthetic construct
  source 1..120: mol_type = other DNA
cgtctcaaaaaaaaacaacaacaaaaaacagaggtgagtgatgagaatatggcttatgaagacttcagtgctgcctcttcttgatccccatcccctagtccccaagcacacataccgagt

SEQ ID NO: 36527 - DNA, 120 bp, synthetic construct
  source 1..120: mol_type = other DNA
gggctgttggttgtttttctagacgtttatacccttttaaaatcttccatctaggactagggaccttatgtccttatgtccttttcatatagagaaggtaaggctggggcctctgtgtct

SEQ ID NO: 36528 - DNA, 120 bp, synthetic construct
  source 1..120: mol_type = other DNA
ctgatgtattctgaagtccaagtaagtatggcatgattatttgttaatagttactactatagaattggaaaagccttctaagttgaacttcatggtttacaaatcacaagtgcctggcct

SEQ ID NO: 36529 - DNA, 120 bp, synthetic construct
  source 1..120: mol_type = other DNA
caaatctgatctatagtgatagagaatagatcattgattgccttggggccaggatggggatgaaggattgactgctaagggacacaagggagtttgtagggtttttatagcctacattat

SEQ ID NO: 36530 - DNA, 120 bp, synthetic construct
  source 1..120: mol_type = other DNA
cagaagagttgaaaaacaacaaacttgacctaaatgacatatatggatactgcgcctgacaactgcgggtagatacacattctttttttttttttttttttttttgagacggagtttcgc

SEQ ID NO: 36531 - DNA, 120 bp, synthetic construct
  source 1..120: mol_type = other DNA
ttacttgcttatttgctgcattttttcttttcttttcttcctttgtttttttttttaattcacagaacaggcagtggtgacatgcatgacaggcatttgggatcagatgttgctgatcca

SEQ ID NO: 36532 - DNA, 120 bp, synthetic construct
  source 1..120: mol_type = other DNA
caaggtccagaggactacgagactcacttgtccaaggttatgctgcaaattagggtcctgtcaggaaggtatccagctccccctgacatctggcccattttttaaaatatgtgatgcaaa

SEQ ID NO: 36533 - DNA, 120 bp, synthetic construct
  source 1..120: mol_type = other DNA
aatgttgttatataatattataataatgctaatattaaattttaaaagtaaacattaaaagatctgggtcaagtacatagcatgaagggttgtagtggcttttaggttttcactgtagag

SEQ ID NO: 36534 - DNA, 120 bp, synthetic construct
  source 1..120: mol_type = other DNA
ataatggtgttagaatatattcctttctaatctgttttctatgcatgcacaaacacatatgtgagcacatatttataattttattctaaaaaataggatactgctgtacatattgtttta

SEQ ID NO: 36535 - DNA, 120 bp, synthetic construct
  source 1..120: mol_type = other DNA
cattctagaaggaactgtccattgtgaaatcttagttgcatactttagatgaaaaacaatgaattggagatacctctgttttagtcacagttgtgccacgtgtcagttctatgactgatg

SEQ ID NO: 36536 - DNA, 120 bp, synthetic construct
  source 1..120: mol_type = other DNA
aaggcctccattgttagctgtcaaaagacagtgcagaagtgtgaggctgggggccaacagaaatttaaccagcacagcacctcaatattacatcaccaggcattgattagtccagggaaa

SEQ ID NO: 36537 - DNA, 120 bp, synthetic construct
  source 1..120: mol_type = other DNA
agagtcccgtgagggtgaaatcagtgcttgctgtttgattctgagaagtctgattccctgagcacatgactggctcacagtttccccctgaggaaaaaaaagtcattaattttaaatctt

SEQ ID NO: 36538 - DNA, 120 bp, synthetic construct
  source 1..120: mol_type = other DNA
gtccatggtgcccggctccagatccacgagcacagcgcggggcacgtacctgccacctgcgtggggcgggagggcatgagcgaggggagggccgcgttcccaggagggcggtgggggaag

SEQ ID NO: 36539 - DNA, 120 bp, synthetic construct
  source 1..120: mol_type = other DNA
tggcagtagggatttcaacaagtaatagagatgatgagataatgtgtgaaaaaaacaagcacaatggtacatcataagtacccaaaatttggtggatattattagtagtattttattcat

SEQ ID NO: 36540 - DNA, 120 bp, synthetic construct
  source 1..120: mol_type = other DNA
tcctgccccaccacaaaccaatagggtcaacgttgtgaatgggcacacatcaaagattcaggcctgactctcagctgtggggtttgttaaaacaatgtggaaagttttcttttatgaaca

SEQ ID NO: 36541 - DNA, 120 bp, synthetic construct
  source 1..120: mol_type = other DNA
gaatagctaagatattattaaataaatgaagaagttagaaaaatatttgtaccatactggaagtgaaacttactttttaacattatagcacagaaaagtgaataagttaactgaagatgg

SEQ ID NO: 36542 - DNA, 120 bp, synthetic construct
  source 1..120: mol_type = other DNA
gtatttctgtttgagaaaatgccatttacaagcataagatttagagatttagaaaaaaaattctgctttacctcatgtggttctactttaatatcctgatagtgtaaagtttccagtttg

SEQ ID NO: 36543 - DNA, 120 bp, synthetic construct
  source 1..120: mol_type = other DNA
cctgatgagatttgtacatcttcctgcatgagtggattaagagatattgagatgactaagctagaaattacaaaaatgttggcatactattccagtatatgggtatgaaaatcaaggaat

SEQ ID NO: 36544 - DNA, 120 bp, synthetic construct
  source 1..120: mol_type = other DNA
gggtctcctgttaaagatggtcttctgaaggtaataacttttatatttttatcttgagtattaactacatattttatgaagtatacattgtatattaattgttttctttccaaacccatt

SEQ ID NO: 36545 - DNA, 120 bp, synthetic construct
  source 1..120: mol_type = other DNA
ttttttaatttctttttttttttttttttttttttagtagaagcattcaagtcaggtaacgggacaaacaagaaagaatgtaggcaggtaattctggagactctgagaagaacagttgag

SEQ ID NO: 36546 - DNA, 120 bp, synthetic construct
  source 1..120: mol_type = other DNA
ctctctttttcttttttaaaaagatataaatcaaacaaaatcaaaattttgtttataatgaaaagagttggttacagattcattctgtgtctcatggcactgtgctctctttttccctag

SEQ ID NO: 36547 - DNA, 120 bp, synthetic construct
  source 1..120: mol_type = other DNA
ctacgcatcaaaaagaaatagataaaataaatggaaaattagaaggtaagaaccgttttttatttaaaaatcatttgaccaaatatttctctaaattgatgaggaaggatatcctctagt

SEQ ID NO: 36548 - DNA, 120 bp, synthetic construct
  source 1..120: mol_type = other DNA
atatatatatagatgtatgtatgtatgtatgtttttgacgttcacaatttgaataagatatacttgaatgtaagaaccttggctttatttttaaggaagcaaattgtgttggtaaaattg

SEQ ID NO: 36549 - DNA, 120 bp, synthetic construct
  source 1..120: mol_type = other DNA
aatgctgctaaatttagaacattctctgcaatgataagtacatttgtacctttgaactctcatcacaactttgcaattcctaaactccaggacaaattgaagaacataatagcaacatgt

SEQ ID NO: 36550 - DNA, 120 bp, synthetic construct
  source 1..120: mol_type = other DNA
ttctactttaatgtcctgatcggataaagtttccaatttgcaatttctgtacgcgcttggttttaaggtaggtgaattttgagactgtgaaatatttgcagtggttcaaaggctgattgg

SEQ ID NO: 36551 - DNA, 120 bp, synthetic construct
  source 1..120: mol_type = other DNA
aggcttaattatctgttaatttaggaattggatcctgaaatagcaagtgccatagttaatgactttagtttgttaaatgaactggtgagggaggattttttctttttaaagtcaattgtt

SEQ ID NO: 36552 - DNA, 120 bp, synthetic construct
  source 1..120: mol_type = other DNA
cagtacttgagataaaagactaaaatgctcgtagggtttttttttttttttgcctttggccctcagaacaacactgtgtggtttggttccttctagaatatttgtagagggggaaatgac

SEQ ID NO: 36553 - DNA, 120 bp, synthetic construct
  source 1..120: mol_type = other DNA
gtacacttgctgcttggattttcactgtatgcctttaaaagtcagcagtggactctgggaaatggattgcctggaccacacttgatacttccaagacacacagcactttctccctttttt

SEQ ID NO: 36554 - DNA, 120 bp, synthetic construct
  source 1..120: mol_type = other DNA
cacaataattctttcaacaaatacaatcctgttatgcacatgagcctggtacgaaagcagaagccttctgccttacaaagagactcttgagtgcccactgtgggcagggccagggagttc

SEQ ID NO: 36555 - DNA, 120 bp, synthetic construct
  source 1..120: mol_type = other DNA
cttgtccctgtgtcagtttgcagatccctttgtttattctgcccttccttcccccagattggttggggaatgggtcttgaatgtggcgtctgacccgaatgcttgcttcagagtaaatct

SEQ ID NO: 36556 - DNA, 120 bp, synthetic construct
  source 1..120: mol_type = other DNA
acggaagcctcccaggatcggcaagctggagcctctgttaaggagggtaagctggggctgggcagctgcgtctccgtgtgcagagttccaaaactgtctttctcactaggagatggaaca

SEQ ID NO: 36557 - DNA, 120 bp, synthetic construct
  source 1..120: mol_type = other DNA
aaaaagccgtagcatcgccagaagccactgtgagtcagacagatgaaaataaagcaagagcagaaaaaaaggtgagcaggagggaagacttaacgcaggagcattgatctgcagcatttt

SEQ ID NO: 36558 - DNA, 120 bp, synthetic construct
  source 1..120: mol_type = other DNA
acttgtcttgtagaatgtgtctcgtgaatttgcttgattattttcctatgaatagattcagggtgagaagttttggcaagaatacaagcaggcagggttgtgcacttccagttggatcac

SEQ ID NO: 36559 - DNA, 120 bp, synthetic construct
  source 1..120: mol_type = other DNA
cattctcactaactagaccgtggcttaatgctgtagcagatgggttctggcatagccatctgtcttgtcgagactgagaccactaacagcctctgggaccctggttcataggttgctttg

SEQ ID NO: 36560 - DNA, 120 bp, synthetic construct
  source 1..120: mol_type = other DNA
cttaaccttccttaagctcatgtggcttaacagtgagtagggtcactgtggcagctgtaactactagtgtgaagctcttgcagagtgccggcacataataagtgcatagtgaatgtgagc

SEQ ID NO: 36561 - DNA, 120 bp, synthetic construct
  source 1..120: mol_type = other DNA
acttttttgggtttcctactcttgtcagctgctgccaaacatcttctcatctcttcccccgcctcccctcccctgcacctagttgttgtctcctgtgtgctgcgtctttaacatctattc

SEQ ID NO: 36562 - DNA, 120 bp, synthetic construct
  source 1..120: mol_type = other DNA
ctagtttttacagtttttttatttttatagaatattgttgtaatcagcttcctgggcatgccactcggtgacatggcatacagctccactggtccagcttgggagtttaacctctggttc

SEQ ID NO: 36563 - DNA, 120 bp, synthetic construct
  source 1..120: mol_type = other DNA
gaacatggcagattagcatccaacatggaattgctttattctcattcaaggtttccctcattcttcactctccccatgctggtcaccttgctgtttgttcctcaaacacatatgacatgc

SEQ ID NO: 36564 - DNA, 120 bp, synthetic construct
  source 1..120: mol_type = other DNA
tccaccccgtaccagatcaggagctgcgccaggaccacattccccttgcggcaggccagatggagcgccgtgcagccgtctccctccccacaggtctcgttcacctcctcacgggagcca

SEQ ID NO: 36565 - DNA, 120 bp, synthetic construct
  source 1..120: mol_type = other DNA
ctgccgctcccgatggtgtcagcatgattctccggggctttcctctctttgtctgggtcactccctttctcagatgtaaacaggttggaccagcgcatggaccgcttgcaaacgggggtg

SEQ ID NO: 36566 - DNA, 120 bp, synthetic construct
  source 1..120: mol_type = other DNA
tttttacgaattcttctcttggatcctgacttgcagagggtttcctgacttcttctttctcagcacatcatggcctgtaccgtgaagtcttttatatgataaccagtcagaaatgcccgt

SEQ ID NO: 36567 - DNA, 120 bp, synthetic construct
  source 1..120: mol_type = other DNA
tgctcagagatttaagagacttagctgactacagacatttagtgattactcaataggtcccaaagctcaggacttgagacagagtttgagtccagtttttgttcgaaacacaatttcctc

SEQ ID NO: 36568 - DNA, 120 bp, synthetic construct
  source 1..120: mol_type = other DNA
tattgttgactgaaacgcacagtagatacctgaaggggaagggaagtgtaagtcaaacttatcaaagtgtattattttctcagttaaaatgtcaaatgacaaagcactaagatatgtctt

SEQ ID NO: 36569 - DNA, 120 bp, synthetic construct
  source 1..120: mol_type = other DNA
ataatttttaataaatgctgagacataaaaagtagataaaggagtggtaaataacacagaaacacaactttggtgcctacagaaagtgactggaacagaagcgagccagtttgtcttgca

SEQ ID NO: 36570 - DNA, 120 bp, synthetic construct
  source 1..120: mol_type = other DNA
attaaaaatcaatgcaggcgtactggtctaagcagcctagcatctgaataacaagactatcagtaaaaaagtaacagagaaaataaaaaaaaaaattctcaagaagagatagtctgcagg

SEQ ID NO: 36571 - DNA, 120 bp, synthetic construct
  source 1..120: mol_type = other DNA
ttggagacagggcctagtgggaggcgtttgggtaatggcagtggattccttatgaatggcttggtcccatccccatggtaataagcacattctcattatggtaatttaaaagactgtggt

SEQ ID NO: 36572 - DNA, 120 bp, synthetic construct
  source 1..120: mol_type = other DNA
aaagtctacattgacgtttcatgtcttttgaaagttttgaccatgaaccaatccccacctctcttttagaacaaggaggtaaataaagtctgttaagtcaccagaataaatctggagaca

SEQ ID NO: 36573 - DNA, 120 bp, synthetic construct
  source 1..120: mol_type = other DNA
acgaacgtggtgcatgtggaggtcctcaccaacttcaacagtcacctcagcaggctgtacagcagcagccatgggcgctcctgccatcctgtccccagctcctgcctcatagatctcaga

SEQ ID NO: 36574 - DNA, 120 bp, synthetic construct
  source 1..120: mol_type = other DNA
tttgctgactaaatatagatacacctgaattgttgactgcttttgtaactaaacactcctctcctgtcttccaacgagtggtcatttttgtccgcaacttgaccacagcaatccctgggg

SEQ ID NO: 36575 - DNA, 120 bp, synthetic construct
  source 1..120: mol_type = other DNA
tgcaaacacatgtaacagtcaggagctggattaactctaactggattaacttaaagaattttgttgcaatgtgacattttgttttctctctagtaactggtatgaaccctctgtctcctt

SEQ ID NO: 36576 - DNA, 120 bp, synthetic construct
  source 1..120: mol_type = other DNA
aattgtcagtggtctttactatgttaaatgtaacacactatgtgtctttttgccaagggtgtgacctagccattagaggcttattttaaccatctttggttggaaagcttgccaaaaatg

SEQ ID NO: 36577 - DNA, 120 bp, synthetic construct
  source 1..120: mol_type = other DNA
ccatactgacttttgtgttgaaaaaaaaaaaacagtttttcctctgctctcacactacaacagtcaacataggatagttctgtgaccagttatgtgggaatatttccccacataccaagt

SEQ ID NO: 36578 - DNA, 120 bp, synthetic construct
  source 1..120: mol_type = other DNA
agtcctccgaccccatccacttgggcctcatgtggaaaattgattggataggcatgactgaagcatggacaaccttatagaactgtgattggacaaaaagggcatgctctactactaata

SEQ ID NO: 36579 - DNA, 120 bp, synthetic construct
  source 1..120: mol_type = other DNA
tctttctgttttgttatattgtggaagcaatatatgtgactttgaatagcatagcagctagctgtcctgggctccctcaccactgcccccatctgtcccttacttgtctcttccaggcaa

SEQ ID NO: 36580 - DNA, 120 bp, synthetic construct
  source 1..120: mol_type = other DNA
gttaaatgctacttaaagatatgtttaacctctatgatactgacttttaacctctatgatatgccatttaatcaactgcatatgcaatattatttttttttccgggggcaaggggctcat

SEQ ID NO: 36581 - DNA, 120 bp, synthetic construct
  source 1..120: mol_type = other DNA
gtctcggtgatttccttcatctttttgtcccctgactcctgggctttctttatggcttcagcaatggctgttggaaagaaagaggaagaatgtcctagtgatccacctgctgaacttgtg

SEQ ID NO: 36582 - DNA, 120 bp, synthetic construct
  source 1..120: mol_type = other DNA
acagccttgtttgtgtgtgaattgatggatgtttgcttgcaacccttgttatatttttcagttgatactagcaggagaatgagttggtgctaacgtgcacttttgcttgcttgataatgt

SEQ ID NO: 36583 - DNA, 120 bp, synthetic construct
  source 1..120: mol_type = other DNA
gtgagtgttacatacttttttctcaagagtgctcagttcaagtagttgagggtgcgtaaaatcaaaagcaattagaatgttggtttcagggtttttttttttaatatttacatttgtctt

SEQ ID NO: 36584 - DNA, 120 bp, synthetic construct
  source 1..120: mol_type = other DNA
ttgcccatttttatgcttcatgtaagtggaatcatgagtatgtattcttcgatggctactgttttgttttaggacactttaaactcctatcttcctttcatattgttcacccagcagatg

SEQ ID NO: 36585 - DNA, 120 bp, synthetic construct
  source 1..120: mol_type = other DNA
tcccttgttttatagacaaagaaactaaaattcagacaagttaaattacctccacatgctcacacagctctgtcatgttctagtgcatcaaactctagtctgagtccaaagcccgttgtc

SEQ ID NO: 36586 - DNA, 120 bp, synthetic construct
  source 1..120: mol_type = other DNA
caaatccatgaatctggacgttgaagttatatttgtattcccaccacacaaaatttatgtctgtgccctgtcttcttgggtctattttttaaccagaaattaataagacattgatttgcc

SEQ ID NO: 36587 - DNA, 120 bp, synthetic construct
  source 1..120: mol_type = other DNA
tcaaaataatcatcatcatcatcatcatcatcatcatcatcatctacaatgtcatttcccatccaagcttgacttctacctttactttctgatatggttttgccatgcccccacccaaat

SEQ ID NO: 36588 - DNA, 120 bp, synthetic construct
  source 1..120: mol_type = other DNA
tgcttagtgccttgttagtaaaagaaagaaaacctgaaagtccctgccatggaaggaagaaatagcggggagaaaagggagttggtaagtttcagcatttcagagcttggaggggcaagt

SEQ ID NO: 36589 - DNA, 120 bp, synthetic construct
  source 1..120: mol_type = other DNA
ctgcaagtgcagcatagcctcggcctaggacagcgggagtgcgtggccaaagctgtgagcagaggcacaggtggtggcagacagtagaggcgccccatggggaacatactgacctgtcgt

SEQ ID NO: 36590 - DNA, 120 bp, synthetic construct
  source 1..120: mol_type = other DNA
gatatttaaggattgctttagaataaacaaatgcattatgtgaattaattgattgtacctttatacacaaagcatgtaagtacttgtgtaaacttatactctgcttggtgatgttcggaa

SEQ ID NO: 36591 - DNA, 120 bp, synthetic construct
  source 1..120: mol_type = other DNA
acacctctaggttgaatctaaattttatggttctgaagacattttgcagctgtgctcttattacagtgttgttcttgaatctattgccagtgtgtgatacgttatttacaaccaggtttt

SEQ ID NO: 36592 - DNA, 120 bp, synthetic construct
  source 1..120: mol_type = other DNA
ctactaatgtaattggtaccactgccttgatttatgctgagaaaccagccattgtacccacttttgcttttatataatcatggcaagtgtcaatgaaaaagcaggcaatgactttgtatt

SEQ ID NO: 36593 - DNA, 120 bp, synthetic construct
  source 1..120: mol_type = other DNA
gagggaagagaaggaacggtggatccgttccaaatatgaggagaagctctttctggccccactaccctgcactgagctgtccctgggccagcagctgctgcgggccaccgctgatgagga

SEQ ID NO: 36594 - DNA, 120 bp, synthetic construct
  source 1..120: mol_type = other DNA
actcactggatgctgactctgttgctcttctgagtgctggggtagaggagaggagaggtggagcacagttcttgcttttatgagcttatgttctaggaaattcaaacaagtattttttca

SEQ ID NO: 36595 - DNA, 120 bp, synthetic construct
  source 1..120: mol_type = other DNA
attaaccaaccattgaacttttcagtgtatttttttctgttcttgttttttaactttaaccttttctagatgacggtatgtgtgtgtgtgtgtgtatttacatttgcagcctactttttt

SEQ ID NO: 36596 - DNA, 120 bp, synthetic construct
  source 1..120: mol_type = other DNA
gtcccccagctgacccactgctgtggcttgatgacggtcagcatgctcttccattggagtcacagctcagattgtgttaatccccaaaaaaaagtcctgacatcggtagagaagaaaata

SEQ ID NO: 36597 - DNA, 120 bp, synthetic construct
  source 1..120: mol_type = other DNA
aaagaacgttgcctaaaaagaacataagctcacctagttctgtatctcttacagtgccagaatcccttctccagcattcctgtcattgagttgttgtgtctgtacttacataggtgtggt

SEQ ID NO: 36598 - DNA, 120 bp, synthetic construct
  source 1..120: mol_type = other DNA
gaaggaggcacaacttggagtgaagtctgtggataagaaggttgagagtgccaaggagtcattaaaatttgggagaactgatgtggctgagtcagaaaaggtggacttttttctcttgta

SEQ ID NO: 36599 - DNA, 120 bp, synthetic construct
  source 1..120: mol_type = other DNA
gattctgtgcagtcatttagatatttgggaatcttaatcaggaactcttacctcaagtagcagtgttaggataggggattagaatttcaccccccctcttctgggatttacagaccttgt

SEQ ID NO: 36600 - DNA, 120 bp, synthetic construct
  source 1..120: mol_type = other DNA
ttgtagcttctcaaaattctacttgattgtatattttggaaactatcataaatactgcatcattgctactaagtgattcatgttttgagattatatgaaaagttctgatttctaagccat

SEQ ID NO: 36601 - DNA, 120 bp, synthetic construct
  source 1..120: mol_type = other DNA
ccagcttccagtgatcttgagggaagggacagattcttttcatcattatgccccagaaagtggctagcacagtatctgtcacaatacatatctgttgaatgaatgaagtaattaatagta

SEQ ID NO: 36602 - DNA, 120 bp, synthetic construct
  source 1..120: mol_type = other DNA
ttggttttcagatgttaaataaatgccgtatcatttagtcatggtgtataatcctttttagatgttgctgaatttgatttgctgatatattgtaaggagttttctactcatgtccatgag

SEQ ID NO: 36603 - DNA, 120 bp, synthetic construct
  source 1..120: mol_type = other DNA
tctacatctggaaccatcggcagctgccttcataaggcacctcggtctggcattcggaaaaccaccctgtcttgccagagccgcttggtcttgggtagcaaaagctgtatgcaatctaaa

SEQ ID NO: 36604 - DNA, 120 bp, synthetic construct
  source 1..120: mol_type = other DNA
tccaccccgtaccagatcaggagctgtgccaggaccacattccccttgcggcaggccagatggagcgccgtgcagccgtctccctccccacaggtctcgttcacctcctcacgggagcca

SEQ ID NO: 36605 - DNA, 120 bp, synthetic construct
  source 1..120: mol_type = other DNA
ctgccgctcccgatggtgtcagcatgattctccggggctttcctctctttgtctgggtgactccctttctcagatgtaaacaggttggaccagcgcatggaccgcttgcaaacgggggtg

SEQ ID NO: 36606 - DNA, 120 bp, synthetic construct
  source 1..120: mol_type = other DNA
caatgaaaaacttctgttaacaatactgttctcaaggaatattttctgtttttataacctgggtcatgggttactactgacatctagttggtagaggccatgaatactgctaaactctct

SEQ ID NO: 36607 - DNA, 120 bp, synthetic construct
  source 1..120: mol_type = other DNA
tgctcaaagatttaagagacttggctgactacagacatttagtgattactcaataggtcccaaagctcaggacttgagacagagtttgagtccagtttttgttcgaaacacaatttcctc

SEQ ID NO: 36608 - DNA, 120 bp, synthetic construct
  source 1..120: mol_type = other DNA
acacgagctgtattgttgactgaaacgctcagtagatacctgaaggggaagggaagtgtaagtcaaatttatcaaagtgtatttttttctcagttaaaatgtcaaatgacaaagcactaa

SEQ ID NO: 36609 - DNA, 120 bp, synthetic construct
  source 1..120: mol_type = other DNA
ttttttccctaaaaagaggccagaataataaaagccccaagagggacttgggccatgctttgtttcccacactgcctctgcctttgatgctggaagggccttgtaggcaaaagttcctac

SEQ ID NO: 36610 - DNA, 120 bp, synthetic construct
  source 1..120: mol_type = other DNA
cacttgtattcttgctgtttaagtcaactggaaaacttggctgtgtatggcttgttggcaaataaatgaggatttaacataacattaagggaaataagcaggagtagggcatgtttaaat

SEQ ID NO: 36611 - DNA, 120 bp, synthetic construct
  source 1..120: mol_type = other DNA
tgttgagacggagaaggtaagtaacctccccaaggtcacatgactgctaagggtggggccctggtttgatcccaggtagtctgaattccccaattgcttaagcatgattatcagaaagta

SEQ ID NO: 36612 - DNA, 120 bp, synthetic construct
  source 1..120: mol_type = other DNA
ggaaaggagcgcggcctgggcgtcccgcagggcccccactaggaaagctatgaacgctcccgccttgagcacagccacaggcctgctctggtcacaatgtggggtcgccccgtggacact

SEQ ID NO: 36613 - DNA, 120 bp, synthetic construct
  source 1..120: mol_type = other DNA
gaatctgacccctatttagcacttgctgtgggtggtgccaggacaatcacttgcatgctgggcatgacgagttatggattatcttcagggttcctagggcgctggcttgggaaagatttc

SEQ ID NO: 36614 - DNA, 120 bp, synthetic construct
  source 1..120: mol_type = other DNA
atgctatgacacattacatgacagcagttacgattactgtccccattactatcattatcaagactaggccatctaggagagcactccccaaagccacgggctccagtgatagctctgagt

SEQ ID NO: 36615 - DNA, 120 bp, synthetic construct
  source 1..120: mol_type = other DNA
acatgttccacccatagtactgagtccacttctcaacactgaggactcgaggggcagtcggagaggccacttggtagcttgtgttgatgtttgatcttggggttgtgttctggggcctga

SEQ ID NO: 36616 - DNA, 120 bp, synthetic construct
  source 1..120: mol_type = other DNA
tcctgcctcctccgggggcgctgcggttcaggtggtcctgacccagctgggacccacttcacatccccaagccctgccctcccctgtgtggtgcgagcaggaggagcggccctcaccacg

SEQ ID NO: 36617 - DNA, 120 bp, synthetic construct
  source 1..120: mol_type = other DNA
cctaagccaggacctggagcaggaggaaggactcacccttgcccaggtaccccaggggcaggagggacctggcacacaaggcccacctgattgtctaatcccccccgctggggatgctcg

SEQ ID NO: 36618 - DNA, 120 bp, synthetic construct
  source 1..120: mol_type = other DNA
ctctttggaagcctgtcccctgctgaaaagacaccctacccagggcctgggctcagggtctctggggagcaatccctgacttgggggctgggtggcccctcacagtctcaaaagagaaag

SEQ ID NO: 36619 - DNA, 120 bp, synthetic construct
  source 1..120: mol_type = other DNA
gggaacaattccacgctccccacccctgactctgcaacacagtgcagaattccagttggcaataaaaaactagtagagaagcaactcactgacttcagtttgtaataccttcagaagaaa

SEQ ID NO: 36620 - DNA, 120 bp, synthetic construct
  source 1..120: mol_type = other DNA
atgctatgatacattacatgacagcagttacgattactgtccccattactatcattatcaagactaggccatctaggagagcactccccaaagccacgggctccagtgatagctctgagt

SEQ ID NO: 36621 - DNA, 120 bp, synthetic construct
  source 1..120: mol_type = other DNA
ttggatgtcagatccccgaagaagccatagcctcctgggaaactccatctgacaacgtgagcaaggcttgcccccgttagtgaacatgctgtgctttctgacagctatgaggatggactt

SEQ ID NO: 36622 - DNA, 120 bp, synthetic construct
  source 1..120: mol_type = other DNA
ggctcttctggaagaatagttagtgtctgtgctacatttcctaaaaaactgtttccccggaaactatatgtaactttcaggtgcctcagtgcttcaagacatgctaagggaggaccctca

SEQ ID NO: 36623 - DNA, 120 bp, synthetic construct
  source 1..120: mol_type = other DNA
gagcaagggaaaggagtgcggcctgggcgtcccgcagggcccccactaggaaagctatgaacgctcccgccttgagcacagccacaggcctgctctggtcacaatgtggggtcgccccgc

SEQ ID NO: 36624 - DNA, 120 bp, synthetic construct
  source 1..120: mol_type = other DNA
cctaccgcattcaaatgatttctagaaatgtttttgttgtagccttgatcaatttcagtcgataaagcagcagatagtaagggaacaattccacgctccccacccctgactctgcaacac

SEQ ID NO: 36625 - DNA, 120 bp, synthetic construct
  source 1..120: mol_type = other DNA
agaaggcagttctgtctcagaggacaaaaggcctgggagcacccagacagacagtcactgcatggaggtcactcccctcccagtggccactgtggagacatttcacagaaatgcttgctg

SEQ ID NO: 36626 - DNA, 120 bp, synthetic construct
  source 1..120: mol_type = other DNA
cacagtgcctggcacatgctatgacacattacatgacagcagttatgattactgtccccattactatcattatcaagactaggccatctaggagagcactccccaaagccacgggctcca

SEQ ID NO: 36627 - DNA, 120 bp, synthetic construct
  source 1..120: mol_type = other DNA
gaccaaggcccgccggccaccaccccggccccaccggcgagcagagaccaaggcccgcctgccaccacccaggccccagagaccagcagagaccaaggtccctgaggagatccccccaga

SEQ ID NO: 36628 - DNA, 120 bp, synthetic construct
  source 1..120: mol_type = other DNA
cctaagccaggagctggagcaggaggaaggactcacccttgcccaggtaccccaggggcaggagggacctggcacacaaggcccacctgattgtctaatcccccctgctggggatgctcg

SEQ ID NO: 36629 - DNA, 120 bp, synthetic construct
  source 1..120: mol_type = other DNA
ctctttggaagcctgtcccctgctgaaaagacaccccacccagggcctgggctcagggtctctggggagcaatccctgacttgggggctgggtggcccctcacagtctcaaaagagaaag

SEQ ID NO: 36630 - DNA, 120 bp, synthetic construct
  source 1..120: mol_type = other DNA
gtctccatcatgttctgccaagagagttattttacagtgacaaaacttctcttctggtgccctgacacatcctaggactttgatgctggtaattctttccccccagcaaattttggttct

SEQ ID NO: 36631 - DNA, 120 bp, synthetic construct
  source 1..120: mol_type = other DNA
tttgtaaatcccacataagtaagcgattctcatggaagcttttcttgactttggccacactcttgcatccacaaccaacttgtgctaccaagtgaacaaactatgactaaaggcctgttc

SEQ ID NO: 36632 - DNA, 120 bp, synthetic construct
  source 1..120: mol_type = other DNA
gcagggcccagcaggaacctggcacatgcccgcagttccgctgaggtccagttagcacagcggtggtggagcctgcacagggggatggtcttgggtcctgcactggggccgatgccgggc

SEQ ID NO: 36633 - DNA, 120 bp, synthetic construct
  source 1..120: mol_type = other DNA
gctagtgactatggacaagagtagggtgcaggctcctcacagcagtggccagaagtcggttttctcccatcccagcctggccagggagttgggttggggagacctgcacctgggacacca

SEQ ID NO: 36634 - DNA, 120 bp, synthetic construct
  source 1..120: mol_type = other DNA
tcctgcctcctccgggggtgctgcggttcaggtggtcctgacccagctgggacccacttcacatccccaagccctgccctcccctgtgtggtgccagcaggaggagcggccctcaccacg

SEQ ID NO: 36635 - DNA, 120 bp, synthetic construct
  source 1..120: mol_type = other DNA
cgttttagctcgagctagtagagtgtcagcaatggtgttagatgtacccgtcagtgcatgtgtcagtgcatggaacaggctaaccctttgtgactgagaagaggacatcccacacttcag

SEQ ID NO: 36636 - DNA, 120 bp, synthetic construct
  source 1..120: mol_type = other DNA
ggtatcatggacataggacagacagcggggcagaggagggatcctctcactgtgaggaactctgaaccaaagatgcttgtctggaagtgggttctcagctgagacccagtgaggaggtct

SEQ ID NO: 36637 - DNA, 120 bp, synthetic construct
  source 1..120: mol_type = other DNA
attcaggactcacatatagtttcgaaaattgagggtgtcaccctctgacctgttcaaggcattgtcagggcaggctcgatacccccatccatcactgctggaaaaattctgagattatga

SEQ ID NO: 36638 - DNA, 120 bp, synthetic construct
  source 1..120: mol_type = other DNA
gctgagtagcagtggttgagggtatcatggacataggacagacagcggggcagaggagggatcctctcactgtgaggaactctgaaccaaagatgcttgtctggaagtgggttctcagct

SEQ ID NO: 36639 - DNA, 120 bp, synthetic construct
  source 1..120: mol_type = other DNA
tttcgaaaattgagggtgtcaccctctgacctgttcaaggcattgtcagggcaggctcgatacccccatccatcactgctggaaaaattctgagattatgatggaccacatttgtatcca

SEQ ID NO: 36640 - DNA, 120 bp, synthetic construct
  source 1..120: mol_type = other DNA
gtgtgtgatgactactgggacaccaatgatgccaacgtggtctgcaggcagctgggctgtggctgggccatgtcagccccaggaaatgcccagtttggccagggctcaggacccattgtc

SEQ ID NO: 36641 - DNA, 120 bp, synthetic construct
  source 1..120: mol_type = other DNA
gtacgtttgaatagagaccaactaaagatggctgggactggttcagtctacatataattgaaaggtaaatcactaggaaagggaaggagtctctgggtttcaagatgaaatagaagtcat

SEQ ID NO: 36642 - DNA, 120 bp, synthetic construct
  source 1..120: mol_type = other DNA
gtgtcttggcagctgtccttggaactcatttttcttttcctgcagttttcccgatatgagctggactctggttctgtgaacacaatgagagtttgagaaagtgcctccaactgaacaccc

SEQ ID NO: 36643 - DNA, 120 bp, synthetic construct
  source 1..120: mol_type = other DNA
actgtccacacctccacagtgcttaccaccacgaccaccacaaccagggccaccggctctgtggccaccccctcctccaccccaggaacagctcacactaccaaagtgccgactaccaca

SEQ ID NO: 36644 - DNA, 120 bp, synthetic construct
  source 1..120: mol_type = other DNA
cggccactacgatcacggccaccggctccaccaccaacccctcctcaactccagggacaacacctatccccccagtgctgaccaccaccgccaccacacctgcagccaccagcagcacag

SEQ ID NO: 36645 - DNA, 120 bp, synthetic construct
  source 1..120: mol_type = other DNA
agaccaccacacccgtggccaccatgtccacaatccacccctcctccactccggagaccacccacacctccacagtgctgaccacgaaggccaccacgacaagggccaccagttccacgt

SEQ ID NO: 36646 - DNA, 120 bp, synthetic construct
  source 1..120: mol_type = other DNA
cctaattttatttccatgatgtgtttccaaaaacacattcacataactaatgctactttgttgggagagtatagccccactaagggattctaccaggccaaaggtccctcctactttatc

SEQ ID NO: 36647 - DNA, 120 bp, synthetic construct
  source 1..120: mol_type = other DNA
aagccaacagtgatatctttctatgtgaaattttgagaagcatgtgtattggatgtgaccatcaagatgtaccctatttcactgcaacacctagaagttttcttgcatggggtgctcaga

SEQ ID NO: 36648 - DNA, 120 bp, synthetic construct
  source 1..120: mol_type = other DNA
cttctccaggaacttatggtgggcaaatgggtgactcttaaaataggaacttgatatcaaaccgtaatgtttctgggagtcaaaaaaaaaaaaaaaagagaagaaaacattgagaaaaaa

SEQ ID NO: 36649 - DNA, 120 bp, synthetic construct
  source 1..120: mol_type = other DNA
aaagagaaggggtgcagaaagggagggacacagattccaaagacatacctggcctgtctgaagtttgcctcctccaggaagggaaggcagcattctcccggtgctgtctccctcctcccc

SEQ ID NO: 36650 - DNA, 120 bp, synthetic construct
  source 1..120: mol_type = other DNA
taccaaggggtctttaaaacatgttcagaaaatttaaagaaataaaatattgacaatgttaaaatgtatacatatgcttaaacgtctcttttgatctatcaaatttgagaattgtctagg

SEQ ID NO: 36651 - DNA, 120 bp, synthetic construct
  source 1..120: mol_type = other DNA
aataatgttgttttgtgtccaacagaaaaatgggtggctcagcaccaccagatagcagctggagaggaagtctcaaagtgtcctacaatgttggacctggctttactggaaacttttcta

SEQ ID NO: 36652 - DNA, 120 bp, synthetic construct
  source 1..120: mol_type = other DNA
gggatttccatttacatctctccagccatgaataaatttcatttattctgtatctttgacaacacacaatattgtgtgtctttaaattttggtatttttttatgagggcctgtggtacaa

SEQ ID NO: 36653 - DNA, 120 bp, synthetic construct
  source 1..120: mol_type = other DNA
aatccttccttttgcaaattaattctttacagtttctaaattttaaagcatgatggaagaatctaagccagaatccaatctgatccttcttttttttttttttgctccaaatgtgtaagg

SEQ ID NO: 36654 - DNA, 120 bp, synthetic construct
  source 1..120: mol_type = other DNA
ctttatccaatctccaagaaaatagacccacaggaattttatgcttcctttacagaaatcgatcttcagagccatcacttacccggtgttcctcagcagcccactcaatgggacggtgtc

SEQ ID NO: 36655 - DNA, 120 bp, synthetic construct
  source 1..120: mol_type = other DNA
tatcccaggacttaaaattaaattaaattaaaaacaaagacccaaatcaaaacaaaatttaaaaaaaagccaaccaaccaaataaacaaagaaaaagactgcaattaaactaatcaagtt

SEQ ID NO: 36656 - DNA, 120 bp, synthetic construct
  source 1..120: mol_type = other DNA
ggtatcattgtgtagatttcagataatgagatatttttaacactctaatttattattgtgtaaaggaaagatgatataattttatcaatatgtttcactcaccctggagttcttttaatg

SEQ ID NO: 36657 - DNA, 120 bp, synthetic construct
  source 1..120: mol_type = other DNA
atcttttctttaacgctttttttttttttggcatttcttctcaattgttttacccgtttattgtctatttttctacaaaccccagtcattttctcttgaaacctcttatctatttgagtg

SEQ ID NO: 36658 - DNA, 120 bp, synthetic construct
  source 1..120: mol_type = other DNA
cagctttcagatctagtctgcaaattgcaaattttgaagagacagcaaataagacctttgcaacaagaattttcaaagtaattcaacatttttaacgttcgctttggcttacgttataac

SEQ ID NO: 36659 - DNA, 120 bp, synthetic construct
  source 1..120: mol_type = other DNA
gcagcattgtttctgggtgagtctgtgaaggtgtttccagaggagagagacatgtgagttggtgagctgagtgggaccatcatccctcaatgtgagtgggcaccattcaatcagctggta

SEQ ID NO: 36660 - DNA, 120 bp, synthetic construct
  source 1..120: mol_type = other DNA
ggtttccttagaaacattgttcaaacgtgtagaatggagctgtggagctggtggccagcaccaagaacacttttcaaagtcaggttatctgaaagccagtttctcagaatattgatgata

SEQ ID NO: 36661 - DNA, 120 bp, synthetic construct
  source 1..120: mol_type = other DNA
gtgtggggagcgcaagcattcacctccggcaagcattactgggaggtggatgtgaccctctcctccaactggattctgggagtctgtcaagattccaggactgcagatgccaatttcgtt

SEQ ID NO: 36662 - DNA, 120 bp, synthetic construct
  source 1..120: mol_type = other DNA
aatcaaagagagaccactaagaacatcgtcaatcattaatacataaatcttgaacttcctgagatttttatccctaaaggaagttatttatcaatagcctggttacagtttttttaatac

SEQ ID NO: 36663 - DNA, 120 bp, synthetic construct
  source 1..120: mol_type = other DNA
ggagaaaaacgttaaaataataactcatctttcacccatgagactggtgaagttttgtaaattcaatgagagaccccaggttagtgggtttatttggttaatcagtgatttctcttagag

SEQ ID NO: 36664 - DNA, 120 bp, synthetic construct
  source 1..120: mol_type = other DNA
aaaaacattaaaataattttctctttgtggatgtatattttgagggtatgatagctaagattagtttgttgaaaagtatttcatgagaacctagtctatgttgaatattaaattagaaaa

SEQ ID NO: 36665 - DNA, 120 bp, synthetic construct
  source 1..120: mol_type = other DNA
tgagcaggctggcggggcagctggaggaaggccttgcaggttcctggatttgggtgccgggtgggctgagaggacagtccctgtcactgggactgggcacaggtgcagagaggctgagac

SEQ ID NO: 36666 - DNA, 120 bp, synthetic construct
  source 1..120: mol_type = other DNA
ctctcattaggaaccaaaacgctcccctttcccacgaggaagcctcatttttaactaaaagggaggagccaactcctcctcctgccctagaagccaactcctcctgcctgcactcccagg

SEQ ID NO: 36667 - DNA, 120 bp, synthetic construct
  source 1..120: mol_type = other DNA
agtgaatacattgaactgtgttctaaaccataacatgagatctctaaaatagaacaagtgcatatacattgctcatgcccagacattgaaagatattgatatcatcacaattatgcaata

SEQ ID NO: 36668 - DNA, 120 bp, synthetic construct
  source 1..120: mol_type = other DNA
ggacctctagaaaaaactcttaacacatactttagcaaaataattcagaaatttgagaaaatatctattcataaaaatgtggcatataaatgcataatagtaaagtgaccagggaataaa

SEQ ID NO: 36669 - DNA, 120 bp, synthetic construct
  source 1..120: mol_type = other DNA
gcagggagcccagatgtgaatctgtacataccaagctttctaatttttcagtagtttccaagcatctttttttttttcttgtttcttcattgatgtcttttttttttttttttttttttt

SEQ ID NO: 36670 - DNA, 120 bp, synthetic construct
  source 1..120: mol_type = other DNA
gaacagattgagaatgaatcgggatttacctgctattagggagggagattcttcctggctgacatctagaagagaagcacaggatgatgggaacagttacatcttgaaccttacaagact

SEQ ID NO: 36671 - DNA, 120 bp, synthetic construct
  source 1..120: mol_type = other DNA
tgccaagcgtgcctttgttcactggtacgtgggtgaggggatggaggaaggcgagttttcagaggcccgtgaggacatggctgcccttgagaaggattatgaggaggttggagcagatag

SEQ ID NO: 36672 - DNA, 120 bp, synthetic construct
  source 1..120: mol_type = other DNA
tggctgctagaagaggtttgctttaggggttccgaagcatcgcctccctgctacctctctggcagtgggagtggtgaggccccattccttccacacagacacatcctgctttcccgcctc

SEQ ID NO: 36673 - DNA, 120 bp, synthetic construct
  source 1..120: mol_type = other DNA
taaccactccttagctattgcagaagtttgctgaaggccctggggctctacagtcatcacatggtaaaaacagccaggcctgtgtccttcccttcaggatggcaagttgtcctagcctcc

SEQ ID NO: 36674 - DNA, 120 bp, synthetic construct
  source 1..120: mol_type = other DNA
cttttttggttaaaaaaagtgtactatgtaaatgcagcttcaagcagttatgtgcagagtttgcagggaaataactatgactcagtaaatccatatccaggaaaagtactgttcacactc

SEQ ID NO: 36675 - DNA, 120 bp, synthetic construct
  source 1..120: mol_type = other DNA
caaattcctcctatatctatgtaatgagactttgtaatttaaaaataaaataaaatgaaaacctgctttattttgtttggagtggggaaagaaggaaatgcttgccttgcttaatctgtc

SEQ ID NO: 36676 - DNA, 120 bp, synthetic construct
  source 1..120: mol_type = other DNA
taatcgagctggcagagaacatcaggtgagtggggctctgctgactacactcaagtccttgtgctcagaacaggcccccctgagctccaggtcggcgtgctatccgtcagcgggttgaag

SEQ ID NO: 36677 - DNA, 120 bp, synthetic construct
  source 1..120: mol_type = other DNA
tgtggctgcaggtgacaggaggagagaggttcaatggcttgtttgctgatgaggacgatgacacaactttcacagggttccttctgttcagcagcccgtgacagaggagagtttaaaaat

SEQ ID NO: 36678 - DNA, 120 bp, synthetic construct
  source 1..120: mol_type = other DNA
aagactacccctcactttaggtgccaactacaagtagtaggtgtgtatgtgacccacacgtctgtctgacttggctacaaattggaggttctcacaatctcctccataagttgaataatt

SEQ ID NO: 36679 - DNA, 120 bp, synthetic construct
  source 1..120: mol_type = other DNA
taaaattttgttatgatccccccaaaacttgttatgtaagatatatatctactgataggacattttgaaaattagtatcagctttatatttgggcacatgatttcactgagatggttctt

SEQ ID NO: 36680 - DNA, 120 bp, synthetic construct
  source 1..120: mol_type = other DNA
tgtcaaaagttttggtaacattttgtatcttatttctcctcagactgtgtcttccagaagattttctggaatccgtctggtgggcaagctctttgtaaataatgatgccttagaatagtt

SEQ ID NO: 36681 - DNA, 120 bp, synthetic construct
  source 1..120: mol_type = other DNA
aaaaggtaacttgcctagttggagatggcgtctgatctcaggcaggctaacaatggagcccacagtttttactactatcgggggaaaggaccaacactatagagtgaaatagattggatc

SEQ ID NO: 36682 - DNA, 120 bp, synthetic construct
  source 1..120: mol_type = other DNA
atggatagcagtcactcaagtcataaatattaaattaataagattaatgtatacttattgggatatagtgatcagtatgaacacaaatcagttcggtagaaaaacaattatttggactgg

SEQ ID NO: 36683 - DNA, 120 bp, synthetic construct
  source 1..120: mol_type = other DNA
cttaacagataactatcaaatgtcttttagatactagccattttttctaatgctacagagcacaaacaattaaaagtagagacaggagcttgttattatcattgtcattttcattatttt

SEQ ID NO: 36684 - DNA, 120 bp, synthetic construct
  source 1..120: mol_type = other DNA
tgccagcagaatattgtaactactttttaatgagataaaaatgtataacaacatcactattattgtacagagaaaaaagtgaacataaaaaggaatttaaaaagacaatatgacaatatg

SEQ ID NO: 36685 - DNA, 120 bp, synthetic construct
  source 1..120: mol_type = other DNA
gaaacagagcaaaagagataagaaacagaagtttaagcaggagagataacatgccagatggttgactgccttttagttattaggaggaactctgacacatactcagcgtgaaatgggagg

SEQ ID NO: 36686 - DNA, 120 bp, synthetic construct
  source 1..120: mol_type = other DNA
tgaagacgccgttagggagaagatgccctccattggctcaaatattgctgacagattaaataaaatgaggtgtaagaaaaaaatgcatagatttatttacagaaaaaagtagtgataacc

SEQ ID NO: 36687 - DNA, 120 bp, synthetic construct
  source 1..120: mol_type = other DNA
cacctagcaagtaagaaagttaggaattaaacccagtattgtgtgaatctaaagcctaacttttttctctttatcacccacctacggcttgtcttcattaaaggaaaagtgtatccactt

SEQ ID NO: 36688 - DNA, 120 bp, synthetic construct
  source 1..120: mol_type = other DNA
cgccaggagggtatgtccccatcatcctcccacatcccacctcctcccagcccaggcctggttacctcttttgcttgtccttcttgttcatgtcagtgtccttgagcatgacgatgagat

SEQ ID NO: 36689 - DNA, 120 bp, synthetic construct
  source 1..120: mol_type = other DNA
gcctgctgggacctcccaggagatgtgtgggagcagacagcaggtgggctcagacactctaatgggcacttgtgccttgttctgtccctgtcatttgaggccattttggccaatgggaaa

SEQ ID NO: 36690 - DNA, 120 bp, synthetic construct
  source 1..120: mol_type = other DNA
caaaccctgtggtggtgaatttgcatatgtaaacctgttaaactaatacacagtctttcttttctcataatattgtcgcacttgcactttatgtcctaagttttctagtaatcttgaatg

SEQ ID NO: 36691 - DNA, 120 bp, synthetic construct
  source 1..120: mol_type = other DNA
atatctctaaaaaggagaaatttcccaggaacatgtacatgggagtgtgaagtcgccggtcacaccacaggacaaaagcaatggctccattccctgttatagtcagtgcatatattgtag

SEQ ID NO: 36692 - DNA, 120 bp, synthetic construct
  source 1..120: mol_type = other DNA
tgaatttctattgctgctgttgttagcttaagtgattatctaatgttactcaccaatattgatttttaatattaatattgtaaagctgcaatgttttctgtagaaagcaaaggctttaag

SEQ ID NO: 36693 - DNA, 120 bp, synthetic construct
  source 1..120: mol_type = other DNA
aaaaattaagtcaatcctggcataactgcagaccaggccctggaatgagcaacccaccagcattatctgcatttctaggaacttgggctagaaggggaggaatggggttggaagggttag

SEQ ID NO: 36694 - DNA, 120 bp, synthetic construct
  source 1..120: mol_type = other DNA
tgggtagggaagggccctcgtccagtttgctgtagaaagatcagtctgccactgtatggcacatggatggcaggggcagagtgcaggtggagagaacagaaggtgggcagggcgggggag

SEQ ID NO: 36695 - DNA, 120 bp, synthetic construct
  source 1..120: mol_type = other DNA
ctcagtttggccttggctagcaaaagatgcaaccacttatgtaaaaaataaaaataaaaaagttaaaaaaatcatttctgctaactggaattttttttttttttgcagccacatgagttt

SEQ ID NO: 36696 - DNA, 120 bp, synthetic construct
  source 1..120: mol_type = other DNA
aaaagaactaatgtcccaaaactagcaaatctgttgttagtagcaaaacttatttttgatattggaaagataatcaattcttatgaaaaatatcaaatgcttttcctttggattgaggcc

SEQ ID NO: 36697 - DNA, 120 bp, synthetic construct
  source 1..120: mol_type = other DNA
gcagcttgcttctgaaatacagccacgcagcagcacctgctccaccagaatagacagtgcctgaccagtattcctcttactataggaagcaaaaaattccaactctgtatctttatttca

SEQ ID NO: 36698 - DNA, 120 bp, synthetic construct
  source 1..120: mol_type = other DNA
cttaaatttgatcatatatacagaactataactgtataattttaagatgtaattatcatgtcattagtatatcactgaaatttttgtaaagtttgcttgattccagctgtttgactgaat

SEQ ID NO: 36699 - DNA, 120 bp, synthetic construct
  source 1..120: mol_type = other DNA
ctgagcatataagcataggtaagggaactaaaaaatgttgtaacttcaaagtcactgtgtgaatccccatgaagacttgagggatctgaatcagtaagggcaccttggtgtcaaaggtca

SEQ ID NO: 36700 - DNA, 120 bp, synthetic construct
  source 1..120: mol_type = other DNA
aggaactgtaataaagttattttaaaagctaatttgatatactttaccaatttgacatcttgcctgtccatgcagaatcaaacatttacatgcgctaaaagacataagcatcttgggtgc

SEQ ID NO: 36701 - DNA, 120 bp, synthetic construct
  source 1..120: mol_type = other DNA
ctgtattcttaataactccatggttttgagtgtttaaacctgccatcctgattaagccaaagctctacaaacttaagagacatactggatagcccacaatatagcttcaattgacaaaaa

SEQ ID NO: 36702 - DNA, 120 bp, synthetic construct
  source 1..120: mol_type = other DNA
tttacatttgttagggaaaaaaaaacttggcagggaaaaattgaaaaaaaaaaaagtattaccttttacaaattcagtgttttttttttttaaaaagcattaaccacaagtgcactgaaa

SEQ ID NO: 36703 - DNA, 120 bp, synthetic construct
  source 1..120: mol_type = other DNA
tataataagatgtatacacaataaaatctaccagaagaggtaaacagaagccctctacttctgaagagggtaaaagttcacagaagatagccatccacaggtataaaaataaataataga

SEQ ID NO: 36704 - DNA, 120 bp, synthetic construct
  source 1..120: mol_type = other DNA
acatcttaagaaaaacgaaccttcctattcaaagatatgaaccatacttcccatttcagtttccttttaaggttactcagtaaagaacgtgtttacatagggtacacatcgatataaaat

SEQ ID NO: 36705 - DNA, 120 bp, synthetic construct
  source 1..120: mol_type = other DNA
gtcatatatacagatgactcccttctgtacaccattctgccattagttgatgtatattttacttttgcttttcccttcccatttcactactagataaaaatcctaatcttgagttctaaa

SEQ ID NO: 36706 - DNA, 120 bp, synthetic construct
  source 1..120: mol_type = other DNA
gatacacagatcaatggaacagaatagacaactcagaaaaaaggccacttacaaccaaatgatctctgagaaaggatacaaaaacatacactggagaaagtacacattattcaacaaatg

SEQ ID NO: 36707 - DNA, 120 bp, synthetic construct
  source 1..120: mol_type = other DNA
aagacatttgatagttatttgttaagtggacaagtgaaaacatagaaatgttttctttgtaaattctgttgaaaaagcacagaaatgaaatagagacacctctattatgagcaccttaaa

SEQ ID NO: 36708 - DNA, 120 bp, synthetic construct
  source 1..120: mol_type = other DNA
cagactcaaactctgagccagcagatgtttgttaggataatgctttatattgatgttcaattccagctgacatgggagaccaaaactctacttttattttttttcagttttcatgaagaa

SEQ ID NO: 36709 - DNA, 120 bp, synthetic construct
  source 1..120: mol_type = other DNA
ctgtattcttaataactccatggtttttagtgtttaaacctgccatcctgattaagccaaagctctacaaacttaagagacatactggatagcccacaatatagcttcaattgacaaaaa

SEQ ID NO: 36710 - DNA, 120 bp, synthetic construct
  source 1..120: mol_type = other DNA
aatgttaaattactattaggttcgcacaaatgtagttgtgattaatggcaaaaatcgcaattatttttgcaccaacctaatagtaacattgaaacacaatattagttattcaacatcaga

SEQ ID NO: 36711 - DNA, 120 bp, synthetic construct
  source 1..120: mol_type = other DNA
ggtctcccacatgccgccctcaggctggggagggatcgaagagcgcaggaactatcctagaccttcagcaaggcagctgtcatacgaacagctgtcatacggaaaagtggccagattatt

SEQ ID NO: 36712 - DNA, 120 bp, synthetic construct
  source 1..120: mol_type = other DNA
gatacacagatcaatggaacagaatagacaactcagaaaaaaggccacttacaaccaaatgatctctgagaaaggatacaaaaacatacactggagaaagtacacgttattcaacaaatg

SEQ ID NO: 36713 - DNA, 120 bp, synthetic construct
  source 1..120: mol_type = other DNA
cagactcaaactctgagccagcagatgtttgttaggataatgctttatgttgatgttcaattccagctgacatgggagaccaaaactctacttttattttttttcagttttcatgaagaa

SEQ ID NO: 36714 - DNA, 120 bp, synthetic construct
  source 1..120: mol_type = other DNA
gggaaaaaaaaacttggcagggaaaaattgaaaaaaaaaaaagtattaccttttacaaattcagtgtttttttttttaaaaagcattaaccacaagtgcactgaaaaaaactgtaccctc

SEQ ID NO: 36715 - DNA, 120 bp, synthetic construct
  source 1..120: mol_type = other DNA
ccgttacaggtaagccaagccgttatgcgcgtgcgggggcgcgcgtgcggggcgcgcgcctcagacgttatgcggcgtgtgcgtgaggcgtgcgcgtgtcattgcacgtggtccaggaag

SEQ ID NO: 36716 - DNA, 120 bp, synthetic construct
  source 1..120: mol_type = other DNA
tttctgagtaattttaaagatttctttataggctaaggatacaaacctttaatctgtcattgaggttacaaagatcttctcccagtaagtaatttgtcacttcactttatttatttattt

SEQ ID NO: 36717 - DNA, 120 bp, synthetic construct
  source 1..120: mol_type = other DNA
agtaagggcagatcgccttcatctactttgggactaagctggttcaaagcaggttttaggttttctgatggctggtctatgttttattcatctggactcccaggggtggcccttccaggg

SEQ ID NO: 36718 - DNA, 120 bp, synthetic construct
  source 1..120: mol_type = other DNA
agttcccccagtctggttcttattccctgcaaagagtagggagcctgtaaggtcacctgttgagcaagctgggggagaaaagtagggtggggctgggaggatcaggatgagaagctcatg

SEQ ID NO: 36719 - DNA, 120 bp, synthetic construct
  source 1..120: mol_type = other DNA
ctcccccgccctgcccaccttctgttctctccacctgcactctgcccctgccatccatgtgccatacagtggcagactgatctttctacagcaaactggacgagggcccttccctaccca

SEQ ID NO: 36720 - DNA, 120 bp, synthetic construct
  source 1..120: mol_type = other DNA
ttggccctctgatcccacccacagagggaggtctttggggcgaccaggtgagctggcccttgtgggaggatgtaactgactcctgagcctggcgagccaggcagcccctcgccaacgtcc

SEQ ID NO: 36721 - DNA, 120 bp, synthetic construct
  source 1..120: mol_type = other DNA
gtccctagcagatggaggggtaggattcaaacccagaattcttagccagtacctggcagttcttccacaatcttaacaattaccctccaccaccccttgggccctctgtccccaggagcc

SEQ ID NO: 36722 - DNA, 120 bp, synthetic construct
  source 1..120: mol_type = other DNA
actgagtatgaagtggtagttaagaggctggagagcctagctgaatgtttggcactctcacagggctgaaatgacctaatgagaatttgggtcccaggaaggagatgggaccttggtggg

SEQ ID NO: 36723 - DNA, 120 bp, synthetic construct
  source 1..120: mol_type = other DNA
ggtattgtgattatataggagaagtcctggttcctagaagatatctgcgaaagtacttaacagtgaaatgctctgatactgccaacttactttgaaatgattcagggggaaaaagggcac

SEQ ID NO: 36724 - DNA, 120 bp, synthetic construct
  source 1..120: mol_type = other DNA
cccacagggtctctgataacccggtcccatgggtgggcctgtcccggggcaggggcagtggtggcattctggggacatgtctcttgcagtaccatctctgcctctgcctggttagatctc

SEQ ID NO: 36725 - DNA, 120 bp, synthetic construct
  source 1..120: mol_type = other DNA
tgggatgcatatagatggttaaaaaaaattactacagtgaagcaaattaacgtatccttcaactcagatagttacccgttttctttttgtttggtggcaagaggagcttaaaatctcatt

SEQ ID NO: 36726 - DNA, 120 bp, synthetic construct
  source 1..120: mol_type = other DNA
agcctctggctcttaaataacaatatcatccagaaatttaaggactcagctctggtcaaggtggcaaagggtctgtttgtctttcctcgttagacagaggtcttgtcctgctaccctaat

SEQ ID NO: 36727 - DNA, 120 bp, synthetic construct
  source 1..120: mol_type = other DNA
aaatgagattttaagctcctcttgccaccaaacaaaaagaaaacgggtaactatctgagttgaaggatacgttaatttgcttcactgtagtaattttttttaaccatctatatgcatccc

SEQ ID NO: 36728 - DNA, 120 bp, synthetic construct
  source 1..120: mol_type = other DNA
tagaggatccacatcagttaaaaagtttccaaataagagtgactctgagttctgcagagtgaaaagattgggttcaaaccaaacacttgcaagatcttgagtaagatacttaatccctct

SEQ ID NO: 36729 - DNA, 120 bp, synthetic construct
  source 1..120: mol_type = other DNA
gaacactaggtgaggctgcaggagctggaggagaggctggggaagctggggcagaaggccgagctcttggggggagcaggcggaggtgtgtgcaaaccctggagatcatacagaacgacc

SEQ ID NO: 36730 - DNA, 120 bp, synthetic construct
  source 1..120: mol_type = other DNA
gggtgacagagcgaaactccgtctcaaaaaaaaaagtttcttccttacatgtatgtttctattagttttcttcttggtctttctcatttagtcttgtgttgtcttttggcattcatagta

SEQ ID NO: 36731 - DNA, 120 bp, synthetic construct
  source 1..120: mol_type = other DNA
tgtccaggcccgccacacctcggggtgggtgaccagaggcggtggtgccataaaaacacgtttcctgggagatccacccccaaagctccaaacattccagggctggtgatttggggaagc

SEQ ID NO: 36732 - DNA, 120 bp, synthetic construct
  source 1..120: mol_type = other DNA
taatttattacattacagtggcatcacaccagcagtcaataaggccactctagggaaaaatctttcagtatttccattacacattctgtttataataattcataaactggtaaaattcat

SEQ ID NO: 36733 - DNA, 120 bp, synthetic construct
  source 1..120: mol_type = other DNA
aacgcaccggctcctcgaagacgctctgtggcttggccagctgctgaaggctcttgtgctgctcctgaatcctctcctcctgcttccgaagcctctcttcctgctcccgaatcctctctt

SEQ ID NO: 36734 - DNA, 120 bp, synthetic construct
  source 1..120: mol_type = other DNA
tgaaattctaaggtaaaattatcctcaacctagaaatacataatcaagcaaactatcaatcaagtgtgagggtagaatatgagagacgtgaataccgatggggatgtgatatgcagcagg

SEQ ID NO: 36735 - DNA, 120 bp, synthetic construct
  source 1..120: mol_type = other DNA
attttttaaatctagtggtttttctttttcctttttccttaggtcttaattatttccccctttttgtttgctttgcttttcctagtttagtggatcaatgtaatttaaattgctttttaa

SEQ ID NO: 36736 - DNA, 120 bp, synthetic construct
  source 1..120: mol_type = other DNA
gctgcagcacctgaggaaggaactagagagagtggcaggagagctccaggcccaggtcaaaaacaatcagcgcataagtctcctgaaccagcgacaagaagagaggattcgggagcagga

SEQ ID NO: 36737 - DNA, 120 bp, synthetic construct
  source 1..120: mol_type = other DNA
ttatcagaggcttgactgttttattatctcagtcttttgaaagaatcctccttcagttttattttttaaatctagtggtttttctttttcctttttccttatgtcttaattatttccccc

SEQ ID NO: 36738 - DNA, 120 bp, synthetic construct
  source 1..120: mol_type = other DNA
tatcaggaaacgtgtctatacaatcacagagttatattttctcacagacttctttacaaagtgaaatatgtttttgtacctctgggtttctgttcgggacatattttgtgcgatatttat

SEQ ID NO: 36739 - DNA, 120 bp, synthetic construct
  source 1..120: mol_type = other DNA
tagacctcttgtcttgagtcttatatctcacgttatttctaaatgttttttaaattttcagttctggaatattttcttatctttcgactttcaggaaattttatttggactgtcataact

SEQ ID NO: 36740 - DNA, 120 bp, synthetic construct
  source 1..120: mol_type = other DNA
tcccgctccattactgggccctcatctcctgccgccccaagcttgatctccgtgggctctttgggctctcatctccaaggagccaggccccaccctcgccagtcatccttgggtgacttt

SEQ ID NO: 36741 - DNA, 120 bp, synthetic construct
  source 1..120: mol_type = other DNA
tgtgcccattcttgcagttgaaggagtcatttcaacaactccaattagaaagagatgagtgtgctgaacatatagaaggagagagggcccggtggcatcagaggatgagtaaaatgttgc

SEQ ID NO: 36742 - DNA, 120 bp, synthetic construct
  source 1..120: mol_type = other DNA
tggtgaaaaaacaagaacttcgcttcattcaatactggcaagagagatgccatcagtgagtgggaggccagggcacggcagggggagctacagggccatcagaggggccccagaatctga

SEQ ID NO: 36743 - DNA, 120 bp, synthetic construct
  source 1..120: mol_type = other DNA
ttcgcatcaacctatttcctgctgtgagcaattggctgtgataatttaaggagccactagaggtcattcaagcactagaaaaaaagttgtgcaagttttaagaatttgtttcaacttcca

SEQ ID NO: 36744 - DNA, 120 bp, synthetic construct
  source 1..120: mol_type = other DNA
tctatacgactcctgaggcacactggactggtcccccctaccccggtgcctctgggctacccccatcaaagttttgtcagtcagccccaccccttcagcaagcagcccagtccttgccct

SEQ ID NO: 36745 - DNA, 120 bp, synthetic construct
  source 1..120: mol_type = other DNA
cttcggaagcaggaggagaggattcaggagcagcacaagagccttcagcagctggccaagccacagagcgtcttcgaggagccggtgcgttgcccaaactggggagcttgccctcctccc

SEQ ID NO: 36746 - DNA, 120 bp, synthetic construct
  source 1..120: mol_type = other DNA
gatgaaggtagggtgtgcaacatctctgtgggggtgggggtgggggtgggtgtgagggtgggcgcaggcagcggcatggcagctgagcacccctccctccaggtgaagctgctggagctg

SEQ ID NO: 36747 - DNA, 120 bp, synthetic construct
  source 1..120: mol_type = other DNA
atagaattttaaactgtgagttccactgaatacattttaatttctgtaggaagaatcaaaacacctatttaaagatggcaatatataataatcattttaaaagtatttgattaaacctga

SEQ ID NO: 36748 - DNA, 120 bp, synthetic construct
  source 1..120: mol_type = other DNA
tttgaacttgttagtgacatggattagttagttaggagtacgaactaaataatgaaggaaatattatcaaggaagaatcagaaagaccaaaagaccatcataagatggtagagttggtaa

SEQ ID NO: 36749 - DNA, 120 bp, synthetic construct
  source 1..120: mol_type = other DNA
agcaggctcacgcaccttggcttgttgctcctagagattggccctcctattcagccgaggggagcccagtgcctgctggcccagctgagctctgcccagcaagcccacccacctcccttg

SEQ ID NO: 36750 - DNA, 120 bp, synthetic construct
  source 1..120: mol_type = other DNA
cttggccagttcagccatccttaggcaacttggtgaccccccgctcacaggaggtcaccacactgatgccgaacttagtgcaggcacccggtcggcataatgaccagctgttctaaaggt

SEQ ID NO: 36751 - DNA, 120 bp, synthetic construct
  source 1..120: mol_type = other DNA
cgcatggactgctctaacttccactccgtacgtgctttgctgcggctggacaactggatggtgaagagtgagaagtttcaatctggagagcctgggcatttccacacagtgccccttaac

SEQ ID NO: 36752 - DNA, 120 bp, synthetic construct
  source 1..120: mol_type = other DNA
cagaaacggggtgagaacgcttaggggactgggtcgtaagatcaaaggccagtcttgcagtaacggcagttactaggtggactgtgacatcacaacattccactcctcctggtcgggggg

SEQ ID NO: 36753 - DNA, 120 bp, synthetic construct
  source 1..120: mol_type = other DNA
gggggaaataattaagacataaggaaaaaggaaaaagaaaaaccactagatttaaaaaataaaactgaaggaggattctttcaaaagactgagataataaaacagtcaagcctctgataa

SEQ ID NO: 36754 - DNA, 120 bp, synthetic construct
  source 1..120: mol_type = other DNA
ctttgttcccacaagtttttttgccacaacgtttttacattttttatcccataactttttcaacccataacttttttaatcccataacttttaaaatcttgtgttcttttaagaaacact

SEQ ID NO: 36755 - DNA, 120 bp, synthetic construct
  source 1..120: mol_type = other DNA
gttcctgttcactcctgctggaactctaggtctgtttttctgccaatattcttttaactgttggaaagaagagcagtaatattcatgagaaccgtcagcccctacagccacaacctcctt

SEQ ID NO: 36756 - DNA, 120 bp, synthetic construct
  source 1..120: mol_type = other DNA
aaccaaatcaaacccattctctcattgccacccagagatactgtcaatgttttgagttcatgggggaagtgtaggcttttcccaccgtcaacatctgtaagggagtgaggcagcctggaa

SEQ ID NO: 36757 - DNA, 120 bp, synthetic construct
  source 1..120: mol_type = other DNA
cgccaccacgactggttagaagacaacagcacagactttgaaattctaaggtaaaattatcctcaacctagaaatacataatcaagcaaactatcaatcaagtgtgagggtagaatatga

SEQ ID NO: 36758 - DNA, 120 bp, synthetic construct
  source 1..120: mol_type = other DNA
aaggaggttgtggctgtaggggctgacggttctcatgaatattactgctcttctttccaacagttaaaagaatattggcagaaaaacagacctagagttccagcaggagtgaacaggaac

SEQ ID NO: 36759 - DNA, 120 bp, synthetic construct
  source 1..120: mol_type = other DNA
ggtaagaggctctgggtggaggtgcagtgacccttcgggtcaaccctccaacctcctcctccaggtgggactgggtgcccctctgccagctgagacagcccacacaccccagccctaacg

SEQ ID NO: 36760 - DNA, 120 bp, synthetic construct
  source 1..120: mol_type = other DNA
ccgatcgtgcaggaccaccaggagcacccaggcttgggcagcaactgctgtgtgccattattttgttgggcttggctgccaagaagaaggagataaacatcaccatcatcaaacagctgc

SEQ ID NO: 36761 - DNA, 120 bp, synthetic construct
  source 1..120: mol_type = other DNA
cgaacagtgtggagtttggggaagagatgtggctaaagacagcgtaagcaattttttaaagttatgtctgaagcaagaagaaaagacaaggaataggttcagtttcatctctgatacacc

SEQ ID NO: 36762 - DNA, 120 bp, synthetic construct
  source 1..120: mol_type = other DNA
gccaaatccaacaccaagcttctgcagctgccacctcccgtagacttcgcatttcttccgcactctcctctcacgacgggtcttctttgttgtacttaatttcctacgcaataagatttc

SEQ ID NO: 36763 - DNA, 120 bp, synthetic construct
  source 1..120: mol_type = other DNA
agttgcctgagcagccggctggtccggcggccaggctagggcgggggcgagcgcccagttgagcctgctggggctggaggagcgagaagggttttcttcacatttcagagcgaaccagac

SEQ ID NO: 36764 - DNA, 120 bp, synthetic construct
  source 1..120: mol_type = other DNA
ggacaaaaactctacccctccacccttgttttagagtaaggttgtagagggacaagggagaccagtgcattttctacatgaatctgtagatgaagaagtatgacagaacattagaaatag

SEQ ID NO: 36765 - DNA, 120 bp, synthetic construct
  source 1..120: mol_type = other DNA
cctgttttcagagtcagatagacctgagtttgagtgctgttccacccctactacatctgtaaacttgggctgcttgtttgatttccctaagcttcagttttatatatataaagtgggaac

SEQ ID NO: 36766 - DNA, 120 bp, synthetic construct
  source 1..120: mol_type = other DNA
ttcataccgaagggctttttcggaaatcaggatctgtgattcgcctaaaagcactaaaggtgagcatattgttgaactattaatttttcatttgagccattttctgatttggtttttaaa

SEQ ID NO: 36767 - DNA, 120 bp, synthetic construct
  source 1..120: mol_type = other DNA
tattgtatatttcaattttttattctaatttgcttgtggctgaaattattcagccagtaagagtcaacatgatcttctgttttctagagtgaagaaatgaactggttaatactcacttat

SEQ ID NO: 36768 - DNA, 120 bp, synthetic construct
  source 1..120: mol_type = other DNA
cacagtcagggtgggggctcccctcaaccagtttggtccacctccatggaccctttggccactgagtcacacatgctggccccaccacctgctttgagaaccagggctgtgccctaccct

SEQ ID NO: 36769 - DNA, 120 bp, synthetic construct
  source 1..120: mol_type = other DNA
tgtcattaaactatgcacacagggcttcttgcttttaagttagcaggatggaaaaattgcaggtgtttgcagcaaacatgaagaaccagccatgctggcccctaagcaatggtattagaa

SEQ ID NO: 36770 - DNA, 120 bp, synthetic construct
  source 1..120: mol_type = other DNA
tgcatttaaatgcaaatttcggaacaaagatctgtgtctctgcactgaccaaatagaaggtatgtgaatgttatggtcttgattgttttacaagattttttctgcaggtacttttgcaag

SEQ ID NO: 36771 - DNA, 120 bp, synthetic construct
  source 1..120: mol_type = other DNA
gacattgccaccaccacagccactgacagcacctgaggagaccctctgagccccctgcctgaggccaagcagcagagaaagccacatcctctaaggcccccatgggtgagcacccatgtg

SEQ ID NO: 36772 - DNA, 120 bp, synthetic construct
  source 1..120: mol_type = other DNA
aagaaacctcgctgattaggctccaaccatactccaccctccatgagattgactggatgggcatcatggaaaccagaacacgtggtttccaaacaagaaaaatcctatgaaggatgggag

SEQ ID NO: 36773 - DNA, 120 bp, synthetic construct
  source 1..120: mol_type = other DNA
cccgagaagctccgcagcgcgtcgctccaggagtgcgaggagccatagatggcgctgccgtccagccagcccgtcacctggttggcctgcggggcacgcggcgggtgagcccgggtcgag

SEQ ID NO: 36774 - DNA, 120 bp, synthetic construct
  source 1..120: mol_type = other DNA
aggatactctagaaagttgagagattccctggtccagtctgggggaggaaaaaatatgcagtgtagcatagatggttttacttgtccactcagacacatgctcatacttattagatggat

SEQ ID NO: 36775 - DNA, 120 bp, synthetic construct
  source 1..120: mol_type = other DNA
ggcatttttcacctctgctggagccagttcccaggaggagcaggcacggctatgtgggcagcggaaggtgtgaaggctgtgctgcctgcacctggctcatctgttggccttggcctggaa

SEQ ID NO: 36776 - DNA, 120 bp, synthetic construct
  source 1..120: mol_type = other DNA
ctcaggcggggtgggcaggcaggggcaggggaggctcgcactgtgctcagacccccgcctccctctctctgaagatttttatgaagtgagcctggacaacaacgtggagcctgcaccagg

SEQ ID NO: 36777 - DNA, 120 bp, synthetic construct
  source 1..120: mol_type = other DNA
atcagtgtctttcaaacttgttttttagctgaagtccccttagttcaagtgaactcttactcaggagtctgtttttttttaatggaggtggaggtctggagctctaccagattcatcgcc

SEQ ID NO: 36778 - DNA, 120 bp, synthetic construct
  source 1..120: mol_type = other DNA
ctcgcactgtgctcagacccccgcctccctctctccgaagatttttatgaagtgagcctggacaacaacgtggagcctgcaccaggagcggccagggagggttctccccatgacaacccc

SEQ ID NO: 36779 - DNA, 120 bp, synthetic construct
  source 1..120: mol_type = other DNA
agctttgtcaatggagacaggatactctagaaagttgagagattccctggtccagtctgggggagggaaaaaatatgcagtgtagcatagatggttgtacttgtccactcagacacatgc

SEQ ID NO: 36780 - DNA, 120 bp, synthetic construct
  source 1..120: mol_type = other DNA
actcacttttatttgtgtttctaatttaccgtttaaatttatttgtaaaaagttaagggagagttggtctttccctgatgttctttctggcatcctttagcatttttatttttaatttga

SEQ ID NO: 36781 - DNA, 120 bp, synthetic construct
  source 1..120: mol_type = other DNA
ttgtaagatcaaaggctggtcttgcagcagtaatgacagttcctaggggcactgtgacatcattgcattccactcctcccaggggaggggaccacatcagcgcgatgcccgagtcgctgc

SEQ ID NO: 36782 - DNA, 120 bp, synthetic construct
  source 1..120: mol_type = other DNA
gccatgctttttgaatgttagtacagcctgtatattcattacggaattcagataaaatttccttatgttctgctgttatgtttgatcgaatcctaatcacagtgagctcttcattagctc

SEQ ID NO: 36783 - DNA, 120 bp, synthetic construct
  source 1..120: mol_type = other DNA
gaggctgggccactctgctccaggtgacgctgatgtcagggtctctgagagtggggacttaccctggccgctccctgttccttctacccagtgggctctcccctccccatttatgcttcc

SEQ ID NO: 36784 - DNA, 120 bp, synthetic construct
  source 1..120: mol_type = other DNA
cctcccatgcagtatcaccacatttgacaatgcccgcccatataatctaccaaataaatcgaatcacttaatacctctacaagatgagagatgcattctttagactcccgaagggatgca

SEQ ID NO: 36785 - DNA, 120 bp, synthetic construct
  source 1..120: mol_type = other DNA
aagtgtttattgagcacctgccgcggacaaggccttgtgtgattaaatagggttataattagtaatataaaaatgagaaatcactaatgctttttagacttaacattttctttctttgta

SEQ ID NO: 36786 - DNA, 120 bp, synthetic construct
  source 1..120: mol_type = other DNA
atttgaagatgaatttgagggaaatagtcagaaagtcaagaagaacacagcagaaatcaattggggtgagtccagaacaaaacttggggatcccacttcctgctttttttttttttttga

SEQ ID NO: 36787 - DNA, 120 bp, synthetic construct
  source 1..120: mol_type = other DNA
ttgcgcctgccagatgtcgcgcggagtcctccaggcctctagaaggcagagatggtctcgtttccttgccgagcatgcgccttagttctctcttctggggctgtgaacgtggggtcgaag

SEQ ID NO: 36788 - DNA, 120 bp, synthetic construct
  source 1..120: mol_type = other DNA
acagaaaaaatccctgtctccatgaggtaacatgctagtgggagggagacaactaagaaatcgaacgaggacatttcagatactggtaagtttgatgaagatactaaaatgggttagcag

SEQ ID NO: 36789 - DNA, 120 bp, synthetic construct
  source 1..120: mol_type = other DNA
ttcagttataagttacatttgtggctcctacctcccaaggagttcaattttagctttgcattttttaacttaattaccttttctgttccaatctccctgtttgctttcatccatgtatta

SEQ ID NO: 36790 - DNA, 120 bp, synthetic construct
  source 1..120: mol_type = other DNA
gtcatccacatagtgttaacaggttcagagcttatgctacaagtgatccgaagccgggaaaagtgactgggatgtagtatggtttctagtatgtaagtgaggcgtgtccgcattgcgggc

SEQ ID NO: 36791 - DNA, 120 bp, synthetic construct
  source 1..120: mol_type = other DNA
attgcatggatcgggttattggtaagacgccttcataggcagtgaaaacgatgcctgcccagtatttctgatcccattattgcagatctgcgatacgtttgagttttcacatgcaaagag

SEQ ID NO: 36792 - DNA, 120 bp, synthetic construct
  source 1..120: mol_type = other DNA
acgtagaaaaaaaatactgtgctttcgaaatgaaatgtgtctatgggccagggacatgcccctgctctaacaggcaagagcatccttctccttttttttttaagagaagctggaaaatct

SEQ ID NO: 36793 - DNA, 120 bp, synthetic construct
  source 1..120: mol_type = other DNA
agacggcgaggtaatgcctgtggccggattctaccttctgcctttgttttaataattctgctgtttagtttaaggaagcacagttctctccttttctccctaaataccactctgcagaaa

SEQ ID NO: 36794 - DNA, 120 bp, synthetic construct
  source 1..120: mol_type = other DNA
actcccatcgcctatgtgaaatatggttgcttttgtggcttgggaggccatggccagccccgcgatgccattgactggtgagtgcatgcctgggaccaggctgcaaaatccctcacactc

SEQ ID NO: 36795 - DNA, 120 bp, synthetic construct
  source 1..120: mol_type = other DNA
tttagctcgaactttggtttccacctgtctccataaagtaaagatgtcttccaggacaattttaattcctggaaaggaagaaactcttttctttgtgtgcatacaaacggacctcagccc

SEQ ID NO: 36796 - DNA, 120 bp, synthetic construct
  source 1..120: mol_type = other DNA
atctcttggaaacctctaactgtgtcggaaacattagtgcaaatgttgcatcctatttcccatatgtccgcatgttttaggaaaaaaccctcaatttcctaaatatgcaagaaaaattgg

SEQ ID NO: 36797 - DNA, 120 bp, synthetic construct
  source 1..120: mol_type = other DNA
tggctgagctgcagcgtggcttctttgacaagcacatctggctctccatatgggaccggccacctcgtagctgtttcactcgcatccagagggccacctgctgcgttctcctcatctgcc

SEQ ID NO: 36798 - DNA, 120 bp, synthetic construct
  source 1..120: mol_type = other DNA
ggtgcccaatgcatgtgactggaacccctgcattggacatgtaggaaacgaggccagccgggaaaggtaaccccacattcccacagccagcaggaactcaagcagaggcttcaacccagg

SEQ ID NO: 36799 - DNA, 120 bp, synthetic construct
  source 1..120: mol_type = other DNA
tgaggaaaccaaggcccagagaggttaggaatttgtccaaggtcacacagccaggaagtaggattcaaacccagacagccaggctgtaatacctaggctcctctcaggctcatgcccttc

SEQ ID NO: 36800 - DNA, 120 bp, synthetic construct
  source 1..120: mol_type = other DNA
aaataaaagtttaattcagcaggaattaagagtgattcagtctaggctcaggtcccaggcctcactgggtaaactcaggcaaccacgttgagactcagtttactcaactatgacatggag

SEQ ID NO: 36801 - DNA, 120 bp, synthetic construct
  source 1..120: mol_type = other DNA
agacaaaatcaacgcatcaacaaataaattagtgatctcaactggtcagtaacgaagctgtgaaaataaacaggaaagcaagagaagaacaatccccacctaggggtctttagctcgctg

SEQ ID NO: 36802 - DNA, 120 bp, synthetic construct
  source 1..120: mol_type = other DNA
agtcaaacactccactgaatcttaaaatgcagagtctgcaccccactgtgcatatgacctaaaagtccgcttctgccagtttaagcgattttaacacagtactttcaaatgtaattatta

SEQ ID NO: 36803 - DNA, 120 bp, synthetic construct
  source 1..120: mol_type = other DNA
tagcgtggggggtggcaaacacaacactcctccaggccaccaatctggacttctgctttggccatgagcagggctgcattcctctccagctttctggaacgtaccagccaggcacccccc

SEQ ID NO: 36804 - DNA, 120 bp, synthetic construct
  source 1..120: mol_type = other DNA
ggaaggaaggaaaacagaaatcataacattgcctttgggaattaactacacatgttacacctgaatgcactcagtcagtatacattcactgaggacctactatataccagcttttaacac

SEQ ID NO: 36805 - DNA, 120 bp, synthetic construct
  source 1..120: mol_type = other DNA
tcacagctggtgagaagagcaaaaatcctcacagaaaagcagaaattcctagggaccatgaaagacagtacctgccaagtcttaggaggaaacactgggcagaggaaaaggcacctttat

SEQ ID NO: 36806 - DNA, 120 bp, synthetic construct
  source 1..120: mol_type = other DNA
gatgaagaaactgagaaacagagaggccaagtagcttacccaaggtcacatagctagtaagtggcagggccaagattgggtctcagagtgttcagccccacagtccctgttcttaaacca

SEQ ID NO: 36807 - DNA, 120 bp, synthetic construct
  source 1..120: mol_type = other DNA
cagctgaggcacttgcttataagtaatgaaaaggcttgagctttatcccttgtcagtgcatcttcctatctgactcaggtataggggcatgggctccagactggaagttcagttactgga

SEQ ID NO: 36808 - DNA, 120 bp, synthetic construct
  source 1..120: mol_type = other DNA
tcaacacttctgacagttttgttaacacccatttccatataataaatccccttgtgcttaaaatacagtgggtcatagatgggatagttgttcccagcaattcactccctttccgttcta

SEQ ID NO: 36809 - DNA, 120 bp, synthetic construct
  source 1..120: mol_type = other DNA
actgggtagttctggcctggaggtttctgctgcatctgccttctcagtgttcacctaaggacttttgtattttcctcctcgcatccccacagatggggttcaggctgccggacacagctg

SEQ ID NO: 36810 - DNA, 120 bp, synthetic construct
  source 1..120: mol_type = other DNA
tgtctcaagtccaagaatgcctcctacacctcctataatactggctttctggtgagtaaagatgccattctcatgtgtaatcaggtggcaaatggagatatgaccaaagtaaccacctgc

SEQ ID NO: 36811 - DNA, 120 bp, synthetic construct
  source 1..120: mol_type = other DNA
atttctataatttgtttatgtaagtttctgtaagtcataagtatgtggtttccaagtgtataatttatctgaatgtaataggcattaatatatttttacattactgggaccatagtacag

SEQ ID NO: 36812 - DNA, 120 bp, synthetic construct
  source 1..120: mol_type = other DNA
tcaaaaaagagtagtgtatggttggcgtattctgtgtagaatgtattttattgatgtctcctatttttataatttctgagttaagtactttttaattaatgctttttagttttgggcaga

SEQ ID NO: 36813 - DNA, 120 bp, synthetic construct
  source 1..120: mol_type = other DNA
atttctataatttgtttatgtaagtttctgtaagtcataagtatgtggtttccaagtgtataatttatctgaatgtaataggcattaatatattttacattactgggaccatagtacaga

SEQ ID NO: 36814 - DNA, 120 bp, synthetic construct
  source 1..120: mol_type = other DNA
atgcaaggtctccacacttactagctgtgtgacattggacagagtgcttcatcattccgagactcagtttttaaaggaaaaacaactaactaccttgcaagcttgctagcaggtttaagt

SEQ ID NO: 36815 - DNA, 120 bp, synthetic construct
  source 1..120: mol_type = other DNA
cagctgtgtccggcagcctgaaccccatctgtggggatgcgaggaggaaaatacaaaagtccttaggtgaacactgagaaggcagatgcagcagaaacctccaggccagaactacccagt

SEQ ID NO: 36816 - DNA, 120 bp, synthetic construct
  source 1..120: mol_type = other DNA
tttttaaattatctaataggttggcactcatcatgagcccctgttctcattctgcaaatggtgaagctctctattgtcctgaccccacagttcctgtcccatgaccagggccagctcacc

SEQ ID NO: 36817 - DNA, 120 bp, synthetic construct
  source 1..120: mol_type = other DNA
aaaggagcagcctccatatgggagctgtcagctgctctaagagatgaaggagagagtggcccgtctcaatggctcccaactcttttgcctcgaggtgacacgcttcacttccacgcacat

SEQ ID NO: 36818 - DNA, 120 bp, synthetic construct
  source 1..120: mol_type = other DNA
tggaaccgtcacgcaaacccaagaggcggagggccgctgacgtggaaccatcattacccgaacccaagaggcggaggttgagctgagaagaggccagtgcactcaagcctgagcaataag

SEQ ID NO: 36819 - DNA, 120 bp, synthetic construct
  source 1..120: mol_type = other DNA
acctctacagaaagttagtatactcacacaaaggcaacttgtgcagaagagaatgttaaatgtgtaacgtctcagaaacccaataatgataattatcaaattatccaatttttgtggaga

SEQ ID NO: 36820 - DNA, 120 bp, synthetic construct
  source 1..120: mol_type = other DNA
cttccatacaatgggagtgccaatggctgcatgcatgcaaagaccgtctgaggataggaggaagcaatctgttgagcacccgtgtacctgagtgtcatcacctcccaagggcatctttcg

SEQ ID NO: 36821 - DNA, 120 bp, synthetic construct
  source 1..120: mol_type = other DNA
aactatcatatggggtaactgaggcagtcagagatttactgactcaatgtcactcaattgattctgagttcactgctgattacatccgaccaaactgctttttctgaagtctactctgtt

SEQ ID NO: 36822 - DNA, 120 bp, synthetic construct
  source 1..120: mol_type = other DNA
ttatattactaattataaccctatttaatcacacaaggccttgtccgtggcaggtgctcaataaacacttgtcgaatcaatgcatgtgggctccggagccacactgtttagattctattc

SEQ ID NO: 36823 - DNA, 120 bp, synthetic construct
  source 1..120: mol_type = other DNA
gtgtgcaccggcgtgggatcctggaactggcaggaattgtgggttgtgttggtccctagactcccatcacctatacgaaatatggttccttttgtggcttgggaggccatggccagccct

SEQ ID NO: 36824 - DNA, 120 bp, synthetic construct
  source 1..120: mol_type = other DNA
attgttgtgcctcggcctccctctgcctcttgggcttgggcgattgttccacctcatccaccctccacctcttgggtttgggtggtttttccacctcggcctcctgagtagctaagggag

SEQ ID NO: 36825 - DNA, 120 bp, synthetic construct
  source 1..120: mol_type = other DNA
gggcatgggtcaccccagccctggcatctgcccagagcccgagaaggaaggaacaatgatcctccagctacctcacagggctggcacaggtgaccactgccctggcatcacccagctgtg

SEQ ID NO: 36826 - DNA, 120 bp, synthetic construct
  source 1..120: mol_type = other DNA
tcatgagcccctgttctcattctgcaaatggtgaagctctctattgtcctgaccccacagttcctgtcccatgaccagggccagctcaccaaggagctgcagcagcatgtaaagtcagtg

SEQ ID NO: 36827 - DNA, 120 bp, synthetic construct
  source 1..120: mol_type = other DNA
cagggcatcatctgtggggatagtgggggtagtgggggtagtggtcagccagacttggtgactctacttgctcaccagatgatcctacacctgccacctccgatggatccactgcctctg

SEQ ID NO: 36828 - DNA, 120 bp, synthetic construct
  source 1..120: mol_type = other DNA
ctcccttagctactcaggaggccgaggtggaaaaaccacccaaacccaagaggtggagggtggatgaggtggaacaatcgcccaagcccaagaggcagagggaggccgaggcacaacaat

SEQ ID NO: 36829 - DNA, 120 bp, synthetic construct
  source 1..120: mol_type = other DNA
cctccatatgggagctgtcagctgctctaagagatgaaggagagggtggccagtctcaatggctcccaactcttttgcctcgaggtgacacgcttcacttccactcacatctcttgggtc

SEQ ID NO: 36830 - DNA, 120 bp, synthetic construct
  source 1..120: mol_type = other DNA
cctacccctggccttccctcatcagccgtaaatgatgatttactgctgttaccatcatcactgccttcagtgaccaagggccttccaaggtgccagctctggaacgaaagatgcccttgg

SEQ ID NO: 36831 - DNA, 120 bp, synthetic construct
  source 1..120: mol_type = other DNA
agggctggccatggcctcccaagccacaaaaggaaccatatttcgtataggtgatgggagtctagggaccaacacaacccacaattcctgccagttccaggatcccacgccggtgcacac

SEQ ID NO: 36832 - DNA, 120 bp, synthetic construct
  source 1..120: mol_type = other DNA
ggcctggcacacacagtgagtactcaatgttagccatgtagcttcataatgcatactgattgtcaatattcagacaatccagtaaagtattaccaaaaataaaagtaaacttatttgcat

SEQ ID NO: 36833 - DNA, 120 bp, synthetic construct
  source 1..120: mol_type = other DNA
acctctaactgtgtctgaaacattagtgcaaatgttgcatcatatttcccatatgtccgcatgttttaggaaaaaaccctcaatttcctaaatatgcaagaaaaatcgatattgtaggac

SEQ ID NO: 36834 - DNA, 120 bp, synthetic construct
  source 1..120: mol_type = other DNA
ctggtcatgggacaggaactgtggggtcaggacaatagagagcttcaccatttgcagaatgagaacaggggctcatgatgagtgccaacctattagataattttaaaaaaaaagtgttga

SEQ ID NO: 36835 - DNA, 120 bp, synthetic construct
  source 1..120: mol_type = other DNA
ttctcagtgttcacctaaggacttttgtattttcctcctcgcatccccacagatggggttcaggctgccggacacagctgggtgatgccagggcagtggtcacctgtgccagccccgtga

SEQ ID NO: 36836 - DNA, 120 bp, synthetic construct
  source 1..120: mol_type = other DNA
actgagtctcggaatgatgaagcactctgtccaatgtcacacagctagtaagtgtggagaccttgcatccaatcaatgcccgtctcattctaaaggccatgttatgtgttctccagccca

SEQ ID NO: 36837 - DNA, 120 bp, synthetic construct
  source 1..120: mol_type = other DNA
aggcttgagtgcactggcctcttctcagctcaacctccgcctcttgggttcgggtgatgatggttccacgtcagcggccctccgcctcttgggtttgcgtgacggttccacgtcaccgac

SEQ ID NO: 36838 - DNA, 120 bp, synthetic construct
  source 1..120: mol_type = other DNA
tgcggcccggcgccggcccagtctttccctctcccactgcttcccagggcttcgcctgtctaaccgggcgcgggcagttgtcctgtgtcctggctcagcgcggacctacgcggggtggtc

SEQ ID NO: 36839 - DNA, 120 bp, synthetic construct
  source 1..120: mol_type = other DNA
taagccacctccacctctgtcctggccgcctcagggcgccctgaaaggaccaggacatgcggctgcgcttttggctcctcatttggctcctgctgggatttatcagccatcagcccaccc

SEQ ID NO: 36840 - DNA, 120 bp, synthetic construct
  source 1..120: mol_type = other DNA
tgtggtggtcaggaggcaagagtgaagtcagggatccgggagaggcctaagccctccacccatcaggaccctgcatctcaggggctccagtgcccccacctgccgacggggctgctggga

SEQ ID NO: 36841 - DNA, 120 bp, synthetic construct
  source 1..120: mol_type = other DNA
cctccctggccccttcagctcctgcggccaggccagggagtcagggagctgggtgagatagggagattccctgggagagaagagatggcctccaaaccaatcctggacaaactccctgat

SEQ ID NO: 36842 - DNA, 120 bp, synthetic construct
  source 1..120: mol_type = other DNA
gattataggacatgttcattccaaattttatgggtaggaaataatgactgtgacttctcttatatttatagcggaccatagcaaaatatgctcccaagtttgatgggtttcagcaacaag

SEQ ID NO: 36843 - DNA, 120 bp, synthetic construct
  source 1..120: mol_type = other DNA
tcaaggtcttctaaaagccatacctgaaaggtttccaataacagatgactcgatggtaattcagccacacaaacaaccacaacaaaagacacaactatcagagattttcaggatagcctc

SEQ ID NO: 36844 - DNA, 120 bp, synthetic construct
  source 1..120: mol_type = other DNA
ccaacatatactttctagccccaactgctggaaaggaaataaaaacttaatatgaaaactacttttcctttttataaataaagtttttaagtggaaaaacaaagccaacactcctcgttg

SEQ ID NO: 36845 - DNA, 120 bp, synthetic construct
  source 1..120: mol_type = other DNA
acaggatttgctgatggactgactgactggggaggtggaggaagggtaaataaaaggaatcaaggaagattccaaagtttttgtcctgaacaactaaaaagataaagatggctaagacag

SEQ ID NO: 36846 - DNA, 120 bp, synthetic construct
  source 1..120: mol_type = other DNA
aggaacatgggtggatcttagatgagtattgctgagggaatgacgccagacccaacaggctaccaccatgggattccaattcattggccattctgggaaagggcaaaccatagagacaga

SEQ ID NO: 36847 - DNA, 120 bp, synthetic construct
  source 1..120: mol_type = other DNA
ctctctcctggtttagtgagggaccacgggtggctgcctgctgaagtctgcggggcccacagaagagcctctggactcatggctctctctcggaagcctctctgcctcagtcccagcgga

SEQ ID NO: 36848 - DNA, 120 bp, synthetic construct
  source 1..120: mol_type = other DNA
tcgttcatttgcacagtgcctggcactcacttagggactcgaagaatggatgaatgtggaatgtggttttcgcagccagggagaatgggataccagccagggcaagaacagtctactggg

SEQ ID NO: 36849 - DNA, 120 bp, synthetic construct
  source 1..120: mol_type = other DNA
cctggaatcgagaaggcagctgactgggattgccttcctcagccgcagcagcacctggggcgccagctgctggaatcctacaatcccagaaggcgggcacagccagggagaggggaggag

SEQ ID NO: 36850 - DNA, 120 bp, synthetic construct
  source 1..120: mol_type = other DNA
ggcggggccaagaggaggaagcagcctcagaacagacaaaagactccctgccccaaacggcagtcatcccacagtcagcacttctggaaggaaggaaggaaggaaggtttccttctgcag

SEQ ID NO: 36851 - DNA, 120 bp, synthetic construct
  source 1..120: mol_type = other DNA
cactgacgcggggcagctccatctcactgtaaggcaacccaggcagagctgaggacctgcccaggccaggagccatccctctccctgagagggccccagggaaggaccagcctaccccca

SEQ ID NO: 36852 - DNA, 120 bp, synthetic construct
  source 1..120: mol_type = other DNA
tcgctgaccagtcccccagtgaccaggccttcctgaccaggtccccactgtccaagtcctccctgcccaggccccagagcagcagtgttcaaggtcctctaccacaactgcccacaggca

SEQ ID NO: 36853 - DNA, 120 bp, synthetic construct
  source 1..120: mol_type = other DNA
gatgtaagtaatagcaaattcattataataggaaatgtaatttgattaaactacccatttaaagacaagaatactaagattggtcagaaatcaaagtccaaacaaaagatctaacaacat

SEQ ID NO: 36854 - DNA, 120 bp, synthetic construct
  source 1..120: mol_type = other DNA
ttcttcaagtgttaatgttctggcttctctgttgctcatagcctaactggattcttgtcaatacagtgcactttgagcattatccatgattatttccatttgaagtaactttccatattg

SEQ ID NO: 36855 - DNA, 120 bp, synthetic construct
  source 1..120: mol_type = other DNA
acgcctcaaaaaaaaaaaaaaaaagaaaagaaaaaagaaagagcaggctctctcctccgctgggctagaaggtacttggggcgatttggcgatagtgggctggctggaaggctgggcaca

SEQ ID NO: 36856 - DNA, 120 bp, synthetic construct
  source 1..120: mol_type = other DNA
ctgggcactggggtacagagagaattggacatagtcccagccttaagcatctcatattccaaagggtaagatggatatacagctgggctacatggcttcaaggaggaagtgcacagagat

SEQ ID NO: 36857 - DNA, 120 bp, synthetic construct
  source 1..120: mol_type = other DNA
ggcgcatcccgagcatggaacagcgaggcagatcctgcccttgtgcgttttgtggctccttgcgggccaggggggcttctgaggacatccagcaggccacagggaggcttgggcacagcc

SEQ ID NO: 36858 - DNA, 120 bp, synthetic construct
  source 1..120: mol_type = other DNA
gtgacttagcttctctcagcctcagttttcctatctgtccagaggggagaattgtccctcctccaaggcagggctgtgagcatcgggatgactgcagccagctgccaagcatgcagggct

SEQ ID NO: 36859 - DNA, 120 bp, synthetic construct
  source 1..120: mol_type = other DNA
tctttgctatacctgcatcagcctctctaggcctctgagcttggtcagagatggggcctgggcaagatcaactctcacacaaggtgggaagtagcttctggcctgaacgggaaaagccca

SEQ ID NO: 36860 - DNA, 120 bp, synthetic construct
  source 1..120: mol_type = other DNA
tgggcaagcagggtgctctggggccgcactttgtcgagctcacgagccagctaggctctgtttgtgatagaaaaatcaagaccatgttaatgattgtaataaaagctttctgctgtcttt

SEQ ID NO: 36861 - DNA, 120 bp, synthetic construct
  source 1..120: mol_type = other DNA
agcccacctgggggtggcaggtccccctgctttcttgttagtttcttcatagaggccctaagatgcttgagcacagtgtcctcatccctggcccaggtatcaacgaaccggttgcaaaaa

SEQ ID NO: 36862 - DNA, 120 bp, synthetic construct
  source 1..120: mol_type = other DNA
ggccacgacagggtggccggaactgggtgggcgctgggcttcccggtcatctcctggtagtggggtcgggccaggggaacaggggatggggagatgctgccacctgggcttggtcggccc

SEQ ID NO: 36863 - DNA, 120 bp, synthetic construct
  source 1..120: mol_type = other DNA
aacctggcatgctggtttcatgtggatgtcagtttccaaatcagtgggttcaatatctgtgacactttggggatgtgtggttcaagtccatcgagctttgtgagccactgcccaactggc

SEQ ID NO: 36864 - DNA, 120 bp, synthetic construct
  source 1..120: mol_type = other DNA
tcatttcctcaatgttcaggaggactgaccacatcgggccccggatgttcatgggcattcccttgtacgctcgatctatgagctgtgggcagaaaacaatctggtgtcacaggccacggg

SEQ ID NO: 36865 - DNA, 120 bp, synthetic construct
  source 1..120: mol_type = other DNA
agctctaggggaatgggggagaacaggggcaggtgggccctcagagacctgctggacaacagccctgaggctgggccaggcgtcccctcaccctgtggccataacccttgcatctcaccg

SEQ ID NO: 36866 - DNA, 120 bp, synthetic construct
  source 1..120: mol_type = other DNA
ttggcccacggtaagggcctaaaaagggatagccccagtggtggggatgctgctgctgctgaccattaaccccagtctgctccaccttcttccaggcagtctgtgagatgtttgatgtcc

SEQ ID NO: 36867 - DNA, 120 bp, synthetic construct
  source 1..120: mol_type = other DNA
gggtggcaggtccccctgctttcttgttagtttcttcatagaggccctaagatgcttgagcacagtgtcctcatccctggcccaggtatcaacgaaccggttgcaaaaacgtgcccacgg

SEQ ID NO: 36868 - DNA, 120 bp, synthetic construct
  source 1..120: mol_type = other DNA
ttgcccagggcttgaggcttccctgagccctctcaagtcgggtcctggcccagtctgcccatgaggctgggcctgagccccagccatggccctgggatgaccccccttgggcagagggtt

SEQ ID NO: 36869 - DNA, 120 bp, synthetic construct
  source 1..120: mol_type = other DNA
ggccacgacagggtggccggaactgggtgggcgctgggcttcccggtcatctcctggtagtggggtcgggccagggaacaggggatggggagatgctgccacctgggcttggtcggccca

SEQ ID NO: 36870 - DNA, 120 bp, synthetic construct
  source 1..120: mol_type = other DNA
tggcatgctggtttcatgtggatgtcagtttgcaaatcagtgggttcaatatctgtgacactttggggatgtgtggttcaagtccatcgagctttgtgagccactgcccaacgggctgcc

SEQ ID NO: 36871 - DNA, 120 bp, synthetic construct
  source 1..120: mol_type = other DNA
gtagctctaggggaatgggggagaacaggggcaggtgggccctcagagacctgctggacaacagccctgaggctgggccaggcgtcccctcaccctgtggccataacccttgcatctcac

SEQ ID NO: 36872 - DNA, 120 bp, synthetic construct
  source 1..120: mol_type = other DNA
tcagaaatgaaaaagcgataccattagagacactaaaaagaccattaggtaatagtactagcttttgtattctgagatccaacagcagcagtcacttccctccaccgctatgtgtatccc

SEQ ID NO: 36873 - DNA, 120 bp, synthetic construct
  source 1..120: mol_type = other DNA
ctctgcacatcggtttggaaccgtggaggaactgtacacccacagactgaactggcgtgtgtgcaaactgaaaaaaaaaatcattcagagtgaaaaggatcaggcaagtcactgtacaac

SEQ ID NO: 36874 - DNA, 120 bp, synthetic construct
  source 1..120: mol_type = other DNA
cagccagacctggggatggccaccctggccaggtgatcacagctttcagccaaggcaccctccttgtgtcgccagcttgttgggagactttaggatgtctctgctgagggtcccacagga

SEQ ID NO: 36875 - DNA, 120 bp, synthetic construct
  source 1..120: mol_type = other DNA
ccgtgggcacgtttttgcaaccggttcgttgatacctgggccagggatgaggacactgtgctcaagcatcttagggcctctatgaagaaactaacaagaaagcagggggacctgccaccc

SEQ ID NO: 36876 - DNA, 120 bp, synthetic construct
  source 1..120: mol_type = other DNA
tccccacgccaggcagcatgcacccctccctctgggatcagcagactacaggcgtgtcctcggtgtcaggccacgggggccacacagagaccccgaggactccagagacgcaggcaggtg

SEQ ID NO: 36877 - DNA, 120 bp, synthetic construct
  source 1..120: mol_type = other DNA
ggagggcatttgggagtcagtgctcaggtcactccgggtcacgcaggtcatttgccggcccctgtcataattattgccatatgagagtgccacctttcctgtgacataatttagacattc

SEQ ID NO: 36878 - DNA, 120 bp, synthetic construct
  source 1..120: mol_type = other DNA
gcattaacaatggcgttgacgcctgctttgcggcacgctgggaggggagagggaggtgtatgctggagagctccccaggggcaaggcctggctctgcgtcacccactgtcagatcctgag

SEQ ID NO: 36879 - DNA, 120 bp, synthetic construct
  source 1..120: mol_type = other DNA
ccacctgcctgcgtctctggagtcctcggggtctctgtgtggcccccgtggcctgacaccgaggacacgcctgtagtctgctgatcccagagggaggggtgcatgctgcctggcgtgggg

SEQ ID NO: 36880 - DNA, 120 bp, synthetic construct
  source 1..120: mol_type = other DNA
gagtccgggccctgactcctttgtgtctcagcttgaccccttgagaccacccccttccttggaggtttatgccagcggtgagctgacatcctacctcctatatcctggtgggtcacaaat

SEQ ID NO: 36881 - DNA, 120 bp, synthetic construct
  source 1..120: mol_type = other DNA
ttcaacttcatttcctcagtgttcaggaggactgaccacatcgggccccggatgttcatgggcattcccttgtacgctcgatctatgagctgtgggcagaaaacgatctggtgtcacagg

SEQ ID NO: 36882 - DNA, 120 bp, synthetic construct
  source 1..120: mol_type = other DNA
aactgctgtagaccactgaggcaggccagagagcagacaggtgctaagcaccagtgacattctgaggtcatggcacgaatcacagtggggccttgcccgggtcagcagcgcccagagtca

SEQ ID NO: 36883 - DNA, 120 bp, synthetic construct
  source 1..120: mol_type = other DNA
cattatgttctcataaggagcacgcaatctagatctctggcatgctcagttcccagttgggttctatgagaatggaacggcaccactcatctgacaggtggcagagctcatgcggtaatg

SEQ ID NO: 36884 - DNA, 120 bp, synthetic construct
  source 1..120: mol_type = other DNA
ttggcccatggtaaaggcctaaaaagggatagccccagtggtggggatgctgctgctgctgaccattaaccccagtctgctccaccttcttccaggcagtctgtgagatgtttcatgtcc

SEQ ID NO: 36885 - DNA, 120 bp, synthetic construct
  source 1..120: mol_type = other DNA
ggccacgacagggtggccggaactgggtaggcgctgggcttcccggtcatctcctggtagtggggtcgggccagggaacaggggatggggagatgctgccacctgggcttggtcggccca

SEQ ID NO: 36886 - DNA, 120 bp, synthetic construct
  source 1..120: mol_type = other DNA
aacctggcatgctggtttcatgtggatgtcagtttgcaaatcagtgggttcaatatctgtgacactttggggatgtgtggttcaagtccatggagctttgtgagccactgcccaacgggc

SEQ ID NO: 36887 - DNA, 120 bp, synthetic construct
  source 1..120: mol_type = other DNA
aacagcagcagtcacttccctccaccgctatgtgtatcccaggaccaccctgggcagggagggctgaggttagggagcagccatggatgctctgatgctggccctgggcctcgggggtga

SEQ ID NO: 36888 - DNA, 120 bp, synthetic construct
  source 1..120: mol_type = other DNA
aagtcatctgagcacatccagcgcatcgaccgggacgtaagcgggacattaaggaagcatatattcttcagggatcgatacggaaccaagtaagcctacgggagccacagggtcccagca

SEQ ID NO: 36889 - DNA, 120 bp, synthetic construct
  source 1..120: mol_type = other DNA
cagccagacctggggatggccaccctggccaggtgatcacagctttcagccaaggcaccctccttgtgtcgccagcttgttgggagactttagaatgtctctgctgagggtcccacagga

SEQ ID NO: 36890 - DNA, 120 bp, synthetic construct
  source 1..120: mol_type = other DNA
ccgtgggcacgtttttgcaaccggttcgttgatacctgggccagggatgaggacactgtgctcaagcatcttagggcctctatgaagaaactaacaagaaagaagggggacctgccaccc

SEQ ID NO: 36891 - DNA, 120 bp, synthetic construct
  source 1..120: mol_type = other DNA
agtaaaatgactagaggtgcatttcaaagattattctatgggaaatataaagaacgaattggaggagtaggaggcaaatagtccaagggacagatacagatctttctttttctttttttt

SEQ ID NO: 36892 - DNA, 120 bp, synthetic construct
  source 1..120: mol_type = other DNA
ttggcccatggtaagggcctaaaaagggatagccccagtggtggggatgctgctgctgctgaccattaaccccagtctgctccaccttcttccaggcagtctgtgagatgtttcatgtcc

SEQ ID NO: 36893 - DNA, 120 bp, synthetic construct
  source 1..120: mol_type = other DNA
ccacctgcctgcgtctctggagtcctcggggtctctgtgtggcccccgtggcctgacaccgaggacacgcctgtagtctgctgatcccagagggaggggtgcgtgctgcctggcgtgggg

SEQ ID NO: 36894 - DNA, 120 bp, synthetic construct
  source 1..120: mol_type = other DNA
gagtccaggccctgactcctttgtgtctcagcttgaccccttgagaccacccccttccttggaggtttatgccagcggtgagctgacatcctacctcctatatcctggtgggtcacaaat

SEQ ID NO: 36895 - DNA, 120 bp, synthetic construct
  source 1..120: mol_type = other DNA
gtagctctaggggaatgggggagaacaggggcaggtgggccctcagagacctgctggacaacagccctgaggctgggccaggcgtctcctcaccctgtggccataacccttgcatctcac

SEQ ID NO: 36896 - DNA, 120 bp, synthetic construct
  source 1..120: mol_type = other DNA
ggactttgtatcacctattttggcttttcatccaggccttttttttttttctttctttttagcttcctggttctagatacaactgatactctgatacaacctgggtaaatgtggtcttga

SEQ ID NO: 36897 - DNA, 120 bp, synthetic construct
  source 1..120: mol_type = other DNA
cggtgagatgcaagggttatggccacagggtgaggagacgcctggcccagcctcagggctgttgtccagcaggtctctgagggcccacctgcccctgttctcccccattcccctagagct

SEQ ID NO: 36898 - DNA, 120 bp, synthetic construct
  source 1..120: mol_type = other DNA
cccgtggcctgtgacaccagatcgttttctgcccacagctcatagatcgagcgtacaagggaatgcccatgaacatccggggcccgatgtggtcagtcctcctgaacactgaggaaatga

SEQ ID NO: 36899 - DNA, 120 bp, synthetic construct
  source 1..120: mol_type = other DNA
ttgtgacccaccaggatataggaggtaggatgtcagctcaccgctggcataaacctccaaggaagggggtggtctcaaggggtcaagctgagacacaaaggagtcagggcctggactcct

SEQ ID NO: 36900 - DNA, 120 bp, synthetic construct
  source 1..120: mol_type = other DNA
tgggccgaccaagcccaggtggcagcatctccccatcccctgttccctggcccgaccccactaccaggagatgaccgggaagcccagcgcccacccagttccggccaccctgtcgtggcc

SEQ ID NO: 36901 - DNA, 120 bp, synthetic construct
  source 1..120: mol_type = other DNA
gtgggcctggatagaacagcaaggcgagggcacatttccctggccattccctccaggcacagccgtgacctgttcattccaaatttgtggaagtatttccacacacacagaactgcaaat

SEQ ID NO: 36902 - DNA, 120 bp, synthetic construct
  source 1..120: mol_type = other DNA
gtaggccattcacagaaatatataaaatatgtcataggacgggtggcactctcatatggcaataattatgacaggggccggcaaatgacctgcgtgacccggagtgacctgagcactgac

SEQ ID NO: 36903 - DNA, 120 bp, synthetic construct
  source 1..120: mol_type = other DNA
aggagtccaggccctgactcctttgtgtctcagcttgaccccttgagaccacccccttccttggaggtttatgccagcggtgagctgacatcctacctcctatatcctggtgggtcacaa

SEQ ID NO: 36904 - DNA, 120 bp, synthetic construct
  source 1..120: mol_type = other DNA
tcatttcctcagtgttcaggaggactgaccacatcgggccccggatgttcatgggcattcccttgtacgctcgatctatgagctgtgggcagaaaacgatctggtgtcacaggccacggg

SEQ ID NO: 36905 - DNA, 120 bp, synthetic construct
  source 1..120: mol_type = other DNA
agctctaggggaatgggggagaacaggggcaggtgggccctcagagacctgctggacaacagccctgaggctgggccaggcgtctcctcaccctgtggccataacccttgcatctcaccg

SEQ ID NO: 36906 - DNA, 120 bp, synthetic construct
  source 1..120: mol_type = other DNA
cgataccattagagacactaaaaagaccattaggtaatagtactagcttttgtattctgagatccaacagcagcagtcacttccctccacccctatgtgtatcccaggaccaccctgggc

SEQ ID NO: 36907 - DNA, 120 bp, synthetic construct
  source 1..120: mol_type = other DNA
ccctggagggctggctgaggggagactatcttcccttgtgttcaaaggggtccgggcactagggttctccccaggtatttcttgctctgcgtggtcctcttgaggcctcgccctcctttt

SEQ ID NO: 36908 - DNA, 120 bp, synthetic construct
  source 1..120: mol_type = other DNA
ccaaggctccctctgggctacagggacaccgagctgggctgccagaggacaaggggcctaagccttttcgaagctacaacaacaacgtcgatcatttggggattgtacagtgagtcctct

SEQ ID NO: 36909 - DNA, 120 bp, synthetic construct
  source 1..120: mol_type = other DNA
caggaggggctggagcggtggccgggagactctgcacattggtttggaaccgtggaggaactgtacacccacagactgaactggcgtgtgtgcaaactgaaaaaaaaaaaaaaaaatcat

SEQ ID NO: 36910 - DNA, 120 bp, synthetic construct
  source 1..120: mol_type = other DNA
acatcgccgccttgttcctcctctatcttcctgaggaggatgcattctgggcactggtgcagctgctggccagtgagaggcactccctgcagggttagtgaacagctgccccggggacct

SEQ ID NO: 36911 - DNA, 120 bp, synthetic construct
  source 1..120: mol_type = other DNA
ccccacgccaggcagcacgcacccctccctctgggatcagcagactacaggcgtgtcctcggtgtcaggccacgggggccacacagagaccccgaggactccagagacgcaggcaggtgg

SEQ ID NO: 36912 - DNA, 120 bp, synthetic construct
  source 1..120: mol_type = other DNA
gtctcggggatgcagaacatcctatggagggcatttgggagtcagtgctcaggccactccgggtcacgcaggtcatttgccggcctctgtcataattattgccatatgagagtgccacct

SEQ ID NO: 36913 - DNA, 120 bp, synthetic construct
  source 1..120: mol_type = other DNA
ccattcacagaaatatataaaatatgtcataggacgggtggcactctcatatggcaataattatgacaggggccggcaaatgacctgcgtgacccggagtggcctgagcactgactccca

SEQ ID NO: 36914 - DNA, 120 bp, synthetic construct
  source 1..120: mol_type = other DNA
gggacacactggccccagcaggttgaatggtttccacctgccaagggtgaagggcccatgatgggctattccagggatgtggaggcagactggggtcagcgaccagaggtctctgtgcaa

SEQ ID NO: 36915 - DNA, 120 bp, synthetic construct
  source 1..120: mol_type = other DNA
ggctccctgtttcgcccaagaagctgaagaaagatccagctcagcgttggagccttgctgagattattggaattacacgccaattatccacacctcagagtcagaaacagactttgcaga

SEQ ID NO: 36916 - DNA, 120 bp, synthetic construct
  source 1..120: mol_type = other DNA
cttataatcgtgtgagatgtagggggtccaccttcattattttgcacatagatgttcaggtgacgccattgcactcaagcctgggcaacagagtgagactccaatggagacggggtttca

SEQ ID NO: 36917 - DNA, 120 bp, synthetic construct
  source 1..120: mol_type = other DNA
tccattttagaaagtgcaaaggctagagttacaaatacgaagacgtctaaaccaatcgtacatgccagaaaaaaataccgctttcacaaaactcgctcccacgtgacccacagaacaacc

SEQ ID NO: 36918 - DNA, 120 bp, synthetic construct
  source 1..120: mol_type = other DNA
tcaaagcagtgttacacagcatacaattcctgtcttcaaaaaagttacctcatcaggtacatgagacttataatgaataaaaggaatcaatacagatttggagatggtggttgttgtcat

SEQ ID NO: 36919 - DNA, 120 bp, synthetic construct
  source 1..120: mol_type = other DNA
ggattcattgctgtggccagggaaagcagaggacatgcaaaattaatatttccctttctatcttctaggatggactttcctcatttggacagccgctctggtttaaagatctgtacaaac

SEQ ID NO: 36920 - DNA, 120 bp, synthetic construct
  source 1..120: mol_type = other DNA
gcaagacgctgagtctttaacaaaaaaaaaaaaatttttaaagtcagctgctaagacacactagccacatatcaagtgctcaactgccccgtgtggctaatggcttccaaactggcagca

SEQ ID NO: 36921 - DNA, 120 bp, synthetic construct
  source 1..120: mol_type = other DNA
aattattttaattcaatttaaataaaacccaccaaggagacttcaagctttaagaagtctagcttcctgtgaaatgtgagaggaagtcagcactcatttcagaaatctgattataacaat

SEQ ID NO: 36922 - DNA, 120 bp, synthetic construct
  source 1..120: mol_type = other DNA
ctcttcaaggggtgtgcttgagtgtgtgtgtgtgtgtttgtggtggtggtggagagagatggacacaaaaaggaaaatataagaaaaggtttgaatgaaagcagagcagatcccaccatc

SEQ ID NO: 36923 - DNA, 120 bp, synthetic construct
  source 1..120: mol_type = other DNA
agaagcacatcagaaatgcccctaactcttcactaattacaaaataacgatcgccccagccctgttaccaagaaagggatccctgtatttctgtctgtttagagacaagaagatactatg

SEQ ID NO: 36924 - DNA, 120 bp, synthetic construct
  source 1..120: mol_type = other DNA
gagacatcagccagacaacgttacaccatccaggtaaagagggagggacaaactccatcactgtataactgaagaaatttttttttatgaaatattaaagcaatacaaaaccaaaaatga

SEQ ID NO: 36925 - DNA, 120 bp, synthetic construct
  source 1..120: mol_type = other DNA
ttagagttgagatgaaaaacaggtattcagtattattctaaactcttgctgttattcataccaattgacatttaataactaatcaaggcaatattttcgttttcctagagatttatcctg

SEQ ID NO: 36926 - DNA, 120 bp, synthetic construct
  source 1..120: mol_type = other DNA
aaagaggccaagagacttacgtagcttatatatgacctcctctgcttgtcctagttctgacctatagcatgggcaagaaaaggcatcaaagaagtgaccctcaaattagccttgttgctg

SEQ ID NO: 36927 - DNA, 120 bp, synthetic construct
  source 1..120: mol_type = other DNA
aggttcacacggctaataagtggcagaaccacttacaagctttgcaaataattttcaatgcagctcttagttcccctgtaataggagctgaatgatgacaatttggctttgtgtgcattg

SEQ ID NO: 36928 - DNA, 120 bp, synthetic construct
  source 1..120: mol_type = other DNA
tggaaacctcgtagcaggacaaggtgaaggcagagaaggccaggactgagcctcctgtctcctggtgcccagggttggggctatttccataccacctggaggtcacaagcatcagatgcc

SEQ ID NO: 36929 - DNA, 120 bp, synthetic construct
  source 1..120: mol_type = other DNA
gatgccactgctgtctgagggctcctccggctcaataatcagctcagtgcttgtgtaattcttccgggcttgtaacaccttcatgaacgctccttctggattccctacagatgcttcttc

SEQ ID NO: 36930 - DNA, 120 bp, synthetic construct
  source 1..120: mol_type = other DNA
gtcattaagaatacagattccatagccagactatgcttcaatctcagctctgctaataatgtgaatttgggcaaattgtttaatctctgttccttggccttgtcattataatagtaccta

SEQ ID NO: 36931 - DNA, 120 bp, synthetic construct
  source 1..120: mol_type = other DNA
ccattgacaacattcagagaacaagaaggggcctcacctgttttccctgacacgtaggaggcagatgggcattcccaggggacctggggtagagcctgttcatctgcccacccccaggct

SEQ ID NO: 36932 - DNA, 120 bp, synthetic construct
  source 1..120: mol_type = other DNA
ggtcactgaccccttttaacgttccagaaacatggccagctggtcccctagaagtttggtatatgggataagccaaggcttgccttcagcaacaggttttccaccacatcactgcccaag

SEQ ID NO: 36933 - DNA, 120 bp, synthetic construct
  source 1..120: mol_type = other DNA
gtttggccttggctagcaaaagatgcaaccacttatgtaaaaaataaaaataaaaaagttaaaaaaaatcatttctgctaactggattttttttttttttttttgcagccacatgagttt

SEQ ID NO: 36934 - DNA, 120 bp, synthetic construct
  source 1..120: mol_type = other DNA
cagtggtggaggcaaaacagctggggtgtgggccacgggcccctgctgactgtgtgtgctgttgcactggaggtagtgctggtttggggtgggtggctggccagtgaaggtgccttctct

SEQ ID NO: 36935 - DNA, 120 bp, synthetic construct
  source 1..120: mol_type = other DNA
gatgaaaagggaagtttttaaaaaccaggactatcaattcccagtctatgacactcatctagactgcagatgagggtggctcagatgtatgagatatgactggcttctggacatattctt

SEQ ID NO: 36936 - DNA, 120 bp, synthetic construct
  source 1..120: mol_type = other DNA
cgccgttagggaggagatgtcctccattgcctcaaatattgctgacagattaaataaaatgaggtggaagaaaagtgcctagatttattacagaaaaaaattagtgataatcttgaggaa

SEQ ID NO: 36937 - DNA, 120 bp, synthetic construct
  source 1..120: mol_type = other DNA
tttgatcgttcttttttcgtttggttcctggatatcaaaaacatgatggtgctcactgaaacatgaaaaccaaagtttgccacaacacaaggagcagagtgaaactgctgaagtgcaagc

SEQ ID NO: 36938 - DNA, 120 bp, synthetic construct
  source 1..120: mol_type = other DNA
agtagggcagaagtcagattatgaaagccttatgtgtacttttaagatgcttagacattaacgttcaagagtggtccctggtcctatctgtatttagatgtagatcattttaatgccaaa

SEQ ID NO: 36939 - DNA, 120 bp, synthetic construct
  source 1..120: mol_type = other DNA
tttctctctgtcccccaaacctttctcattcaattatcactaaatcatattgactatacctctcttcttcctctgctttatattaccactgccactgagaacataaacatttacaaaatg

SEQ ID NO: 36940 - DNA, 120 bp, synthetic construct
  source 1..120: mol_type = other DNA
tgtgatcaaaaattccttacttttatttttttatctacggtaggaccacccagagcaggggcccacaactctcaggtcacagactggtaccactccatggactattatgaaccacaccac

SEQ ID NO: 36941 - DNA, 120 bp, synthetic construct
  source 1..120: mol_type = other DNA
gacaaggcttggctcttgtccatgactcatcactacttacttaacctacttgagattctgagaattctcttcaatggcttcctgtgaggtacaatttgaaaatattttaaaatcttgagc

SEQ ID NO: 36942 - DNA, 120 bp, synthetic construct
  source 1..120: mol_type = other DNA
tcccaataagtataatttaatcttattaatttattatttatgacttgagtgactgctatcaatctagaacaacacacagattaaaagaaataaccataccttccatatctatcaagtgca

SEQ ID NO: 36943 - DNA, 120 bp, synthetic construct
  source 1..120: mol_type = other DNA
ttgaacaaagggacacaaagtcctgagagagccatcctctacttattggaagactactcactgcaaatttctaaagaccttctgaatggcagtgaataactgatggtagaaaggaaaagc

SEQ ID NO: 36944 - DNA, 120 bp, synthetic construct
  source 1..120: mol_type = other DNA
ctagctggaagctagtgcaatagacaattatttcagtctcatctctcatccacataaacaattccctttatcatttgaggatctggccaaaaagaggaaagagtaggagagagactcatt

SEQ ID NO: 36945 - DNA, 120 bp, synthetic construct
  source 1..120: mol_type = other DNA
aaattataattggattgaaaatcagctaacattttttgtgttgctgtttataaagggacctgggccctgacctctctgaggtttccacacccagggtggtgtggggcctgcggaggaaga

SEQ ID NO: 36946 - DNA, 120 bp, synthetic construct
  source 1..120: mol_type = other DNA
gagctggatgcaaatggcctcaaaatctccgagcacaagacgcccacggagcccagggcctgcctgaggcgccttccacacctgctcctccttggtccgcacccagaacacagggtcatc

SEQ ID NO: 36947 - DNA, 120 bp, synthetic construct
  source 1..120: mol_type = other DNA
gtgactctaaagcttttggccttggtgtctttttatgctactgtaattaattgcctagaggtacaaaacagcctgaattaatttttgttgtcattcccatgcatgtttaaatcatgttac

SEQ ID NO: 36948 - DNA, 120 bp, synthetic construct
  source 1..120: mol_type = other DNA
attacttttaacagagtttccttgagactctcttacagaatgatgtgtgtttacccaaggctacacatcaaaaagaattcgataccttaagtggaaaattagaaggtaagaaccatattt

SEQ ID NO: 36949 - DNA, 120 bp, synthetic construct
  source 1..120: mol_type = other DNA
acctggactgtattagtttgtggatgggtgtgctttgacttttctgtataagtggatcaggaaattttgagaggactaaaccagagaaccccataaatgtaaaaatactcctatatcaca

SEQ ID NO: 36950 - DNA, 120 bp, synthetic construct
  source 1..120: mol_type = other DNA
gggttgttcactccattcataacgatttatatagttgggtctgtgtctgcttttgattgggttgttcatgccgttagtaacgatttatatagttgggtctgtttctgcttttgattggat

SEQ ID NO: 36951 - DNA, 120 bp, synthetic construct
  source 1..120: mol_type = other DNA
cctgccgcacctctcctcctcgccctccaggagcttccggtaggcgttgatctccatgtccagggccagcttcacgtccagcagctcctggtactcggccagctgctgctgcatcacgtc

SEQ ID NO: 36952 - DNA, 120 bp, synthetic construct
  source 1..120: mol_type = other DNA
ggtccccttgggcaggggcttgtgggagcgtccgtacacgtccaccttgagatgagcctgcaggctctggtagtagcgcaccctggccgagtccggcttccagttggacaccgcccaggc

SEQ ID NO: 36953 - DNA, 120 bp, synthetic construct
  source 1..120: mol_type = other DNA
tctccgatgggccttggccatgtggatttctcgtttcttctgtaaagcccagggcatcatgtttcttttgagcttcccctttcaaaagaaaagaaaagaaaatgtgaaatttcaaccaat

SEQ ID NO: 36954 - DNA, 120 bp, synthetic construct
  source 1..120: mol_type = other DNA
atgtgtctgtgtctatgtctttttcttttctctgtgtttgtgtctttgtctcagtgtatgtctatgtccatgtttttttgtctgtgtctatgattatgtctatgtcaatgctatatctat

SEQ ID NO: 36955 - DNA, 120 bp, synthetic construct
  source 1..120: mol_type = other DNA
tgtactgtccttttatatgaaatttccagaacaggccaatctgaagagatgtatagtggattggtggctttcagcagctgtggggaggtgggactgaggagcgactgctaatcaggatgg

SEQ ID NO: 36956 - DNA, 120 bp, synthetic construct
  source 1..120: mol_type = other DNA
ccttgtctctctctcttctcctcacacctgctctcccttccctccgctcccacctgaccacactggctgtgccctctcccctgtgcctgtcaccttcacttgttcctctctatcctgctc

SEQ ID NO: 36957 - DNA, 120 bp, synthetic construct
  source 1..120: mol_type = other DNA
gatgggaagggaaggacagctgtcacggggcaggagctgatgggaatgggatttgtttcatagcaaggaaggaactgagttaaaggcatctgtctcattgtttaggtatttcagtggggt

SEQ ID NO: 36958 - DNA, 120 bp, synthetic construct
  source 1..120: mol_type = other DNA
agtcacctgttttgcccatcacaagctgtggacgctgagtctcccatgacaggagcagcctcttttctcctattgttgatcaagcctaggcctactctggtttgcctggggcagaaagtc

SEQ ID NO: 36959 - DNA, 120 bp, synthetic construct
  source 1..120: mol_type = other DNA
atggcagcctggctcacagaggaacagaaaatactcacggaggagattcagggtgaatgggtcactgcggctggcactcactgggttccgtatttcacattcatagggtcctgcagtgta

SEQ ID NO: 36960 - DNA, 120 bp, synthetic construct
  source 1..120: mol_type = other DNA
ttcaggttcagtgatgggggttaagatctgagggggaggcctggacattttttttgcactgactttgatggttgaagcaggtgatttagttctggagtatagactaatcagctgaccatt

SEQ ID NO: 36961 - DNA, 120 bp, synthetic construct
  source 1..120: mol_type = other DNA
ttaccagggactatgatcctcttgattatgagatttgttccatcagtggctgagttatggatgaaacagacatagatccctctatgttttggtgatttggggaataaagcacacttgtgc

SEQ ID NO: 36962 - DNA, 120 bp, synthetic construct
  source 1..120: mol_type = other DNA
ttctctcaccacgtttctagcttgatgattagtttttggtcaattccatactggccatgctgcactcatatattttttaaagctttgggatgtgagaaaggctgattgctattttctgtc

SEQ ID NO: 36963 - DNA, 120 bp, synthetic construct
  source 1..120: mol_type = other DNA
gcaacactgaagtcccagccaaatccccgctgtgttcactgatctggagcctgagaccttcacctgtttctcccatcacaagctgtggaacctgagtctcccatgacaggagcagcctct

SEQ ID NO: 36964 - DNA, 120 bp, synthetic construct
  source 1..120: mol_type = other DNA
cccaaagtgctggcttctttcatttttcagaaccccatcctctccaggagaccccatccagtcactctgcttcctcctcctgtcctctcccaggaagttctctcctcacctgtgagcagg

SEQ ID NO: 36965 - DNA, 120 bp, synthetic construct
  source 1..120: mol_type = other DNA
gcaaagagaataatgtcacaagcgatattgtcagagggaagggaaaatcctggtctgtggaagggccacagtgaccctgtgagccaagtcgcaacactgaagtcccagccaaatccctgc

SEQ ID NO: 36966 - DNA, 120 bp, synthetic construct
  source 1..120: mol_type = other DNA
aggacactgcttcacccgggtctgagaccgcagccccgagtcctggccttcccatcccgcgtggtacaccacccacaaagacccagagacccttcccggcatctcctattcaggacccac

SEQ ID NO: 36967 - DNA, 120 bp, synthetic construct
  source 1..120: mol_type = other DNA
ccggagctgtccccggaaatgcgtgtgcttcaggtgatttaactgattattgaataggcccgcaggaggtgtgtcctgcccatggggccgaagcctcggaggacattatctggacttagt

SEQ ID NO: 36968 - DNA, 120 bp, synthetic construct
  source 1..120: mol_type = other DNA
gtggcctccgaagcctggggttcccagccccagagctcagaggtgaaggaggtgctacagctctggtgaccactggttgtttcccagtcttctccatgccaccctttcccaaaacaacaa

SEQ ID NO: 36969 - DNA, 120 bp, synthetic construct
  source 1..120: mol_type = other DNA
tctctctcttagcgggatatcttccgcaagcactgggaatgtggacatggaaagtaaattgagtctccgtgggggagtgagacagggagtgaggggtgttggacgcggcacgggaacctg

SEQ ID NO: 36970 - DNA, 120 bp, synthetic construct
  source 1..120: mol_type = other DNA
cacaaccccgaggtataaagccaggtacacgaggcaggggacgcaccaaggatggagatgttccaggtaagactgcagggcccctgggcaccttccacctccttccaggcaatcactggc

SEQ ID NO: 36971 - DNA, 120 bp, synthetic construct
  source 1..120: mol_type = other DNA
ggacaccccgatcctcccacaataaaggcttctcaatccgcactctggaggtgtctttctgtgggctcagggcaatcacacacacacaggatgggtccagcttccaaaccattttataca

SEQ ID NO: 36972 - DNA, 120 bp, synthetic construct
  source 1..120: mol_type = other DNA
ttacaggcgtgagccaccacgcccagccgtccaccctgttttctaccagagttctgtactgtgactctgtataaaatggtttggaagctggacccatcctgtgtgtgtgtggttgccctg

SEQ ID NO: 36973 - DNA, 120 bp, synthetic construct
  source 1..120: mol_type = other DNA
atctcctattcaggacccaccacccggacacctgcctttcagagcccaccccacagcccagaggacctgagataccccaacatttcagatccccaccttcaggaaatgccccacctgaag

SEQ ID NO: 36974 - DNA, 120 bp, synthetic construct
  source 1..120: mol_type = other DNA
ctgacttgcgctccccacccagggctgaactgtgcagcatcttgatcgcttctcattgaaccttgcttatactccccctgtgatcggtagctcattatctcaaaacagaatattctaagc

SEQ ID NO: 36975 - DNA, 120 bp, synthetic construct
  source 1..120: mol_type = other DNA
aagccctctgttcctgccctcccacaccccattccgcagcccctgaccagagaggcagaccacccttcctcccccgctgcctctgtgggtctggccctgaggtggcagcacctgcccggg

SEQ ID NO: 36976 - DNA, 120 bp, synthetic construct
  source 1..120: mol_type = other DNA
agagagtagggtgtaggaaggcctgcctctgcctatggtggggtcttgggaaccaggaggaggccgtgacccgagaaaggtgctggactgaagcctcaaccctcctctacttgagccatt

SEQ ID NO: 36977 - DNA, 120 bp, synthetic construct
  source 1..120: mol_type = other DNA
tgtgtggggaccctccagactcctgggcccccagtttggcactgagaggccctggctcctctgtctcctttcctacctgtcctgtttgcttgggaaaccatcactctcaggttctctgga

SEQ ID NO: 36978 - DNA, 120 bp, synthetic construct
  source 1..120: mol_type = other DNA
tggagctgcgtggggtaagggccggggattcagggcgctacacctgccgagcggagaacaggcttggctcccagcagcgagccctggacctctctgtgcagtgtgagtgtgcctagcagg

SEQ ID NO: 36979 - DNA, 120 bp, synthetic construct
  source 1..120: mol_type = other DNA
acgttgcactcctggacacgatgcatttatttgcattttgtctcccaccatgaggtgagctcaggaggcgggggcggctttgctccctgctgtgtctgcagctcccatggggagccccat

SEQ ID NO: 36980 - DNA, 120 bp, synthetic construct
  source 1..120: mol_type = other DNA
cacgtgaccctgagcaaggcccaagttgtgagcaagtctcagggtcctcactgtcaactgggaaaaaactctgcagtgatgagaatcacatgcacgtagaaggtgcaggaggcgtgggaa

SEQ ID NO: 36981 - DNA, 120 bp, synthetic construct
  source 1..120: mol_type = other DNA
atgaatgaaagatggatataagctatgcttgtgaggtagaatcatttgcagggagggcttgctgggtttgatttttcctagtagtttaatccttgtttcattaatttctttctgagatgt

SEQ ID NO: 36982 - DNA, 120 bp, synthetic construct
  source 1..120: mol_type = other DNA
ctctcaaccccttggcagagtcaagttctgtggggaccagggttagactggggtgctcaaagctggggtgtgtggttgggaagtggtaggaacagcagatcctctgaggacaaaggtgtt

SEQ ID NO: 36983 - DNA, 120 bp, synthetic construct
  source 1..120: mol_type = other DNA
gccatgtttattctgacacctctgccttccatgtaatggagagtaatcgtcccaggatatcatggccccagaacaccaacccctgtatgctgtgtgaacttgtggtctccagactggatt

SEQ ID NO: 36984 - DNA, 120 bp, synthetic construct
  source 1..120: mol_type = other DNA
ctgaggattccaggcaagaatctgcttctcacttatcccagcttctaaaggctcccagttccttggctcctgttccccttcctccttcctcaaagcccacaaagactggtcacatctcac

SEQ ID NO: 36985 - DNA, 120 bp, synthetic construct
  source 1..120: mol_type = other DNA
tttcaggtgacaaagaaggtctcactattcagatatttgtgacattaatgaaaaacacggattgaacccctgaaagattggcggaaggattttgcacacacagctgtcagccgtgaaggc

SEQ ID NO: 36986 - DNA, 120 bp, synthetic construct
  source 1..120: mol_type = other DNA
gaagacagcccaggctgttctgagacgttcctcctgatctcaggacgttgctgtcttagtccatttttgttgctctaaaggaacacttgagcctgggtaacttctagagaaaagagattg

SEQ ID NO: 36987 - DNA, 120 bp, synthetic construct
  source 1..120: mol_type = other DNA
agggtgagtccttctcccaaccttcgggtgtcatctccccacataagaggattttcctgaaatgggagggaagtcctgtcagggagtctctcataaactaggaagaagggaccctggggt

SEQ ID NO: 36988 - DNA, 120 bp, synthetic construct
  source 1..120: mol_type = other DNA
ccagtgggtggtcggcacccagcaaccccctggagatcacggtcacaggtcagagggctcctgtctgggattctccttgtcccacctcctgaatcccagagctcctggtgggcgtgtcct

SEQ ID NO: 36989 - DNA, 120 bp, synthetic construct
  source 1..120: mol_type = other DNA
gaaagtgctctggtcatcacaaaaaaaacttgcccactcacccaaatcccccacctcacccctacttccaatcacctgtggagattcagatagaccatggggaggtaaacattaacactc

SEQ ID NO: 36990 - DNA, 120 bp, synthetic construct
  source 1..120: mol_type = other DNA
ggtaacttctaaagaaaagagattggtttgcctcaccgttctgcaggctgtactggaagcatggcaccagcatctatttctcgtgacggcctcaggctgctcccactctggcagaaggga

SEQ ID NO: 36991 - DNA, 120 bp, synthetic construct
  source 1..120: mol_type = other DNA
acctacagatgcttcggctctttccatggatctccctacgagtggtcagacccgagtgacccactgcctgtttctgtcacaggtgaggaaagccaatgtctgtcccatgtcctatggtcc

SEQ ID NO: 36992 - DNA, 120 bp, synthetic construct
  source 1..120: mol_type = other DNA
catttctgtgatgatgagtgatgctgagcactttttcatatacgtgatcgccatttctatgttttgtttgtggagaaatgtctcctcatgtcttttgctcgttttttaattaaattgttt

SEQ ID NO: 36993 - DNA, 120 bp, synthetic construct
  source 1..120: mol_type = other DNA
ctggcaggcagctctcactccagatctgagctgtccgcagaagcagctggaggccaggggagaaactccagaaggagaggtgagttcaatcttatggaattcatttttacaaaaggcgta

SEQ ID NO: 36994 - DNA, 120 bp, synthetic construct
  source 1..120: mol_type = other DNA
tactccctgtgttacatacatggttgtgtcctttaacttatgaggcctcctacattctgtgaccgttatagtccagtaataatacatagcaccatcttccatctgaagccaacatcctgt

SEQ ID NO: 36995 - DNA, 120 bp, synthetic construct
  source 1..120: mol_type = other DNA
acaaactgcccctatgctgaggtatcacaatccatctctcccacacatctactctcgcacatcctcctctcaaggtcctcaaacataggagaaactaggcccactggtcatggggtatag

SEQ ID NO: 36996 - DNA, 120 bp, synthetic construct
  source 1..120: mol_type = other DNA
ttgacatttactagctgtgtgactttagataacttttattctctcacaaaatctgtttcctcatctattacactaggataatagactggttattccccctggcccttttcttttctaata

SEQ ID NO: 36997 - DNA, 120 bp, synthetic construct
  source 1..120: mol_type = other DNA
aaaaagaaaagtagtattcacgttttggacattcctatctaaactaggtggaaagagaaaatggagagtactgggttctaaggaggcaggtattctagggtaagtaatttggtattttaa

SEQ ID NO: 36998 - DNA, 120 bp, synthetic construct
  source 1..120: mol_type = other DNA
cctttgtccattttgtgtgctatttaaacagcagactttacactatcaatgtcccaaatcctcctctgacacccttcaggcccctgtggctggtcccttgagtagctgaggggcagagca

SEQ ID NO: 36999 - DNA, 120 bp, synthetic construct
  source 1..120: mol_type = other DNA
ggtttcattcatgataacaggctttgaggtctgtgtggacgccccacaagctctgagtgcctggtgtataatagcatctcatttagccctgcatcccccattttacagacaaggaaactg

SEQ ID NO: 37000 - DNA, 120 bp, synthetic construct
  source 1..120: mol_type = other DNA
cgaatttagtgctaggatgaaggtttcttcttttggtggcaggttgtttctttctatcactggggttggggtgccatacaacttggggtcttccctttgtttaaactgatgttgccgggt

SEQ ID NO: 37001 - DNA, 120 bp, synthetic construct
  source 1..120: mol_type = other DNA
gactctgaaatctcatgagtggaaaggtgtggggcttacagagacaaaaacaataagctaaagccaaaccccaaaccccaaaccccaaactcccaaagtccatttttcaatacgaaaatc

SEQ ID NO: 37002 - DNA, 120 bp, synthetic construct
  source 1..120: mol_type = other DNA
gagatactgttttgcacctactttacccatgaggaaagagagactcaggagggttaaagatgtgctcaaggtcacacagtgatccagattaaaacccagcttgtgggaccccaaaacctg

SEQ ID NO: 37003 - DNA, 120 bp, synthetic construct
  source 1..120: mol_type = other DNA
ccccttttcactgcctccccttctcctgcgtccaggcttttgaggggaggtggcctcagtccaggggctctccggtcccccggggtaatgcgatatgggggtattttatttccaccctta

SEQ ID NO: 37004 - DNA, 120 bp, synthetic construct
  source 1..120: mol_type = other DNA
cttcggttgacgtttgttcagtacaggttggtataagtatttggggacctcactatattgtcttctgcagctgtgcctgagtgttgactggttaaaatacttgtccatttattataaagc

SEQ ID NO: 37005 - DNA, 120 bp, synthetic construct
  source 1..120: mol_type = other DNA
gattttgaagacctgtgtcagtggcaagtggatggttgaggttggagtagaggataacatgactggagatgaggtgattaaggaactgagtagtcagcctgggcaacacggcaagacccc

SEQ ID NO: 37006 - DNA, 120 bp, synthetic construct
  source 1..120: mol_type = other DNA
ctaatggcacaaagaaaaatttcaaacccttaagccaatttttttattttatttcaggtgctattcaagcacataatggtagtcttcagcaccttacttggcttggcttacagtggaatt

SEQ ID NO: 37007 - DNA, 120 bp, synthetic construct
  source 1..120: mol_type = other DNA
cctcacccttagtgaccagtaacacatcttagccatgccaaacaagtacaatgataaaataacaatctctgatttttttttgagtataccagttttattaccagctaaggtagctcttaa

SEQ ID NO: 37008 - DNA, 120 bp, synthetic construct
  source 1..120: mol_type = other DNA
cattttattgtgtatctctgtaaggccgaatcaatagattttgaacaatctcacacttaacctttaaaaaaaatctaataggcccagtttcctctcagcaatctttgaagaaccttcgag

SEQ ID NO: 37009 - DNA, 120 bp, synthetic construct
  source 1..120: mol_type = other DNA
gatagagcagcagactccagaagccaatttgactttgtgatttctgaaaaaattacctgtcaactgtgagcctgtttcattgtctgtaaagtttgaataatgatacctaccccgcctgat

SEQ ID NO: 37010 - DNA, 120 bp, synthetic construct
  source 1..120: mol_type = other DNA
ggttacccactttagccatttttaaattcactgatcaatcacatggggagtactcctaacgtacctacagcaaactaatgcttttaacccaatactacgtattatgattgccagtacatc

SEQ ID NO: 37011 - DNA, 120 bp, synthetic construct
  source 1..120: mol_type = other DNA
tttttttttttccccaaagtactttctcaagcacatcaacataagccccctaagagacatttcacattaaaaataaaacgtctgcccactgctggtttctcaatttgcctccaccttctg

SEQ ID NO: 37012 - DNA, 120 bp, synthetic construct
  source 1..120: mol_type = other DNA
cttagtttgcttgttttcaaagtgacagaagggagcaaaaggttatataaactccggtgggtacatacagttgctgtgggatattgacctgctgctaacttacctgccagggtttttcca

SEQ ID NO: 37013 - DNA, 120 bp, synthetic construct
  source 1..120: mol_type = other DNA
atagtattctcttaatttgcaaatactgctgatcacactgtaataatcgccacacatcagcatatccttgatgtaactttagcagtataatttagttcttgcctgataaacatgaaagaa

SEQ ID NO: 37014 - DNA, 120 bp, synthetic construct
  source 1..120: mol_type = other DNA
aatctttaaagagtgcttcaaagtatctaacttgttacactgcaagaaaacaatctcctgccattacatatgttctttaacactactgacaccagattaactggattgccacgcccaata

SEQ ID NO: 37015 - DNA, 120 bp, synthetic construct
  source 1..120: mol_type = other DNA
catgtccagaaagggcctccttgtccattctcccacagcttctctgctgtgccccacgctagtcattccgctgccctagccaggacctgagggcatcgctgagctgccccgctcccttcc

SEQ ID NO: 37016 - DNA, 120 bp, synthetic construct
  source 1..120: mol_type = other DNA
gtcaagaaaagaaggctggcgggtaaaggagcctctggggaggcaggagaccattctcggtgtaggactggcatgtgcaaaggcctgcagctaaggcagtacgtgatgtgcaaggatggg

SEQ ID NO: 37017 - DNA, 120 bp, synthetic construct
  source 1..120: mol_type = other DNA
ggaactttcagaaagcactggttgaaggaacgctggaatccctgggacttactgcgtagcatgtagtagttgctcctctagaaaagtttcaccttatgaagtatagcaggtaaaatacaa

SEQ ID NO: 37018 - DNA, 120 bp, synthetic construct
  source 1..120: mol_type = other DNA
catgcccctcattagggacttgggtatatctctatagagcagtaatatgcagccacaagaaataaagaggacactctctatgtattgttacatattgttaagcagagatctccaaaatca

SEQ ID NO: 37019 - DNA, 120 bp, synthetic construct
  source 1..120: mol_type = other DNA
tctgtctaccttcccagtgtttctccgctcctgtatatgtttatactgtacatatacttaccttttacttaagactccatcaggagcattttttcatgccattaagtattcgccctgaca

SEQ ID NO: 37020 - DNA, 120 bp, synthetic construct
  source 1..120: mol_type = other DNA
cctcttccttacacccaatcttggtgaaatgtctcatctccagtgtctgaaaaggtttataccaaccttcaaatttgaactagaatacatatcataccatttatccaataaactagaatt

SEQ ID NO: 37021 - DNA, 120 bp, synthetic construct
  source 1..120: mol_type = other DNA
gacaccacaactgcaacattccacacctgacctcatgtgacaggctctggggaaaacagtaaaaactttcttacctgcaaaaaattactgtaaaacattgtagagaattaccttcaggct

SEQ ID NO: 37022 - DNA, 120 bp, synthetic construct
  source 1..120: mol_type = other DNA
tttttgtaattaattttagtgggacactgctacaccccttcagtctgcatattgttcatggctacttttgtgctgtaactgcagggctgagttattgcaacaaggatcttatggctcaca

SEQ ID NO: 37023 - DNA, 120 bp, synthetic construct
  source 1..120: mol_type = other DNA
aagtgcaaacaatatcaggaactttttaactcaattccaagagtaaagataagatacaagttgctatagattccaacactattttaagttttataactagttaaatgtttttaaaatgaa

SEQ ID NO: 37024 - DNA, 120 bp, synthetic construct
  source 1..120: mol_type = other DNA
tcattttggtggctgtattcagaacagaatttttattttcaattgtagcctgaatgggttttaaaacaaagtgattagcacatgatgtatattggtataggttatgcagttaataattaa

SEQ ID NO: 37025 - DNA, 120 bp, synthetic construct
  source 1..120: mol_type = other DNA
agtttgtgtctttgggacaggaacatgaggaaatacactgaagaaaataggaatacacgcttccagaaaatatacagtcagaaattacaaagaggtattatgcgtcatgtgtgtattact

SEQ ID NO: 37026 - DNA, 120 bp, synthetic construct
  source 1..120: mol_type = other DNA
gaggctgttatgtgctgaaccgctctcctatggctcttcttcccaatttcaatgtagggaagtctacaatcttactactcagatcatggtcaaggaccagcaccatcagggtcacccgag

SEQ ID NO: 37027 - DNA, 120 bp, synthetic construct
  source 1..120: mol_type = other DNA
ctctcctagttttttctccatgcttttttcctctggctatattcaaaagagaatctttctcatctcttgtagcctgaatggaatttgaaatgcaataataaattaataaagtatgtttca

SEQ ID NO: 37028 - DNA, 120 bp, synthetic construct
  source 1..120: mol_type = other DNA
aatattccttgaaaataaccatttgggattcaagtaatgaattcaacattattttcacttctaaaatagtctggttaaagtatcatgttattctctagagaatttttattaagttgctat

SEQ ID NO: 37029 - DNA, 120 bp, synthetic construct
  source 1..120: mol_type = other DNA
gtaacactttgaccattggccatttccactccttactgttagtctctgaaaagcacacactggattttctcagagtcaggacatgtcaaaaagacatgctttaagggggaaacagttgca

SEQ ID NO: 37030 - DNA, 120 bp, synthetic construct
  source 1..120: mol_type = other DNA
taatacaaagcaaacaaaccaacattaattcaggttgttggttacctgtaggcaatgaattgtagtagtatcaaagactctaaggctaaaacagctcagaatcattgctttaaaaccctg

SEQ ID NO: 37031 - DNA, 120 bp, synthetic construct
  source 1..120: mol_type = other DNA
aattcattatttctacaattcaagtcaataaaatacagtgacagcacaaaggcaataacacttatttctacttgggaagcttctgagacactgtaaatttagggtcctatttttaaaata

SEQ ID NO: 37032 - DNA, 120 bp, synthetic construct
  source 1..120: mol_type = other DNA
tctttcaggttgctttctacttctttccttccctaatggcaaacctaagaatcatttactcccacaaccttttaggaatcctagtcccatgcatatatttcccttgttgtcacacttctt

SEQ ID NO: 37033 - DNA, 120 bp, synthetic construct
  source 1..120: mol_type = other DNA
aataaaaagtttaatttgtttactataaaataacacatcccaagaattaaccatgatcattcacctgaaagctgaaacattcttactacaaacagagagagagagacagagagaggaaaa

SEQ ID NO: 37034 - DNA, 120 bp, synthetic construct
  source 1..120: mol_type = other DNA
gagatacaaagaccctgagtggattattttttaattacaatgcaaaaaccttgtgaaattaaagtctgatcatagaaatatgaagagtctctgcttatcaaacaggttgttattttaaac

SEQ ID NO: 37035 - DNA, 120 bp, synthetic construct
  source 1..120: mol_type = other DNA
gcaaaacggtccagtaggtagagacacctacagagcaaaaagatatgaaaaaaatgagcacgttcatttcttaaaagaaaacaaaaaccgtcagtctatacatgcaggtcccctccaaaa

SEQ ID NO: 37036 - DNA, 120 bp, synthetic construct
  source 1..120: mol_type = other DNA
ttctaaataacactctaaagacagttaatatataacaaaatgtgactttctgaattgatctgatgtaaataagtaccgtggccccattgctgcataggcctctatccatctatgcttagg

SEQ ID NO: 37037 - DNA, 120 bp, synthetic construct
  source 1..120: mol_type = other DNA
cgtggagaaataatctttctctttgggatgtatagttttgaaataatctagaagaaaaacacaataggtttaagaataacatggagcaagttaaaataaggataatacccaccattacta

SEQ ID NO: 37038 - DNA, 120 bp, synthetic construct
  source 1..120: mol_type = other DNA
tgccaagcttggtcttaaactcctgggctcaagaaattctcctgacttgatctcttgaataggtgggactacaggcacatgataccatgtctagttaaatttccacaatttctaatatta

SEQ ID NO: 37039 - DNA, 120 bp, synthetic construct
  source 1..120: mol_type = other DNA
caatcctacatttgtcctaccctacatgtacatgagagaattgagaaaagagtcagaaaaaaagagacatccaccctggatcacagatctatgtacttaagcaatctccagctccctagt

SEQ ID NO: 37040 - DNA, 120 bp, synthetic construct
  source 1..120: mol_type = other DNA
gaattaaagcaaaattatgctgtcccctcagcctgttgtatcttgaactgctctccaatggttcttcttcccaatttcaatgtagggaagtctataatcttactactcagatcatggaca

SEQ ID NO: 37041 - DNA, 120 bp, synthetic construct
  source 1..120: mol_type = other DNA
aagtgctctgtggaagtgttctgaattgatcagcttaaatatatgtttggtgaatcctagcatataatattccttatttctcacaccgctgtggagtcataatgtgcctacatttcttct

SEQ ID NO: 37042 - DNA, 120 bp, synthetic construct
  source 1..120: mol_type = other DNA
aggtgattaatgctcctgcatgtttttcatgtaacacatcagagggatttataccattatactacaaatatttatcatgttcttaaacttgcctgacaattgagcaggtacacaatgaca

SEQ ID NO: 37043 - DNA, 120 bp, synthetic construct
  source 1..120: mol_type = other DNA
gaaatctatcccccatgtgtaagaggaaattactgtacttattttgttgaaacacaacagtttctccacctcttcagtttaaactatttaggataaagcactctaattcaaaaaatctag

SEQ ID NO: 37044 - DNA, 120 bp, synthetic construct
  source 1..120: mol_type = other DNA
aaagtacaacctcttgagattgtccctttccactgctagtctatctggacccatctcacagagaaggatgaaccagttagtgctgtgtagtacacagcatgaagtcattttcctcaaccc

SEQ ID NO: 37045 - DNA, 120 bp, synthetic construct
  source 1..120: mol_type = other DNA
aggctgtttataaaacacctttccctaatctgttctccttaacagttgcctttgagattcctgtatttccgcatgaataaatccataaaggaatagaaataattatgccaaaaaataatg

SEQ ID NO: 37046 - DNA, 120 bp, synthetic construct
  source 1..120: mol_type = other DNA
cttaggaccctgatgcaaatatttatgtaattataatcttaggaccctggtacataactcctttaaaaatttatttatattctagtttccaattaattcttacctaactttttttatttt

SEQ ID NO: 37047 - DNA, 120 bp, synthetic construct
  source 1..120: mol_type = other DNA
tatataagagaatagtagctagcccacagaacactgctgtgatgcttacataagaatctatgcacagcatttagaacactttctaacacaaataacagctcaataatttttagatattac

SEQ ID NO: 37048 - DNA, 120 bp, synthetic construct
  source 1..120: mol_type = other DNA
tatctactgacatctgcaaaggtcccatattgtcccatcctatggatgcactgaaatttattgataaatttataaaatttataaaatccattataaggggttttccaaatacattgctat

SEQ ID NO: 37049 - DNA, 120 bp, synthetic construct
  source 1..120: mol_type = other DNA
gttaatttccacaagttatttactaacagctgaaacaacaaatcagtgaatggaacaggttagaaaatccaggaacacaccaatatgtgtaagaatttattaggttggtgcaaaagcaat

SEQ ID NO: 37050 - DNA, 120 bp, synthetic construct
  source 1..120: mol_type = other DNA
gtaatatctaaaaattattgagctgttatttgtgttagaaagtgttctaaatgctgtgcatagattcttatgtaagcatcacagcagtgttctgtgggctagctactattctcttatata

SEQ ID NO: 37051 - DNA, 120 bp, synthetic construct
  source 1..120: mol_type = other DNA
catgtatgttttaaaatatttccttgaagctgggcatggtggtgcctctagccagagcaacagattaagacactgcctctaacagcaacaacacaacaacaacaacaacaataaaacatt

SEQ ID NO: 37052 - DNA, 120 bp, synthetic construct
  source 1..120: mol_type = other DNA
gcttggagacatatccatagcaaatataaaaatacaaggtatatagtccaaatgtgtcccatacatgtgtttagtttgtgtctacaaattgtctcaacatggaaggtttaggagactcgt

SEQ ID NO: 37053 - DNA, 120 bp, synthetic construct
  source 1..120: mol_type = other DNA
ttgataagccattgtatttttatttctgattgatattttacctaaaataaaaaaagtaagaattaattggaaactagaatacaaatagatttttaaaggagttatgtaccagggtcctaa

SEQ ID NO: 37054 - DNA, 120 bp, synthetic construct
  source 1..120: mol_type = other DNA
gttagaatgtccagctaacagagcaaggtgctgatgttttggaaacaatggctgagcatataagtatgtgcatatattatatatacacacatatgtatgtaagaatataatgtaagtaac

SEQ ID NO: 37055 - DNA, 120 bp, synthetic construct
  source 1..120: mol_type = other DNA
tatcaacttgtggttggcccctcaagtgatctgttatctataataatgaagatctctcaagctgcttgcatcagtatctcaagtttataaaatattttcggattctatttcacaggaagc

SEQ ID NO: 37056 - DNA, 120 bp, synthetic construct
  source 1..120: mol_type = other DNA
gaatgttaaaaatgctgcttcattaaacctatataacaacctagtgaaagaagatagtaaaatctagaagaagacattgtgcctaagagaagcaacttgtttaagagcaaatacctgttg

SEQ ID NO: 37057 - DNA, 120 bp, synthetic construct
  source 1..120: mol_type = other DNA
aggtctctatacagaagttactatggcaatattagataattataatctgttcttattcgattaacctttcagtaaaatggttagataaaataagtaatgatttctcatttaaaattaaaa

SEQ ID NO: 37058 - DNA, 120 bp, synthetic construct
  source 1..120: mol_type = other DNA
atgattgacttatggcaggcagcctccagatggcttcagggtggggctcatcatcatagtgatcagggtgtgattagagggttgggacttccagccccacccctcacctcctgggatgtg

SEQ ID NO: 37059 - DNA, 120 bp, synthetic construct
  source 1..120: mol_type = other DNA
tatgctctcttcgtgttgataccatatggacataaatatggtgacataccagcatggatatgcttatgtggttgcttttattgatttgtactatattagaaatgaaacagaagtatggga

SEQ ID NO: 37060 - DNA, 120 bp, synthetic construct
  source 1..120: mol_type = other DNA
aatatgcatacattggctttgttgttcagagagctaacttttggacaaaatagcaatttaatgaaaacagtttagtgaataacatgatccttcaaaccagactattttagaaccaaaaat

SEQ ID NO: 37061 - DNA, 120 bp, synthetic construct
  source 1..120: mol_type = other DNA
ggtgcataaaatttcagaatgttaagaaatcctagagactaaacaaagtatcctctagtgcttgaatccttgcttaacatcctgatcaagtggttgttcaggtggagaacctgaaactca

SEQ ID NO: 37062 - DNA, 120 bp, synthetic construct
  source 1..120: mol_type = other DNA
tgcagcaatggggccatggtacttatttacatcagatcaattcagaaagtcacattttgttatatattaactgtctttagagtgttatttagaagcctggctactccaaaagtttttcca

SEQ ID NO: 37063 - DNA, 120 bp, synthetic construct
  source 1..120: mol_type = other DNA
gagattgccatggatccctgctgaagagggatccagaagggggagcccataggaaggaagatatttagatagtgatgaatgaaatgaagctctaagtactcaggagggagacttttccac

SEQ ID NO: 37064 - DNA, 120 bp, synthetic construct
  source 1..120: mol_type = other DNA
ttaaagaaatagggggggttaattttaatttttttttactttgcaaataagaaatagttgataaatactttgagaggtgtgatctgaaaaaaaaattgctggaaaatacatagtgacagg

SEQ ID NO: 37065 - DNA, 120 bp, synthetic construct
  source 1..120: mol_type = other DNA
atgctgatacaaaatgaacataaatatgatgacataccaacatagatttgcttatgtggttgcctttattgatttgtactataaagaaattaaatagaagtatttcagataccccgagta

SEQ ID NO: 37066 - DNA, 120 bp, synthetic construct
  source 1..120: mol_type = other DNA
gctttgacatttatccttctggggtcctatttggtcctttcttttgacatcacattttttggcttcagttaagaggatcacattggtagaagtactttcctgtgttagttgtagtcatgt

SEQ ID NO: 37067 - DNA, 120 bp, synthetic construct
  source 1..120: mol_type = other DNA
agaattgggataaaccacagtgactcattgctcctctttgttaccattgggcaccagaggtatatgttttgttgacattggttattcaaatgagataaacgtgaatatgcatacattggc

SEQ ID NO: 37068 - DNA, 120 bp, synthetic construct
  source 1..120: mol_type = other DNA
gaagagatttcaactaaagtgtcattataattgtgtaccttctcactgatcaatcaagttaaagagcatgatgaatgtttgcagtaaaatgttccaaatcattctgatatcttgcatgaa

SEQ ID NO: 37069 - DNA, 120 bp, synthetic construct
  source 1..120: mol_type = other DNA
tgtagacttccctacattgaaattgggaagaaaaaccattggagagaagttcaacacataccaggctaagggagcagcataattttgctttaattttacagcatgtttccatcaagaggg

SEQ ID NO: 37070 - DNA, 120 bp, synthetic construct
  source 1..120: mol_type = other DNA
acttccccacattgaaattgggaagaagaaacgttggagagccattaaagacataaggagtcaggggacagcataattttgcattaattctacagcatgttttcaccaagggaggaagga

SEQ ID NO: 37071 - DNA, 120 bp, synthetic construct
  source 1..120: mol_type = other DNA
ttctacagacgtcacatagtactgctaagaaaagacagaaaactgatagtaataacccatagacactgtagaacgagaactaaggagacccctgatgtagcaattattttcccaaggaag

SEQ ID NO: 37072 - DNA, 120 bp, synthetic construct
  source 1..120: mol_type = other DNA
tcccaaggaagatggattgtcagacaggaaggagggaaaagaagttatttatataatttaggggtttctgctgaggaaatctgagtgaactcacttcacatgcatttggaatatgtgcct

SEQ ID NO: 37073 - DNA, 120 bp, synthetic construct
  source 1..120: mol_type = other DNA
tcaaggagctaagtcttggataaaatagctattgaatgaaacttctttagagaatagcatgatactccaaagaagactttttagaaacaaaaaatatgttgaattctaattaactcctaa

SEQ ID NO: 37074 - DNA, 120 bp, synthetic construct
  source 1..120: mol_type = other DNA
tgctcattgaaaatgcactttctgattcagcaggcctgagattgtgcatttctactgagttgtcaggtgttgttgatgctgctggtccttggccatgatcttagtaacaagcttatagac

SEQ ID NO: 37075 - DNA, 120 bp, synthetic construct
  source 1..120: mol_type = other DNA
ttttactattgtgacatgacctttgttatttattgctggaatgtttttttttttttgctatgaaatctactttggtattaatacagccacacctgctcagctgcctttgccaactgttag

SEQ ID NO: 37076 - DNA, 120 bp, synthetic construct
  source 1..120: mol_type = other DNA
aagttagaactgagagatgctttcctctgattaaagtcaatgtgtcacttataaaattttaagttataaaatgttaacatagactaacattaataatgtagtcttatactgctgaagtaa

SEQ ID NO: 37077 - DNA, 120 bp, synthetic construct
  source 1..120: mol_type = other DNA
ttaaaaaaagagggaaatcattccacaatgtataatttactaccatcagtctcacccacatactcatttctttttgagacttcagaaggtttttaagcattgcagattcatcaagggagg

SEQ ID NO: 37078 - DNA, 120 bp, synthetic construct
  source 1..120: mol_type = other DNA
aggttaacttgttcagaaaggccattttactgaataaatttttatttcgatgaaaatccttacttcctttgtattgggctcagagagcacactctgtctctatatgaatatggacagtta

SEQ ID NO: 37079 - DNA, 120 bp, synthetic construct
  source 1..120: mol_type = other DNA
gaaaacataaacattcatagtgaagggtatacttatgctttgttaattcatcatgtttcatagctttaaaaaaatcgcaagaaatctgtgtatccctttttttctggccctacacttttc

SEQ ID NO: 37080 - DNA, 120 bp, synthetic construct
  source 1..120: mol_type = other DNA
gaagaatggcagtggcatctgcacagcttctggtcagggacccagaaggcttttacttgtggctaaaggtgaagagacaacgggtatgacacacatggctagagaggtaggaagagaggg

SEQ ID NO: 37081 - DNA, 120 bp, synthetic construct
  source 1..120: mol_type = other DNA
atggctcacaaagccttacataatactatctggccctttacagaaaagttcacagacccctgctctaggactaaaacacaacattcttcttgcttttgaattacattttatcaattaaat

SEQ ID NO: 37082 - DNA, 120 bp, synthetic construct
  source 1..120: mol_type = other DNA
aactctctcaacttctgtgagaaatgatgcataattctcaactttcctaaggttaaatatttaagaaaaaaatatatgtataaaaaatggcagaatgaaagccagagattaagatatagg

SEQ ID NO: 37083 - DNA, 120 bp, synthetic construct
  source 1..120: mol_type = other DNA
aggaagaacatgggaatgtctgctttcactacttgtttgtagcattgttctgaagattctagttaatgcagtcaggcaagaaaaagaaataagaggcatccaagtttaaaaaaaagaaat

SEQ ID NO: 37084 - DNA, 120 bp, synthetic construct
  source 1..120: mol_type = other DNA
acttgtggtactataaaggcactgtcactttaaaagattttatcactatatgaacagtgtacacttgagtgctttttcctaatattactaactaatgattaggcaaactttaaattatta

SEQ ID NO: 37085 - DNA, 120 bp, synthetic construct
  source 1..120: mol_type = other DNA
ttcagaacagaatctttattttcaattgtagcctgaatgggttttaaaacaaagtgattagcacatgatgtatattggtataggttatgcagttaataattaaaaatataaatgtaagag

SEQ ID NO: 37086 - DNA, 120 bp, synthetic construct
  source 1..120: mol_type = other DNA
gagtcagaatgtgcagcttcgaccagccccccactgatttattcggggaagagaacttcttatctggactgaacatgacattaaatgtgtttcgcaaaattacctgtcctagatatttct

SEQ ID NO: 37087 - DNA, 120 bp, synthetic construct
  source 1..120: mol_type = other DNA
gtacacttcacaagtcctcggtggaagtggcccagcttcaacagcttggatataggttgggataatcctgtatataatattctttatttctcaaacccatgtggtgtaataatgtgccta

SEQ ID NO: 37088 - DNA, 120 bp, synthetic construct
  source 1..120: mol_type = other DNA
tgtcaaagcaggtggtacatgatccctcatgtctttcttgcaagaaatcagaaggatttacaccattatactacagatgttcattatgccctttaacttgcccaataactagaaggtaca

SEQ ID NO: 37089 - DNA, 120 bp, synthetic construct
  source 1..120: mol_type = other DNA
atccctcatgcaaatattctaaatgcatctgaagtgagttcacttaatctaagagttataatttaaaaaatcattttatttatactcatgaagactcctgatgtttttacatttcctgga

SEQ ID NO: 37090 - DNA, 120 bp, synthetic construct
  source 1..120: mol_type = other DNA
tgtattggagagcatccaggtagctgaatacagctacctggatgctctccaaatccaatccttttgggattttatgaaagcttcattacataggcatgactgattaattgaacattcagc

SEQ ID NO: 37091 - DNA, 120 bp, synthetic construct
  source 1..120: mol_type = other DNA
taaaaatttgagaatatggatgattaaaaatatatcccatagtatgaaagcttctagaagagaaacaaaaagatcacagccaattgtcttcaactcaccaaggtttcttttataataatt

SEQ ID NO: 37092 - DNA, 120 bp, synthetic construct
  source 1..120: mol_type = other DNA
ctgcaggcttaaaacaataatattaataggaatgctaatagtagtagtcatagcttcagttaatgatgctcataagcatgtgctaggcatttaattaaacactatatatatatatatatg

SEQ ID NO: 37093 - DNA, 120 bp, synthetic construct
  source 1..120: mol_type = other DNA
aaacaacatcaaaacacagtagaaatgaaaaactaacatgaaacccctttagctaatgtaagatcatacaatcaaaagcatcacattattacattgtaaataacaccacatcatcttaca

SEQ ID NO: 37094 - DNA, 120 bp, synthetic construct
  source 1..120: mol_type = other DNA
cattataccccaaaagagagactccatgatcacccatgtttgaaaaatgttacaaaactgtgcattatgtgtctagtatttgagaaatcttttgaacttcacctaatccctatttgtaaa

SEQ ID NO: 37095 - DNA, 120 bp, synthetic construct
  source 1..120: mol_type = other DNA
ttaggtaaaatataaatcagaaataaaaatacaatggcttatcaattaaagctctaataatgacctatatgtattctttgtattcttactaacttcatggttttcagtgtttaaaactgc

SEQ ID NO: 37096 - DNA, 120 bp, synthetic construct
  source 1..120: mol_type = other DNA
ccgcagccctcagcctgcaaaggggtacttctccacatccacaggcctcctcccgcagccccggctcccggcccccattacctttccttcctgtctctcttattggcgtcataatacgtg

SEQ ID NO: 37097 - DNA, 120 bp, synthetic construct
  source 1..120: mol_type = other DNA
ctggctctcaaggggaagagattatacaaaggcatgaatttctggaggaggcaatgagggcaaagaactctgaaaagtctctcttccacaatctgaagaacttctagaaagtagaaggaa

SEQ ID NO: 37098 - DNA, 120 bp, synthetic construct
  source 1..120: mol_type = other DNA
ttgtttggggactactgctacactctaagtcattttaccttataacgcagagttgtaacacgctactctgagcagctcatgacatctgcttgaaatttaagttgggcccctagtatgtgt

SEQ ID NO: 37099 - DNA, 120 bp, synthetic construct
  source 1..120: mol_type = other DNA
tatggtggtaagtttcctttgcatgtctttctttctggcatcttagaccttttacctaggaaattttctttttgcttgaagtacatcattaagaattttcagtgaaggcagattcttaaa

SEQ ID NO: 37100 - DNA, 120 bp, synthetic construct
  source 1..120: mol_type = other DNA
tgtactcacattgataagagacaagtagtaaataatctttaaagggcaaactaatttaaatgtgttttcctgtctgtttacaggacttaccaaatgcacatcttagagttctgggtttct

SEQ ID NO: 37101 - DNA, 120 bp, synthetic construct
  source 1..120: mol_type = other DNA
acaccaactagataaggtcaatcagtcaaaagtaagatgtctggacattctgggcctcctgatgtcttagaaagcacacaataccatctatgatgtatttttgtccaccatcccacctaa

SEQ ID NO: 37102 - DNA, 120 bp, synthetic construct
  source 1..120: mol_type = other DNA
atttataacaggaagaagtctctctctttcactacctggcttcaagaaaatgaactgcagcaagacgttcttcaagtgttccacgttagctgcagacacctcttgctcttgattcctttc

SEQ ID NO: 37103 - DNA, 120 bp, synthetic construct
  source 1..120: mol_type = other DNA
catcggcagcctccactaaccccctgcccctacgctgttcctgaagtcccaggcagttaagacgtccacagtgaacggcacttaatcaaaagttcagacacagtgaaaattcaggaatat

SEQ ID NO: 37104 - DNA, 120 bp, synthetic construct
  source 1..120: mol_type = other DNA
gtaatctagatttttaaacttcagatttcatttattttgcatttcattaaattgccttagtcctgactgacctttctgaagcattttcctgggtttctggtaagctgactgcttattcca

SEQ ID NO: 37105 - DNA, 120 bp, synthetic construct
  source 1..120: mol_type = other DNA
ctctccttcattataaacaaaaacttagtatcatttcctagctaggagaaataacagtacaccgtaagatacagattcttgttccacttctggtattactcagtaaagacaccttgggta

SEQ ID NO: 37106 - DNA, 120 bp, synthetic construct
  source 1..120: mol_type = other DNA
tttgcaacatctgcaaatgtaaaagtgctacttgtttggccaaaaatcacaccacggcccttcttccggccactaatatcctgagcctgtaagccagtatcattttcaagaggcttttca

SEQ ID NO: 37107 - DNA, 120 bp, synthetic construct
  source 1..120: mol_type = other DNA
ctataatatactgaagggccagtagttgcaactaaaaaaaaaaaagaaaagaaagaaaacactgttaaagtctatactacagttaagactatctaggcaagagctacaaatacaaaagca

SEQ ID NO: 37108 - DNA, 120 bp, synthetic construct
  source 1..120: mol_type = other DNA
aaaatgacgaggttgcattgtgcaaattgaagctattatgagaatgttcaggtcaaaaaaattacctgacaaattcatgcacaggatctctcaaggaacacaaatgtgttcgttggcttt

SEQ ID NO: 37109 - DNA, 120 bp, synthetic construct
  source 1..120: mol_type = other DNA
cgcatttcgcaaagaaccatttttatagagaggacctccttcactatagttttcgagttcctgcatgactgacttaagcatctcttttacagactccaggggcacaggcaactaaaaata

SEQ ID NO: 37110 - DNA, 120 bp, synthetic construct
  source 1..120: mol_type = other DNA
ttctaattccccaagaagtactttttaagagcatatacctagattcccaagtttaaaaagacacaccaaacctaagacaaagcaagcaaatctaagcatttagacacacacatcccttct

SEQ ID NO: 37111 - DNA, 120 bp, synthetic construct
  source 1..120: mol_type = other DNA
ctgttcttcttttttattatcttcaacaatggcaaaactttcttccaataatgaacacttctccctatgtattctcgttgatcataaaaagaattaagaccgctgccctaaaaaagaaag

SEQ ID NO: 37112 - DNA, 120 bp, synthetic construct
  source 1..120: mol_type = other DNA
tttaaaataaactgataaaataaaatacaagcatctaagatgtttctattatatattcattctacagaaatatgtggtagttaataaagactgaggtaggtatctctgtgctgaagtgga

SEQ ID NO: 37113 - DNA, 120 bp, synthetic construct
  source 1..120: mol_type = other DNA
ccatcatacgagattacatctttatcatgttcccaaaaatggcagagtaaaaagatcaaactcttcaaatttgtctacaaacaaatcatggcaatgcaggctttcgacaagagtgcactc

SEQ ID NO: 37114 - DNA, 120 bp, synthetic construct
  source 1..120: mol_type = other DNA
acatatttgtgtagattttctccagaacagttacttagtaaactatattttactctataaagaatatcaggaccagtcaacacactagcaagaacttcctaccatttttagtaattacgt

SEQ ID NO: 37115 - DNA, 120 bp, synthetic construct
  source 1..120: mol_type = other DNA
tattccagaaatctcttctcctaccatgtgtaaaagcctctatgggaaagaataagtaagtacttaggatctattaaggcactgaggattccctgtgcctcaatagtacatgtactgttc

SEQ ID NO: 37116 - DNA, 120 bp, synthetic construct
  source 1..120: mol_type = other DNA
cagctgtcaaaggtgcctgcctgtagtcctaagtactcaggaaacagaggtaggaggatcatttatgcccaaaaatttgatgagcaacacagcaagaccctattctaaaaaaaatataaa

SEQ ID NO: 37117 - DNA, 120 bp, synthetic construct
  source 1..120: mol_type = other DNA
ttttccctgaagggcttcgggcacctgtgtacttgcagccccactgtgtgctcgtgagcacataaccaccatcggggagaggattgcaggtttcttcaattcagtggttcaaagtcaggt

SEQ ID NO: 37118 - DNA, 120 bp, synthetic construct
  source 1..120: mol_type = other DNA
acattcttagctctcctgaggagagcaatcaggctttgcatgcacagaataccgcagagtatcccaaactcatcccatccgttatttcatcccacctattatttcatccccttggttctg

SEQ ID NO: 37119 - DNA, 120 bp, synthetic construct
  source 1..120: mol_type = other DNA
atccaggcatggagaaaatagcctgtggtgctcacagatctgagttgcgatttgaggtagttgttccccagcctctaactgtccttagaaaatcatcccatccgcaggctaatttcttct

SEQ ID NO: 37120 - DNA, 120 bp, synthetic construct
  source 1..120: mol_type = other DNA
catgtttcgattgatggcaacctggtttggtactattcatcgttttggacattcactggggtcttggaatttcaaaaataagatgtttgagtagctgtatactctgtatcacatggatgg

SEQ ID NO: 37121 - DNA, 120 bp, synthetic construct
  source 1..120: mol_type = other DNA
tggcctcatttctctgatggtaatactgtcaaggaacctagaggatatttacttattttagttgttacttgatttgagaaatggaaatttcctgtatttggtactgtaattagtaatttt

SEQ ID NO: 37122 - DNA, 120 bp, synthetic construct
  source 1..120: mol_type = other DNA
caaatataatttttatttggttcatttccagaaaattccaagacacttttattttaacacctttgaagtaatatgttttctctagaagtagaattttttaagagttggagtgataatttt

SEQ ID NO: 37123 - DNA, 120 bp, synthetic construct
  source 1..120: mol_type = other DNA
tttttgacttgattcagtcagaactttatgtaagacctgatgacgtccatgtgaacatccggctagtggagttgtatcgctcaactaaaagattgaaggatgctgtggcccgctgccatg

SEQ ID NO: 37124 - DNA, 120 bp, synthetic construct
  source 1..120: mol_type = other DNA
atggttaaatactcagttttgtcatagtcaagcttaaaatgaatgttctaactgctatttcatattttatttttttataatagtataatcttgagtgaaaattaaggttcatctgtcatc

SEQ ID NO: 37125 - DNA, 120 bp, synthetic construct
  source 1..120: mol_type = other DNA
gtcaacattttgtttcttattttgtgtgctcttttcaacatatagatgacaaactttgacatgatgtttagaaaacttgtgagtaaaaggataggcgatacgaatatttctaaaattcaa

SEQ ID NO: 37126 - DNA, 120 bp, synthetic construct
  source 1..120: mol_type = other DNA
ccttcgccattctattcatcatgcttttttttttccataggttattgcatgaggatctctttaatttcctggttgtcccatttattccagtgctatcccctattatccatactctgaaaa

SEQ ID NO: 37127 - DNA, 120 bp, synthetic construct
  source 1..120: mol_type = other DNA
tcccccttctgctgtcttatgtagatactgagaatattaaacctgtactcttttcatttgctacataagcacccgttttgttgtccagctgtattttttgggttggagggttaggtctgc

SEQ ID NO: 37128 - DNA, 120 bp, synthetic construct
  source 1..120: mol_type = other DNA
gagatgggaatttccagtttataaacaaagacatggagctatacactgcttaaattaattgccttgttatttaacggtaatcttgttttctaaattcactagctctcacagataagatat

SEQ ID NO: 37129 - DNA, 120 bp, synthetic construct
  source 1..120: mol_type = other DNA
ggttcccgagtgattgaactgctacaatgtactaatcatactctggtctatgagttcattcccagattagctgtggattacatgtgtttcaaatgtatagctaggaattgaaaagtggtc

SEQ ID NO: 37130 - DNA, 120 bp, synthetic construct
  source 1..120: mol_type = other DNA
atcaggtagccacatagctacactagacggcattgtatctatctgccatcttgtcaaggcagcagagttgtgttaagaaaacatttttggagtcagatgtggttcaaattccagctgtta

SEQ ID NO: 37131 - DNA, 120 bp, synthetic construct
  source 1..120: mol_type = other DNA
ccaggcagccagaaataacaaaattgttccttttatgtacgacagacttctgaaatggtagtagtagtgcccttttttttctctctctctttttagcccaggaaagatttagaataaaat

SEQ ID NO: 37132 - DNA, 120 bp, synthetic construct
  source 1..120: mol_type = other DNA
aaatattcagtttatgctcttaccactagtatctgatagtgccattttcgcacttttgctaatgctgacttactagtttataaaatcctttgccaatttgtaggaacaaaagtgatatca

SEQ ID NO: 37133 - DNA, 120 bp, synthetic construct
  source 1..120: mol_type = other DNA
ttgaggatagagtgttggggtgcatttagacccttgctcttctgcttattttgaccacaggcaagtttcttaacctctcaatgcatcagttgcctcatatgtaaaatgaggataataata

SEQ ID NO: 37134 - DNA, 120 bp, synthetic construct
  source 1..120: mol_type = other DNA
tgcgaagagaacaagtactaaaagtgtgtgctaatcattggataacgactacaatgaacctgaagcccctgtctggatcagatagagcatggatgtggtcagccagtgatttctctgatg

SEQ ID NO: 37135 - DNA, 120 bp, synthetic construct
  source 1..120: mol_type = other DNA
tacaatgataaagtaacaatctctgatttttttttttaagtataccagttttattaccagctaaggtagctcttaatcttttattttaaagatacggtctttgagaaatgtgaaaagtgt

SEQ ID NO: 37136 - DNA, 120 bp, synthetic construct
  source 1..120: mol_type = other DNA
gtatatgccaaagaatcaacaaaggaagtaatcagccagggcaaaggtcgcacaagagattgtaatctagcaatcagcagtggaataagcagtcagcttaccagaaacccaggaaaatgc

SEQ ID NO: 37137 - DNA, 120 bp, synthetic construct
  source 1..120: mol_type = other DNA
ggaatattaatagatgggaagaagatgtgtaataaaactgtctataaacacaattctgacaaatttcagaactgggactcatagggcttgtattcagttagatgacatgctttacaacag

SEQ ID NO: 37138 - DNA, 120 bp, synthetic construct
  source 1..120: mol_type = other DNA
gaaaggaatcaagagcaagaggagtctgcagctaacgtggaacacttgaagaacgtcttgctgcagttcattttcttgaagccaggtagtgaaagagagagacttcttcctgttataaat

SEQ ID NO: 37139 - DNA, 120 bp, synthetic construct
  source 1..120: mol_type = other DNA
ttatttttgacatttacaagcacaaggaaggcgctataatctctcttgagttgtcacccatctctaacagttttcaactcatggacaatcttttggcataaataggggagagttagagac

SEQ ID NO: 37140 - DNA, 120 bp, synthetic construct
  source 1..120: mol_type = other DNA
aaaattccaattgctggtccccaatttctgacccaagattctgcatttttagcaatttgttgctgatacttctggtctggggcccataccttgaaaacccctggtctagaggcctgataa

SEQ ID NO: 37141 - DNA, 120 bp, synthetic construct
  source 1..120: mol_type = other DNA
ttgttttggttcagttttaaggtttaccataaatctattggttttagattctaagttgtatataagcttctgttttaaaagaattttttttaaaatcctcttatcatcaacaatatttag

SEQ ID NO: 37142 - DNA, 120 bp, synthetic construct
  source 1..120: mol_type = other DNA
atccataaaatatgcagccctaacatgatttcatttttgtttcctttcctggaaaaggagaaatcattcagatcagctttcatattgccttatagacgatgacttcaaaatagttttaaa

SEQ ID NO: 37143 - DNA, 120 bp, synthetic construct
  source 1..120: mol_type = other DNA
gcctcctccttcatgttcagtttcatgatgaaagactgaagtgccacatgcatgccaggtatttgatagctgtgaggtcagaggtggcatctctatggcccatatgggcagtggcatgat

SEQ ID NO: 37144 - DNA, 120 bp, synthetic construct
  source 1..120: mol_type = other DNA
ttttattgaaatgggcaattatgacaaaggccttaggagagctcggtccaggggagcaatagagaagaactcagagaaaaagacaggctttgtttttccagacattttccttatatccct

SEQ ID NO: 37145 - DNA, 120 bp, synthetic construct
  source 1..120: mol_type = other DNA
ttcaaaatatcccttttctagctattttgaaatagctattttgaaatattttgaaatgcaatatattattaaccaaagtcactctactgtgcaatagaacactagaacttattcgtccta

SEQ ID NO: 37146 - DNA, 120 bp, synthetic construct
  source 1..120: mol_type = other DNA
ataatataagaaggaaattatgaatatgactggtgtggtggtatgtatctgacctagtcttgcatcttatccttttaagatacagatgttttggtaggagtctgaaacctgttcaggcct

SEQ ID NO: 37147 - DNA, 120 bp, synthetic construct
  source 1..120: mol_type = other DNA
tcgcccccctccccgcccggaacactttggtagctgcctttgcttaaaaaaaaaaaattctaaagttcttacaaatcgttagtatggcttgcaatttttaaccttttccacagatgtttt

SEQ ID NO: 37148 - DNA, 120 bp, synthetic construct
  source 1..120: mol_type = other DNA
aaaaatttggtaaatgtgacatttaatggtaaaatgagtatgtggtcaactctatgtacgtgtttttaagtattacccatttctttctatgaatacttttgagttatctgcataaatagt

SEQ ID NO: 37149 - DNA, 120 bp, synthetic construct
  source 1..120: mol_type = other DNA
gaaaccagttgggagggttcttctgaggaaaagagggaattagttgaagggatctgtaagcaaacagtaattatggatataagggattatagcattttttgcctgacagaagaaagtgtg

SEQ ID NO: 37150 - DNA, 120 bp, synthetic construct
  source 1..120: mol_type = other DNA
tggaaataactgggaataagacatcatttgagaggttaagcatgaagtataggaagtatgcaggataaaaataagcattagatgattcataatttataacatggggaataagaattatta

SEQ ID NO: 37151 - DNA, 120 bp, synthetic construct
  source 1..120: mol_type = other DNA
attccattgtatggatgtactgtagttttggagtttttaaaaccagggtcctaaaaccaggacattagcttgcttttacttttgttttaaatgctacttcaagtaatttagcaatgatta

SEQ ID NO: 37152 - DNA, 120 bp, synthetic construct
  source 1..120: mol_type = other DNA
aaagcacttgccagtataatacattgctcccaggcagccagaaataacaaaattgttccttttacgtacgacagacttctgaaatggtagtagtagtgccctttttttttttctcttttt

SEQ ID NO: 37153 - DNA, 120 bp, synthetic construct
  source 1..120: mol_type = other DNA
ttgaggacagagtgttggggtgcatttagacccttgctcttctgcttattttgaccacaggcaagtttcttaacctctcaatgcatcagttgcctcatatgtaaaatgaggataataata

SEQ ID NO: 37154 - DNA, 120 bp, synthetic construct
  source 1..120: mol_type = other DNA
tttaagaaaatttttgatgaagcaaaaacagcccaggaaaaagattctttgataacacctcatgtttctcggtcaagcactcccagagagtcaccatgtggcaaaattgctgtagctata

SEQ ID NO: 37155 - DNA, 120 bp, synthetic construct
  source 1..120: mol_type = other DNA
accatagctctcagaatgtttccctgtcaccagttggtatacatggcatgcttcataactggcttactttattaaactcctttagccagaagttcttctttacattaatagatcagaaca

SEQ ID NO: 37156 - DNA, 120 bp, synthetic construct
  source 1..120: mol_type = other DNA
aactatcctctcacccttccaagaaactgacagtttcagtttattcctcttgatgaagtaatgctaaatttttgtagtgatgttttggtatattttattacttgtaattaatattactgt

SEQ ID NO: 37157 - DNA, 120 bp, synthetic construct
  source 1..120: mol_type = other DNA
actggttgagagaaaaattgaagctggtaaatggtggaacaaaattcaaactcatagctgtctgaaaagtacatgcttttcccctgtactttgctgctcctaatagatctgtcctgccac

SEQ ID NO: 37158 - DNA, 120 bp, synthetic construct
  source 1..120: mol_type = other DNA
acattgtcttatattcctgaattttcactgtgtctgaacttttgttttgattaagtgccgttcactgtggacgtcttaactgcctgggactttaggaacagggtaggggcagggggttag

SEQ ID NO: 37159 - DNA, 120 bp, synthetic construct
  source 1..120: mol_type = other DNA
cagataaaaccagacagaacagaaaaataaaatgactttaactctagaaagtttccccatgtaaaattttgaaaatgctactctgcctaaggtcaaactgtcatacatatatacgtatga

SEQ ID NO: 37160 - DNA, 120 bp, synthetic construct
  source 1..120: mol_type = other DNA
cccattgcatagctttggcagtgacataaatctggcagcgtaagatcgagaaaagctagaagtctcaccacagattgtatttcagtgaaagggattctttttaactgcttataaaactaa

SEQ ID NO: 37161 - DNA, 120 bp, synthetic construct
  source 1..120: mol_type = other DNA
aataaagttgagctttgactggtctgaagtgatgaacatggtgtgtctgcacgcagttatttatggcaaggctacaaaacaggatgactgttttgtgaaacattttggggagaaaggcaa

SEQ ID NO: 37162 - DNA, 120 bp, synthetic construct
  source 1..120: mol_type = other DNA
aatttagttcctcaaggctgctaaactgatggcctgtgttccttgcctctgggatggtagcttgcttcaacaaagtgtgcaagcagagaagacagagagaggccgctagcaagatagaag

SEQ ID NO: 37163 - DNA, 120 bp, synthetic construct
  source 1..120: mol_type = other DNA
atttgcctccaaggagatgagagaggcaaaaggtacttgtttgctctgatgggccctgtttccttcagtgccaggaagagtggctctcagacctttcttctggcatccctcatgtatgca

SEQ ID NO: 37164 - DNA, 120 bp, synthetic construct
  source 1..120: mol_type = other DNA
actaaccccctgcccctaccctgttcctaaagtcccaggcagttaagacgtccacagtgaacggcacttaatcaaaacaaaagttcagacacagtgaaaattcaggaatataagacaatg

SEQ ID NO: 37165 - DNA, 120 bp, synthetic construct
  source 1..120: mol_type = other DNA
gcagcaattgaaaaaaatcttaaaacataagcaagtattagtatacatatgaaactaatccaaagccaactgtgattagttcctgtaaggaaagttaacaattgccaagaatggaaggtg

SEQ ID NO: 37166 - DNA, 120 bp, synthetic construct
  source 1..120: mol_type = other DNA
cttaaactggcattctttaacatgcatgttgtagtggtaagtacttcatttcatacagccacagtaattaatactttgctaagggctacccagctgctaaaaactgctgttatctcatac

SEQ ID NO: 37167 - DNA, 120 bp, synthetic construct
  source 1..120: mol_type = other DNA
agttactgaaatgtctttaactaagttctcttgctctttgaaacctcaccgtgaacttattaagggagaaaaaaaattgctcaaatattttgggggtgttcacaaagcatcgtttatatc

SEQ ID NO: 37168 - DNA, 120 bp, synthetic construct
  source 1..120: mol_type = other DNA
aaacaacttgttcattttcctcaccactggatacttcaactagatcaggtaaaggaacaacaggttcaaagtactgtccatctctctcttcttcttgagtaacaacagattcttcatcag

SEQ ID NO: 37169 - DNA, 120 bp, synthetic construct
  source 1..120: mol_type = other DNA
tttgcaacatctgcaaatgtaaaagtgctacttgtttggccaaaaatcacaccacggcccttcttccggccactaatatcctgagcctggaagccagtatcattttcaagaggcttttcc

SEQ ID NO: 37170 - DNA, 120 bp, synthetic construct
  source 1..120: mol_type = other DNA
agtgagccttgaaaatctgcaaaatgacgaggttgcattgtgcaaattgaagctattatgagaatgttcaggtcaaaaaaattacctgacaaattcacgcacaggatctcacaaggaaca

SEQ ID NO: 37171 - DNA, 120 bp, synthetic construct
  source 1..120: mol_type = other DNA
agagttctaggtacctggtgctgattttaaaatatgattcttaatttgttaaaaatttatctgctcccattttcattcgttaatacaaaacctaattcattaactctctcacctaaacaa

SEQ ID NO: 37172 - DNA, 120 bp, synthetic construct
  source 1..120: mol_type = other DNA
atctcaattttcaagctaaataaaatttcccccattcatccatctacagtgcctagtccagatgctacacatacacatccaagaaataagaaactagtggaatcacctagaaaactttat

SEQ ID NO: 37173 - DNA, 120 bp, synthetic construct
  source 1..120: mol_type = other DNA
aatactgttcttctttattatcttcaacaatggcaaaactttcttccaataatgaacacttctccctatgtattctagttgaccataaaaagaattaagaccgctgccctaaaaaagaaa

SEQ ID NO: 37174 - DNA, 120 bp, synthetic construct
  source 1..120: mol_type = other DNA
tatcttctatcttcctcactatgctctcagctctttaagacagatccgtatcttcttcatctttatatccccacagcagtgtttttagaatcagctggtgttaaatggttggcaaatcaa

SEQ ID NO: 37175 - DNA, 120 bp, synthetic construct
  source 1..120: mol_type = other DNA
taatcattgctaaattacttgaagtagcatttaaaacaaaagtaaaagcaagctaatgtcctggttttaggaccctggttttaaaaactccaaaactacagtacatccatacaatggaat

SEQ ID NO: 37176 - DNA, 120 bp, synthetic construct
  source 1..120: mol_type = other DNA
taataattcttattccccatgttataaattatgaatcatctaatgcttatttttatcctgcatacttcctatacttcatgcttaacctctcaaatgatgtcttattcccagttatttcca

SEQ ID NO: 37177 - DNA, 120 bp, synthetic construct
  source 1..120: mol_type = other DNA
ggtaaatcacatagttgagttattttgtttcttagctaaaacagtattttctgaaataccagtgatgctaagtgcttatactagtacatgtgaacctagccatctgatgacagatgaact

SEQ ID NO: 37178 - DNA, 120 bp, synthetic construct
  source 1..120: mol_type = other DNA
gttctacataaataaaagaaatttaagtcctgcggggcactgctgctttagtacaaaaagatgtatgctaattgcctacatagaaatgtaaagactcaatagcttttatctaccttaagg

SEQ ID NO: 37179 - DNA, 120 bp, synthetic construct
  source 1..120: mol_type = other DNA
aaccaccataccacccttcttattcttccacctcactgagggcctacatacccttactttcagaaatatacttctccaccatatgacaagttcccttcaagacaataacatcatcaagtt

SEQ ID NO: 37180 - DNA, 120 bp, synthetic construct
  source 1..120: mol_type = other DNA
actatttatgcagataactcaaaagtattcatagaaagaaatgggtaatacttaaaaacacgtacatagagttgaccacatactcattttaccattaaatgtcacatttaccaaattttt

SEQ ID NO: 37181 - DNA, 120 bp, synthetic construct
  source 1..120: mol_type = other DNA
tgccattgcactccagcctgggcgacagagactccatctcccaaacatcatcatcatcatcatcatcatcatcatcatcatcatcataaataagctgggtgcagttggtcacacctttaa

SEQ ID NO: 37182 - DNA, 120 bp, synthetic construct
  source 1..120: mol_type = other DNA
taaaacatctgtggaaaaggttaaaaattgcaagccatactaacgatttgtaagaactttagaattttttttttttaagcaaaggcagctaccaaagtgttccgggcggggaggggggcg

SEQ ID NO: 37183 - DNA, 120 bp, synthetic construct
  source 1..120: mol_type = other DNA
aaatattgttgacgataagaggattttaaaaaaaattcttttaaaacagaagcttatatacaacttagaatctaaaaccaatagatttatgggaaaccttaaaactgaaccacaacaaac

SEQ ID NO: 37184 - DNA, 120 bp, synthetic construct
  source 1..120: mol_type = other DNA
ttatcaggcctctagaccgggggttctcaaggtatgggccccagaccagaagtatcagcaacaaattgctaaaaatgcagaatcttgggtcagaaattggggaccagcaattggaatttt

SEQ ID NO: 37185 - DNA, 120 bp, synthetic construct
  source 1..120: mol_type = other DNA
gtctctaactctcccctatttacgccaaaagattgtccatgagttgaaaactgttagagatgggtgacaactcaagagagattatagcgtcttccttgtgcttgtaaatgtcaaaaataa

SEQ ID NO: 37186 - DNA, 120 bp, synthetic construct
  source 1..120: mol_type = other DNA
tgatgagattaaataatgtatgtaaagcccagggcctgggtcataagaactcctcaacaagcagtatgactatattctgaggggtgatttatcagtgagccagggtggaaaaacctcatt

SEQ ID NO: 37187 - DNA, 120 bp, synthetic construct
  source 1..120: mol_type = other DNA
aagcatgactccgtacactgtaccaagttcttttgctctgccctagcatgatagaagtatcttccagttactgaaatgtctttaactaagttctcttgctctttgaaacctcaccgagaa

SEQ ID NO: 37188 - DNA, 120 bp, synthetic construct
  source 1..120: mol_type = other DNA
atactgaagggccagtagttgcaactgaaaaaaaaaaaagaaaagaaagaaaacactgttaaagtctatactacagttaagactatctaggcaagagctataaatacaaaagcaatagaa

SEQ ID NO: 37189 - DNA, 120 bp, synthetic construct
  source 1..120: mol_type = other DNA
atctaatgcttatttttatcctgcatacttcctatacttcatgcttaacctctcaaatgatgtcttattcccagttatttccagccctccaatcacaggataaatataagattagtgatt

SEQ ID NO: 37190 - DNA, 120 bp, synthetic construct
  source 1..120: mol_type = other DNA
cctaaaaaaaaaaaaaagcctgcctccctcttaatttcctgctttaatccactcccagccaggaaatcagaatcaccaagcttcttatccctaggatagagccttacagcatcacatatt

SEQ ID NO: 37191 - DNA, 120 bp, synthetic construct
  source 1..120: mol_type = other DNA
ttaaaaaaaagggtaagaaatggtcaaagaaataatacaagaaatgctacagaactgaaagaaatgagtttcccaattgaaaggacacttccagaaaacctttaagttaccaagaacaag

SEQ ID NO: 37192 - DNA, 120 bp, synthetic construct
  source 1..120: mol_type = other DNA
ttgtgtttagggcgtaagctatctattttgggctacccatcacagcttctctcctttggtagaataaagtgaactgaaccaccatgcctaaggtatttgccttatttcttcctcagctgg

SEQ ID NO: 37193 - DNA, 120 bp, synthetic construct
  source 1..120: mol_type = other DNA
agcaggggcggtgcacataggtacgtgtaacttactggtaatgcttttaggttaggaatgaggtcaaaggagttcactataaatttatattagaaagaagggctatctatggattagtga

SEQ ID NO: 37194 - DNA, 120 bp, synthetic construct
  source 1..120: mol_type = other DNA
gatcaagagcaaatgtcttcgaggtaggggctgggtcacttgcttctcgtatgggttgcctctcatcttgggagttaatgatgcccggccccctctgcgttagattcccatttctcaagt

SEQ ID NO: 37195 - DNA, 120 bp, synthetic construct
  source 1..120: mol_type = other DNA
tacataaagtattttgcaacaggtttcaaaggatgctttaatcttatcctctaggatattctatactaaaataatatatgaaaaatagcacgcaaattctcaaaaacgttaggattcttt

SEQ ID NO: 37196 - DNA, 120 bp, synthetic construct
  source 1..120: mol_type = other DNA
aaatccagtatataaaacatactagtctatttagaaagtttaccctggacaagaaaaaaatgccttcaagatagctactttattaagaaatgggggtggccaagtaagaggcctaaggag

SEQ ID NO: 37197 - DNA, 120 bp, synthetic construct
  source 1..120: mol_type = other DNA
gagagtttaattaaacacgattcagcttttcagaggaagaaagaaaaactaaagatcacagagaaagcttttatacaaattgtagttataaaaaatcttaatgtttcttgcttctaactt

SEQ ID NO: 37198 - DNA, 120 bp, synthetic construct
  source 1..120: mol_type = other DNA
gaatgtgacctgaccttctccttcccaaagcaaggagatggttaaaactcactcttgaaatttttttgttgacttttccttgtgttgcttattcattcctcggctctactttttgccatt

SEQ ID NO: 37199 - DNA, 120 bp, synthetic construct
  source 1..120: mol_type = other DNA
acaaaattcttattggcaattcagttgtttcccgttttggagactgacactctccagttctaagttaaataattgtcatggtaaagtaatttccctgaaaagaacggacattgattcagc

SEQ ID NO: 37200 - DNA, 120 bp, synthetic construct
  source 1..120: mol_type = other DNA
gggcaaattaaaacatggatagaatcatgtttctcagtgtgaagaaatatttttatttgatgaatattatatattttcaggtgcagtggcttctatgttttgggttgatgctgaattagg

SEQ ID NO: 37201 - DNA, 120 bp, synthetic construct
  source 1..120: mol_type = other DNA
tttaagaatgtcatgcttcacagagccagcccatcacaagtaaagctgagaaatggtaccctgtggccagccagccaaattgaaactgaagtggtaattgatatcatggggtatcatgct

SEQ ID NO: 37202 - DNA, 120 bp, synthetic construct
  source 1..120: mol_type = other DNA
ctagaggcagagtatataacaataggacttgttgtagcctcaggccaagatgaattatgaaaaaaatattaaacttggtcttttggcatggaatgatttttgatacaatacttgtcaagt

SEQ ID NO: 37203 - DNA, 120 bp, synthetic construct
  source 1..120: mol_type = other DNA
tgcttttaggctagaatcagggctgaatcagccttcccaccacttatttgtttctagggtgtttgaaaggcctagtactgagttcacgtggtgcatgattgtgggctggggtgtagggaa

SEQ ID NO: 37204 - DNA, 120 bp, synthetic construct
  source 1..120: mol_type = other DNA
atgatgctcaaatatgtgctaacagtcattttgctgactgttctggagactcccattccttttgaaaacaaagatggacttttcaaatgaggttatagttcaggggctttgttttgaatt

SEQ ID NO: 37205 - DNA, 120 bp, synthetic construct
  source 1..120: mol_type = other DNA
aatttggaagaagcaatttgataaattacacacccttttggcttttaccctccctttatatcagacttgtgactgactcagaatgatatttggggaggtgaaaaaaggtaaacatgtttg

SEQ ID NO: 37206 - DNA, 120 bp, synthetic construct
  source 1..120: mol_type = other DNA
acatgactcttgggaggtagattcaatgtgaggctaatctccgaggtataggaaatacaggaaggaggagcaacaggtcgggtagtggtggaagcaggtttggaaaatgtgattagtttt

SEQ ID NO: 37207 - DNA, 120 bp, synthetic construct
  source 1..120: mol_type = other DNA
aatttggttacttttattgttatgtaccttttttccccatagttaacaggaatgatttgcacaattgcatccatgatttaagcttcctgccattcctttggcatacaagaccatacttaa

SEQ ID NO: 37208 - DNA, 120 bp, synthetic construct
  source 1..120: mol_type = other DNA
acactatgtcactttactactaaatagggcatatctatatttttgtagcctctgtaggagattctgatgcactgtcctgctttagataatataaacataggggaaaatagtatcacagcc

SEQ ID NO: 37209 - DNA, 120 bp, synthetic construct
  source 1..120: mol_type = other DNA
tggaagaaggagttaattttagattcaaaacaaaaactggaaaaaaaaagtctgaaatgggtaatacctaggacctagtatatatgtgttattaaggctctatccctgaatttttaatgc

SEQ ID NO: 37210 - DNA, 120 bp, synthetic construct
  source 1..120: mol_type = other DNA
tagtcatgcaccgcataacagcgttttagtcagactgcataagattacgatggagctgaaaaattactgtcacacaaatacttaccattgtgttatcatttccatacactggtcagtaca

SEQ ID NO: 37211 - DNA, 120 bp, synthetic construct
  source 1..120: mol_type = other DNA
attatcctatcattctcatcgctaagaactcttctcctcttggcacatgcttattcagttaaagataagccaagcctttcttttgtattttttttttaagagaacaaatttactttggtt

SEQ ID NO: 37212 - DNA, 120 bp, synthetic construct
  source 1..120: mol_type = other DNA
agcaagaaagctcttttccagattttatcctgaaggcactagctactttaagctattttttattatattttgcccttgcagttggcgtttgatttctcactgaacattcgttgtcataat

SEQ ID NO: 37213 - DNA, 120 bp, synthetic construct
  source 1..120: mol_type = other DNA
ggagtagaaacaagcagaggaaaacatcccaaagggtaaccactagcgttcctgcttcttgcaacattcatcccaggcttccagctcagcccgccccgggccaggtgatcggccgccaca

SEQ ID NO: 37214 - DNA, 120 bp, synthetic construct
  source 1..120: mol_type = other DNA
gggagcgggtacaggggctgcgcagagtttgtccccgaccgcgtggagctactgccccctgctccagcgaccgtcaagcctgtcggacaattttgcagcaacagcagcagcatcaggagg

SEQ ID NO: 37215 - DNA, 120 bp, synthetic construct
  source 1..120: mol_type = other DNA
ggaaatttactatttatgagacttctaaaagaaaagaataggagggcatgtaaatatattctccatttatttttcctcaccccccaacaagctggaaaaccgtttgagatcaatttggaa

SEQ ID NO: 37216 - DNA, 120 bp, synthetic construct
  source 1..120: mol_type = other DNA
ctccaggccgaccttccttcatttattgccaacaaacgtcctgggagagcggctacagccgctgaacccagaagggactttctctaggctttcttggcaccctcccaatcatcttccttc

SEQ ID NO: 37217 - DNA, 120 bp, synthetic construct
  source 1..120: mol_type = other DNA
aacaaacagagctttcggagaatgtatcttggtatacccagctcccaagttcaatgctagtctctttatatgcctcatttcaaacagtaacaaaaaataagaatccaagtagttaacttg

SEQ ID NO: 37218 - DNA, 120 bp, synthetic construct
  source 1..120: mol_type = other DNA
tcacccttatcaatgaagggtagctgccttgacctgttgcagggtagcccatgtttactctcaattcactatattggaggccatttcagtggaatttagtgttttcaaaagaattcaatt

SEQ ID NO: 37219 - DNA, 120 bp, synthetic construct
  source 1..120: mol_type = other DNA
gggatgagtcctagagacctcctgtacagcatagtgactatagttaacaacactgtattacatacttaaagatttactggaaatagatcttatgttaagtgtccttatcacaaaacatga

SEQ ID NO: 37220 - DNA, 120 bp, synthetic construct
  source 1..120: mol_type = other DNA
cttctgtccctcgtcggtttgtactctccaaagcccgcaggctggaatgactacgttgcctgaacgggaaagatggcggcctgccccgtcttttctctcagagttttatcttgtttcgtg

SEQ ID NO: 37221 - DNA, 120 bp, synthetic construct
  source 1..120: mol_type = other DNA
caagaaaacaaataaagccatgccaatctcatgttgttttctgagaagtttggttttgtcaagaaagggtgtaacgcaactaagtcagagtccacctacaagcatttgcggtggacaatg

SEQ ID NO: 37222 - DNA, 120 bp, synthetic construct
  source 1..120: mol_type = other DNA
ctcactctcaagtttacgttaaatactatcccattacaaaaaaacactctttctcttacttcttttcattatgtcctgctaaaaagattctgattggctgcaggcggcaagagggaaaaa

SEQ ID NO: 37223 - DNA, 120 bp, synthetic construct
  source 1..120: mol_type = other DNA
ctcccaacctctggtatctcacacttttggtactagcaaaagtgaactgctcagaaaccctgccatgttcactcaagcatcttgtcttctgcacttgctgctcttcctcccaaacgggca

SEQ ID NO: 37224 - DNA, 120 bp, synthetic construct
  source 1..120: mol_type = other DNA
aattctaggaaaactgatactcatcaaatatacaaaataattgatcacagcaaaatactgggttctattaacaggaataaagtgggagaaatgcagaaaataatcttattttataaatga

SEQ ID NO: 37225 - DNA, 120 bp, synthetic construct
  source 1..120: mol_type = other DNA
tcgtggtgaccctgcctgagaagccagagcccacaggtatgggctccagacatcccagagcaaggttaagaaaacaaaatcctttactgtctccccttcccctcagcattcactcagagc

SEQ ID NO: 37226 - DNA, 120 bp, synthetic construct
  source 1..120: mol_type = other DNA
ctactgcatctttaccacctgaactgtacattattcctccacatgtctgtcccgtctgctccaagactgcagaggacagtcttgagcatcatcttactcacattttactcagaaatttct

SEQ ID NO: 37227 - DNA, 120 bp, synthetic construct
  source 1..120: mol_type = other DNA
tggctgatgcaggggactaaaactcactgccacgcgaaaactacctgaaccaaactatgacatctcacctgatatgtgagatgcaactgttataattattttaaacctcaattcagcatt

SEQ ID NO: 37228 - DNA, 120 bp, synthetic construct
  source 1..120: mol_type = other DNA
cattgctcgctgtattaatgaaagggcagcctatatgaatataaagagcatagcccttggatgacattcaacgtgggctggaatcctacttgaagctctgtcacttcctggctgttgctt

SEQ ID NO: 37229 - DNA, 120 bp, synthetic construct
  source 1..120: mol_type = other DNA
aataataaaagacagcatgtgtaatttaaaaacgctaaaactttgctatttttatttggcttaggtaaaagtgataaatagaaaaagctcccatcttttttttttttttttgaaacggag

SEQ ID NO: 37230 - DNA, 120 bp, synthetic construct
  source 1..120: mol_type = other DNA
aatataagattaacaatttgactacatttttaagattaggtttacactctgatatctaacctatcaaccacaccatcctaagagccttagctatgcatatatttggacagaagcaatttc

SEQ ID NO: 37231 - DNA, 120 bp, synthetic construct
  source 1..120: mol_type = other DNA
caaagccaaactattgggggggggggtatccttatttttaaaatatctaaatgtcattatttataattcaaaatagcaatttttattacttatgattttgtttgaaaacaaaatgatctc

SEQ ID NO: 37232 - DNA, 120 bp, synthetic construct
  source 1..120: mol_type = other DNA
aagtaaagagctgaagtaatggaaacagtaagctagaagaatatctggggaaaaagcattccagacacagggaactgctaagtgcagaggtgtgcctggagtctttaagcactaagggat

SEQ ID NO: 37233 - DNA, 120 bp, synthetic construct
  source 1..120: mol_type = other DNA
ctccacatgtctgtcccctctgctccaagactgcaggggagagtcttgcacatcatctttgtaaaaacagtctttgttttactcagaaatattttattgagtcctgctaaatacatgcta

SEQ ID NO: 37234 - DNA, 120 bp, synthetic construct
  source 1..120: mol_type = other DNA
ctcccaacctctggtatctcacacttttggtaatagcaaaagtgaactgctcagaaaccctgccatgttcactcaagcatcttgtcttctgcacttgctgctcttcctcccaaacgggca

SEQ ID NO: 37235 - DNA, 120 bp, synthetic construct
  source 1..120: mol_type = other DNA
ttatggcaccattcaggattgttccataataatcaaagaatatctctaggctttgtatctcttgaaaactcaaagtacagaattctttctgagttaaatattaactttttcactcatgat

SEQ ID NO: 37236 - DNA, 120 bp, synthetic construct
  source 1..120: mol_type = other DNA
gttttcccgcacttagctagtctgactctaaggatagtaacaagcagggcccaggaaaggtcatggtgaccctgcctgagaagccagagcccacaggtatgggctccagacatcccacag

SEQ ID NO: 37237 - DNA, 120 bp, synthetic construct
  source 1..120: mol_type = other DNA
actccgatattcatctttatccattaagttcatctgtcccattctatgtctgtggatgctaacttttgatcattgatggtgatacacatggacatttatcatcaactttcagattcttgg

SEQ ID NO: 37238 - DNA, 120 bp, synthetic construct
  source 1..120: mol_type = other DNA
ccttattctttcttgaagaagaaatccaagtctattgggatatttattatcccaatccccctcctcagcctcagaaacagaaatgtttattctaagctaatcaggtatttaccttcccag

SEQ ID NO: 37239 - DNA, 120 bp, synthetic construct
  source 1..120: mol_type = other DNA
gcaaatgttgtagttttcagaaaatgttattaagtcctaattttgcttcttagttgtcctactctttatggcttataattcagggcatctcaactatgtcatagtttataactaaattta

SEQ ID NO: 37240 - DNA, 120 bp, synthetic construct
  source 1..120: mol_type = other DNA
ggaaggttcatatgggactttctactgcccaaggttctatacaggatataaaggtgcctcacagtacagatctggtagcaaagaagaagaaacaaacactgatctctttctgccacatta

SEQ ID NO: 37241 - DNA, 120 bp, synthetic construct
  source 1..120: mol_type = other DNA
atgaagtcttagataattaggtcatttcaaaatattttcattcaggttatgcttgagcttccaaatatggaagactggcccttacacaggtcaatgttaaaatgaatgcatttcagtatt

SEQ ID NO: 37242 - DNA, 120 bp, synthetic construct
  source 1..120: mol_type = other DNA
ttaaatgagactctgcacaaaagatatagaatagttcctaacacaaataacagctcaataattgttagatattttaatttttactaataccactaaagacaacatttgaattgagatgat

SEQ ID NO: 37243 - DNA, 120 bp, synthetic construct
  source 1..120: mol_type = other DNA
tagccctgaagttgatgtgttatggggcttcattcttagttctcaatatacacttttctataatgtatagaacattgttttaaaatctgtagattaaaaataatctgctgcattgactta

SEQ ID NO: 37244 - DNA, 120 bp, synthetic construct
  source 1..120: mol_type = other DNA
tcaaatgagaaagggaattggtcatatgggtgagaaatgagactgaagtaattgtctgttgcactagctttcagctagaattgtgcatcccagtaacctgaggaaaatgtttaaataatc

SEQ ID NO: 37245 - DNA, 120 bp, synthetic construct
  source 1..120: mol_type = other DNA
tttctctagcagatattaggtgggcttgttctaaagggtgagaggggttcaaataatgtggcagaaagagatcagtgtttgtttcttcttctttgctaccagatctgtactgtgaggcac

SEQ ID NO: 37246 - DNA, 120 bp, synthetic construct
  source 1..120: mol_type = other DNA
taaatttagttataaactatgacatagttgagatgccctgaattataagccataaagagtaggacaactaagaagcaaaattaggacttaataacattttctgaaaactacaacatttgc

SEQ ID NO: 37247 - DNA, 120 bp, synthetic construct
  source 1..120: mol_type = other DNA
ctgggaaggtaaatacctgattagcttagaataaacatttctgtttctgaggctgaggagggggattgggataataaatatcccaatagacttggatttcttcttcaagaaagaataagg

SEQ ID NO: 37248 - DNA, 120 bp, synthetic construct
  source 1..120: mol_type = other DNA
ttaaaatattctcatctgcctttttgattagcttatagctaatctttccttttggaatagaggcaaaaacaaatttcagaactttgttcttttatttttacaacacccgaacatgatgaa

SEQ ID NO: 37249 - DNA, 120 bp, synthetic construct
  source 1..120: mol_type = other DNA
aagggattgtacatggggatctatatttaatataaacatttcagtatatttggtaaaacttttattaaaatacatcaaagaatctttgatctactaaaccaggagttggccagctttttc

SEQ ID NO: 37250 - DNA, 120 bp, synthetic construct
  source 1..120: mol_type = other DNA
ccacctgttatgtaaaatttggaagctactatttcttgtctatcacttttccatgactgtggatgaaaattacatcattctcagtcatgagcgttaagtatgttgtccttaaagaactgt

SEQ ID NO: 37251 - DNA, 120 bp, synthetic construct
  source 1..120: mol_type = other DNA
ggctactgatgtccttcctgaaatctacacctcatgtagtctttcctactttggttaacagcaactcttccagttgctctgccaaaaacctcagtgtcattcttgactgatctttctctc

SEQ ID NO: 37252 - DNA, 120 bp, synthetic construct
  source 1..120: mol_type = other DNA
tgttcaaaaagaaactttttaatattccagaattgtggatttaaagttttggttatgatgacttggttaataatagctctcacgaagatttttttttttgatacatcatcttaaccagaa

SEQ ID NO: 37253 - DNA, 120 bp, synthetic construct
  source 1..120: mol_type = other DNA
agtgacctgcacaatggcctcaatccaaaggagaagtatttgatgtttttcataagaattgacgatctttccacatcagaaataagttttgctactgaaaacagattttctcgtttttgg

SEQ ID NO: 37254 - DNA, 120 bp, synthetic construct
  source 1..120: mol_type = other DNA
ggccgagcgggaaatcgtgcgtgacatcaaagagaagctgtgctatgttgccctggacttcgagcaggagatggccatggtggcctccagctcctccctagagaagagctacgagctgcc

SEQ ID NO: 37255 - DNA, 120 bp, synthetic construct
  source 1..120: mol_type = other DNA
cagggggaggaccagattgtcatctttgctgtttgggcgacccaggcatttcagccttagggcttcagagtgtctgaggcggaccaggggctgaagtgaacccccagcacagcacagctg

SEQ ID NO: 37256 - DNA, 120 bp, synthetic construct
  source 1..120: mol_type = other DNA
agccagacacctattatgtggcaggcatattctactatctctcaggatccttccacctttgaaaacttcatgtttatctgctgggcttgagcaagctgagagatttaaaattggtgcatt

SEQ ID NO: 37257 - DNA, 120 bp, synthetic construct
  source 1..120: mol_type = other DNA
agagggtacagttttttttttttaatgcacttgtggtaaatactttttttgaaaacactgaatttgtaaaagataatacttactatttttcaatttttccctcctaggatgttttttccc

SEQ ID NO: 37258 - DNA, 120 bp, synthetic construct
  source 1..120: mol_type = other DNA
tcaaatgagaaagggaattggtcatgtgggtgagaaatgagactgaagtaattgtctgttgcactagctttcagctagaattgtgcatcccagtaacctgaggaaaatgtttaaataatc

SEQ ID NO: 37259 - DNA, 120 bp, synthetic construct
  source 1..120: mol_type = other DNA
aaggtctttagaaatttgctgtgagtagtctttcaataagtagaggatggccctctcaggattttgtgtctctttgttcagtcattcaagtgcttaggtcagtaagtcgttaagagcaga

SEQ ID NO: 37260 - DNA, 120 bp, synthetic construct
  source 1..120: mol_type = other DNA
gtcttttagtgcatgtaaatgtttgattctgcacagacaggcaagatgttacattggtaaagtatatcaaattagctttaaaaataactttattacagttcctatctctgtcattttagg

SEQ ID NO: 37261 - DNA, 120 bp, synthetic construct
  source 1..120: mol_type = other DNA
ttgttggtcttttctctggcagatgttaggtgggcttgttctaaagggtgagaggggttcaaataatgtggcagaaagaggtcagtgtttgtttcctctttgctaccagatctgtactgt

SEQ ID NO: 37262 - DNA, 120 bp, synthetic construct
  source 1..120: mol_type = other DNA
ttaaaatactctcatctgcctttttgattagcttatagctaatctttccttttggaatagaggcaaaaacaaatttcagaactttgttcttttatttttacaacacccgaacatgatgaa

SEQ ID NO: 37263 - DNA, 120 bp, synthetic construct
  source 1..120: mol_type = other DNA
cagttcatgtatgtatgtgatagtcatattctgtgtttttaaattccttttcttgttcacttttttctctgtacaataatagtgatattgttatacatttttatctcattaaaaagttgt

SEQ ID NO: 37264 - DNA, 120 bp, synthetic construct
  source 1..120: mol_type = other DNA
ttgaatttcagaagaaatcatgatatgtcaatctattgagtgctaactaaaagttctctttgtttacttagctttctcttagttgtaagaaagaaaaagacgtcttgcatgaaaatagta

SEQ ID NO: 37265 - DNA, 120 bp, synthetic construct
  source 1..120: mol_type = other DNA
atgaacaggtttatttacagaagacaatgaattctcatttatctcacctaaaagagaacagattctttctcaacaagtctaatgtagacagtaaaatcaacaggctaaaaattaagctcc

SEQ ID NO: 37266 - DNA, 120 bp, synthetic construct
  source 1..120: mol_type = other DNA
cagaaaagtggccgggctctctacttgatgggcagatcctcctggcctgggtctctagccagcccaccactggagctatcaagccagtagcaactctgcagttcctgggacagagcttcc

SEQ ID NO: 37267 - DNA, 120 bp, synthetic construct
  source 1..120: mol_type = other DNA
gtgtctgtgagactcggctcctaatttaggaaaacctgacctacagggaaaagctgctttgccagcagtaagatgggctgtgaagagattccctcgtgcgtgcctcagccctgctcaggt

SEQ ID NO: 37268 - DNA, 120 bp, synthetic construct
  source 1..120: mol_type = other DNA
ctctggagccacatcacccagatggggccttgtgtgcccaagctactggtaggacctgtcagccccgctgagctccctggtggcctctgggaaaatcaaggtctgtccttgagccatagg

SEQ ID NO: 37269 - DNA, 120 bp, synthetic construct
  source 1..120: mol_type = other DNA
tgacccaaggaaatgctgtttagtgttttggatctagcataatagcaacaattattttaaaaacattcagatgatttatatttgtctgaaatatgttttcattgccagaagttactacta

SEQ ID NO: 37270 - DNA, 120 bp, synthetic construct
  source 1..120: mol_type = other DNA
tatacccttccactatctgaattgttgaaagaacctagattgcttttctaacccactgaaataagcaaccaaaggcaaaaaagtaataatcccaactgtggaaatgatttcacttttctg

SEQ ID NO: 37271 - DNA, 120 bp, synthetic construct
  source 1..120: mol_type = other DNA
ttctctgagacttagatttccttttgtttttggaaacccagttgggtcccacctggcgtccccctggcacagctggggagactgagaccaggagggaatggacctgcctgagggcacaga

SEQ ID NO: 37272 - DNA, 120 bp, synthetic construct
  source 1..120: mol_type = other DNA
aaaagctgttagtaaagctatgtgtcttctggagattccgttttttgcctttccaaattccagaggctgcccacattcctttctcacagttacatcttcccatcactctaacctcttgct

SEQ ID NO: 37273 - DNA, 120 bp, synthetic construct
  source 1..120: mol_type = other DNA
ggttgtgcagccggggctcctccacggcccacttcacgtcatagccgaaccagaggttgtagatgatggcctggggcatgggagtgtgatcagcatggcttgggggctgtgcagggtggg

SEQ ID NO: 37274 - DNA, 120 bp, synthetic construct
  source 1..120: mol_type = other DNA
gacatttccttgatacccagagatctagtagactgtgtgggatcagaggttcttgtagtaagggaatggcaacttgaggagagaattcacctcttttggccaattgatcctccatctaca

SEQ ID NO: 37275 - DNA, 120 bp, synthetic construct
  source 1..120: mol_type = other DNA
acgcaaggctgtcactgacatttgtggcgccaagacttgcgcacgcggattgcacacatcggccacttcctgcaccacgtgcaatgacgcgcgcacgcctcacgcgcacgccgcataacg

SEQ ID NO: 37276 - DNA, 120 bp, synthetic construct
  source 1..120: mol_type = other DNA
gtatagattaaaaattttaaagatacaaaaggagaaaagtaccagaagaaaacacaaatgcctatttatatgtgaaaatatttatttatttttctgagacagactctcactccatagccc

SEQ ID NO: 37277 - DNA, 120 bp, synthetic construct
  source 1..120: mol_type = other DNA
tacccatctattccattatactgaaatatctatatgaaacagacacagctgtttttcttagtattgcttaaaatagccatgtattgagaagaactcatataaagatgttataaacaaatt

SEQ ID NO: 37278 - DNA, 120 bp, synthetic construct
  source 1..120: mol_type = other DNA
aatgctgccaattataattatagtaaatcatgaattataagtggtatttcagtgtaagaaatgttaaaacatggagacaatgatcatcttagactcaataaaatacagtacaacgctacc

SEQ ID NO: 37279 - DNA, 120 bp, synthetic construct
  source 1..120: mol_type = other DNA
ggaacatggcgctgatcgaaatattccagatgagtatggaaataccgctctacactatgctatctacaatgaagataaattaatggccaaagcactgctcttatatggtgctgatattga

SEQ ID NO: 37280 - DNA, 120 bp, synthetic construct
  source 1..120: mol_type = other DNA
tctttttgaccaaatcctcaaatgataaagggaattgtttatgtggatgagagatgagactgaaataattgtctattgcactagcttccagctagagttgtgcattccagttacctcagg

SEQ ID NO: 37281 - DNA, 120 bp, synthetic construct
  source 1..120: mol_type = other DNA
caaattctaaaccttttttgtcaattgaagctgtattatgggctatccagtatgtctcttaagtttgtagagctttggcttaatcaggatggcaggtttaaacactaaaaaccatggagt

SEQ ID NO: 37282 - DNA, 120 bp, synthetic construct
  source 1..120: mol_type = other DNA
tcatctcttattatattgactgatgttatttgttgtatgatgtttttggttacatgatcttatgttagctaaagggatttcatattaattttatgaagtttgaactttaactttcagttt

SEQ ID NO: 37283 - DNA, 120 bp, synthetic construct
  source 1..120: mol_type = other DNA
ccagtttagcagaaagtcttgtactgtcttctggggactatcttctacatactccttgaatttttcaagaaccaaaggggttcactaaatccaaggaagacagtcccttttatcaagtca

SEQ ID NO: 37284 - DNA, 120 bp, synthetic construct
  source 1..120: mol_type = other DNA
atggagctaggacttatgcagagttgggacactttctattatgtcatgctaatgcatgctgatttactgggtcacagtgtccttgatttatgagcatttcacctaattttttttcttctt

SEQ ID NO: 37285 - DNA, 120 bp, synthetic construct
  source 1..120: mol_type = other DNA
tggacatgaggaaggagtaggaaattttctccatgacctgtgtgagtcacagcttccagaaaagaaagagagcaaggagcatattaaggaaccacagcaaagtcagtcctagagtgccct

SEQ ID NO: 37286 - DNA, 120 bp, synthetic construct
  source 1..120: mol_type = other DNA
gagattttagtctctttgtcagttcatgtatgtatatggtagtgatactctactctctttttaaattccttttcttgttcactttcttctcagtacaataacggtgatattcttatacat

SEQ ID NO: 37287 - DNA, 120 bp, synthetic construct
  source 1..120: mol_type = other DNA
cccagccaggccacacctgcttagagggcactttcgggtgcccacaccatagcttctgtacaagcggaccatgcctgatcaatggagagctgcagcaaggtgacctctacagccacgcac

SEQ ID NO: 37288 - DNA, 120 bp, synthetic construct
  source 1..120: mol_type = other DNA
aaaggagagagtggtccatggtagcaaaccctggccttgtggttttcattctagattcttagaacaacaacaacaacaacaacaacaacatcaacaacaacaaaagacagagacagagag

SEQ ID NO: 37289 - DNA, 120 bp, synthetic construct
  source 1..120: mol_type = other DNA
tatggtgtaatactgacaggccgtacaatgccaggaagatgaatgtgcgttaatgttgctggaacatggcactgatccgaatattccagatgagtatggaaataccgctctacactatgc

SEQ ID NO: 37290 - DNA, 120 bp, synthetic construct
  source 1..120: mol_type = other DNA
agttaggctttagattcacacaatactggttttaattcctaactttcttacttgctaggtgtgtgaccttgggaacgttatttaccaccaaatatgttgtcatatatgaaaagtaggaga

SEQ ID NO: 37291 - DNA, 120 bp, synthetic construct
  source 1..120: mol_type = other DNA
cctgcctcagggcctttgcactgaccatttaggccacattccaggctcttttcacacgttgcctcctctgagaagccctccctgaccactctgcccatacctcatgcctcttgattcccc

SEQ ID NO: 37292 - DNA, 120 bp, synthetic construct
  source 1..120: mol_type = other DNA
ctgaccatttaggccacattccaggctcttttcacacgttgcctcctctgagaagccctccctgaccactctgcccatacctcatgcctcttgattccccttacctggcttgtggtttca

SEQ ID NO: 37293 - DNA, 120 bp, synthetic construct
  source 1..120: mol_type = other DNA
ggagttgggaaagacagaggagtgactactagtggggtttctttgagggggaataaagaggttctaagattagattgtaacaatggttgcacaaccctgtgaatatagtaaaaacgctga

SEQ ID NO: 37294 - DNA, 120 bp, synthetic construct
  source 1..120: mol_type = other DNA
ggaccttctctgggctctatgagctcaatgtgggcctcgctggatccacacacactgcttggaacatcctttcaagggtgccagtctccatcaccgcctaagcagtgggactcccccagg

SEQ ID NO: 37295 - DNA, 120 bp, synthetic construct
  source 1..120: mol_type = other DNA
tccccgctcccctgtgccttgccttcccctctgctcagagcctcctctgggttccctgctccccacagggcgcccagctccgtccctccctttccttctcacagcctccttctctttccc

SEQ ID NO: 37296 - DNA, 120 bp, synthetic construct
  source 1..120: mol_type = other DNA
tcattaacgggaatggaagaccctaaaggccaagttagacagctatcaaagaaaaaagacaacacatctggacctaactactcttaaagatggaatcagaaagccacgtcttgttggccg

SEQ ID NO: 37297 - DNA, 120 bp, synthetic construct
  source 1..120: mol_type = other DNA
cgtttttaatccattgcaagtaagaatttccctacatatgtgttgtcaatgaagaaacctcttaccaggtattggcaggacatatacttatttgtcctctggtaggcatgtgttacaact

SEQ ID NO: 37298 - DNA, 120 bp, synthetic construct
  source 1..120: mol_type = other DNA
tcccagagacaaccaagagccgactgtagaaaaagacttccagacacctagaatatatatcaatagacactgtttaaaaggggtacaatcttatagaaaactatgtaataaacagaattg

SEQ ID NO: 37299 - DNA, 120 bp, synthetic construct
  source 1..120: mol_type = other DNA
tcttcttggagtctcagggcaaaccctttcaagcagcgcctcccagtggccagaagctgaaatgacggcagtggtgccacctggtgaatgacccgggaagctgtggttggccctgatttc

SEQ ID NO: 37300 - DNA, 120 bp, synthetic construct
  source 1..120: mol_type = other DNA
cagatacagagatacacatgcacatacatacacatatgcacacacatacaggtacacagagatacacacatatgcacacatgcacacacacatgcacacacatgcccaccatacacatgc

SEQ ID NO: 37301 - DNA, 120 bp, synthetic construct
  source 1..120: mol_type = other DNA
tagaatgattttatatctacatttatttagcttctttagctctctaaccctttatatttcacttagagtttcctagtcttaccccactacccctcacttcccccgacacccccaccccca

SEQ ID NO: 37302 - DNA, 120 bp, synthetic construct
  source 1..120: mol_type = other DNA
aacatgtttagagacatttgcagtacagtagtttgttttaatacaactgataggtcacgttctcactctatttgcctttaagggaagaaagcaatcaagttaatacgttttccttcattg

SEQ ID NO: 37303 - DNA, 120 bp, synthetic construct
  source 1..120: mol_type = other DNA
aacttagccttggtcagacaactagttaaaagtagaattataactataatgcaggtcatctatattctaagctttattccttccacagtattcttatgcatagtctccaatatagtcaat

SEQ ID NO: 37304 - DNA, 120 bp, synthetic construct
  source 1..120: mol_type = other DNA
acagcaaatgagaggttgaagaggtggtgaggcaccaaatgctgtgggccatgttctagaatttggactttatctttaaggcagtggaaagagaatgaatggtttgaagcagttttttat

SEQ ID NO: 37305 - DNA, 120 bp, synthetic construct
  source 1..120: mol_type = other DNA
tttttcttttttggaaggtttttattaagccaaagcagccaactacaatttagaaaaattgaacttaaggataaagtgctttgtgtgatagcatctgagcctactgttttggatagccta

SEQ ID NO: 37306 - DNA, 120 bp, synthetic construct
  source 1..120: mol_type = other DNA
ccatttcataccctctgaaatggctataattaaaaaaatgaaaaagtacaatttctggcaagattgtggagaaattggcacctcatacactctggtgaaaaggtcaaaaggtgcagctcc

SEQ ID NO: 37307 - DNA, 120 bp, synthetic construct
  source 1..120: mol_type = other DNA
gactggcgtgctttggcagtccccatacaactaattggtaacacttcttcctttcctaacttggtagagaagggtgctgtatttattctatctcgaaggtgttgtggcctaggaggactg

SEQ ID NO: 37308 - DNA, 120 bp, synthetic construct
  source 1..120: mol_type = other DNA
gaaatgaaactagtttgttctcatccttgactgcatggtagaatcatctgtgatatccaggcattggattctgatgtgcggccagcagtgagaacaactgctccagttggtaatatagat

SEQ ID NO: 37309 - DNA, 120 bp, synthetic construct
  source 1..120: mol_type = other DNA
tgtaccctaaaacttaaagtatagtaaaaaaaaaataatgggtgaaggactagaaccaacatttctccaaagatatgcaaaatgcagttaccaacaattacatgagaagattctcagcat

SEQ ID NO: 37310 - DNA, 120 bp, synthetic construct
  source 1..120: mol_type = other DNA
gacttctttcttcttcaacagctactcctcacagtaaaagagcacttggtggaaattttgttctgaagtgaaggctgaaaccccagagatcaaacactgtactcaagtttacaaagctgg

SEQ ID NO: 37311 - DNA, 120 bp, synthetic construct
  source 1..120: mol_type = other DNA
tggatgaaccctgaaggatgggcagagttttaggtgaagatgcagaggaggagggataaagaaatagcatgggcctaacatatggagaaaggggagtataacatgcattgatgtggaggc

SEQ ID NO: 37312 - DNA, 120 bp, synthetic construct
  source 1..120: mol_type = other DNA
gtataaatgggaatcttgcctgtgctaaaagatgtttgaagaagactgttcccatgaagcaatattttaagggaacgattttgtttggctcttgaaccaaaggattggcaagttcaatct

SEQ ID NO: 37313 - DNA, 120 bp, synthetic construct
  source 1..120: mol_type = other DNA
aggaattggaagtggctgctaatgggtaagaggtttccttttggagtgatgaaaatgttctggagctacataatggtgatgggtgtgcatcattttgactgcattaaatgctacccattg

SEQ ID NO: 37314 - DNA, 120 bp, synthetic construct
  source 1..120: mol_type = other DNA
tatgaacttcacgttgcaaaagacacgataaacacaaaattttaaaagacagactgaaagaaatacgttggaaacacacagatcagagaattactatccctaatgtgcaaagagcactta

SEQ ID NO: 37315 - DNA, 120 bp, synthetic construct
  source 1..120: mol_type = other DNA
cagcacaccgcagcctacagcccagcaccctcagcgctgcctccactctccctccccatgggctgctcctgcaggatgggcacccccaccctcccacagctacatggccccacaggatgg

SEQ ID NO: 37316 - DNA, 120 bp, synthetic construct
  source 1..120: mol_type = other DNA
ctggataatccaggggtgaggggtggctccgggcgtgagcggctccctgactgctgctccctcatactgccttccctctcacagcttaggtttcccaagcagcagcccctccaggcagtg

SEQ ID NO: 37317 - DNA, 120 bp, synthetic construct
  source 1..120: mol_type = other DNA
aaacagtaacatgactgcactgctgaaagaatgttgcttttttcttctgcatgtgtgctgatatagagacaaagtgtgctttccctgataaataagagggtcttgtggtagccaaggagg

SEQ ID NO: 37318 - DNA, 120 bp, synthetic construct
  source 1..120: mol_type = other DNA
atatgtgagaaaatacatttcttgttccaacaccccatgtgtggttcctgcttgtggaagctctagcaaagaaaaacacctgctatgtgtgcacacacgttgttctcagtgctcttggtt

SEQ ID NO: 37319 - DNA, 120 bp, synthetic construct
  source 1..120: mol_type = other DNA
gacagctcagcagagtggccagtgccactgatccggcccctgcacagggagaactgctccgcccaccatgcaggccctgtgaggtcaggatgagtgcaggtgccttgtgggcccagttct

SEQ ID NO: 37320 - DNA, 120 bp, synthetic construct
  source 1..120: mol_type = other DNA
ggacacgcagggcatctgaggcaggggcgggggcatgcagggcaggtggggggtgcagaggcaggggcagggacacgcagggcatctggggcaggggcgggggcatgcagggcaggtgtg

SEQ ID NO: 37321 - DNA, 120 bp, synthetic construct
  source 1..120: mol_type = other DNA
ctgccatgatgatatttttttaaaagtatcctttaacctcctttaatcctttccattgtattatgttcacctaagcttgtttaaatccctttttctattttcaactggaggccagagcat

SEQ ID NO: 37322 - DNA, 120 bp, synthetic construct
  source 1..120: mol_type = other DNA
tggcagaggccacactgtgatgtcccttagctgctgctcatgggacaaggaggcaacaaaccaggtgcacagggccccagaggacaaaggagtcagtgtggttatcacagaacgccaaca

SEQ ID NO: 37323 - DNA, 120 bp, synthetic construct
  source 1..120: mol_type = other DNA
gccaccgccacgctgcacgtgctcctggtggacggcttctcccagccctacctgctgctcccggaggcggcaccggcccaggcccaggccgacttgctcaccgtctacctggtggtggcg

SEQ ID NO: 37324 - DNA, 120 bp, synthetic construct
  source 1..120: mol_type = other DNA
tctccatcaacacagacaacggccacctgttcgccctcaggtcgctggactacgaggccctgcaggcgttcgagttccgggtgggcgcttcagaccgcggctccccggctttgagcagcg

SEQ ID NO: 37325 - DNA, 120 bp, synthetic construct
  source 1..120: mol_type = other DNA
ggtggtgctggtcaaggacaatggcgagcctccgcgctcggccaccgccacgctgcacgtgctcctggtggacggcttctcccagcccttcctgccgctcccagaggcggcccccggcca

SEQ ID NO: 37326 - DNA, 120 bp, synthetic construct
  source 1..120: mol_type = other DNA
gaggagcagggcggcctcggtgggtcgctgctcggtgcccgagggtccttttccagggcatctggtggacgtgagcggcaccgggaccctgttccagagctaccagtacgaggtgtgtct

SEQ ID NO: 37327 - DNA, 120 bp, synthetic construct
  source 1..120: mol_type = other DNA
cagagactcaggcaccaacgcccaggtcacctactcgctgctgccgccccaggacccgcacctgcccctcacatccctggtctccatcaacgcggacaacggccacctgttcgccctcag

SEQ ID NO: 37328 - DNA, 120 bp, synthetic construct
  source 1..120: mol_type = other DNA
ctagcaactaagattgtatgctttcctttttttaaaaaaaaaaaaagaacggatataatgttatgtgacaattaaatacagaaattacaaaactagttaaattgatgttgccattaaagc

SEQ ID NO: 37329 - DNA, 120 bp, synthetic construct
  source 1..120: mol_type = other DNA
agtgttaaattgaataagcataataatttctgagttaaaattagaataaaaatggtcttttattttgattatgtgaatctagttttcatgtcgtgctaaatccctgtttagagttatgaa

SEQ ID NO: 37330 - DNA, 120 bp, synthetic construct
  source 1..120: mol_type = other DNA
agcagaaaataatcaggcgtgttatgttgtatttaacggcataaactccacaagccttacatatgctgcagttcagcacacacccccgagacacagcaccaaataagaaccgaaggaaaa

SEQ ID NO: 37331 - DNA, 120 bp, synthetic construct
  source 1..120: mol_type = other DNA
accttcctggtgccttccttcaccatttgccttccctctccaccatggaggatggaccggcagcagctgagtctgtgctgtgaacacacctttccacacacgccagccccgtgtccacag

SEQ ID NO: 37332 - DNA, 120 bp, synthetic construct
  source 1..120: mol_type = other DNA
ttctattgtatttaatgaaataatcatcaggcaggatacctgccccacactagttgcagaggaggtgagaacggaccctgcttcagtgcaaggtgaactcagcaaagggagaggggctgc

SEQ ID NO: 37333 - DNA, 120 bp, synthetic construct
  source 1..120: mol_type = other DNA
tttaaaaactcttttggcagcacaagctgtcctcaataaatgtgatactatttgtagtttctatttataccactcagctggccttcaaagccatgcatacttttaatgtaagtagcccca

SEQ ID NO: 37334 - DNA, 120 bp, synthetic construct
  source 1..120: mol_type = other DNA
aaaccattttttagttgataatgaactctggcatttgcccaccaagaaattctgtcaatcacctatagtgtacatggtgagatgtatacatcttaattcaattgaaacagagaaaccgag

SEQ ID NO: 37335 - DNA, 120 bp, synthetic construct
  source 1..120: mol_type = other DNA
aaccttttgttttaaagaagactaaaccaagatttgaaaatactcaattatcctaccatttaaagatgactgctacttggcccgtgatgtttgtccttctgcccttccttttaacacagt

SEQ ID NO: 37336 - DNA, 120 bp, synthetic construct
  source 1..120: mol_type = other DNA
tcatgctcacactgactccagcacagagacagtctgtcatggggagcagcgaggcggggcaaggggtgggcactgaccctctccaacccagctgtgcagagattccagcagggaaaatgg

SEQ ID NO: 37337 - DNA, 120 bp, synthetic construct
  source 1..120: mol_type = other DNA
ccagaacattttgtacgaggtaaaaagcaacctttcttcaaagaggtgatataattctagccaaaatattctacatattcactaaccttttgtttcaaagaagactaaaccaagatttga

SEQ ID NO: 37338 - DNA, 120 bp, synthetic construct
  source 1..120: mol_type = other DNA
accactggaaagatcactcctttaagagcttatccactcggaaccacgcctcacattcagagagaagcttaagaaacaccggcgtggtgtgccaggctgccaggcagtactatatgatat

SEQ ID NO: 37339 - DNA, 120 bp, synthetic construct
  source 1..120: mol_type = other DNA
tcagcagcgacactggcggcctccgacctctcagacctagtgagcctcgcaaagccgcccggctcccggaagccgcaggtgcaggcgccgctgggctcgcgggttctcctgggctggcca

SEQ ID NO: 37340 - DNA, 120 bp, synthetic construct
  source 1..120: mol_type = other DNA
gccaaacaccagctctgaagaggaaagcgctgggtgtcccgaggcgggaggggtggccgtcctggggacggactcggaaaccggggcccggctgcgtccgccctgccctcggggtcccgg

SEQ ID NO: 37341 - DNA, 120 bp, synthetic construct
  source 1..120: mol_type = other DNA
cactgaatatactgtttctgtttcagggaaaatccaggcggaactgggtaagtatgtgtcatgtcctgagcctcccacacatggttctcccgggtccctccctgatccacagtttgagcc

SEQ ID NO: 37342 - DNA, 120 bp, synthetic construct
  source 1..120: mol_type = other DNA
cagattataataaataacgtttattgtgctatactatgtggtaggtatgaggttaagtatttttacctatattatatcacttatttcttacaaatggagcaagggagcaagcaagcaagg

SEQ ID NO: 37343 - DNA, 120 bp, synthetic construct
  source 1..120: mol_type = other DNA
aattattaacctttctaccataatgtatggagctaagtttgtgaattttcatagttttaggatttgaagataaaagaggtgaaaatttggaaatggtttctggactttgaattttggcaa

SEQ ID NO: 37344 - DNA, 120 bp, synthetic construct
  source 1..120: mol_type = other DNA
cacgattgatctgagaagtttttaagcctcgtcctcgccctcctcctcctcgaactccccttgttcgtcggccgtggcgtcctggtactgctggtactcggacaccaggtcgttcatgtt

SEQ ID NO: 37345 - DNA, 120 bp, synthetic construct
  source 1..120: mol_type = other DNA
gaccagctcggctccctctgtgtagtggcccttggcccagttattcccggctccactctggcctgccagagggaaagtgaacattagacactaaaacataaggaatttcaaaatctgtca

SEQ ID NO: 37346 - DNA, 120 bp, synthetic construct
  source 1..120: mol_type = other DNA
cacctgagggtggggtcaagggaggccccaaaacagtctacacagcaggagggatggctggggctcttgagctataagtggcacctcagggccctgacgggcgtcttgccatgctgctcc

SEQ ID NO: 37347 - DNA, 120 bp, synthetic construct
  source 1..120: mol_type = other DNA
tgcatctctaaggacacgagacaaccaaggtctcctctctctccagccccctgcacccacctcccatgtcacctccccacagaggcctccaaggataagaagaagccccctcctgcttcc

SEQ ID NO: 37348 - DNA, 120 bp, synthetic construct
  source 1..120: mol_type = other DNA
atgtgaagagtgttcaatccctcattcttggttcccattatgattttctcatttgattgaggctatagcactttactattatgtttctcttgttttatcataagggaagatataagacga

SEQ ID NO: 37349 - DNA, 120 bp, synthetic construct
  source 1..120: mol_type = other DNA
atgcattgcctttttaaatgttaggattacttttttaattgacaagtaaaaattgtatagtatatttatgttgtacagcatgaagttttgatatatggctatagtgtggaatgtctaaat

SEQ ID NO: 37350 - DNA, 120 bp, synthetic construct
  source 1..120: mol_type = other DNA
tacccattttgatattttgctgtaggtggccagttttgtttctcatagggaaatctgacccccacctgtcatgttggctcctaaggaactgctgttgtaagcggctcatcaagagttgaa

SEQ ID NO: 37351 - DNA, 120 bp, synthetic construct
  source 1..120: mol_type = other DNA
accatagatgttatgatgccctatctgttaactccaatatctggattatctatgagtttgtttttaataactgatttatttcttatcagtctgttttacttgcttttttgtatatttggt

SEQ ID NO: 37352 - DNA, 120 bp, synthetic construct
  source 1..120: mol_type = other DNA
acgactggaggagacttctatgcgtatttgtagagctcttttcctccacacaaaccagttcttatttctagcagacctagaaaaatttcagctaccacagtcatcccaaactccaatccc

SEQ ID NO: 37353 - DNA, 120 bp, synthetic construct
  source 1..120: mol_type = other DNA
catcctaaagacaaagcccaaccacgttgcaccagaaatcactccgctggctcccccagagagtgcacggaggcttcctcctacatggtagaactcaggcaacactcgagcatccgttta

SEQ ID NO: 37354 - DNA, 120 bp, synthetic construct
  source 1..120: mol_type = other DNA
aggaggatagccgttccaggtcaaccctcacactctatgtactcaatacgtagtgaaaaggctctacctttcccacagaaaagcattgtgcaaatagtattactgtctgtcaggtttagt

SEQ ID NO: 37355 - DNA, 120 bp, synthetic construct
  source 1..120: mol_type = other DNA
aaaacaatgaattaggaggcaaagcagctgaggagtttgggctgcggggatcttgaagcattcgctcttccttatgcctcccaagaacgttgctccaacctctcagtatcctcacattca

SEQ ID NO: 37356 - DNA, 120 bp, synthetic construct
  source 1..120: mol_type = other DNA
agttctctggctgttgcatccaagtaaaattaaaataaaattggttgcaattttaaaatcaagttcttcctatttgctttattcattcttggggctgttttaagaagctatgtttctgat

SEQ ID NO: 37357 - DNA, 120 bp, synthetic construct
  source 1..120: mol_type = other DNA
gctgcttccatgaccacctggaacaaggcaggggctcagcagaccctggctgggattgtcagccttccctttgagtttcctgctacctcgttttttcttttttgttttttttttttttgg

SEQ ID NO: 37358 - DNA, 120 bp, synthetic construct
  source 1..120: mol_type = other DNA
tacctgagatcaaaatgagtttcctttttcctaaacataattcttagcattgaggtaaatctgaatttacgtggtatactttgtcaaacttttccaaagaatttgaagccctggataaag

SEQ ID NO: 37359 - DNA, 120 bp, synthetic construct
  source 1..120: mol_type = other DNA
aagcactcgccgcaggcccggaaaaagaatccgcctcgcagcgtcctcttcaggcacccccgggtggccttgttgtctgtttcctggccgagtttgtgttttgctggctcgcggagtttt

SEQ ID NO: 37360 - DNA, 120 bp, synthetic construct
  source 1..120: mol_type = other DNA
aagcaaagagactacagagggatcaagtgcagctgctgggcagggactggagggaggagggtgtgggcccatcctgggagggctgccagacccagtggggcagaccagcagctggtgaca

SEQ ID NO: 37361 - DNA, 120 bp, synthetic construct
  source 1..120: mol_type = other DNA
aatttggctgattgaatccttttggtatcttttaatatagtctgtgtttctttgtaattcctgtaaaatggtagttacaactaaaggctcgattgacgatatattcagtttttgtcaaga

SEQ ID NO: 37362 - DNA, 120 bp, synthetic construct
  source 1..120: mol_type = other DNA
tttttctgctcttagcccagattattttaaagcaaaccaccaaaattatatcatttacccagaattatttcagcatatattcctaaaagatttctactcttattttatttactttatttc

SEQ ID NO: 37363 - DNA, 120 bp, synthetic construct
  source 1..120: mol_type = other DNA
ttgagactggttatgtggcttggtgtgcagataattttatcaatactctgagttcttattgtagttttgacttatatttgcctaataagtgatgctgagcacttttttttctgtgcttat

SEQ ID NO: 37364 - DNA, 120 bp, synthetic construct
  source 1..120: mol_type = other DNA
tggaaacatttaaccctgtgtcagcgggactgcttgagataaacttgacttgtcttccgggcccagcaaaactgcaggcccaagggaaaggaagctctcctgtgattgtagcgcatcttg

SEQ ID NO: 37365 - DNA, 120 bp, synthetic construct
  source 1..120: mol_type = other DNA
ggtaaatggacatcaacgtgatgcctatggctcctggtggatttagatacctcctggtgcttactgatatctttaccagttgcatgggggcttttccatgccagactgaaaacgcaggag

SEQ ID NO: 37366 - DNA, 120 bp, synthetic construct
  source 1..120: mol_type = other DNA
ttcaatgctatctgtgatcttaaccctgcctaataatctcctttccctgcaacccttctcttgaccttcagccatcccaaactacttgtggttctcaatgtgccatgtctccgtgcttct

SEQ ID NO: 37367 - DNA, 120 bp, synthetic construct
  source 1..120: mol_type = other DNA
gcaagactgtctcagaaaaacaaaacaaaacaaaacaaaacatctcagctatagacagaaggctttatctatttcctagtgatgttcatagtttggtgaaccaaataatacccatcagag

SEQ ID NO: 37368 - DNA, 120 bp, synthetic construct
  source 1..120: mol_type = other DNA
tcctaaatgcacccactgctctccagccctagtcccactgaccttccccaaaccatctcttgcttggactaaccactcactttgtgactgttgtgcctactctactgccctctataacca

SEQ ID NO: 37369 - DNA, 120 bp, synthetic construct
  source 1..120: mol_type = other DNA
ggagtatacaggaccaccagtgaaatattcctgaaatacaaacaaacccacacacacatgcacccctgaatttaatcaatcttctcttgatctaactataggcaccaatccacaggacgc

SEQ ID NO: 37370 - DNA, 120 bp, synthetic construct
  source 1..120: mol_type = other DNA
aaaatgtattttaacttaacatatcctcaaaattatcaactcaagaagaaatcaatatttaaatattgggatacctgacattctttttaccagactaagtctttgaattccatctcttct

SEQ ID NO: 37371 - DNA, 120 bp, synthetic construct
  source 1..120: mol_type = other DNA
atcgaatccttcattttaggaaagtagaaaaacaagagcaatttaagctaaagcgagcagaggaaaagaaattataaaagtcagagcagaaatcaataaaataggtaagagaaaaccaaa

SEQ ID NO: 37372 - DNA, 120 bp, synthetic construct
  source 1..120: mol_type = other DNA
gcttctgattagaggagcgctatggaacgtctgtaaacatgtttttataatcccatgtataattggtatgcactcacataataccagtccccagcagccgctcttctctgtatagggcca

SEQ ID NO: 37373 - DNA, 120 bp, synthetic construct
  source 1..120: mol_type = other DNA
cacccagccatatatatctggtctttgaccctggttcttggtacacagcttcaaaaaaccttggcatttcctaagtaatagattcaggatgaaagctgatcaccagaaagaaaccatgtg

SEQ ID NO: 37374 - DNA, 120 bp, synthetic construct
  source 1..120: mol_type = other DNA
gtgacagtttagtggctttgtaattaggctcagcacttacgagactatttgcagtgtccgctctgtgccatctactttgctgctggtctgtggaggaagcagagatgaaaacaccgtctt

SEQ ID NO: 37375 - DNA, 120 bp, synthetic construct
  source 1..120: mol_type = other DNA
gcagttttcatttgctgcgtggacaggcgggggtgaggaaaggtgggaaacgaacctggctcttaggctttgtgctgctgtgacttggagaatcaaagaaacttaagtccctgagaggta

SEQ ID NO: 37376 - DNA, 120 bp, synthetic construct
  source 1..120: mol_type = other DNA
tatatcaagttttgtatcatatgtattgctcttaactcagaaaattccaccatttatagcagtggtttatttatttataccattgaaggaaatggtttatttatgaatctatattatgga

SEQ ID NO: 37377 - DNA, 120 bp, synthetic construct
  source 1..120: mol_type = other DNA
gtggaagtcccattgttaggaagctctgcttttctggagttcaaatttgcattcatgacgctttaaaccgtcagagctgggtgtgtcctcctacaacaaatcactttactctctctccta

SEQ ID NO: 37378 - DNA, 120 bp, synthetic construct
  source 1..120: mol_type = other DNA
atttgaaattctctgagttggacagtgcaagagagatcctaaagaaagcaaagtcactgtggactgaaatgagctggcaaggttttctgagcgtggtgaaatatgatctgggcctcgctt

SEQ ID NO: 37379 - DNA, 120 bp, synthetic construct
  source 1..120: mol_type = other DNA
taaaaaggaaaacaaaattatatgtatgtgtatacaacagttataatacccatcacacagctttatagaaacagcatctattcaaaaataccagtatttccaaaatatttaaaataatat

SEQ ID NO: 37380 - DNA, 120 bp, synthetic construct
  source 1..120: mol_type = other DNA
gtggaagtcccattgttaggaagctctgcttttctggagttcaaatttgcattcatgacgctttaaaccgtcagagctgggtgtgtcctcctacaacaaatcactttactctctctcctg

SEQ ID NO: 37381 - DNA, 120 bp, synthetic construct
  source 1..120: mol_type = other DNA
acctggaacacatggacagacccttcgattctaattactttaggaaaactcctcggctaatgaaacttggagagggtaggttcagagtgggagctggagaagaaggaattgtttaggggc

SEQ ID NO: 37382 - DNA, 120 bp, synthetic construct
  source 1..120: mol_type = other DNA
gaaacgttattgtgtaagagaatatccctgttctctgaaaatactcactgaagtatttaggggtaaatgatatacgtaactttcccttgaacggtccaggaaaaaaatgaacatccattt

SEQ ID NO: 37383 - DNA, 120 bp, synthetic construct
  source 1..120: mol_type = other DNA
gtctcaaatgacaagggtgacggccacagaaccacacaaaactcattcgtataagtgtgttcgagtgtacaggggctagtgttttagatttaaagaacctggccaccctgcaggtaatca

SEQ ID NO: 37384 - DNA, 120 bp, synthetic construct
  source 1..120: mol_type = other DNA
agcatcttctcatagggaacaggcaccatcactgttgtccctaaggctttacctacaagaagacgcaaacgtctttggatggtgtgaacctaacgttctaccagtttttttttgtttgtt

SEQ ID NO: 37385 - DNA, 120 bp, synthetic construct
  source 1..120: mol_type = other DNA
gtggaagtcccattgttaggaagctctgcttttctggagttcaaatttgcattcatgacgctttaaaccgtcagagctgggtgtgtcctcctacaacaaatcactttactctctctctct

SEQ ID NO: 37386 - DNA, 120 bp, synthetic construct
  source 1..120: mol_type = other DNA
atttgaaattctctgagttggacagtgcaagagagatcctaaagaaagcaaagtcactgtggactgaaatgagctgacaaggttttctgagcgtggtgaaatatgatctgggcctcgttt

SEQ ID NO: 37387 - DNA, 120 bp, synthetic construct
  source 1..120: mol_type = other DNA
cttttctgtaaggcaaagagattctctacagaatgcaaatttcccccaaagagatggctttgcaggactattttaaagtttgtcaaagaaaatatgttatggggtaaaatactgtgattt

SEQ ID NO: 37388 - DNA, 120 bp, synthetic construct
  source 1..120: mol_type = other DNA
aggttaaccaagcatgcaaccacggagtggaaactaaaagctcggcctgaagagctgagactgatttaagaactggacactccatggcaggagccaggatccaatcagattgagttttgc

SEQ ID NO: 37389 - DNA, 120 bp, synthetic construct
  source 1..120: mol_type = other DNA
tatctgttacaatctgtggcactgatatttcacaaaagaattctgtgccaatctgagcccctgcattgtgccttcaaatgctcctggactgtggcaaccaagtccgtaagaaacaggacc

SEQ ID NO: 37390 - DNA, 120 bp, synthetic construct
  source 1..120: mol_type = other DNA
tgagccactgcaccctgcctcagtacctccattcttcccacacaccctcctcacgtgctccttcctgacttctgggcccgcccttccttctttttttttttttttttttttttttgagag

SEQ ID NO: 37391 - DNA, 120 bp, synthetic construct
  source 1..120: mol_type = other DNA
agagcaaaactccatctcaaaaaaaataaagaacctgcgagtgagttcccacacgttttcctaatgggctgctgctttcctaggagtctctcgctcatagaaaaggcacacactgaaaga

SEQ ID NO: 37392 - DNA, 120 bp, synthetic construct
  source 1..120: mol_type = other DNA
aaaatataattgaggactgatatcagcaaaagggcagagtagacagctccaagctcccatcacccaacagaaacagaaaaaaaaaaaaaaaaaaaaaggccaggcgcagtggttcacacc

SEQ ID NO: 37393 - DNA, 120 bp, synthetic construct
  source 1..120: mol_type = other DNA
ctttccatggcccgtgtcaatgccggtatttctgtctgttgcacatttgatttccttgttgttggcatttagaaggccccctgtttcccagatcacaccacgggcatggaccgcagagat

SEQ ID NO: 37394 - DNA, 120 bp, synthetic construct
  source 1..120: mol_type = other DNA
ccaccacctcctggagggggtaccccgaggtgctccgctggagactctgctcattctgggggtgcggttgacggctggtcgtgatctttcccgtaatctgtcccctcttacggaacctag

SEQ ID NO: 37395 - DNA, 120 bp, synthetic construct
  source 1..120: mol_type = other DNA
ggtcacctgcatttcccctccctgcacaaagtcctgggcccagatctggggtctgtctctgctgagggtggggtgaaccaggaagcacctccctctacatctccttgatgaatgggtata

SEQ ID NO: 37396 - DNA, 120 bp, synthetic construct
  source 1..120: mol_type = other DNA
ccacgccaggcctcagtgaggaatctaccaccgtctacagcagcagcccaggctcaactgaaaccacagtgttccctcgcacccccacaacctcagttcgtggtgaagagcctacaacct

SEQ ID NO: 37397 - DNA, 120 bp, synthetic construct
  source 1..120: mol_type = other DNA
actcgaaggacactacccctgcacctcctactaccacatcagcctttgttgagctatctacaacctcccacggcagcccgagctcaactccaacaacccacttttctgccagctccacaa

SEQ ID NO: 37398 - DNA, 120 bp, synthetic construct
  source 1..120: mol_type = other DNA
gcgaagaatccagcacatcccacagtcaaccaggctcaacgcacacaacagcgttccctgacagcaccaccacctcaggcctcagtcaggaacctacaacttcccacagcagccaaggct

SEQ ID NO: 37399 - DNA, 120 bp, synthetic construct
  source 1..120: mol_type = other DNA
gaaggacactacccctgcacctcctactaccacatcagcctttgttgagctatctacaacctcccacggcagcccgagctcaactccaacaacccacttttctgccagctccacaacatt

SEQ ID NO: 37400 - DNA, 120 bp, synthetic construct
  source 1..120: mol_type = other DNA
ttcacaaaagaattctgtcccaatctgagcccctgcattgtgccttcaaatcctcctggactgcaagtccgtaagaaacaggacctccaggttccgccccagggaggttggaattcagca

SEQ ID NO: 37401 - DNA, 120 bp, synthetic construct
  source 1..120: mol_type = other DNA
agtcccattgttaggaagctctgcttttctggagttcaaattcgcattcatgacgctttaaaccgtcagagctgggtgggtcctcctacaacaaaatagtttgctctctctctcctagtt

SEQ ID NO: 37402 - DNA, 120 bp, synthetic construct
  source 1..120: mol_type = other DNA
ggcccgccgcagccggcgtcacttacttcttctcgccctcgaagagcaagaacgactcgaaggctggaggggcgttcatgctcccgccgccgttgcgtccagaccccaagggtccgccgc

SEQ ID NO: 37403 - DNA, 120 bp, synthetic construct
  source 1..120: mol_type = other DNA
tccacggactttgaggccagagagttgctccggaacagggtgttggtctcacctacaaacagaggtcccagtgggtagggggctggcacaaagcttttgggggagggggaggacagagga

SEQ ID NO: 37404 - DNA, 120 bp, synthetic construct
  source 1..120: mol_type = other DNA
ccaccaggcaccttgaggcacctccataatctgggaatcccctaggcacccgtgaagcaggggctggtatccccaatgacagatggggaaactgaggctctgcaggtgaagaaacagcag

SEQ ID NO: 37405 - DNA, 120 bp, synthetic construct
  source 1..120: mol_type = other DNA
gcctcagagaacctggagaagccagcctcactcacatggctgggattttcatcgggagaatcccactggccatgtactgggctctctcccagtccctgagattgggctctgggctcagcg

SEQ ID NO: 37406 - DNA, 120 bp, synthetic construct
  source 1..120: mol_type = other DNA
gactgcccagagggtccgggggctctggagccagagcttggttccgagtgagtctagaacgtcctcttcaacctgcctggttctctgccgcctcccaacatggccccaaggcatcttcgc

SEQ ID NO: 37407 - DNA, 120 bp, synthetic construct
  source 1..120: mol_type = other DNA
agtcttgttaattacactggggtttacattgctgtgtacagtgagatcaggatgagggtggtgaggtggtgatcagggggacccatgcttctgctcagggggttggcagaagccagcaag

SEQ ID NO: 37408 - DNA, 120 bp, synthetic construct
  source 1..120: mol_type = other DNA
tctgtgtctgaaaaaaaaaaaaaaagaagaagaagaaataaaaagaaatgggattctaacgtgttttcgggcctccttagagccttcagcgaattcactcatatgcatcacacacatcac

SEQ ID NO: 37409 - DNA, 120 bp, synthetic construct
  source 1..120: mol_type = other DNA
ttttttcccttggggccggcttcccatctctctgctcatgccctccatccgggtgccctgcatagctctgcctcccaggctctgcccgggctatttattttctgtttttggaaagccctt

SEQ ID NO: 37410 - DNA, 120 bp, synthetic construct
  source 1..120: mol_type = other DNA
ccctcgccccaggacgggacggggaggaaggcctccctggactcacactgcctgcccacttcatccagcctggtagtgatcagctgcctcccacctgctctgagctacctgggggcgggg

SEQ ID NO: 37411 - DNA, 120 bp, synthetic construct
  source 1..120: mol_type = other DNA
agcaatcagatccaggagtgcttagggccccattacagccaagtcccaggtcaccctctctggtccattcccctaatgctgcccacacctttgtaaacgctctcaattgccctgtgagac

SEQ ID NO: 37412 - DNA, 120 bp, synthetic construct
  source 1..120: mol_type = other DNA
taaggtgaaactccatttcaaaaaaaaaaaaaaaaagaaactgcgccttttgccttttgtgtactctaggaaaggactggaggaagtggaggcagagggcttgaagtcctccagccaaca

SEQ ID NO: 37413 - DNA, 120 bp, synthetic construct
  source 1..120: mol_type = other DNA
gccgccagcggctggccacgcacactgggccttgtgccatggggctgcgtcgcgtactgtgccctgggcacgcaggggtctcctctagagcggctcagagtggcgtgagcaccacaaggg

SEQ ID NO: 37414 - DNA, 120 bp, synthetic construct
  source 1..120: mol_type = other DNA
aaacaaaaaaacagtgaatgtaaatgcacgtgttcatctacagaataagccactacagaagtgtggcttatgtgaagacatggaggtcggtgtcattttgataaaaaggtaccaagatta

SEQ ID NO: 37415 - DNA, 120 bp, synthetic construct
  source 1..120: mol_type = other DNA
cgacagaccaggacaaggatgacagcaaacaaatggatgtagctgcaaaggcaatgggaccacggtggtgcagctggggtttccaacgcctcggtcccagactggaggactcaggtggag

SEQ ID NO: 37416 - DNA, 120 bp, synthetic construct
  source 1..120: mol_type = other DNA
aacagtcaatgggaaaatggtgctaacttagatgatcctctgaaaggagctttgaagaaactgattcatgctgctaagttaaatgtttctttaaaaagcttagaaggagaaagaaaccac

SEQ ID NO: 37417 - DNA, 120 bp, synthetic construct
  source 1..120: mol_type = other DNA
gcaactggccctggccttattcctccacctcttgctccaatcagcggtccattgtttccagtggatacaaggggcccgttcatgagaagaggacctcctttccccccacctcctccagga

SEQ ID NO: 37418 - DNA, 120 bp, synthetic construct
  source 1..120: mol_type = other DNA
attctgtcccctcccacacgcacacacatctaggagcggggagcatctgagagtaacttatatacatcatggccctttactactaaatactttagtgtgtatttactaaaactgagaacg

SEQ ID NO: 37419 - DNA, 120 bp, synthetic construct
  source 1..120: mol_type = other DNA
aaaagacagtcaacaatatttgtcatcaggatcatacagcttaaatccaccacacaccaagtctgggttaagacgaacaactgcaactcttgtacactgttggtgggagggtagatgctg

SEQ ID NO: 37420 - DNA, 120 bp, synthetic construct
  source 1..120: mol_type = other DNA
tctcagtgtgacaggtactgttattaccaacacacaatccaattttctctgagaaaatgacatggttgagagtctgcctctcattcctaaaatgtattcagcaggagtcttgatgggaga

SEQ ID NO: 37421 - DNA, 120 bp, synthetic construct
  source 1..120: mol_type = other DNA
gtttgaggaaacggcaccaagcaggtctgtcagcgccattttcccaaaagcacacgctcacttcgtgtctctgtatcagcatattttagcaataacatattttttaaatgaaggtatgta

SEQ ID NO: 37422 - DNA, 120 bp, synthetic construct
  source 1..120: mol_type = other DNA
aaaagcaaccaaaatgatttcattaggaatatgaaaagaaaaaccacataagatagttcatttccaaaaagaaatgctgtctgtaagaacactaaacccaataggttctttccctaacaa

SEQ ID NO: 37423 - DNA, 120 bp, synthetic construct
  source 1..120: mol_type = other DNA
attggcaatgaggtcacttgtggcgttgtttaaaatacagattactaggcctcacacccagaaattctaatctggaaggtacagggtaatttttcaaccaaagaaaatgttgccccaaag

SEQ ID NO: 37424 - DNA, 120 bp, synthetic construct
  source 1..120: mol_type = other DNA
tctgaaatggcacactgtgcagagactaataaaattactaacactgctgaactccataatcaaacactgctagttctttttaagtaaaaaagactcgaaatacaggaaaaactgtatgca

SEQ ID NO: 37425 - DNA, 120 bp, synthetic construct
  source 1..120: mol_type = other DNA
ttgtgtcttactggcctgaacttacttacttagtcatccctgtccacaaggaagtctgggaaatgcttttttctgggcctgttgccatttcccatcatagatcagtggtctgtcagtcac

SEQ ID NO: 37426 - DNA, 120 bp, synthetic construct
  source 1..120: mol_type = other DNA
tgctgggaggcaagaaaccttccccagctctactcagaaatcttcataccttcttaacctttctctcctgatacttccccacctctactcagtttaaatattttgtttatttcagttata

SEQ ID NO: 37427 - DNA, 120 bp, synthetic construct
  source 1..120: mol_type = other DNA
tgtgattgcaccactgcgctccagccttagcgacaaagggacaccctatttcaaaaaaaaaaaaaggttggtctgtgctctataagcagtgaaataaagcagtgatgtatgctatttctg

SEQ ID NO: 37428 - DNA, 120 bp, synthetic construct
  source 1..120: mol_type = other DNA
gtaggtaaatctgaataaagagtgtatcacttttgctgagcttgaaattctttctaaattaaaaaattatttatttttatgtttttgagatggagttgcccaggttggagtgtaatggtg

SEQ ID NO: 37429 - DNA, 120 bp, synthetic construct
  source 1..120: mol_type = other DNA
agagtttctttgaaaagcacagatgataataaatggaaatattgccttttatactatacaataatatacacatgcaattcactggaaaaagtatacttgttattatgatttgaggatact

SEQ ID NO: 37430 - DNA, 120 bp, synthetic construct
  source 1..120: mol_type = other DNA
aaaatgtacaatctgacattgttcaatgaaactccaattctttagcacagaggatggtttttttttcccggagaagtaatgattttgtgactgcatgaaatgtaagctgacaccgattgt

SEQ ID NO: 37431 - DNA, 120 bp, synthetic construct
  source 1..120: mol_type = other DNA
tcctcaggcttggctgcagtttttaaaagctcttctgtagatagagtaaaatgttctctttacaactaagtctacttgtttagatccagaaataactagtctgtctcttcatatctgaaa

SEQ ID NO: 37432 - DNA, 120 bp, synthetic construct
  source 1..120: mol_type = other DNA
ttaaccccctactttatgttacagtcatccatgcactctggtacaacaataagcaaaacatgcagcttcccttctggagtaaggaggcaaatgttacgtatagtaagtgaagtgtacagg

SEQ ID NO: 37433 - DNA, 120 bp, synthetic construct
  source 1..120: mol_type = other DNA
ggttgagagttaaaaaagtgacggcccttggaaggaccttggtgccttgggtgtccatagcacatccagagacattaataaccatgactttaggaggccaccgtgctgcttgaggaggct

SEQ ID NO: 37434 - DNA, 120 bp, synthetic construct
  source 1..120: mol_type = other DNA
aacagagtttgaaaaatatgacaaaattacaaaattagaaaatgacccagcaatacttttaattatattctgcgtgtcgctgcctcttcttgctttttgacaaaattactcccctaacca

SEQ ID NO: 37435 - DNA, 120 bp, synthetic construct
  source 1..120: mol_type = other DNA
ttgttcagtgttacataataacgaaaccctgtcatttgtgacaacatggatggacttggagggcattaggttatatgaaataggccaaccacagaatgacaattactatatgatttcact

SEQ ID NO: 37436 - DNA, 120 bp, synthetic construct
  source 1..120: mol_type = other DNA
cctgcctgagcactattccagggccagagcacaggcccatcccacccattgctgtcactaccactacccaaggtcgttgtccaggaggctggggatcaacccacactgctgtctgtcatt

SEQ ID NO: 37437 - DNA, 120 bp, synthetic construct
  source 1..120: mol_type = other DNA
gcatttttatggtaaaggaattaaacagcagaaagtatacacggtaaaacactgaaattcctccttctctctttcccctccacatctgtgttgctttatattgtttctacatctctcttc

SEQ ID NO: 37438 - DNA, 120 bp, synthetic construct
  source 1..120: mol_type = other DNA
gctttcctccctctcctttccccctccctttccttcttcctttttccatcccttctgtcttttcttaccattctttctctctctctctctctttcagtgccctgtctttttttttttttt

SEQ ID NO: 37439 - DNA, 120 bp, synthetic construct
  source 1..120: mol_type = other DNA
tgtacattgactcactcaactctcaatgctccttcttttcctcctgtctctcttcttcctctgcctaattactctgattccactaccctcttcactcagctgcctttctactctgaagat

SEQ ID NO: 37440 - DNA, 120 bp, synthetic construct
  source 1..120: mol_type = other DNA
tagaataagatgccttcccccatcctcctccttctgaacagctttactctgcacagaaaagggcgcctactcatcctcctaaattttgcaacttttcatatcaagtcagatgattagggt

SEQ ID NO: 37441 - DNA, 120 bp, synthetic construct
  source 1..120: mol_type = other DNA
tggaggttggatgttgtgcaagagtgttttcctaatcacgcaagaccaacactgtgctgttgttgttgttgctgctgttgttgctgctgtttaaagtcatcgtacgtagcatttgcagat

SEQ ID NO: 37442 - DNA, 120 bp, synthetic construct
  source 1..120: mol_type = other DNA
gatcaaggcagtcaggtctgtcttgccacctcttggaacacttgaatgcaaataatcgtcacagaaaggtgaggctcttgtcctgccacccatctccgaaggtgatttattatcaccaaa

SEQ ID NO: 37443 - DNA, 120 bp, synthetic construct
  source 1..120: mol_type = other DNA
aatgacagacagcagtgtgggttgatccccagcgtcctggacaacgaccttgggtagtggtagtgacagcaatgggtgggatgggcctgtgctctggccctggaatagtgcccaggcagg

SEQ ID NO: 37444 - DNA, 120 bp, synthetic construct
  source 1..120: mol_type = other DNA
gggtcagttggtgatgcagtttcaaaaatgcactgaggaaaacttggcacttccatagggttgagttggttggaatatatctcagtctctgagattttgaacccaatgttttgaactttt

SEQ ID NO: 37445 - DNA, 120 bp, synthetic construct
  source 1..120: mol_type = other DNA
aacctaaaacctccagaaaacaacaggcttcagtcctttttgggtgtagtgctctcaattcttggttgatgccccagaggcaggcagcagggtcggctatttaaacatctccctacatgg

SEQ ID NO: 37446 - DNA, 120 bp, synthetic construct
  source 1..120: mol_type = other DNA
gtcctaagatatcactgctctggggataggccacacactctgaggtactgagtttgaaaagtgttttaattctgagcagtctttgtatgtaacacagagcaccttttccatgataacttc

SEQ ID NO: 37447 - DNA, 120 bp, synthetic construct
  source 1..120: mol_type = other DNA
cagaggtctttgaatcatgtgtactattttactatacctgattctattgagcattatattttcaaaccacttttcgagaaacttaatacagaactaccatttgacccagtaatctcacta

SEQ ID NO: 37448 - DNA, 120 bp, synthetic construct
  source 1..120: mol_type = other DNA
gccttgtatgttagattagtgaatgtatatttgcctcatccactactgtatgaacttcttgcttgctaggacaaggctatattcctcagaactgaggagggagttgaatcatgtggctat

SEQ ID NO: 37449 - DNA, 120 bp, synthetic construct
  source 1..120: mol_type = other DNA
aaaacaagggaacatctacccctccttttaagttttttaaccaaccccctcttgttttattttaaccgactttgttgagcgatgattacatttaaaaagctgtacatatttaaggtgtac

SEQ ID NO: 37450 - DNA, 120 bp, synthetic construct
  source 1..120: mol_type = other DNA
actatttacaaaaaaagatatgagaggtttcatttatatatttctttttcttctatccatcctataatctcatagggaaataattgacccattaactgtactgttggctgaaatagactt

SEQ ID NO: 37451 - DNA, 120 bp, synthetic construct
  source 1..120: mol_type = other DNA
cacatcattggtcttttaaccatttgattggggagaaatctgtctttcatctagagaaataatttatttcatcgcagtcatgtttaaaaagtagtaaatcatggttatttgccttgtgac

SEQ ID NO: 37452 - DNA, 120 bp, synthetic construct
  source 1..120: mol_type = other DNA
aggcatggactcagcattcataggtcctgactgttttgaatttccttttcctgatggccctttggtttggatttattttctagtctcaagttgggtcagaaaaatcctggggagttttct

SEQ ID NO: 37453 - DNA, 120 bp, synthetic construct
  source 1..120: mol_type = other DNA
gtcaatgtactaatcttaaaaagcatcagaaaattcaccctggagagaaaattataaacttcttcagaacatattctgactttagatgacacagtgttaggaatgacgaaggtaaggaat

SEQ ID NO: 37454 - DNA, 120 bp, synthetic construct
  source 1..120: mol_type = other DNA
tagcaatgagaagataatattctaggtgacggctttaatatacgtgtccaaactgcttcttttctagggaagcacttactctaagaaataaatgttatatagtgcaaaaatatattaaag

SEQ ID NO: 37455 - DNA, 120 bp, synthetic construct
  source 1..120: mol_type = other DNA
agttcttaggataactaacttttgccgaaagaaactagaggagctttggagacaaaaatttagtagaataatgcctgatttttaatttttgaggtctagtaactgctagtaaacttgcct

SEQ ID NO: 37456 - DNA, 120 bp, synthetic construct
  source 1..120: mol_type = other DNA
ttttagcaaggaaataatacatgcatgtttccccctgtctcaaacacatacactcatataaacatatgcacctatatacctacatatctatgtacgaatatatacatggacatgggtatt

SEQ ID NO: 37457 - DNA, 120 bp, synthetic construct
  source 1..120: mol_type = other DNA
cttatccccattcattttaccttttggtaattaacttttttgccttctggtaagtgaaagtaacatataggaaatataattatttaattatggttgcacactcagaagaaggaatatagt

SEQ ID NO: 37458 - DNA, 120 bp, synthetic construct
  source 1..120: mol_type = other DNA
ccaaaaacactgagtattctgcatacccagctcctagctatatcatctcagccttcctcttccggacattgaaagggatttctctgtctaaactaaaatgtctgtgatgttttaggagaa

SEQ ID NO: 37459 - DNA, 120 bp, synthetic construct
  source 1..120: mol_type = other DNA
caaggaaaagagctgtggcgggaaggaagagtatttcttcaagaccagaatccaggtaagcaacagggtcctgtgtcctaataggaggaggtgctttctcaatgaataatatcagttgaa

SEQ ID NO: 37460 - DNA, 120 bp, synthetic construct
  source 1..120: mol_type = other DNA
agagcattccggaggacatctcctgcctttcagcgcagccacagaatttcgtgggcacaggagagcacctagaatattcccctttcattgcacagcagctttgggaaatagtggctgcct

SEQ ID NO: 37461 - DNA, 120 bp, synthetic construct
  source 1..120: mol_type = other DNA
ctgctcagtcaactcactcttcacaaagcttagaaagtggccgggcacagccagactctgtctcaaaaaaaaaaaaaaggttggttgaggcttatactatgtgtgctgcttggcactgtt

SEQ ID NO: 37462 - DNA, 120 bp, synthetic construct
  source 1..120: mol_type = other DNA
agccctgaccccgactgccgctcccgccacctccattttatagatgaggaaaccgaggcccaagggcttagggaaccctgctctgaagcacatagtagggctgctgggctcagaccctcc

SEQ ID NO: 37463 - DNA, 120 bp, synthetic construct
  source 1..120: mol_type = other DNA
ggagggtgcctttctcataccagcaaatagctccggtggccctgggtggactccttggccatcagagtctccgtgagcacctcgtacagtttgtccaaaggctccgtgtggacagcctcg

SEQ ID NO: 37464 - DNA, 120 bp, synthetic construct
  source 1..120: mol_type = other DNA
gtactgccgatccatggtgcctggctcacggaaggcatttattaaacattttgagactgaagaaaacactagctaacaccgacatgcatttaccatgagccaggcactgatccgcaggca

SEQ ID NO: 37465 - DNA, 120 bp, synthetic construct
  source 1..120: mol_type = other DNA
gcctctttaagaacagtaatgataacctaaggcagtttaacagtatggaatggttaccttttagaagttaagctatgggcatggaagttcaatcagtgcattgaagtttttcctttatct

SEQ ID NO: 37466 - DNA, 120 bp, synthetic construct
  source 1..120: mol_type = other DNA
tcagagcaatattgccctaaaatctcaatggttaagatatggtcaggtatttataacaactagcacagcagtaaaaaaaccaaaggggttatctctagatctatatgtttcagataaaga

SEQ ID NO: 37467 - DNA, 120 bp, synthetic construct
  source 1..120: mol_type = other DNA
atcctaagcaaaaagagcaacactggaggcatcatcctacttgcctccaaattatactataaggccacagtaactaaaatggcatgggactggtacaaaagcagacacatgaaccacttc

SEQ ID NO: 37468 - DNA, 120 bp, synthetic construct
  source 1..120: mol_type = other DNA
gggccttatccaattttcactcccctcgggggatgttgtctcactgtgctgggaggatttgtgttcccagggcagagaccagcactctgccccacccctcttgcctagcagggttggtgg

SEQ ID NO: 37469 - DNA, 120 bp, synthetic construct
  source 1..120: mol_type = other DNA
ggagtatgcctgtctccaacaacagggctgtggcttgaaggtcaccttaagaggcacccctgtcctttgatgtcaccctggaggcccagagtaactcttctggaagccccatcacgtcca

SEQ ID NO: 37470 - DNA, 120 bp, synthetic construct
  source 1..120: mol_type = other DNA
gcgagtgcagctgtgtcccagtgaccagaacgattactgcctttaaaaagtcgtgaaaatgatcgtgaaccgtaccccacaccgagcgcgcgtctaccccctaaggcggtggagacgccc

SEQ ID NO: 37471 - DNA, 120 bp, synthetic construct
  source 1..120: mol_type = other DNA
gttgactatgtcgtagcacatggccaggcggtgcgcggactctgggaggcgaagcttaggacgggcccacttggggaggggcccagggcccgggaggcggggccgagtccgggctgggct

SEQ ID NO: 37472 - DNA, 120 bp, synthetic construct
  source 1..120: mol_type = other DNA
agttagcaacacagcttagatttcagtactgcccctgaaatctgaactgtgttcaaagtctaaaacgtttaccttagcaaattcctcatcaaactccatttggaagagtcccgagagcta

SEQ ID NO: 37473 - DNA, 120 bp, synthetic construct
  source 1..120: mol_type = other DNA
gactcctgtaaaaatgtgtctccatgtttgtcctccctcctgaaataagaaattcatagctgggggtggggagtagatgggggctgggggaaaaactttctcacattcacagagcagctt

SEQ ID NO: 37474 - DNA, 120 bp, synthetic construct
  source 1..120: mol_type = other DNA
gcataggcgggggccgagagcagtaggtagcgaggaggatgcgggtgcagcagagcgtaagggcgtctcccggggccggtgttggggtaggcccccgggactggctgcggcggggcaggg

SEQ ID NO: 37475 - DNA, 120 bp, synthetic construct
  source 1..120: mol_type = other DNA
tttcactttgttttaaaactgtgaatcctttgagacttaccaaggaggaccaatcgatttgttctctcagtgtcatccttccagctcactggagtctcctccagatcatagagctcatgg

SEQ ID NO: 37476 - DNA, 120 bp, synthetic construct
  source 1..120: mol_type = other DNA
ggtaacatttcaaagcacacaggtttgttctagctgcaaccctaaagaaagttgtgcaaataaatcaagccttatgcagtgatttccaaagctccttttcagtcacgaaaataataaaga

SEQ ID NO: 37477 - DNA, 120 bp, synthetic construct
  source 1..120: mol_type = other DNA
agtgctttcttgcttgataagagaagtacaagcagactaaaaaaaggttcaaattgaacttgcaaatgtgagacttttaaaagtacttattttgtcacagcagtcaagacactaacaacc

SEQ ID NO: 37478 - DNA, 120 bp, synthetic construct
  source 1..120: mol_type = other DNA
aagacagaagtagaaaggaaaaacaaaaattgatatactgaatatagaggtgggaaatgattgcatactataattcttattagtgaaataaagcactaaaggatacaacatgtaaaggga

SEQ ID NO: 37479 - DNA, 120 bp, synthetic construct
  source 1..120: mol_type = other DNA
atccagacacggcggatgaaagggatcatggctaactagtgaaacagcactgatagtcaaatgaagagctggaaccttgaagtaaaaagaagaaaaggatcatcgagagaaaagttagga

SEQ ID NO: 37480 - DNA, 120 bp, synthetic construct
  source 1..120: mol_type = other DNA
cttttataccccctcccttgatataacatgtaatataaaaatgaggagtcaaataaccaatgtacaaaatattaagttactctaggaccctgatcttcacgtgatttgatttcattcatt

SEQ ID NO: 37481 - DNA, 120 bp, synthetic construct
  source 1..120: mol_type = other DNA
tcaaggcatacgactagaaaactaatttccatggcatcaaattaatttcctcctttggagataaaaccatgagatcttttccaaagcattaaaatcgccaagaaaaaaaaaaaaagaaaa

SEQ ID NO: 37482 - DNA, 120 bp, synthetic construct
  source 1..120: mol_type = other DNA
gaaaaggattctaatgcaacttcagtcctcatagcaaggaagtactatttcagaaagtccctagattctcagatgcactggcaagcaccatacactgaataattcacagaagattttagt

SEQ ID NO: 37483 - DNA, 120 bp, synthetic construct
  source 1..120: mol_type = other DNA
gaactcctgtgttcagcattcactttatgctacgacaaaaatgactttaagtaaaagtttagttatcagatcattataaatagatagcaataattcaactaagggaaaaaaagaaaataa

SEQ ID NO: 37484 - DNA, 120 bp, synthetic construct
  source 1..120: mol_type = other DNA
taatatttttttcataattcatcttggcctgaggctacaacaagtcctattgttatatactctgcctctagagaatgaggctgctaacagaccttggaatggtgcctggcacacaggctc

SEQ ID NO: 37485 - DNA, 120 bp, synthetic construct
  source 1..120: mol_type = other DNA
aagcatacaaagttcgttatacaagatgcataagtcatggagagctaattacagcatgatgactgtagttaattctattgtatacttgaatctgctaaaacatagatcttaactgttctt

SEQ ID NO: 37486 - DNA, 120 bp, synthetic construct
  source 1..120: mol_type = other DNA
agtgacatcgagttccaccactgtctggggttttttaatctatatgaacaaagatttcatcattaaactaaagtgtgaaaagaacaacaatgcaaggaattaaagttataatatgaatga

SEQ ID NO: 37487 - DNA, 120 bp, synthetic construct
  source 1..120: mol_type = other DNA
ctcccacatcaagaagaaacatgtatgcatatgtattacagcctgacaaaaagaaacacgcacatacagggaataaaaagcaagaaagaacacaaaatgaagaaatgaatagggcacaca

SEQ ID NO: 37488 - DNA, 120 bp, synthetic construct
  source 1..120: mol_type = other DNA
attacagtgctgctaaaaacttttacatgtaggctatacatgtcttctgaaatacattaagttttctagtatataactagatcttcctataactaggaagattttacggagtattagggt

SEQ ID NO: 37489 - DNA, 120 bp, synthetic construct
  source 1..120: mol_type = other DNA
ctatgttgtccagtctggtctaaagtctcatctctaacaatgagcagcctgtaacctatgaggccagctcagtcaagttgaccaaatagcattgttgtaacagtatgtagcctcagtgac

SEQ ID NO: 37490 - DNA, 120 bp, synthetic construct
  source 1..120: mol_type = other DNA
caggactgcagctgctgtggcctacacacctgggcctgtgtgcctgtcccgggctttaggctgctttccctacccggctcaagcggtcttttgtatcccttgggctatcactcagctttt

SEQ ID NO: 37491 - DNA, 120 bp, synthetic construct
  source 1..120: mol_type = other DNA
ttgtttcatgttggaccaggtgttattccttcctccttaatctttcttgcaagtttgttgataaagagagggatctcatgatttctgctctgacaacctcccaggcacaagggctgtatt

SEQ ID NO: 37492 - DNA, 120 bp, synthetic construct
  source 1..120: mol_type = other DNA
ctgtgcaacctgattagagaataaagggtatattttatttgcttatcattattatatgtaagatgtaagtaaaaatgacctttctctaaaccaggttgtatgttgtactcaagatataaa

SEQ ID NO: 37493 - DNA, 120 bp, synthetic construct
  source 1..120: mol_type = other DNA
tattttcaaaaaattttcactggtctctcttacacagaatatactgagctttctaatagttaagataaaaatctatcctcttgcattaggagaaatcccatggagtatttaataataagg

SEQ ID NO: 37494 - DNA, 120 bp, synthetic construct
  source 1..120: mol_type = other DNA
ctaatgggtaggatttagggtaagcatgcagagtaagtgaaactttgccaggtaaggaggcagagggatgatgttttccagaaggaatatctaacaagtttgcgtgtttgacagaaacag

SEQ ID NO: 37495 - DNA, 120 bp, synthetic construct
  source 1..120: mol_type = other DNA
atggtcttaacttctccatgcaaacaaacgtgaagtaaggtaaaggagaaattgcatttgatgtcttaacactcaaagtatgctgtgtttattttacttctgtgaagagtaaaagtcatt

SEQ ID NO: 37496 - DNA, 120 bp, synthetic construct
  source 1..120: mol_type = other DNA
caaccaggtgttccatggaatggtttgagaggcagttctacacagaagccagaagggctgggtctgaatcccagatctaccagatactagccgtgcgaccttgagcaaattaattttctg

SEQ ID NO: 37497 - DNA, 120 bp, synthetic construct
  source 1..120: mol_type = other DNA
atcttatttgacttgaattttctgagagatggggtctcactctgccacccaggctacagtataatgttgctatcacagctaactgcaggctcaaagttctaggctgaagtaattctcctg

SEQ ID NO: 37498 - DNA, 120 bp, synthetic construct
  source 1..120: mol_type = other DNA
aataacagtggtaataacaatctcccaactgtattttttaaatgtattttgtaacattggaaaaatgcttagtctgtaacagatacatgatagttattatttaagtggacaagtatttga

SEQ ID NO: 37499 - DNA, 120 bp, synthetic construct
  source 1..120: mol_type = other DNA
tctgtcattttgaaggaaacaaacacaactagtttactcttgtatgtgctatggagagtctgcagaataagaatacaattaagatttcaataactcggccgggcatggtggctcatgcct

SEQ ID NO: 37500 - DNA, 120 bp, synthetic construct
  source 1..120: mol_type = other DNA
tatttcctttctaatttggatgtttttcttcttctttttttttttttttcattttcttgcctaatcagtctggcctgaacctctagtacaatgctgaatagaactagtgagagtatacat

SEQ ID NO: 37501 - DNA, 120 bp, synthetic construct
  source 1..120: mol_type = other DNA
agaattctgtgttcagagaaggccaaacaaaagcgaagcaaaagcaatgagaccagtcaggggatcgcgcagcaacacagtagggacagggtcaagttcagaatcacctcaaaggtacga

SEQ ID NO: 37502 - DNA, 120 bp, synthetic construct
  source 1..120: mol_type = other DNA
gaggagcgaggacttgaccatgaaagccacccatgaacgaaaatgctgcaggaaagagattaatacacattcggtgccatgtaatgtaaaacagaatgtacagaggtcagaaaatagaga

SEQ ID NO: 37503 - DNA, 120 bp, synthetic construct
  source 1..120: mol_type = other DNA
ctgagtcatactatccacgacagtagtgagtcaatccatttatttggctgtccttaattctcttgaataagttttgtaattttgtaattttttccataaaagtactgcagttattccaca

SEQ ID NO: 37504 - DNA, 120 bp, synthetic construct
  source 1..120: mol_type = other DNA
atttcatgagactggtaaattccatttttataaactgaaaaatcaattttatttgaaaaattaaaatagaaattgtaatttcccacccccccacccccatacacacccccacatttacaa

SEQ ID NO: 37505 - DNA, 120 bp, synthetic construct
  source 1..120: mol_type = other DNA
ctgttacttacacacgcctaacaacagagatcagaggaaagaaggaaaagaaaaccagccatgctactgaaatatctctttagtcacagaacccatggagaggaaaggtgtgatatccac

SEQ ID NO: 37506 - DNA, 120 bp, synthetic construct
  source 1..120: mol_type = other DNA
cttggtttcctcatcttaaaatgatgacaaccaaggtccttcctggttgtgactttggttgagtcttttgatatccaccaagaccatttttatgggatttctcactttgctttcattgtt

SEQ ID NO: 37507 - DNA, 120 bp, synthetic construct
  source 1..120: mol_type = other DNA
gtgctgaaatatctcttctgatgtgtttgcatgattgcaaatatgcagatacatataaacaactaatcaaaatgaaatgacaaagagatgctgacagaaacgagagggaggcgtgaggct

SEQ ID NO: 37508 - DNA, 120 bp, synthetic construct
  source 1..120: mol_type = other DNA
aactcagagagagctgagctccctggctagttagctgagcaacttgggattatattaagtgagcaaatggccagaaaccttcccaactacccttcccacgactacagagtggggttctgg

SEQ ID NO: 37509 - DNA, 120 bp, synthetic construct
  source 1..120: mol_type = other DNA
tgtccaacacccatgtgaaaaccagcaatctagcagccccgaaaagtgggaaagcctgtgtgaacacagcccaggtgctttccttcctcgagccgtgtactcagcaggggttgggagccc

SEQ ID NO: 37510 - DNA, 120 bp, synthetic construct
  source 1..120: mol_type = other DNA
gacctcagagacttcacacagagtcataaaacagggacctcatgcagagactcatgcagctcactgcaacctccggcctccagccccagaaatggcacacggcaccccccactgcctcac

SEQ ID NO: 37511 - DNA, 120 bp, synthetic construct
  source 1..120: mol_type = other DNA
ttctgcttggggacatcctcacacttttttttttttttttgtaatagcgctgcctctgaaaagaattatggattccacaggcagacctgcaaaattctttcttccacaggtttccattag

SEQ ID NO: 37512 - DNA, 120 bp, synthetic construct
  source 1..120: mol_type = other DNA
ttccaaattgatctcaaatggttttccagcttgttgaggggtgatgaaaaataaatggagaatatatttacatgccctcctattcttttcttttagaagtctcataaatagtaaatttcc

SEQ ID NO: 37513 - DNA, 120 bp, synthetic construct
  source 1..120: mol_type = other DNA
cggacacttgcagcaaaggggcagcggtctggggatgcaacaggcttgatggtcgctggagcaggtggcagtagctccacgcggtcggggacaaactctgcgcagcccctgtacccgctc

SEQ ID NO: 37514 - DNA, 120 bp, synthetic construct
  source 1..120: mol_type = other DNA
acataactaagatgggtttcacgaaacaatatacttacactatagtgatcactgatatttccttttaaaaaaaaatggccataaccaactaaattgatttcacacataccagtatgggcc

SEQ ID NO: 37515 - DNA, 120 bp, synthetic construct
  source 1..120: mol_type = other DNA
cactgttactagtaataggaaaagcggaaaagtgctttcttgcttgataagagaagtacaagcagactaaaaaaagattcaaattgaacttgcaaatgtgagacttttaaaagtacttat

SEQ ID NO: 37516 - DNA, 120 bp, synthetic construct
  source 1..120: mol_type = other DNA
tacattgttctgatatgaaaagcacaagaagatcaacatggcataacaaattacaaccataataactgtagcatacatttcaacactgatggggacaggacgggagggggaaaggactga

SEQ ID NO: 37517 - DNA, 120 bp, synthetic construct
  source 1..120: mol_type = other DNA
atacagttctaatccagacacggcggatgaaagcgatcatggctaactagtgaaacagcactgatagtcaaatgaagggctggaaccttgaagtaaaaagaagaaaaggatcatcgagag

SEQ ID NO: 37518 - DNA, 120 bp, synthetic construct
  source 1..120: mol_type = other DNA
aacaaccaattagtaaaacttccaagaatatacctcattaagaatggtcttgtatgccaaaggaatggcaggaagcttaaatcatggatgcaattgtgcaaatcattcctgttaactatg

SEQ ID NO: 37519 - DNA, 120 bp, synthetic construct
  source 1..120: mol_type = other DNA
aaaactaatcacattttccaaacctgcttccaccactacccgacctgttgctcctccttcctgtatttcctatacctcggagattagtctcacattgaatctacctcccaagaggcatgt

SEQ ID NO: 37520 - DNA, 120 bp, synthetic construct
  source 1..120: mol_type = other DNA
aatcatatacaattatagcagaagagataaatgtcctcttctatgcccataggaaagctatacaaacatttaaaaaaataagtgcatcttaacatttattttctttagacatcagccctg

SEQ ID NO: 37521 - DNA, 120 bp, synthetic construct
  source 1..120: mol_type = other DNA
ggatgtcttttacacttgatcttagccaaaagaccaagaagcgatgcaagatgccttttaatggagagagtcttcttactaatcctatgtgtatatcctgattttcttcaatatgtactt

SEQ ID NO: 37522 - DNA, 120 bp, synthetic construct
  source 1..120: mol_type = other DNA
ttttcttaagatttaaattattgcctaaagaatgagacatcttaaggtatcattcctaacatctctcaccaaatccaaatccaactcataaatgttttacataacatatgcctaagtttc

SEQ ID NO: 37523 - DNA, 120 bp, synthetic construct
  source 1..120: mol_type = other DNA
ccacgtaccctgattagtatgccacaacgcaagaaaaagaaaactgacagcaaggaaagtatttgatttttgaaagcatcacaggcccagttagtgacagggctgtctaaaagaataagt

SEQ ID NO: 37524 - DNA, 120 bp, synthetic construct
  source 1..120: mol_type = other DNA
acatgtatgcatatgtattacagcctgacaaaaagaaatacacacatacagggaataaaaagcaagaaagaacacaaaatgaagaaatgaatagggcatacaagtggcaaagaacccatt

SEQ ID NO: 37525 - DNA, 120 bp, synthetic construct
  source 1..120: mol_type = other DNA
actatagtagtttaatataatagctaaagggacactgatattaaacaccatataattctattttacattaggatgcaaggttttaaattccttttttcttattttatcaaaagtgaagga

SEQ ID NO: 37526 - DNA, 120 bp, synthetic construct
  source 1..120: mol_type = other DNA
taatgaaggcatttttttcttgtccagggtaaactttctaaatcgactagtatgttttatatactggattctgtatgcccttcaacctcttaagagactgccttatctatctttttcttt

SEQ ID NO: 37527 - DNA, 120 bp, synthetic construct
  source 1..120: mol_type = other DNA
ttcatttttaaatatggaatatcaattcaccagaggaataaacagtcacacaaaatcttgcaacatgacatttattgaactttacttaccttccccagattcatttaaaatgaccgctac

SEQ ID NO: 37528 - DNA, 120 bp, synthetic construct
  source 1..120: mol_type = other DNA
cgtgtcgggcattttacagacgggacatcctttaatggcaataggtaggttgttccggccctatttcacaggtgacaggtatttttccattttcaggtgaggtagatgagcgtcaggaag

SEQ ID NO: 37529 - DNA, 120 bp, synthetic construct
  source 1..120: mol_type = other DNA
tattttgtctcatttactttagggtaaaacaacaacaacaacaacaatagtaatgttttgagcccctaagcatctgataggcactgtgttaagcacattaaatgcattatcccatttaac

SEQ ID NO: 37530 - DNA, 120 bp, synthetic construct
  source 1..120: mol_type = other DNA
ggtcataatcaacctataggcaataaactatgttatcattttgtaaaaaaaaataccacaggaagtagtgcttcagtacattttcccgacgatatgattaatccataataaattctgcta

SEQ ID NO: 37531 - DNA, 120 bp, synthetic construct
  source 1..120: mol_type = other DNA
gtcaatctagtaggtttgaagaggcagctcattatacttttcgtttgcatttctttaataactaatgatgtcgagtatcatctttccatgtgattattgactctttgtatatctttttgg

SEQ ID NO: 37532 - DNA, 120 bp, synthetic construct
  source 1..120: mol_type = other DNA
ctgccatctgtctcctctgtgctgtttttttgtaatatatttctataggcccaacaatgaaaatatatacattatatatttgtatattctctattatagttttatacattgctttttaaa

SEQ ID NO: 37533 - DNA, 120 bp, synthetic construct
  source 1..120: mol_type = other DNA
atgttttcaaccattatttttcaaatatttttttctgatcctttctctctctcctggtattttcaattacgtatatgttggtgtgcttagttatgtctgatatttctctgatgatctgtt

SEQ ID NO: 37534 - DNA, 120 bp, synthetic construct
  source 1..120: mol_type = other DNA
ggtcttggcttaaatgcctcaaactctcactgttattactgattaataaatgtttcttcatttgatgtatttccttaggacattttctaaagactttcaatagttgttttttaaaataat

SEQ ID NO: 37535 - DNA, 120 bp, synthetic construct
  source 1..120: mol_type = other DNA
agagacacttaaacacacaattacattttagctctgatgattcaatattgtaagaggtttcataaaagtattataaatatattaaataagtcagtacagagtacttaatactaaaatcag

SEQ ID NO: 37536 - DNA, 120 bp, synthetic construct
  source 1..120: mol_type = other DNA
agttgactttcagaatgttcctcaacttggatttgtctgacatactcatgattggattcatgttgtgcatttttgtcaaaaataccacagaagggctgctgtgttctcctcagtgtgtcg

SEQ ID NO: 37537 - DNA, 120 bp, synthetic construct
  source 1..120: mol_type = other DNA
ctccttggctcaagccatcctcccatctcagtctcccaaaaagagaagggaatatttcaaatatcacactttctcttctccatactttcagaagtcttgctgaaagtaggatataaactg

SEQ ID NO: 37538 - DNA, 120 bp, synthetic construct
  source 1..120: mol_type = other DNA
gaacatactttaatctagttaccttattgtaccagcttgtctgacatttaattaactatgcataattaaagaataaaaaccacatttttgtgcagggaaatcatgtggaaatcaccattc

SEQ ID NO: 37539 - DNA, 120 bp, synthetic construct
  source 1..120: mol_type = other DNA
taggccatgaggaaaatgaaattggattaactcaaccagttttttaaacatgcttgatcatgtggtgctgtttttcaaatttcaataggttgttaccattggaatatgaatcgagatctg

SEQ ID NO: 37540 - DNA, 120 bp, synthetic construct
  source 1..120: mol_type = other DNA
agatgctggcagaatcaactgaaaaaaaaataacacaacgagaaatttataagaaactcacttcaaaataaacataggcaggttaaaagtaaaaggatggaaaaaatacactctgcaaaa

SEQ ID NO: 37541 - DNA, 120 bp, synthetic construct
  source 1..120: mol_type = other DNA
ggaatttgaaataataatcaatatgctaagggctctatgttgaaaaagtgggcaacatgcaagaagagataggtactataaacaaagatatgaaatctcaaaatcagaaggaaatacaga

SEQ ID NO: 37542 - DNA, 120 bp, synthetic construct
  source 1..120: mol_type = other DNA
atgtatatacctagcaacagaagagtcaaaatatattagggggaaactgatagaactgcaaggacagagagacacatccattattaccactggagacttcaacacccctctatgagtaag

SEQ ID NO: 37543 - DNA, 120 bp, synthetic construct
  source 1..120: mol_type = other DNA
aatacatacagaatactccacttaagaatagcagaatatacatttttttttcaaatgcccatgaaaaatttacaagacagaccatatccctgggagccaaacaaacctcaacatatttaa

SEQ ID NO: 37544 - DNA, 120 bp, synthetic construct
  source 1..120: mol_type = other DNA
cctgtagcctccagcagtggcgcttacctcgtgagtccgggcgccgcgctgtcccgcagcgcagagccagccgctgctcgcagcgctccgccaggttcaccgcggcccgcagctgccccg

SEQ ID NO: 37545 - DNA, 120 bp, synthetic construct
  source 1..120: mol_type = other DNA
catgtatacactatttttcttcaactaaacacaacatcaattgtgaaaaatttacatgtagtacaaataatagaggaagtagctagcatgcagaagaccaacagaggggaagatggcaga

SEQ ID NO: 37546 - DNA, 120 bp, synthetic construct
  source 1..120: mol_type = other DNA
gatgggtgtgtggttgcaaaagcgagctttataactattagctgagcaactcgggatcatattaaggtaaaattcataaggtgtatatcttctaataaaatactatcatttaaaaaatgc

SEQ ID NO: 37547 - DNA, 120 bp, synthetic construct
  source 1..120: mol_type = other DNA
ttctgttatgtttctttttcttttccattgtcaatttatattggctcagagaaaacaggcttgatggataaagtccatggtatttcccaattttgccatgaaaaatatggcaaagttaga

SEQ ID NO: 37548 - DNA, 120 bp, synthetic construct
  source 1..120: mol_type = other DNA
tgacaccatgactttggggtcaggatttcaacatatgaatctggggtggggaagcaaacattcaatactttgcaccagtgtaacaccaattatactggattcatttaatatgcttgtctc

SEQ ID NO: 37549 - DNA, 120 bp, synthetic construct
  source 1..120: mol_type = other DNA
agaattcccccaaagctgatcttagaaagaaaaatgacataaataacattgtttagtgattttctgatggtacgtgtttaaagcatttataaattaataggtctagtactaattgtcaca

SEQ ID NO: 37550 - DNA, 120 bp, synthetic construct
  source 1..120: mol_type = other DNA
ctaaacctaacactgactgtttacttcttttcaaggtggaaaagatgatctattataataaactgacctattagaaggcataaacagtttcatagtaccgggacagacatacctattact

SEQ ID NO: 37551 - DNA, 120 bp, synthetic construct
  source 1..120: mol_type = other DNA
acagttctacctagccataatcaatgcaaatattcccctacaatatatatttgaataatacactaaaataaaataattccagtaacacatttaatataatcttttctcagaaatctgttg

SEQ ID NO: 37552 - DNA, 120 bp, synthetic construct
  source 1..120: mol_type = other DNA
cccttctgccccttcctcccttccttccttccttccttccttccttctggtgtgaactgcaccagcaccctgcccctcgcccctctcacctgcatctccttttcatcctttctccctctc

SEQ ID NO: 37553 - DNA, 120 bp, synthetic construct
  source 1..120: mol_type = other DNA
aataaatagaagccgttcctaaacctgaatttatttttcctttcagtcagaagtttagctaataaaacttttgccagagtgtagcacaatagctcccttgggaactctttcaactgcgta

SEQ ID NO: 37554 - DNA, 120 bp, synthetic construct
  source 1..120: mol_type = other DNA
cgcagagttaagctcattaagtggataatcttatttttcctcacacaattatgctcattttataaatgagaaagctagaactttgaggagttaaatcacccaactttatacatagtttat

SEQ ID NO: 37555 - DNA, 120 bp, synthetic construct
  source 1..120: mol_type = other DNA
cactgactgcagaaaatgtttgtttaatgcaggtggccactagagcattcctgtcaacttttggaactagtgttatttcatagcccttgtgcaagatttgccctttgccaacataagaga

SEQ ID NO: 37556 - DNA, 120 bp, synthetic construct
  source 1..120: mol_type = other DNA
ggggttttctctactggcccttcctgttgactccaccagatctactcttctctcctaagcctatgtaaactttaattggtgggagatccttttggggttggtctaactagcaaccaatgg

SEQ ID NO: 37557 - DNA, 120 bp, synthetic construct
  source 1..120: mol_type = other DNA
tagtacttaaatgcaaataagctatattttcagccattactgataaagtaatgaaattctggcattaccaaagaatttcatcaggatgttgtagactcatggttacaatctgcaatccca

SEQ ID NO: 37558 - DNA, 120 bp, synthetic construct
  source 1..120: mol_type = other DNA
ggtaattcgtttttataaaggctgatattggtaccacagtgaagatgctgagctgcgctgttttgtccctaaatgttcacacaacataggatttatcttatgtaccgttttatccacttt

SEQ ID NO: 37559 - DNA, 120 bp, synthetic construct
  source 1..120: mol_type = other DNA
agacacttcccactaagataacaaattgtttcaaatgtgattttatccagatatatttgtttgtttctttcctcatctaattgcattttaattcacattaaaaatttcaggtattacctg

SEQ ID NO: 37560 - DNA, 120 bp, synthetic construct
  source 1..120: mol_type = other DNA
ggattggctatattaaacaaagtagatttcagtgcaaaaattattataaaaggtaaagaaaattattttgtaatgattaagatgttctttcatcagagaacataatcctaaacatgcaaa

SEQ ID NO: 37561 - DNA, 120 bp, synthetic construct
  source 1..120: mol_type = other DNA
gttccctcttgcaggcacttgctccacaggccattggcagaaactcacatgcagtccactgagaactctatttggccctcacagaaaatatcagaaagagccctaaaggttaaatgactc

SEQ ID NO: 37562 - DNA, 120 bp, synthetic construct
  source 1..120: mol_type = other DNA
aatagcaaccagttcaatgaatatgccacattgtggttatccattcagtggctgatggacatttgagttgtttccagtttttgtctactgtattagtccatcttcacactgctgatgaag

SEQ ID NO: 37563 - DNA, 120 bp, synthetic construct
  source 1..120: mol_type = other DNA
caatgaggatgctgtgcaggctgctcttggagactggcgttctcctttccactacacacttgagagtgcccactcagatccctgagcttcagtgaagacttccattaagccaccaccggc

SEQ ID NO: 37564 - DNA, 120 bp, synthetic construct
  source 1..120: mol_type = other DNA
ctctttcactcataaaattcaccaagttcacattggaaaacattattctatggttattccagaaaatattagattatccccgttttgtttgaaaactgacggaaaatatgacatcatgtt

SEQ ID NO: 37565 - DNA, 120 bp, synthetic construct
  source 1..120: mol_type = other DNA
ttacaatattgtcatcaactcataaccaaatatcacaaataggcagcataatggcctcattagggcagtttccacagtgacccacatcatcaacaatggcatgcatctgtcatgcatctt

SEQ ID NO: 37566 - DNA, 120 bp, synthetic construct
  source 1..120: mol_type = other DNA
taaaacattccagcttgggtcagcagacatgttacagctacagactcttatgttttctctctttagaccaaagagtttatcttacactcatcatgtgttggtctgtgagtggccaagaca

SEQ ID NO: 37567 - DNA, 120 bp, synthetic construct
  source 1..120: mol_type = other DNA
aactaaggacaaccattgcataattaaattgcctctgaaagccaattattgattatggagaaaaccaagttttacaactgtatgtgtgtatcatataaagatttcatttcctaatataga

SEQ ID NO: 37568 - DNA, 120 bp, synthetic construct
  source 1..120: mol_type = other DNA
taagaatgaaaaaaaaaaagaatgcatggataatacatggacagattttgtccgtatctgcagaggaaatgggaaaagccaaaaggaggggcgacaactgatcctttggggaggagcttt

SEQ ID NO: 37569 - DNA, 120 bp, synthetic construct
  source 1..120: mol_type = other DNA
tacctgtgggaacagatgaggcttggaagaagacacatagaaacaggtttaaattctataaattagaatttacagggggtaggagataggggttacacgttgtctctccttccagatgac

SEQ ID NO: 37570 - DNA, 120 bp, synthetic construct
  source 1..120: mol_type = other DNA
agttcacgccccagttgctcacagaagtgaccagctcaatgacacccccttttggtggatttttcttctctattccattcttccctcttttatgagctcactttctaaaagaggctacct

SEQ ID NO: 37571 - DNA, 120 bp, synthetic construct
  source 1..120: mol_type = other DNA
tagctgtatgtgtgtggaggggcgggtggaggaggttagctgtatcagggtaggcataatactatattttaaatccctccttctgttataaatgtaagctgaaaataatctctgctccca

SEQ ID NO: 37572 - DNA, 120 bp, synthetic construct
  source 1..120: mol_type = other DNA
aactgttatttctcataattgtttttttttcagcctctttatttttaatctacatctcttaggtaaaatgcatcaatttaactacacttacttattctgagtttttctattggtccatgt

SEQ ID NO: 37573 - DNA, 120 bp, synthetic construct
  source 1..120: mol_type = other DNA
gtaatagcacatatttaggaagtgagtatatttatattggaacaaatgatgatactgaggtgtgtttgatgactagcttctggattataagaatgtaaatgtttgttaagatagactctt

SEQ ID NO: 37574 - DNA, 120 bp, synthetic construct
  source 1..120: mol_type = other DNA
tataaatttttttgtgaaacgaatcagctagcctaaaatttaatccttccaaactacagtaggttaaaaaaaacaagtgaatgaatggtaaacaagttgaaattttctttccagtttctt

SEQ ID NO: 37575 - DNA, 120 bp, synthetic construct
  source 1..120: mol_type = other DNA
tggagagccttctatgatgggaagtctcagaagagaccagaacatcatccttccagggagaggcagggcagccaggggttggtaggggtagatagtgtactgggatttccatcccaagat

SEQ ID NO: 37576 - DNA, 120 bp, synthetic construct
  source 1..120: mol_type = other DNA
ctcatggcagccagaaggagcaaactggtgcaagaggagcccagaaacccaaactgtcaaggctcatgcaagagccaaaggccaatgtttccccctattcacaagagtgagaagtctagg

SEQ ID NO: 37577 - DNA, 120 bp, synthetic construct
  source 1..120: mol_type = other DNA
ttagataggcctagaggggcctagtgtctcatcctggccacaccccagggtctgtctctgctccagctcccagatcacagacccctagaaaaaccacatttacccccaacacagagggcc

SEQ ID NO: 37578 - DNA, 120 bp, synthetic construct
  source 1..120: mol_type = other DNA
accccagggccacaggcagcctggagctgacctgggatggggagaccagggggacagaggatgggagtaaaaccctggggcgaggggtagcaggagaattgggcaatcagggtgtggggt

SEQ ID NO: 37579 - DNA, 120 bp, synthetic construct
  source 1..120: mol_type = other DNA
ctggagaaaaacaagtccccaagaaaaaattcactctatgtagagaaaaaatattttctctcatgttagtacatgcagaacatttaatattccacaatatatatggttttttattcataa

SEQ ID NO: 37580 - DNA, 120 bp, synthetic construct
  source 1..120: mol_type = other DNA
atgcagacagagaattgaaaaggtggcaaagtggcgtgtgtgagggagccatcagtggtgccgtgagccaggagactctgacattccaaccccttagacaggcctagaggggcctagtgt

SEQ ID NO: 37581 - DNA, 120 bp, synthetic construct
  source 1..120: mol_type = other DNA
gtgtttctctacaaatgcacacaggcaccccattttgatgcacagataggtgtttatttcttttaagaatagcagctttattgagataaatttcacatatgatacaattcaccaatttaa

SEQ ID NO: 37582 - DNA, 120 bp, synthetic construct
  source 1..120: mol_type = other DNA
ttgtgtttagggtgtaagctatctattttgggctacccatcacagcttctctcctttggtagaataaagtgaactgaaccatcacgcctaaggtatttgccttatttcttcctcagctgg

SEQ ID NO: 37583 - DNA, 120 bp, synthetic construct
  source 1..120: mol_type = other DNA
accaattcatgactgttgttactatcttatggggcaggctgtggattggaagcgggggcggtgcacataggtacgtgtaacttactggtaatgcttttacgtcaggaatgaggtcaaagg

SEQ ID NO: 37584 - DNA, 120 bp, synthetic construct
  source 1..120: mol_type = other DNA
taaataaaagctaaaataatgtagtgtactgtaatttagatatcaaggctgcatgaataaaatgaaagaatataagttataaaatgcagtttctgctttaagatctccattattgagtta

SEQ ID NO: 37585 - DNA, 120 bp, synthetic construct
  source 1..120: mol_type = other DNA
attttcagtttgcataaaagttagtgcttattctgtgaatctgacccataccattattttctttttgatctgggtctctggcattggggcgatttgtaaaactatattaaagtatttggg

SEQ ID NO: 37586 - DNA, 120 bp, synthetic construct
  source 1..120: mol_type = other DNA
ggttggttctttgccatttgtatgccctattcatttcttcattttgtgttctttcttgctttttattccctgtatgtgtgtgtttctttttgtcaggctgtaatacatatgcatacatgt

SEQ ID NO: 37587 - DNA, 120 bp, synthetic construct
  source 1..120: mol_type = other DNA
cactagttgccagtagcattcccctagttaagacaaccaaaaacatcttcagacattgccaaatattccctggggagaaaagcaccctggtttgagagccactgatcaattttgtccatt

SEQ ID NO: 37588 - DNA, 120 bp, synthetic construct
  source 1..120: mol_type = other DNA
gtgagcatgtaccctggaacttaaaatttaaaaagtacatattgaagaaaatcaggatatacacataggattagtaagaagactctctccattaaaaggcatcttgcatcgcttcttggt

SEQ ID NO: 37589 - DNA, 120 bp, synthetic construct
  source 1..120: mol_type = other DNA
atcatatttcttgaaaaatgcttatggaggtagcaaaaaagccccaaattattcattttgaatgtttattataggcatgtttgaatctacctcttccataaatttattacaaaatttgat

SEQ ID NO: 37590 - DNA, 120 bp, synthetic construct
  source 1..120: mol_type = other DNA
agcattgtacacagactgattttatgtggcataaaagatttcacaaaggctttaaaattatgttcattttacttgatgggtgtgtgttcaattaaaaaaaaagtccctgtgattgtatat

SEQ ID NO: 37591 - DNA, 120 bp, synthetic construct
  source 1..120: mol_type = other DNA
ttaatagaaaatagagcttctgattattatcatctactttgttatctagcattcagtcaactggattctttacagagataatatacagtatatttatagtgataaagaagacatttgtgc

SEQ ID NO: 37592 - DNA, 120 bp, synthetic construct
  source 1..120: mol_type = other DNA
agtcctcagtgcttgcagaatatagttcacagttaatagactgatattcagggtcttcgcactccatctttcttttcctgtcttctctttgactctttcctaatgtcagtcttccctaac

SEQ ID NO: 37593 - DNA, 120 bp, synthetic construct
  source 1..120: mol_type = other DNA
tacaaagccatattctatagtatcaaaagagggagaataggcataacgggtagagagcctaattagggaactgacgaggttattctataaaggaacctgggatgtgtgacttagaattac

SEQ ID NO: 37594 - DNA, 120 bp, synthetic construct
  source 1..120: mol_type = other DNA
ttcccttttttgtttacttcattctcttactcagttttaaaatgctggtaatggtcttttttttcttttttttttttttcttggcgattttaatgctttggaaaagatctcatgctttta

SEQ ID NO: 37595 - DNA, 120 bp, synthetic construct
  source 1..120: mol_type = other DNA
atttgcatgtagtttgtaaaaaaaaaaataaagaaaaaagaaattgattgagattatttcagcagccagaagtgtgggacaggcagggcagttattcctccttctcagtttggaaactga

SEQ ID NO: 37596 - DNA, 120 bp, synthetic construct
  source 1..120: mol_type = other DNA
atgtgtgcagaatttacattttatgtgtgcagagacaaaaattgttataagattacaagttaatgtgcaagatgatttccgattcatgagtttcaggttttgatagcatatccttatcca

SEQ ID NO: 37597 - DNA, 120 bp, synthetic construct
  source 1..120: mol_type = other DNA
ctcaagtgatcactcaatttttgaattgctattggttgtaatagggccaagataacagctacttgcatttgtattcattttggttcatatttatgagcaggtttgctactatgtttgtgg

SEQ ID NO: 37598 - DNA, 120 bp, synthetic construct
  source 1..120: mol_type = other DNA
tcaaacgtacataagagtagaatagtataatgagcctttatgtacctattgcccttggtgtagtgtattaaagcaaattccagacattatgtcactttactactaaatagggcatatcta

SEQ ID NO: 37599 - DNA, 120 bp, synthetic construct
  source 1..120: mol_type = other DNA
gtgatgggaaacaagcctagattgactagagaaacctagaaatagaaaaatcgggaaggcaaagtgatttggatgataatgccatatattcagttgtccctggtggccagatattatagt

SEQ ID NO: 37600 - DNA, 120 bp, synthetic construct
  source 1..120: mol_type = other DNA
ttgttaactgtatgtacattgttatatagcagatctctagaacttttcatcttgcatgactaaaattatacccattgaacagcacctcccaattttcgtctccctctgacccctggtaac

SEQ ID NO: 37601 - DNA, 120 bp, synthetic construct
  source 1..120: mol_type = other DNA
ttcatcagggtttttgagtgagttttttaaaatacaaggtagtagtttgtgtaaatactaaatccattggtacctgtgcagaatgtaggaaatggagttgctaattccaaaaaaaacagc

SEQ ID NO: 37602 - DNA, 120 bp, synthetic construct
  source 1..120: mol_type = other DNA
cattacttgatatttgggtatttaagtcatgaaaggtatttcttctaggaagcagtgattctaaagtgtatgcttaaccagtcagttgagtgtctactcttgtgtgttcacaagtgtaca

SEQ ID NO: 37603 - DNA, 120 bp, synthetic construct
  source 1..120: mol_type = other DNA
ctggcgctaggaaaactaacaatactccctttcccaggtcatccgattcctatgctgatggaggaaatttgcctcacatgctggggggcgctggggaggaggcgtctgggattatgtggt

SEQ ID NO: 37604 - DNA, 120 bp, synthetic construct
  source 1..120: mol_type = other DNA
acatttcagcctcctgccccaccatttcttttctccaggagggaaggctgcatgtcgaggtggtcatagaatgttgagtatcatactttcctacctcgcttttatttgcgcgggtttaaa

SEQ ID NO: 37605 - DNA, 120 bp, synthetic construct
  source 1..120: mol_type = other DNA
ggctgcttcagttatccgggccccagagaggacctggccccaggagaagccacaggctggggactgtgcccactgccccctgcaccccggtgccggccagtcccacatgttgggggcagg

SEQ ID NO: 37606 - DNA, 120 bp, synthetic construct
  source 1..120: mol_type = other DNA
cctccatgtcctgtcgcttctggaaaccaagcccacaccaagcatggcacaaataaaagccatcaccctcttatgaataaaaaaccatatatattgtggaatattaaatgttctgcatgt

SEQ ID NO: 37607 - DNA, 120 bp, synthetic construct
  source 1..120: mol_type = other DNA
gctcttgcatgagccttgacagtttggttttctgggctcctcgtgcaccagtttgctccttctggctgccatgaggtcatgtagctcctgggaagcccgcatgttcccagtaggcatgct

SEQ ID NO: 37608 - DNA, 120 bp, synthetic construct
  source 1..120: mol_type = other DNA
agagcttctgaggtccgggcagctgtttcgagttctctcccatgttccagaagggttttgggtttgtggtgtcctgctcagcatccaatgatttagccaaattccgcaaagaatttaagt

SEQ ID NO: 37609 - DNA, 120 bp, synthetic construct
  source 1..120: mol_type = other DNA
accccacaccctgattgcccaattctcctgctacccctcgccccagggttttactcccatcctctgtacccctggtctccccatcccaggtcagctccaggctgcctgtggccctggggt

SEQ ID NO: 37610 - DNA, 120 bp, synthetic construct
  source 1..120: mol_type = other DNA
agacaagatgacaatgggagacaagaaagggtaagaagctaggaccggctctccctctctgccccagcccagccgcagcatgctgcactcaggaaccgcatggctctctctgtcttgctc

SEQ ID NO: 37611 - DNA, 120 bp, synthetic construct
  source 1..120: mol_type = other DNA
ttgttatcagggtaatgctggcctcataaaaaatgtttgtattccctcctcttcaacttttggaagagtttgtgaagaaatggtactaattcttctttaaacatttgctagacttctcca

SEQ ID NO: 37612 - DNA, 120 bp, synthetic construct
  source 1..120: mol_type = other DNA
agcttctctcctttggcagaatacagtgaactgaaccaccacacctaaggtatttgccttatttcttcctcagctggttcatggttacattgtcaaagctggcaaagcattcaagacctg

SEQ ID NO: 37613 - DNA, 120 bp, synthetic construct
  source 1..120: mol_type = other DNA
aatatgtaagtgtaaaactactcgattttatgggagctcatttgcttagtggacttttagaacttcaccgtttggtatatttctttattagaggaaaagtaaaacatttaaaataattct

SEQ ID NO: 37614 - DNA, 120 bp, synthetic construct
  source 1..120: mol_type = other DNA
gaataaagtgaaagaatataagttataaaatgcagtttctgctttaagatctccattattgagttatcctcatctttgttttttgttggctaatggacataagctaaagagtgctgtttg

SEQ ID NO: 37615 - DNA, 120 bp, synthetic construct
  source 1..120: mol_type = other DNA
ttggtcagataaagtttcctctgcttttaattttaataaagtattattatgtatatgatttctttttacctattatatatatgcatctattgttttctcactggtaaatatgggacagac

SEQ ID NO: 37616 - DNA, 120 bp, synthetic construct
  source 1..120: mol_type = other DNA
agtcttttcaagttacaggtactgcatgcattctttgggttcttatacacttcattgattcaaaatatttgtcttttgtttttatattacttgaaggattacttggctcggtataaaatt

SEQ ID NO: 37617 - DNA, 120 bp, synthetic construct
  source 1..120: mol_type = other DNA
cagtagcattcccctagttaagacaaccaaaaacatcttcagacattgccaaatattccctggggagaaaagcaccctggtttgagagccactaatcaattttgttcattcatctttact

SEQ ID NO: 37618 - DNA, 120 bp, synthetic construct
  source 1..120: mol_type = other DNA
ctcttcctccccctataaaaccccacaggttcacttgtagaaaaaaattgcaaatggggaagaaaaatgctttcagctagaaaagttagttttggatttgtgtattcagtaacagaacat

SEQ ID NO: 37619 - DNA, 120 bp, synthetic construct
  source 1..120: mol_type = other DNA
ataagtgtgttaagtgcctacagatccatattgtatacacagaatattttttactctgattgttgccctgtagaaacttaaggtataaggttgacctgcttcaagaacgttagggaatca

SEQ ID NO: 37620 - DNA, 120 bp, synthetic construct
  source 1..120: mol_type = other DNA
attctcttactcagttttaaaatgctggtaatggtcttttttttcttttttttttttttcttggcgattttaatgctttggaaaagatctcatggttttatctccaaaggaggaaattaa

SEQ ID NO: 37621 - DNA, 120 bp, synthetic construct
  source 1..120: mol_type = other DNA
aatgaatgaaatcaaatcacgtgacgatcagggtcctagagtaacttaatattttgtacattggttatttgactcctcatttttatattacatgttatatcaagggagggggtataaaag

SEQ ID NO: 37622 - DNA, 120 bp, synthetic construct
  source 1..120: mol_type = other DNA
atgtagtttgtaaaaaaaaaaaataaagaaagaaaaaagaaattgattgagattatttcagcagccagaagtgtgggacaggcagggcagttattcctccttctcagtttggaaactgaa

SEQ ID NO: 37623 - DNA, 120 bp, synthetic construct
  source 1..120: mol_type = other DNA
agtgatcactcaatttttgaattgctattggttgtaatagggccaagataacagctacttgcatttgtattcattttggttcacatttatgagcaggtttgctactatgtttgtggcacc

SEQ ID NO: 37624 - DNA, 120 bp, synthetic construct
  source 1..120: mol_type = other DNA
tcccaacatttcttttgcctggagtatttaaaaaaaacaaatgtattttaataggaaatttcaaacgtgcataagagtagaatagtataatgagcctgtatgtacctattgcccttggtg

SEQ ID NO: 37625 - DNA, 120 bp, synthetic construct
  source 1..120: mol_type = other DNA
acagagggatagagtgtgaaggtacagattttgagtttaagcacattagggggcttagtgttctggatgaagaaaacatataaaagttattgtatgttaggtattgtttgcaaaagagta

SEQ ID NO: 37626 - DNA, 120 bp, synthetic construct
  source 1..120: mol_type = other DNA
tccctgacttacttgaaaaagaattcactaggttggttattaagctaaggcaccagagaaaggtgaagcccaatgtaaggatatatatatatataaaaaagatacaagaagtaaagggag

SEQ ID NO: 37627 - DNA, 120 bp, synthetic construct
  source 1..120: mol_type = other DNA
gttcctttcatcttaaaatttgtgatttaaaaaacattgatattactataaagaattattattatttcccttgatttacagagtattgttacaatcacatttgaagtaccaggaaatgca

SEQ ID NO: 37628 - DNA, 120 bp, synthetic construct
  source 1..120: mol_type = other DNA
catttcaaagaagatcaagtttgtacataacactagaggcatttcttatcaaaaggattggataataaaaataagtttctactgggtatatttcaagcatttatttattactttagttac

SEQ ID NO: 37629 - DNA, 120 bp, synthetic construct
  source 1..120: mol_type = other DNA
acccccatcaatgtgggttttgtgttttgtttttgagcgcctccttatttttctcctgtatttttaaataaccccaatccctattgaagctggctctaggaaaactaacaatactccctt

SEQ ID NO: 37630 - DNA, 120 bp, synthetic construct
  source 1..120: mol_type = other DNA
ccctgccccgccgcagccagtcccgggggcctaccccaacaccgcccccgggagacgcccttacgctctgctgcacccgcatcctcttcgctacctactgctctcggcccccgtctatgc

SEQ ID NO: 37631 - DNA, 120 bp, synthetic construct
  source 1..120: mol_type = other DNA
cttttcttgccttcggttgtggcttctatggctgtcccgatttgcgcatttcctggggtactatgaacgtgagtggggtattttgttctggcattaaaagaaaaacaagcaagcaaacaa

SEQ ID NO: 37632 - DNA, 120 bp, synthetic construct
  source 1..120: mol_type = other DNA
agctgctccgtgaatgtgagaaagtttttcccccagcccccatctactccccacccccagctatgaatttcttatttcaggagggaggacaaacatggagacacacatttttacaggagt

SEQ ID NO: 37633 - DNA, 120 bp, synthetic construct
  source 1..120: mol_type = other DNA
agaggagctcaaatatgctttccatggagaatgtggggaattatcagggatgcagccaggagactgccccaaaaaaccatctcttgcatgatccggagacatcttcagacgaggatctga

SEQ ID NO: 37634 - DNA, 120 bp, synthetic construct
  source 1..120: mol_type = other DNA
gttgaggacgaacgagattctgaaaataaaaatccctggtacataagccaaaatttcagagtcaactacagattttcaaaggctatgaaataggtaacctcaagccaccgactccaatag

SEQ ID NO: 37635 - DNA, 120 bp, synthetic construct
  source 1..120: mol_type = other DNA
gagaacatgtcactttgccatgcgcgccatgcctcgaaggtaaatcagcaaagacagcagtttcaagccccagtctgtgggtttccctgcaaccacagacacccgttctactcagaccac

SEQ ID NO: 37636 - DNA, 120 bp, synthetic construct
  source 1..120: mol_type = other DNA
gctcttgcatgagccttgacagtttgggttcctgggctccttgtgccccatgttactccttctggctgacatgaggtcacatagctcctgggaagcctgcatgttcccagtaggcatgct

SEQ ID NO: 37637 - DNA, 120 bp, synthetic construct
  source 1..120: mol_type = other DNA
tctattggagtcggtggcttgaggttacctatttcatagcctttgaaaatctgtagttgactctgaaattttggctatgtaccagggatttttattttcagaatctcgttcgtcctcaac

SEQ ID NO: 37638 - DNA, 120 bp, synthetic construct
  source 1..120: mol_type = other DNA
gactggcattcctctgataaaagttattttattttctcattttccatcaatctatcctgttcagtgaaatatcggttcgtgcctttagcccattttctaattggcttgttttttcttgtt

SEQ ID NO: 37639 - DNA, 120 bp, synthetic construct
  source 1..120: mol_type = other DNA
cttccaggaatcgggggtgaatgacggcctccacctggaaacagaaggaagaaggtgtgaacttcctggggagggagtaacctggagccaaggacacccggaggagatgcagaaagcggg

SEQ ID NO: 37640 - DNA, 120 bp, synthetic construct
  source 1..120: mol_type = other DNA
ggcaaagtgagtctggggtcctgggggcagggcccgtgtggcggggtgagagtgaatgacagaggcccggtggccgtggtggcttctcagcgtggagcatgaggagggtgtggacaaaca

SEQ ID NO: 37641 - DNA, 120 bp, synthetic construct
  source 1..120: mol_type = other DNA
cactccctgccccccaccgatctacatcctaggcctacataaccacgaactgactttctatatagctttacatgctctggacttgcatatgaatggaatcatacaatgtatgtctttcac

SEQ ID NO: 37642 - DNA, 120 bp, synthetic construct
  source 1..120: mol_type = other DNA
gaaacataagaacagagacctcaaatagtttccccaaggtcacacagcttataattagaactagaattggaactccaggctggcttcagatctgcctctctctcacgccctctttaagat

SEQ ID NO: 37643 - DNA, 120 bp, synthetic construct
  source 1..120: mol_type = other DNA
tggttcctacctggacgatgagaagaactgggggctgtctttctatggtaggcatgcttagcagccccaaactcatgcccctctcaggcctcaccccccattcacccacccctgggctgg

SEQ ID NO: 37644 - DNA, 120 bp, synthetic construct
  source 1..120: mol_type = other DNA
ttggtgtggccctgtgccctaatacctgtgaaatcacagcaccgatgagctggttccaatttttaaaatatatacatgcagtacttccatgactattcaaagaaaaacaattccttccat

SEQ ID NO: 37645 - DNA, 120 bp, synthetic construct
  source 1..120: mol_type = other DNA
ttgcctgggccaggacagggcagggcagggaagggctggggtgatgcagagggcttggggcccaggccagaggggctgggtgtctccatggatgtgttcttagggtgctcacctgggaga

SEQ ID NO: 37646 - DNA, 120 bp, synthetic construct
  source 1..120: mol_type = other DNA
gtaggtaggtagatggatgcatggatgtgatggatggatgggtgaatagatagtagatgatggttaagtaggtagatgaatggatggatagatggatgcatgcatgagatggatggatta

SEQ ID NO: 37647 - DNA, 120 bp, synthetic construct
  source 1..120: mol_type = other DNA
tgtagagagaatgaatgaatgatacccagatattccccacaaatgtggggggaatgaatgaatgacatccagggattctccacaaatgtggagggaatgaatgaatgataccccagattc

SEQ ID NO: 37648 - DNA, 120 bp, synthetic construct
  source 1..120: mol_type = other DNA
atattccctgcaaatgtggggggaatgaatgaatgacatccagggattctccacaaatgtggagggaatgaatgaatgataccccagattcacttctgcaaatgtagagagaatgaatga

SEQ ID NO: 37649 - DNA, 120 bp, synthetic construct
  source 1..120: mol_type = other DNA
gtaatataaccagtgagttttattctgggtgtcatgatgaatacatgaacttttatgtctttatcattttaaatccagtacaaatattcttacagatgttctaattgtcccattacagct

SEQ ID NO: 37650 - DNA, 120 bp, synthetic construct
  source 1..120: mol_type = other DNA
ttaagagttctttttacacgtccagatttttctagggaacccgaaacgaggtatgattcaggaggatgtattgaaagcccaggagccttccccttctggaaccccccaactagatttcct

SEQ ID NO: 37651 - DNA, 120 bp, synthetic construct
  source 1..120: mol_type = other DNA
aaaacatccaaaaagagccttttcaaagccagtgagaaagccttgctctgtggagcactaggtgcagacagggcctttgaaagggcaggggactgtcacacaagcaaatctgccactaat

SEQ ID NO: 37652 - DNA, 120 bp, synthetic construct
  source 1..120: mol_type = other DNA
ggggcagagcagtggtccaggggacagagtagggtgaccaggtttctgaggaggggaggacagaggtactggggacaaggagcagggtctcgggggagatctggacccttgggagcctcc

SEQ ID NO: 37653 - DNA, 120 bp, synthetic construct
  source 1..120: mol_type = other DNA
aatcaactgaagtatgctttacacatgtgttttccaaattgctgactgttaattgtaagtgcttgtgacttgaaaggaagcacttgatgttcaggggggaaattccttttaaattctgca

SEQ ID NO: 37654 - DNA, 120 bp, synthetic construct
  source 1..120: mol_type = other DNA
tcccgaggtgccgggaacccccgacgacacagggcagattccctgaatggggcctccggcgggggcgaggcgggcggtgaagaaggggcctggcacctgggaaggctgcggcctggtgag

SEQ ID NO: 37655 - DNA, 120 bp, synthetic construct
  source 1..120: mol_type = other DNA
gtaaattttaggatatctgtattttttaccacaattggaaattcctttcttcctaaagttcagtgcagttatcatatattcttttaaatttttactgtatgtatcttcaagacatagcat

SEQ ID NO: 37656 - DNA, 120 bp, synthetic construct
  source 1..120: mol_type = other DNA
cagcattatatttttaataacagagaggtaacaatactgcgtctttagtaacagacttcttatataaaggttatttgaaacgtagttcaggccccagcacccgactgatagactgtcaga

SEQ ID NO: 37657 - DNA, 120 bp, synthetic construct
  source 1..120: mol_type = other DNA
ggaaagaaaacaatggaaagaatgcctgaaattgactggaaaagcgaggaggctatgtagtttgcagcttagcttaggcaaatccctcactatgataaaagttctcgactttatgaatga

SEQ ID NO: 37658 - DNA, 120 bp, synthetic construct
  source 1..120: mol_type = other DNA
caccaattgttagtagctttcgcttcataggtttcacatctcttccctccgtctcttaccgtgctgcccacacactcacacacacacactcacacacacatacggatatatgtttactgt

SEQ ID NO: 37659 - DNA, 120 bp, synthetic construct
  source 1..120: mol_type = other DNA
aatgcctgaaattgactggaaaagcgaggaggctatgtagtttgcagcttagcttaggcaaatccctcactatgataaaagttctcgactttatgaatgagagaatggaggtgccaggat

SEQ ID NO: 37660 - DNA, 120 bp, synthetic construct
  source 1..120: mol_type = other DNA
atgacgaggggtccgcagccatgcccatgttcgtgaaaggtcaccacgttctgcttctcatcatgggcatatgtcgtatccccgaggctgaggcaagaagagagaaggaaagtaagtggc

SEQ ID NO: 37661 - DNA, 120 bp, synthetic construct
  source 1..120: mol_type = other DNA
tatccagtttttcacattctctggcttagagaggctgagaccttagacccacaccaatacaggccaaatgccaattaaagttttagcttctggctccttctgttgtggggtttagattcc

SEQ ID NO: 37662 - DNA, 120 bp, synthetic construct
  source 1..120: mol_type = other DNA
acaagtaagttgtctagggccagccttgggaaaggaaagggcaatgtttgaacatctctgctttcctgttttcctggcagcagattcctgaaataattagcctacaggtttttacttcat

SEQ ID NO: 37663 - DNA, 120 bp, synthetic construct
  source 1..120: mol_type = other DNA
acatgaccatggaacaggagtcaccccctttctgtcacttgtcaacaaatgcggatttttttttttttttttttttttttttcctcatatgtaggtagcatgcaccagggtgcgcctctg

SEQ ID NO: 37664 - DNA, 120 bp, synthetic construct
  source 1..120: mol_type = other DNA
ctgctgtgcgtcagcaggtgcatcttcagctggtgcttcttggcgaaggtttgcccgcacagcgcctcggggcacaggtacagcaccacgcctggaccagagcccagcagtccgcggggg

SEQ ID NO: 37665 - DNA, 120 bp, synthetic construct
  source 1..120: mol_type = other DNA
tatttcacccacgtaactcattattctcatttgtcatgaaatatttgtgcactgatagacaatgaaaattggcatcttcctctaggattttcatttcactgatggcaggttttgaagttc

SEQ ID NO: 37666 - DNA, 120 bp, synthetic construct
  source 1..120: mol_type = other DNA
gtggagaaggagggaaggtggggcagtgccctgagaggcctgtccttctgtcttctcaacctcctctgccctctgccttccactcctgcctcaggaacgtggcccgcttctggccccttg

SEQ ID NO: 37667 - DNA, 120 bp, synthetic construct
  source 1..120: mol_type = other DNA
ggctaagggcctgaatgccaggatgatgcgaggcctctcctactccctcaccaccagctccactcacaaaaggagcagcctctgcaaagtgaagatcgtctgcccaccccagagcccacc

SEQ ID NO: 37668 - DNA, 120 bp, synthetic construct
  source 1..120: mol_type = other DNA
ctctgtcagatccgcatcgtttctatgattcccaagctgtctactgagtaaaacgctcagcaccgatttagaggccaggctgggtcttaagtattcatccaccttcctcctgatgctcca

SEQ ID NO: 37669 - DNA, 120 bp, synthetic construct
  source 1..120: mol_type = other DNA
gctaccaggtttctgcatcatcctatctttgctgaaaccagtgaagtcatcaatctgagaatccaattggctgggtggaatagcatgtcctgtcataagctctggtgaaacagattttga

SEQ ID NO: 37670 - DNA, 120 bp, synthetic construct
  source 1..120: mol_type = other DNA
tatccattcaacaatttactggaggttctaaaaagtgccatatcatcaggaaaatacaataggtttaaaatttggaaagaaataaaactgtcattattcacagatgacattgttctgtac

SEQ ID NO: 37671 - DNA, 120 bp, synthetic construct
  source 1..120: mol_type = other DNA
atgcagaaccttctcacccagcgggatgaaatcgcctgggtaacatagtgagaccccggctctacaaagcaaccaactaatcaaaaaagaaagaaagaaagaaagaaagaaagaaagaaa

SEQ ID NO: 37672 - DNA, 120 bp, synthetic construct
  source 1..120: mol_type = other DNA
acgctcacccccagtgctctattgagcccaagtgcttaaagaaattggacagttcctatttctacccaccttgctgcttccttgatgatggattcaaaaaatcgcttcctgactgcagta

SEQ ID NO: 37673 - DNA, 120 bp, synthetic construct
  source 1..120: mol_type = other DNA
ttaacaatctggtagtctggcatgtcaagatggtggttataaggtgaacagcaagttcttacatcttgcctttcttactactaaataaggaacatgaaacgagttgcataatcgatgctt

SEQ ID NO: 37674 - DNA, 120 bp, synthetic construct
  source 1..120: mol_type = other DNA
ttctagggaattatttatttaataaatgggaggatacaccagggagaaatcccaggcctgacaaacggaggccaggacacataatacaataaaaccacctcttattttctggccctatga

SEQ ID NO: 37675 - DNA, 120 bp, synthetic construct
  source 1..120: mol_type = other DNA
aagtctgagaaaaaaaaaaatatgtggacaggcctgtccaaacggacatacaatgtgaagatattggggtctcatgagagttctcagcaaagggtatcctcagcagagcagaattttaat

SEQ ID NO: 37676 - DNA, 120 bp, synthetic construct
  source 1..120: mol_type = other DNA
cttctattataaaaagagaagtgctttcttcttacctgaacagacatttagtctagatatggattttccttcccacttgcagtgcttttgagaaaaccaatgtttgtatctcagcttcca

SEQ ID NO: 37677 - DNA, 120 bp, synthetic construct
  source 1..120: mol_type = other DNA
tctaatggttcagactcttccgtaatgaaggtttgagtcatcctgccaggccaagcatcatgaccaactgacatgctatctcagggcaaagggaatgcgaaacgggtagcgaaagaaggt

SEQ ID NO: 37678 - DNA, 120 bp, synthetic construct
  source 1..120: mol_type = other DNA
tgggggaaaatacctgaaaaggaacttcataaaaggcatagttaaatgaccaataaacacataaaatggtgctaaaaaaaaaaaaaaagaaaacaataaatagctgggtgtggtggcact

SEQ ID NO: 37679 - DNA, 120 bp, synthetic construct
  source 1..120: mol_type = other DNA
atgcagaaccttctcacccagcgggatgaaatcgcctgggtaacatagtgagaccccggctctacaaagcaaccaactaatcaaaaaagaaagaaagaaagaaagaaagaaagaaacaca

SEQ ID NO: 37680 - DNA, 120 bp, synthetic construct
  source 1..120: mol_type = other DNA
acgctcatccccagtactctattgagcccaagtgcttaaagaaattggacagttcctatttctacccaccttgctgcttccttgatgatggattcaaaaaatcgtttcctgactgcagta

SEQ ID NO: 37681 - DNA, 120 bp, synthetic construct
  source 1..120: mol_type = other DNA
ggtggaaatagtagtttgcaatgaggaataccttcaattgtacagatcaaagagtaagaaaaaaagcattgggattttttgtttttaccttgtggtccgacaacttgaaagaatattctt

SEQ ID NO: 37682 - DNA, 120 bp, synthetic construct
  source 1..120: mol_type = other DNA
tcctacagttccttcacatgcacctcgaagaccatttacttttgggctactgccaggcaaatttcaacccatgttcttttacccaatgtccatgtagttcttttaagtttcctatctcca

SEQ ID NO: 37683 - DNA, 120 bp, synthetic construct
  source 1..120: mol_type = other DNA
attttgcattaaggagtgagttaatgctccaagaaagccttgttaaactgacacagcaacctagatactggttttgctttagtgtgcctttgatattaatggttaattcctagagaaact

SEQ ID NO: 37684 - DNA, 120 bp, synthetic construct
  source 1..120: mol_type = other DNA
ttttgtcaataactcaggatttagctattttcattaaccaaacaatattaaattccttacttactaaattttacataaacaaagataattctcatttgagctgcattcatagctttagaa

SEQ ID NO: 37685 - DNA, 120 bp, synthetic construct
  source 1..120: mol_type = other DNA
ataccactttttattgaaatagctggcacatgaatatacctggttacaatgcttggccgaatgagaaatgcaatgccattttatgtaattgcacttaatatgcgtgagtctcacacttaa

SEQ ID NO: 37686 - DNA, 120 bp, synthetic construct
  source 1..120: mol_type = other DNA
aaacaacagttacaaataactaaaattgtaattgctcctgcatttctatttaactccctcatgtatcctgagaagaccttcttgttttacctaatgatctctccaacatcccctgaactc

SEQ ID NO: 37687 - DNA, 120 bp, synthetic construct
  source 1..120: mol_type = other DNA
tggattgtttgtccattgtatatattggttcttcaatgtcagcggcaggcttttgtaggttttgaatcttctcagtggcccggagctcttgccctccctatgtataccctcctggtgaca

SEQ ID NO: 37688 - DNA, 120 bp, synthetic construct
  source 1..120: mol_type = other DNA
tgggccttgaggagttgaatagttttaatttctggccctgcatctcatgaacgcagtttactttgattagcatcttctactgggcctgaagatgaggctgtaattgctgtcagtgtttaa

SEQ ID NO: 37689 - DNA, 120 bp, synthetic construct
  source 1..120: mol_type = other DNA
accatttacttttaggctactgccaggcaaatttcaacccatgttcttttacccaatgtccatgtagttcttttaagtttcctatctccaatctgaaataatggccttcagtctgtcaaa

SEQ ID NO: 37690 - DNA, 120 bp, synthetic construct
  source 1..120: mol_type = other DNA
taggattcggctgactcaggtccatcccatggagtctttggggcggtccggagtagggcggggacagctagaggaaggcacaggcaggatagcatgtggtcagtgctatgacagaggtca

SEQ ID NO: 37691 - DNA, 120 bp, synthetic construct
  source 1..120: mol_type = other DNA
gccgagttggttcattttctgctcctcaagtatcgagccagggagccggtcacaaaggcagaaatgctggggagtgtcgtcggaaattggcagtatttctttcctgtgatcttcagcaaa

SEQ ID NO: 37692 - DNA, 120 bp, synthetic construct
  source 1..120: mol_type = other DNA
tggcacttcaggtcagcagagggaggaatcccaggatctgccggacccaaggtgtgcccccttcatgaggactggggatacccccggcccagaaagaagggatgccacagagtctggctg

SEQ ID NO: 37693 - DNA, 120 bp, synthetic construct
  source 1..120: mol_type = other DNA
cggagtcagacaggacacatggaagtgacccggggaaatgtgctgtaattctgaaagtgctggggctggacagaaatgaacacatcttgccagtgtcagctctcagggaacccagcgcac

SEQ ID NO: 37694 - DNA, 120 bp, synthetic construct
  source 1..120: mol_type = other DNA
gctgactgctcgcttcaaagagtgaagaatgggcctcacgtcacaggaggcagtggaaactaagggatggggccccggaaggtgcactggcccaaaccccctcccactggccctggctgc

SEQ ID NO: 37695 - DNA, 120 bp, synthetic construct
  source 1..120: mol_type = other DNA
gcttctgctggggaccatacgccttcttcgcatgctttgctgctgccaaccctggctaccccttccaccctttgatggctgccctgccggccttctttgccaaaagtgccactatctaca

SEQ ID NO: 37696 - DNA, 120 bp, synthetic construct
  source 1..120: mol_type = other DNA
attaagagatcagatggtgtaggatttgggagcttttaaggtgaagaggcccgggctgatcccactggccggtataaagcaccgtgaccctcaggtgacgcaccagggccggctgccgtc

SEQ ID NO: 37697 - DNA, 120 bp, synthetic construct
  source 1..120: mol_type = other DNA
gaagtgacgcgcatggtggtggtgatggtcctggcattctgcttctgctggggaccctacgccttcttcgcatgctttgctgctgccaaccctggctaccccttccaccctttgatggct

SEQ ID NO: 37698 - DNA, 120 bp, synthetic construct
  source 1..120: mol_type = other DNA
ttctattttgaattgtggtaaaatatacataaaatttactaccttaaccacttctaagtggcagttggaacaggggtcaaggagagcccttgggttgggtaatgtatattcacattgcca

SEQ ID NO: 37699 - DNA, 120 bp, synthetic construct
  source 1..120: mol_type = other DNA
taacacatccaccttggcaaaaggacataaaatatgtcttatggtcagaaaaatcaacattttgtgtatttacttagtttacgaaaagtactgaaaatgctattactagctgaatttgtg

SEQ ID NO: 37700 - DNA, 120 bp, synthetic construct
  source 1..120: mol_type = other DNA
cttggggctggtggtgctggagataccggggctgaagcatatggagtcacccagcccggtgtccatgtccttggataggccattgcttttagagctggagatgggtgcacaggctgatgt

SEQ ID NO: 37701 - DNA, 120 bp, synthetic construct
  source 1..120: mol_type = other DNA
ttcttcacagaaagatgcctcacatccatcccgattttcctaaaaggcttctcagtgcctagagatagagggaaagtggagatgggaagatacatgtatttgcagacttgcattttgaaa

SEQ ID NO: 37702 - DNA, 120 bp, synthetic construct
  source 1..120: mol_type = other DNA
ggaactccaactttctttgctaactctgcttttcctttccaggcctgcttttactttccaggcagaaaattgggagatccttctcagaagaaactgaaatgtcttcagtaaagatcccca

SEQ ID NO: 37703 - DNA, 120 bp, synthetic construct
  source 1..120: mol_type = other DNA
attgagcatatctagggaaacccacgctatattgaactaggatgacaaaaggccaaagaaagttgccccccacacacacataaaaaggaacagatgtgtttttgcagatggaaaatatct

SEQ ID NO: 37704 - DNA, 120 bp, synthetic construct
  source 1..120: mol_type = other DNA
tatttgagtgtttacttacatggtttgtacagttgcttcttcttatttctacaactaagaataaaaaaaaaaaaaaactggtcacttctgatacaaataccataaaataaaagtagttgt

SEQ ID NO: 37705 - DNA, 120 bp, synthetic construct
  source 1..120: mol_type = other DNA
ttaaaaattaagagcccaaccaaagtttaaatagaagagctataagacatttcctctagagtaatgaaatctctggcatttaaatgaaaccaataagccaactggatttaatatgtttat

SEQ ID NO: 37706 - DNA, 120 bp, synthetic construct
  source 1..120: mol_type = other DNA
gagaaaccccaaacacacacacacaaccatttttctgcagccccggctgtgacattttatacctttcacaattattttaagcactctccttttttctttttccttctgtgttcaaattac

SEQ ID NO: 37707 - DNA, 120 bp, synthetic construct
  source 1..120: mol_type = other DNA
cacctccttaccttcaggcatctcccggtcacgaacctggtgcatgtggaggtcctcaccaacttcaacagtcacctcagcaggctgtacagcagcagccatgggcgctcctgccatcct

SEQ ID NO: 37708 - DNA, 120 bp, synthetic construct
  source 1..120: mol_type = other DNA
aggagggtttatctgttctatacccagagtacccaatagaatgtcttggatgcatattattgaaggcttaataattctaaatattgtttacatataacaaatgcttttgtcaatgaataa

SEQ ID NO: 37709 - DNA, 120 bp, synthetic construct
  source 1..120: mol_type = other DNA
gattaagttttccacgaggtaaataataaggaaataatgacgtggtggcaatgggccttcagcagggtataaaggtggctatggacccagaagacttccaaacccaagaacttcactctc

SEQ ID NO: 37710 - DNA, 120 bp, synthetic construct
  source 1..120: mol_type = other DNA
gtctcgatctcctgacctcgtgatccgctccccttggcccaaatttctgatgactacaaatacacgcccaaaagttgcagggggggaagaaagcaaaagacagaaacagaacaaaaacat

SEQ ID NO: 37711 - DNA, 120 bp, synthetic construct
  source 1..120: mol_type = other DNA
cttgcttggcgtgtggtgaaaagttcccacacgtttggtcacagaagaacttgtgttgattgttgtggtgtgcaagcagagggaaaatggtttgtgttttctatccacctcattcacaat

SEQ ID NO: 37712 - DNA, 120 bp, synthetic construct
  source 1..120: mol_type = other DNA
ggatatatgatttattttcttagagcagttataaggttgcagtgaagttgagcagaaagtggatcattcccacatacttcatgaccccactctagcgcggactcctaaaggatcaacgtc

SEQ ID NO: 37713 - DNA, 120 bp, synthetic construct
  source 1..120: mol_type = other DNA
tccaggccccaagtgtgcatcctttgtgaatgaacccagtgaacaggcatgggagaaattaaggaagaaacagatgactgaaaggaagcaaaaaatgagtgagaactaatcaaaatgatc

SEQ ID NO: 37714 - DNA, 120 bp, synthetic construct
  source 1..120: mol_type = other DNA
aaacagtcttaaagatttccaataattcccacaatggccataaattatcctgggtgtcattttcccatcaatttaaaaaggcacatgagaggccgagtgcagtggctcaggcctgtattc

SEQ ID NO: 37715 - DNA, 120 bp, synthetic construct
  source 1..120: mol_type = other DNA
tcctcacaataactaactgtgtgcttttggaatcagacttgaagcatctatcccagtgcccgagtatcagtcaactaaagaccctggacctgagtggcatcagactgaccaattacagtc

SEQ ID NO: 37716 - DNA, 120 bp, synthetic construct
  source 1..120: mol_type = other DNA
aagccttagttggtggatgtcagctgcactgcacaaggacccactctcttctcgctgccctggaagggtatgtccatattgtgtattagctggagactctgggcagcaccaaaccttgct

SEQ ID NO: 37717 - DNA, 120 bp, synthetic construct
  source 1..120: mol_type = other DNA
agcatcatggagagtagttttgtttccttaaaagtcctctgtcctctttccattcatcccattgtactccaaatcccttgcaaccactgggttttctaccatctccatagaaaaaggcag

SEQ ID NO: 37718 - DNA, 120 bp, synthetic construct
  source 1..120: mol_type = other DNA
tccaatccataggtctcgggtgccatctgctggtagatcagatcagatggtgtaatttaatgttgcaaggattatattatatggtatttttttaaatttactattatgagccaggagcgg

SEQ ID NO: 37719 - DNA, 120 bp, synthetic construct
  source 1..120: mol_type = other DNA
tcaggaagagattcaactcttccctatctcacactcagaactacaaaggtcacatattactaaaattccatgtttgtggagtaaatcagtgaatgagtcctggactttcaccatatccct

SEQ ID NO: 37720 - DNA, 120 bp, synthetic construct
  source 1..120: mol_type = other DNA
tctttagaggttgggacacactcttcttggtaccagaagggcagaaccatgcctctgtagccacttattgcagaacggaattggagtaaactgagggctctttcacacgtgctagagaaa

SEQ ID NO: 37721 - DNA, 120 bp, synthetic construct
  source 1..120: mol_type = other DNA
gacttggcatcaatgaggccttcagggacctgtgtcctagacttagaaatggaacctgaagttctagagtgatgcaggacttacccctgcaaggatggttatttaaaaatgtcaaaaata

SEQ ID NO: 37722 - DNA, 120 bp, synthetic construct
  source 1..120: mol_type = other DNA
atctaccagagcaccgtgggctgttacttgccttgagttggaagcggttcgcatttataccggtaaatgtattcatccttttaatttatgtaaagttttttagtatgcaattctcgatct

SEQ ID NO: 37723 - DNA, 120 bp, synthetic construct
  source 1..120: mol_type = other DNA
tccaaaacttacttttccattttcaaaatatcttggccaacggtagcttgacattactcgtgtaaatccataaggatgagcaagcataaatccaactgccattttgtacagcctgaaagt

SEQ ID NO: 37724 - DNA, 120 bp, synthetic construct
  source 1..120: mol_type = other DNA
tcagggagaaatgcaaaatgggaaaggggctggtcccagtatgaaaggcacttgcaaggtcagtgtgtatcctaattgtttcatgaatcactgtgatgctagaaaagcatttgctttttt

SEQ ID NO: 37725 - DNA, 120 bp, synthetic construct
  source 1..120: mol_type = other DNA
atcctttggagtagacaatatttttctacattataggtaaggaatttggaacttaggttcacagctttggatgttggcctatggttagtgaggggtgtagccaggattcaaacccctgtc

SEQ ID NO: 37726 - DNA, 120 bp, synthetic construct
  source 1..120: mol_type = other DNA
gcgaggggatattgtgaagaaagtaagcaaaacccctttgtttgtagaatttcagtgagcatagtcctgggttaacctgacaacagtcctactgtttattgatgcttataggtgagccta

SEQ ID NO: 37727 - DNA, 120 bp, synthetic construct
  source 1..120: mol_type = other DNA
tattttgatacagcggccatgcctgggatatgaactcagctgttttgagtgagaaggggcatcctaccagtgtgagttaacacttctctgtactctccccggttcctcattttgttcctg

SEQ ID NO: 37728 - DNA, 120 bp, synthetic construct
  source 1..120: mol_type = other DNA
tgagtaatcaaaaggctgatggagttggaggactggcgtttttaagaggaactgatttggacattgagattatcagctcctcatcaaatatcattaagtacacattattatttttttctg

SEQ ID NO: 37729 - DNA, 120 bp, synthetic construct
  source 1..120: mol_type = other DNA
ccagtgaatggcagggctgggaccatggtgaggcaagtaaggcacaggcctctcttgtgaaatttaagagagtgccaaaaaactcactaatcaaaataatgtttgtatgtagttgttcaa

SEQ ID NO: 37730 - DNA, 120 bp, synthetic construct
  source 1..120: mol_type = other DNA
cccacaagcatctaggcctagtcacaccaaattctccttatttcctgaaaatgttgtacttattattgcttccatacagttacacacccttttgcctggaatgcccttttctacaactgg

SEQ ID NO: 37731 - DNA, 120 bp, synthetic construct
  source 1..120: mol_type = other DNA
ctgttataattgtttcagggtgctatgaaccacacccacttaagaccacacccacttaagactgcaaacttaatcgataaatattttgtgtgttctgactgctccactgaccagctgttc

SEQ ID NO: 37732 - DNA, 120 bp, synthetic construct
  source 1..120: mol_type = other DNA
ccctcctgcccctgtctctggcaagcaccattgtactttgtctctatttgataactccagatactgcaggtaagtggaatcatattgtatatattttttgttactggcttatttcacttc

SEQ ID NO: 37733 - DNA, 120 bp, synthetic construct
  source 1..120: mol_type = other DNA
ttgtccttttctagtcctgcccctcccagttcactctttcatctcaccccactttagtccttagtccttaactgctggcaaccactaatctcttgtccatgtttataatattgtcatttc

SEQ ID NO: 37734 - DNA, 120 bp, synthetic construct
  source 1..120: mol_type = other DNA
gaacatcagatgcttggatcaaccaatgagttgtatccagacctgtgaccaaaactgaggtggcatttgggatatcattcaccttttggtctgtgcttcaggccatgagtagttagtgta

SEQ ID NO: 37735 - DNA, 120 bp, synthetic construct
  source 1..120: mol_type = other DNA
tgccacactcccagttagaggcagactttagtctatattttcagatttattttgattataaagtgtagtctccccccgccaccccctgtctgcttttctttgtagttctgtaatcaggag

SEQ ID NO: 37736 - DNA, 120 bp, synthetic construct
  source 1..120: mol_type = other DNA
tcacaggaaacagcatgatagatttgcatgacctagctccctgccttctcctgccattcttttagaaagtggtgagtggctgcctgccaggtaaaatctgggtgacaaaatccaaagtta

SEQ ID NO: 37737 - DNA, 120 bp, synthetic construct
  source 1..120: mol_type = other DNA
agatcttggagaacaaggaaattcgagagtgacattgggacaaactttcccctagaggcatatcttctgattcttaaagaggcagctgagaggctagaaatctttccagcaaaacttact

SEQ ID NO: 37738 - DNA, 120 bp, synthetic construct
  source 1..120: mol_type = other DNA
atcacctaataaaaggaaaatattttcagattgactttcaagcaaaaccaattcattgctctgtagaagagacatacctaaaacaaaaggattcagaaaggataaaactagtaggatgac

SEQ ID NO: 37739 - DNA, 120 bp, synthetic construct
  source 1..120: mol_type = other DNA
gtattattttttctctccacctcagtccctgtaactttcctctttgtccattctggagttgtggaggtgataaatgggtccaaaaatgctgttaagagtgatctttaggtgggcacaggt

SEQ ID NO: 37740 - DNA, 120 bp, synthetic construct
  source 1..120: mol_type = other DNA
tattgccttaataatacaggacacaaattatcctttaaaagccagctctgtgcaatgaagatggggttaaggttgaggagaacatgacatctcaaaataagccagaatgaaaatttcctc

SEQ ID NO: 37741 - DNA, 120 bp, synthetic construct
  source 1..120: mol_type = other DNA
agtggttattgggtgcccactgtgaacagacattgtaggaactgtcttcaagagaagcccttgagggataggcttctagaagttcaggtacatgctggatttatctatgcaaattataat

SEQ ID NO: 37742 - DNA, 120 bp, synthetic construct
  source 1..120: mol_type = other DNA
gggttgaatcccacagtttgtaaaacattgctttaagagcattgttttttaaattttttggtgtgcataaaattacctgacatgctgatttgaaaggcagattcctgggcatcagtccac

SEQ ID NO: 37743 - DNA, 120 bp, synthetic construct
  source 1..120: mol_type = other DNA
cctcttccctccctctccttcttgtccttattttctccttttttctccactgagtttttagaaaaggagaaaactagagaggtgagcttcaggaaaaatatctttatttctggattggct

SEQ ID NO: 37744 - DNA, 120 bp, synthetic construct
  source 1..120: mol_type = other DNA
ctaatttttcttttgcacataaaccttcaaagggtatggagatgttgaacatcaacattggattgtttttcctacctggggttggggcaagcagctggaagttgggaatgaaatagggca

SEQ ID NO: 37745 - DNA, 120 bp, synthetic construct
  source 1..120: mol_type = other DNA
tgtgtctgggtgggggtagggaaatgggtttaaagatattttcagaaagtggtaaaagtagtaatttgtattaggtgttggcaattcaaggatatatgttgtaatttttggtaaccactc

SEQ ID NO: 37746 - DNA, 120 bp, synthetic construct
  source 1..120: mol_type = other DNA
aggcagtcaatattgagataccgctgccttgtgagttttgggtagaaataaagcaagtaagaaatatagttccatcctgcttggagttttctatttagttagggactttgaagtccctga

SEQ ID NO: 37747 - DNA, 120 bp, synthetic construct
  source 1..120: mol_type = other DNA
ggcttcagcttccattctttttgtttttctcaatttatacctaaatgataatcattttagaaccttttttttcctattattttagtgtggctgtcagagggagcagagctaaatatgtga

SEQ ID NO: 37748 - DNA, 120 bp, synthetic construct
  source 1..120: mol_type = other DNA
aaattagttttctagtagtaaaaagtaattaaactctaaattattattacccctagtatactggggaatgagtgtgtgttccaaatgaaaaaaacttgggatgtctaatgagatgctgtt

SEQ ID NO: 37749 - DNA, 120 bp, synthetic construct
  source 1..120: mol_type = other DNA
tgtaccattctccaaatgcaatgctatttggttttatttttattttttaaaaatgtgctgcctgttttgagtctctaaaagtgtgaaatgctcagcatttcccaaatgtatttgaacatg

SEQ ID NO: 37750 - DNA, 120 bp, synthetic construct
  source 1..120: mol_type = other DNA
aaagcacatctatagttgtattggctttgtgtgggttgtatggtaaacaggtagtcaccctgcttaatgtgggtatcccattttccataaatgtctatttcaccaccccaaaaagccctc

SEQ ID NO: 37751 - DNA, 120 bp, synthetic construct
  source 1..120: mol_type = other DNA
tgtatatatagatatgtatacataaagatatacatatacatacttctatctatatatagataggcaaatgcaaactatggggaaaaactgaaaagtctaaattctcagttctgcaaagaa

SEQ ID NO: 37752 - DNA, 120 bp, synthetic construct
  source 1..120: mol_type = other DNA
aatactaaagttggggcttccacaaggacacagcccagttagaacaccctactgtgaaggccacagctgacatagaatcttttagtgcctcactttaaaatgtgaataggcagctaagaa

SEQ ID NO: 37753 - DNA, 120 bp, synthetic construct
  source 1..120: mol_type = other DNA
actcctggcctaaagatccctccacctcagcctcttagagtagctgggattatattctcgagcgactgtgcctggccttttctatttttttatattggtcataactcactacatttattt

SEQ ID NO: 37754 - DNA, 120 bp, synthetic construct
  source 1..120: mol_type = other DNA
gtcagctgtcaaccatgctgttgctccactgaagataatacgtcttttttacctctagctgtttgtattttctttgtatttctcctgtttggggctcataatgcttcagtctgtggcttg

SEQ ID NO: 37755 - DNA, 120 bp, synthetic construct
  source 1..120: mol_type = other DNA
acatcagtaaaagaggactatcaaggaattatcaagatccagaagtaaacctaagtgattggggtcatcctgtaacgagaagattcccagtctggagtcagatgatccccactagtatct

SEQ ID NO: 37756 - DNA, 120 bp, synthetic construct
  source 1..120: mol_type = other DNA
agtgacacaactgataaccagccaaacaagaaagtttactttctatgtctacctccttgatattctgctaatttaatattagtgaaaataggagattgtcttattcttctctatctccag

SEQ ID NO: 37757 - DNA, 120 bp, synthetic construct
  source 1..120: mol_type = other DNA
tagactgtaagctctaggagtacaggggtgggtatctggcatgtgtctggcacatggtaagaagatatatatttgctaaatggacagaaggataaattccccttcttttcattcctacca

SEQ ID NO: 37758 - DNA, 120 bp, synthetic construct
  source 1..120: mol_type = other DNA
tcaggatcagaactatgatgctgaaatgttcttgaagcaatgaggatgggtaaatggtgcgtttagctttgccttaaagtagtcgaggctccacaatctgtccccatctacatttttgtt

SEQ ID NO: 37759 - DNA, 120 bp, synthetic construct
  source 1..120: mol_type = other DNA
gaagatgtccttactggaacaaaaggtggcactgaggcttggtcaaagataaaggtgcaagaggaggaatagctccaaaggccaatagagtagtttggatctcaagcagccagaaatgga

SEQ ID NO: 37760 - DNA, 120 bp, synthetic construct
  source 1..120: mol_type = other DNA
caatctaaggtgctgccattcaacatcagggagagtcctgtggcctgttctcttagtttcgtcttccttattttgaggcccagcaaccgtcatcattcactgtacctttggagcaaagaa

SEQ ID NO: 37761 - DNA, 120 bp, synthetic construct
  source 1..120: mol_type = other DNA
aggcttaagagactcacaataaatgcagaggaagacaataaataaaacagaaaaaaatatccagagaactaaatctgtgaatagaaaaggcccataatatatcatgaaatgaacacagaa

SEQ ID NO: 37762 - DNA, 120 bp, synthetic construct
  source 1..120: mol_type = other DNA
catggaacttaatgtagaagtttatgcaaccctgagcaagtttcaaaacctggtctcctaacacatatgtctaagttttctaaggctcctgaccaagcaatagactgtgaacaccccaga

SEQ ID NO: 37763 - DNA, 120 bp, synthetic construct
  source 1..120: mol_type = other DNA
atatccaaattggctttgtaactgttagaggaaaggcattccatagctacaaggtgttactcccttgtagatatgcagttgaaactctctgtggtaaccgctaccatgtagaaacaaaac

SEQ ID NO: 37764 - DNA, 120 bp, synthetic construct
  source 1..120: mol_type = other DNA
ggaatctagtctaccagagaagacagactaccataagaagtaattgcaatgtaaaaagcccattatcggggaaaaagacgatgctgtaggagtatacagaaattggtctagggctcagca

SEQ ID NO: 37765 - DNA, 120 bp, synthetic construct
  source 1..120: mol_type = other DNA
agggagaagttatctgcaaggtaggattggcagccaccacaaaggaagggaaaagagcaaagacaggagggatttaagacaaaaacagcaactttaaaaagttcactacttatccatgag

SEQ ID NO: 37766 - DNA, 120 bp, synthetic construct
  source 1..120: mol_type = other DNA
ggatttcaggccacaaggaggcaatttcagaaggatgaggccataaaacaattatagaggaacgggttaatctgtatctggtcataatccatatgcccaaagcaacatcactacaaggta

SEQ ID NO: 37767 - DNA, 120 bp, synthetic construct
  source 1..120: mol_type = other DNA
tgggcttacaaagaagttcaagtggacctgcagagtagtgggtcttatctccaagcccgagctgtaagtagcaacactattctttagaaaggcattacatatcttgcataaatgagaatc

SEQ ID NO: 37768 - DNA, 120 bp, synthetic construct
  source 1..120: mol_type = other DNA
aaagttattcaaataaaatcttagcgggacacccaatatcgtgaacataaaagcagagctattctggttggagctgtggggacagcctagtgctgctacctcaaaggggaaaatatttga

SEQ ID NO: 37769 - DNA, 120 bp, synthetic construct
  source 1..120: mol_type = other DNA
atattccattttttggtcttactctttgaaatctggtgtacattttacacttaacagcacatctcaattcaggccagccccactgcaagtgtacaacagccacatgtggctagtggctat

SEQ ID NO: 37770 - DNA, 120 bp, synthetic construct
  source 1..120: mol_type = other DNA
ttctgagttccttcaaaaacactgagactaaaattagagcagccagattgtatttggtttacagggactcatgctgtcttcctacctctccatctgttgaaacagtttttaggtgctggc

SEQ ID NO: 37771 - DNA, 120 bp, synthetic construct
  source 1..120: mol_type = other DNA
ggtctcaggcaacctaaaaggctagatagaagtctctcatcctctaacgaaggatggattgtaaaatggaatactgctaagactctccctttgggtactaattctgcaaaaacctagaat

SEQ ID NO: 37772 - DNA, 120 bp, synthetic construct
  source 1..120: mol_type = other DNA
caaattttcattgtggcaccattttatgacaggcactatgctggggatgctggcgactagggtagggagttaaaatgagagtgtctacttggaaagatgaacagataaataatcaccgtg

SEQ ID NO: 37773 - DNA, 120 bp, synthetic construct
  source 1..120: mol_type = other DNA
actttggagggaaccagctactagatggttcaattagtctttcgcccctacacccaggttggatgaccgatttgcacatcaggactgctacggacctccaccagagtttcctctggcttt

SEQ ID NO: 37774 - DNA, 120 bp, synthetic construct
  source 1..120: mol_type = other DNA
ttctttctctttctctgccccctgaaactcttaaaaggaagttagggatagttgtctggaacatcccagttccttatcataatgttaaatgtgcaccagagctgggggacatttaagagc

SEQ ID NO: 37775 - DNA, 120 bp, synthetic construct
  source 1..120: mol_type = other DNA
aaatgcacattagaagtaagtcactaatcataaccctcagacaccaaagaagtgtaatccaatccagatcagcattcattcccacctaatctgggtttctttttagagttttaatcagtt

SEQ ID NO: 37776 - DNA, 120 bp, synthetic construct
  source 1..120: mol_type = other DNA
ggatggggacagaggtcatcagggataccataatcaatgtactgtgcaaaaatagtgcagaggagattggttagtcctacataaagtccaactacatgtatggctaactattctcaagtc

SEQ ID NO: 37777 - DNA, 120 bp, synthetic construct
  source 1..120: mol_type = other DNA
aagcagcatgaagccacagaaggcttcaaatgacaaagaaatgaattagaaaaatcacccacagtacactggcccttcctggttttggcaaggatttcagccagaaagacatggtattta

SEQ ID NO: 37778 - DNA, 120 bp, synthetic construct
  source 1..120: mol_type = other DNA
ggattgctgtgagagtcaaaatgatccacttggcattttgttgatattgaggtgtcaaacctttaactagttggccactccttccagtaagcttctgtacactggacaactgaaagaaag

SEQ ID NO: 37779 - DNA, 120 bp, synthetic construct
  source 1..120: mol_type = other DNA
ttcatttaacaaaataatagactttattttttgagcagttttagctttatggaaagatcgagcagaaagtacagagttctcacatactgtcacctttatcccacccccagtttacattag

SEQ ID NO: 37780 - DNA, 120 bp, synthetic construct
  source 1..120: mol_type = other DNA
atgcagggctcctaagattccatgacacccctaccttctaattctgttattgcaactgcagacggttacctggcacgctggccacaatctacctcactcttatcagagtctgagcagtgc

SEQ ID NO: 37781 - DNA, 120 bp, synthetic construct
  source 1..120: mol_type = other DNA
ggtgacccatgcctagatgttcatgtccctgttgcacattgggctgactgtgcttgcagactgtgaagtgggaaatatctgaatgaacacttctgtatttacagaaaatgataacgatga

SEQ ID NO: 37782 - DNA, 120 bp, synthetic construct
  source 1..120: mol_type = other DNA
ggcagggaatatggcattatggtctacacgtagagggagattttggcctgtgggtctggaaagcagggtcatctaattctcaccaaagttaatctagggcaccctagaatattcctgtca

SEQ ID NO: 37783 - DNA, 120 bp, synthetic construct
  source 1..120: mol_type = other DNA
tcctaaaaaatagtgtgtccccccaaaacaaaagcaatcttgaaatgcaagaagaaacattttctattccaaaggtctttaactgctctaagcagtacttggtagtcttcaatatatagg

SEQ ID NO: 37784 - DNA, 120 bp, synthetic construct
  source 1..120: mol_type = other DNA
gaggggtatttcaggcacttgaggagtgtggctttactgttatcaatcacatttctgaaagaataaaaatggttcagtgaagggatgggttgcccctccacacctgtgggcgtttctcgt

SEQ ID NO: 37785 - DNA, 120 bp, synthetic construct
  source 1..120: mol_type = other DNA
gtgagcgtgccatggtcattgttaatttctttcatttaacaaaataatagactttattttttgagcagttttagctttatggaaagatcgagcagaaagtacagagttctcacatactgt

SEQ ID NO: 37786 - DNA, 120 bp, synthetic construct
  source 1..120: mol_type = other DNA
ttcagattcaagaaatttaatttctatccaattaagtaatcatttctaaaatatttctaaaagatgatcaccagcctctgcttgaatacaagcatgtagcatggtgccggataaatcttg

SEQ ID NO: 37787 - DNA, 120 bp, synthetic construct
  source 1..120: mol_type = other DNA
tcatattgagtctttactccaagtttccttgattgagacaacttttacattatactcatacaatcacagaatttcagcagtgatctcagaaaccaaatggtctgaacccctatagcactg

SEQ ID NO: 37788 - DNA, 120 bp, synthetic construct
  source 1..120: mol_type = other DNA
gtgtgcatacacacatatgacaggaggacggagagacactaaacttcattcctaactactgtatgttgagaggaggcctaatgaaaacctctatcacacccacatatttatgctagctta

SEQ ID NO: 37789 - DNA, 120 bp, synthetic construct
  source 1..120: mol_type = other DNA
gattgctctactgcactcaagcctgggccacagatggagatgctagtaaccaagacttcctttacaaaagaccccttagggaaacatcatatttgataaaggattttaataggacataag

SEQ ID NO: 37790 - DNA, 120 bp, synthetic construct
  source 1..120: mol_type = other DNA
ggcaccaaatgccacaaaaagactaaacaagatttcagtggcctactctaaggtattaagttccctcccttattatctccagttgtatctccattcttagaggagaatgcaccacatgtt

SEQ ID NO: 37791 - DNA, 120 bp, synthetic construct
  source 1..120: mol_type = other DNA
agcctgggaatctgcattcctaacaaattcccaggtgatgttgataccacaggtctgaggaaccacacactgactatgactatatgaacgcttgagtgtccacttttaaaaatactcaaa

SEQ ID NO: 37792 - DNA, 120 bp, synthetic construct
  source 1..120: mol_type = other DNA
agacagcaaagacagaaaattttgtatatattaagtgaccatattggaacttaaaactttccatgtttgtgtctttaagcacagaagagaactctaggtttctccatttgcagcaacacc

SEQ ID NO: 37793 - DNA, 120 bp, synthetic construct
  source 1..120: mol_type = other DNA
tattttggcccagcccttgtctccaccctacatttcaaaccagtagccttccctctatggctcaacatttctctgcctcagttttttccattttaaagatgaagatattgtttggaagga

SEQ ID NO: 37794 - DNA, 120 bp, synthetic construct
  source 1..120: mol_type = other DNA
taaatcatggtgttttatgtacattcatacacttaacactttgcaacaaccctaagagacaggggtaggtatttagggaaactggggcttctaacttgcacaggataatgcaattagtaa

SEQ ID NO: 37795 - DNA, 120 bp, synthetic construct
  source 1..120: mol_type = other DNA
gagtagccttcattgctaccacccaaggatgttttaaaaaggctatgaggaaggatgcatgtagggaaatctgaggttgttctttggattttccctgttttgttttaggaagtatccatg

SEQ ID NO: 37796 - DNA, 120 bp, synthetic construct
  source 1..120: mol_type = other DNA
gatcctgaaccttttggacatgtaaactgtgatcatgttggtcagtgtcatttggatctcgttggtgcttattgttctgccgatgtgtattagtgaacctactcatggggaagataatac

SEQ ID NO: 37797 - DNA, 120 bp, synthetic construct
  source 1..120: mol_type = other DNA
tgtgactctttgtgagtgactagtttcttggagtctattaaagcatcagtttaaacatcaattctctatggtatgattaatgtttctttttttactttataagcatgaagctgccttcaa

SEQ ID NO: 37798 - DNA, 120 bp, synthetic construct
  source 1..120: mol_type = other DNA
ggggagcaggggctttgggtgtgtattattatatggggataaaagagtaaggatgaaggaaaatgtaggctagttcttggcttaagagcatttttttttcctttttctccaaccatctac

SEQ ID NO: 37799 - DNA, 120 bp, synthetic construct
  source 1..120: mol_type = other DNA
ttaggagtgtgtgagagcagggaacactgaatgcttgagacaccaccacgatgtccactacatgtatttccatttcagtaaacatttccattaagataatgctagaacaaaatcagagga

SEQ ID NO: 37800 - DNA, 120 bp, synthetic construct
  source 1..120: mol_type = other DNA
ccttgcctctgccctctcctatcttaataccccttcccttccttaacctcagcattaggctggcaacatttctcagggtaaggatttgtctttgtttatttccatagtagcagcagtacc

SEQ ID NO: 37801 - DNA, 120 bp, synthetic construct
  source 1..120: mol_type = other DNA
ggacctggttttcagaaccattgattatttaaaatgtatgtctttaagattaggctccacccaagatgcctcctcagaggctaagtttgaggttgagaaactagcttaaggagaaagata

SEQ ID NO: 37802 - DNA, 120 bp, synthetic construct
  source 1..120: mol_type = other DNA
actttgcctgtgcgctgtcaatgaaacaacaaagcctggacgacagcaaatctgtttacagcatgttttactaactattttaagcccattgttaagacctactgctcagaaaaatccctt

SEQ ID NO: 37803 - DNA, 120 bp, synthetic construct
  source 1..120: mol_type = other DNA
gcccaggctttggtgtttttccccattctgtgctttggtgaggagatcctgcgttttctttccgtttcctttgccagaaagagctccctgtggcaacatagaaaatatcaactcactgat

SEQ ID NO: 37804 - DNA, 120 bp, synthetic construct
  source 1..120: mol_type = other DNA
gagttttgacaaatggtatatacttgtgtagccacaattataatcaataggttgaacatttctatcaccccaaaaagtcccttcacggtccttggctttaatcttcctctttccttcccc

SEQ ID NO: 37805 - DNA, 120 bp, synthetic construct
  source 1..120: mol_type = other DNA
gttggttctgagctgaatttaagagaaggctatggtcttttgtccttccacacttttgggacccagcagatactacaaatgcaatctttacaaacccactcactgccagaaatgaatcta

SEQ ID NO: 37806 - DNA, 120 bp, synthetic construct
  source 1..120: mol_type = other DNA
ctacctgggccttataacctggacatgcccaggggtaaaatatatccaagtagaaatcttccttctcagaacatacccagaaataatgattctctattttgagtactttcttgtgcagta

SEQ ID NO: 37807 - DNA, 120 bp, synthetic construct
  source 1..120: mol_type = other DNA
acaactttccatctttatcgtcttctgaactccataagatctttctaagaattgaggggaaagttgattataagggagaatatacaaaacctggcatcgaagccttactagagacctgga

SEQ ID NO: 37808 - DNA, 120 bp, synthetic construct
  source 1..120: mol_type = other DNA
agggaaagcacaactcatttccatttattttagttcaacatttatgccagctctgcgctaggtgctgggatataacaatgaataagacatggtcttggacttaacggtgctcctaacctg

SEQ ID NO: 37809 - DNA, 120 bp, synthetic construct
  source 1..120: mol_type = other DNA
ttactatcagcttttcactaatatattgaagggggacagatgcctacaggaatagtctcaacaagggctgttccctttaagagacccagaaatccctggcaagaaccagatgcctgacat

SEQ ID NO: 37810 - DNA, 120 bp, synthetic construct
  source 1..120: mol_type = other DNA
ttcaggtttcaagtgagcttggaagccataaaagaaagaggtctgtaaagtgtctttttgacttgggtgattgataaattaatggtatctttaaaagaaatagagaggggcttttttgtt

SEQ ID NO: 37811 - DNA, 120 bp, synthetic construct
  source 1..120: mol_type = other DNA
atgctctttgtaactgaagtaccattatttatagtccctttcagcagacagaggtagtagatatatgtatgtacacatagacacatacacacacacacccatgtacttctataaatagct

SEQ ID NO: 37812 - DNA, 120 bp, synthetic construct
  source 1..120: mol_type = other DNA
cacaatgaaacaccacttcacacccactaggatagctataattttaaaaaggaagaaagaaaaggaaagaagagttttggagagggtatggaggaatcagaaccctcatacattgctggt

SEQ ID NO: 37813 - DNA, 120 bp, synthetic construct
  source 1..120: mol_type = other DNA
tacaagaggtttttggtgggtgatggaactgttctgtgtcttaattgtggtgatggttagacaactctgtgcatttgccaaagcacatggaactgtatgccaacaagagtgaattttctg

SEQ ID NO: 37814 - DNA, 120 bp, synthetic construct
  source 1..120: mol_type = other DNA
ttcttagcaccaaacactttccccagaggcctagcctggccctccgtcctcaagcatgtctgcacctgaaatcatctttgtccccagcatcttggcaccatcgagactaataatgagaag

SEQ ID NO: 37815 - DNA, 120 bp, synthetic construct
  source 1..120: mol_type = other DNA
gactgactgggaacccttggaagatgcaaaactttatcacgtcctggctgtgagtgctaaaaccctgcctaatgctagcctttcttttttaaagtattgatgtggcctttttttttccat

SEQ ID NO: 37816 - DNA, 120 bp, synthetic construct
  source 1..120: mol_type = other DNA
gacctgttaacagactcctggaaccagagctgtgagtctcaaatgtgctccttcaataatgcagtagaaggcctgagtttccacatagtggtatccttgaatgcctggagacttttaagg

SEQ ID NO: 37817 - DNA, 120 bp, synthetic construct
  source 1..120: mol_type = other DNA
ccatagaaatataattacacctctttaagtttaacaaaaatcctactatatgttagttcagagcctgggtatccctaggagaagttaatttaacccacgagaaaataaaaaggcccaata

SEQ ID NO: 37818 - DNA, 120 bp, synthetic construct
  source 1..120: mol_type = other DNA
ggactagatttttgatgttcttatcataaaaaagaagcagagctaagtgatatgatcgatttgttaattttcttcattatagtaatcatttccttatgcacatgtatctcaaaacaacat

SEQ ID NO: 37819 - DNA, 120 bp, synthetic construct
  source 1..120: mol_type = other DNA
tgtcttgatgtccctttgctttccccatgtgttaccatcaactgcctaatgaaacagcctgggattgtgtaatgactaacttagtgctttgagtttaattctttttcagccactgtggta

SEQ ID NO: 37820 - DNA, 120 bp, synthetic construct
  source 1..120: mol_type = other DNA
ctgaacatggtaactatgtatcaagagacaaaccacaaatttaaagaaggtgtggtcaaattttataagtgtttataacatttgtaaatgtttggcatctagaatacatgtataattcca

SEQ ID NO: 37821 - DNA, 120 bp, synthetic construct
  source 1..120: mol_type = other DNA
ttagaagtttctaagtattatgactaagtgataataaaggtctgaataaacattttcctctgtagtctctcaaagtggaagtttgcttttagacagatgtctgtggtcctagggcataca

SEQ ID NO: 37822 - DNA, 120 bp, synthetic construct
  source 1..120: mol_type = other DNA
gtgctccaaaagaggagacatcacagaaatacaacaagcaaattaaccttctgtttttgcatctgcaggaaatgtctcaagaaccagaaataaataagggtggtgatagaaaggtatact

SEQ ID NO: 37823 - DNA, 120 bp, synthetic construct
  source 1..120: mol_type = other DNA
agctagtctactcccttatcaataggaaatagctcaatgtccatacccccaaaataatgtattatgcaaccgtttttgaaaaatgaggttagatctagggtatactgattatttcacaat

SEQ ID NO: 37824 - DNA, 120 bp, synthetic construct
  source 1..120: mol_type = other DNA
ttgagtattcacctcaccatatttttccacagtgacttcatataattttaaaaacttcatttataaaataagattattttctgcatttctctctctttattcctgttaatagaactcagt

SEQ ID NO: 37825 - DNA, 120 bp, synthetic construct
  source 1..120: mol_type = other DNA
ttgctaatggtgatgacctggccgttgggcagctcatagctgttctctagggaggagctggaggccgctgtggccatctcctgctcgaagtccagggcaacatagcacagcttctctgtg

SEQ ID NO: 37826 - DNA, 120 bp, synthetic construct
  source 1..120: mol_type = other DNA
tgatttcttctgaaattaaaaaataacatctgtatttgtataatgaaagaatccccatagtggatatttaactggaaaaaactggacaaaactccaaacctagcagagtgtaaattcctc

SEQ ID NO: 37827 - DNA, 120 bp, synthetic construct
  source 1..120: mol_type = other DNA
caaaaaaccacttggggagacatcagatgtcaccagattgaagacatacacacatgttaaaaattccctcataaattcatccacccaacataaatgaacaaaaccaccataaacacagct

SEQ ID NO: 37828 - DNA, 120 bp, synthetic construct
  source 1..120: mol_type = other DNA
cattttcagggcttagaggccaggtgattctagaaaaatcggatttagtgattaactcatgagagtaggagttatttatgtcctttttctctcccccatcacttagcatttagccttact

SEQ ID NO: 37829 - DNA, 120 bp, synthetic construct
  source 1..120: mol_type = other DNA
atttagtataaactgtaaagcaggatgtgactgtaggagcttgtagttctcatgagtatcactgctcttcctttccacagttgacagaccatcatccccagaccaaccctagtgttggta

SEQ ID NO: 37830 - DNA, 120 bp, synthetic construct
  source 1..120: mol_type = other DNA
tctcctttgttaactcctcaatgtactgcaaatagagaaaggttaagtcaggatagagcaggcacagcagtagctggacgaccaggaacaactgctacagtgactactccacagtaacac

SEQ ID NO: 37831 - DNA, 120 bp, synthetic construct
  source 1..120: mol_type = other DNA
tggcaatgattcacttaacatacatccagctgttgaaagtgatgatgccaggatatatttctcccatagaaacatgcttaaaatatagtaagtgacaaaagaccatgtattgtgattcta

SEQ ID NO: 37832 - DNA, 120 bp, synthetic construct
  source 1..120: mol_type = other DNA
acagctgagcacccctccctccaggtgaagctgctggagctgcaggagatggtgttgcagctggtggcgactacaagggacacagcaaattcttggtgactgcccagaaccctgctcatg

SEQ ID NO: 37833 - DNA, 120 bp, synthetic construct
  source 1..120: mol_type = other DNA
agaagaggaaagttgcctgctctggcaggtatgtgcaagatagagtgtgtttcatttgttctgttgccaagaattagtgctgtactattgtagttcctttaggatttgtatgtgctctgg

SEQ ID NO: 37834 - DNA, 120 bp, synthetic construct
  source 1..120: mol_type = other DNA
gccagttatttacctctctgaggtaatctgtgtaaacaatttgatatatatcctttcaagttcatacttgctatgcatacatatatatacacacatacattgacatattcccccttccct

SEQ ID NO: 37835 - DNA, 120 bp, synthetic construct
  source 1..120: mol_type = other DNA
aatccagaatctctaagaatgaagatggagtgaaaatcagaagggctgctgagagaataatggggaagcagccccagttatcaagggacatgtccatgtgttcaatagaaagtttcagat

SEQ ID NO: 37836 - DNA, 120 bp, synthetic construct
  source 1..120: mol_type = other DNA
ttcttctgtgtggcggtgacagcagagagagcccgctctaactctcctttacgctgcaatgaatgttgcagacggacggccagatccttggactcttctgtaatgagagagttgagatgg

SEQ ID NO: 37837 - DNA, 120 bp, synthetic construct
  source 1..120: mol_type = other DNA
ttcatagaagtagaatttctagaagaaaataatataaaacagttttaggatttttaaaacaaatgttcaaatcatcctataggaaaattggttgagtttacgctcccaccaacagggaca

SEQ ID NO: 37838 - DNA, 120 bp, synthetic construct
  source 1..120: mol_type = other DNA
agatgatgtgggagaaggaggagaagatacgggagctggaagagaagatgcacgagcaggagaagatacgggagcaggaagagaagaggcaggaggaggagaagatacgcgagcaggaga

SEQ ID NO: 37839 - DNA, 120 bp, synthetic construct
  source 1..120: mol_type = other DNA
ccatatcctgggtgtcctgagtgtttacagcaggccatgtactagggattaacataaaaacaacaataacaaatctcatgaaaatttcacaaatggaagtgaaacaatatcacctctatt

SEQ ID NO: 37840 - DNA, 120 bp, synthetic construct
  source 1..120: mol_type = other DNA
gggactctcaaggttttatcctatctcaccactgcattgccgacagatagaggaggtgggactctgactatcacccctgctctgcagtggatttggctctcagcactcccaggctgggag

SEQ ID NO: 37841 - DNA, 120 bp, synthetic construct
  source 1..120: mol_type = other DNA
aagccctcattaagaccagtaacaaatcaagcctatcttatcaactgacaacacattctggaaccatggcgtgtccatggataagacatgaagtccttctttcaagacttggttttctgg

SEQ ID NO: 37842 - DNA, 120 bp, synthetic construct
  source 1..120: mol_type = other DNA
ctgagatggcctgccaaaagttgcaggagacccaggggagggagctgccgaggatggggctgtgagggggatgacctggcaaactccaccccttctcactctgtcctggcccctcaggag

SEQ ID NO: 37843 - DNA, 120 bp, synthetic construct
  source 1..120: mol_type = other DNA
ttgttgtttttatgttaatccctagtacatggcctgctgtaaacactcaggacacccaggatatggtttgattttcctcatccccagtctcaaggggaaaccaggacaaagagaacagcc

SEQ ID NO: 37844 - DNA, 120 bp, synthetic construct
  source 1..120: mol_type = other DNA
gaatgacattccagtgaaatacatttttaacggctgttctatgtcacagggataacaatttgactttcacaaactgtatttcagacgtacaaggtcttcattttgatgaagaggggctgt

SEQ ID NO: 37845 - DNA, 120 bp, synthetic construct
  source 1..120: mol_type = other DNA
tgctgcagctcatgatgcaatatcttcatgagcccagagcacatacaaatcctaagggcaccaccataatacaccgctaattcctggcaccggaagagatgaaacacactctatcttgca

SEQ ID NO: 37846 - DNA, 120 bp, synthetic construct
  source 1..120: mol_type = other DNA
caaggagaggatcctccctggcctctccttgggcagaggaggtgagggtcacctcacgaagatctttggagagagggaggcggggatctgagcacagtgggagcccccctcttcctgcct

SEQ ID NO: 37847 - DNA, 120 bp, synthetic construct
  source 1..120: mol_type = other DNA
tccaaaactcagaaggtacagaagggaggtgtctccaggcaccctgttactctctcctgagttttttatgaatgcttgcagacatgtttttgtatattatcatagtacacacacacacac

SEQ ID NO: 37848 - DNA, 120 bp, synthetic construct
  source 1..120: mol_type = other DNA
gatgggtgagccttcttccccaggctgggagtgggcaagatgagactggcgcctctgcatctgagtgtcccccaaacccagcagtcatgttgtgagcaaagaaatcacgttacttcttcc

SEQ ID NO: 37849 - DNA, 120 bp, synthetic construct
  source 1..120: mol_type = other DNA
ttttcattgagttgactgattgtcactgagcttgactccagggctactgctagttcttggtactggctctgaggcacatgcagagaggaggagttggaagaggattgtggggagaggtag

SEQ ID NO: 37850 - DNA, 120 bp, synthetic construct
  source 1..120: mol_type = other DNA
atttttctccagaaattctacttctatgacttcagccccaaaatgcttgcttgcgtccattaaaatatatatataagaaaatttacttctggggtggcaatgattaacttaatacacatc

SEQ ID NO: 37851 - DNA, 120 bp, synthetic construct
  source 1..120: mol_type = other DNA
ctggagctgctagtccagagactacatttttgagaactgctctcatatactaactgtaagttgcagagctctagaaaaaaagcttagtttggtgtgggataagaagcacacaggttatgg

SEQ ID NO: 37852 - DNA, 120 bp, synthetic construct
  source 1..120: mol_type = other DNA
tgcagtgagcaagtacttgtttcaagataggaatgaaatattcggctcttttagacagacaagcacaggtgctcagtttgggagaagaattaaaatcctctgcactctccatgctgcctt

SEQ ID NO: 37853 - DNA, 120 bp, synthetic construct
  source 1..120: mol_type = other DNA
ggcaaatcatgtttcatcttgcagagctaattcaaagtatactgactgcatgcacttcttgcttaggggaagaaaactcatcaaaatttgtttctaggcatatgttattagagctaggat

SEQ ID NO: 37854 - DNA, 120 bp, synthetic construct
  source 1..120: mol_type = other DNA
tcctctacctttgcggtgacggggaggcccttccatcccagctgtatgtgtgggcttcttgttagagatggggatcttgggtagttttttctttatcgatggtttgcaaaataatggtga

SEQ ID NO: 37855 - DNA, 120 bp, synthetic construct
  source 1..120: mol_type = other DNA
tgaagggaaagaacaagagaaccatacttcactcctgcaggaagagtgtgtaagactgagggaacggcacgtgcaaaggtcctgaggcaggagtgtgctgaagggtttggggcatcccaa

SEQ ID NO: 37856 - DNA, 120 bp, synthetic construct
  source 1..120: mol_type = other DNA
atccacctgtatgtaacctgcagaacagctttagacataacaggtgctcacaaaacagtagcttagaaggagactgcagggtctgcttgggagaagcgcggcatgagcaaagtcaggcag

SEQ ID NO: 37857 - DNA, 120 bp, synthetic construct
  source 1..120: mol_type = other DNA
ttcctaactttactacagcttatacctgcctctcctgtacaacatccacgtgacatccatctctaaacctctgagtcatccctagacaagctggcatgtgactacatcatctcatttcat

SEQ ID NO: 37858 - DNA, 120 bp, synthetic construct
  source 1..120: mol_type = other DNA
atctgccatcttagaccattttgttttttaaatacctcagcaaacaagtctgtctcatatgacttttgtcccattccaagtctaataacagcccgggtgcggtggctcacgcctgtaatc

SEQ ID NO: 37859 - DNA, 120 bp, synthetic construct
  source 1..120: mol_type = other DNA
tgtccaccttccatgcaggatggcgtttgaaaagcatgaaatggtaactggatagcatgtggaaaaagacaatctggagccatacttcacatctataccaggaaaaactccaaatggata

SEQ ID NO: 37860 - DNA, 120 bp, synthetic construct
  source 1..120: mol_type = other DNA
agaggaatttttaaaaattacaaggcatttttaaaagtggacttcttagcaggaaagcatggggtgatatgttcaaagtgcaagagtcgatcatgcccaacagtaggccttggttaaata

SEQ ID NO: 37861 - DNA, 120 bp, synthetic construct
  source 1..120: mol_type = other DNA
tggccaagggaaactgtctggattggattgtcgaggttttcgcttttgtaaagcttgacctggagggagaaacaaagtcagacatgctttgaaactgaaacacaatcaatatttcatagc

SEQ ID NO: 37862 - DNA, 120 bp, synthetic construct
  source 1..120: mol_type = other DNA
aatctgcctgtttcttaactactgcatagcattctaaggcagggtttgacaaaccacagcacctactcttgtggtacacaagagacaattggaatatccccaaatatgtatctctaggca

SEQ ID NO: 37863 - DNA, 120 bp, synthetic construct
  source 1..120: mol_type = other DNA
ctgttacacacgagcagccatagagaatccataaacaaatgggcaaggctgtattctaaggaaactacgcttataaaaggcagtttttgtagtctgccaagccctgccataacagaaaat

SEQ ID NO: 37864 - DNA, 120 bp, synthetic construct
  source 1..120: mol_type = other DNA
cagcaggcactcaataactgactcctgaatgaatgaatgtgtgcacgcacgtgtgcaacagcatttgagatgaagctttaaataattaaatgacttcctttttatgcagggagcccttct

SEQ ID NO: 37865 - DNA, 120 bp, synthetic construct
  source 1..120: mol_type = other DNA
cccacttccaccctgacaccctgcaaactctcctcaatgcagctgccagaaggatcacgccactcctctgctaggaaccttccagtggcaccaattctcacccagagttataggcaaagt

SEQ ID NO: 37866 - DNA, 120 bp, synthetic construct
  source 1..120: mol_type = other DNA
tcttttttcccatgggatgttcccctgatgtagtactctttcccttttcctagggatgtggctttctgagagccaaactgtactgattgttatttctcattatcttgcttggcaactgcc

SEQ ID NO: 37867 - DNA, 120 bp, synthetic construct
  source 1..120: mol_type = other DNA
atgagccaccacgcccagccgcaagtacttttacacaaaatgcaaacaccattcttccatcataaaagtgataccacagcttccgtgaagttttgccaggtagtactcataattaccttg

SEQ ID NO: 37868 - DNA, 120 bp, synthetic construct
  source 1..120: mol_type = other DNA
agtgctgggattacaagcgtgaagcattacatccaagtgaaacttcttgagatggttacataatgtctaaatctgctggtgtagaagttaataaagtgtagaactgaataaatattaaat

SEQ ID NO: 37869 - DNA, 120 bp, synthetic construct
  source 1..120: mol_type = other DNA
ctcattttgcaccgaggcaccaaaaacataccatggggaaacagatggtgtcttcaataagtggtgctgggaaaatgagatatatctatgtgtgaagaataaaactagacccctgtgctt

SEQ ID NO: 37870 - DNA, 120 bp, synthetic construct
  source 1..120: mol_type = other DNA
acaggaaaaaatgtttccttcctgccctgacctcatgttcatcagcttttctctctagaagcaaacacaattgtcagtttatagcgttatcttccagatgtcactttgtgccctctctct

SEQ ID NO: 37871 - DNA, 120 bp, synthetic construct
  source 1..120: mol_type = other DNA
accaccggttcggacagcgagtccgagtcgtccttgtccggggaggagctcgtcaccaaacctgtcggaggcaactatggcaaacagtgagttgcgggggctgtggctgtgaccattctg

SEQ ID NO: 37872 - DNA, 120 bp, synthetic construct
  source 1..120: mol_type = other DNA
tcagggaacactggtcaaggtctgggccacattgtctatcacaccccttcttggagggtttacaaccacctctggaaagttccatgagaataaatatacctaactttgttttattaacca

SEQ ID NO: 37873 - DNA, 120 bp, synthetic construct
  source 1..120: mol_type = other DNA
aggaatagaagggagcttccctctacctgataaaggatgtttatgaaaaggacgtttcctgtccttttatttttaactctgccatgctgtatgattaagagtgtttcttggctgggcgtg

SEQ ID NO: 37874 - DNA, 120 bp, synthetic construct
  source 1..120: mol_type = other DNA
ttcatcttttggtcaaaacaagcttgtaaaggagtgggtttattctcatgagcttcagcctctttgatgtgggataaggccatctgttgtcttatggtgatctgaaggtattagggggaa

SEQ ID NO: 37875 - DNA, 120 bp, synthetic construct
  source 1..120: mol_type = other DNA
acaggcatgagccaccgcaaccggccactcaaaggtcttttaaattttagttggttgtctaatggtatctcattgtggtgttagtttgcatttccctggtgactattgatattggctact

SEQ ID NO: 37876 - DNA, 120 bp, synthetic construct
  source 1..120: mol_type = other DNA
tctgctctaagccaccatcatctgcctttgtgtcccttcagtccctttgttctgttcataatacagattaaccctgttcagttatgtcagatcatattacctgtttgctcaaaaccttcc

SEQ ID NO: 37877 - DNA, 120 bp, synthetic construct
  source 1..120: mol_type = other DNA
agtgtgaaacagcttgagaaatagaatctgtgtcatatccaacatttactcacactcatgattgcgagactgggatacctaagcaggaggaaccagaagagcaccctcttcccctgcatg

SEQ ID NO: 37878 - DNA, 120 bp, synthetic construct
  source 1..120: mol_type = other DNA
gagttggaattaaacccagcctttattggagtcctagggctggattctgcattgtgctctgctgtgtcattgcaccttctcgtttccgctctttctgacttgcttcatcctcttcatact

SEQ ID NO: 37879 - DNA, 120 bp, synthetic construct
  source 1..120: mol_type = other DNA
gagtgacagtttccccctgactgtaacgtaaggctgcaaactcgaagccaggaattttctgcatattcttaaataggatgtttcagtcaaagccttgataatataaccaatctttctgat

SEQ ID NO: 37880 - DNA, 120 bp, synthetic construct
  source 1..120: mol_type = other DNA
ccgagcaggctccactaaaaagtctgaacccaggagggagtaccatggaaaccaagttgcaatgccctggttaggggcccagcagaggggtcatcccagctctacgccattggatactga

SEQ ID NO: 37881 - DNA, 120 bp, synthetic construct
  source 1..120: mol_type = other DNA
cttagacacactaagcccgtttcctcatctacacgacgggcatcccatctgctactgcaccaggttcttgtggcaataacttgaactcacacatgcaaacaggctttgtgagctccataa

SEQ ID NO: 37882 - DNA, 120 bp, synthetic construct
  source 1..120: mol_type = other DNA
gagaaccactggcaaaagcaaacaatttgaatctgaagtcagcccacctgcatttgaatacaggccctgccacttaataactgtgatttagagcaagttagttacttaacagctaggttg

SEQ ID NO: 37883 - DNA, 120 bp, synthetic construct
  source 1..120: mol_type = other DNA
ccaggggtgctcccagctgtgacctccgtggttgggtactcctgcctgggaccccaggaggggctgcggtggtcgttggctggcagctggcaccctttccagggcccttttgtcaaagtc

SEQ ID NO: 37884 - DNA, 120 bp, synthetic construct
  source 1..120: mol_type = other DNA
tgctttcaccgagggtgagattcccacacatccacccgaaagtagagtccctgatgccttgctctgcacccttggtgggagaggggaggagaggaaaggcagagggtgctaaagattctg

SEQ ID NO: 37885 - DNA, 120 bp, synthetic construct
  source 1..120: mol_type = other DNA
tcagcaacagcttggaaatagcacaaatgggcaatatataagaagagtgaaacaaactctccagtagagactaaaaatgacatgtacaagactggcttgtagcaggcagatgtgaacatg

SEQ ID NO: 37886 - DNA, 120 bp, synthetic construct
  source 1..120: mol_type = other DNA
tcaacaaatatttactgagcatctactatgtgctggtaatacaacagtgactaacagataccaactccttcctcagggaaagaggtgaagagaggcagacaaccaatgcacaaatgtacc

SEQ ID NO: 37887 - DNA, 120 bp, synthetic construct
  source 1..120: mol_type = other DNA
gacctgccactagatcttaccattaataaattcataaagtatagtagtcctcccttatctgcaggggatacattccaagacccccagcagatgcctcaaattgtggttaataccaaacct

SEQ ID NO: 37888 - DNA, 120 bp, synthetic construct
  source 1..120: mol_type = other DNA
gggcatacttgtcctgagtagtaagccatggtgtcctctcctcagggtggggaagcaacacacacaatgctaaaaattaacaccaaaaacaaacacaaagtccgccttgtactacacatg

SEQ ID NO: 37889 - DNA, 120 bp, synthetic construct
  source 1..120: mol_type = other DNA
gacagatgccgggtttatttttatgtgttttagaagtatttattctctgccaagtcctttacaaagaggtaagtgaccaatagttggtaggtggcagggctggggttcaaacccaggcag

SEQ ID NO: 37890 - DNA, 120 bp, synthetic construct
  source 1..120: mol_type = other DNA
ctgcgtggccttggccaagtcacttcccctgtgggcctcagttttgttatttgtaaaatagcatttggtgatgttgaccttgggggctatatgagaatcagggggacagacggaaggcgt

SEQ ID NO: 37891 - DNA, 120 bp, synthetic construct
  source 1..120: mol_type = other DNA
caggatttcccggcagctggccgaagagattctgatgaagcggaaccatctgggagccttcctgatccgggagagtgagagctccccaggggagttctctgtgtctgtgaagtgagctct

SEQ ID NO: 37892 - DNA, 120 bp, synthetic construct
  source 1..120: mol_type = other DNA
atcagccttgttcccttcccttttctcctgggggcaggctggtgatcctgaggggcaggaacgcgcatgccccctctgagcctctatttccccatcttaaaaatgcgagtgctgtcagca

SEQ ID NO: 37893 - DNA, 120 bp, synthetic construct
  source 1..120: mol_type = other DNA
ctttccattcttctggttgtttccttcccctttcttctcactcctcgatttccagcctggttaggaggccatattgttccagaaagagcccatgctcaggaaccaaactgaatttcctgg

SEQ ID NO: 37894 - DNA, 120 bp, synthetic construct
  source 1..120: mol_type = other DNA
aaggagactacacagccatgggtaacacccttacaaggaaatggtcatgttatctgtatggtggtgtcactctggctgaatgtcaattaaagtggttacttaaaaggccattcacattca

SEQ ID NO: 37895 - DNA, 120 bp, synthetic construct
  source 1..120: mol_type = other DNA
gaaaggagcctggcctctctagcagccacacaggcctgcagtaggatggggctgtggctggccatgtggatcacttgggcctcatgaggggaaaggaaataccaggggggcagaagagga

SEQ ID NO: 37896 - DNA, 120 bp, synthetic construct
  source 1..120: mol_type = other DNA
aaatcaattgctgtgtgagagtttgttggattctcttctgagtaaagggtatgtgttttattgtacggactttgtatcacctattttggcttttcatccaggccttttttttttttcttt

SEQ ID NO: 37897 - DNA, 120 bp, synthetic construct
  source 1..120: mol_type = other DNA
atgccaagtgcagacatggctatggagcaatcataccattcacgtgtagccagtgagagtttaaatgggaagaaatgtactttatttgtatcccaacctgaacgtacattggaatctcct

SEQ ID NO: 37898 - DNA, 120 bp, synthetic construct
  source 1..120: mol_type = other DNA
cacagatttgtatggctgtaactagcaagttcatggagataacaataaaataataaacatatttaattcaaagtcagtcaagtaaaggcaaaaggaacgtgagtcagttaagtcaaaacc

SEQ ID NO: 37899 - DNA, 120 bp, synthetic construct
  source 1..120: mol_type = other DNA
ttcacctcttttccgagcccacctgttctggtgagtacgggatatttattgattacaggaatgtccatatgtgtcctttttccttctgtaagacagctttacagttagcagtgggttgtt

SEQ ID NO: 37900 - DNA, 120 bp, synthetic construct
  source 1..120: mol_type = other DNA
cagctgttgctccctgaggctgagcatctccgccagattcagtcgctggtcgtagttcgggtactggtccttctgaaagtaaaattctagcactttctgctggctttcagtgtagaccgt

SEQ ID NO: 37901 - DNA, 120 bp, synthetic construct
  source 1..120: mol_type = other DNA
ggccaaggaggattgtcacaggggcagctgacacctcagcccacctccctggtcccagaccctggcccaaacactttacacattttaatccccttaatgctcactgaaaacctgagttgg

SEQ ID NO: 37902 - DNA, 120 bp, synthetic construct
  source 1..120: mol_type = other DNA
aattgtaggcaaaagtatgctcctgggtgcatttctgtggggagaggtccgttattttcatcgtatgttcaaaggggtctgtgacctacaaaagttaagagccactgatctagttcatgc

SEQ ID NO: 37903 - DNA, 120 bp, synthetic construct
  source 1..120: mol_type = other DNA
gggattacaggtgtgagccactgtgcccagccttaaccattcacttttgaggggcattttggttatttctaggttttggctgttgttcaactgctatgaacaatcatgtccagatttttg

SEQ ID NO: 37904 - DNA, 120 bp, synthetic construct
  source 1..120: mol_type = other DNA
agtgcactcttgtcgaaagcctgcattgccatgatttgtttgtagacaaatttgaagagtttgatctttttactctgccatttttgggaacatgataaagatgtaatctcgtattatggg

SEQ ID NO: 37905 - DNA, 120 bp, synthetic construct
  source 1..120: mol_type = other DNA
ggtatggaagagatgcgaagaaatagcacattctttaaaaaaaatgaatatttgatattgtttgttcctatgtggagaggatttcttaactctttcttcatctggctgctagagcctcta

SEQ ID NO: 37906 - DNA, 120 bp, synthetic construct
  source 1..120: mol_type = other DNA
gtaaaagttacaaggtaaacaggaaagaatggaatcatttcattgtgaaattgtttctaagtgttttaaatgctcttttgttatttttatttttttttttagtattctcccaaaacacca

SEQ ID NO: 37907 - DNA, 120 bp, synthetic construct
  source 1..120: mol_type = other DNA
atggccttttggactagcaccccttcctcacagcctgagagcaaaggtatagaactagcattctcagtatgagataacagcagtttttagcagctggtagcccttaggaaagtattaata

SEQ ID NO: 37908 - DNA, 120 bp, synthetic construct
  source 1..120: mol_type = other DNA
catatgccaaagaatcaacaaaggaagtaatcagccagggcaaaggtcgcacaagagattgtaatctagcaatcagcagtggaataagcagtcagcttaccagaaacccaggaaaatgct

SEQ ID NO: 37909 - DNA, 120 bp, synthetic construct
  source 1..120: mol_type = other DNA
gaaacagaggcaaccagtgcagtccttatggagcaaattaaggtgagatcagaaacctggccactgtgaaaaccgccagtttggttttctggaccctccatacacatgcacccaagttta

SEQ ID NO: 37910 - DNA, 120 bp, synthetic construct
  source 1..120: mol_type = other DNA
cagtattaaattgtaactgcataaatttaaccgtagtgcataccacagtacggtaataagttcatagcctcctcctgttgctgttgcaatgagctcaggtgttgcaagtatccacttaaa

SEQ ID NO: 37911 - DNA, 120 bp, synthetic construct
  source 1..120: mol_type = other DNA
cccctagcatgttaatcttagttattttaaattcctggttggatacttccgatatttctttcatatctgagtctggttctgatgcttgctctgtctcttcaaactgtggggtttcttgtc

SEQ ID NO: 37912 - DNA, 120 bp, synthetic construct
  source 1..120: mol_type = other DNA
accaaccatagttaacaagcagtgctcttaccaaaaggtaactctttctagaatctggcacaccatttaatatcagtatgagcatatggtgggtttaataattgttttccatgtttataa

SEQ ID NO: 37913 - DNA, 120 bp, synthetic construct
  source 1..120: mol_type = other DNA
gtcttctttctctggctgcttttgagatttctctctgtcttttttaggggcagttttactcttatgtgactagaagtagatttcttcttttttttttaatattgcttgagattttattgg

SEQ ID NO: 37914 - DNA, 120 bp, synthetic construct
  source 1..120: mol_type = other DNA
atctattaatattccaagattttatgtcatttcacgtataaggaaagcattaacatttactggtcacgtatcatgttccctcataagaatcttctatcaggcggggtaggtatcattatt

SEQ ID NO: 37915 - DNA, 120 bp, synthetic construct
  source 1..120: mol_type = other DNA
gttcattaagctttaaaataaactgatcaaataaaatacaagcatctaagatgtttctattatatattcattctacagaaatatgtggtagctaataaagactgaggtaggtatctctgt

SEQ ID NO: 37916 - DNA, 120 bp, synthetic construct
  source 1..120: mol_type = other DNA
ttagttattttccactgtatcaaattgactatttcattttaattccacagtttgttcacatattgtcattacataccagagcacaccttcatttaaaacacatcaagactccgtgaaatg

SEQ ID NO: 37917 - DNA, 120 bp, synthetic construct
  source 1..120: mol_type = other DNA
gaagacaatttttagaaaaagtgttttaagccaaacaatttcttgcccttggtataaagcagcagcatgcagaaaacactaattacggtttcaatctcaatggaatctaggctggtcctt

SEQ ID NO: 37918 - DNA, 120 bp, synthetic construct
  source 1..120: mol_type = other DNA
aacttttgcagtttggggtgtcacaacaaaactagcacaaatttctttttccttcttcacaatttcatggacaaaagatttgttcttaccgtagatcttagcaaccccagtatacgatct

SEQ ID NO: 37919 - DNA, 120 bp, synthetic construct
  source 1..120: mol_type = other DNA
acgctacagaactgaaagaaatgagtttcccaattgaaaggacacttccagaaaacctttgttaccaagaacaagactctcatcagactcctaacaacagaacttctggaaaatggagca

SEQ ID NO: 37920 - DNA, 120 bp, synthetic construct
  source 1..120: mol_type = other DNA
taaacaaaaactccaataacagtactgaaacaatgaggggcaaagcaaagtgtctgaggacagttttggaggagcataatagccagtacagaatgtctaaagtggggccgggcgcggtgg

SEQ ID NO: 37921 - DNA, 120 bp, synthetic construct
  source 1..120: mol_type = other DNA
gagagataaactcatatcatctccaagtggagcttattctagaaaggttgactaatgtaacatcagaaaatgaaataagtaatcacgacatgaacaggatgaaatacatatcattgttcc

SEQ ID NO: 37922 - DNA, 120 bp, synthetic construct
  source 1..120: mol_type = other DNA
ggtgcattccattaaagaaagagttttacttggtgtcaggcactgacagaagctctctttctccatatatgcctgaacttgactgtcctccttctgttccaattatttaaccctgaatac

SEQ ID NO: 37923 - DNA, 120 bp, synthetic construct
  source 1..120: mol_type = other DNA
tgtcagtgtgattgtgtgtgtatgtgtgtgtagtcatgtgtttatgtggtatgatgaatgtcatctatgccttttatcagacattaatcttttcttactttcccaagtgactcaggggtt

SEQ ID NO: 37924 - DNA, 120 bp, synthetic construct
  source 1..120: mol_type = other DNA
ttggataaattcttctggttaaagtatagaaacttttttagatctgttttagatctgtgatcaatatttctaaattgttcttaaggatgttcatattaatttataattcaaccaacagag

SEQ ID NO: 37925 - DNA, 120 bp, synthetic construct
  source 1..120: mol_type = other DNA
gagagaatcgtatgatttttgtctttgactttgttcatgcattttatcacatgtattcatatgcatatgttgaaaccaacttgcatccaaaggataaatcccactttatcatggtgaatg

SEQ ID NO: 37926 - DNA, 120 bp, synthetic construct
  source 1..120: mol_type = other DNA
tgagaggaatttgaattctccctgggagggagttctggagttcctgcccagtgggagtccttccaactggggcctgggggagaggatggggccagctttggagagtcccaaatgactggg

SEQ ID NO: 37927 - DNA, 120 bp, synthetic construct
  source 1..120: mol_type = other DNA
gaggtgactttctggctgaagaatgtggattcgtcactgtcttgtgctcaatgtagagggggctcttaattccagaaatgtccatatctgatgaaagaaagcgaagaatgaaacaaaaag

SEQ ID NO: 37928 - DNA, 120 bp, synthetic construct
  source 1..120: mol_type = other DNA
ctcacctcctgctgtgcagcctgcttcctaacaggtcatggaactgtgtgtggcctgggagttggggacccctgctatagaggattcagatttaaattcagaagttagaatgaaaaagaa

SEQ ID NO: 37929 - DNA, 120 bp, synthetic construct
  source 1..120: mol_type = other DNA
gtgttttggtgataatatgcaaaatttaggaataatgtagaaaaatgatgtatttcgatatagcttacaaatgaaacttttttggcttcacaaagacatactaattatcataactgatac

SEQ ID NO: 37930 - DNA, 120 bp, synthetic construct
  source 1..120: mol_type = other DNA
caaaagaagaaacaagaccaacaggtagaaggcttgaagaatatttttattctatataaggaagtaccaagagccaaaccacctaaagatgcactgggctatcttgaaaagtaatgaatg

SEQ ID NO: 37931 - DNA, 120 bp, synthetic construct
  source 1..120: mol_type = other DNA
tcaggggatccatgaagctaaaattacttttacaataataccaaaaaaatttatatattacatactcattttctcatgtatgtagagctgagtttttttgtttttgtttttggagacaga

SEQ ID NO: 37932 - DNA, 120 bp, synthetic construct
  source 1..120: mol_type = other DNA
cagtccaggaaaaacaaaactgcacaacaagggcaattcaaatgcaaaatatttaccttatatttatataaatgttaaatattcatttaaacaaaaactgcaataacagtactgaaagaa

SEQ ID NO: 37933 - DNA, 120 bp, synthetic construct
  source 1..120: mol_type = other DNA
tggaaataactgggaataagacatcatttgagaggttaagcatgaagtataggaagtatgcaggataaaaataagcattagatgattcataatttataacacggggaataagaattatta

SEQ ID NO: 37934 - DNA, 120 bp, synthetic construct
  source 1..120: mol_type = other DNA
cctgcttcctcagcctcttcctcttgtcagaaccctttgcctctccctacacacgcacacacacatgcatgcaccatgctacagaaacctttctcagtcttgccattctctcaaattatg

SEQ ID NO: 37935 - DNA, 120 bp, synthetic construct
  source 1..120: mol_type = other DNA
ggcaaacatttaaaatgtatattgtaatgttttatatattaatgtatactttattgtgtgtgtacaatataaaattataaatgtatatttgcctttagcttcctcctacccccatcatat

SEQ ID NO: 37936 - DNA, 120 bp, synthetic construct
  source 1..120: mol_type = other DNA
gagtttcttgggtgttcagaaatattttttgcatatgcaaatgtgcaatacattctttctctgcttttaaaaaatattgtgcctcagtgtgggtgtgctttacctattgccagatgcctt

SEQ ID NO: 37937 - DNA, 120 bp, synthetic construct
  source 1..120: mol_type = other DNA
cccttttctcttttccttctacccttgcagggctctcataagtgcctttgcatggtgtcacagttagataaaaattgcctgtatcttttttttatgtctttgatctgggcattccgaggg

SEQ ID NO: 37938 - DNA, 120 bp, synthetic construct
  source 1..120: mol_type = other DNA
tccccgttctgctgtcttatgtagatactgagaatattaaacctgtactcttttcatttgctacataagcacccattttgttgtccagctgtattttttgggttggagggttaggtttgc

SEQ ID NO: 37939 - DNA, 120 bp, synthetic construct
  source 1..120: mol_type = other DNA
tggaataagcagtcagcttaccagaaacccaggaaaatgcttcagaaagggcagtcaggactaaggcaatttaatgaaatgcaaaataaatgaaatctgaagtttaaataaaaatctaga

SEQ ID NO: 37940 - DNA, 120 bp, synthetic construct
  source 1..120: mol_type = other DNA
agaacgtttgcattttaaaattaaagttttcaatagttttcaatacaacaatgatactatctcaaaatactcagcatgtctaacaggcctcttttaaaagctcagcatgtttaatgtagg

SEQ ID NO: 37941 - DNA, 120 bp, synthetic construct
  source 1..120: mol_type = other DNA
ctcatcttcccccacacaaagcaacccatttccacaagcggtgggaccccagggttcttaaggcattttgtttataaatactactaatttggaccattaatatttctaacaggcttatcg

SEQ ID NO: 37942 - DNA, 120 bp, synthetic construct
  source 1..120: mol_type = other DNA
gacatcacttttaagattccaaggattttaggagctgtatgccaagaaactgggaggaagaccaaatatgtatttcacaatgtcacagtgagggtatgccatgagctagaacaaacagac

SEQ ID NO: 37943 - DNA, 120 bp, synthetic construct
  source 1..120: mol_type = other DNA
ttccccaccaaatagtattctcttaatttgcaaatgctgctgatcacactgtaataatcgccacacatcagcatatccttgatgtaactttagcagtatgagtaatttagttcttgcttg

SEQ ID NO: 37944 - DNA, 120 bp, synthetic construct
  source 1..120: mol_type = other DNA
caagaaagcaataacattagtttctttgggggtggagaaagtaaataactagggaacagaaaggagtcttcatagcatattcttaagagccgccagaattttaaaccatgtatatataat

SEQ ID NO: 37945 - DNA, 120 bp, synthetic construct
  source 1..120: mol_type = other DNA
ctttctaagcctggtttaatgtttttttggaagactgcttatttcttttcctttcgaaagttatgcaagctcattaaaaaaaaaaaaaaaaaaaaaggccaggcatggtggctcatgtct

SEQ ID NO: 37946 - DNA, 120 bp, synthetic construct
  source 1..120: mol_type = other DNA
gatgtccttaagaaaaatgtaaaaggaacttgtgaccaaaaaatttgagtatacaaagaacacaaaataaaacatcctacatgttttctaaaataaagttatgttagttcttttaggtac

SEQ ID NO: 37947 - DNA, 120 bp, synthetic construct
  source 1..120: mol_type = other DNA
ctcgtctccaaaggcccagagcctcaggctaggagtcagtggcctttcttcctcctggtcactgatatcaccaccttaactagccatgctgcaaatcaaaaccttcctcactcttgcctc

SEQ ID NO: 37948 - DNA, 120 bp, synthetic construct
  source 1..120: mol_type = other DNA
acttttcccctcacctcggttgaggcctccatggtttggacttgctggttttgccttgctcttcccttgataaatacaccatttattccggttcagcccttggaactttaaaccttaacc

SEQ ID NO: 37949 - DNA, 120 bp, synthetic construct
  source 1..120: mol_type = other DNA
ctttttccctcatgtcagcttcaggtatccagtatcacttatgcttgataatgattgtatgaaaatcattcagaattatactatgttttttcatataaagcttttgttttactaattttg

SEQ ID NO: 37950 - DNA, 120 bp, synthetic construct
  source 1..120: mol_type = other DNA
acagttctttaaggacaatatacttaacgctcatgactgagaatgatgtaattttcatccacagtcatggaaaagtgatagacaagaaatagtagcttccaaattttacataccaggtgg

SEQ ID NO: 37951 - DNA, 120 bp, synthetic construct
  source 1..120: mol_type = other DNA
tctttgcagaaaaagctggccaactcctggtttagtagatcaaagattctttgatgtattttaataaaagttttaccaaatatactgaaatgtttatattaaatatagatccccatgtac

SEQ ID NO: 37952 - DNA, 120 bp, synthetic construct
  source 1..120: mol_type = other DNA
tgaagacgccggtgtgagattaagagtgaatgaaaagaaaatttgagttcgtgagtgtggacagttcttttaaggacatcatgcttaggagtcatgactgagaatgttgtaattttcttc

SEQ ID NO: 37953 - DNA, 120 bp, synthetic construct
  source 1..120: mol_type = other DNA
taggtagctacatccaatatgctaagcctttttctaagcagtgaagatatggtagtgaaaaataaaaaccctattcatgacagtgagaaaaacacacaataacaacagacagataaggca

SEQ ID NO: 37954 - DNA, 120 bp, synthetic construct
  source 1..120: mol_type = other DNA
cagaatatcagaacttaatagtattatcccatccacttatgagtacattctacaaacttctctttaagcttctaattaaagacgaaaaaaatgtaaggtgaaatactcataaatcaaggg

SEQ ID NO: 37955 - DNA, 120 bp, synthetic construct
  source 1..120: mol_type = other DNA
ttcccccttaagggagatgttgtgaaaggaaggtgctaactgtcaggggaaggtggcggtgccaggctttctggctccagctttggctccttctcgctgttgttctgctgtctctaccta

SEQ ID NO: 37956 - DNA, 120 bp, synthetic construct
  source 1..120: mol_type = other DNA
catctcacttccgtgttacctgcccatctctgaagacacctgagttggctacatcactgtgtcattccacagactctgaattttagagtagtaaactgtctcttgatgcttgtgaaaact

SEQ ID NO: 37957 - DNA, 120 bp, synthetic construct
  source 1..120: mol_type = other DNA
acagaactgagaagcaagaaatagcagtgcgacgtgcttaagctgtttgcttaagctctgcagtcggctctgaggagaagggctgatggccaggcaataaagcttctgatgacctatttt

SEQ ID NO: 37958 - DNA, 120 bp, synthetic construct
  source 1..120: mol_type = other DNA
aatgaacatctgaagttgtagttaaggttcattactaatgcaataatccttgggaagagaaggaatatgcttcttgcatagatgcaaataattcctcacattctattatttatttttatt

SEQ ID NO: 37959 - DNA, 120 bp, synthetic construct
  source 1..120: mol_type = other DNA
tgggtcacagtgcccttgatttatgagtatttcaccttacatttttttcgtctttaattagaagcttaaagagaagtttgtagaatgtactcataagtggatgggataatactattaagt

SEQ ID NO: 37960 - DNA, 120 bp, synthetic construct
  source 1..120: mol_type = other DNA
tttttacaacaccctaacatgataaagaaagtaacatcaatgattgaatcatattattaagcaataggaattatgaacaatgtaacactgattccctgagctggattcatggttaaagag

SEQ ID NO: 37961 - DNA, 120 bp, synthetic construct
  source 1..120: mol_type = other DNA
cctgggtctctagccagcccaccactggagctatcaagccagtagcaactctgcagttcctgggacagagcttccaggagcaaatgaaatcctttctgccactgcctctgcagtggaact

SEQ ID NO: 37962 - DNA, 120 bp, synthetic construct
  source 1..120: mol_type = other DNA
ctaccttacgagagctcctgaaggaagcactaaatatggaaagaaaagatcatcacctgctactacaaaaacacactgaagtacacagtccaatgatgctaaaaagcaagcacatatgta

SEQ ID NO: 37963 - DNA, 120 bp, synthetic construct
  source 1..120: mol_type = other DNA
gttttagttaaagttcattagtaatgcaataatccttgggaagagaaggaatatgcttcttgcatagatgcaaataatttgtcacattctattatttatttttctatctgtggttggcta

SEQ ID NO: 37964 - DNA, 120 bp, synthetic construct
  source 1..120: mol_type = other DNA
ctttctattatgtcatgctaatgctagctaatttactgggtcacagtgccctcgatttatgactatttcaccttacatttttttcttctttaattagaagcttaaagagaagtttgtaga

SEQ ID NO: 37965 - DNA, 120 bp, synthetic construct
  source 1..120: mol_type = other DNA
ggctactgatgtccttcctgaaatctacacctcatgtagtctttcctactttggttaacagcaactcttccagttgctctgccaaaaacctcagtgtctgatctttctctctcagtcaag

SEQ ID NO: 37966 - DNA, 120 bp, synthetic construct
  source 1..120: mol_type = other DNA
aaagtccactcacagagagggtaatgatgtgcggctgccccagccctgagttgtggggtggtctgtgacccagcaatagataacacagctgcacttctcattcacaccagccccccttct

SEQ ID NO: 37967 - DNA, 120 bp, synthetic construct
  source 1..120: mol_type = other DNA
gacgtggggcggcgggagcggacctaggaagaggggccgaccttgggcagagaacagcgaaggctgatctctggaggcgggagctgacctcaccccctccgtccactcaccagcgcgacc

SEQ ID NO: 37968 - DNA, 120 bp, synthetic construct
  source 1..120: mol_type = other DNA
aaaaaaactcaacaacaccatcaagcaacaggatcttactggcatttataaagtgctccaccactggctgggtgcggtgggtgtaatcccagcattttgggaggccaaggcgagtggatc

SEQ ID NO: 37969 - DNA, 120 bp, synthetic construct
  source 1..120: mol_type = other DNA
gtactgcttaaagaattgacaccaatacacacaatcttttctgaaaatagagaatctttcccaattcattttatgaagctaacattactctgatatcaaaatagtacaaaaaagtaaact

SEQ ID NO: 37970 - DNA, 120 bp, synthetic construct
  source 1..120: mol_type = other DNA
tagagaaggatcattgctccaagccaggtcttaacatccattggtttttctgcccttagcacaacaaattggtcaactccgtaatagtggacaatcacattatctactttaatgagagat

SEQ ID NO: 37971 - DNA, 120 bp, synthetic construct
  source 1..120: mol_type = other DNA
aatagcagtgtatttagaaaagcccatataaagatttcatgaacaaatttcagtgcatccataggacggaataatatgtaactattgagggtgtcagtacatagagatatgtcgacatgc

SEQ ID NO: 37972 - DNA, 120 bp, synthetic construct
  source 1..120: mol_type = other DNA
gcaaattctaaactgttttttatcaattgaagctgtattgtggactgtccagtgtgtctctttaagtatgtagagctttggcataatcagcatggcagttttacacacttaaaaccatgg

SEQ ID NO: 37973 - DNA, 120 bp, synthetic construct
  source 1..120: mol_type = other DNA
cttaacagataactatcaaatgtcttttagatactagccattttttctaatgctacagagcacaaacaattaaaagtagagacaggagcttgttattatcattgtcattttcattatttg

SEQ ID NO: 37974 - DNA, 120 bp, synthetic construct
  source 1..120: mol_type = other DNA
gtggatgaaaattacatcattctcagtcgtgagtgttaagtatgttgtcctttaagtaactgtctacactcacgaactcaaattttctttccattcactcttgatctcaatgccagtaag

SEQ ID NO: 37975 - DNA, 120 bp, synthetic construct
  source 1..120: mol_type = other DNA
gctacttgacaggcctagcctatcagacgtagctacctaataaatagttatttgattagctgttgagtatcacacacttgtcagatccaaaattgggctactgatggccttcctgaaatc

SEQ ID NO: 37976 - DNA, 120 bp, synthetic construct
  source 1..120: mol_type = other DNA
gttggttggagtgagcttcccccaaagttctacaatgtggctgaggactttgatcgtacattgtttttcttttcaatagtcattccaaatattgtgagatgcattgtttcaggaagcccc

SEQ ID NO: 37977 - DNA, 120 bp, synthetic construct
  source 1..120: mol_type = other DNA
gctgctcacaccctgccagaggagaagcaagcgttcagaccctcacaccagcacccctcctcaccaccataagtagcatgtgctccaagtgccactgtgttaaactgatggtagtcctta

SEQ ID NO: 37978 - DNA, 120 bp, synthetic construct
  source 1..120: mol_type = other DNA
gtgtcccctggcctcacttccgttgccatgttttcataatcctctcaggctctgggcagcagcgctgcccacagtaggaccagatcatgtaaggaaaatactgcaggctcatcttggggc

SEQ ID NO: 37979 - DNA, 120 bp, synthetic construct
  source 1..120: mol_type = other DNA
aaaaacgctgcacctctacaccctccctcctcctccccaagcggagccccacagccctgagaaacagcaaggtctgggactagaggcctggatcagcctcactccctggctgggcctccc

SEQ ID NO: 37980 - DNA, 120 bp, synthetic construct
  source 1..120: mol_type = other DNA
gtgtgaggatgttttttatactgctgcctgaagtttaagttgctgattactttttaaatagataatttggtggtaagtactatattttaaaaatgcgtatgcccgttacccttcaattcc

SEQ ID NO: 37981 - DNA, 120 bp, synthetic construct
  source 1..120: mol_type = other DNA
aaattgaagttacactaatgcattttaaatgtaatttggagctagtttagaattgttgaagctaggactctctggtgactcaggaatagtagaaattggtggggaaggcatttcacatca

SEQ ID NO: 37982 - DNA, 120 bp, synthetic construct
  source 1..120: mol_type = other DNA
aatcaacccattcattcctcaccacagctgtagctgaaggtaagtttaatatcccaagtcctcacatggagatgatgtagagatgaatttttcaggcttttggtctcctaaatggaaatg

SEQ ID NO: 37983 - DNA, 120 bp, synthetic construct
  source 1..120: mol_type = other DNA
gccccaataagcacgagtgtgaacaaactggctggcctcgatgaggacggctagggacatctgggctggctatcgtgtggatggtaagagaacaccttggctggcttagatgaggaccac

SEQ ID NO: 37984 - DNA, 120 bp, synthetic construct
  source 1..120: mol_type = other DNA
tggtgactgacaaccttcagctcttctctcctctccagagtctcctgaatgagacagaagatctcaacactctaatcaatcatgtcttcaggatggtgaccagttcccatcctgaagcta

SEQ ID NO: 37985 - DNA, 120 bp, synthetic construct
  source 1..120: mol_type = other DNA
ctcactggagcaagatgctccagtttgtgctgtgtggtattgcatggtgtcattttcctcaaccctttccattatgtggcaaaggcctatacaaatcatgtttcctaagtatgtaaagca

SEQ ID NO: 37986 - DNA, 120 bp, synthetic construct
  source 1..120: mol_type = other DNA
agacagaactgagaccttcatcctacactcagagtgaagcctccatctctggtcagccttctggttccctcattgttaaatatggctgcaaaaacaaaactagaggtctcgaaagaaaca

SEQ ID NO: 37987 - DNA, 120 bp, synthetic construct
  source 1..120: mol_type = other DNA
ttgcagagtggatgaagatgaggagatcattgtgaaggccatgagtgattactgggttgttggaaagaagtctgatcggcgggagctctatgttattttgaatcaaaaaaatgcaaacct

SEQ ID NO: 37988 - DNA, 120 bp, synthetic construct
  source 1..120: mol_type = other DNA
ctttattagtaatacctgtgttagtcattgtgcgcactagaaacatcagttaatgcaagcctgatctaaactgtgaatgtggtaagatcaaaatcctgacccctctgcggagcacttggt

SEQ ID NO: 37989 - DNA, 120 bp, synthetic construct
  source 1..120: mol_type = other DNA
aataaattgttaaaagtttttaaaattctggtttggtgttgagtctctctcctgctgcctatttatagattacactggccaccagctccgtgacccaggctggaatgcaatggctcactg

SEQ ID NO: 37990 - DNA, 120 bp, synthetic construct
  source 1..120: mol_type = other DNA
aggttctacaattaaaatactcactgctctcagatgagaaaaaggtgatcccttttccagtcaatttaaaattcattttggagactctttcatgacttacagacttcttgatcttgggct

SEQ ID NO: 37991 - DNA, 120 bp, synthetic construct
  source 1..120: mol_type = other DNA
gcactgggtctgcagtaagcgagataaatctcccagcacttattcatgtaactcatagagtagagcgtccgctgttgctcacggaataaattgcctaaaaatacaacgttcgaaaaatga

SEQ ID NO: 37992 - DNA, 120 bp, synthetic construct
  source 1..120: mol_type = other DNA
ggcaaactttctgtaaagggccagagagtaaatattttaggcttggtggaccagaccgtctacatcacaatccctcagctgtggtgcttcggggtaaagcagtcacgaacacgtaagcaa

SEQ ID NO: 37993 - DNA, 120 bp, synthetic construct
  source 1..120: mol_type = other DNA
ctctgtctcaaaaaaaacaaaacaaaacaaaacaaaaaaacagatgaaagttcacttgcttgtccactgctcaccttccactgtgtagcctgtttcctaacgggccatggaccagtactg

SEQ ID NO: 37994 - DNA, 120 bp, synthetic construct
  source 1..120: mol_type = other DNA
gtctcaaaaaaaaaaaaaaggagcaatattcacggtggttgctttactcacctccctctgtcacacttcaccttttaggatttttccccagaccttgacgcccttaagctgccccagatt

SEQ ID NO: 37995 - DNA, 120 bp, synthetic construct
  source 1..120: mol_type = other DNA
gctcacagaggacttctgtttcctgaagtgttcggtgtattttcatgagtgaacaccatggataaaaacagatgaattttatttctttttttttttccattttatttatttaccagacgg

SEQ ID NO: 37996 - DNA, 120 bp, synthetic construct
  source 1..120: mol_type = other DNA
aaaaaattaataaaatggttaatttatgtgatgtgaatttcgcctcaataaacaaaaagtgaatatgccctggacagcgccgctagcccctacccccttctctccctccatgtggccacc

SEQ ID NO: 37997 - DNA, 120 bp, synthetic construct
  source 1..120: mol_type = other DNA
agtgaagactctgtctttcaaaacataaaaatctgcgataaaaccaattattccatacagtgactacggtcagttctgagaaatgacacccaggttggcgatgtgtctcatggttggcct

SEQ ID NO: 37998 - DNA, 120 bp, synthetic construct
  source 1..120: mol_type = other DNA
tctccctcagcctctggaaggaaccagcactgtgggactaatttacatactgtagggtaataaatttgtgttgcttcgaaccactaaatttatggtaatttgtttgcggcagcaatggaa

SEQ ID NO: 37999 - DNA, 120 bp, synthetic construct
  source 1..120: mol_type = other DNA
agtaaccattggatcttcccaaggcaatggtgaaagaaaagaaaaaagcagacaaaaaaggggagaagtctgcccgctctccctcatctctctctgataatctagacttttccaaacaag

SEQ ID NO: 38000 - DNA, 120 bp, synthetic construct
  source 1..120: mol_type = other DNA
ggttgagaacacatttttgtagctgaggtcatccttaggtcatgaagatgaggacctcttagatcctttttagagaaggatggagcccagcatggaggcagctcagagtaggactcacta

SEQ ID NO: 38001 - DNA, 120 bp, synthetic construct
  source 1..120: mol_type = other DNA
tgcttcagggcgactttgtgaagaatgtcccgatgaaccacggcgtgtacacgtggccggacggcagcatgtatgaaggcgaagtggtcaacggcatgaggaacggattcgggatgttca

SEQ ID NO: 38002 - DNA, 120 bp, synthetic construct
  source 1..120: mol_type = other DNA
aaaagccttttgaggcttttctatgtagatcaaacaaagggtactctatgctcacttatactcggaggcggtaaaatgagtagcatgtccaaatgggtaaaacaacagtggatctggtgc

SEQ ID NO: 38003 - DNA, 120 bp, synthetic construct
  source 1..120: mol_type = other DNA
actccgtctcaaaaaaaaaatcagggagtctgtattgtgtgatgggcgttctgctggtcactagcgtagtttaataagacacattctgtggccataggtgcttaaagttggagaaagatt

SEQ ID NO: 38004 - DNA, 120 bp, synthetic construct
  source 1..120: mol_type = other DNA
gggattacaggcgtgagccaccacgcccggctgtcttttgttcttaatccacgtatgactttcttcctttcaggtggaatatgccgtcttaagaaatattacagaattaagaagaattta

SEQ ID NO: 38005 - DNA, 120 bp, synthetic construct
  source 1..120: mol_type = other DNA
ggtcatagcagaggataatcgtttcatatatgatggaattgacagcaactttgaacctgaggtttgtaaagagccatcacaaatggtacagatccaattcaggctgttggttttgccatg

SEQ ID NO: 38006 - DNA, 120 bp, synthetic construct
  source 1..120: mol_type = other DNA
gtagtatgcccaagatacaaggggaaaaaaacgcttacactgaatttccacacagtgtacacgtggggcatctcccaagggggcagctctgccgaggtgaggtcccctctctccagggca

SEQ ID NO: 38007 - DNA, 120 bp, synthetic construct
  source 1..120: mol_type = other DNA
ttactcatacggccagactgtgagaataagcgttccaaaccaagaacaggaaatggaacgggcgcacgtggcatttaaaaggctcagggagtgccgcgcgagggaaccggtgacttcagg

SEQ ID NO: 38008 - DNA, 120 bp, synthetic construct
  source 1..120: mol_type = other DNA
caaacgaaaacttcactggtctgggaaaacaaacaatgaatgctcaggcccccttctgctcctcaaatagaagagaaacagaagatagaaaaccggttacatttcagatgaaaaaagggc

SEQ ID NO: 38009 - DNA, 120 bp, synthetic construct
  source 1..120: mol_type = other DNA
ggtggaaaaaaggagactttcgtataataacaatctgttcaaagtcaatggggagaagtcaactgtaagaagctgctttttggtcaactagagccatctggacacagactgcccattcca

SEQ ID NO: 38010 - DNA, 120 bp, synthetic construct
  source 1..120: mol_type = other DNA
tttcccagaactgacgcaaagcaaagcgcaaagagcctcaacctggggtgtggagtgatatagacccgacggggctttattccatcgacctaggacctgaagcggtccctgcctgctgtc

SEQ ID NO: 38011 - DNA, 120 bp, synthetic construct
  source 1..120: mol_type = other DNA
ttccctttgatccagttgagtagcccactcttacttgtaataactcctcaggctattaaacttactaaagccattactggacaaaatgaatttttcttcatgtttcttccagttcattta

SEQ ID NO: 38012 - DNA, 120 bp, synthetic construct
  source 1..120: mol_type = other DNA
aaaaatttcaaatctgtaatcctatcattgtcactattggtctcatctcatcttttcttaattgtcttgcccagaggtgtgtctagttcagccgagatcgggtgcgttcagggtggtacc

SEQ ID NO: 38013 - DNA, 120 bp, synthetic construct
  source 1..120: mol_type = other DNA
agatgtcccagggctcatctgttacccttctttcaccagtcctgaaaccagccctttatcataaggaatgctattcagaaaaacaagatctgagtgcttagtacattgattatttctggg

SEQ ID NO: 38014 - DNA, 120 bp, synthetic construct
  source 1..120: mol_type = other DNA
tcttccaactcctccagggaaacccaagccctgcagcgcatggaacaaaagaagtggaaccgatacttccggaacaaggctatctgagagcagttcttcctggccctcgggttcatgtaa

SEQ ID NO: 38015 - DNA, 120 bp, synthetic construct
  source 1..120: mol_type = other DNA
gaggctggacaaatgcctgctcagacacacaagtccactgggtcccctaatcccataggaaggccagggaggaactacatttaggaaattgaagcttgtatggaacatttagtcctatgt

SEQ ID NO: 38016 - DNA, 120 bp, synthetic construct
  source 1..120: mol_type = other DNA
tgccctccgaggctgtaggggtgtgggagaaaggggcaggcagggctcagggatattgagtgactgctttggagtctgggctggttgctggcttggcagaaaagtcagggctaagatctc

SEQ ID NO: 38017 - DNA, 120 bp, synthetic construct
  source 1..120: mol_type = other DNA
cattgcttcctgagtgggtcattaggtggagatccacagccttcctccacgctggtcgcgtgaattcccccaatctggaaagtattcacaattttgtgtcactaattccagtgactaata

SEQ ID NO: 38018 - DNA, 120 bp, synthetic construct
  source 1..120: mol_type = other DNA
tagtccatacctggaacagtcacttgaacgatgttaagatcttcaacacctgctgcagaatttgtaacactggatgaatttgtgtttccttaaaacagaagttgaagtttagaatttacc

SEQ ID NO: 38019 - DNA, 120 bp, synthetic construct
  source 1..120: mol_type = other DNA
gacatgttcttcttgggatgcctattcattctccaagataaaaattttttttcttaagtcgctgtacaagtggagatttcaaagcaggcagttggctatatagatgtggagtttagggga

SEQ ID NO: 38020 - DNA, 120 bp, synthetic construct
  source 1..120: mol_type = other DNA
aaaaaatcatgttttagtttcgtgctggtaatttgaagtaagcagatgtctagatataagcttggaaactggccagttggagattgctcacggctgcaattgaagactccagcagcctct

SEQ ID NO: 38021 - DNA, 120 bp, synthetic construct
  source 1..120: mol_type = other DNA
aattgtgaagaaggaaaaagaaattcgtgctagttttgctgtctcacctccaactgctaaagtgacggccacagtgcgtgataagtgcttagttaagatggaacaggcactgcatttgtg

SEQ ID NO: 38022 - DNA, 120 bp, synthetic construct
  source 1..120: mol_type = other DNA
gcccggcccaccagttcttaattaccagattaagtgttcttatagaagatgatgtggatcttggatcttctgctctgtggaaacttctgtattgatcactctttcttccttgatcccatt

SEQ ID NO: 38023 - DNA, 120 bp, synthetic construct
  source 1..120: mol_type = other DNA
cggtagacacgtttaatttgggaacaacttattaagacattaatgttaaaatggaggcattgttgcatttgattgaggggaggagggggatttggtgctgcggagatccagggcatttga

SEQ ID NO: 38024 - DNA, 120 bp, synthetic construct
  source 1..120: mol_type = other DNA
ctcaatattagccttggatgttttcagagctcagatatcttctgcctgtgtcttacctggtcacagagaattaaaagaataccccaagccacaggctccacatacaaactgggaagatga

SEQ ID NO: 38025 - DNA, 120 bp, synthetic construct
  source 1..120: mol_type = other DNA
tgtgaaagagctatgataaaaattagtcaatatgtctttttacagaagagcttttgcatggtatcattgactaattacaataataataataatagctatctttgttttactgagtgctta

SEQ ID NO: 38026 - DNA, 120 bp, synthetic construct
  source 1..120: mol_type = other DNA
cggctatctggaaatcagttccatgaggaggatcttggaggcagctgagtttatcaaattcacagtcatcaggtaagtgagtcaagagaaggaatctggagactctgacttgcccgaggt

SEQ ID NO: 38027 - DNA, 120 bp, synthetic construct
  source 1..120: mol_type = other DNA
agacgggaagctgaagctcagagtggctaagtggctcgctccaggtcacgcagccattataggagttgtcaggattcaaaccagggtccatgtgactccaaagtccatgtgcttcacttt

SEQ ID NO: 38028 - DNA, 120 bp, synthetic construct
  source 1..120: mol_type = other DNA
actcagtgccctgctcagcatgaagtcgaagcagaagcatgacctccatccctaatccctcaagaatgaggagtggaaggtgttggcaggagggtgggggtgaggtttgtagatctgtaa

SEQ ID NO: 38029 - DNA, 120 bp, synthetic construct
  source 1..120: mol_type = other DNA
tggagttgtggtttctgtaccttgaagagaacttccccttctgggacccagaaacccagtgaaccctcaggaaaaaagggaatgaaattactgaagacaactctgtggcagggagaggga

SEQ ID NO: 38030 - DNA, 120 bp, synthetic construct
  source 1..120: mol_type = other DNA
gtaccatcctggccttctggaatcacagtttcagtcatttggcacacttctgtgagaaggcaatcgccatggactcctacgataaaacataaataagtattcccagcatttttaatagta

SEQ ID NO: 38031 - DNA, 120 bp, synthetic construct
  source 1..120: mol_type = other DNA
caaggaaagaaggagagagtgtaaagacacttgcctcttacagtgaaatcaaaagatattatttaaaactgataaagtatcagaggcattagtaaacataaagttataaatgttaacact

SEQ ID NO: 38032 - DNA, 120 bp, synthetic construct
  source 1..120: mol_type = other DNA
tagacggtgagcagtgccaaggaaagagagaaaccagggccaggtgggtaccagatttcagctcagcacagggagagctactttacaaattggtctatacaaggtggggtccgaattctg

SEQ ID NO: 38033 - DNA, 120 bp, synthetic construct
  source 1..120: mol_type = other DNA
gttacagggtgtccgcaggcagggaaccaagagctctttgtgctgaagacaattgaattgtgtgtgaaataatatgtcatgaataaatcttgcagcagagtatttatttgtctcactttg

SEQ ID NO: 38034 - DNA, 120 bp, synthetic construct
  source 1..120: mol_type = other DNA
cacatattgtatgattccatatatatgaaatgtgcacagctggcaaatccagtggctgcttactggtgtctccttttgggatgatgaaaaagtcagctggggtttctccccactttttta

SEQ ID NO: 38035 - DNA, 120 bp, synthetic construct
  source 1..120: mol_type = other DNA
aactgtcttgccacagtaagaggcattaaagacacccttcccatatcaaaactctcttcattttctcctgctcctgggaatctccagtggctccaattgtatcctcttcaaaattaaggc

SEQ ID NO: 38036 - DNA, 120 bp, synthetic construct
  source 1..120: mol_type = other DNA
cccctaacgctaagcttcgttttccctgagcaagcatgctgtcctctttttcctcctctaactccaggttgtaaagcgacctgccacagatatgtcagaaggcacatatctgctactcaa

SEQ ID NO: 38037 - DNA, 120 bp, synthetic construct
  source 1..120: mol_type = other DNA
gagagaggatagagctaaggaaggaatggcctattgttttccaaatttggtgagactataaacacacaaatttaccacatgaagacatccaagttgaaatatgaaacatgaagaaaacca

SEQ ID NO: 38038 - DNA, 120 bp, synthetic construct
  source 1..120: mol_type = other DNA
ccatttgggatgctattaaaaagtaatataaacagggtggcttataaagagcagaagtttacttctcacagttctcgaggttggaagtccaagatcaagacaccggcataggtgtctgga

SEQ ID NO: 38039 - DNA, 120 bp, synthetic construct
  source 1..120: mol_type = other DNA
atcaaattttgtaataaatttatggaagaggtagattcaaacatgcctataataaacattcaaaatgaataatttggggcttttttgctacctccataagcattttgcaagaaatatgat

SEQ ID NO: 38040 - DNA, 120 bp, synthetic construct
  source 1..120: mol_type = other DNA
tcagaatagcacttaccccttctttgactaggaaggggcaaaaaggaactctttacaattttggatatcttttgtatcttgacctgagtgggagttagaaggatatgtgtttgaatgtgc

SEQ ID NO: 38041 - DNA, 120 bp, synthetic construct
  source 1..120: mol_type = other DNA
gcattcactttatgctacgacaaaaatgacttcaagtaaaagtttagttatgagatcattataaatagatagcaataattcaactaagggaaaaaaagaaaacaaattttccttgactat

SEQ ID NO: 38042 - DNA, 120 bp, synthetic construct
  source 1..120: mol_type = other DNA
tggaaaaaggagttaattttagattcaaaacaaaaactggaaaaaaaaagtctgaaatgggtaatacctaggacctagtatatatgtgttattaaggctctatccctgaatttttaatgc

SEQ ID NO: 38043 - DNA, 120 bp, synthetic construct
  source 1..120: mol_type = other DNA
ataaaggctgcccccctgaccccctagcccccacctacacatgcacagagctggaaggtctgtccccactgccactccagagtgcgagaaagggagaggcagtgggatggggactctctg

SEQ ID NO: 38044 - DNA, 120 bp, synthetic construct
  source 1..120: mol_type = other DNA
atggtatggaagaggatagttaatggagaagcataattagataaaacagtatgatctaataataaactgggaagaacttagcaaggcctgtttgttcagatttttctctgtgacccttca

SEQ ID NO: 38045 - DNA, 120 bp, synthetic construct
  source 1..120: mol_type = other DNA
ttggttgtacttgtatggaactatttctgagttctcaattctgttttattgaactgtctgtccccctgccaataccacactgtcttgatttctgtagctatgtaaaaagttaaaaaattg

SEQ ID NO: 38046 - DNA, 120 bp, synthetic construct
  source 1..120: mol_type = other DNA
ctgttcctctgctccaggaacacccaggctcaggcccgcaggcaccactgagctgtcaggtagcattctgcttgccaggagaccagaggagatgccaggccccggtgggaggccctcggg

SEQ ID NO: 38047 - DNA, 120 bp, synthetic construct
  source 1..120: mol_type = other DNA
gtcattgtgtagccagcaacagctgcacatgactagaacacagccagcaaatggtgagcagcagggctatcaggggaggtgtctagggattttcttttttttctttttttttttttttga

SEQ ID NO: 38048 - DNA, 120 bp, synthetic construct
  source 1..120: mol_type = other DNA
agacagcaaaggcttggctgtttcttcttggcagacaagggtcagggagtcttggtgactggcgccaggctctctagtggagcgactctgccgtggaggaacagagcatctgatgcacac

SEQ ID NO: 38049 - DNA, 120 bp, synthetic construct
  source 1..120: mol_type = other DNA
cacgtgacgtggggaaagtcttccaaatttcctcagctccaggttcctagtccataagatggaaataaagaatcatagttcataaattgtttggagacattaaatgtaatctagaaggcc

SEQ ID NO: 38050 - DNA, 120 bp, synthetic construct
  source 1..120: mol_type = other DNA
aacctgacaacggaaggagccagaagctaaaattttaatttgcatttggcctgtattggtgtggatctaaggtctcagcctctctaaaccagggaatgtgaaaaactggataaagaaggt

SEQ ID NO: 38051 - DNA, 120 bp, synthetic construct
  source 1..120: mol_type = other DNA
gcaaattaaaattttagcttctggctccttccgttgtcaggttaaattcccaacctcttcacttacgggaacattcaccgatacctcctttcattcagcatgtatttgttaagggcacac

SEQ ID NO: 38052 - DNA, 120 bp, synthetic construct
  source 1..120: mol_type = other DNA
tccaagctcatcacggagaattggggttgttggggaatgtgaggactatttggttttgataaaatacagagaaacagcgacgcttattacataatgtgttcatcaccctcactcctaaga

SEQ ID NO: 38053 - DNA, 120 bp, synthetic construct
  source 1..120: mol_type = other DNA
ctgtccagagactcctaaagtaacaagcaaaatacattgtatgccatagagcatagcccaccatgtgaagaaccaggaataacacagcttgaatgaggaaatagaatccagtggtaccaa

SEQ ID NO: 38054 - DNA, 120 bp, synthetic construct
  source 1..120: mol_type = other DNA
taagttattattgactataatcaccctgttgtgtgtaattgttttgggggtaccatgaactgcacccatagaagttgacaaactgaatcgaccaatgttgtgtgtgttctgactgctcca

SEQ ID NO: 38055 - DNA, 120 bp, synthetic construct
  source 1..120: mol_type = other DNA
tctatagtgcttttgagcttacaaagggtcttcacatgcattagcttattcaatgttctcaacaacactgggagagttacacaggcctaaattaggagaaacctgggaggggaggttaga

SEQ ID NO: 38056 - DNA, 120 bp, synthetic construct
  source 1..120: mol_type = other DNA
aataataacaattaatacctttcacaatccttctttgaattcagtctccacactggcaacccaactcccagatccctttaccctccaaaccagagttgaatctgcacttgtgggatcact

SEQ ID NO: 38057 - DNA, 120 bp, synthetic construct
  source 1..120: mol_type = other DNA
agatatgtcactgatactatttatctgtgatcttcacattataaagatcatgcccaagaagccagcagaggaaggaaatgattcggaggaagtgccagaagcatctggcccacaaaatga

SEQ ID NO: 38058 - DNA, 120 bp, synthetic construct
  source 1..120: mol_type = other DNA
tttgtcactatgaaagtgtaatttttctcaatttggttttctaaatggttattatcggtatgtagtaaacctatctatgattgtatataatattttgttacctgtctgggtgcagcttcc

SEQ ID NO: 38059 - DNA, 120 bp, synthetic construct
  source 1..120: mol_type = other DNA
gcctttggtttggtctctactctagaatgtcgcatgctggacacctgtggacatcacaggactgcagatcctagtctgtaacttgggatagtatggtgtctcagacatgacccccaagtc

SEQ ID NO: 38060 - DNA, 120 bp, synthetic construct
  source 1..120: mol_type = other DNA
cacagagggagtatgggggaaggcagataccgagcccaaccagctgtcccagggcagtctctctttcccactttccaccctctctgtgcgtatcttgcccatgtgttggttagcgggcat

SEQ ID NO: 38061 - DNA, 120 bp, synthetic construct
  source 1..120: mol_type = other DNA
tttcaaatcaagggtatggagtccactggctgcagaaggggctgctggccacctatagaacaccaaggatatggaagccactttctgtgtaggtgcctgcgaacagtttccaccaggttg

SEQ ID NO: 38062 - DNA, 120 bp, synthetic construct
  source 1..120: mol_type = other DNA
aatgtagatgcgatgtacactataataatgaaacgaacgcaaaggaaaactcactaagtgcttactctaggccaggcactgagcaaagcaacttcaggtagatgatctgaagaggaagct

SEQ ID NO: 38063 - DNA, 120 bp, synthetic construct
  source 1..120: mol_type = other DNA
ctagaggaaataaaaggaatacttctcacccttatcccagatcagagagtccaggcacagcaaagctctggtggacacatgctcattgatttgttttcttcaataaaggtttattggtgc

SEQ ID NO: 38064 - DNA, 120 bp, synthetic construct
  source 1..120: mol_type = other DNA
gtgtgtgtgtgtgtgtgtgtgtgtctttgtctggttttggtatcaggaaaacactcatagaatgagttcagaagtattccctcctcctctaccttttgaagtactttgagtaggattggt

SEQ ID NO: 38065 - DNA, 120 bp, synthetic construct
  source 1..120: mol_type = other DNA
agattgctcaacctcactaatcatcagggaaatgcaagtccaaactaccgtgagatatcctctcaccccagttagaatggccattatgaaaaggacaaaaagataagttttggcgaggat

SEQ ID NO: 38066 - DNA, 120 bp, synthetic construct
  source 1..120: mol_type = other DNA
aatccctttcgggaggactccttgctccagccccctgagccctggcctttggccaatgaggcagggctcatgggattgcttttgattcggaggtccgggagggagtggatgattgggctt

SEQ ID NO: 38067 - DNA, 120 bp, synthetic construct
  source 1..120: mol_type = other DNA
ttttgggctccacacaggttcaagcagtgcctctgcatcttctccctgtagctctgcctgccagcccaaagggaactcctgtgtctaggatctcagaggtccacagcaggaatgtggtgc

SEQ ID NO: 38068 - DNA, 120 bp, synthetic construct
  source 1..120: mol_type = other DNA
cttatcctcagttttgcaagttaggaatctgaggttgagggaagctaagtcatttatccatggtcacgggaaagaaagtggcagagcctggattcagagtaaaatttgtctgactcttaa

SEQ ID NO: 38069 - DNA, 120 bp, synthetic construct
  source 1..120: mol_type = other DNA
aacctcattgagaaatgggcaaaagatgtgaacagccatttctccccccaaaaaaatacaggcagaagtaaatataggcagaagtaaaatgataccacgtggaaactaggattgaccaag

SEQ ID NO: 38070 - DNA, 120 bp, synthetic construct
  source 1..120: mol_type = other DNA
taaccaaagtgatctccatgttcgacatttgacatccctgtcaaaataccaatgacagtccggatagaaaaaaaaaatcctagatttgtatggagccacaaaagatgctgatagccaaac

SEQ ID NO: 38071 - DNA, 120 bp, synthetic construct
  source 1..120: mol_type = other DNA
tgtaacaaccactccaaattaaaaaatcaactttttcttgaatccctacacacttgtttaatctcagctgagggagacatggtataaagctacgaggggctgacctcgtagcctttctcg

SEQ ID NO: 38072 - DNA, 120 bp, synthetic construct
  source 1..120: mol_type = other DNA
atgtttccctctaaaccaaactttctagcaggctttcttttcttcttcaccttcgccgccgactcctcctcctcctccttcatcttcttcctcttcttcttcttgtttgcaaatgtactt

SEQ ID NO: 38073 - DNA, 120 bp, synthetic construct
  source 1..120: mol_type = other DNA
taattttaggtcttatgcgacattaccgcaaacgtgatttcgttcccttctatgtggatcatgtcaggggtacatgacatccataagttgtattactggtggtgctcaccttgatcactt

SEQ ID NO: 38074 - DNA, 120 bp, synthetic construct
  source 1..120: mol_type = other DNA
ggggaatgatatttaccaaccagtatctcggtgtgtgttcattattaatggcgtttcattgctgctaaggctctctctatggagagggttaggaaataatgtatgtatacacccatgcct

SEQ ID NO: 38075 - DNA, 120 bp, synthetic construct
  source 1..120: mol_type = other DNA
tttgatttgattttcgtatgtggggagagataggggtctagttgcatttttctgcatatgggtggtccaggttttccagcacgatttatcgaagagactgtcctttctccagtatatgtt

SEQ ID NO: 38076 - DNA, 120 bp, synthetic construct
  source 1..120: mol_type = other DNA
tgaacaacagtggtgacagtgggcatccttgtcgtattccagttcttcaaggaaaggctttcagtttttccacattcggtatgatactagctgtcagtctgttgcatatggcttttatta

SEQ ID NO: 38077 - DNA, 120 bp, synthetic construct
  source 1..120: mol_type = other DNA
atgaacttccctctgagtactgcttttgccatatcccagaggttttggtatgttgtgtttccattgccattcgtttcaatttccttcttaatttctgcattgacccactggtcattcagg

SEQ ID NO: 38078 - DNA, 120 bp, synthetic construct
  source 1..120: mol_type = other DNA
tgtgccacacactccaaaaggttaccgcatttaagagtgctaactctatggagtaggtagtataacagaattttacagacgaggaaactgaagcacagaggcgttaaatcacttgcctaa

SEQ ID NO: 38079 - DNA, 120 bp, synthetic construct
  source 1..120: mol_type = other DNA
aaagaagatgtggcatatatacaccacagaatactactcagccataaagtggaacgaaataatggcctctgcagcaacttggatggagctgaaagccactactgtaagtgaagtaactca

SEQ ID NO: 38080 - DNA, 120 bp, synthetic construct
  source 1..120: mol_type = other DNA
tgtagcaggggatgcttacttaaaaaacgcatggccacttgatggcaaaaggctgtcagatattagtgtctctggttctctgatatattaaagaaggaactgagtcctgaccaaagatag

SEQ ID NO: 38081 - DNA, 120 bp, synthetic construct
  source 1..120: mol_type = other DNA
caatgcatgatcaaaagatgctgaggtagtaaatttctgggggttcataagattactttatgtagctgtatgtgagatcctagggcacgtttaacttaacaagaggaccgtagacccggt

SEQ ID NO: 38082 - DNA, 120 bp, synthetic construct
  source 1..120: mol_type = other DNA
tccacaccactacaggccaaagtgctctggggtcccaggtaaacttgaagggatgcctaggacacaaagactgcaattcctaggcaactcctaggaaattaaacgatatgcacataaatg

SEQ ID NO: 38083 - DNA, 120 bp, synthetic construct
  source 1..120: mol_type = other DNA
gtgaacccaattcgacaatacactagaaagatctttaatcatgaccaggaaggatttatccctgggatgcaaagatggttcaacatgcacaaataaatcagtgtgacacatcataccaac

SEQ ID NO: 38084 - DNA, 120 bp, synthetic construct
  source 1..120: mol_type = other DNA
tcatcattaaccatttcagggcatgtttaaatgatacaccctttttatacagacagccacagttatcactaccatagcgaaaacatggaaaagcctttacaaatatccactctgctcact

SEQ ID NO: 38085 - DNA, 120 bp, synthetic construct
  source 1..120: mol_type = other DNA
ttgagagagtattttcgcagtcagttgcatatttgtagtaggattttattgagtttgttatctgaagctggggacagaacacgcaaacagacggatggtgctcagaaattcccctcctaa

SEQ ID NO: 38086 - DNA, 120 bp, synthetic construct
  source 1..120: mol_type = other DNA
gttgttgtcacaacagttaatagtttctgtaaagtgtcctctacttctagctgtgttcaacgctgttgcttctccaaaaccacgttttctggggtttggctttgttttgtgagacagaga

SEQ ID NO: 38087 - DNA, 120 bp, synthetic construct
  source 1..120: mol_type = other DNA
accatcaagagctcagcactattcttgattgctgcatagctacaaagaagctgcagcgagtcagcactgagaccgctttccacagggccactggtcctcataccatagtcagctgtgctc

SEQ ID NO: 38088 - DNA, 120 bp, synthetic construct
  source 1..120: mol_type = other DNA
acctattacattacggcagagttttatagtcctctaatttatccattctgctgatgatgggcaggcatttggatagtttccagcccttggctatgaacatgcttgtacaggtctcttgaa

SEQ ID NO: 38089 - DNA, 120 bp, synthetic construct
  source 1..120: mol_type = other DNA
actacaaaataatttattcgaacacacagctacagcgcgagactcctatgtacaagcacattgacgctcctgactaccctcaactagaggacccttttcttcccccttgccttgcagacc

SEQ ID NO: 38090 - DNA, 120 bp, synthetic construct
  source 1..120: mol_type = other DNA
tcaaccccagaggtaccacagacatagactaattttttccatctgtgcagtttagggtagatttggcatacgctcaataccaggcaagaaagaaactatggtttaggctgcttttaaagt

SEQ ID NO: 38091 - DNA, 120 bp, synthetic construct
  source 1..120: mol_type = other DNA
ttaactttgtcctattaccaaaaggtgtcaaagctgttactaaattgtctgtgtcagtatcggaaaccccgacagcactggagaattcctcatggtccttccagaccatggtcacagtga

SEQ ID NO: 38092 - DNA, 120 bp, synthetic construct
  source 1..120: mol_type = other DNA
aatctcatgctgtcacaacagagccctcccccgcactgcagagtcctgcttttctcatttgtaaaatgaggttagtaatagctgcttttcctgcccacctataagttttcatgagtttca

SEQ ID NO: 38093 - DNA, 120 bp, synthetic construct
  source 1..120: mol_type = other DNA
aagcatgtgtagaaagtttactatgatgatgcagagacattgtacagaatccagtcccttgactctcaggtccccagaacactcacttcacgattttgttgacctcttctgtcaacttaa

SEQ ID NO: 38094 - DNA, 120 bp, synthetic construct
  source 1..120: mol_type = other DNA
attcgtcagtgaggcagaaattgtggtgtccttgtgtaagttcacagtttatactttaccattatactgtgctccaaattatctgatatttactttcaaagcatgtgtaggaagtttact

SEQ ID NO: 38095 - DNA, 120 bp, synthetic construct
  source 1..120: mol_type = other DNA
tcaggaaaggaggtgcctgctctcctttgtcaatggaagcaggaaaacttgccttccttgttggaaatgagtaaaacttcaaaaaaggagttgtacagcaaaatcaaccttacatctcaa

SEQ ID NO: 38096 - DNA, 120 bp, synthetic construct
  source 1..120: mol_type = other DNA
aacaggctctaaggcagtgactaaacaataaataatttgtaataaaaagggctgagatataaatgagtcaataaaattaagaaaaaataaaacaggctctaaggtagtgactgaacaata

SEQ ID NO: 38097 - DNA, 120 bp, synthetic construct
  source 1..120: mol_type = other DNA
ttcttaccggacccttgaacctcaatgatccagatgcaaaatgcagattccccaaaatttttgtaaatacagatgacacttatgaagagctccatttaatcgtttataaggtaacaactg

SEQ ID NO: 38098 - DNA, 120 bp, synthetic construct
  source 1..120: mol_type = other DNA
ggagctcatgggcaagtcactaaatgcctttaaatttcagtttcttcatctcaagaggaaagtttgaactagatctttggtgagcaccctcacatctctaaatgtgggtttcagactctg

SEQ ID NO: 38099 - DNA, 120 bp, synthetic construct
  source 1..120: mol_type = other DNA
caactgatgcaacgtaacttttcttttgtttgttaacatggtggattattttgattgactttttgagacttaatcaggcttgtatttctggaaacaaccccccttggacatggggtacat

SEQ ID NO: 38100 - DNA, 120 bp, synthetic construct
  source 1..120: mol_type = other DNA
ccctactgcccatcttagagaatgcgtgtttcatagaactgtttaaaaaataaatccttttaaattgcccatctgcttaagctatgtttgtggaacattaggactaagtcatgtctgaca

SEQ ID NO: 38101 - DNA, 120 bp, synthetic construct
  source 1..120: mol_type = other DNA
cattttaaaagatgcagtctccaaatggtagggcatgaaggtccagtgatcatcgaaaccctccttcaccaactggaaataggctttgaaaggtcttgcagtactgagtcatattgttac

SEQ ID NO: 38102 - DNA, 120 bp, synthetic construct
  source 1..120: mol_type = other DNA
agatcaggaaactgaggcacagagaggttaaagaacttgttcgtggtcacccagctagcaaatgacaccactctaagatttggaaagcccagaattaagtagcttaataactgtgctttc

SEQ ID NO: 38103 - DNA, 120 bp, synthetic construct
  source 1..120: mol_type = other DNA
gctaagaaagctttctgaccacttgtggctgtcattggactgatttgcccagatgacatcaattgggaatttgaggcatgacctataaagatcagttgcttgcaagagtctcaggaaaat

SEQ ID NO: 38104 - DNA, 120 bp, synthetic construct
  source 1..120: mol_type = other DNA
gtgaatttctacagtatgtttgccaaaatgaattatatctagaatacgcttaacaatatattctggaggcagctttcatttgaaattaggttcaccttctgagagtatgaaaaagttaat

SEQ ID NO: 38105 - DNA, 120 bp, synthetic construct
  source 1..120: mol_type = other DNA
cttaatatttaaaaaaaagagaataatgtcaaacaaacagagaaaaataatgaaaacacacttgaaactgggtgaaaaacttgaatggatcctacacaaaagaatataaacaagtgaccg

SEQ ID NO: 38106 - DNA, 120 bp, synthetic construct
  source 1..120: mol_type = other DNA
acaggcatgagccaccatgcccagcctgaaagtggtggtttcaaactgggttctttagggctccagggttccttggaaatatagaactgctgggcacacacctatactcccagctacttg

SEQ ID NO: 38107 - DNA, 120 bp, synthetic construct
  source 1..120: mol_type = other DNA
taacgatcagctcatctggtaggtacaccccgaggcatggtattaaaagaagaaattaagataataaaaacagcagtgactggattgatgacaggttgtcaaacaggaacttgcagcggg

SEQ ID NO: 38108 - DNA, 120 bp, synthetic construct
  source 1..120: mol_type = other DNA
ggagctgaaaataaacttattacgctggaagaacacccattttgagttttaccataatcagaacttccaatatcttttccaagaaacatttaagaggtttgcacatgcactcgtgtacac

SEQ ID NO: 38109 - DNA, 120 bp, synthetic construct
  source 1..120: mol_type = other DNA
ccgtatgtagaagagtccatttctatttaggtaagttcctttagtccttttattactgggcactcttaattacatgtagcttgaaatatgtccagtttgatcagtgaactgaaaatgtca

SEQ ID NO: 38110 - DNA, 120 bp, synthetic construct
  source 1..120: mol_type = other DNA
ctggatgatcctcttcctgctcgatacctgcagtgagattggagccatatttctgagttctagctctgggctgttcctggctacatagagttgcttttgtctgtcccagcttgtgcatcc

SEQ ID NO: 38111 - DNA, 120 bp, synthetic construct
  source 1..120: mol_type = other DNA
tgtaagttgcatgtgtcaggggagtcatctgtcttcagtgagagtgggaaggactttttgcccaggtcaggattactccagcaggaggccagtcacactggggagaagtcaaacagcaaa

SEQ ID NO: 38112 - DNA, 120 bp, synthetic construct
  source 1..120: mol_type = other DNA
tggtctatataggcagtgatgtagtctgtgaaggcaattcctgccacaggaaggcataagaaaatagcagctagagaaaggaagtagactgtgggtacacaggaacctgaaatctggaca

SEQ ID NO: 38113 - DNA, 120 bp, synthetic construct
  source 1..120: mol_type = other DNA
aggccttctgaaagtaaaggttcttcctttaactgttccctgttctttcttctattccttctttgtcctactcaaagggataagtttgttgaaattgacctaaagccagtctgcaaacac

SEQ ID NO: 38114 - DNA, 120 bp, synthetic construct
  source 1..120: mol_type = other DNA
tgccctgtgctgtttcagttccacccaccttggaggttactcaacagcccgtgagggcagagaaccaggtgaatgtcacctgccaggtgaggaagttctacccccagagactacagctga

SEQ ID NO: 38115 - DNA, 120 bp, synthetic construct
  source 1..120: mol_type = other DNA
acagctttgtatagcattgggcagaaagggacacaggtctcctgcttctggagtgcacgatctagtgggggacaaggtgaacacactcattgcacacaaggcacagaaggacacattcca

SEQ ID NO: 38116 - DNA, 120 bp, synthetic construct
  source 1..120: mol_type = other DNA
gcctcatgtgagcacgttctatcttcattttctcttttaactgctttatcacttccaaagcctaccaagacaaaatcgagaatgcaatttcttctactatattatttcataaggttttca

SEQ ID NO: 38117 - DNA, 120 bp, synthetic construct
  source 1..120: mol_type = other DNA
ccaacagatggttttcacaagctaggtatgctaacatacacatcataaagaaaatgtgaaggtggggaagagaacaccacctgttaattgttttcagaaactaatttatgaaaaacctca

SEQ ID NO: 38118 - DNA, 120 bp, synthetic construct
  source 1..120: mol_type = other DNA
caaaggcatttttcctgtttcttccctgtcatcccccacctccaaaggtagccactattcccaatcattcaatatagtcttttattttgactagcttctttagtagcattatgtctatca

SEQ ID NO: 38119 - DNA, 120 bp, synthetic construct
  source 1..120: mol_type = other DNA
aacagcattgtgtctgcatctgcagggagctccaggcatatctgtgaatctagggccaatttgtattattgatttcacatcttgggggcatttatatgaccttgaggtaccataatacta

SEQ ID NO: 38120 - DNA, 120 bp, synthetic construct
  source 1..120: mol_type = other DNA
gaacccagggcaggcaaaactcatcatgaacttttgtaaactgaagctatattttgaggaaagatgaaacaaaaataaacactatgattctaacatgccttatggaaggcacatgagata

SEQ ID NO: 38121 - DNA, 120 bp, synthetic construct
  source 1..120: mol_type = other DNA
gatatttttataactcagtgaaataactgaaaagacaatgattgccctcagaattaagaacacaaaagacaagcattgaaaacatcaggaattatcttccaaagctgctcaggactggcc

SEQ ID NO: 38122 - DNA, 120 bp, synthetic construct
  source 1..120: mol_type = other DNA
gaagaatcctgtcttctctttggccatctcaaattgaaatcctaaactattcctgcagaactgcctggctggcacccacaagcaatacctcttgttccagcacgaccaagggagccagcc

SEQ ID NO: 38123 - DNA, 120 bp, synthetic construct
  source 1..120: mol_type = other DNA
ctggactaccttagatttaagtgacttctggaacattattctccttggcttctggaacactattcagtatgtggaaagcccaaatctcatttgtgattggataaattagttctgtcaata

SEQ ID NO: 38124 - DNA, 120 bp, synthetic construct
  source 1..120: mol_type = other DNA
ctttgagaagctgccatctgagctgagtctgagagcttggcctgcagagctgggggtgggtggacaggccaggtggagggaagataatgagcgcagatagaaggagagtgggcagatgcc

SEQ ID NO: 38125 - DNA, 120 bp, synthetic construct
  source 1..120: mol_type = other DNA
catccagggtttgttactacagtcaaaagaataaataaatcaatgaagaaataccttcattgtctgtggttttcatgcagatatactcatggaggttgtatctctccaaaaacagacaaa

SEQ ID NO: 38126 - DNA, 120 bp, synthetic construct
  source 1..120: mol_type = other DNA
actcaaaaaactaaaactagaattactatatgatccagcaatcccacttccttgtatatatccaaaggaatttaagtcaatatgctgaagagatatctccaggctcatgttcattgcagc

SEQ ID NO: 38127 - DNA, 120 bp, synthetic construct
  source 1..120: mol_type = other DNA
taagtacttccctttttaaagaaaaaaattatatgaattctacaaaattatggcagaaaatttaagaagagcagatgcttcccaactcattctaaagggccagcattaccctgattctga

SEQ ID NO: 38128 - DNA, 120 bp, synthetic construct
  source 1..120: mol_type = other DNA
gctgacatcatacttttttgcaccaacaactccagttcttctgacacaaaggaccatcttcctagtgccataatttatcttagaccccaaaactcacagaggcacacatcatatctctaa

SEQ ID NO: 38129 - DNA, 120 bp, synthetic construct
  source 1..120: mol_type = other DNA
agagtttctttgaaaagcacagatgataataaatggaaatattgccttttatactatacaataatatacacatgcaattcactggaaaaagtatacttgttactatgatttgaggatact

SEQ ID NO: 38130 - DNA, 120 bp, synthetic construct
  source 1..120: mol_type = other DNA
cgagtcaagaccaaattcctagtcacagttatgttctgtttccagtattaccttctcacttattcattttgttaaagtggagccaaaatagaagtgggtgtcacacatcaagaaagactg

SEQ ID NO: 38131 - DNA, 120 bp, synthetic construct
  source 1..120: mol_type = other DNA
acacttcagagctgatgggagcctgggacaagagggagtcctggtcctcctgagttggcagggcagtagctccaaagacgcaactgaagttgtccaggtcacagttaccaaatgaggtcc

SEQ ID NO: 38132 - DNA, 120 bp, synthetic construct
  source 1..120: mol_type = other DNA
caaagttactggatttttcccccaagaaaaccagagagtgaattgtgatatcctgtgtgatttttagactgactattgccatagtgcttaggtcgtctccaggtgcccagagactcaatc

SEQ ID NO: 38133 - DNA, 120 bp, synthetic construct
  source 1..120: mol_type = other DNA
ttcttgagatggtggctattcctgttaccatgatttgaacattacacattttatgcttatatcagaatttcaggccaggtgcagtgactaatgtctacaatctgagcactttgggaggct

SEQ ID NO: 38134 - DNA, 120 bp, synthetic construct
  source 1..120: mol_type = other DNA
tcagatgatggtctgcatgcaaggtgctgcctgatgaagactcagatcattcaggggccactccattttaggctcagtcctttcacccttgcctgtgtgattggtaccactctcacacct

SEQ ID NO: 38135 - DNA, 120 bp, synthetic construct
  source 1..120: mol_type = other DNA
atgcacggccactggacgctcacgtacaactcacgctcataaccgaaggctaaaaagagttcacgaagattgctcatctggctcaggtaaggggcaaactttcccgttttattgagagag

SEQ ID NO: 38136 - DNA, 120 bp, synthetic construct
  source 1..120: mol_type = other DNA
cccgaaagccacctgagtcacctcacctggggcgaaccttctgggccaccagtgtatcaagtcccctcaggacagcttgcaaggtctccagatgaggtgtcttcatcagggatcccagag

SEQ ID NO: 38137 - DNA, 120 bp, synthetic construct
  source 1..120: mol_type = other DNA
atatcagatatccatattaagttcatgaatcaagaaattgacagtgttagggatagggtgggaatcaagaatgcattcattcaagaccgggcaaggtggctcactcctgtaatcccagca

SEQ ID NO: 38138 - DNA, 120 bp, synthetic construct
  source 1..120: mol_type = other DNA
gggacactacctagattagacccggttacactaatgtttcctatgcatggagataagttacaagtaatgaaatcaacaatagtcataggccacccatttgcatctatagcttctgctcag

SEQ ID NO: 38139 - DNA, 120 bp, synthetic construct
  source 1..120: mol_type = other DNA
accactttaaaaatgaggaatatagcaacatgccttagattcctcgtgagggagagctgagatcttggatgaatggtaccagtccctgctgtgccttgtgcatgctcaatcaacagagac

SEQ ID NO: 38140 - DNA, 120 bp, synthetic construct
  source 1..120: mol_type = other DNA
gcgagcccatcatttttgggagtaaacacgctttcccttgtagtagaggccaagactgtatctgcctcctctgccctcaaagacaatgttgtgtttgaagagtctgcactgtctcttttg

SEQ ID NO: 38141 - DNA, 120 bp, synthetic construct
  source 1..120: mol_type = other DNA
gcaaacttgttctcttcaacatccgtgcatctgcctgcattcccccagacaacaaggggcagttcattgcccgattcacctctcagttcctcaagctggactatttccagaatctgtcta

SEQ ID NO: 38142 - DNA, 120 bp, synthetic construct
  source 1..120: mol_type = other DNA
aaacatccaggttttaggttttctcatttgggtaaatgccaaggagcgtggctgctggaccatgtgcctaggttgtgtttgataatgattttttccttgacaatctcatgtagacagaga

SEQ ID NO: 38143 - DNA, 120 bp, synthetic construct
  source 1..120: mol_type = other DNA
aatctatgctgaacctgttggccaccaagtgtgcatattcagcaggtcattggagcagctatgaaaattcacagggtgggggatgcatgcatgtatggtaagcaaatatacatgtcacat

SEQ ID NO: 38144 - DNA, 120 bp, synthetic construct
  source 1..120: mol_type = other DNA
gttgaaaactcaatcaccgttaactgggtggaagttcaggatccagttggatgtcatttttggattggaagttggtaattgagaagggggttgtggtgagaaaagtcaataaaactcctg

SEQ ID NO: 38145 - DNA, 120 bp, synthetic construct
  source 1..120: mol_type = other DNA
ggctagcagtgaaagaccctgagaagaaggtgctttccacgtggattggctcactgttcttgcccagtaatgttccagacccttggtttccacctagtgtgtattaacccactgaacagc

SEQ ID NO: 38146 - DNA, 120 bp, synthetic construct
  source 1..120: mol_type = other DNA
tcaagcctccactctagacattcaaattcccattttccactctacaggacacaggtccccaaagtcccatcgaatccatggcaacacttcccccaagtcctgcccctgcttgatcacctt

SEQ ID NO: 38147 - DNA, 120 bp, synthetic construct
  source 1..120: mol_type = other DNA
ttgagggagctgaatctcacttcatcggccaggctagagtgcagtggtgtcatttcggctcactgttgcctcggcctccaagattcaagcaattctcatgcttcagccttccacatagct

SEQ ID NO: 38148 - DNA, 120 bp, synthetic construct
  source 1..120: mol_type = other DNA
tcacatctattcccatttctttgcttactacataataaacattttttttacagagtcttcttctctgttaagtagaccacatatgttgttgccacacaagatgagcaacctggttctatg

SEQ ID NO: 38149 - DNA, 120 bp, synthetic construct
  source 1..120: mol_type = other DNA
atttctgcttctagggaaccaagcagttcaggttaaggaaggtcaggaagctattttaactataaagcatttttaaaatattgatgtggccaaagatctcccaacaacactattctcagg

SEQ ID NO: 38150 - DNA, 120 bp, synthetic construct
  source 1..120: mol_type = other DNA
ctcccatgggacctacagtcagccgatgtagcatggtgacagtgcagcctacgacagagcagagctatatcctgtcttttttttctttttttcatatgaacactttgaagctttgatttt

SEQ ID NO: 38151 - DNA, 120 bp, synthetic construct
  source 1..120: mol_type = other DNA
tgtgatgatgataatgaagatcagggggacaaccagctggagttgatcaaggatgatgaaaaaggggctgaggaaggagaggatgacagagacagggcgaatggccaggatgactcttaa

SEQ ID NO: 38152 - DNA, 120 bp, synthetic construct
  source 1..120: mol_type = other DNA
agagtggctgtctatggaaaggagagtggaagtgaatcatggtaataaatggaaatagatacagatatgaataggtagacatacacacatatagctgcaagaaacggggttgtcgtggac

SEQ ID NO: 38153 - DNA, 120 bp, synthetic construct
  source 1..120: mol_type = other DNA
aaattgttttgaaagactcatacttggtcataaggatcaaaaccaaaggggcatccatgcaatgttggatagattcatcctccacccactcaataacccccaacatgttcagcaagtctt

SEQ ID NO: 38154 - DNA, 120 bp, synthetic construct
  source 1..120: mol_type = other DNA
gcaacgaagtgagactcagctccctcaacaccaagaagaattatgccacccaggtaatcactggatatatgaagattactattgtgttttcttaggaactgtcatctctgtctttgtaaa

SEQ ID NO: 38155 - DNA, 120 bp, synthetic construct
  source 1..120: mol_type = other DNA
cccaagacccctgtcagaaatgaagaaataaaagtaaaaacaaacaagataactttttttttttctgagatggattttcactatgatcgtccaggctagagtgcagttgtgacatctcag

SEQ ID NO: 38156 - DNA, 120 bp, synthetic construct
  source 1..120: mol_type = other DNA
tccaagtgaaggatcctgctgagtactcaggggctggtgttgctgtcagggatgttagccaagagcctcagcttcctgtaaaatgaggatgatgatgtccaacagcttatgggacctagg

SEQ ID NO: 38157 - DNA, 120 bp, synthetic construct
  source 1..120: mol_type = other DNA
aacgtggcacttggtagcaaatgctgttgaccacatgatgcatggaaatgcttatcatcagtatagccactaaattgctaacgtggggacgtcaacagtagctcactaccaataatacaa

SEQ ID NO: 38158 - DNA, 120 bp, synthetic construct
  source 1..120: mol_type = other DNA
gaaggtagatgagaactctgcagtttctgcttagtttttctgtgaatctaaaactgctataaagaaaaaaataggctgggcgtggtggctcacatctatagtcgtagcattttgggaagc

SEQ ID NO: 38159 - DNA, 120 bp, synthetic construct
  source 1..120: mol_type = other DNA
ttggcctcccaaagtaccgggattatagttgtgagcctccactccagccttattatcgaatatttcagtgagaagctttgaaagctatgtgacactgttatgcatcattcgcaagataga

SEQ ID NO: 38160 - DNA, 120 bp, synthetic construct
  source 1..120: mol_type = other DNA
agaattagggatagggtgaaagtccaggactcattcagtgattcactccataaacatggagttttactaatatgtgtccttcaaagtcctgagtgtgagagagggaagggttgaatctct

SEQ ID NO: 38161 - DNA, 120 bp, synthetic construct
  source 1..120: mol_type = other DNA
tattctttcagattctgcatgtcagtgaaactactgatgccagctcatctaaatgggccctgcaaggcactaacgcaaagaatgcagtttctagatcctgttgacttcttccctcttacc

SEQ ID NO: 38162 - DNA, 120 bp, synthetic construct
  source 1..120: mol_type = other DNA
caaaccccacaactactgatgaaggcttcacccactgacagtgagaaggacgctgatttgattctgatcatgaagttttgctggttgtcttgcaaggaatacgttttatcctgttatgtt

SEQ ID NO: 38163 - DNA, 120 bp, synthetic construct
  source 1..120: mol_type = other DNA
gaaggataatgaagttaatattagtgccattggatcagtaaaatcttacctgtgtgataacctgcccagtaactgagttctcctcccattggagatttctccagagatgctccagaaagg

SEQ ID NO: 38164 - DNA, 120 bp, synthetic construct
  source 1..120: mol_type = other DNA
ctagcaatcattctgccatcctctcctgctacagcagcccgggcatttttctccttatcatattgaacgaaggcaaagcccttatgaacagagcagcccgcaattttgccatacttggaa

SEQ ID NO: 38165 - DNA, 120 bp, synthetic construct
  source 1..120: mol_type = other DNA
gagattcaacccttccctatctcacactcaggactgtgaaggacacatattaataaaaccccattttgtttgtgaagggaatcagtgaatgagtcctgggcttccaccccatccctaaat

SEQ ID NO: 38166 - DNA, 120 bp, synthetic construct
  source 1..120: mol_type = other DNA
agtcagtcggtctggggtggtgacagtacagcctacgatggcacagagctatatcctgtcctttttttttttcatatgaacaatttgaagctttgaatgttttcctctaaatgcagttct

SEQ ID NO: 38167 - DNA, 120 bp, synthetic construct
  source 1..120: mol_type = other DNA
ggccgatgaagtgagattcagctccctcaacaccaaaaagacttatgccacctaggtgatcattggatatatgaagatttctattgtgttttcttagggactgtcatctctgtctctgaa

SEQ ID NO: 38168 - DNA, 120 bp, synthetic construct
  source 1..120: mol_type = other DNA
cagagcagtgactttggccttgggagaagataagattgcatgggcttggcctgagagtgatgccttttctctgggtttgtcctctggaagttttccctgcagattcgtgaagatgagcat

SEQ ID NO: 38169 - DNA, 120 bp, synthetic construct
  source 1..120: mol_type = other DNA
gatgatacaggcttgtcagggacgcctgcagcccgcccaccgtagctgatgttgcaggatcctgtctgggtttgtcctttatgcctgaatctccactgggctcctgtggcccagggatgt

SEQ ID NO: 38170 - DNA, 120 bp, synthetic construct
  source 1..120: mol_type = other DNA
taatgggcacccaagtgaaggatcctgctgaggattcaggggctggtattgctgtcagggatcttaaccaagagcctcaggtccctgtaaaatgaggatgatgtccaacggcttatagga

SEQ ID NO: 38171 - DNA, 120 bp, synthetic construct
  source 1..120: mol_type = other DNA
acatgacattctggaaaaggcaaatctatggacacagtagaaagcccaggggttgcaaggagtcagggtagagtgggatggatagaaagagaacaggtgatttttttagggcactgaagc

SEQ ID NO: 38172 - DNA, 120 bp, synthetic construct
  source 1..120: mol_type = other DNA
tctgaggatagtcagcacctggggtgtgggaatggagactctgttccttcagtgcagtcccaatcgaggctcagtccttcaccatcaccgaggtgattggatcaagtccatgaactctaa

SEQ ID NO: 38173 - DNA, 120 bp, synthetic construct
  source 1..120: mol_type = other DNA
aacagcacatcaaccccttccagcacagattttaatgactccagatgaggcgacttcatcagggaccctagagggaggcgggtgaaaggccaggcctgcaccattgttttcagggtttca

SEQ ID NO: 38174 - DNA, 120 bp, synthetic construct
  source 1..120: mol_type = other DNA
aatttgagggatgaagtgaatactatatttagaggaaaaatcaaaacctacatctgttaaattgaaaaaacagacaggaaattctctgtgccactttgggctgtgtgtcaccatccctga

SEQ ID NO: 38175 - DNA, 120 bp, synthetic construct
  source 1..120: mol_type = other DNA
atttctaagagtcaaaatctctgttctggccctgttgcccttctctggtcctcaaccgggtctgattccaggtcagattcatgcacatcgtgtgctaaagtaggggcttcctctctttct

SEQ ID NO: 38176 - DNA, 120 bp, synthetic construct
  source 1..120: mol_type = other DNA
ctgtgacttcctagctgaccacacacacacataaacatgtaaacaccatgaggtcattgtagggatgcccactgggcctgcggttctcccatagcacccagttcataaaagcctcccttt

SEQ ID NO: 38177 - DNA, 120 bp, synthetic construct
  source 1..120: mol_type = other DNA
agatcagattctttactcagggacagaatgtaagccaatcataagaccttccacaggtggttaatttggactcctgaaaaatgtgacctgtaagttttcactggcaatatgcaggtgcac

SEQ ID NO: 38178 - DNA, 120 bp, synthetic construct
  source 1..120: mol_type = other DNA
tgaggaagcaggtcagagagcaagctgacctcatgatgaatgctgaatgcactgcaagcttggtttatgtctgtttctccccctcccttcttcactgattaaatttataaagtttataag

SEQ ID NO: 38179 - DNA, 120 bp, synthetic construct
  source 1..120: mol_type = other DNA
aaaatcttaaccaaagaggatctttgaccttaattttaaaccaatcacatcctcattgtaactcttccacccaaacggagacatgggtgtggaggtgcatgcctgtaatcccagctacat

SEQ ID NO: 38180 - DNA, 120 bp, synthetic construct
  source 1..120: mol_type = other DNA
gacttggactctccattcctctgcctgtactacccccagatgctttatataaaaaagatcagtaatatcaaagagcacctggagcacctgctcaggtaagaaatgatggtgagctttctc

SEQ ID NO: 38181 - DNA, 120 bp, synthetic construct
  source 1..120: mol_type = other DNA
gacattagtcactgcacctggcctgaaattctgatataagcataaaatgtgtaatgttcaaatcatggtaacaggaatagccaccatctcaagaatttatcatttctttgtgttagcaac

SEQ ID NO: 38182 - DNA, 120 bp, synthetic construct
  source 1..120: mol_type = other DNA
ctgtaagaagctgaaaattttgggaatgcccttccgcaatatcagaagcatcctgaaaatggtgaacctagactgtatccaggaggtggaagtgaattgcaagtgggtactgcccatcct

SEQ ID NO: 38183 - DNA, 120 bp, synthetic construct
  source 1..120: mol_type = other DNA
agctggttattaaaaagtgcctctcacctttccttgctctcttttgcttcctctctcgccatatgatctctgcacaccctggttccttttcaccttctgctgcaagtggaagcagcctca

SEQ ID NO: 38184 - DNA, 120 bp, synthetic construct
  source 1..120: mol_type = other DNA
ctgagatttctgggtgggagaagccccttcaggacgcagaaccaacaggtcatgagtcccgccctcccttggcctgcagaggctgtggggcccaagccttcttttgggtctgaagtgccc

SEQ ID NO: 38185 - DNA, 120 bp, synthetic construct
  source 1..120: mol_type = other DNA
ggatgttcataccatctgataaaggccaaaggataatagggctgtaagatagaagaaacattgcctcaaggctgcttgtccccattatccgaggctgcctcctctcagaccccattctac

SEQ ID NO: 38186 - DNA, 120 bp, synthetic construct
  source 1..120: mol_type = other DNA
tgctcttgaatgtgagcgatatttagctcccaagggatttggaggggttcaggtgggtatgattcatagtatcaattgcagaattcactgtgcttgtagtaaacactattctgatcttct

SEQ ID NO: 38187 - DNA, 120 bp, synthetic construct
  source 1..120: mol_type = other DNA
ttcgcaagtggaatggagagaagatgtcttacttaaagtaaataaatacaacttttcccctgaactatttcatagatctgttagtcatactaccccagtgcgagttatcttctggaacat

SEQ ID NO: 38188 - DNA, 120 bp, synthetic construct
  source 1..120: mol_type = other DNA
actaattggtcttatttctgttgttaggagtcagagagttcttttattttttctattactataacattcccactttgacaggactgctgcatgctataaactcttaagttttgttcactt

SEQ ID NO: 38189 - DNA, 120 bp, synthetic construct
  source 1..120: mol_type = other DNA
cacttgatagtatgaaatacaattccaggttacacataagttatttattttggcaaaaggatgactcaaaaattttaaaactaggcaacaatctttactcattaagaggtaagacttagc

SEQ ID NO: 38190 - DNA, 120 bp, synthetic construct
  source 1..120: mol_type = other DNA
tgcattactggcttcccagtagagccctttaagaacagggatagcaaaccacgaagtttctagggcctaatcaacttgtatagctgtaagacaaaaacagattttgagcaggattgatca

SEQ ID NO: 38191 - DNA, 120 bp, synthetic construct
  source 1..120: mol_type = other DNA
aaaatcccctttctgattaaatgccaatgttgttggaagcagaacaggtgcctcaaaagaacatatggatttaatggctgtcctccttctgatgggaacagcactgaggctagaatttgt

SEQ ID NO: 38192 - DNA, 120 bp, synthetic construct
  source 1..120: mol_type = other DNA
agatgggaggaaagagaagagggacacccctgtaatctttctcttcaacctgggtcacttcaaaagttgaaaggagactaagggacaccttctactcccctctttttatgcatgggtaac

SEQ ID NO: 38193 - DNA, 120 bp, synthetic construct
  source 1..120: mol_type = other DNA
aaggcttgctaaatatttcaaggttgtaggctgcctactttacaacttggtaaggcctggggacatatgaaattaaccatgccctaactagaatggaaaaagtcagactttatctgcatc

SEQ ID NO: 38194 - DNA, 120 bp, synthetic construct
  source 1..120: mol_type = other DNA
acgaaggagtaacagccatcatccttttgcttctacccaattttgatctctattgtcttctcgctccactgactacatgatttttcagatatgataaatgtcaatgaacagaaaaaaaaa

SEQ ID NO: 38195 - DNA, 120 bp, synthetic construct
  source 1..120: mol_type = other DNA
ttagctttcagctatttctgagttattttagacttgttgtgctttgttctttagagacagggtcttgctatatcgtccaggatggtcccaaactccaggcctcaaggaattctcctgcct

SEQ ID NO: 38196 - DNA, 120 bp, synthetic construct
  source 1..120: mol_type = other DNA
cttaaagtagtcaaacttgttaacctctgtccctaagagatctaaattcatatttacaacgaagttcaattagctacatgtctacaacaaaaggcatatatcactccttattcagatcac

SEQ ID NO: 38197 - DNA, 120 bp, synthetic construct
  source 1..120: mol_type = other DNA
ataactgatggacggccgaggcagctccttaggcagattaggcatgccttgtggagtaaggccggggcatccctcaggctgccagggactctggccagcctgagggatgggatccaaaga

SEQ ID NO: 38198 - DNA, 120 bp, synthetic construct
  source 1..120: mol_type = other DNA
tggaggcttatccaacatgaactgaaaaagctcctgaagtaacctgtgtacttcttcaaaatttcatccctaggtttggactgcctctacgaattggctcaaataataggccagcatttg

SEQ ID NO: 38199 - DNA, 120 bp, synthetic construct
  source 1..120: mol_type = other DNA
tgagagcagattcggtcctaagctccaggcctttgctcacctcactgggttggagcatcatggatttcaacttgaccctgaggaagcatgggaggccccattctctcctccacccacagc

SEQ ID NO: 38200 - DNA, 120 bp, synthetic construct
  source 1..120: mol_type = other DNA
aagtgctacagatcagcatgtgcggttccttaggaaggcaacacaggacacgatcctcacattacccactcctccagtggggttcgggtggcaccccttaaacaaattgtttccatttcc

SEQ ID NO: 38201 - DNA, 120 bp, synthetic construct
  source 1..120: mol_type = other DNA
atccctgaagaagagaatctagcttgggacacaggaatcatgaaacaggcctccaaataattgggcaaaactcccaacatatgtggatggccagagaagagataaagacatggaattagc

SEQ ID NO: 38202 - DNA, 120 bp, synthetic construct
  source 1..120: mol_type = other DNA
tgcggggaactgccaggacacagtgcattcggcacttttgcatccattttgttgaaattagcgtcagtggccaaatgaatacaggctcttgagtcttcacagagttcctgtatcctcaac

SEQ ID NO: 38203 - DNA, 120 bp, synthetic construct
  source 1..120: mol_type = other DNA
caaaaaagctagaacaggcaagttggtcttgaagaagcagtaagttgtaggagttattctgctggatttcaaaactcatttagagctacaataatttaaaaactatagtactagtgtaag

SEQ ID NO: 38204 - DNA, 120 bp, synthetic construct
  source 1..120: mol_type = other DNA
cacagaagcagaacaagaatatattcaatgcattctctaaagtggagaaaactgttgagggaacctagaagtgaaggaaacctggcttgctgggctccatcttaactttatcctgagtac

SEQ ID NO: 38205 - DNA, 120 bp, synthetic construct
  source 1..120: mol_type = other DNA
tgctacctccctcactcttgtcagagtcggagctacaggcagtgccttcagctctgagctcaggcatcccggtccctgtttttgcggttaaggactctaaagtgttgtgtcgtgttcatc

SEQ ID NO: 38206 - DNA, 120 bp, synthetic construct
  source 1..120: mol_type = other DNA
gggccaggacaacggcaggcatttacatggcaggcacgtgtcacacaaatatttataaaacagagaacagtcatcttagtaagttatgggttgtagttgtttcttaagccttgttttctc

SEQ ID NO: 38207 - DNA, 120 bp, synthetic construct
  source 1..120: mol_type = other DNA
acacagcttcaggcttatgaaagtccccagacctccacacctccacaatgacaattgtatgggtagtgtttctttccagtaaacttttgtggccacgacatgatcagaatttcttgggtg

SEQ ID NO: 38208 - DNA, 120 bp, synthetic construct
  source 1..120: mol_type = other DNA
aaagtacaggaatcacctgcccccaggtaacattgaataatcaggagcgggtaatgggtggtaaaatatgaaaaaggtctcagaaagaataaaagggaggtgaaggtagtcacagattcc

SEQ ID NO: 38209 - DNA, 120 bp, synthetic construct
  source 1..120: mol_type = other DNA
atgatgaagaggaggaagctctaaacattcccccaggtagcctctctattctttgtccctcctagctctgtctaggctgaggaagatcaattctgaggacagactgtatacatacatatt

SEQ ID NO: 38210 - DNA, 120 bp, synthetic construct
  source 1..120: mol_type = other DNA
tgggccctgagttcttcaccccatgagcggtcaatgtttctgtgtagcaccgcagactcttttttatgcaaggattgttagaatttatccatcagttcagtctcctatacaaatttctct

SEQ ID NO: 38211 - DNA, 120 bp, synthetic construct
  source 1..120: mol_type = other DNA
tcaagagctgtgttcacttggatgctgcatgtaatgtcaacgcaatttgtgtaaaggaagtgaagtcccagcttagttctcagtgctgcaagtcatgatgcttgatgctagcttacaggg

SEQ ID NO: 38212 - DNA, 120 bp, synthetic construct
  source 1..120: mol_type = other DNA
tcgttcacttctctcaggctagactccctccccttttagtaggcttgtcttagctaagaagtctctgagtaccagaacatgaacaccactattaaattttgtatgtttctctgaaaggag

SEQ ID NO: 38213 - DNA, 120 bp, synthetic construct
  source 1..120: mol_type = other DNA
gtgttccttacaagttcctttccccaaccatgtcctgtgagattctatgcctgcccaacgcctgtggcatttttgtctacttttcattaaagatattacccaggtttcaaagaacctagc

SEQ ID NO: 38214 - DNA, 120 bp, synthetic construct
  source 1..120: mol_type = other DNA
acattttctgcagtccccttttctgtcctttttgcttaaagtgaagttgagttgcacatctgatgtctgcctctttggcattaccatgtttgcaagtattcgatagcagggaagtgaatg

SEQ ID NO: 38215 - DNA, 120 bp, synthetic construct
  source 1..120: mol_type = other DNA
gttttaagcacagacatccactgggtagaacttcctcttctcctgttccaagtgcctcctctgtcacctggctccttctcacaggagcaggctttggctatcaaaacaggccagagaagg

SEQ ID NO: 38216 - DNA, 120 bp, synthetic construct
  source 1..120: mol_type = other DNA
ggcatctccatgttggagctgagaacaatgaggcatttttaagaaaacttagaaaaccttggagagaatgaagatgtggagaggggaggagagagaggagccccacagcaacgtggatcc

SEQ ID NO: 38217 - DNA, 120 bp, synthetic construct
  source 1..120: mol_type = other DNA
atccctcatgaagccaattttcccctgtcaggcactttcaataacaacctatgaggcacattgagtaacagtgtaaatcctgggcccacactcagtctcctgacatgtccagctgcttct

SEQ ID NO: 38218 - DNA, 120 bp, synthetic construct
  source 1..120: mol_type = other DNA
ttacgtgtgactatgtatatctggtgtgtatgctatatagggtgtatatatatatgcagtagatcatataatgatgcaacttttgtaaattctctaggtttagtcttcctggttctttcc

SEQ ID NO: 38219 - DNA, 120 bp, synthetic construct
  source 1..120: mol_type = other DNA
ataaattgcttgttgtaagcctactgggtgtgcctgcctaccagacacccgatcttgcaagactgtcattaataataagtcgcacttctgctgttttccgggtcttggagtccattcttt

SEQ ID NO: 38220 - DNA, 120 bp, synthetic construct
  source 1..120: mol_type = other DNA
aaacggcagctccatccttcaagttgccgaagccccaaatctcaatattaaccatgatttctctcttttatctcataggcaatctgaaagcaaatcctgtttagatgcaggcgaaggttc

SEQ ID NO: 38221 - DNA, 120 bp, synthetic construct
  source 1..120: mol_type = other DNA
gactagatactgtagcactcaccacaataagaaatcaagcgaattgcacttcatttttaaaaagcttctccttattatgttgttgtttaacaacttaaacgctatctctagaccaggaat

SEQ ID NO: 38222 - DNA, 120 bp, synthetic construct
  source 1..120: mol_type = other DNA
atgcagccaagtcactatgaattatctttagtgagtaaagaggaagatcgaactggtaacactgtgggtaaacaactgaaaaataatgttatctttctctgaacatacttgcacaagaca

SEQ ID NO: 38223 - DNA, 120 bp, synthetic construct
  source 1..120: mol_type = other DNA
caataaagaagagtagattgctttttttccaagcttttgtgtttttaaggcaccccgctggttttgacattcgttgctccagctgaactgctctatgctgaagccctgcaggtctcaagt

SEQ ID NO: 38224 - DNA, 120 bp, synthetic construct
  source 1..120: mol_type = other DNA
ccgatttagtaagttatcctctacctgccactcccttctgctccctctataattatttctaagactttatttttccattgtgggaacattatggaaggttttcttttacagtctgagata

SEQ ID NO: 38225 - DNA, 120 bp, synthetic construct
  source 1..120: mol_type = other DNA
cttgactgtacagttgtgttcttatggtaccattctgaaagtgatgtaagagaccatgtaaaatgattggaatgcctcagcatctgaacaatgcacatagccaattattaaaattaccca

SEQ ID NO: 38226 - DNA, 120 bp, synthetic construct
  source 1..120: mol_type = other DNA
tggaaaagccagagctagaacccaggttctgatttccagagcagttcttatttcatgataccgcataattttataatgtccctaaatccgaatttcatttctcatgatgtgaaaggattc

SEQ ID NO: 38227 - DNA, 120 bp, synthetic construct
  source 1..120: mol_type = other DNA
tttgcagcaattaggctttattggtgcactaaggagaagcagagaggagaagcaattcttggtaacttccttggaagttgcagctaactctgaaaagtctgggttgaactaggtaagtaa

SEQ ID NO: 38228 - DNA, 120 bp, synthetic construct
  source 1..120: mol_type = other DNA
ctttcacatcatataaacagatcatgggaagctgagggaatgcaaagtcaaggcctcattggagagcggaaaggaggctgagattggtggagaggagtggctgttacattctaattagaa

SEQ ID NO: 38229 - DNA, 120 bp, synthetic construct
  source 1..120: mol_type = other DNA
aactttgtatttgaaactttatgtggtaacatatatttaggctcatagccaaagtgattacaatgcattggttttaatattttcagtgaggtaatgtgtgctttagtggggaggaggaga

SEQ ID NO: 38230 - DNA, 120 bp, synthetic construct
  source 1..120: mol_type = other DNA
ggaagcactgggctcaagaaagccaataccccttctagggcttaccccccattttaaaatttaatatattggaatttatattgtttcttttgatccgagatcttcaggctgaagctggag

SEQ ID NO: 38231 - DNA, 120 bp, synthetic construct
  source 1..120: mol_type = other DNA
ggctatgaggaaggatgcatgtagggaaatctgaggttgttctttggattttccctgttttgttttaggaagtatccatgattttatataataatatgtagcaatcttaggtttttccat

SEQ ID NO: 38232 - DNA, 120 bp, synthetic construct
  source 1..120: mol_type = other DNA
gaggaaacttggaggggggaacttctcagttttgctttcaggtatttatacattaactatcataagagatggacatcttaataacttccaagaaagagttcatgagcttcaatttgatat

SEQ ID NO: 38233 - DNA, 120 bp, synthetic construct
  source 1..120: mol_type = other DNA
gccgtccagctcttactttctcttgggtttctgaatcttatcttgctcatgcatagtcaggaattatttaaggatttgagcagagttgtatgcatactttgaagctacccactctgtggt

SEQ ID NO: 38234 - DNA, 120 bp, synthetic construct
  source 1..120: mol_type = other DNA
ggaacaggagcaagtccagacagatttatgcagttgtgaaattgagacaggttaaattcagtgatttttgataaatgttgttgccagcacaaaagtcacaagttgttgaatatggcacct

SEQ ID NO: 38235 - DNA, 120 bp, synthetic construct
  source 1..120: mol_type = other DNA
cagtttgtaatatcccagtgtaggggcacagataataactatggacactcagacaaaggaacaagtactgtgggacaaaagagtaaaatcagaggacttttggtgcactgcttagatcct

SEQ ID NO: 38236 - DNA, 120 bp, synthetic construct
  source 1..120: mol_type = other DNA
atccaaaccctcaattttccagaataaactaggtctgcctattctgtgtggaaaacatttgatggtggttaagattctcttgcctagacgatggtagtgccttagtcgtttaactgcctg

SEQ ID NO: 38237 - DNA, 120 bp, synthetic construct
  source 1..120: mol_type = other DNA
atttatccggcaccatgctacatgcttgtattcaagcagaggctggtgatcatcttttagaaatattttagaaatgattacttaattggatagaaattaaatttcttgaatctgaaggtt

SEQ ID NO: 38238 - DNA, 120 bp, synthetic construct
  source 1..120: mol_type = other DNA
gggacctcatgaaagtgtgggttaaaagagacttgtatatcttctaaggtaaaagtaaagaactaagctgatgtccagccctctaaaacattttaaatagaaatcaaactttattaatac

SEQ ID NO: 38239 - DNA, 120 bp, synthetic construct
  source 1..120: mol_type = other DNA
atattctacaggtactttcagctcaccttgttgacagaaatacgtagcaaccatgtacatcccaaatacccacgctagaaactccctgtcccttgttctgacctcatttcaactcagtca

SEQ ID NO: 38240 - DNA, 120 bp, synthetic construct
  source 1..120: mol_type = other DNA
ttctttcatgctggatgttcttgcctatgctgcctcctcagctatcaccctctcttcccctttttaatgtagaactcattcttaatgatttgtcaaaggcaccctatttcactgaaatgc

SEQ ID NO: 38241 - DNA, 120 bp, synthetic construct
  source 1..120: mol_type = other DNA
acttgggcaagttacagactgtctatgcctcagtttctttatcagcaaaacagaatcatcccataaactataaggtcgatggtatcagcgggtccccaaactgactgcacatctgagtca

SEQ ID NO: 38242 - DNA, 120 bp, synthetic construct
  source 1..120: mol_type = other DNA
tagaaaatacattgacttaaagcctttgatacatctcaaagcagtatccttacagtgtcactggaagatggtgcgggctgcagagagggatgctttcaaatgggattaaccagtcctcct

SEQ ID NO: 38243 - DNA, 120 bp, synthetic construct
  source 1..120: mol_type = other DNA
aatgaacctaacctcattctttgtgtcttcagtgttggcttgttttagctgatccatctgtaacacaggagggatccttggctgaggattgtatttcagaaccaccaactgctcttgaca

SEQ ID NO: 38244 - DNA, 120 bp, synthetic construct
  source 1..120: mol_type = other DNA
atgcccttagcttttgaaccacttctacttgtgttgaaatttaccctttaattttggggtttgacaggctctgcccttctgttatgcttgagtctggcttttcctactctgactcacttt

SEQ ID NO: 38245 - DNA, 120 bp, synthetic construct
  source 1..120: mol_type = other DNA
gttggactttaccactctcgcttacaaaagcctatttagctgtcaagactattaggtgtccaacacacaagcaacaaagtccaaggctaagcacacaataacatatcctgggtgaataaa

SEQ ID NO: 38246 - DNA, 120 bp, synthetic construct
  source 1..120: mol_type = other DNA
gattacagatgtgagccaccacacttggccagaaaaacaaatcttaagctgtccagttatcagtgtggacacaaagaggatccagcaattcaggatacccaccccatatacactgagata

SEQ ID NO: 38247 - DNA, 120 bp, synthetic construct
  source 1..120: mol_type = other DNA
cagccatgatattctcttaagcgaaaacctaatccagagctaggtcttaactctctgcaattctatgaagggcaagaaagttgaggaaactgtagaagaaagtttgaagctagcagaggt

SEQ ID NO: 38248 - DNA, 120 bp, synthetic construct
  source 1..120: mol_type = other DNA
ccttcctccagccgcgggaagtgggagacgctagcgggagcttcctcctcccggcgctcggaggaaaaggaaagaccaagtagaaagggtcgccgctgcggcacgcgagggagctagtcg

SEQ ID NO: 38249 - DNA, 120 bp, synthetic construct
  source 1..120: mol_type = other DNA
accacagagctggaagcgaaattttgtaatttccatctggagcattttgatagaaaaagtgcaggcctttgcttggaacagtttaaccctttcaggacccttcaagagcaggagatgaaa

SEQ ID NO: 38250 - DNA, 120 bp, synthetic construct
  source 1..120: mol_type = other DNA
gacattaattaggctttgtgtttttagccatttttagagtccgttgtgctgtatctcctgatctctctttttcagtgatttgtggttatgtaagttatctcagttctttgctgtcagcaa

SEQ ID NO: 38251 - DNA, 120 bp, synthetic construct
  source 1..120: mol_type = other DNA
tcatataagggaaagacctatttacgcatagttgagttgcagctgctgctgccctggcctgatggcacagtggtgagggctgtctcaatatctgtcccatgtctctttcatagaataata

SEQ ID NO: 38252 - DNA, 120 bp, synthetic construct
  source 1..120: mol_type = other DNA
tgacctagaatcattcttatttcacagcaacctgtgtcttgactaatgttaaactgactaatttgttttgaagctgagaatgagaaattggaggtccttctcatagatctgagattcctt

SEQ ID NO: 38253 - DNA, 120 bp, synthetic construct
  source 1..120: mol_type = other DNA
tcaggatttctatagcttcttttagagactcaaagtgcttccagttttgttacctcatttattctctaggggcaggaattaaggtcttgatggagatgaagtggtacatcacttactggg

SEQ ID NO: 38254 - DNA, 120 bp, synthetic construct
  source 1..120: mol_type = other DNA
tcaggtggccacaggatatgatccagaatggtggtctctacttttctatttgctcctatttagccacccagtttgggagtagccctgtgtattatgattatctctttcattcattttggg

SEQ ID NO: 38255 - DNA, 120 bp, synthetic construct
  source 1..120: mol_type = other DNA
gaaagtggcaaggaacaaaaaaagacaatgtattttaaaggaaaactttttggagctatttcatggatgctgctggtcacctggggaaatcttggatttatttgacagttcccattttcc

SEQ ID NO: 38256 - DNA, 120 bp, synthetic construct
  source 1..120: mol_type = other DNA
taaactgagctctcaatatacaaagacttccccagttcttttcctttcgctcatatcaatgcctgtctttaaagaaaaaaagagggttatttttctctcctccatcagtgggattctctg

SEQ ID NO: 38257 - DNA, 120 bp, synthetic construct
  source 1..120: mol_type = other DNA
tagtagtttccatactgtgcggtatttgcctgttcacttgcctgttcctttgtgagctctcgagggccaggaacaaatatggatataaacatggaaccatgagcgaatagatgtttctta

SEQ ID NO: 38258 - DNA, 120 bp, synthetic construct
  source 1..120: mol_type = other DNA
ttttaatccttagtattgttaggcctatacttccacctatagaggtggcaattgaggatcttgacttgcccaggggttcatgatcacgaaccttctactacttcataccttgaacaccat

SEQ ID NO: 38259 - DNA, 120 bp, synthetic construct
  source 1..120: mol_type = other DNA
gagggcatccatcttcagcattcagactttccagagatctagttgcttagtaggtactgatccagtttaattgtattaaccagactctcacactggggagaagtggaatgcaaattgatg

SEQ ID NO: 38260 - DNA, 120 bp, synthetic construct
  source 1..120: mol_type = other DNA
tttacaagcagaagatgaggcttggggtaaagtcccatggaatagctggacttagagtcatcagagagaatgatttttaattccaatttctatgaacactgcctctaggctctaaaggcc

SEQ ID NO: 38261 - DNA, 120 bp, synthetic construct
  source 1..120: mol_type = other DNA
aactggcagagcaaaaaggtcaaaaagtatcaggaataccctgctttgctttaaatctctatttgccttagagcagtcatctgtagtgtggtgaccacaggctttctaatgtctatgggt

SEQ ID NO: 38262 - DNA, 120 bp, synthetic construct
  source 1..120: mol_type = other DNA
tctgactggtatactcagatgttccctttggtcactgatggcaggatttcagaagcgaaggaccatttaatttaattttgcagatggcaggaggtaagcaggaaagcttggtcacaatat

SEQ ID NO: 38263 - DNA, 120 bp, synthetic construct
  source 1..120: mol_type = other DNA
ctcaggacttacaactttccatctttatcgtcttctgaactccataagatctttctaagaattgaggggaaagttgattataagggagaatatacaaaacctggcatcgaagccttacta

SEQ ID NO: 38264 - DNA, 120 bp, synthetic construct
  source 1..120: mol_type = other DNA
ccagattagtagtccacatttgcatagtagacatgctgttgctgttccttttcttatcacgaaaagagcagaagatgcagattatacctgagacagaaagatacaggggagatactgagc

SEQ ID NO: 38265 - DNA, 120 bp, synthetic construct
  source 1..120: mol_type = other DNA
cttactcaggagctttgtcttcatactccatggtcagccctgggcaattaaaacttttgttccagtaaaggtttcattctaaagaggtttcattaattatgaaaaattccccgtgggcat

SEQ ID NO: 38266 - DNA, 120 bp, synthetic construct
  source 1..120: mol_type = other DNA
tgtgtgactctcctgaaagattacatctgtctcctggcctgcccttcctcccccattttctccttagaaatgtggtattcatgacttaatcagagaaaattcctgaagaagaagatgaat

SEQ ID NO: 38267 - DNA, 120 bp, synthetic construct
  source 1..120: mol_type = other DNA
aaatacctactgagtactgtgctctgtgttgattcctataggaactaacataaacttaggaattcctgtttaagcggagcatggtgacttatgcctgtaaccccagcactttgagagggt

SEQ ID NO: 38268 - DNA, 120 bp, synthetic construct
  source 1..120: mol_type = other DNA
aattataaatgtgatagtgaaataaacctggaaaagataggggccagaagattaaagaggtctatgaatgccaggcgacagggttcgggctttattctgtaagcatgggggaccattgat

SEQ ID NO: 38269 - DNA, 120 bp, synthetic construct
  source 1..120: mol_type = other DNA
ctacattgggcaggacataggcaattatgtgactctgtgtaattgcatggtcagtccctataaaaactcagcaattgtatgttttgttctgtaaggtgtcatatagttcaaccttggtgg

SEQ ID NO: 38270 - DNA, 120 bp, synthetic construct
  source 1..120: mol_type = other DNA
taagaaagggttggcttcttacgtgtattgacttcctcccctccttctcctctctcactcctttttatacattgactggatttgtcagtcttgttcttgctcctgttttctccggtaatg

SEQ ID NO: 38271 - DNA, 120 bp, synthetic construct
  source 1..120: mol_type = other DNA
tcctccagtaggtgcccagagccagtccaaaattagaatggggtgggattcaaaactgcttttcctattcacttgcctttcatgtgtaaccacatgcagtgtgtcaacatgctttcaggc

SEQ ID NO: 38272 - DNA, 120 bp, synthetic construct
  source 1..120: mol_type = other DNA
agcagctattccccttcataaatattaattggataagccccaacatgtataataggcatcgcaacaactgatgatgagatggtatgatattaagcatgttgattttcgctacccaaccac

SEQ ID NO: 38273 - DNA, 120 bp, synthetic construct
  source 1..120: mol_type = other DNA
ggcaaaaactgccaagtttgactcccatctccctgtggtctccatgaggggcatgttctaaagaagcccaccaagaacagaaataatttttcccacttgcttagtttaaactgaaataaa

SEQ ID NO: 38274 - DNA, 120 bp, synthetic construct
  source 1..120: mol_type = other DNA
ccatacattcactaggatggttaaaattaaaacatctggcaataccaagtgttaaggaagttggccagaaccctcatatgttgctagtgagagtgtgaaagtggtacaaccactttggaa

SEQ ID NO: 38275 - DNA, 120 bp, synthetic construct
  source 1..120: mol_type = other DNA
aggcataagccactgcacccggccctgggttgctcttctaagaatagctgactttattaaacatattgtaggtttcattaaatgatgtttcacaaggtgttgcttctcctggaccaaatt

SEQ ID NO: 38276 - DNA, 120 bp, synthetic construct
  source 1..120: mol_type = other DNA
tgacagttggatctgtggttgacagaagaatttcaacacacattcaaatcagctcctaagatagattgtctgagttccctgggcctgcctcatgccctcctcaaatgcatttgactcctt

SEQ ID NO: 38277 - DNA, 120 bp, synthetic construct
  source 1..120: mol_type = other DNA
aggaaggcctgttgttgttttctttttgcgataactacagcaagcaattctttgatcatggtccttgtgtttggaagggatcaagaagcgatttcctttcccctgggtgtttgaaccttt

SEQ ID NO: 38278 - DNA, 120 bp, synthetic construct
  source 1..120: mol_type = other DNA
gaatgaaaatgatttcagtaattaaagatgaaaaagtacggagtttgtgagcatggagggggagctggagtcaaaggatattccatatggaagaacaggcttcaggatgaaggagagcac

SEQ ID NO: 38279 - DNA, 120 bp, synthetic construct
  source 1..120: mol_type = other DNA
taactcactggagcctcttcctctcgattctaaaggctactcccagtgttctaaaactacacagatctctcgatgaattggctttgctgctgggttcctctttcttaaaagtatttaatc

SEQ ID NO: 38280 - DNA, 120 bp, synthetic construct
  source 1..120: mol_type = other DNA
gaaaagccgtaaggaaatggctttcagaaagccatttctgtcctagaggagagaggtcctggatttcactgaaccagaacttgatgggtggttttggtattctgtgacctaggtagtggg

SEQ ID NO: 38281 - DNA, 120 bp, synthetic construct
  source 1..120: mol_type = other DNA
gagccaggaatagaaagagaatcttgtgattgctaatttagggctccttccacccctttccccactatcagatgtaaaaattcatgcttactcatgacagaggccacacataggttatat

SEQ ID NO: 38282 - DNA, 120 bp, synthetic construct
  source 1..120: mol_type = other DNA
gagagtcggtgttgcttaatggctaagaatgtggtctttggagtctgacagacctgggtttgaatcctgattccaccatttactcattgtatgaccttgggtatgatagttaatctctct

SEQ ID NO: 38283 - DNA, 120 bp, synthetic construct
  source 1..120: mol_type = other DNA
atcggtagtgtctttctttttcttgctgacctatgagataaaaagggccaaaaggatgcagttagagcaggactaagtgaggagcctgggatattggcatcctgatcttaacattattca

SEQ ID NO: 38284 - DNA, 120 bp, synthetic construct
  source 1..120: mol_type = other DNA
agaggtcaagtcagttgggagcttaaaagccaatggaggaaaaggtcaagtcccagccccctccatttgaagaaaggttttttcttttcaagcaagggaatggtccgtgggcatgtgaat

SEQ ID NO: 38285 - DNA, 120 bp, synthetic construct
  source 1..120: mol_type = other DNA
tacagagatgccaacaactgcagtctcgcttatccactctaaagattgaaaacgaagaggtgagtttcttccttaggaggctcaaagccacactcttagtttccctgttgaaacttttgc

SEQ ID NO: 38286 - DNA, 120 bp, synthetic construct
  source 1..120: mol_type = other DNA
tgcttccagtacagcaactccatggagtccgtcaagtccacggtctctgaaaccttcatgagcaagcccagcattgctaagaggagagccaaccagcaagagacagagcagttttatttc

SEQ ID NO: 38287 - DNA, 120 bp, synthetic construct
  source 1..120: mol_type = other DNA
tcctttggaagtcactactggtctttgtgtgctgctttttaataattgagttattttgagcttgccaagtaggatctattgcctggactaaaatttatttcctaatcttctgatgaccaa

SEQ ID NO: 38288 - DNA, 120 bp, synthetic construct
  source 1..120: mol_type = other DNA
aagtaatatctaggcaggtggaaattttaagatcttttaaattaacttctggactatagcaaaaattcaaactaaaattcatcagggagtcagggaaggtcaaatgaagaagcatgggga

SEQ ID NO: 38289 - DNA, 120 bp, synthetic construct
  source 1..120: mol_type = other DNA
tccattcctctacgaagttcttcactatactctcttgacattctgccatatatcatttaaaaattaagttaatcaccctcaataagccctgttttaaaaagagggataaatggagaggaa

SEQ ID NO: 38290 - DNA, 120 bp, synthetic construct
  source 1..120: mol_type = other DNA
cctcccaaagccctagaccctgtaacataatggaatatgtatgtttctaatttgtgcaatatggaagcaggaatactacatagaactgtcatcttttcctattgcatttattttggtgtg

SEQ ID NO: 38291 - DNA, 120 bp, synthetic construct
  source 1..120: mol_type = other DNA
tgcatcgcaggcacatctcaaattaaaaatcttcatcttggtctctgtcatttccattttaaactgggactgaataacctgttttgccactcaaaataatagccagtgtctctttcttat

SEQ ID NO: 38292 - DNA, 120 bp, synthetic construct
  source 1..120: mol_type = other DNA
atattttggaggcctttacacaaaagtgttttccctgaagggagaagagaaaagttgaatgcagaagtagaaaaaaaaaattcatttgcacttgtagtagttatatctaaatattttata

SEQ ID NO: 38293 - DNA, 120 bp, synthetic construct
  source 1..120: mol_type = other DNA
tcagcaaagagtgggcacattcacatgcccacggaccattcccttgcttgaaaagaaaaaacctttcttcaaatggagggggctgggacttgaccttttcctccattggcttttaagctc

SEQ ID NO: 38294 - DNA, 120 bp, synthetic construct
  source 1..120: mol_type = other DNA
cttggtgacaccccttcccccaattctaattgcacatgctgccatctcacttctccatctgttcagacactgacatttcctaagccacagcaatggaaatgaactgtaaatggtttgatt

SEQ ID NO: 38295 - DNA, 120 bp, synthetic construct
  source 1..120: mol_type = other DNA
gaagaaacctcaaagaagaatctatgcatagagtaaggccatctgcctgattgccatttcattgcacaagcaagcatcaaattaactctccccacagccttttcctctcatcatgatcac

SEQ ID NO: 38296 - DNA, 120 bp, synthetic construct
  source 1..120: mol_type = other DNA
cgtcagtccatgtgctaagtgctttatatacattctacattttaatcctcataataaccccaatgaggttggtataatcttaattttccaggcttgaaagctgaggttcagtgaagttaa

SEQ ID NO: 38297 - DNA, 120 bp, synthetic construct
  source 1..120: mol_type = other DNA
ctgtttatataactattctgtagcttctttgtgccaatgagtgagggtctgagtcacaatgtgcccctggctcctctacacctctagccaaccaggcagattcggaagaggttctccaga

SEQ ID NO: 38298 - DNA, 120 bp, synthetic construct
  source 1..120: mol_type = other DNA
ctttcttaagggatctgaccaatggtttgaaaaatgttgtcttacagcctatgactacctctagggtgagaactactataatccatttttaccccaatactgagcacgtggcttctccct

SEQ ID NO: 38299 - DNA, 120 bp, synthetic construct
  source 1..120: mol_type = other DNA
tctgaatttttaccaaatgcgagataaatagcagaaattgtgcataagaaagaatggattctcttccttatgctgagaacaggcctctctcccaacaatgaggagctcttcccctgagga

SEQ ID NO: 38300 - DNA, 120 bp, synthetic construct
  source 1..120: mol_type = other DNA
tgaagcaatatcctcacacccctaagggaaaaatccagaagtgtttggttcagcaaacacagattaaagaccactccaaagcacaggaaagcaatatgtgaactgagccaacatttcctc

SEQ ID NO: 38301 - DNA, 120 bp, synthetic construct
  source 1..120: mol_type = other DNA
caagtcaacaaatgaagtaacaaaaatcaacaatttacaatgttactttcccctaaaaaacttaaagaactttcttgttaaaagagagtaaaacgctactttgcctaagaaactatacat

SEQ ID NO: 38302 - DNA, 120 bp, synthetic construct
  source 1..120: mol_type = other DNA
ctattaaaactaaacgccttgaggtcagaaacatctcttatttgttcttgtctccctagtgcctagtgccagagtcaaataggcaagcagagttgagggactattaagtgccattgtttc

SEQ ID NO: 38303 - DNA, 120 bp, synthetic construct
  source 1..120: mol_type = other DNA
cattaggagcagatgtgaaggacatgaaaaaactgggtgggtttcttatatccttggtttcctttttccagtgaccccaaataacttctattgcctacaacgtcattgaaatgagaggcc

SEQ ID NO: 38304 - DNA, 120 bp, synthetic construct
  source 1..120: mol_type = other DNA
tttttttttaaagcacagcatatgaagagacataggaccctgggtaaaagctaacagatccttagacagtagtcttcttctgctgccttgagtcccactgaagaagtggcaaggtttgtt

SEQ ID NO: 38305 - DNA, 120 bp, synthetic construct
  source 1..120: mol_type = other DNA
tcaccactctaagtgttgttatgtatttttctaatcttttctagttttacaaaattgggattgcattataaatcctgttttgtaacttattcacttaaacatatgttgtaaacatttcca

SEQ ID NO: 38306 - DNA, 120 bp, synthetic construct
  source 1..120: mol_type = other DNA
tctcatccaatgacctcaactgctggaagaagccacaagagggaatgcctttcatctgtgatctcacataccagcctgtcctttccattgagaggaaagctgagctccactgaagcaaca

SEQ ID NO: 38307 - DNA, 120 bp, synthetic construct
  source 1..120: mol_type = other DNA
ggcacttgtggtctgaatgcaaaacagaaagtttaaaagtttacaacctgttgagaaagatggacattaatctaacgtctgggcccatcagaatgcaattcttccaatctcaaaggtatt

SEQ ID NO: 38308 - DNA, 120 bp, synthetic construct
  source 1..120: mol_type = other DNA
tagcctatcaaggaccacatgcagtattaaaagagagctgaacatgcaggctctggagcaggaattgaatcctacttctactccccaattgatgaccttgggtaaattatatttaaaccc

SEQ ID NO: 38309 - DNA, 120 bp, synthetic construct
  source 1..120: mol_type = other DNA
gttatgaagacagcattttcttgacacctcaggtgccagggttggacctaagaggagcacaaagccaactttgggagaatgagtagagccctttactgacagaaattagaatgcattgcc

SEQ ID NO: 38310 - DNA, 120 bp, synthetic construct
  source 1..120: mol_type = other DNA
tgtcctgctagccctacaagtctattaaacactctgctcagctttttgacactcagtaatattttctaaaatggcagaagcctcttcaaggaaagcagctcccatgaagcaaaaggattg

SEQ ID NO: 38311 - DNA, 120 bp, synthetic construct
  source 1..120: mol_type = other DNA
atagcagcaatattttatcatttccctatgagtaggtcttccatcgttccctagtgctctcagaatgaagttcaaactccaagtttggcattcgaggctcttttcggctttgtttcaagc

SEQ ID NO: 38312 - DNA, 120 bp, synthetic construct
  source 1..120: mol_type = other DNA
aatttaaccaataaggaaaataaaaaaataaaccatctagagccctgggtccccaaccaggttacctgattcctggtctaatgttcatttcctatgctgtggtagctcccaaagagggca

SEQ ID NO: 38313 - DNA, 120 bp, synthetic construct
  source 1..120: mol_type = other DNA
tatttatagaagctcccttaattggtcttcccttgctgcttccaccctactcctcctaaagcactctcttcacacagaagctggaataatcccatttaaacagaagtcagactgtatcat

SEQ ID NO: 38314 - DNA, 120 bp, synthetic construct
  source 1..120: mol_type = other DNA
agatttatttatctgaagctaacttcacccttcatcaccctccaagaataaagtaggaaaccacaatgggttgcctagagaaactagcctagatgctttaacactgtctgttgcagaggc

SEQ ID NO: 38315 - DNA, 120 bp, synthetic construct
  source 1..120: mol_type = other DNA
ccaggttgttcttgaacttctggcctcaagcattttcccaccttgacctcctgagttgttgggattacaggaatgatccatggtgcttggctcaatctatttttatgatctgccaaccag

SEQ ID NO: 38316 - DNA, 120 bp, synthetic construct
  source 1..120: mol_type = other DNA
agtcacacacatgcatcaccaagtattgcagaataattcaaattaatgacaaccaagctgaagctgatgctggaaaccatggaggagatggtgagaagtaccctcactccaaaatgaggt

SEQ ID NO: 38317 - DNA, 120 bp, synthetic construct
  source 1..120: mol_type = other DNA
ttcccaaaacacagtttttgttaatagatgcagattatgaattatagtaccagccctgggtttataccttgcaaatggttcctttcccaaggctactattaattcagctcagaaaggaag

SEQ ID NO: 38318 - DNA, 120 bp, synthetic construct
  source 1..120: mol_type = other DNA
tatcatttcattttaaggaaagaactaccattatcccccttcaactgattagaaaactgaagctcagagaggttgtcacttgtctacagcgagtaagactaacacaacaagtaagagggc

SEQ ID NO: 38319 - DNA, 120 bp, synthetic construct
  source 1..120: mol_type = other DNA
ggaataatttgcagtactatttatcaagggatactgtacacatatctgggccctttatacatgttgtttgacttaaaccccacaactacctgatgaggtgggtgttattaaccacatttg

SEQ ID NO: 38320 - DNA, 120 bp, synthetic construct
  source 1..120: mol_type = other DNA
ggtgctttagtggttataaaagtgcaaatgctgcaatatagtaagggagacaaagaaagacctatagtaaagtagaactttaatggtggtacaaacaaaaggccagctagctcagaaagg

SEQ ID NO: 38321 - DNA, 120 bp, synthetic construct
  source 1..120: mol_type = other DNA
ttaaactgtgttctgagatactctggaattagcagaaaatcacatttcaatttaaaaaacggtgacacatccattcaaatgagcaaccctcactgacatgagcaagagacccaggaccca

SEQ ID NO: 38322 - DNA, 120 bp, synthetic construct
  source 1..120: mol_type = other DNA
ggagtctatgcttaaaaaaccagcactagatcctgttggctgtttcttccaggagttctcagcctctcctactattaatgcagcttttcacacaatatttctggtcctttgagtctgtaa

SEQ ID NO: 38323 - DNA, 120 bp, synthetic construct
  source 1..120: mol_type = other DNA
tttcttatttcattgtggtggttattacatttcattcaaaagcccttagcatctcaaagggctggtgctgaaagagttaatggacaatgctcagagccccagagcgcagagctattctaa

SEQ ID NO: 38324 - DNA, 120 bp, synthetic construct
  source 1..120: mol_type = other DNA
agtttttatagggactgaccatgcaattacacagagtcacataattgcctatgtcctgcccaatgtagctataccataaaaatcagggtaggggatgaatttgtcattcatgagggccca

SEQ ID NO: 38325 - DNA, 120 bp, synthetic construct
  source 1..120: mol_type = other DNA
gggagcttcatgtttcctggtactttccttctcaaggtcactccataagtcaatgaggaaccttctggtcttccacccttttccgatttgcaaccacaactataacattttccatggcca

SEQ ID NO: 38326 - DNA, 120 bp, synthetic construct
  source 1..120: mol_type = other DNA
ctgagcctcatctcttctgcagcatatacttagtacttactacatatagccttatgttgaagatttgtattcttgtatttgaatttaatttctccctgactagattataatttcatatgg

SEQ ID NO: 38327 - DNA, 120 bp, synthetic construct
  source 1..120: mol_type = other DNA
tccctaaatgcaatcacttagaactgtaagaaaatacccaacctaacgcagtatgagtggctgaaacccagccagggtaagaaagtggcctggaaaagggtgagatgaatccatgtggac

SEQ ID NO: 38328 - DNA, 120 bp, synthetic construct
  source 1..120: mol_type = other DNA
tactttatagtcacccagaacaataactacacttcccagcctcccttgcagttcagcataaccatgtgactaagttctggccagtcagatatgagttgaagagctgtgtgtgccacttcc

SEQ ID NO: 38329 - DNA, 120 bp, synthetic construct
  source 1..120: mol_type = other DNA
ggatgttgcctgagcctctcttattgagtttctcaccaccttgcctgtattaaatgcatttgtacatatgttctatctcctcttctaccaggctgtaccatatgaaattgccattttgcc

SEQ ID NO: 38330 - DNA, 120 bp, synthetic construct
  source 1..120: mol_type = other DNA
ctccaaccacataatgactccctaaacttctcttgtattttccaatgccttgtacaagcacagaactggtcaatcaataaatactcactggttatttgaggaaaaaatgttgccaagcac

SEQ ID NO: 38331 - DNA, 120 bp, synthetic construct
  source 1..120: mol_type = other DNA
ggcctcactcccagagattctcatttaattggtctggagtggggcccagatttctgtattttttttaaagttctccagggaattctaatatgcagccagggttgaaaatctctgctatag

SEQ ID NO: 38332 - DNA, 120 bp, synthetic construct
  source 1..120: mol_type = other DNA
tttcggaagaagtcctggaggtcctgcaacagttgcacccgaagctcacactgctggtccaggcatttcatctgctctgtgagctgagcacggatctctacaacaaaaacaagagaagac

SEQ ID NO: 38333 - DNA, 120 bp, synthetic construct
  source 1..120: mol_type = other DNA
gtgtgtatgaattaaacacattctgcattgactattcctaaagcaaatcttggaagctgcccctctgggccgtaggcttggccatgacattgaactccactggcagatcaccatttccaa

SEQ ID NO: 38334 - DNA, 120 bp, synthetic construct
  source 1..120: mol_type = other DNA
acttcttatcacaacagtaatcagcccctctcaaaactgttcctcaggaaacaaaataccagaatgccctgccaagtcttgctctctactctgctagtttgcctttctatgaacttagta

SEQ ID NO: 38335 - DNA, 120 bp, synthetic construct
  source 1..120: mol_type = other DNA
tctgaaataattgtttttcattccttatatccatgttttccccactctcggtccacatgctttcagtaaaactgatcccacccctgccctctccaaagatagtgtgctttctcaaatcca

SEQ ID NO: 38336 - DNA, 120 bp, synthetic construct
  source 1..120: mol_type = other DNA
gcagaacagatacaaacacagttctaaagggctctgtaaactctggacaaagcaaaatgagagtcttgaaaagcaggacagcccaagaagagtcaaagctcaaggagagtaaaaatccaa

SEQ ID NO: 38337 - DNA, 120 bp, synthetic construct
  source 1..120: mol_type = other DNA
caaaatggagtttgtaatagcagccactccactggattgttatgaagaataaaagagatggagaatataaagtgcttgctacatgcctgatgcctagtaagcctccattaaaaggcaacc

SEQ ID NO: 38338 - DNA, 120 bp, synthetic construct
  source 1..120: mol_type = other DNA
ttgcacccagtagatcaatcaaaacaaaaaccacaggaacaggaaagccacgatcaaagaacaagtggctacatatggcaccaagaccaaaaaatgggagcatgcaagttggaatgtaaa

SEQ ID NO: 38339 - DNA, 120 bp, synthetic construct
  source 1..120: mol_type = other DNA
ctgaaatgccccatgcatgattcagtcataggatctgttttctatctctccttgcttcctatcagatcccattccattctatgtctggtgattcccaaatctgtatctacagtctagatc

SEQ ID NO: 38340 - DNA, 120 bp, synthetic construct
  source 1..120: mol_type = other DNA
aatttttcttcatgccacttgtaaatctatttaggtgtttatcattttctcctcccactagagtgtaagttccatgatggtagggacttcactttgttccctgctgatccccgatgccac

SEQ ID NO: 38341 - DNA, 120 bp, synthetic construct
  source 1..120: mol_type = other DNA
acaaaataagaatatccctttcaaataagctgacactttttgaacatgtaataaccaggttcacagaatcacagaggccagtgagaagaagatttaaaagtacccgtgtgagccccagtg

SEQ ID NO: 38342 - DNA, 120 bp, synthetic construct
  source 1..120: mol_type = other DNA
cactcttccttccccttccctctccacctccagaggggagttcccgctggaaattgcacaattctttgtgcagagagaaacaacaagcttagttcctgttgacctgaagagcataatgtt

SEQ ID NO: 38343 - DNA, 120 bp, synthetic construct
  source 1..120: mol_type = other DNA
ctagcatgcaggtgggtaatgaagagagtggagacaaccagccgatttcttcctggactttctgagtttcaaagtgctttcacttctattatttcatttaatgagatgctgtcagaaagt

SEQ ID NO: 38344 - DNA, 120 bp, synthetic construct
  source 1..120: mol_type = other DNA
aggggagaaacagatgcccatttccaacagaaacatctgttccttccagctcaggaaaatctgttggcagagaatcatgtggtaagatttttttgttaggaaaaaagctaaaatgcacac

SEQ ID NO: 38345 - DNA, 120 bp, synthetic construct
  source 1..120: mol_type = other DNA
ataggtataacagtcattcacctgggggaaacattctcaatacaaaacagtaaacaatgacaagtaagtttccctctcatccctacccttccccaaaggtctatacctctgaggaaacca

SEQ ID NO: 38346 - DNA, 120 bp, synthetic construct
  source 1..120: mol_type = other DNA
ccatgttcatcataagcccttttgttaaaattttcccaaatcatatttgcatggaagaacttgtcaccttcattttaaaggatattttcacactgtagagaattttatttgtatgttatt

SEQ ID NO: 38347 - DNA, 120 bp, synthetic construct
  source 1..120: mol_type = other DNA
ccctggagtttcacccagatcagatttttagagtatgtgccaacatgagatgactaaaatattcgagacagaaagaaaaatctgagccccagtttagagattctcaatcttcctccaggg

SEQ ID NO: 38348 - DNA, 120 bp, synthetic construct
  source 1..120: mol_type = other DNA
tgtcacatgctaccaagtaatacaacacattgctttcttgccttcagtgttatcccctttccaaggcataagaaactactctagaagtatccagagtcttaagacatatagggaaatatt

SEQ ID NO: 38349 - DNA, 120 bp, synthetic construct
  source 1..120: mol_type = other DNA
acccacgataaaaccctgttcactgaaatcccattcatacatttatttttttaccaaagtaatacatgcgaacaaaagcaatcaactggtggcagcatttaggcccactaagacacaacc

SEQ ID NO: 38350 - DNA, 120 bp, synthetic construct
  source 1..120: mol_type = other DNA
gacttcattctcctgctcttcatctccaagggctttggtggggaagaatgagataatgggtgctaagggttttgtactgagaatgaaggtatacaagatcaatacccagcagatattgag

SEQ ID NO: 38351 - DNA, 120 bp, synthetic construct
  source 1..120: mol_type = other DNA
caagtgcttttttattaagtatttctgtggttccccttccccagacaaaaaggaaaggggaagctattgttcaggacttctaatgggtttatctagctttgtgggttaaaagaacccaca

SEQ ID NO: 38352 - DNA, 120 bp, synthetic construct
  source 1..120: mol_type = other DNA
aattccttcttcctggcagtgtatgctctttgtatctccacttctcctgtctcagttaatagcctgttgattgatcaatttcattctaggttcatggaacaccaaccatgcaccaagatc

SEQ ID NO: 38353 - DNA, 120 bp, synthetic construct
  source 1..120: mol_type = other DNA
aggatatgaggggtaatattagtcctgatgggccaaaccaactggagggatatagggaggtgccaagttgcagaggtatcatgttgcccagcacttgatctagaatcctagattctaggt

SEQ ID NO: 38354 - DNA, 120 bp, synthetic construct
  source 1..120: mol_type = other DNA
cattctgtgtttgatggcagaacctaagtcagaatccagcacaatccctgacaagtgagaacctcagggtaagttgtcctgaccttgagattgcttctctacctcttcaattaaaaaata

SEQ ID NO: 38355 - DNA, 120 bp, synthetic construct
  source 1..120: mol_type = other DNA
actagatgcagcaaaaccacgggctttatgcatgactggtattgtaagagaggccacagggagtagaattaaatatgacacctccttgacatatgatcaaagctccttctaacctcaatt

SEQ ID NO: 38356 - DNA, 120 bp, synthetic construct
  source 1..120: mol_type = other DNA
gattaaagagtggtactaataacgctaaatctgtggcttaaccccaataggagtcttctgggattatactaagaaaaactatcccacacagacagagccattctgaccatgtccctccct

SEQ ID NO: 38357 - DNA, 120 bp, synthetic construct
  source 1..120: mol_type = other DNA
catgcagacactatgggaagaatgttccaggcagagggaacagcagggccctgagacaggacagggtcaagcatgcctggcatgttaaaggaaacaccatgagcccagtgtttattaaga

SEQ ID NO: 38358 - DNA, 120 bp, synthetic construct
  source 1..120: mol_type = other DNA
gtaacaattcccaactgcagaagctcctctgtcaagatgacccttgagagtcccaaagttcttaacccacagagactgacaatgtacaaaatacagaagcagaaaaccgagtataggaaa

SEQ ID NO: 38359 - DNA, 120 bp, synthetic construct
  source 1..120: mol_type = other DNA
taacaagtgctgttaattctttaattgtggatccgaggaaaatgaaacagggttcacccataaacatcttatctgccttgattccccctgtaactccttgactggagcagagtaaacagg

SEQ ID NO: 38360 - DNA, 120 bp, synthetic construct
  source 1..120: mol_type = other DNA
cattaaatctcataacttgtaacttatgtcaccgatttggtgagcaaacagaattaagtagtccagggccaacagcagaatcttcagggacagaaaccagataactccaattaggtgggc

SEQ ID NO: 38361 - DNA, 120 bp, synthetic construct
  source 1..120: mol_type = other DNA
attggggagattcttattttattatgtaagtcagaggaagccacgtttagctcctctgctctactgcagcatccctatttgtacctggtataaccagcagaggtagaaaaggaagtctgt

SEQ ID NO: 38362 - DNA, 120 bp, synthetic construct
  source 1..120: mol_type = other DNA
taggcagtctctagatttaagggttcctttcacctcgcctagaagggccctcaaccttgaaaataagaagcagcactatgaaaacaaactacccatttctcaactgttcaaagattagac

SEQ ID NO: 38363 - DNA, 120 bp, synthetic construct
  source 1..120: mol_type = other DNA
aattggaaagctgtcaatcaatgaaacaggtttcaaaataggttgtggaatcttcttccccagagacagttaaaaataggctaggcagccatctgtcttggtgggatacagcccttccag

SEQ ID NO: 38364 - DNA, 120 bp, synthetic construct
  source 1..120: mol_type = other DNA
taatagattaatgggttatcttggcagtgaaactagtggctttttaagaagaggaagagggacccgagctggcaagtttacacactcagctccctctctatgtgatatcctacgccacct

SEQ ID NO: 38365 - DNA, 120 bp, synthetic construct
  source 1..120: mol_type = other DNA
ttcatatgtcctaaaaatcatgaagctaggaactagtaatccatctttccactttccagctgagaagctgagaatcccaaaggtggaatgacatcttcaacattacatagctggtcctcc

SEQ ID NO: 38366 - DNA, 120 bp, synthetic construct
  source 1..120: mol_type = other DNA
ctaaccaggcaatagctctctccacaccgtgctttgaaaaaggaacaaaacagttcctttttcaggtcaacccagttttaactccaggtcaagacagacaaactttctcaaacttagact

SEQ ID NO: 38367 - DNA, 120 bp, synthetic construct
  source 1..120: mol_type = other DNA
gagggcacagcatggatacagcacaaaccatgacacaacatgataaagaaaggaaactagaggcagttcagctgtaaggcagtataaaatgtaagcagggtaagtgggaagtgattaata

SEQ ID NO: 38368 - DNA, 120 bp, synthetic construct
  source 1..120: mol_type = other DNA
gttatcttgaagttaatgcctcttctataacataattattagctctatcacctaggctagactgcaatggtgcaatcaatcatggctccctgcaatctcgaactcctgggctcaagcaat

SEQ ID NO: 38369 - DNA, 120 bp, synthetic construct
  source 1..120: mol_type = other DNA
tcaactgctttttccctgcaatatgacatattttcctaatgtagctgtcagaggtcaagggtataaggtaagcacaattcccatgaagcattctcacttctggaaggacaactctacagg

SEQ ID NO: 38370 - DNA, 120 bp, synthetic construct
  source 1..120: mol_type = other DNA
caagtcctctctgataggaaaaggtctccttgcactggtgcagggaaaggaggggcccctccctctgtactctgaaacaaaggaaaacccagagctccaaccatgtggtgtaacattcaa

SEQ ID NO: 38371 - DNA, 120 bp, synthetic construct
  source 1..120: mol_type = other DNA
cctttgacctgagtatcgtactctgctatgatctccttatcctttttgaatttggctggagacgtcatgttttccttctttcttccaaattcgaattgtgaattgatagatccacggaaa

SEQ ID NO: 38372 - DNA, 120 bp, synthetic construct
  source 1..120: mol_type = other DNA
caaatctgcaggaaaaagcctgctcggcacgggacacatccaggaaaacaatgtggtcagctgaagcaggaaacgggttagaggatagggtcggagccgggaaaaccggggggcggcgag

SEQ ID NO: 38373 - DNA, 120 bp, synthetic construct
  source 1..120: mol_type = other DNA
gacccgcagagcggaggaaggtccgggagaaaaggggcgggacggaggagaatccgggatcgcctggcagaaaaagagaagggagtttctgaatcctgggaagaggaggcgtgggtaggg

SEQ ID NO: 38374 - DNA, 120 bp, synthetic construct
  source 1..120: mol_type = other DNA
ctctgggtttggaagatggatattgacaccaaagcatagagaaaggttcagtgggctgcaacaaggactggtataaagcatgcaatgagccattgaaaaattacttattacttagagcta

SEQ ID NO: 38375 - DNA, 120 bp, synthetic construct
  source 1..120: mol_type = other DNA
gactgactcacaaatctcacagagtaagactaagcttgaataagaatttttacaactcaaggtataaacagttcatgttgctattttttttaaagtactagctaaaacattccctgtagg

SEQ ID NO: 38376 - DNA, 120 bp, synthetic construct
  source 1..120: mol_type = other DNA
tcgacatctatgttaatacgttatgacagaattttagtcaagggaaatatttgacaccaaagtataaagtatgttgtacaggcacaagtggagatattgtaggttcaattccagaccacc

SEQ ID NO: 38377 - DNA, 120 bp, synthetic construct
  source 1..120: mol_type = other DNA
aagatacacatctgtatccctaccagcatcagatacatgctaaattcttgccagattagattccagtatctccctcagtcaaggtaaacagttaattatttctactgtttcaacaatgtc

SEQ ID NO: 38378 - DNA, 120 bp, synthetic construct
  source 1..120: mol_type = other DNA
gcaacttgccagagatagaagagagtacagatgaagatgtgttaaatatctcagcagaggagtgtattagataaatggaattatgatatatatgatatacaaacttttttctatttaaaa

SEQ ID NO: 38379 - DNA, 120 bp, synthetic construct
  source 1..120: mol_type = other DNA
acaaaggaataggaaagtagggtagtgttggattctggttttatgtaactctaaaataaatgtatctctttaatatctcagttgtagggattttgtcaataccaaagcagactgagttgt

SEQ ID NO: 38380 - DNA, 120 bp, synthetic construct
  source 1..120: mol_type = other DNA
gcaagacagaggtgcactgattgaagcaagccccaaatgtgattctactccagctggggaatatttcaaattactcaactacctttggttaactggattatgggaaagccaattctaaac

SEQ ID NO: 38381 - DNA, 120 bp, synthetic construct
  source 1..120: mol_type = other DNA
tcaattcaacacacctgtattattctccaatagtgtggcaagaattgtacaatgacatgctcacacttgccttcagggagtacacagtaagttgaggaaaggatagaactctgtgagtcc

SEQ ID NO: 38382 - DNA, 120 bp, synthetic construct
  source 1..120: mol_type = other DNA
gaacatgcacatgttcctaaaatttttctgttatggtgtctggtttgcgaaaggaacaaaattaaacatagttccttggcaatttttccctcttccactctactaattggcgtatgtgcg

SEQ ID NO: 38383 - DNA, 120 bp, synthetic construct
  source 1..120: mol_type = other DNA
gacctaagggctacaggacgagctccctgcctacaagacagaagcagctccagaggttttggtaagtaatgtagatttcagtgcagtgtggtctatttaaaaaagtagaacaaaaaggaa

SEQ ID NO: 38384 - DNA, 120 bp, synthetic construct
  source 1..120: mol_type = other DNA
ccaacaaggggcacaaggcccaaagattatggggtctacctgggccatgaactggagctttatcaccttcacaatggagtactcactgcctatgtcaacagccatgcagacttgctgttc

SEQ ID NO: 38385 - DNA, 120 bp, synthetic construct
  source 1..120: mol_type = other DNA
agcaaaggctttgaaaataaactgcctcggtttcaggacccagcctaaccacatattagctgtacaactttgggtgaatcacttaacatctccaaacttcagttacttcatgtgggaaga

SEQ ID NO: 38386 - DNA, 120 bp, synthetic construct
  source 1..120: mol_type = other DNA
gtacatgggagagggttgtgaaggccagtagcccagagaaaatcaagggcagctgggtgcatttaggtggataagaaaacaatgaattactccatcaaaagcaaaagcacaagcacatag

SEQ ID NO: 38387 - DNA, 120 bp, synthetic construct
  source 1..120: mol_type = other DNA
gagccctctccagtaactctccaaggacctcagcagagacacaaggactcagtgggtggagcacctggaggcaattgtaggttagtcacattgaagcccaatcctgcaggacgctatcag

SEQ ID NO: 38388 - DNA, 120 bp, synthetic construct
  source 1..120: mol_type = other DNA
tggctgccttgatattgttcttgctttttctttgtccacttatgttgaccctgccactcctaaatatgctaatattacttttgctgaggtagggaatcactctctttatacaagttttgt

SEQ ID NO: 38389 - DNA, 120 bp, synthetic construct
  source 1..120: mol_type = other DNA
gatggggagtagatcatgaatagagactgcagagagagtatcaaaagaaataaaaggagaaggcaattttatacatacagataaaacaaaaattctcaaactgttgattcccccattccc

SEQ ID NO: 38390 - DNA, 120 bp, synthetic construct
  source 1..120: mol_type = other DNA
tccactgatttctgccttcctcattactatctaaattctacccattccttcaaggcccagttcacctcttgcctcacccagaaagcttcccctggagggttctggtcctcacagggccac

SEQ ID NO: 38391 - DNA, 120 bp, synthetic construct
  source 1..120: mol_type = other DNA
ccagacacatacccttcatgatgttgaatcccaatttaggaaacctcagacagctcagagcactgtcttatccacaaggctgagaatacaagacttttgtcctccaaaattaaaagtata

SEQ ID NO: 38392 - DNA, 120 bp, synthetic construct
  source 1..120: mol_type = other DNA
ttttagaaatgcaatctaccaggtcccgctccagacctaccagatcagaaactctgggggtgagcccagcaatctgtattctaacaagtcctccaaaacttgatgtgcactcaagtttga

SEQ ID NO: 38393 - DNA, 120 bp, synthetic construct
  source 1..120: mol_type = other DNA
ggtgagaaatgctaagagctaggaaataaaaatacacttagaagcagcctatgttgtacgctcttgaaaaaccttaaggaagctttaaagagcagcaaaatcacttcaggccactcagga

SEQ ID NO: 38394 - DNA, 120 bp, synthetic construct
  source 1..120: mol_type = other DNA
ttaaaaacaatttccacaatcctctccttgtgtctcaaccatgctcaggaattacaagtacaataatctcctcaacctcccctagcctttcctagctcagaaatccgacataggccactt

SEQ ID NO: 38395 - DNA, 120 bp, synthetic construct
  source 1..120: mol_type = other DNA
ggcttcacattagtactctgcatggtgacactggatggcatgtgattatgtttgtcatatcataggaaatttggaaacaagagtgttagacctgatactgttctcaaagctgtacctcag

SEQ ID NO: 38396 - DNA, 120 bp, synthetic construct
  source 1..120: mol_type = other DNA
gttcaggggactctcttggttcaaaaaaaaaaaagcaaatatactttactaaatgtacatattctctcaatccagtacaagtttgcaatatccaactcaatgaaaaaaatctcaaaaaaa

SEQ ID NO: 38397 - DNA, 120 bp, synthetic construct
  source 1..120: mol_type = other DNA
ttaggcattcgaactgagacatcaagaaaggaagcatgtaactatggactgtgaacacaatataaagaaaatgatgtaaaatttcttatatccttattcaaatcacgccttgcagttttt

SEQ ID NO: 38398 - DNA, 120 bp, synthetic construct
  source 1..120: mol_type = other DNA
gactttcggtggggttggagtgtcaaaactcaggcgcgccgcaaaaccccgtccccatccaaaccaagcccacacacccggcccatgtgccgccccctggcaaaggcgaggctggctgcg

SEQ ID NO: 38399 - DNA, 120 bp, synthetic construct
  source 1..120: mol_type = other DNA
accaaattatgcagccttgaatggcaagctgaaagggtggggaggcagctacctcttaggtcacataaaactattgaaagtttttgaacagagttgagattgatggaaaggaagattgct

SEQ ID NO: 38400 - DNA, 120 bp, synthetic construct
  source 1..120: mol_type = other DNA
atgttattgtgtgcttagccttggactttgttgcttgtgtgttggacacctaatagtcttgacagctaaataggcttttgtaagcgagagtggtaaagtccaacatgttgctaaacctat

SEQ ID NO: 38401 - DNA, 120 bp, synthetic construct
  source 1..120: mol_type = other DNA
cagtttttcctattacgaataaaactgctatggacattcttgtatatatcattttctgcacatatgttttaatttctcttggataaatgcttaggaattactgagtcatagaataggtag

SEQ ID NO: 38402 - DNA, 120 bp, synthetic construct
  source 1..120: mol_type = other DNA
gggcagagaatggggggtgagaggggaagagagaggagagggatgcagatctagctaccaaggaaaagtcctgaagagaacatgtcctctcctgaagtaaaatcactttcacccgaccat

SEQ ID NO: 38403 - DNA, 120 bp, synthetic construct
  source 1..120: mol_type = other DNA
atctactggtctatctggtctatctgtacccgtatattctacaggctgtctcactgagctttcactaggttatgctgcagtaacaaaagccccaaaatcttagcagctacacatacaaag

SEQ ID NO: 38404 - DNA, 120 bp, synthetic construct
  source 1..120: mol_type = other DNA
ggacatataaatggcaataaaagatactcaatctcaataccaggaaaatggaagttgaaaccgcattgatatattactgcacctctacgagaataacaaaataatttttaactgacaagc

SEQ ID NO: 38405 - DNA, 120 bp, synthetic construct
  source 1..120: mol_type = other DNA
aaagaagagagaagaaacctgcatctaattactgaagcagtttcattcagcaaatgtaattgcatcgcaggcacatctcaaattaaaaatcttcatcttggtctctgtcatttccatttt

SEQ ID NO: 38406 - DNA, 120 bp, synthetic construct
  source 1..120: mol_type = other DNA
gctctttcaggttctatctccattttcccctcaattcctccccattctgctataataaaaaaaaattctcacctccggaagatcccgcctgtgcctccccgccagcctttcaggaggtct

SEQ ID NO: 38407 - DNA, 120 bp, synthetic construct
  source 1..120: mol_type = other DNA
aagtaacagataagaaacctgaagatgagggacagctaatcacgtatttggccatatttccattttttggtttttgtgatgctggaagaatgaccagaatgggtcacgggaagagtattc

SEQ ID NO: 38408 - DNA, 120 bp, synthetic construct
  source 1..120: mol_type = other DNA
aattgagccacacccactacctcctgtgctaggggtttgtcccctaatcctgggacactagggagctccttacctggaaggcagttgcactcaaaagtgaagtcaccagtctgccgacag

SEQ ID NO: 38409 - DNA, 120 bp, synthetic construct
  source 1..120: mol_type = other DNA
tgatcatgtgaattaatacttaacaaactctcctttatatatatataaagattgccaatatatatatattaagattgccaccaagacactttgggttggaatatatatacatacatatat

SEQ ID NO: 38410 - DNA, 120 bp, synthetic construct
  source 1..120: mol_type = other DNA
ttaaaatctttttaatttccagtgagaaacatcatgcttcccttctggtatatctccaacttaggttcctttcttccacccttttttcaaaaatctgctgtaaacctgtcctatagtaag

SEQ ID NO: 38411 - DNA, 120 bp, synthetic construct
  source 1..120: mol_type = other DNA
ttactcagcaagaaggaaaaacaaaaagaactttaaaaaaaagtatttgtgtatagattggtgtccagaactgggacgcttgtggtaaaacacactttctagtgtagtttttctagggcc

SEQ ID NO: 38412 - DNA, 120 bp, synthetic construct
  source 1..120: mol_type = other DNA
cccctgtacagaaggccacattatagtcagtttttttcatacttggctttactctgaacctctctaagaagcccaagttaatgaactggtaattattttatgacttcccaaagaagtgtg

SEQ ID NO: 38413 - DNA, 120 bp, synthetic construct
  source 1..120: mol_type = other DNA
atgtatgaaattctgaaaggcccctttatatttccaattttcatcattaaaaataattgcagagtaacttatatcagactagccctcttgctctggacaaaatatcaaaggcactggaga

SEQ ID NO: 38414 - DNA, 120 bp, synthetic construct
  source 1..120: mol_type = other DNA
tggtgcagtggagggactcaggagacctgaaatcctgtctgtacccctaactgcaagcaaagcacaacttcatgggggctcaatttccctacctgtaccaagctgagagcgaactaaatg

SEQ ID NO: 38415 - DNA, 120 bp, synthetic construct
  source 1..120: mol_type = other DNA
aagtcatccctttttagactagactgaagacatccattttcccagctccccaaaatggcaatgattttattctaaccgcatctaaccttccagaagcactacttgtaacatgttgcccca

SEQ ID NO: 38416 - DNA, 120 bp, synthetic construct
  source 1..120: mol_type = other DNA
gtgttttacttgttgcattaacatgtaatcgttttaaactggcattacttgttgctttgtagcttcttcaaataagcctctgtcgtctatctcacatgatttttttcatatccttctccc

SEQ ID NO: 38417 - DNA, 120 bp, synthetic construct
  source 1..120: mol_type = other DNA
cacctccacggaaaataccccaaaagcagcaaccttcagaaaatacaagactttactctcaaggagtaactctaatgtgagttccagaagatagccagccatatcctaaatcagttggct

SEQ ID NO: 38418 - DNA, 120 bp, synthetic construct
  source 1..120: mol_type = other DNA
ttatgcggtatcatgaaataagaactgctctggaaatcagaacctgggttctagctctggcttttccatatactaaccatatggtctaaaggaattcccttaagctatttgagactgatt

SEQ ID NO: 38419 - DNA, 120 bp, synthetic construct
  source 1..120: mol_type = other DNA
agacatagcattagtcctgcctttcagggatgttaaatgcttcaaaaatcttggctatctagaaaaggaggacagtagccgattacgtcacccacccaaaatcatgtatttgactccaga

SEQ ID NO: 38420 - DNA, 120 bp, synthetic construct
  source 1..120: mol_type = other DNA
taaaggccaaactattggggagctagtagaacagggttttgccaagacaagtacaaaagggtgagggagatattagtatgattaatcaatgccacctgaggcagcaactctgggtgtgtc

SEQ ID NO: 38421 - DNA, 120 bp, synthetic construct
  source 1..120: mol_type = other DNA
cactaccagtgatgcagtttgtcccgtctcaagcctatgagcatatcctttcagatctgaagccacttccttcttcctatcaaggacagtattatcaagtgtctttgtgagaggagcaat

SEQ ID NO: 38422 - DNA, 120 bp, synthetic construct
  source 1..120: mol_type = other DNA
cttgaaaggtcagtaaaatttgtataagacaaggagaccagctaagctaaggatattcgttgtaacactgtaatagcaaaaccttgaaaacaacataaatgcccacccttagaggaatgg

SEQ ID NO: 38423 - DNA, 120 bp, synthetic construct
  source 1..120: mol_type = other DNA
ataagctgtttgttcagtttcacaggtcgacagaggtaagggaattatgtcaaggatctgcacttaatggacactctcggaagcctcattcacacctggtgtggatgttttagatgggat

SEQ ID NO: 38424 - DNA, 120 bp, synthetic construct
  source 1..120: mol_type = other DNA
ggttctgaaatacaatcctcagccatggatccctcctgtgttgtgttgagctttcaattgctttgctcttttagttctattcatcaaatgaaaatgctttttgtgacatccgttctttct

SEQ ID NO: 38425 - DNA, 120 bp, synthetic construct
  source 1..120: mol_type = other DNA
gtcctggctacatcaaaatctgttggggtggatcttggactcagcacccagggattctgataaggtaagtttgagaatccatattttttcaaggtttacaggtgattctgacaagtaact

SEQ ID NO: 38426 - DNA, 120 bp, synthetic construct
  source 1..120: mol_type = other DNA
gtgcttattgttaatgcgtacatgaggaaggaatcgtgtattttcatttatgtgtttattctaatgcccataccctacccctgtacctggcatgatgccttggtatctaataggcacaca

SEQ ID NO: 38427 - DNA, 120 bp, synthetic construct
  source 1..120: mol_type = other DNA
ctcctggagattttgggatcttgtgtggggaaccacccatctaatccatccttgttttaaagagagaaaaccaaagaagcaaagtgactggcccaagtacctagagctgggtcagggttg

SEQ ID NO: 38428 - DNA, 120 bp, synthetic construct
  source 1..120: mol_type = other DNA
gttgaatgttgaaggagaggatgccaagggatattaaagaaggtaaaagagataagtgacagcaaacattatttatttttaattatctctcagaatgacttttagatacccttccctact

SEQ ID NO: 38429 - DNA, 120 bp, synthetic construct
  source 1..120: mol_type = other DNA
gttaatgcattcttgggtggatttgcaaaacagaacaaaacaaaaagttgttgaagttagttacactggtctaacaacgtatacttaccacccccatttgggctggaggaatggatctaa

SEQ ID NO: 38430 - DNA, 120 bp, synthetic construct
  source 1..120: mol_type = other DNA
cagcaggccatgcttctctgttcagtagttcagttttcactaacttaactgcagatgtgttcttggagggatttatttctaatcaattgaattatgggtacttggataaaatgatgatgg

SEQ ID NO: 38431 - DNA, 120 bp, synthetic construct
  source 1..120: mol_type = other DNA
atcttgttaatgtgatgaggtgatgatgggaaggacattcccactgggcccgaagtggtgaaactggtaaaactccctttgtaagtccctcttgttcaacatgagtgtcactcccatgtc

SEQ ID NO: 38432 - DNA, 120 bp, synthetic construct
  source 1..120: mol_type = other DNA
gaaggttgggtttattcataggttttgtcttaattatagatatttagtttattgaatatcttattgagtattgagtacctgctgtggtccaggcatcttcttaggtcccaggtgtacaaa

SEQ ID NO: 38433 - DNA, 120 bp, synthetic construct
  source 1..120: mol_type = other DNA
gaggcctttcctagacactatctgaggtacactcctgcacccccagccttcatgattgctttttatacattactgggttttgtttccaatggaacttatcgcttattactgtcctaaatt

SEQ ID NO: 38434 - DNA, 120 bp, synthetic construct
  source 1..120: mol_type = other DNA
tttataaaaattctatcaggcatgcagggcatgtgattatctttttattcatgcgattgcttagtggattaagaaaagaaagttgaagccaaattccttttacagggccagcgtgggggt

SEQ ID NO: 38435 - DNA, 120 bp, synthetic construct
  source 1..120: mol_type = other DNA
aacaggcagtggtccaaattagacttgcaaactgtactttgtcaatctctggttttactgatttcttaaatatatcttaggttaaaacttatttttccatacttgatagggagcaacaat

SEQ ID NO: 38436 - DNA, 120 bp, synthetic construct
  source 1..120: mol_type = other DNA
agataagtaacttgtccaaggtcacagcaccagaactccaaaccagaccttctgaccttcttgatacagactcctcacagtcacctgcatgccatctttggtttcagtgctatgaacttt

SEQ ID NO: 38437 - DNA, 120 bp, synthetic construct
  source 1..120: mol_type = other DNA
ctcttaaatgtcccccagctctggtgcacatttaacattatgataaggaactgggatgttccagacaactatccctaacttccttttaagagtttcagggggcagagaaagagaaagaaa

SEQ ID NO: 38438 - DNA, 120 bp, synthetic construct
  source 1..120: mol_type = other DNA
taaccctcccctaacttaaagctagagaattctgaaactgaggaggggatcctctgttaatcagtgagcactttttgatgagctgatagatgatatatgagagactatgcgtggcacaat

SEQ ID NO: 38439 - DNA, 120 bp, synthetic construct
  source 1..120: mol_type = other DNA
actcaagctgataacaaacttggcctgatgagaaataataagtatttttctatttacatgagaatttaatctcaaaacagaaatcagaaaaatatgaagtccagggcataaaacctaaaa

SEQ ID NO: 38440 - DNA, 120 bp, synthetic construct
  source 1..120: mol_type = other DNA
tgcagagttgagttaagtttatgattatgaaataaaaactaagtaacaacaacaacaacaaaaaagctcagtggttgccaggagtttggggatgggtagggagataaatagttctgaaac

SEQ ID NO: 38441 - DNA, 120 bp, synthetic construct
  source 1..120: mol_type = other DNA
caagtagtgaggcctccactgtctcacaccagccaagaaagaccaggtcttagactatccagtgttcctgcctctctttcacggtgctgtatctggggaatgaatactccattgtcatag

SEQ ID NO: 38442 - DNA, 120 bp, synthetic construct
  source 1..120: mol_type = other DNA
gatttagaggatccgtagaaacggatgcacagaatatccctcagtcttctctatgtagcaggccctccatatacgcgggttccccaagaccgaaaatattaaacaaatgaatttcttttt

SEQ ID NO: 38443 - DNA, 120 bp, synthetic construct
  source 1..120: mol_type = other DNA
gtgttgtgtggtgtctccagccacgcactcagctcaatcttagcacagttaaaaaatgcctttctagcaagttatctgcccagtgcctgaaaagtatcatttcttgtgttcaataaaaag

SEQ ID NO: 38444 - DNA, 120 bp, synthetic construct
  source 1..120: mol_type = other DNA
gggcagggaggaagtggcaagaataacatttgtgaagatgtccaggtgagaaatagaggttttaatgctcaagatgtttccttttcccttttaaatctgacctgtgatttccagcattgc

SEQ ID NO: 38445 - DNA, 120 bp, synthetic construct
  source 1..120: mol_type = other DNA
ctgactatgtaatctactagaccagagctggcgaggacttcagttaaggcatggtcatgggtggacggagaaaaggtgatacaattgaaagtcagaagacagatttagtaatatttggaa

SEQ ID NO: 38446 - DNA, 120 bp, synthetic construct
  source 1..120: mol_type = other DNA
ttctggctgagctatcctattggctatcgggacaaaatttgcttgagccaatcaaagtgctccgtggacaatcgccgttctgtctataaaaaggtgaagcagcggcgttttcggcgactt

SEQ ID NO: 38447 - DNA, 120 bp, synthetic construct
  source 1..120: mol_type = other DNA
gtgctcgctagtgtggcggagctgggtcttggcttcactgagctgacttaagtcttagtttctgttttgttttccaaagcgccctggcggcggagagtaagggcctcggaggcggaatct

SEQ ID NO: 38448 - DNA, 120 bp, synthetic construct
  source 1..120: mol_type = other DNA
aagtggcggttcggccggaggttccatcgtatccaaaaggctcttttcagagccacccacatcagcacttggaagaagctgtaccgcttgccctccgtgctcctccggcattagagcggg

SEQ ID NO: 38449 - DNA, 120 bp, synthetic construct
  source 1..120: mol_type = other DNA
gatacaaatggctgtagaggtcttagataacaccttctcggtcatttatttgcacctcagaagaagccagggcttcggttttctgtttgtttcatcacagttgacaggttaaaagcattc

SEQ ID NO: 38450 - DNA, 120 bp, synthetic construct
  source 1..120: mol_type = other DNA
tcctctaataaccagcttctacgtggctaccttggttgccagtaagtccactctgaatctgtggcttttatgaagtgaaaaacgtgctttgttcacatttaattctgccttaggctagtg

SEQ ID NO: 38451 - DNA, 120 bp, synthetic construct
  source 1..120: mol_type = other DNA
ttatacatctagttctttatgtttcccacagccttcccaggtttcagatgttcttgcagctgaacaagaatgtttagccccacacgacatctgcaatctccaagtacacaatatcttcac

SEQ ID NO: 38452 - DNA, 120 bp, synthetic construct
  source 1..120: mol_type = other DNA
aatgaaaacctaaggctgcttctcccactttgcctgagcaaatatagtgagattacacagcaaggcatgtgtaaattgccagtgcctatttctcagaaccagatttggtgatcgcaaaga

SEQ ID NO: 38453 - DNA, 120 bp, synthetic construct
  source 1..120: mol_type = other DNA
ttctgttttcctctccctcctcctccactctgctcaggtccctctcactcttttttttttttaaccgctacgccacagtccccgggagaattcagatcccaaccggggcttccggattct

SEQ ID NO: 38454 - DNA, 120 bp, synthetic construct
  source 1..120: mol_type = other DNA
ggatgtgtagtgtgacattgttgaaacagtagaaataattaactgtttaccttgactgagggagatactggaatctaatctggcaagaatttagcatgtatctgatgctggtagggatac

SEQ ID NO: 38455 - DNA, 120 bp, synthetic construct
  source 1..120: mol_type = other DNA
cacgttggttttcgctccctcttccgcttttcctgcctctccaacccggtatcagtttgaattgccagcgccgcgcaccgattggaagaactagagttagccccagtccctcattggaag

SEQ ID NO: 38456 - DNA, 120 bp, synthetic construct
  source 1..120: mol_type = other DNA
gtccaccgtagggcagtcgtcgttggcatcgcgcgtaatcatcggccggcctcctccagtgtctcccagccctggcggacagcccgggtcccagcctaggacccaggaggatgggtgttc

SEQ ID NO: 38457 - DNA, 120 bp, synthetic construct
  source 1..120: mol_type = other DNA
tttccattcccatttggttgaatctgcagatatggaacctgcaggtatggggagggctgatgtacattaatctctggaaattctttacaaccctggtcagattcatggtcataaactgaa

SEQ ID NO: 38458 - DNA, 120 bp, synthetic construct
  source 1..120: mol_type = other DNA
aagacatcttgactgaggtacctattctggagcaacatttcttttgggccaatacagtactttgttacgcgttgagctacaggattctacacaggcagaatgatcctaagggaaagtgct

SEQ ID NO: 38459 - DNA, 120 bp, synthetic construct
  source 1..120: mol_type = other DNA
caaacatgctgttaaatgtgatcaattactggagtcacctgtgagggaattgcgagtccccatttactgaacaagaaatttgagtcaggcagatgatccgaggtgatggtgacccatgat

SEQ ID NO: 38460 - DNA, 120 bp, synthetic construct
  source 1..120: mol_type = other DNA
tagaaacaaaacagtgacttgggtagggtagacattaggaaagtgacttagctggtaaatatgtgattaataatggagatttggcctaagcatgagtgcgagcctctgaatacggatggg

SEQ ID NO: 38461 - DNA, 120 bp, synthetic construct
  source 1..120: mol_type = other DNA
tatagaattccaggagagtttaaagaaaacagtagaatactttcttagcaagggtatgggtgggcttctgagtggaggaagcaggctagaccttgggatgttccagtccaaattctgttt

SEQ ID NO: 38462 - DNA, 120 bp, synthetic construct
  source 1..120: mol_type = other DNA
acaatatgaagagatggcattataaagaggcttggcagcagggcccatttgaatggttggttcttgattcccatgttgatataggcagatccttgacaggaattttgaatggtcccaaat

SEQ ID NO: 38463 - DNA, 120 bp, synthetic construct
  source 1..120: mol_type = other DNA
gtgaggttaagccactgaaattttgggggttagttgttcatgcagcagaacccagcccattcttactgccttaatagtcatttaatacatatgtattgagtatttaactttgtgctgggc

SEQ ID NO: 38464 - DNA, 120 bp, synthetic construct
  source 1..120: mol_type = other DNA
gtgagccactgtgcccagcaatttttttctttagtctaagtgtgcacattaatgcataggaaatccccatctttccccaaccccctagtttttcttttcctctttttaaaaactggattt

SEQ ID NO: 38465 - DNA, 120 bp, synthetic construct
  source 1..120: mol_type = other DNA
tgtgaggtgggtaggcaggggataaattcttaccacagtttctaggatgaggaaagtgaaactcagaggcccaaatcttctgactcacacagtgattctggggctgtctgtaatatctaa

SEQ ID NO: 38466 - DNA, 120 bp, synthetic construct
  source 1..120: mol_type = other DNA
gtaaggggaggagtgtttctttctttcatagctttggaataatctaccgcacagggcagacagttttgaagatggccatgtttaaagtccatcagagaaaactacagtcaaaaggaaagc

SEQ ID NO: 38467 - DNA, 120 bp, synthetic construct
  source 1..120: mol_type = other DNA
ggaagcttcatgggtgtgtctggtgatgctggatttgaattcacatataaaaacactccctggcaggtctttatctgacatcgtttggaaatggtgatctgccagtggagttcaatgtca

SEQ ID NO: 38468 - DNA, 120 bp, synthetic construct
  source 1..120: mol_type = other DNA
tggtgagtcggtgggcaagtccaaacttgtcttaggggcctgaatcaaccctcagctggaaagtggaaaaggcgatgttccaggagttaagagtcatggtcactgtgatttacacagaga

SEQ ID NO: 38469 - DNA, 120 bp, synthetic construct
  source 1..120: mol_type = other DNA
ggccctcatgaatgacaaattcatcccctaccctgatttttatggtatagctacattgggcaggacataggcaattatgtgactctgtgtaattgcatggtcagtccctataaaaactca

SEQ ID NO: 38470 - DNA, 120 bp, synthetic construct
  source 1..120: mol_type = other DNA
gtttagctctttgaggaaggtatttcaggcagagataatagtgcacatctaaggccatgagatgggaatgcgcttatctggtttgagaaacagtaaggagaccttgtacagagtaggcaa

SEQ ID NO: 38471 - DNA, 120 bp, synthetic construct
  source 1..120: mol_type = other DNA
gggttttagaatcttgggaaactgtggtgcctacaacttaacctcctttaaaattttaagcacttttcttgccgtttcagctaataaggagaaggaatataacagggtaagcctgagaca

SEQ ID NO: 38472 - DNA, 120 bp, synthetic construct
  source 1..120: mol_type = other DNA
cttctaaatgtctacatacttgcctaagaaaatatttctcaactcctccagaatatttagggttaactaaaaattataaaaacataccacagagctagtccactctttatgcctagggtt

SEQ ID NO: 38473 - DNA, 120 bp, synthetic construct
  source 1..120: mol_type = other DNA
actctggatgcctgactggtgacatcaggcagccagagaatttcactcttggcgctaaccggttctggccactgagctttctccattgtgtctgcttatccaagagttagagtgaagtca

SEQ ID NO: 38474 - DNA, 120 bp, synthetic construct
  source 1..120: mol_type = other DNA
tctaaattgacctttagtaaaagcaggaatggccatattcaaactggtaacctcgcaaatcctgcccaccctttcactttctgtctcaatacattgatgtcctctaacccatttcctgtc

SEQ ID NO: 38475 - DNA, 120 bp, synthetic construct
  source 1..120: mol_type = other DNA
cttccataattgtattcagaatattttacaagctttacactaaagttaacgagatttacacacctccattacagtactagagtgttccaaatttgactacaaatcttctcagcacaagaa

SEQ ID NO: 38476 - DNA, 120 bp, synthetic construct
  source 1..120: mol_type = other DNA
ctctgatagatattaactccagtagatactgtccagtcatatacgaacactacatattgcaaaccgaagagatgtaacacagaagattggttagaggtggcaaagggttacagggaaggc

SEQ ID NO: 38477 - DNA, 120 bp, synthetic construct
  source 1..120: mol_type = other DNA
gaagatgactccaattttagttttaatcaaggtactgatttgtggaggtatctttgacacatcagttgacctctgagtttcagattctatacctgtgaaatgttagaataaaaataacaa

SEQ ID NO: 38478 - DNA, 120 bp, synthetic construct
  source 1..120: mol_type = other DNA
gacagggctgagcaagcgagagagatcaatgcccagtagatctttcttatttcatgttaggcttatttcttgcccttgtgtggcccagggttttacaaacaatagtgaaatgatcagatt

SEQ ID NO: 38479 - DNA, 120 bp, synthetic construct
  source 1..120: mol_type = other DNA
aaaaaatgccaactacaacaggttactttaacctgcaaggacatatgcagacgaagtgaagtggttgaaaaggatatcccatgcaagtcgtaaccagaaaagagcaggagtagctatgct

SEQ ID NO: 38480 - DNA, 120 bp, synthetic construct
  source 1..120: mol_type = other DNA
gaaacaagttcagagcttgaagacaaggctattgaactaaccgaatccagcaaagacaattaaaaaacacacctttaactgtgttttcttatacttcgggctttttgtaggttaatgact

SEQ ID NO: 38481 - DNA, 120 bp, synthetic construct
  source 1..120: mol_type = other DNA
tttggtactcagttacttgagttctttatatattctggatatgaaccccttgtcaaatgcattgttggcaaatcttttctcccactcgtatgttatctattcactctgtgaattgttttc

SEQ ID NO: 38482 - DNA, 120 bp, synthetic construct
  source 1..120: mol_type = other DNA
accatgtcatctgtaaacagggaaaatttcagttccttctttccaatttggaggcctttgtttccttcttttacctaattgctctaagaccagacacagcttctcttttttctctcctga

SEQ ID NO: 38483 - DNA, 120 bp, synthetic construct
  source 1..120: mol_type = other DNA
tttgcatatgctttttaggtccattgccctagagtgcaacttgaagctgttatttcattgtttacctcctgtctggatagtctttccatggctgaaagaggggtgttgaagtttcttagt

SEQ ID NO: 38484 - DNA, 120 bp, synthetic construct
  source 1..120: mol_type = other DNA
ctacatcctcaatacaccacatggcagtaattatttcggagagataaatccactagacgccatcagaattggaccatgcagaaaaatgtagccctcaataaagaaggggcgatgactgga

SEQ ID NO: 38485 - DNA, 120 bp, synthetic construct
  source 1..120: mol_type = other DNA
aatttgcagaacctccctcctctgctaacacaaacagtgactcattgaaagaaagataaagcaaactccttattgtagagtttttgtcatagacagctgaattgaatcaacatcgctggt

SEQ ID NO: 38486 - DNA, 120 bp, synthetic construct
  source 1..120: mol_type = other DNA
gtttgtcctgacttctttgctacttcacttttcgtaaggctctgagagtgcaggcccttgtgggtggacactgcagggtgagaggaagaagtaaactacttttttccgtttctgatgggg

SEQ ID NO: 38487 - DNA, 120 bp, synthetic construct
  source 1..120: mol_type = other DNA
ggttaccagagtttggagtgaggaaggaaaagagaagatgtgggtcaaaggatacaaaattttatttaagcaggagaaataagttcaggaggtttatggtacatcatgctgactacagtt

SEQ ID NO: 38488 - DNA, 120 bp, synthetic construct
  source 1..120: mol_type = other DNA
ctcagctttcagcttagtatcttttttccttttggcatagtaaattggggtcccaagtttttttcccacagatgcaaagatggttcaacatacaccaatcaataaatatgatatgccaca

SEQ ID NO: 38489 - DNA, 120 bp, synthetic construct
  source 1..120: mol_type = other DNA
tgagggtgccaaaaatgcagcatgaagaaaggatagtctgttcaataaatggcattgggaaaaccagatacatacatgcagaggaacgaaattggactcttatcctacactattccccca

SEQ ID NO: 38490 - DNA, 120 bp, synthetic construct
  source 1..120: mol_type = other DNA
agacaaactcctttcatgcactgcaggaataattttcagtgagaagcaaaagtgttcggtcgatgtgtcatgtaaagcaagtacttgtcatttctctcgaagatgcgataggcatgggaa

SEQ ID NO: 38491 - DNA, 120 bp, synthetic construct
  source 1..120: mol_type = other DNA
actctaaagatattaaatctaatgagataaatgggagcaataagcagtatggagggaaaacgccacgtataagaaagaaggaaaatatgagtgggctttgtgctggggacccggagacct

SEQ ID NO: 38492 - DNA, 120 bp, synthetic construct
  source 1..120: mol_type = other DNA
agatggactattgcatgtctcttcccctggccttttgcctataacatctgtatgtgtatagtcaccctgaatctctactgagccactccagaaataaataagtttatttcagtcaatttt

SEQ ID NO: 38493 - DNA, 120 bp, synthetic construct
  source 1..120: mol_type = other DNA
gtttgataaaaaaaatttaatcagatcatgctgtttcctggagttcactcacagctgacttggggtgagggaagaatttgcatttctgacgagatcccaggtgatgttgaggctgctgtt

SEQ ID NO: 38494 - DNA, 120 bp, synthetic construct
  source 1..120: mol_type = other DNA
gggggggttagggagatgggagggcaccaggaaaagtgattagaagtcaggtatgggaaggctaaataggacagagtcgagtacatctctgcttggaaaaacatatcaacaccctttttt

SEQ ID NO: 38495 - DNA, 120 bp, synthetic construct
  source 1..120: mol_type = other DNA
tggatataaaggatagaaagctataaacctggtaggaaaacattgaaaatggcacaagtgactccttccctgtcaccaatgacagtcatgtgttgcataatgcctgggctatcttctgag

SEQ ID NO: 38496 - DNA, 120 bp, synthetic construct
  source 1..120: mol_type = other DNA
catgtacctagaagacccacaagaatctagaggcaaattttgtaatgtctagcataatttagtaggtttgatgaataacattgaatatctatctctccaatgaacaggtataataggaaa

SEQ ID NO: 38497 - DNA, 120 bp, synthetic construct
  source 1..120: mol_type = other DNA
tgttgcctctcctgtgctagagtagaagaaacccttatgacgtacacaaagagttcatgcataggaaatacagggaaatggagctggcccaaggctgtcctgagagccttacaagaagca

SEQ ID NO: 38498 - DNA, 120 bp, synthetic construct
  source 1..120: mol_type = other DNA
tgatctttttcataaaaataaattttatgcccctctctcctaagaaaatagaaatgctatttctgagcacaagcaactccatgaaccctatcctggtttctcaataactccgaccactag

SEQ ID NO: 38499 - DNA, 120 bp, synthetic construct
  source 1..120: mol_type = other DNA
atttgtcatgggaatatgacttcttctgttgagaattatcccccagcagattactagtaattgttaaagagaaaacatgagttaaaaacaacagatctgaccactgttagcttaaccaag

SEQ ID NO: 38500 - DNA, 120 bp, synthetic construct
  source 1..120: mol_type = other DNA
agagtttttatcaaattcttaatgtagccctggctttgatttcccattatcatatctaatatacccttttgcattaactagcctgactagttttcagtaccttaagacaaaagttatgaa

SEQ ID NO: 38501 - DNA, 120 bp, synthetic construct
  source 1..120: mol_type = other DNA
tgatgatgagttccttctgcatcttgcagcatttgaaatgactaattttcatttttctctctctcacacacacaatttaaaggaatgactaatgagcatttctttaaaatattgccctca

SEQ ID NO: 38502 - DNA, 120 bp, synthetic construct
  source 1..120: mol_type = other DNA
agaatccaaagagataccatgcagatactaatcattaagaaaactggagggagctatattactagccaataaaataaacttcaaaacatgagataatactagcagtattgagaaatattt

SEQ ID NO: 38503 - DNA, 120 bp, synthetic construct
  source 1..120: mol_type = other DNA
ataaactgtgttgtaatcctaaagaatgacaataaagagccatttttgggctctcatccaacactacccatctactaactggtgtgtaacatccatcaggctttccgaacatcaccaagc

SEQ ID NO: 38504 - DNA, 120 bp, synthetic construct
  source 1..120: mol_type = other DNA
tggagaacccagaactggttattagaaaactcttgcggagtgaataggtaagcttctttcatattaattcttcacttggcaaatgcttaagtgcctgctctatccaagggtgtgtcagag

SEQ ID NO: 38505 - DNA, 120 bp, synthetic construct
  source 1..120: mol_type = other DNA
taaaagttccctcaataaatcactcaataccaacaaactggatttgtctgcttccttctttggtctcttggctcctttggcatttgggggttgctttgtgcatgtgggcttttcacaaaa

SEQ ID NO: 38506 - DNA, 120 bp, synthetic construct
  source 1..120: mol_type = other DNA
aggaagatttctccagcactatggtcttcgggcaaaaagggccatttggggctgaacatggcaaaataaactattccagagccaaacacagggcccaatataagataaagaacagtcgca

SEQ ID NO: 38507 - DNA, 120 bp, synthetic construct
  source 1..120: mol_type = other DNA
agatacaaaaactagaaccagctgcaagccccaacagggaccccctgcagcctgccttcccagtcaatcagaggaaaattaatgaatcatacacacaatgctaatctcccagtggggtta

SEQ ID NO: 38508 - DNA, 120 bp, synthetic construct
  source 1..120: mol_type = other DNA
taggattttccttctgccataaaagtggctggctggtgtgacctgctggagactgcttctcctaaatagcttagtgacaggttcccttcccaccccatcaggaatgttcctcatgaatca

SEQ ID NO: 38509 - DNA, 120 bp, synthetic construct
  source 1..120: mol_type = other DNA
gtgttttgaaattttgcagtacctgtctaggtgtggagcagttcctcgggcttccttttaatctgtagctctggaatactcttgctattgatgattctatgtgtcgactattttgctcac

SEQ ID NO: 38510 - DNA, 120 bp, synthetic construct
  source 1..120: mol_type = other DNA
gaaggaagagcttggactttggattgaaagtccagccctaccatctacaagttggctggctgagacaagacactctacttctttgaggctcagttttctcgcctgtgagatgggatgatc

SEQ ID NO: 38511 - DNA, 120 bp, synthetic construct
  source 1..120: mol_type = other DNA
gattaataatgactagagaatctgagaggtgagtcacaatgatgtatgtagtggtatggtgcttcccatgcaaaacatccatcattggcactaacacgggggaactctggagtctaaatt

SEQ ID NO: 38512 - DNA, 120 bp, synthetic construct
  source 1..120: mol_type = other DNA
ggattctaccctgggcatgatccctgagtattgtttgtctgtttgccttgtaggcgtcatccctcaagtgtatcacttagttcaagagtcctggaatcttttcacatccactatgaacac

SEQ ID NO: 38513 - DNA, 120 bp, synthetic construct
  source 1..120: mol_type = other DNA
ggaacctcatcttcttagtgtgccacttgcttgccatggcctccacctgtgtcaacccattcatctatggctttctcaacaccaacttcaagaaggagatcaaggccctggtgctgactt

SEQ ID NO: 38514 - DNA, 120 bp, synthetic construct
  source 1..120: mol_type = other DNA
tgttgacccactacagaggcctccagaactcaaggctatggctgcagcctccttcactctgtgctctgaccactgagctgacttgccccagataatgtgccacgtatctttcaaagcttc

SEQ ID NO: 38515 - DNA, 120 bp, synthetic construct
  source 1..120: mol_type = other DNA
gcaagaacgccatgtgcatcatagcccagaatttgcatgataacatcaagcttgctttgatctaaaagcaggagtacatattcttacactcgggacagtaaataaagtaggagtcaggag

SEQ ID NO: 38516 - DNA, 120 bp, synthetic construct
  source 1..120: mol_type = other DNA
ctgtggggatacagtggttgtaatcagacattgtccctgttctatggaacttagagtccattgatagatatatcctatgtccttaatatcatctgttgtggcattctgagctgtctctag

SEQ ID NO: 38517 - DNA, 120 bp, synthetic construct
  source 1..120: mol_type = other DNA
tcaaagagcagttaatttggatatgcagatattattgcttgcccactgtggtaacctttagggctgcttgcaaatatcctggttctgtcacctgcccagtgaaaaatgcacagtaatgtg

SEQ ID NO: 38518 - DNA, 120 bp, synthetic construct
  source 1..120: mol_type = other DNA
acacacacacacacacacacccctccaccccattagcagtaaactatctgtccccaaacagggacgattatagaagtcaacatggtagttcactagttcacattcatttgaaatcactta

SEQ ID NO: 38519 - DNA, 120 bp, synthetic construct
  source 1..120: mol_type = other DNA
ttctaacaagaaggaacagaaaatacaaagtgtccaaagcaggaacaaacttgatgtggccacaaagcagaaagcaggtcagttggtacagggaatggtaaaccatggaagagtgcttga

SEQ ID NO: 38520 - DNA, 120 bp, synthetic construct
  source 1..120: mol_type = other DNA
caactaaatatgtccagaaacctccttgggaatttgatatcattaataccttgtactgagccagtcttttcatttgtcttcccagcattacaagccaactggtttcgaagcttgaaagac

SEQ ID NO: 38521 - DNA, 120 bp, synthetic construct
  source 1..120: mol_type = other DNA
cttaacatcttcttgacagacaatgcagtcatacatgcattatgctatacttggtcctaagtggagccaattatatgtttcctgtgtgcttttacccagactcaatccacattaactacc

SEQ ID NO: 38522 - DNA, 120 bp, synthetic construct
  source 1..120: mol_type = other DNA
aaagccaaacagtcttgagtttatagcacagagcatcatagagaggatagctgcacagagacagaaatctggagatttgcagaaagctcccctcaagtttgcatgcatataagggaacta

SEQ ID NO: 38523 - DNA, 120 bp, synthetic construct
  source 1..120: mol_type = other DNA
ttccaccaaattaattgcatttttcttcattgtcactacaaaatttgaagaatctattttcttgggaagaactatagacctatgagcatagtgacagttaaacagtagttatctctaggg

SEQ ID NO: 38524 - DNA, 120 bp, synthetic construct
  source 1..120: mol_type = other DNA
aacccactgcttttaacaggtagtccataggagtcacttaccttggccagtaaatggaaatgcccatcctcttttgtcatacataatcttgaagattgtgccagttttgaataatgtgag

SEQ ID NO: 38525 - DNA, 120 bp, synthetic construct
  source 1..120: mol_type = other DNA
gaacttcacttgtggaaatcttccctttggatgcagttgtttatgaagctgcaactgtgatgtcagaaggttagtcaacaaacaagataaagagcttaaaataataagcagccccttata

SEQ ID NO: 38526 - DNA, 120 bp, synthetic construct
  source 1..120: mol_type = other DNA
agtcaggatgtgggatgatcttaaattttaaattaaaaatatatttattatattcttttattagcacagacaagaatctaggaaaaaacttggtactcactccaggtgagagtggctcaa

SEQ ID NO: 38527 - DNA, 120 bp, synthetic construct
  source 1..120: mol_type = other DNA
cacgggctataccatatagcctaggtaggaggttacaccatctaagtttgtgtaagtctaagtctgtgatgctcatacaatgatgaatttgcctaacaatgcacttctcaggatgtatcc

SEQ ID NO: 38528 - DNA, 120 bp, synthetic construct
  source 1..120: mol_type = other DNA
actgtggagaaatatgaggctacttcaacatcgtggcagatagtgtgtaatgatgcctcctgggagactcggtgagcacatttattgaatatttttgtctttcaagcttcgaaaccagtt

SEQ ID NO: 38529 - DNA, 120 bp, synthetic construct
  source 1..120: mol_type = other DNA
ttgcttgtttgttttttatcaacagtttttattggcacaagggactcctgggtctgagtaatgcaacagtggaatggcatattccagacactgcccagcctggaatctacagaataagat

SEQ ID NO: 38530 - DNA, 120 bp, synthetic construct
  source 1..120: mol_type = other DNA
tgttattactcagaagggttcatgaatcagtttccactacctctattccttctattgaagctttcctcaaatctacttgtgattcctgatagctcactggcaactgtaccaaggtggcca

SEQ ID NO: 38531 - DNA, 120 bp, synthetic construct
  source 1..120: mol_type = other DNA
gtgtttagttcttccaaatgatgctcttgcttcctgggtatccaacctgacttgctggtttatattggcttccaaaattttagagtgatagggtatcggagagggaaatttgcacattcc

SEQ ID NO: 38532 - DNA, 120 bp, synthetic construct
  source 1..120: mol_type = other DNA
cctgcatactgccaagttatcagggacccagcttcggttagtcctatttctggatttttttaccataatgaaaaattagaagcctaggggtatggggtcaatactagctagaggagaata

SEQ ID NO: 38533 - DNA, 120 bp, synthetic construct
  source 1..120: mol_type = other DNA
tattggatagttggagaaggggaaagttgtgactggataatcatgaatgtaagtttgctttggggtgaaagcataagtcttttggtagctcagtaaacctctacagagagtgtccagagc

SEQ ID NO: 38534 - DNA, 120 bp, synthetic construct
  source 1..120: mol_type = other DNA
acggactccttttgggctgtctctaaatgccaggggaactatgtgctttatgcagcctgaccacgtagagtattttattcaggtttccatacgagccatgtcagaacttctttcctgaga

SEQ ID NO: 38535 - DNA, 120 bp, synthetic construct
  source 1..120: mol_type = other DNA
gactctaataagatccagtggaaataaccaggctctcgtcggaatataagtcccaagggaagctgtgccagtcttgtgggcgactgcctgacttctcctttcatttcagcaccatgaagc

SEQ ID NO: 38536 - DNA, 120 bp, synthetic construct
  source 1..120: mol_type = other DNA
ttgagattcacttacccaatttttagtataccgtgctctgcctgaagcaattccaagtcgttggaagaacacctcaaaatcatttccagatcccaatttgcttatccttttagagataaa

SEQ ID NO: 38537 - DNA, 120 bp, synthetic construct
  source 1..120: mol_type = other DNA
tagcaaattaccaactaacctctgcccactcagtagaaccaagaagaccaaattcttctgcatcccagcttgcaaacaaaattgttcttctaggtctccaccctaaaatgtatgtgtata

SEQ ID NO: 38538 - DNA, 120 bp, synthetic construct
  source 1..120: mol_type = other DNA
atgtcagaacaacaggaaagagttctaaaggattttctttcagttatatctgctttcagaataccaaatgcatctagaaatttctttctttgttctaggcagttgcagaccaccaatgac

SEQ ID NO: 38539 - DNA, 120 bp, synthetic construct
  source 1..120: mol_type = other DNA
tttttttcttttaatttgtgtagctgaaaagccctgatgaaggctttgaaggcaaatctctttatgaaagttggactaaaaaaagtccttccccagagttcagtggcatgcccaggtaaa

SEQ ID NO: 38540 - DNA, 120 bp, synthetic construct
  source 1..120: mol_type = other DNA
ataaatatctcagtgctctgagtttatcgatgtcaacagcactatttatattattaagggcaaaatttatgtccaaattatctgaaaaatatttgcttttcactctattatgtacaacaa

SEQ ID NO: 38541 - DNA, 120 bp, synthetic construct
  source 1..120: mol_type = other DNA
caaaagataggcctgagaggaggtgagaaagagcaattagggatggtgtatattagggagctttgattaacatcaacaaagctcacagtcttagcctcacaatccaggaataatcctact

SEQ ID NO: 38542 - DNA, 120 bp, synthetic construct
  source 1..120: mol_type = other DNA
ttttagttcactcttcttttattcatttatttacttcgtggccttgtcttttaaggtgtgggaacgaaagtagatgcaaaaaaaagtggtatcaatatcttaattatttatgccatgact

SEQ ID NO: 38543 - DNA, 120 bp, synthetic construct
  source 1..120: mol_type = other DNA
cattacaacttggtgtcccatctgcctaattttgtagctataggacgggaacaaaagcattgtgaggaacaccaggtgctttccttaaagccaaatactcttgtccctcctacttttctt

SEQ ID NO: 38544 - DNA, 120 bp, synthetic construct
  source 1..120: mol_type = other DNA
cgctccccacacagcaaagctgtccactccctggggatccgtgggagcactgagatggtcatctccaaatatcacatatctcacatcctcagaaaggcttatatagcaaggaatcatttc

SEQ ID NO: 38545 - DNA, 120 bp, synthetic construct
  source 1..120: mol_type = other DNA
atgcacatgtttcggaaaactatgtattacctacatgtcaaaactaataaaacttaaatgggaaaatcctcaaccaagggacccaataaggaaataatttgaggctggaatgccaagcag

SEQ ID NO: 38546 - DNA, 120 bp, synthetic construct
  source 1..120: mol_type = other DNA
caccatttgcagattaatagacatttaaaaaattataaaattcataaaagccagcatatcctagaaaaagatgaagtggctgtctttttaatcagtccatggcattgcaaattagtatgt

SEQ ID NO: 38547 - DNA, 120 bp, synthetic construct
  source 1..120: mol_type = other DNA
tgccaaagtatgttcctaagccaccaaattacatacaatattttggggggatgcttcttgcatgctggccgaattgattgaacgttgacaaagctttcaagtattgtgcaggttttggtc

SEQ ID NO: 38548 - DNA, 120 bp, synthetic construct
  source 1..120: mol_type = other DNA
atcagtattgattttaaatcactcatttaacaaaaactcaggctacatacaactacgcaaagggcctaacattgtaagcctttagggactgcttcaatcattcgctgacacaataacact

SEQ ID NO: 38549 - DNA, 120 bp, synthetic construct
  source 1..120: mol_type = other DNA
ctggagagccctgactaatatataaactatggtctttggcaattttaagtccttttctttactctcctttatttgataacactgctgaattttagtgaaagaaatgaaaaatcttagaat

SEQ ID NO: 38550 - DNA, 120 bp, synthetic construct
  source 1..120: mol_type = other DNA
atgtgtgtaatgagtgtattaatattatacaattgaattgagaagacgttaatgaatgttaatccattcattcggcatttacacatagctttaaattagtaaggtaatgatgagagatgc

SEQ ID NO: 38551 - DNA, 120 bp, synthetic construct
  source 1..120: mol_type = other DNA
ccagatccacattcagaaaaatgggaaattgaatagattggtattgtgttacagacaggcactaggagtagaaggggttgtgagtcatctagtcagtaatatctactataaagccgggag

SEQ ID NO: 38552 - DNA, 120 bp, synthetic construct
  source 1..120: mol_type = other DNA
aacctccgagatttgacgaagcagaagggaaacagaagaaatgccatttactggggacttatttgtctctcattctgggccccctccctatgaaacggtctgcatgttactttattgtcc

SEQ ID NO: 38553 - DNA, 120 bp, synthetic construct
  source 1..120: mol_type = other DNA
taaggagaactctgaggacttcagaaaaatattaaaaatgattttctctttgtggatgtatactctgagggtatgatagctaatagtagtgtgttgaaaagtatttcataagaacctagt

SEQ ID NO: 38554 - DNA, 120 bp, synthetic construct
  source 1..120: mol_type = other DNA
ctatactccaactcttaagcatgaactggtcttacttttccataaatatgggttggaatagagaaattcaaattgtgtttttttttttttatttccaactatcttagaacactcattatc

SEQ ID NO: 38555 - DNA, 120 bp, synthetic construct
  source 1..120: mol_type = other DNA
cactcatttgggtaataggttctgggaaagatgactgagtaggttattcgaggttaccatggagcatagactctctgggcctcttctcccttcacttctttagagaatgtcttcaagact

SEQ ID NO: 38556 - DNA, 120 bp, synthetic construct
  source 1..120: mol_type = other DNA
attctcaaggccgtaaggctaaggaaccttaaacatttggggcaaaaaataggaaagatcagactgaattctgactcagactctcccactgtgctttaaaattcggaaactgtaaatcga

SEQ ID NO: 38557 - DNA, 120 bp, synthetic construct
  source 1..120: mol_type = other DNA
agcttcagccccaagctagcatggagggccaacagagagactggtaaaagattttgcagaaatctgctttaaatgatcacttatgacatgtacttatggatttttacccagttatctaga

SEQ ID NO: 38558 - DNA, 120 bp, synthetic construct
  source 1..120: mol_type = other DNA
ctatacacaccatccctaattgctccttctcacctcctctcaggcctatcttttgctgtgttcacctctgaccagagacaaatcagatatgtgttcatctgctgtgggaacccctttatc

SEQ ID NO: 38559 - DNA, 120 bp, synthetic construct
  source 1..120: mol_type = other DNA
ggagaaagatattcacccgaacatatataaaataaaatacaatacatgtgcatgatgaatacttaaaatgtattctaagtatttttccagattcttccagagtggcctagaataaactcg

SEQ ID NO: 38560 - DNA, 120 bp, synthetic construct
  source 1..120: mol_type = other DNA
cctggtttaggattacactgggctttgctgatgaaagaatttggaatcttgtttggttaccctgtaatacctatatgaataaattaaccctgtaattttactactgccgaagctccctta

SEQ ID NO: 38561 - DNA, 120 bp, synthetic construct
  source 1..120: mol_type = other DNA
cttacaatgttaggccctttgcgtagttgtatgtagcctgagtttttgttaaatgagtgatttaaaatcaatactgataataatgataattattattaaatagttatattaatgataaca

SEQ ID NO: 38562 - DNA, 120 bp, synthetic construct
  source 1..120: mol_type = other DNA
atattccaaggcgaagaggatattactgccaatattgcagaaagtgtacaccaccctagtgatattgttcccatgatccaggagagaagaggatgatattactttcagtatcacatgggg

SEQ ID NO: 38563 - DNA, 120 bp, synthetic construct
  source 1..120: mol_type = other DNA
tcctaatattcatggaaggagaaaatgatattactcccaatatcacagggagtgtacgccccttctgtgatattgttcttaatacccggagggcgagaggatgatattacagcaatatcg

SEQ ID NO: 38564 - DNA, 120 bp, synthetic construct
  source 1..120: mol_type = other DNA
ccgggccagacactggaggtgtcatttccaaagcaaattggaagcgcttttttggaatttctctccaatgctttctactcacaaagactgacatcttaacacgtggcaaagaaaaaaata

SEQ ID NO: 38565 - DNA, 120 bp, synthetic construct
  source 1..120: mol_type = other DNA
tcagaaaagataagactacccgcatcctttgggtttcagcttaggtgtcatttctcttaggaagacttttaggatgactgtcccttcctttgtatcaactgctagaccatgagctcctta

SEQ ID NO: 38566 - DNA, 120 bp, synthetic construct
  source 1..120: mol_type = other DNA
ccgatacagctaattatatcaaccattatatatacaattttgtgaaacacaattgagttccttgttatacttttttaaacaagagagtgacacagcacagatatgttggtaatcccagtt

SEQ ID NO: 38567 - DNA, 120 bp, synthetic construct
  source 1..120: mol_type = other DNA
ccaggagtgacttctaatctggatatctacagagtttctagactgagaccattcatagtagccttgtgagtatacagtgtgcagcaaaaccatcatgctcacttttactcttaaacatgc

SEQ ID NO: 38568 - DNA, 120 bp, synthetic construct
  source 1..120: mol_type = other DNA
agttgttgattaattcttgttaattatagttgaaatattggctatttcagaatgtgaaagtgttctctctaatcatcagaattgacaatgggaaaaaactttcctaattaaaaataatag

SEQ ID NO: 38569 - DNA, 120 bp, synthetic construct
  source 1..120: mol_type = other DNA
aatctagacataaagtattcaggaggataggtttaggttacatacaaattcacaccatttactaataagagacttgaacatcttaggatcttggttctcagggagtccttgaccgaatct

SEQ ID NO: 38570 - DNA, 120 bp, synthetic construct
  source 1..120: mol_type = other DNA
aaaagtttgttctcttgcgaatgaaggggatgtatcattttgagtactaacatcgttgtcggtggctatttccaattttgtttcaaaagagggcctgaggtcttcttctctttggtctgg

SEQ ID NO: 38571 - DNA, 120 bp, synthetic construct
  source 1..120: mol_type = other DNA
ctcaatttcctgacttacagtttgacgaaaatgtaaagcaagatacatactttatctgcagaataagaggacaaaatattcagatcatgtagttatgaagactctagttctcatggcggc

SEQ ID NO: 38572 - DNA, 120 bp, synthetic construct
  source 1..120: mol_type = other DNA
gctttttttctttttaagtctgagcaagttaggttgacctcacagactttattatgtctcaacaacctagttattaatcacatttcagctcatacaacagtttttcagtgctgggttgct

SEQ ID NO: 38573 - DNA, 120 bp, synthetic construct
  source 1..120: mol_type = other DNA
acataagtaacaagagtctcaaaacataaagtgttctaaaaggttaaagtacgtatttgagatagagagaataaataatagttaattacttagactttattatgtgaaaagactttccta

SEQ ID NO: 38574 - DNA, 120 bp, synthetic construct
  source 1..120: mol_type = other DNA
gatcacttgagcctaggaggttgaagctgcagtagctatgatccagcaactgctctatagtctggatgacagagtgagaccctgtctctaagaaaagaaaaaagaatagaaaaggaaaaa

SEQ ID NO: 38575 - DNA, 120 bp, synthetic construct
  source 1..120: mol_type = other DNA
acgtaattggtcagatacagctatgttgatctttatgcagaaaaaaggaaaggaacaaaatttgtagattctaagaactggcaagacagaagtttgaactattggacgttcgagagacaa

SEQ ID NO: 38576 - DNA, 120 bp, synthetic construct
  source 1..120: mol_type = other DNA
ttataacatgtacatatggatttttatccagatatctagagcagttcttaagtgaaaatcttcacattcacattctttccaaaatgatagcactagtttttaagaataagaaacatttct

SEQ ID NO: 38577 - DNA, 120 bp, synthetic construct
  source 1..120: mol_type = other DNA
ggtgatgaagatgtattcgtattgtttgggattgggaggctttgcttattttttaaaaactattgaggtaaagggttaagctgtaacatacttaattgatttcttaccgtttttggctct

SEQ ID NO: 38578 - DNA, 120 bp, synthetic construct
  source 1..120: mol_type = other DNA
cccagtgtgatcgctttctttcggcctcctttgtctcttttcccccccacccctcagggattgcgtgaaacaaacaactgttcagtgaaactaacctgaaattacacgtctactttcttt

SEQ ID NO: 38579 - DNA, 120 bp, synthetic construct
  source 1..120: mol_type = other DNA
tcaaatctcagggaagcagtgatggaggacacaatctggctaataaggcggttaaggttagtgtaggttgggcgctcgatatcgaggtttctacgacagatgtcatagatggcctcattg

SEQ ID NO: 38580 - DNA, 120 bp, synthetic construct
  source 1..120: mol_type = other DNA
ctacttccatcagtaggaaacagatttgattacctagcttagtatgaaccaggaggtaaagttttctgggttaagagctgtagaccagtgttccagatgtcactgagtcattgtgtaatc

SEQ ID NO: 38581 - DNA, 120 bp, synthetic construct
  source 1..120: mol_type = other DNA
atacatggaaaccatgggaaattcccatttcagtcttcacacatatggtgtcactggaacagagccatgcttatttatggagcatctacagcttcttttcactacaaggggaagttgagt

SEQ ID NO: 38582 - DNA, 120 bp, synthetic construct
  source 1..120: mol_type = other DNA
gctaagtttaatgtattattgaagaaataaaatgtattttatacatttaccctaatgcctaatgtttaagacatctactgtagtgtacagtaatatcccaggccttcacattcactcact

SEQ ID NO: 38583 - DNA, 120 bp, synthetic construct
  source 1..120: mol_type = other DNA
actctttcatcaatctcatttattattaaatttcggttatcagctgccatgccaataactgccaactctaaacacttatcacagtttactatgcaagctttataggaatattaatatact

SEQ ID NO: 38584 - DNA, 120 bp, synthetic construct
  source 1..120: mol_type = other DNA
taaaattctggggagtgggttaacctaattgatagagcttaggtcatcgggcataccctagctgcaacagagactgagataatgattaccgttatcttcagcttctatagtaggtggcaa

SEQ ID NO: 38585 - DNA, 120 bp, synthetic construct
  source 1..120: mol_type = other DNA
gaggtccaagactctgtcaagcatgtaattcttggatatagaaatcttggagtatgaatccttgaatcagtattatctttagccgtgtcattttagaagcaaattgtcctctgacagtga

SEQ ID NO: 38586 - DNA, 120 bp, synthetic construct
  source 1..120: mol_type = other DNA
aaaaacatctcctttgctggatgttttctccagttttatttcttcttctctttgggtacatcagaatgcttgcttttgactgtgatggcctttgatcagtaccttgctatctgccgtccc

SEQ ID NO: 38587 - DNA, 120 bp, synthetic construct
  source 1..120: mol_type = other DNA
tctgattgtgattcttatcatatttgggtttattattttggtgacatggtcattactaatacataagcccttataagcaatttatcaacatttttgtaggacaataaaatattctagcct

SEQ ID NO: 38588 - DNA, 120 bp, synthetic construct
  source 1..120: mol_type = other DNA
aaaataaaagtagacttttggtctcccatgtcagccggaattgaacatcaatataaagcatcattgtaaccaacatctgcgggctcagagtttgagtctgtagagaaggctcattggtcc

SEQ ID NO: 38589 - DNA, 120 bp, synthetic construct
  source 1..120: mol_type = other DNA
tcccctatttcacagttactactgtttcaaacattataaagaggaaataaaagttatcacaatgacaaataatctcatgatttctaagaaaatctctataagttgcatcttacttaccat

SEQ ID NO: 38590 - DNA, 120 bp, synthetic construct
  source 1..120: mol_type = other DNA
aaggggtaggctatcatcttccctggaaaatacgagtcaattagggacttgaggggacccccagcattccacagcagcccttcagaaaagtggccagactctgtacttgatgggcagatc

SEQ ID NO: 38591 - DNA, 120 bp, synthetic construct
  source 1..120: mol_type = other DNA
tggattttatcctgtcgtcatgctgtcagctggttattttgcagacttaacgtatgtggttggtttttagcatcactggactgcgtaattcactgcgttcttcactgcatttttgtagtg

SEQ ID NO: 38592 - DNA, 120 bp, synthetic construct
  source 1..120: mol_type = other DNA
cttattggaggtgttgatatggcacttagggtctttgctcccgtgatatatcttctgaggatagcaagggcagttcactgcaaaggcagtggcagaaaggatttcatttgctcctggaag

SEQ ID NO: 38593 - DNA, 120 bp, synthetic construct
  source 1..120: mol_type = other DNA
ctcaggctggaatgactaagttgcccgaacgggaaagatggcggcctgccccatcttttctctcagagttttatcttgtttcatggaacttaatttttagcctgttgattttactgtcta

SEQ ID NO: 38594 - DNA, 120 bp, synthetic construct
  source 1..120: mol_type = other DNA
agaaaacaattaaagccataccaatctcatgtggctttctgcgaagtttggttttgtcaagaaagggtgtaatgcaactaagtcagcgtccacctagaagcatttgcggtggacaatgga

SEQ ID NO: 38595 - DNA, 120 bp, synthetic construct
  source 1..120: mol_type = other DNA
gcactcctacatacaacactgaactcatttaagatcgtgattcttaaaaggagaagtcaaaaaatatatacaagatgcaggattttccccaggtctgctgatgctacttctagtgatcct

SEQ ID NO: 38596 - DNA, 120 bp, synthetic construct
  source 1..120: mol_type = other DNA
gaatgtagattataaaaagccaaaagaattttaaaaatacatataattaccaggcaaaattgttaaaatgaactctgtcaaacactttttaagtgagaatcaatcaaacaatatagccag

SEQ ID NO: 38597 - DNA, 120 bp, synthetic construct
  source 1..120: mol_type = other DNA
ccttttctgcactaagatattcttctcccccactgcctttgagcattcttttttcattaggttcctaggatatcaaaaacacgaaggtgctcactgaaacatgggaaccaaagtttccca

SEQ ID NO: 38598 - DNA, 120 bp, synthetic construct
  source 1..120: mol_type = other DNA
ttttgaaacaattctatgtgaagtcttccttgattctgcatgtctttccccaaataaacaggtatctccttccttgaggctgccttagtattttactgatttttctacggcatctttacc

SEQ ID NO: 38599 - DNA, 120 bp, synthetic construct
  source 1..120: mol_type = other DNA
acacaaaaatgccctgctaaagggattctgtttggctgcaggcagcaagagggaaaaacacagagcatattttgcagaaaatgatttattagaagtcagaactatgacacgaagccaagc

SEQ ID NO: 38600 - DNA, 120 bp, synthetic construct
  source 1..120: mol_type = other DNA
ccacccagagcaggggtcctcaactcccaggccacagactcataccagtccacggactattatgaaccacaccacacaggaggaggtgagcactaggcaagccaaggaagcttcacctgt

SEQ ID NO: 38601 - DNA, 120 bp, synthetic construct
  source 1..120: mol_type = other DNA
ttctaattttaggatatgtgccgccgaagcaagcacaaagccctacttttacacatgcctagtgatgcttcatggacaaggcttggctctgttgagtccaactaacctacctgagattct

SEQ ID NO: 38602 - DNA, 120 bp, synthetic construct
  source 1..120: mol_type = other DNA
cccatgcataggtgctacacttggatcaaatgaacaatgttgggatctctatggataaaggtcttaaaagtcctgagataaagaatcctgcacccactggtacttctaacttgtcttgtt

SEQ ID NO: 38603 - DNA, 120 bp, synthetic construct
  source 1..120: mol_type = other DNA
accccttctctgcctcaccacagtaactctactcatctcaaaaactcactttaaacatttactgcttccaaggctctttgcttctaacccagcatttgatatggtattattggatggtaa

SEQ ID NO: 38604 - DNA, 120 bp, synthetic construct
  source 1..120: mol_type = other DNA
tagatttgaaagcagagctgaggctctaattggccacttctaccagaagaggatactaagtcagttaattacttgatattccccctgctcaagggtttccccttacattacccacctatt

SEQ ID NO: 38605 - DNA, 120 bp, synthetic construct
  source 1..120: mol_type = other DNA
caatctctggtgccttacattaagtagaatatgttataatgtaacaggtctggggcggttccagtcagatgaccagcatttaaattttagttcttaaaagtactatggaataagagagct

SEQ ID NO: 38606 - DNA, 120 bp, synthetic construct
  source 1..120: mol_type = other DNA
cttatgtctgatgactaaacggattgaaaacaatggatgaacacagcttgggagttcaatatttttaaagaaaactcctgtagagtagggcaatacatttgcaatagtaatatcatttat

SEQ ID NO: 38607 - DNA, 120 bp, synthetic construct
  source 1..120: mol_type = other DNA
ttcagctgttagtaaacaatttgtggaaataaataacatgcacattttgacatctggaaaagcaagcctttgtccattctgctacaaaaaaattaacttagcacaataataaaagacagc

SEQ ID NO: 38608 - DNA, 120 bp, synthetic construct
  source 1..120: mol_type = other DNA
caaatgccttacccccagacgcttgctgtctgtgtccttcctgacaggagggatgggagctggtggccctggcatgaggtgctgtaacagtcaaacacaagcaggagcaggtagacacct

SEQ ID NO: 38609 - DNA, 120 bp, synthetic construct
  source 1..120: mol_type = other DNA
gcatatattggaggatatacagcccagtgaggaaaatactgaggttccaacattgtcacacattgaacaaaaacttacagaatttagaaataacttttagaaggatggcacttttttgcc

SEQ ID NO: 38610 - DNA, 120 bp, synthetic construct
  source 1..120: mol_type = other DNA
tatgtcggcaaaatcccacctaagggctaaactttaagctctattcacgtttagctaattaagtaaatataccaccatcccatgctgatagtgatgggcagtcaagggggaggttgactt

SEQ ID NO: 38611 - DNA, 120 bp, synthetic construct
  source 1..120: mol_type = other DNA
aattattagcctctttctgccagggagcagtttttcccagacaagaccctggacagaggttggtggggccctcctcatcagaatcactagattatgactgacccctagaggtggcttttc

SEQ ID NO: 38612 - DNA, 120 bp, synthetic construct
  source 1..120: mol_type = other DNA
ggtaatggtctcgctgctgctgcagactcagcctcttggctcttcagctccacctgcaggataggcgtcagggtaggtagtggctggcttccagattctgggcccataaacagggtagtg

SEQ ID NO: 38613 - DNA, 120 bp, synthetic construct
  source 1..120: mol_type = other DNA
ccttacaaacgtgttttatgtatgttaccataatacgtacacacacacacatatacacctgccccctctctccacacaaataataacatactcaagatactcttctgtacctttatggta

SEQ ID NO: 38614 - DNA, 120 bp, synthetic construct
  source 1..120: mol_type = other DNA
acagaaaagttgataaaatcatacagtgaacatctgtatgctattcaactggattcactagttaatgttttgtcacacttgttttctgtcttctgcgtatggaagattgtatatgtgccc

SEQ ID NO: 38615 - DNA, 120 bp, synthetic construct
  source 1..120: mol_type = other DNA
ggatgagatcaggctggatgagaactgatacctgtagatatattttttagatgaaatctctgattgccacacgttttcttattgaactcataaaaataaaacacactggctggagggtgg

SEQ ID NO: 38616 - DNA, 120 bp, synthetic construct
  source 1..120: mol_type = other DNA
acaagaaaaacttcaacttgtagaatctgaaaagtctgagatccagctcaacgtaaaggagctaaaaaggaaactggagagggccaagctcctgctgccacaggtgagcagctgcagccc

SEQ ID NO: 38617 - DNA, 120 bp, synthetic construct
  source 1..120: mol_type = other DNA
acctataaccctccctcatcaagtcaatagataaacaaaccctgaaaaataaacaactcttcctggcccagcagcccacagcctaatatttactgtattcccaggctttcagaaatgtaa

SEQ ID NO: 38618 - DNA, 120 bp, synthetic construct
  source 1..120: mol_type = other DNA
accctgcctattgcatccactttccaactcgctgcctatctgagcagatgcgatattgggcaccttgtgaaacatgctcctggtgcacctgctgcctgctgcccctcctgcagagtgccc

SEQ ID NO: 38619 - DNA, 120 bp, synthetic construct
  source 1..120: mol_type = other DNA
actctgtctggagaagggctaggtcttcttcctgagtggtagttttgacttcaccagcctggccctcagtcaagctggctgtccaggcccgccacacctcggggtgggtgaccagaggcg

SEQ ID NO: 38620 - DNA, 120 bp, synthetic construct
  source 1..120: mol_type = other DNA
acttgggtgaaccaagggaggagtcaggaagagacacccagttttgtatcagatgtgtagagcgtgggatgctgttcattgacggagggaggaggaggaggaagaggtatggcatgggga

SEQ ID NO: 38621 - DNA, 120 bp, synthetic construct
  source 1..120: mol_type = other DNA
agaggcagtagagaaaggaatgaatgaagaacataaaagaccactttggtgattgaccccctaccctcgccccacaaccacagaaccgtggcgctggaagggaccccaggaattaaaagt

SEQ ID NO: 38622 - DNA, 120 bp, synthetic construct
  source 1..120: mol_type = other DNA
ccagcctttcctactattgctgggctgagggctgggagctgcagattctgaccccacagctgccttagacatgccagatggtctggggcaagacacacccctctctatgaaatgagcagc

SEQ ID NO: 38623 - DNA, 120 bp, synthetic construct
  source 1..120: mol_type = other DNA
gctgctgggccaggaagagttgtttatttttcagggtttgtttatctattgacttgatgagggagggttataggtacaaccagtttaaagatggaaattttgagagagcaggcagggatt

SEQ ID NO: 38624 - DNA, 120 bp, synthetic construct
  source 1..120: mol_type = other DNA
aggtaatggtctcgctgctgctgcagactcagcctcttggctcttcagctccacctgcaggataggcgtcagggtaggtagtggctggcttccagattctgggcccataaacagggtagt

SEQ ID NO: 38625 - DNA, 120 bp, synthetic construct
  source 1..120: mol_type = other DNA
acttcccctgtgagctcaaaacattgacagtacctctggatggcaactggagaatgggtttgacttggtttggttttctcccaggcttctactttccagagagattttaacaaatttttt

SEQ ID NO: 38626 - DNA, 120 bp, synthetic construct
  source 1..120: mol_type = other DNA
cacgaccatgagcttctcctcctcatcctcccagccccaccctactctctcccccagcttgctcaacaggtgaccttataggctccctactctttgcagggaataagaaccagactgggg

SEQ ID NO: 38627 - DNA, 120 bp, synthetic construct
  source 1..120: mol_type = other DNA
actgagtatgaagtggtagttaagaggctggagagcctagctgaatgtttggcactctcacagggctgaaatgacctaatgagaatttgggtcccaggagggagatgggaccttggtggg

SEQ ID NO: 38628 - DNA, 120 bp, synthetic construct
  source 1..120: mol_type = other DNA
gtatcttctcctcctgcctccacatcttctcctcctgttgctggttcaggcggttccacaactcgttctcttccacctgggcttggagctttgctgacacactctgcagctccttaccca

SEQ ID NO: 38629 - DNA, 120 bp, synthetic construct
  source 1..120: mol_type = other DNA
agtagagaaaggaatgaatgaagaacataaaagaccactttggtgattgaccccctaccctcgccccacaaccacagaaccgtggcgctggaagggaccccaggaattaaaagtcccagg

SEQ ID NO: 38630 - DNA, 120 bp, synthetic construct
  source 1..120: mol_type = other DNA
gctaacctttgcctctatttctctcaatatactgtgaagctgttcctggatttagcaattttatatacttctttttattattctttttttcctttcccttttcctgagacacagtcctgc

SEQ ID NO: 38631 - DNA, 120 bp, synthetic construct
  source 1..120: mol_type = other DNA
tgtccagattcttgtcttgtcctgttcagattttttaaattccaagaacagtcaccttctaccagacactctgatgttggaagacaaagcatatttggtaagtggcgtgatttctgggct

SEQ ID NO: 38632 - DNA, 120 bp, synthetic construct
  source 1..120: mol_type = other DNA
tttacacagattacctcagagaggtaaataactggcctttggtgttctgtgttccatagattctgaattttctttttttatttaaatagagatgggatcttagccaggagcagtggctca

SEQ ID NO: 38633 - DNA, 120 bp, synthetic construct
  source 1..120: mol_type = other DNA
cagagatgttgcacactctaccttcatctcctccctgtccagggccagcctgatggtgtcctcctcccggtgctgcatctttggcactgccccctggctttgttatagggtgataaactt

SEQ ID NO: 38634 - DNA, 120 bp, synthetic construct
  source 1..120: mol_type = other DNA
atgctaggaatgggccgaggtgcctcctccccctcactgtccagatgtcctcctccatctcctgggggtgggggtggtggccagaggggtcctcagacaactcaacaagggaagtattgt

SEQ ID NO: 38635 - DNA, 120 bp, synthetic construct
  source 1..120: mol_type = other DNA
ttcttccccaggctgggagtgggtgagacgagactcggggcctctacatctgagtgtcccccaaaccgagcagtcatgtcgcgagcaaacaaagaaatcatgttacttcttccagctgat

SEQ ID NO: 38636 - DNA, 120 bp, synthetic construct
  source 1..120: mol_type = other DNA
caaaatcccaccaagcactgatcaacacctccagtcacctaccaggtagctgtgcgactgagccagaggaggcgtaaccagggatgcagtagaaggcagaataggggcgtggccttaatg

SEQ ID NO: 38637 - DNA, 120 bp, synthetic construct
  source 1..120: mol_type = other DNA
ttctatttctttcactttctaatataattttaatatctcctcctgggatttcactaagacacattttggacctcattctgatcttcctctcccctccaagcccaccaacttctgccctat

SEQ ID NO: 38638 - DNA, 120 bp, synthetic construct
  source 1..120: mol_type = other DNA
ttcaaacattcagaagttatttcatcctaccttcatggtttccattctatgcctggtttagaattgggatctgataaaataaacgtgttcaacagaaccacttctcatggctgtataaca

SEQ ID NO: 38639 - DNA, 120 bp, synthetic construct
  source 1..120: mol_type = other DNA
gattcataatatatatggcatgtatttcagtttagtcagttcttcctttaagtccctgggtaatttttatatttgtcttagtcccttcatagtgctataacaaaacacctgagactgggt

SEQ ID NO: 38640 - DNA, 120 bp, synthetic construct
  source 1..120: mol_type = other DNA
aaaagttgataaaatcatacagtgaacatctgtatgctattcaactggattcactagttaatgttttgtcacacttgttttctgtcttctgcgtatggaagattgtatatgtgccctttt

SEQ ID NO: 38641 - DNA, 120 bp, synthetic construct
  source 1..120: mol_type = other DNA
tggggcctgagaatttacatttataagaagttcccaggtgctcctggtccggagactacatgtttgagagccacccttacatactaactgtaaattgtagaactctagaaaaaagcgtag

SEQ ID NO: 38642 - DNA, 120 bp, synthetic construct
  source 1..120: mol_type = other DNA
agagtatttagtataaactgtaaagcaggatgtgactgtaggagcttgtagttctcatgagtatcactgctcttcctttccacagttgacagaccatcatccccagaccaaccctagtgt

SEQ ID NO: 38643 - DNA, 120 bp, synthetic construct
  source 1..120: mol_type = other DNA
gagggggcaggtgtatatgtgtgtgtgtgtacgtattatggtaacatacataaaacacgtttgtaaggattcattaaaaaactcaggatagaggcacagtgttggggggagatatttccc

SEQ ID NO: 38644 - DNA, 120 bp, synthetic construct
  source 1..120: mol_type = other DNA
tacgggagcaggaggagatgtggagggaggaagagaagatgcatgagcaggagaagatatgggaggaggagaagaggcaggagcaggaggataagatgtggaggcaggaggagaagatac

SEQ ID NO: 38645 - DNA, 120 bp, synthetic construct
  source 1..120: mol_type = other DNA
caccctgcctattgcatccactttccaactcgctgcctatctgagcagatgcgatattgggcaccttgtgaaacatgctcctggtgcacctgctgcctgctgcccctcctgcagagtgcc

SEQ ID NO: 38646 - DNA, 120 bp, synthetic construct
  source 1..120: mol_type = other DNA
caccaggcctgatagagaagaaacactgcttgaaccaggatgatgaagctaaaagggatggatgggtggagtgatcgccggagccccctctggggggtcagaaagcccaggaacccttga

SEQ ID NO: 38647 - DNA, 120 bp, synthetic construct
  source 1..120: mol_type = other DNA
gctgcagcacctgaggaaggaactagagagagtggcaggagagctccaggcccaggtcaaaaagaatcagcgcataagtctcctgaaccagcgacaagaagagaggattcaggagcagga

SEQ ID NO: 38648 - DNA, 120 bp, synthetic construct
  source 1..120: mol_type = other DNA
gcatgactcagactgcccaacaggtgcggtgtgcacaggaggactatcctaggactctggccgcctcagagtacagccccacacaccaccccctctaagctctcagcccttacaccataa

SEQ ID NO: 38649 - DNA, 120 bp, synthetic construct
  source 1..120: mol_type = other DNA
ttttaaaaatagctaggcttagtgatggcacatgcctatagtcttagctattcgacaggctgacattggaggatcactttgagcccaagaggttcaggctacagtgagtggtgatcttgc

SEQ ID NO: 38650 - DNA, 120 bp, synthetic construct
  source 1..120: mol_type = other DNA
acttagtctgttgtagtggtgagctgacacgtccaggtgtgactgttgtgaaacttgtgcccccctctgtggtatgccctcgcattgttctataaatatctataaatacccatacacaca

SEQ ID NO: 38651 - DNA, 120 bp, synthetic construct
  source 1..120: mol_type = other DNA
agacagcagcaatcattgtcaacaacctgaaatatatattgagtagttcccatgctagacattagagacataaagatgcagaagaggccatcgccttaagggaaataatcccgttcagac

SEQ ID NO: 38652 - DNA, 120 bp, synthetic construct
  source 1..120: mol_type = other DNA
gtagaaattagatcactgggggagggggtaatgtaaaaaacattccaggtaagagaaagtgcttagcaagtaagaaagcatccaaaatattagaaagtaccaggctggtgcagtggctca

SEQ ID NO: 38653 - DNA, 120 bp, synthetic construct
  source 1..120: mol_type = other DNA
gcactctggaggcacagacagaacaggccaccaggtgcagacaggagagggagacaaggggatagaacggaagatgccggggctgggtggaagtcagtgcccttaggtgctggtacctgt

SEQ ID NO: 38654 - DNA, 120 bp, synthetic construct
  source 1..120: mol_type = other DNA
tgtacacattttaagtttcataaacttctccttgattttcaaagatagtataataccatctactaaaactcctttttgtttcaactatctcacatatattagtttataagaatgtttcta

SEQ ID NO: 38655 - DNA, 120 bp, synthetic construct
  source 1..120: mol_type = other DNA
ctctgcgtccagtgctcactccccacagtaccccccaactcacccacagcagctgactcggccccaggctgccactaaaaaccatacaaaaaagtagcaagaaatggccatgctgccttc

SEQ ID NO: 38656 - DNA, 120 bp, synthetic construct
  source 1..120: mol_type = other DNA
ttgcagggtggggagggaggaagggttggggccacagcagcaaaatcccaataagaaccgatcaaggcctccagtcacctaccaggcagctgtgtgactgagccagaggaggcgtaacca

SEQ ID NO: 38657 - DNA, 120 bp, synthetic construct
  source 1..120: mol_type = other DNA
aacattccctctacccacagaatgccaatgagacctcccgaccatgaccagttgtgaccacaaaaatgtctccagatatttccaaacgtcccataggaggcaaaatactcctgcagttga

SEQ ID NO: 38658 - DNA, 120 bp, synthetic construct
  source 1..120: mol_type = other DNA
aacaaaacaatatgaataagaaataatcagagaagaaaaagttcttagaactcatgctccatcttgggagttggtctccaatgagccatacctcctgtcatcatgtcctcagacaggccc

SEQ ID NO: 38659 - DNA, 120 bp, synthetic construct
  source 1..120: mol_type = other DNA
ttccccctttttgtttgttttgcttttcctagtttagtggatcaatgtaatttaaattgctttttaaacaaacgtgtaagggtatacattttcgttggctgctgtttgacttcgttgcac

SEQ ID NO: 38660 - DNA, 120 bp, synthetic construct
  source 1..120: mol_type = other DNA
aactagagagagtggcaggagagctccagtcccaggtcaaaaacaatcagcacataagtctcctgaaccggcgacaagaagagaggattcgggaacaggaagagaggcttcggaagcagg

SEQ ID NO: 38661 - DNA, 120 bp, synthetic construct
  source 1..120: mol_type = other DNA
gcggccagaggccctggagccccagggcctgggggcgagtctgtgagtggggagacccactgggccctgcaggaagtcacggagaagctggcccatgccaggactcacctccgccttctc

SEQ ID NO: 38662 - DNA, 120 bp, synthetic construct
  source 1..120: mol_type = other DNA
gagtgcgggagcaggagagactgtgtgaacaaaacgagaggcttcgggagcagcagaagacgctacaggagcagggtgagaggctgcgaaagcaggagcagaggctacgcaaacaggagg

SEQ ID NO: 38663 - DNA, 120 bp, synthetic construct
  source 1..120: mol_type = other DNA
agctaacagagaactctgatgctctacctcctccagaaacacaagcccaaggaggacaggtggcttgtccagactcaaagcaaattagggactgagtcagggcagaaatacagggcccct

SEQ ID NO: 38664 - DNA, 120 bp, synthetic construct
  source 1..120: mol_type = other DNA
tttgaaagacactgatcttatccagtatcatcttacagaggaggaaactgaggcccagcagaagaagtgatttttctgtggtcacccagcaagctggtggcaagttagaccttctcttgc

SEQ ID NO: 38665 - DNA, 120 bp, synthetic construct
  source 1..120: mol_type = other DNA
cagggaggttgggcttggggtggcaggacgtgagggctgaatatggagcaggtatccccagtagtcatccgcccaaagtcaccgcagggtgattggcgagggcagaggctgggctgcttg

SEQ ID NO: 38666 - DNA, 120 bp, synthetic construct
  source 1..120: mol_type = other DNA
atttcttctaatgtatgtatcacatgtaccctaagagcttgaatccctacttcttgaggtaaatcagaccatttctgtctctatcaacttgccttttttggacatttcaaatcaacagaa

SEQ ID NO: 38667 - DNA, 120 bp, synthetic construct
  source 1..120: mol_type = other DNA
ccatcttccaaatctctaaacatttctctccacagcccagtcctctccatagttgtccaaatccctccctcttttctcttgttgtctccaaaactcaaaaccatgctctgactttctata

SEQ ID NO: 38668 - DNA, 120 bp, synthetic construct
  source 1..120: mol_type = other DNA
ggttgcatgagccaaatcagcagggcagctgcagagtggggtgcaaggtcctcaacccagaggttccctaggccccacttgccccagctcatgagagcctggttctgagctctgccagga

SEQ ID NO: 38669 - DNA, 120 bp, synthetic construct
  source 1..120: mol_type = other DNA
aacatgcagcatgggtcttctgcactgccctctttgctgactctctcttctccagacacccctgctctagtccttgccacacatgccctggggttgtcacctctctgggaagcactagcc

SEQ ID NO: 38670 - DNA, 120 bp, synthetic construct
  source 1..120: mol_type = other DNA
ctgagcttcactgagcttcccagggatcttagatctaatttgggaagctctggggctggagcccgccctccccctccacccagtgaccggcccctgctgtccacctttccttacaccggc

SEQ ID NO: 38671 - DNA, 120 bp, synthetic construct
  source 1..120: mol_type = other DNA
acacagcatgtcgtcacggacgatgcggacgtcgtctcccgtgtaggcgccaaggtggtattttgcgtcacaaatgtggttttccattatggggaccttcacctgcttcagaggaaatgg

SEQ ID NO: 38672 - DNA, 120 bp, synthetic construct
  source 1..120: mol_type = other DNA
tctcctccattctctggacaaactccccagaggcctccacctgccccgtcctggttccatgaatgaggcccacaagatgggaccttcaggagcccaggaggtgaggggatggggtgacgg

SEQ ID NO: 38673 - DNA, 120 bp, synthetic construct
  source 1..120: mol_type = other DNA
tggacccaccccggtccccccgtcccagctccattcttcaccccacaatctgtagcccccagccctgccctgtgaggcccggccaggcccacgatgctcctccttgctccccagatgctg

SEQ ID NO: 38674 - DNA, 120 bp, synthetic construct
  source 1..120: mol_type = other DNA
cgaggctggcttctccccacacgatgcatccagcattcgggtcacacagagccactcgggcaactcagttgattataaaggacagccaggtccctgcaaccgggtcaagacagagaatgg

SEQ ID NO: 38675 - DNA, 120 bp, synthetic construct
  source 1..120: mol_type = other DNA
catagtgtgtcagagtcaaacccaaactgtaatttatttaactacttggacatatagactttccccaattttaaaataatagtaattttaacataacacaccaggaaatattcttgaact

SEQ ID NO: 38676 - DNA, 120 bp, synthetic construct
  source 1..120: mol_type = other DNA
agtgtctttagaactcatgaatgggcttcagcactgtcttctgattgtttagatgaaaacttctggtgttcagcttcagcttgtagcttctgaagagaatcagtgctcagtaccatgtag

SEQ ID NO: 38677 - DNA, 120 bp, synthetic construct
  source 1..120: mol_type = other DNA
tgttttgatgtagtttacatttttgaagaggagagactcttgatgtttcagtagagcaggtgtgggtgaccccagtccatggcttggggagaggagtagggatcaccgttgttgatatca

SEQ ID NO: 38678 - DNA, 120 bp, synthetic construct
  source 1..120: mol_type = other DNA
ctgtggtacgcgtgaccaaggagaatgtatgagaatgtttattgcagctttgtttgtaatagcaaaatattgtaaacaacctaaatgccttttaagagaagaatggattggggttccatc

SEQ ID NO: 38679 - DNA, 120 bp, synthetic construct
  source 1..120: mol_type = other DNA
agttaatccctgtttctagccatggccagccactgatctattttctgtccccatggattggctttttttggacgtttatcatacgatgctggtattttgtttggcttcttttatttaaca

SEQ ID NO: 38680 - DNA, 120 bp, synthetic construct
  source 1..120: mol_type = other DNA
ggggagtctctaataggctctctggaaattagttttgatttcttatctctagatgtatatacaaatggccttccctctcttataggacattgccgtcaattcccagcagccttgatcctt

SEQ ID NO: 38681 - DNA, 120 bp, synthetic construct
  source 1..120: mol_type = other DNA
atattaattattttaggtctggagagaaaatcactgttacaccgtcatctaaagagctgctcttttatcccccttcaatggaagccgttgtcagtggaggtaaatgtcaactcagcgagc

SEQ ID NO: 38682 - DNA, 120 bp, synthetic construct
  source 1..120: mol_type = other DNA
gccatttttatttcacctcctccacccactcaatgaacttgccagtctgtgaacaataatatgtaatgtttataaaatttgtgtgggcatagaaagagttctgggcggggcacggtggct

SEQ ID NO: 38683 - DNA, 120 bp, synthetic construct
  source 1..120: mol_type = other DNA
atgtaggatattcagttagcccctggttgaggggcgtttgtgttgttactggttttctgctattacacataaccctttaatgaattgccttacgcatgcatgtttttgagtgttcgtcag

SEQ ID NO: 38684 - DNA, 120 bp, synthetic construct
  source 1..120: mol_type = other DNA
tttgtaagcacattggtttccttctttgttgatgtgactgcccacagcctcgcgactggattttactcagtattccatgccctgctgagcatttcacatactcctttcatcaagtttcac

SEQ ID NO: 38685 - DNA, 120 bp, synthetic construct
  source 1..120: mol_type = other DNA
cagtaaggaatgaatgaacgcacgcacagaggaatgaatagatgggcacacagtgtgtgccctcacagcacatggcccatcactgggtagaaggcaagtcagtaagtagacaggggtaat

SEQ ID NO: 38686 - DNA, 120 bp, synthetic construct
  source 1..120: mol_type = other DNA
cgggctgttattagacttggaatgggacaaaagtcatatgagacagacttgtttgctgaggtatttaaaaaacaaaatggtctaagatggcagattcttggggaactctgctctgtgcac

SEQ ID NO: 38687 - DNA, 120 bp, synthetic construct
  source 1..120: mol_type = other DNA
atcagcctccatttttggctttctctttcattagaaaaatgaacctgactttatgaccatgacaatgaaatgcctagagaagggagcactcattttccagtgggcctactgtgtgctggg

SEQ ID NO: 38688 - DNA, 120 bp, synthetic construct
  source 1..120: mol_type = other DNA
attctggcttctgagtcttctctctttctccctggtcagtctagctaaggctgctcaagtgtgttgacccttcccgagcagcctttggtggacgcctttccctctggctgcagcactgga

SEQ ID NO: 38689 - DNA, 120 bp, synthetic construct
  source 1..120: mol_type = other DNA
ggaaccaggcagggctgagccctgcagaggcgcgggagggaggtcaggctcgcagggcgccccaatgcgggggcagaggggcagagcttggcagggtccgcacagacctttgttgtcgtg

SEQ ID NO: 38690 - DNA, 120 bp, synthetic construct
  source 1..120: mol_type = other DNA
caaagtgcaatgcctgttacgacctagcccgagaagtcacacatcatcactcacttccaccacttcccactggtcgcacagagccagcctgattcagtgtgggaggggaccacacacaaa

SEQ ID NO: 38691 - DNA, 120 bp, synthetic construct
  source 1..120: mol_type = other DNA
gctaacatttaaaattgggaaaatttcacgtaaatctttgtttttctggcttctctagaaaaatgaacgcacatttctgcacagcaggggtgagccagagctgagtccctaagcttccct

SEQ ID NO: 38692 - DNA, 120 bp, synthetic construct
  source 1..120: mol_type = other DNA
aatgagctagaaaagagagaaagtgtgagagagaggggtacaaagaggaggcttttgccagatgaacagcggagcctcacttctcaacacaccttcttcagacatgatcagcagctgcca

SEQ ID NO: 38693 - DNA, 120 bp, synthetic construct
  source 1..120: mol_type = other DNA
acttctcatctataagcctgcaaaaattgaaaaatttgacaaaatactctgttggggaaaaaagggtactcattcactgctggcgggaatataaaacagtaaaacccccatggatgggaa

SEQ ID NO: 38694 - DNA, 120 bp, synthetic construct
  source 1..120: mol_type = other DNA
tccactgttccagcctatcggatacaggacagaccgtatgcaacagatacacatattgcaaatagtaagggccacatattgcaatgaattaagcgataagttaagtttcttttaacccac

SEQ ID NO: 38695 - DNA, 120 bp, synthetic construct
  source 1..120: mol_type = other DNA
taaggagccaggagaggaaacgtcaccctctaggctcacacttgacatcctcaggctaagaccaccagaaaagaaccaaattctttgcaaagtttgcactccccacaccaactacaagtt

SEQ ID NO: 38696 - DNA, 120 bp, synthetic construct
  source 1..120: mol_type = other DNA
aaccacaccttcctgccggagggataagctgccatcaatttcttttctcatacattttgagggatgctctggaaaattgtaatttaagaaggctaaagctttattttattctttctaggc

SEQ ID NO: 38697 - DNA, 120 bp, synthetic construct
  source 1..120: mol_type = other DNA
aaaataaataaaagcttttagcaactcaataggctctctcaagccaattccaaaataggaaatttgagactgaaccaccaggttgagctcctaggagagaagggcagcagtcaaaactcc

SEQ ID NO: 38698 - DNA, 120 bp, synthetic construct
  source 1..120: mol_type = other DNA
tttttatgcgatgtaatctgtcactcttttcctttggcctatagtttataaatattcattctcaacgatctccagacccactctgtacaatcgcagcacgcttcttcccagaaaggaccg

SEQ ID NO: 38699 - DNA, 120 bp, synthetic construct
  source 1..120: mol_type = other DNA
gaagaaataaacacaaggatggggcttggtagcagagacaggagcttcttggttgggggtttcccatgacaaaagtggctaaaacagatcttagaagctagttccaaatgcggttattta

SEQ ID NO: 38700 - DNA, 120 bp, synthetic construct
  source 1..120: mol_type = other DNA
gagaaaaataataccagaggaaaagtgcaataaagaaaaataaagcagtgtgggaagacggagagcccggagcactgttttacattaaagggacagtcaaggcctttctgataaggtgac

SEQ ID NO: 38701 - DNA, 120 bp, synthetic construct
  source 1..120: mol_type = other DNA
agctaaaaacctggctccccatcaccagaaaccagggccagccctgacatttctcccgccctaacccagtggtcactttagtgccatgtctcatcaactcagtccctcaacgactctccg

SEQ ID NO: 38702 - DNA, 120 bp, synthetic construct
  source 1..120: mol_type = other DNA
tgattttcattttccataaggtaacaactcacagtagttaaatctgcacagaccaggtgaacggacccatgcacgagaaggaacagaaagtacgtttctactgcaaattggactgaggat

SEQ ID NO: 38703 - DNA, 120 bp, synthetic construct
  source 1..120: mol_type = other DNA
taatgcagtcaaggtcacgaggcaaagacgacttaaaacaaggaaaggtacatggtcgtgatacaatttgagacctgagttttagaaagtttacaaagacaagaagtgtgtgagggccac

SEQ ID NO: 38704 - DNA, 120 bp, synthetic construct
  source 1..120: mol_type = other DNA
agaggagtgactggcagcctgatactaataaacatcaagactggaaaaaagagaggcagatggcattattttttagctggatgcctatctgactctcctctactggtgcaggattgtaaa

SEQ ID NO: 38705 - DNA, 120 bp, synthetic construct
  source 1..120: mol_type = other DNA
gcctcatctagagtaattgcacaaagtgtttatggaaggtgggaaagacttaaatccaagaattactttctgagggtaatttgcttccctgtcttccattcaccactggactccttgacc

SEQ ID NO: 38706 - DNA, 120 bp, synthetic construct
  source 1..120: mol_type = other DNA
gtgtatccttacatgtacaccagaatacttggaccaaaagctgccatgttctcatatagtcatcagttcctctccatttctctctgtgatccaaaaagagcgctggccatcagcctgggg

SEQ ID NO: 38707 - DNA, 120 bp, synthetic construct
  source 1..120: mol_type = other DNA
tcgtcttggggctggaacccaggcactggtgagacattgcagcccaggacatcctatgccagggggtaaaaaagacaagacttccttttccatttacatgttctgaataccatcaattag

SEQ ID NO: 38708 - DNA, 120 bp, synthetic construct
  source 1..120: mol_type = other DNA
aactatgaggggactggccgcattggcattggagttggttacacgcactgtggtgcttgcctgtaacagaaaaagattttaacctgtaaaaaaataaacacttgcaaagtgcctaacaac

SEQ ID NO: 38709 - DNA, 120 bp, synthetic construct
  source 1..120: mol_type = other DNA
aactgacaaggagaaggggacagaagtgtccaaggaaacacatgggaagggagaagtggggtgaaaaagaacagaacagatgcacaggctgagggggacgctgacccaagatgatgcaaa

SEQ ID NO: 38710 - DNA, 120 bp, synthetic construct
  source 1..120: mol_type = other DNA
aatattaatttcatctttccagtaccttaggagataggttccacaattatcttcatttacaaaagaggaaactgaggcacagaggggttaaggaacttgccctaggtcaaccagccagca

SEQ ID NO: 38711 - DNA, 120 bp, synthetic construct
  source 1..120: mol_type = other DNA
gcccaggaaccctctttgggtcaagaatcccattgaaaagatgctataaatcatggatatgtttcctggggatgaggtaggagagggaacagtaacagtaaaataagactctatttcaat

SEQ ID NO: 38712 - DNA, 120 bp, synthetic construct
  source 1..120: mol_type = other DNA
gctagcctaaattaatattcggcatatcatctaatcttttacaaagaatgtctagtgattcagttaacttaccaaaactccaccctaggggaggctcaatcttcagaatgaaatccccct

SEQ ID NO: 38713 - DNA, 120 bp, synthetic construct
  source 1..120: mol_type = other DNA
agctcaaatccagcatattttgtcccaagagtgaattcatatgtacactgaatttaactaccagtcaccacatcaaaatacacaccaaagaggccgggcacagtggctcacgcctgtaat

SEQ ID NO: 38714 - DNA, 120 bp, synthetic construct
  source 1..120: mol_type = other DNA
aataatatcacagggtgtacactcactgtgatattaggagtaagatctcccttggatactatgaataatatcacacagtgcacacccactgtgacgcggtacacccactgagatattagg

SEQ ID NO: 38715 - DNA, 120 bp, synthetic construct
  source 1..120: mol_type = other DNA
actctctacattaatagtaggcaactggtgtccctgcagtggggccaccaggaagtgccggccaagtttaactttgctagtgatgtgttggatcactgggctgacatggagaaggtaatg

SEQ ID NO: 38716 - DNA, 120 bp, synthetic construct
  source 1..120: mol_type = other DNA
aacttaatacattggtgctcaaaaagagtcacgattatgacatgatgtcctaagttccctacactatgaaacagtcttagtgtggagattgcaaatgccttgcctctaggctgaagacgg

SEQ ID NO: 38717 - DNA, 120 bp, synthetic construct
  source 1..120: mol_type = other DNA
tgttcaggttatacactgcacacctgcagttttaataagactcatagcatttgttcatggcagccccagggcaggggatttaggctttgcaggcacaatgactctgtctttctgtggtca

SEQ ID NO: 38718 - DNA, 120 bp, synthetic construct
  source 1..120: mol_type = other DNA
tggacacatggcccaagttggtccagtgagagtcaacccagagaattttgttgaggcctttggagaaaaacatgctcattttctactggagttttctaagctgctgagaatatatgtttg

SEQ ID NO: 38719 - DNA, 120 bp, synthetic construct
  source 1..120: mol_type = other DNA
atactttgtccaaagctaagaggttgatcacatccttccctggccactctcattccaggtatggttttatccatctcagcaaatgtcacccctattcctctagttcttccaacatcaaat

SEQ ID NO: 38720 - DNA, 120 bp, synthetic construct
  source 1..120: mol_type = other DNA
atttctgaaatgcctttggaaccttcttcctattatcctattagcaccaggcccccttttggtcatgctttagcagagttgttctgacactttcttggactcctctcctgaaaattctct

SEQ ID NO: 38721 - DNA, 120 bp, synthetic construct
  source 1..120: mol_type = other DNA
tctttgtcttcttctgagccatccaaactcttccaaccttttccattgcccagttccaaagctgctgtcatattttcaggtatctttatagcaataccctactccctggcaacaatttcc

SEQ ID NO: 38722 - DNA, 120 bp, synthetic construct
  source 1..120: mol_type = other DNA
atttccttgctaaatatttttgtcaacttctcaatgaagcttaccttgaccaccttctcaaaacggcaacccacctccaagttggttcttcctcctcctcattactaggcactattgtct

SEQ ID NO: 38723 - DNA, 120 bp, synthetic construct
  source 1..120: mol_type = other DNA
ggggacactgccaagtcatgatgctggactttgctgactttcttttccattctttctgtttttcaaatgttgacctttagacacatttcaggacagcacattcctgtgggaaatctgtga

SEQ ID NO: 38724 - DNA, 120 bp, synthetic construct
  source 1..120: mol_type = other DNA
gctcccctaagactcttagatgtggagaacaatgcaaagtgctagacttctgcaaagccttatgtttgatctgaaaaacctgctcaaaagtatccatgtgcttcaggagataactttgtc

SEQ ID NO: 38725 - DNA, 120 bp, synthetic construct
  source 1..120: mol_type = other DNA
agtcaccaaatctggctgaccactacccccactacccccactatccccacagacgatgccctgtcccttgcctcatgctccggcagggtacaggctcgcacctggggcctcaaggagcat

SEQ ID NO: 38726 - DNA, 120 bp, synthetic construct
  source 1..120: mol_type = other DNA
gcatcgtctgtggggatagtgggggtagtgggggtagtggtcagccagatttggtgactctacttgctcaccagacgatcctacacctgccacctccgatggatccactgcctctgtgcc

SEQ ID NO: 38727 - DNA, 120 bp, synthetic construct
  source 1..120: mol_type = other DNA
ggcctggcacacacagtcagtactcaatgttagccatgtagcttcatgatgcatactgattgtcaatattcagacaatccagtaaagtattaccaaaaataaaagtaaacttatttgcat

SEQ ID NO: 38728 - DNA, 120 bp, synthetic construct
  source 1..120: mol_type = other DNA
ctgtggagccctgcccgccccctgccctctaggtagcccgccgtctgatgaggattgttattctaagtgcaatacttggccctccggcttcccgctgctcccaccgtgctcacgcaataa

SEQ ID NO: 38729 - DNA, 120 bp, synthetic construct
  source 1..120: mol_type = other DNA
cgcttcccaccccggcccctacgctccaatccctccatggctccacctgcccgcttcccaccccggcccctaccatcagctcctcattaatgatcattttgctgatgatggagtgcacag

SEQ ID NO: 38730 - DNA, 120 bp, synthetic construct
  source 1..120: mol_type = other DNA
catgtcctcatgtacattcttcctaggaaaaaggcccatggctttcatcagattctcgtaagcttccttgacctaaaaacacctcttccagccaggcgtggtggctcacacctgtaataa

SEQ ID NO: 38731 - DNA, 120 bp, synthetic construct
  source 1..120: mol_type = other DNA
ataattatttgtaaaacacttagcacagtgccaggcagaggaggtgtcattaaatcagatggagtcgagtggtgggagagttactcccttcacttctcttaatccttatgtgtaatcagg

SEQ ID NO: 38732 - DNA, 120 bp, synthetic construct
  source 1..120: mol_type = other DNA
tgtttgaataaagacctaaagagagagcaagtcatgcaggcatctggggaaagaatatcctataaaaaggaaaaataaacgcagtgatcctgtggaagaaccgggccaggcatattcaag

SEQ ID NO: 38733 - DNA, 120 bp, synthetic construct
  source 1..120: mol_type = other DNA
aactactttcttacatcacacctccctgtattcctgcagctattctggaagggagggttccctgccttattttacagatgagaaaactgaagattagacaggctaagtagtttgtccaat

SEQ ID NO: 38734 - DNA, 120 bp, synthetic construct
  source 1..120: mol_type = other DNA
aggagcttctgatttcttcttcaagaaagttgcagcactgactccgtcctcatcctcatcctcatctgaagagcctagtggtaatggagggagaaaaagatcctgaatgttgaaaagcca

SEQ ID NO: 38735 - DNA, 120 bp, synthetic construct
  source 1..120: mol_type = other DNA
atcacccagcctcgccatggctttacctcttgtccttggcactgcggacaactctcttggtatcttcttcatcctcgctcagcaacaatggcctgtttggaaggaacagaggccattaac

SEQ ID NO: 38736 - DNA, 120 bp, synthetic construct
  source 1..120: mol_type = other DNA
agcctccagagtagttgggactacaggcatgcaccatcttgcctgcctcttttccctttttattattttttggattattttagcggtgttttttgaggtggagttttgcttttatcgccc

SEQ ID NO: 38737 - DNA, 120 bp, synthetic construct
  source 1..120: mol_type = other DNA
ataccaatcaagcattttgcatttccttctgtgagcagtgagaagtcactaaggacttctcggcggtaaaatgagaggagacaggtagaggctgtagacttaaggccagttaagaagctg

SEQ ID NO: 38738 - DNA, 120 bp, synthetic construct
  source 1..120: mol_type = other DNA
atcgtagaaaaatactagcagtggaggtgttaataccattgagactttctccttgctgttggcctctcatactttgggaaatgttgctaagatctagtttaggtaccacctccctaaagc

SEQ ID NO: 38739 - DNA, 120 bp, synthetic construct
  source 1..120: mol_type = other DNA
ggttctatatccgcatcctggctgacctagaggactatcttaatgaggtgtgatgcctatatttattaccaccacttattcatggttttgtacttttagtggtgggatgtataggatctt

SEQ ID NO: 38740 - DNA, 120 bp, synthetic construct
  source 1..120: mol_type = other DNA
gtgatacataacatttcccattttaaccattttcaggtatacaaatcagtggcatttagtacgttcacattgtgcaatgaccgccagaacttgatctctgcttctctggcaatttagttc

SEQ ID NO: 38741 - DNA, 120 bp, synthetic construct
  source 1..120: mol_type = other DNA
gtcttctaaagattgggcatctctaattccaaagtctgaaacttctggagcaccataagtggacaattccacatctgacctcatgtgacaggttgcagtcaaaactttgtttcatgcaca

SEQ ID NO: 38742 - DNA, 120 bp, synthetic construct
  source 1..120: mol_type = other DNA
tgtttttgtttttgttttttaagtgaaccccaggatctctagtgagactgaatgtccgagttaggatcctaagcaagggtatacatctagggctttccatcagtagttgtggttgggaag

SEQ ID NO: 38743 - DNA, 120 bp, synthetic construct
  source 1..120: mol_type = other DNA
gccatttggtttgtattttgttacataaatacatactcaagtctggagatggtttcaggcaacatccagtagcctaagaccattttaaggtagctggtgatctttttctgttttgtgggg

SEQ ID NO: 38744 - DNA, 120 bp, synthetic construct
  source 1..120: mol_type = other DNA
tgccgttggttaaggtgagggtttcagaggtaaaatgaattggggaacagtttgggaggacataaaggtccccttgtggggaaaaggcaaggacagtttcccgctggcatgtacatgacg

SEQ ID NO: 38745 - DNA, 120 bp, synthetic construct
  source 1..120: mol_type = other DNA
gattattgttgcttctgtttggaatttataaaggagaagcagggatatgggtgatgaggagggcgcgttatccgaagcgggcatgctgggagagactttgtgatttgtctccaaagcctc

SEQ ID NO: 38746 - DNA, 120 bp, synthetic construct
  source 1..120: mol_type = other DNA
tatactttgagaacctttggggtaaggcatctattcacttctcttgtttagcttggatgagaggcattggggtgtgaaagtgcagcatagtttactcagtaaaagtgtgaatgtgcccat

SEQ ID NO: 38747 - DNA, 120 bp, synthetic construct
  source 1..120: mol_type = other DNA
ccttaagtagggaccacctgaggtgagatccaatgaggaggagttaggggaagaatcagctgaagacagcgcctgacaggaggagcagagagcgagcttgatgttccaggagtaaaaagg

SEQ ID NO: 38748 - DNA, 120 bp, synthetic construct
  source 1..120: mol_type = other DNA
cacctcctctgcctggcactgtgctaagtgttttacaaataattatttaatctgcattagtaataaccctatgccggtaggtactagtaataccctttttcccagtggagaaactgaggc

SEQ ID NO: 38749 - DNA, 120 bp, synthetic construct
  source 1..120: mol_type = other DNA
agaagctgggcagcctggtggagaacaacgaacgggtgtttgaccacaagcagggcacctacgggggctacttccgaggtgagtacttcggctcctctccttgcccactcctggtgccct

SEQ ID NO: 38750 - DNA, 120 bp, synthetic construct
  source 1..120: mol_type = other DNA
caggagacctctctacagtgaccccaaatgatggatagtgagatagggacagtatgatctatattttttttttggtcacaggggtttgttgtacaggggcacaatatattcttctcccac

SEQ ID NO: 38751 - DNA, 120 bp, synthetic construct
  source 1..120: mol_type = other DNA
cgggcaatcctcccgcctcggcctgggctgggattacaggtgtgagccacagtgcccagcctgtagtttcttacatataagtttttaattaatttcaatttgatttttatatatggtgaa

SEQ ID NO: 38752 - DNA, 120 bp, synthetic construct
  source 1..120: mol_type = other DNA
agggcccgggttccacttggcggcgtcttctcgcgagtcgctttcgctgctccaagaagtcggcggtgcagcaactgacgccgctgctgctccggtcgccgcaggtcgccatattcctcg

SEQ ID NO: 38753 - DNA, 120 bp, synthetic construct
  source 1..120: mol_type = other DNA
gctcctgtctcaatctgggattgtcctcctgtagccccaccatccaccgtggggaacggtggagagactacaactcccagtatgcaccgcgatgcgcgcctcaccctgcatctcccagcc

SEQ ID NO: 38754 - DNA, 120 bp, synthetic construct
  source 1..120: mol_type = other DNA
tatgtggataacataccccctcccactagctcatctataaaaacacttgtatttcactgcagaatggcaactctttttttctggatccctctctgcagcagagagctgttctctttttct

SEQ ID NO: 38755 - DNA, 120 bp, synthetic construct
  source 1..120: mol_type = other DNA
accttcggaaggcaagggaagatggccaaggacacaaggctgaagcaacccatctgagccaaagatctgtttaggtccttctgaatctcagcagccttgccaaggaaggcatgattaccc

SEQ ID NO: 38756 - DNA, 120 bp, synthetic construct
  source 1..120: mol_type = other DNA
cattagagagactagagaaagggcctgggagagctaggctcagagtagattagacgaagagtgagggtggggacgatctgactttgtgatttattaaaatcacaccatagaggtaactaa

SEQ ID NO: 38757 - DNA, 120 bp, synthetic construct
  source 1..120: mol_type = other DNA
tttgattaggggaatagaatcaatgataaactcctagaggagggactgtttatatccaactcttgagaacaggttggggctacatgggattggaggggagggtaggaccccttaaaagaa

SEQ ID NO: 38758 - DNA, 120 bp, synthetic construct
  source 1..120: mol_type = other DNA
gaggccaaaaggaaggtaacgggaacagagtttgagttttgcaaaatgaacaaatttccctatgaatgtggatgatggttgtagaacaatgtgagtatgattaattcctctgtcctgcac

SEQ ID NO: 38759 - DNA, 120 bp, synthetic construct
  source 1..120: mol_type = other DNA
gagccttacagacctgtgggatgactgagtctgagaaaaggtgagagatagaaaaaatcaaatggagtataaaagtaaatcaacaaaatttaaagaaaataaacacagccttagagaccc

SEQ ID NO: 38760 - DNA, 120 bp, synthetic construct
  source 1..120: mol_type = other DNA
tagctgtttccttagtggatgcagcagggtcaggcccttccgctgtgacgttttctcctctttattacactggtgggaaagtctccgtgagaggcccgacctagatatggaccacgcagc

SEQ ID NO: 38761 - DNA, 120 bp, synthetic construct
  source 1..120: mol_type = other DNA
gctaagagcggaggagaaaaacccaattcccagccatgtgtctggtatgacatttcaccaacccatttaagtgtgcaggcctccaaatatctacctaaagattatgatagattaggcatt

SEQ ID NO: 38762 - DNA, 120 bp, synthetic construct
  source 1..120: mol_type = other DNA
catctatgttcatcagggatattggcctgtaattgtttttcttgtaatgtccatctctggtttttgtatcagtgtaatgctggcttcataaaatgagtttggaagtattcctcctccttc

SEQ ID NO: 38763 - DNA, 120 bp, synthetic construct
  source 1..120: mol_type = other DNA
caataataagcaatgttcatatgactacccgggcatttagtaatggtaagcagaccagatgaagtgaccacagggatatagcctgactcttggtaatcaggactgaagtactcactgatt

SEQ ID NO: 38764 - DNA, 120 bp, synthetic construct
  source 1..120: mol_type = other DNA
ccattggctaattgatataaacaagagttaattttccatggcatatagtattttgtttcacttaaagtcagtttccagggacctatcaatgatgttaagtgagcacttactgaacatgta

SEQ ID NO: 38765 - DNA, 120 bp, synthetic construct
  source 1..120: mol_type = other DNA
tgctgaagcccggccttcactgtgggatatttgcatttaaccttgtatataaggttatttttatttataagttgtatatatgtggccaggcatagtggatctcacctttaataccagcac

SEQ ID NO: 38766 - DNA, 120 bp, synthetic construct
  source 1..120: mol_type = other DNA
aaaaataaaaataaaaatacatcaaaaaacaggtagctattaagcattgctaggacccacacgcagtgaccctgagggtgctgggtttctgtttgagggagaagaaactcctgagcccct

SEQ ID NO: 38767 - DNA, 120 bp, synthetic construct
  source 1..120: mol_type = other DNA
ttttggtgattcagtatcttccccctggagttttttgatgattcagtaccctcctagatttggcccctggggcctgcggggatgtgacttgtcatttaattctggagaaaatgaggggta

SEQ ID NO: 38768 - DNA, 120 bp, synthetic construct
  source 1..120: mol_type = other DNA
ctgtttttctagaggcggacgtgatcccagcaggactggagtcagcccagggcatcacgtgctctggtccccgcctgctttgactcctcctgcctcactccccccctggcctgtagtcac

SEQ ID NO: 38769 - DNA, 120 bp, synthetic construct
  source 1..120: mol_type = other DNA
aggtttagaagatgctactaaactaaagccctgctcctccccttttcccgctgtccctccctggagggaatcttcccaaagttcaggagcatcactgccaagcaagtttccattttttct

SEQ ID NO: 38770 - DNA, 120 bp, synthetic construct
  source 1..120: mol_type = other DNA
aaaactgaaaacttgatccaatggttacagaatgaccaaggggacccacaccttaaaaggtctttatttgggaaagagtgaaatgtggagaccagaggctatgaaaattaggctgtgtgg

SEQ ID NO: 38771 - DNA, 120 bp, synthetic construct
  source 1..120: mol_type = other DNA
ggtggaggccgctgcagtgaagcctcaggccccctctggtctctccagggtcatcctggatcatctgaatttccctttgaaatgagcatgcacaggttcagctgattcataatttaatac

SEQ ID NO: 38772 - DNA, 120 bp, synthetic construct
  source 1..120: mol_type = other DNA
acacttacccgtggttgtcaggctgcccaaaggcaaaactggtgaaggcctggtgctcccctgtggcccagcggaaggagtccttggcggtcttgtaggtgagccctgggccggggtagt

SEQ ID NO: 38773 - DNA, 120 bp, synthetic construct
  source 1..120: mol_type = other DNA
agtaattaattgtggtttcgagagttgccagtggaagtctgggttgctggttttcttgaacaaccccgagctctggccaccctgaccttgcattcctgcaaggcaaccagtggctggaac

SEQ ID NO: 38774 - DNA, 120 bp, synthetic construct
  source 1..120: mol_type = other DNA
ctgcacctcactgccagggcagggcagtggggcagaggctcagcccccagccttctggaccccacgctgccccccagaggcctcgaacatccagggaatgccaaccacagcaagaatacc

SEQ ID NO: 38775 - DNA, 120 bp, synthetic construct
  source 1..120: mol_type = other DNA
actcctttaaatgtgactctgcagctttttgcagcaaagagaggtgtctctttccttgctccttgaatctggctggctctgtaactggtttggccaccagaatgccacagaagtgatact

SEQ ID NO: 38776 - DNA, 120 bp, synthetic construct
  source 1..120: mol_type = other DNA
atgtgagcagtgcccacgcgttgcagactggttctgtgtttgggccctggccattgtcagaaaggctccactgctcccacccggccatgctgccctcctgtgatgcaaaaagccctacag

SEQ ID NO: 38777 - DNA, 120 bp, synthetic construct
  source 1..120: mol_type = other DNA
acctgaacccaacacacggcagaataagcatgtgtccctgcccttggaaaacaagatgggagaggagtgtggtgggtgcaggggacgtggggcatagcaatggagcgaggctgagagaga

SEQ ID NO: 38778 - DNA, 120 bp, synthetic construct
  source 1..120: mol_type = other DNA
aactgggcaagaccccaggggagttctttcctttcttgggaagctcgtcccaaccccccagccatgaattaaacataggcaagaggtaaccgcacaccagaggggtgcaatctgtgggct

SEQ ID NO: 38779 - DNA, 120 bp, synthetic construct
  source 1..120: mol_type = other DNA
aaaaaaaaaaaagagtcccaggagagcaaggttcatgggccagaagagaagctgagtggataaaagattaatgagacactggaagacctaggctggaaccgacacgctgtgtgaccctga

SEQ ID NO: 38780 - DNA, 120 bp, synthetic construct
  source 1..120: mol_type = other DNA
tctcttggatggatgctaaagctctaaggtcttacaaacaatccaaagcagaagggaagaaccagaagagagtgcacagccaaccagcagacaagagccccactaaggaagagaacgcaa

SEQ ID NO: 38781 - DNA, 120 bp, synthetic construct
  source 1..120: mol_type = other DNA
tacatctgggttacatgaactaaaaaaaaaaacaccttatgaggagagattacaaaggttaagtaagcctggcctcagacttctccaagatattcagtgaaagaaaatgatggaatagca

SEQ ID NO: 38782 - DNA, 120 bp, synthetic construct
  source 1..120: mol_type = other DNA
gagatataaaaaagagtaagactcacaaattgggtcaagtgacaaactatattttccaaagacagcagcaacaatatctcctcttccacaaagtcttctagcaccttcttattccttatc

SEQ ID NO: 38783 - DNA, 120 bp, synthetic construct
  source 1..120: mol_type = other DNA
ataaaaagattaggaatccctgtatgaaggtgatgtgggaggaagaagagcattccagatagagcagcaggcactgatgccctaatgaagaaagtacaatctatggatttatgggacttg

SEQ ID NO: 38784 - DNA, 120 bp, synthetic construct
  source 1..120: mol_type = other DNA
cgatgattgcactgactcgaaagaataagtggaaaaacgatgctactggatgtctgaaaaccaaaacacaatgaaagaaatgcaattacattttactacaggtactagcaaatgtagaga

SEQ ID NO: 38785 - DNA, 120 bp, synthetic construct
  source 1..120: mol_type = other DNA
taatctcaaggtttctggctccttcacaaaatcatctgactgcatccttagttccatgaccccttctcacaactcctcctcttcttatccaaggctaaaccaattatttgtgctcagaat

SEQ ID NO: 38786 - DNA, 120 bp, synthetic construct
  source 1..120: mol_type = other DNA
ccctctctattccagcctctcctttacattacccagagcaatcctcccaatatggaaatcacaccatgtcactctactgctcaaatttttcaatggcatccctacaagtataggataaaa

SEQ ID NO: 38787 - DNA, 120 bp, synthetic construct
  source 1..120: mol_type = other DNA
atcctagtgtctagcagagcattcagccaagtggtacagtatttgttgaaggcatgagtaaataagcaaaggagacgataatatacagctgactgtgatcagggctgagaaatctaagtg

SEQ ID NO: 38788 - DNA, 120 bp, synthetic construct
  source 1..120: mol_type = other DNA
tcaaaatgtcactggtgctgagtgaccgcccacctgcccacccactcacctctgtgttgtgcagcacttgcacataagacgcacacaggtgtctggttctgtggtgcatgaacgactttt

SEQ ID NO: 38789 - DNA, 120 bp, synthetic construct
  source 1..120: mol_type = other DNA
tgttctctaggactaaggccccagcgttctcttgttctttcttggtgacccaggaaaacaaagtcccctcctgtattgacagctgggaattgtggtgtccaccgtcctcgacctgcgacg

SEQ ID NO: 38790 - DNA, 120 bp, synthetic construct
  source 1..120: mol_type = other DNA
caggacagtaggggaggacagccaagcatcccatgtcctggtttttgcagtggctgggaggaggctgagggctgaaggccaatgaccctgagagccagctgaggctggagcaggagtgct

SEQ ID NO: 38791 - DNA, 120 bp, synthetic construct
  source 1..120: mol_type = other DNA
cttgtaggagacaggtttgacaagttgctgaggtgcctgatgggccaggcacttgtcatgaaatgagtttgcatcctgggggagcctcttcttcactggaaacctggcaaggatccaatt

SEQ ID NO: 38792 - DNA, 120 bp, synthetic construct
  source 1..120: mol_type = other DNA
tgtgactgtgggcaagttgcttcacctctccgtgcttttgtttctttccaggtagaatggggattattatttgtgcctgcttcataaaactgacataaagttaattgtaagacacctaga

SEQ ID NO: 38793 - DNA, 120 bp, synthetic construct
  source 1..120: mol_type = other DNA
attgtggtgactgaagggtgccgaagtcagaactctcagtggcctggcactgtgcctcgaagtgcctccctactgtgttgattagtctaaaaacatgtcagcctttgggtatgaccttac

SEQ ID NO: 38794 - DNA, 120 bp, synthetic construct
  source 1..120: mol_type = other DNA
atactgagtccagaatgaggctgcctatgttctggtctgcagagctcagctctgctttctagactccagagaggaagaatggagaaaggaggcctgtttcctcctggctgtcaccaatga

SEQ ID NO: 38795 - DNA, 120 bp, synthetic construct
  source 1..120: mol_type = other DNA
gctgcaatgaataaccttgtttgttggatgatattcaatttaaaatctcatttttcaggacaggcatagtggttcatgtctgaaatcccggccctttgggaggccaagacagaaggatca

SEQ ID NO: 38796 - DNA, 120 bp, synthetic construct
  source 1..120: mol_type = other DNA
agaagatgttgactttttagatgaggcgtgtgacgtctactttgccacagtccccaccactccctacctggccatctgactcatacacatcacctgcctggcttctttaggcatttaatt

SEQ ID NO: 38797 - DNA, 120 bp, synthetic construct
  source 1..120: mol_type = other DNA
ctcagggccaggattctccttatcacaagcttagactgtctgagtaactaattggatttgtgtctgcctccacacaggaccctaagacccgtggggctgagactccttctgtcctggtca

SEQ ID NO: 38798 - DNA, 120 bp, synthetic construct
  source 1..120: mol_type = other DNA
tgctgcatccccctgcctgcctgttctctgcctcctgcccctgcatctgcctttcggcttctccttggctctattaatgcttctcctcaccggccggtgccttttgttttaacagaatcc

SEQ ID NO: 38799 - DNA, 120 bp, synthetic construct
  source 1..120: mol_type = other DNA
aatgtggttggctggccgtgatggaacaacctgagttgccactccatgggcagccacggaagaccatgccccacgttcacttctctcacctgcaaagggaggctaggctgagagacgttt

SEQ ID NO: 38800 - DNA, 120 bp, synthetic construct
  source 1..120: mol_type = other DNA
ggagcggactcctggccgtgttgctgagatgcacggctgccacgcagggcagggcacgtctggagcctgaagttggcactgcaccttctcctgccacctgagacgctgctgctggaagga

SEQ ID NO: 38801 - DNA, 120 bp, synthetic construct
  source 1..120: mol_type = other DNA
cttcagagaggcctttctaaaaacaaaacccatccctgaggtgagattggtggctggggtcggggggacagaggacttactgcacaatcccgaggttattggtgtattttctgacatcaa

SEQ ID NO: 38802 - DNA, 120 bp, synthetic construct
  source 1..120: mol_type = other DNA
ggtgctccctaaactcagacctccccatccagggcattcctgggattgcagatggaagatagggggcagaaggttgagggttgggggcaaaaggcaaagggcaggtcccctccctagcag

SEQ ID NO: 38803 - DNA, 120 bp, synthetic construct
  source 1..120: mol_type = other DNA
agcttaggtactgtataaatttcctgttgctactgcggcagtgaagtcatatgtactgttgtaaagttctggtggtcagaagtccagaatgaggctcaaggggttaaacatcaaggtgtg

SEQ ID NO: 38804 - DNA, 120 bp, synthetic construct
  source 1..120: mol_type = other DNA
agtaggaatgatttgcttccttccctggctcccatttgcacttagatttctcagccctgatcacagtcagctgtatattatcgtctcctttgcttatttactcatgccttcaacaaatac

SEQ ID NO: 38805 - DNA, 120 bp, synthetic construct
  source 1..120: mol_type = other DNA
tgtgcctgtttatattaatcttcaccagaatgtcacaggtagactaatggttggcctacgttggtggaatcacattgatgaagatggaaagagccattgggtgtttgaatctagaaaggt

SEQ ID NO: 38806 - DNA, 120 bp, synthetic construct
  source 1..120: mol_type = other DNA
cagctatacatcttgttaagggtaaggagaataaatctagattggaaaacgacatttcattgagctgctttgcttgtcacagatataaaagagtagaatggtcgatgagctgtttattcc

SEQ ID NO: 38807 - DNA, 120 bp, synthetic construct
  source 1..120: mol_type = other DNA
tgtggtgctacaaggtgccaacctgtatggttacatcaggtgtaaggtgcgcagcagaaagcatttaaccagcatggctacttcatattttggaaagcagtttttaagacaagtaagtgt

SEQ ID NO: 38808 - DNA, 120 bp, synthetic construct
  source 1..120: mol_type = other DNA
gtctctaaaaaaaaaaaaaagatgtgttcaaggttcccaccctctgatctgtatgaggcatagggcaaaacaggattccccctactccattccagtcaaggggtccaaaccacttctaaa

SEQ ID NO: 38809 - DNA, 120 bp, synthetic construct
  source 1..120: mol_type = other DNA
gctcttgctcatggccctcaccagaaataatgccttttcccttttctctgtctagtcttgaccttagccatccttcaaggcccaggtggagcctcaaagcatttgagaatcccccagact

SEQ ID NO: 38810 - DNA, 120 bp, synthetic construct
  source 1..120: mol_type = other DNA
tccattactattacatttattttgatgcttaaaatgcccctgattaggccagtggggtctccttcaagctgtctccttatccttttgacatggacccatcattctatgaacacaccctga

SEQ ID NO: 38811 - DNA, 120 bp, synthetic construct
  source 1..120: mol_type = other DNA
ctgagctgagaggaagggcaagaggggccatgatctcagtgcaaacaccatggcctcacctttttaaaccaaatattcatagatgttcatgaatccatgtttcttcatttgcattttctt

SEQ ID NO: 38812 - DNA, 120 bp, synthetic construct
  source 1..120: mol_type = other DNA
tcttgttgaccttaggatttaagtcccacctaaggtgcccagtgtctaaaccagaagaggtaccttctgagctggtctttgatggatgaataggagtctcctgggagcagaaagaggaga

SEQ ID NO: 38813 - DNA, 120 bp, synthetic construct
  source 1..120: mol_type = other DNA
tgttgtgaggattcgatgagatattaccacagtgtctggcaggagttagttcaacccccagttttccaggaaaaagtttgaaaagaaaattgttgagagagggagagaatgagagctaga

SEQ ID NO: 38814 - DNA, 120 bp, synthetic construct
  source 1..120: mol_type = other DNA
tgagcccaaggcatgaccctctgcggggatccaagtcttggtttctcatctgagagcacttcgaggtctctagacccaagtgtggtgttgggagggagtggggcagtgatgaaataggaa

SEQ ID NO: 38815 - DNA, 120 bp, synthetic construct
  source 1..120: mol_type = other DNA
attctccatctgtcacctgatgtccatttttcacagcgcttactgctccattaaactaccttgcttatttgtttcttcccttgtttatggtctgtctctgcctactagaatgtgagcttc

SEQ ID NO: 38816 - DNA, 120 bp, synthetic construct
  source 1..120: mol_type = other DNA
ttgtcacccctgagctgtctaaatgcgagggaccctaggtgaccactggtggctgtgctcaggccgggtcccccgaccttcaccccaaggctcagtgcgtggcatgtaagtgctgtgggc

SEQ ID NO: 38817 - DNA, 120 bp, synthetic construct
  source 1..120: mol_type = other DNA
ggctgctgtgtggcctcaggcaggtccctgccctctgttcctcagttttcctatctataactcaaggagggcagatgctccaatctgttcagggtggagggttctagagctcttgctgag

SEQ ID NO: 38818 - DNA, 120 bp, synthetic construct
  source 1..120: mol_type = other DNA
ccaggccccactatgtcccgcgtggttgtgtgacattgggcaggtttctgtgatctttctgtcaattaagggggagagggaggggggtgtgcgaagagggagagagacgagagaatccga

SEQ ID NO: 38819 - DNA, 120 bp, synthetic construct
  source 1..120: mol_type = other DNA
tgtgtggggggagcagcaaacacccgcgtacgagcagctcatgcatcctcccaaggccctgagagctgagcaccaccatcgccatctttgagattagcagacagaggcacagagaggttg

SEQ ID NO: 38820 - DNA, 120 bp, synthetic construct
  source 1..120: mol_type = other DNA
ccattcgtttgggggcagcagtggtctagaatctcatgtctaggagttcgggtttctccggaagccgtccctgagacacgagcctgataacaaggaatttatataacagtggagaagagg

SEQ ID NO: 38821 - DNA, 120 bp, synthetic construct
  source 1..120: mol_type = other DNA
actgctaatcacctcccaatgaccccaccttttactgctgtcacatgggggattaggtttcaatatttgaattttgggggacagaaagtcagcctatagcagtggcaaattcctgaagag

SEQ ID NO: 38822 - DNA, 120 bp, synthetic construct
  source 1..120: mol_type = other DNA
tgagcttgggcaagtcacttaccttctctgtgcctgtttcttcacatgtaaaataggctattgcacggaagaaacaagttggtatatttaaagcaattagaatagtccctggcatggagg

SEQ ID NO: 38823 - DNA, 120 bp, synthetic construct
  source 1..120: mol_type = other DNA
gagatgtaattggactccatttttagcagatgactctgagtgctgtgaggagaaagaactgttgggggagagcgtggtggcagggaggcccgtggggagtcaggagggagatgatggcct

SEQ ID NO: 38824 - DNA, 120 bp, synthetic construct
  source 1..120: mol_type = other DNA
cgcacacgcacatgatcagacctgaacaccccagccttgtgagtttgctcagcacgcatttattgagcatcagctgtgtgaaaaccacaaggcaggactgaaacaggagacaaaccagag

SEQ ID NO: 38825 - DNA, 120 bp, synthetic construct
  source 1..120: mol_type = other DNA
taaaatggacagctatgtaacgtgttttttatgatgactggcacatgataagtgccagttatcataattatattaaggctccaaggactgcacaccaagctggggaggaattagggagcc

SEQ ID NO: 38826 - DNA, 120 bp, synthetic construct
  source 1..120: mol_type = other DNA
tgcccctcccaagctcagcttgactctggttcctgtctgctgccgaacaggttgttccacccctccttttcacagatgggcaaactgaggccagagaggggccatgcctgatggagatcg

SEQ ID NO: 38827 - DNA, 120 bp, synthetic construct
  source 1..120: mol_type = other DNA
catcttagagcaatgggttggccaccggagcctgggttcagggtcagaacacctggtgggctgcaatcccagttcagaaccaacagaagtgggtttcaagaacaaagcatcgcaatgagg

SEQ ID NO: 38828 - DNA, 120 bp, synthetic construct
  source 1..120: mol_type = other DNA
ccctcttgttcaggagaaccatagacctgaaggaactcaggctgtgggtgaacccaagcttgcaaatgtattgcgaccaaattgtttaaccagatttcaatttacaacccaggagaggta

SEQ ID NO: 38829 - DNA, 120 bp, synthetic construct
  source 1..120: mol_type = other DNA
tgtaaggcactgtcctaagcgtgctacagatactgcctcattccattcttacagctctaggagattcatatgattattagctccattttgtagatgaggaaactgaagcacagagtagct

SEQ ID NO: 38830 - DNA, 120 bp, synthetic construct
  source 1..120: mol_type = other DNA
tttttcggggcagacttcgctcctcagacccccaagagttgttgatctgggtgttacggaccacagcattctcatcaaaacgggggttcatgtggaaggcgatgtggctcccagagcaca

SEQ ID NO: 38831 - DNA, 120 bp, synthetic construct
  source 1..120: mol_type = other DNA
ctagagggggctccactgtgaggctgacctcatgagcctttggcccttggactctcccgtaaacctccgttttcatgttagccttcctggaacttcctgccgtgttcccagaccccacca

SEQ ID NO: 38832 - DNA, 120 bp, synthetic construct
  source 1..120: mol_type = other DNA
ccactcccgatgggagaggcccaatgcctggccctgcatcctccattagcccagaagaagagccaaaatcaagaggatccaaaaagaaagcaagagacttacaatgggagctgggttggc

SEQ ID NO: 38833 - DNA, 120 bp, synthetic construct
  source 1..120: mol_type = other DNA
attcagtttggttcttgagcctgggctctttctagaacaatatgccctccttaccaggatggaaattgacggatgaagagaaaggggcagctgaggagtctgggagaccaaggcaggtgt

SEQ ID NO: 38834 - DNA, 120 bp, synthetic construct
  source 1..120: mol_type = other DNA
agtagaaaatggctaagggaaagtgctggcattagcaaacaagaagcataggtcctggaaagtgattaccagttggtaacaaagatggaagttgttaagcacacctagaagagagaggct

SEQ ID NO: 38835 - DNA, 120 bp, synthetic construct
  source 1..120: mol_type = other DNA
tggatttgagggggttgtcttttcttgcccctcaggtcaggtctgaactctgccattaaatactttggtgacctcaagcaaatcacagcttctctgtgtctctgacttctctttcttgtc

SEQ ID NO: 38836 - DNA, 120 bp, synthetic construct
  source 1..120: mol_type = other DNA
tctgtgtagctttcaaaagaaaagaaaaagaagacggaaaagaaaaaagaaaaagaggaaaactctgagcaccgatatggaataatgccatttgcataaaaagtgggtaggggaaggcta

SEQ ID NO: 38837 - DNA, 120 bp, synthetic construct
  source 1..120: mol_type = other DNA
aaacaactggacctacttttgctccgtagggtgcaggaggatggatttttgtgttggatttgtggtcccatgggcctgggctcgcctcccagctctgtacactagcaattctgacactgg

SEQ ID NO: 38838 - DNA, 120 bp, synthetic construct
  source 1..120: mol_type = other DNA
tccgactgccagatgggtcaccgagtgaggctcaagtgtcccaacccaggggagcccccgtagggtagaggggagctctggacacctgtgggggctgcactgatcgtctttcttgtctga

SEQ ID NO: 38839 - DNA, 120 bp, synthetic construct
  source 1..120: mol_type = other DNA
ctgaaccttggattttccgtgaatgaaggggactcataaacctcacagagtttcagcaaggcacctgcagccctctgaccccacactgcagggacagtccctgcctccgtcacctctgag

SEQ ID NO: 38840 - DNA, 120 bp, synthetic construct
  source 1..120: mol_type = other DNA
gtgtgtcgtctgcactcaccatcccattatgttctggatcaagtagaatttgaccaagttaaggagtagacagtacaaggggagcagaaaggagagaaaagaagggaaattctttgcaat

SEQ ID NO: 38841 - DNA, 120 bp, synthetic construct
  source 1..120: mol_type = other DNA
tccgtgcattaacaatggcgttgacgcctgctttgcggcacgctgggaggggagagggaggtgtatgctggagagctccccaggggcaaggcctggctctgcgtcacccactgtcagatc

SEQ ID NO: 38842 - DNA, 120 bp, synthetic construct
  source 1..120: mol_type = other DNA
cccgggctggggaagcagggcactgcagggcaaggaaggtccctgagccagggtctccctatgcctccttaccccgtcaatcaatatccggatgaggcagcctaacggggaacactgccc

SEQ ID NO: 38843 - DNA, 120 bp, synthetic construct
  source 1..120: mol_type = other DNA
atttatttcaaaacatgaaggtggttatccttccatgagtttgaagtacaaaggcaggctcacggtgtcgtcagaattcagaacgatggtcgtggggctgggggtgctgggaggggctgg

SEQ ID NO: 38844 - DNA, 120 bp, synthetic construct
  source 1..120: mol_type = other DNA
tgcgtggtcctcttgaggcctcgccctccttttgcctcgagtattcccaggagggacggtccatccagctgttctccaggaccaaggacccactgttcttcctcagtgacccaggaaaat

SEQ ID NO: 38845 - DNA, 120 bp, synthetic construct
  source 1..120: mol_type = other DNA
acatgcctcatttgacagcaaattcggcgggagatcagccgaaagagcaagtgggtggatatgctgggagactgggagaaatacaaaagcagcagaaaggtaacgtgtggagggaggaag

SEQ ID NO: 38846 - DNA, 120 bp, synthetic construct
  source 1..120: mol_type = other DNA
aggtcatctgagcacatccagcgcatcgaccgggacataagcgggacattaaggaagcatatgttcttcagggatcgatacggaaccaagtaagcctacgggagccacagggtcccagca

SEQ ID NO: 38847 - DNA, 120 bp, synthetic construct
  source 1..120: mol_type = other DNA
gggaagggtcttcagaggccctggaagagggaggtttttagggcagcccagtggcctgagcacctctgttgcttccatcaggacaagaaagatctatgtgggcagtgttccccgttaggc

SEQ ID NO: 38848 - DNA, 120 bp, synthetic construct
  source 1..120: mol_type = other DNA
cgcagggggtctgtctaagctctatcccctgccttcagcactgagggatgaaatccaactcttagggaacggtggccacgtgctgggccagccccaggctctcaggatctgacagtgggt

SEQ ID NO: 38849 - DNA, 120 bp, synthetic construct
  source 1..120: mol_type = other DNA
tggcatgctggtttcatgtggatgtcagtttgcaaatcagtgggttcaatatctgtgacactttggggatgtgtggttcaagtccatcgagctttgtgagccactgcccaactggctgcc

SEQ ID NO: 38850 - DNA, 120 bp, synthetic construct
  source 1..120: mol_type = other DNA
ggtcatccataggccccatcactgttcccgcttctaaatggagggtattttggcacatcttcctggcggggtccggggcctcatccctgttatttattctatcttggtaaagccaggtta

SEQ ID NO: 38851 - DNA, 120 bp, synthetic construct
  source 1..120: mol_type = other DNA
caccacacccggcctaaatttcttatgtgccatgggactgcaaaacatcattattaggggcagctggatggaaggtataggaggatactatagtgccttttcaatatttctgtctaaaat

SEQ ID NO: 38852 - DNA, 120 bp, synthetic construct
  source 1..120: mol_type = other DNA
gcaggaatctccaggaaccctgaggtcctccctgagccagggccgggctgggcacaccctgagtgcccacagggtaggtgtcttcccggacagccccaccaggacagggtgtggaagaac

SEQ ID NO: 38853 - DNA, 120 bp, synthetic construct
  source 1..120: mol_type = other DNA
ggcggggtctcccacaaatgggtctgggctcgtctagtaacttggagggccctgcgagggggagagggagacaccgtggaaagtgggagggggcttgttggagggtcttgcccacatccc

SEQ ID NO: 38854 - DNA, 120 bp, synthetic construct
  source 1..120: mol_type = other DNA
ttcatcagaagacacgagcaaactccggcgagaaagggcaacggtcaaagattttattctctcggaaaagggttctcgggctgtaagcagcaggcagaagactttattgcacgcgtagtt

SEQ ID NO: 38855 - DNA, 120 bp, synthetic construct
  source 1..120: mol_type = other DNA
actctactatctccttgcccagatgtcttaacctggctttaccaagatagaataaataacagggatgaggccccggaccccgccaggaagatgtgccaaaataccctccatttagaagcg

SEQ ID NO: 38856 - DNA, 120 bp, synthetic construct
  source 1..120: mol_type = other DNA
ggatactaccatttctggaagggtgggagggaggaaccaaaggaacaaaggtacttatcttaaaaatagaaatccattcacattttaaaaattggtcagcatcttgtcttatattagaga

SEQ ID NO: 38857 - DNA, 120 bp, synthetic construct
  source 1..120: mol_type = other DNA
cagctaccgaggagggtcatccctgagcactcaccaggcgcccgttctacactgcccgtgtagacgattggctctttcgtctccatggtggcttcgtagagtgggtgctgttcccaaatg

SEQ ID NO: 38858 - DNA, 120 bp, synthetic construct
  source 1..120: mol_type = other DNA
ttgcacagagacctctggtcgctgaccccagtctgcctccacatccctggaatagcccatcatgggcccttcacccttggcaggtggaaaccattcaacctgctggggccggtgtgtccc

SEQ ID NO: 38859 - DNA, 120 bp, synthetic construct
  source 1..120: mol_type = other DNA
ggtcggcacccaggctggggccgctccaggccccgtgcagttcctcagctctgcctgggttgccttacagtgagacggagctgcctcctctgactgcgcgggaggcgaaggtaagagcct

SEQ ID NO: 38860 - DNA, 120 bp, synthetic construct
  source 1..120: mol_type = other DNA
gcccgttgggcagtggctcacaaagctcgatggacttgaaccacacatccccaaagtgtcacagatattgaacccactgatttgcaaactgacatccacatgaaaccagcatgccaggtt

SEQ ID NO: 38861 - DNA, 120 bp, synthetic construct
  source 1..120: mol_type = other DNA
aggaccagctggccccctgctggcaggctgaacaccctgcggagcgggtgagatcggctttcgctgcacccagcactgattccgaccagggcacccccttcagagctagggacgaacagc

SEQ ID NO: 38862 - DNA, 120 bp, synthetic construct
  source 1..120: mol_type = other DNA
gggggaataaaatgtcacagataccactaaagcccgtttccatctcgtcccaccctgcctctagaagtaacttctttcttcaggtaggtgcgtattattcctttttattcctacgtatag

SEQ ID NO: 38863 - DNA, 120 bp, synthetic construct
  source 1..120: mol_type = other DNA
tatccaaagtgccatataatacaatacatagtttttaaacttcatatcattctgatcagaagctttataaactgttaggtgaatgctgttagatgatatgagagcacaatttaacctgtg

SEQ ID NO: 38864 - DNA, 120 bp, synthetic construct
  source 1..120: mol_type = other DNA
atgtcaaggaaaattctggacatattttattgtcagggtctgttttgtgaatactttaattctcttgacttagcctatccctacttcagtttatatatataaattttgtatctaaagaac

SEQ ID NO: 38865 - DNA, 120 bp, synthetic construct
  source 1..120: mol_type = other DNA
aaaacttaagagcaagaatagaaggcatagagtacgcattattaaataaaaggcagtaggcatcagaaggatatatgtgtttcagtgtatctgatacttgagtatttgagtaaatttgtt

SEQ ID NO: 38866 - DNA, 120 bp, synthetic construct
  source 1..120: mol_type = other DNA
catgaggcccaagtgatccacatggccagccacagccccatcctactgcaggcctgtgtggctgctagagaggccaggctcctttccgcaccccgaggctgcccgatatgctttctgcat

SEQ ID NO: 38867 - DNA, 120 bp, synthetic construct
  source 1..120: mol_type = other DNA
caacatgcctcatttgacagcaaattcggcgggagatcagccgaaagagcaagtgggtggatatgctgggagactgggagaaatacaaaagcagcagaaaggtaacgtgtggagggagga

SEQ ID NO: 38868 - DNA, 120 bp, synthetic construct
  source 1..120: mol_type = other DNA
taggctaagtcaagagaattaaagtattcacaaaacagaccctgacaataaaatatgtccagaattttccttgacataaacaatggaaccatagtgttacccaataggtatgacttctcc

SEQ ID NO: 38869 - DNA, 120 bp, synthetic construct
  source 1..120: mol_type = other DNA
aggctctgtgctttcgccacacttcccacccatgggaagagcagagctccctgcctcccagaattagagacgtacacaggaggggcgaccctgactaggcccaaacagcccaagcatcac

SEQ ID NO: 38870 - DNA, 120 bp, synthetic construct
  source 1..120: mol_type = other DNA
gggcgctgatcagaaaatgaggtttgttttttctcagttttagaccagacgctatctccttttcattggtcatgtaatgacacacataagctgtttttttctgcaattggccagccagac

SEQ ID NO: 38871 - DNA, 120 bp, synthetic construct
  source 1..120: mol_type = other DNA
gatgtactttcctgggggtacaggatccaaacctcttcccccactccggttttccacgctttctctcttactgatgtatttgaatgaatagttgctcttaatgtatcttaatatggttca

SEQ ID NO: 38872 - DNA, 120 bp, synthetic construct
  source 1..120: mol_type = other DNA
atctcaacacaggtaaaatgagatagacatcagtggggcaccatttctaatatgctgaaagaaatttgtcaaaccagacacccgtacctgacagcaatattgcccccaaataaagatgcc

SEQ ID NO: 38873 - DNA, 120 bp, synthetic construct
  source 1..120: mol_type = other DNA
tgggctttcggtccctttcttttaatgcccatcctcattcctactctgaattgtcacacttttcccttccccaccagttctttaataaaagtatttgaaaggcaacaggtgtaaggagtg

SEQ ID NO: 38874 - DNA, 120 bp, synthetic construct
  source 1..120: mol_type = other DNA
taaataaataaataaataaataaatgatttctgatttcctggcccctcccgtaggcatccggagacactggtctggaaggcacccaggtgtgaaaacactcccaggtgtgttttctgcaa

SEQ ID NO: 38875 - DNA, 120 bp, synthetic construct
  source 1..120: mol_type = other DNA
cagcatctgtctgcctcctcaaagatcaaaccaggaagatttatacaatgaaaacatcatgaaaaataataggaaaaaactgagtagtcactgcatagaccaaggctgctgagactgtat

SEQ ID NO: 38876 - DNA, 120 bp, synthetic construct
  source 1..120: mol_type = other DNA
ccaagcctgcctgttctggtgagtatgggatccttattgactattgaccaaaataatgtccatttgtattcctttttctttctgtaaaacatcttcacagtttagcaagttgttctcaaa

SEQ ID NO: 38877 - DNA, 120 bp, synthetic construct
  source 1..120: mol_type = other DNA
aaccccaggaatgggttgtcagctcccaccgcccctctctggccaattggtgactcctgcagatatccggagacaggccaggagggtgaagaaagccagggagagactggccaaggcctt

SEQ ID NO: 38878 - DNA, 120 bp, synthetic construct
  source 1..120: mol_type = other DNA
ttccaccaatagcctggctttgcccaaccctctgctccagggacctaagtcttggcgtccacgcccctgtcgcagagacgcaccttgaagccgtcgtctgacgcgatgatgagcacctcg

SEQ ID NO: 38879 - DNA, 120 bp, synthetic construct
  source 1..120: mol_type = other DNA
aagtcataggactatatctaggaaccctgagattacccagggacctcaaatgcttagggaaacttagggaccccagccacaaaggcacgggggcaaatacgaatacatcagatttgaggt

SEQ ID NO: 38880 - DNA, 120 bp, synthetic construct
  source 1..120: mol_type = other DNA
cttggctggcaaataaagcgttagcccgcagcgcgactgtgtctgtgtcccattcactgagatgagcaaactgagacccagagaggccaagatactggctccgggccacacagcgaatcc

SEQ ID NO: 38881 - DNA, 120 bp, synthetic construct
  source 1..120: mol_type = other DNA
aaaagaaagaaggaaagaaattaaaccatgcagttgagtggagcagaggactgggcaggtggcggctcccctgcaagtgtcagggtccctataacccttggatgggaggggacggggcag

SEQ ID NO: 38882 - DNA, 120 bp, synthetic construct
  source 1..120: mol_type = other DNA
gtgaaccccgtggtctcctacgccgtggctctcagctgtcaatgtgcactctgccgccgcagcaccactgactgcgggggtcccaaggaccaccccttgacctgtgatgacccccgcttc

SEQ ID NO: 38883 - DNA, 120 bp, synthetic construct
  source 1..120: mol_type = other DNA
gctcacacatgtggacagaggatcagacgccattcccatccccctcccagggctgagccggcatcctgggaccccacagcttcctctccctggatgctcctgagctgggagccactcact

SEQ ID NO: 38884 - DNA, 120 bp, synthetic construct
  source 1..120: mol_type = other DNA
acctgcctctgcacttgaagactgtaactgggatccttgttcagggaccctggggagatgcagaggctcagcggcagccccagcccctgcctgggacccccagccaccgacccactcacc

SEQ ID NO: 38885 - DNA, 120 bp, synthetic construct
  source 1..120: mol_type = other DNA
ttaatgggggaggtactagtctgatcctctaactcctcctcctctctaatatgcaaaacataaattaaagtttcgtgcttaacggcacaaggccatgaaggggcaggggccacccacccg

SEQ ID NO: 38886 - DNA, 120 bp, synthetic construct
  source 1..120: mol_type = other DNA
cctggtagaatcgtttagggcagacttgagttcaggtacacacggcgctgacatcagtgctgattagaaaaccccaaaggagggatgctcctattaatactgaggaagtattttgtcctc

SEQ ID NO: 38887 - DNA, 120 bp, synthetic construct
  source 1..120: mol_type = other DNA
ttcccttgattaacataacaggtagagactcttgttgggtcttccctcactttgtcccagcatgtctctgtcagtgctgaagtgcctgaaactgggggttgggacagaagcaccccttta

SEQ ID NO: 38888 - DNA, 120 bp, synthetic construct
  source 1..120: mol_type = other DNA
ggtccagagtgtgtctagaaatattatctgggtgggcctggaatgggtcctcacaaccctgcccagtgccctatcctgtggctgaggtgacatccaaaatgcaagacaaagttctttttg

SEQ ID NO: 38889 - DNA, 120 bp, synthetic construct
  source 1..120: mol_type = other DNA
attattggcattcataacctgtgttatgcattcacacaggagagggaggtaagtgacaatgaatgtagggtgtatcagagggcatagcttgtcgtggggcagacttccatggagataata

SEQ ID NO: 38890 - DNA, 120 bp, synthetic construct
  source 1..120: mol_type = other DNA
aatgtgctcattctggtgctgatgaaagtttccactgtcatacaatttattcccccaggcctcacacctgtgcagtttctgcttgtgatgtgttccctgatgatctgccacatgcaaaat

SEQ ID NO: 38891 - DNA, 120 bp, synthetic construct
  source 1..120: mol_type = other DNA
gcagagaagtaacatcacctccccactctgatcagttttatctctgagcatttcacatactgctaccaaatccaaggctgaccttctaagtgtttacacagtttcactgaaatgggaata

SEQ ID NO: 38892 - DNA, 120 bp, synthetic construct
  source 1..120: mol_type = other DNA
gacgtggtgcttctgttaatgcagcctcaggttgcagtgttttatggtgcaatagctcctaggctgctaaagctcaggtaggggcggctaagatgggtctcaggcactttttcaaaccca

SEQ ID NO: 38893 - DNA, 120 bp, synthetic construct
  source 1..120: mol_type = other DNA
ggccttgaatggaactttctagaggtctggcctgagacagctacactcaagttattatctcttgggtagggggcagcttctaaatccaacacacaaggtgaaaattgtacacaattaaaa

SEQ ID NO: 38894 - DNA, 120 bp, synthetic construct
  source 1..120: mol_type = other DNA
aatttacaaacagcaactctgggaggtagctaatgtcctacccccatctgaggcagccgaggctcagagagaccggggcactggatcaggaaacagccacgttgcactcaaacccaggtt

SEQ ID NO: 38895 - DNA, 120 bp, synthetic construct
  source 1..120: mol_type = other DNA
ccatcgtctagtctttgtaagcactttaaacattattgaaatcattttattataaaatttcatgtcccacattcaaatttttaagaagtagacaattttcatgcctggtaatgagtcttt

SEQ ID NO: 38896 - DNA, 120 bp, synthetic construct
  source 1..120: mol_type = other DNA
tctttcccaagcccccagccttaggcagcaaccaatctacattctgtctctacagaggatcatatgctggatattccataatcatggaatcatatagtatatggatttttgtgactggct

SEQ ID NO: 38897 - DNA, 120 bp, synthetic construct
  source 1..120: mol_type = other DNA
gctaagttcagctttacaaaggtacaggggagagagctgccatttgtttattgtgtacttatatgcctggcccttgcataaaggaactcaatcaagcctcaaactggctttggaattttt

SEQ ID NO: 38898 - DNA, 120 bp, synthetic construct
  source 1..120: mol_type = other DNA
gcttgttggccatttgtatttcttctttgtatgtgtattcaaagtatttgttgtttagaaaacacaagctacctctttctatccactctctcatgggcgccacagcattgcaaaaggaac

SEQ ID NO: 38899 - DNA, 120 bp, synthetic construct
  source 1..120: mol_type = other DNA
cttagttctaacccaaatcaaagagaagaagtctagattgctttttatagtctccttaggaaaaagtctcaaatatcaaactaaccaccatcaaagggagcccaaatcaaacaaaaatat

SEQ ID NO: 38900 - DNA, 120 bp, synthetic construct
  source 1..120: mol_type = other DNA
ttagggggagggagattcatttgactgtgcaagatgggcgacagagcgagactccgtttgaattaaaaaaaaagagagagaaatttagaactgcataatgaaaaagtaggccacaaatgt

SEQ ID NO: 38901 - DNA, 120 bp, synthetic construct
  source 1..120: mol_type = other DNA
atttaggtagaacagttataaaatgaaatttttaccaggatcagttaaatttataatgggaaagttggggagataactatgataaatgtatatatttttggtgttttcatttataaggtt

SEQ ID NO: 38902 - DNA, 120 bp, synthetic construct
  source 1..120: mol_type = other DNA
tttgaattaaatgaaccatgattattcacagtgcagtaagtgtgtatcatctgtttgatattttcatattacagttttgatagtgctcttcagtctgcaaaatcttctttgggtggaaat

SEQ ID NO: 38903 - DNA, 120 bp, synthetic construct
  source 1..120: mol_type = other DNA
aacaaaaagaatgatgtcaacattttgtttcttactttgtgtgctcttttcaacatatagatgacaaactttgacatgatgtttagaaaacttgtgagtaaaaggataggcgatatgaat

SEQ ID NO: 38904 - DNA, 120 bp, synthetic construct
  source 1..120: mol_type = other DNA
tttgcttgcaactttctgttattgggcatccaagttttctcaacttttccactgttaataatcatactctgataaaaacttcaacaaaaagtgtcttcattgcaagttatttccatagag

SEQ ID NO: 38905 - DNA, 120 bp, synthetic construct
  source 1..120: mol_type = other DNA
agaagaggcaggtttcagctatctaaaaatggcaactgttaaaaagtagttgggattgctacattagggtggtatcattagaagtgtttaaaagttgagtgtagaggccgggtgcggtgg

SEQ ID NO: 38906 - DNA, 120 bp, synthetic construct
  source 1..120: mol_type = other DNA
ctattctgtgtgtttaggcatcagaaattgttgagtatgaagaagatgcacacataacttttgctatattggatgcagtacatggaaatatagaagatgctgtgactgcttttgaatcta

SEQ ID NO: 38907 - DNA, 120 bp, synthetic construct
  source 1..120: mol_type = other DNA
tggtgtattgtagcatctgtatttctgtcaccattgaaaatcagttagaaaacatcagtaacttattttgttcacttggaaaagctttccaagttaacattcctctacaattatcatggt

SEQ ID NO: 38908 - DNA, 120 bp, synthetic construct
  source 1..120: mol_type = other DNA
ttttttcttccaatagaaactaaatagcagtaagtcagcatcccgtcatcgttggcccacagagaattatggaccagactcggtgcctgatggatatcaggggtcacagacatttcatgg

SEQ ID NO: 38909 - DNA, 120 bp, synthetic construct
  source 1..120: mol_type = other DNA
caaaatattcagtttatgctcttaccactagtatctgatagtgccattttcgcacttttgctaatgctgacttactagtttataaaatcctttgccaatttgtaggaacaaaagttatat

SEQ ID NO: 38910 - DNA, 120 bp, synthetic construct
  source 1..120: mol_type = other DNA
gaggacagagtgttggggtgcatttagacccttgttcttctgcttattttgaccacaggcaagtttcttaacctctcaatgcatcagttgcctcatatgtgaaatgagggtaataataat

SEQ ID NO: 38911 - DNA, 120 bp, synthetic construct
  source 1..120: mol_type = other DNA
ggatgttgcagactcatttaagaaaatttttgatgaagcaaaaacagcccaggaaaaagattctttgataacacctcatgtttctcggtcaagcactcccagagagtcaccatgtggcaa

SEQ ID NO: 38912 - DNA, 120 bp, synthetic construct
  source 1..120: mol_type = other DNA
ttgttgcttttctacttcacccctcttccttccaaccccaaatagcttaggacaatggagtcatatagcccaacacttggttcatatgcagcaatccactttctaggcaaatgcagcttt

SEQ ID NO: 38913 - DNA, 120 bp, synthetic construct
  source 1..120: mol_type = other DNA
tcaaagtatattgtgagaagatggtatttcagaatagaggaagaatttcttatgtgctggtaagattgtagataatcatttctgcataattttcatagctggattgctttaataaagcca

SEQ ID NO: 38914 - DNA, 120 bp, synthetic construct
  source 1..120: mol_type = other DNA
tgtatgggtttgtttgatgttttcccatgattagggatagacactgcaagactcagagctactttacaaagaagcctctagggagctccccagagaagacaggggagacaacacaaggac

SEQ ID NO: 38915 - DNA, 120 bp, synthetic construct
  source 1..120: mol_type = other DNA
tttcagtaggtattttttttttttagtttttatcattgacctttgaggtgcactattaaattgctcagtccattaaaataacggattgctgatttaaaaactggttccttgcttagcttc

SEQ ID NO: 38916 - DNA, 120 bp, synthetic construct
  source 1..120: mol_type = other DNA
tttttctaatgaagactccagtaaaccttaacaagaagctgttagtatggcttcacatgctatgagcaaatatagttccaaactctggctccataaatttctctttcctcttaaatcgtt

SEQ ID NO: 38917 - DNA, 120 bp, synthetic construct
  source 1..120: mol_type = other DNA
actttctgccaacttgaactctcatttccaagaagagttgtgttttggttaattctatagctcgcagtgtgacttcaaaacacacaataaatccacaaagtgtgtcctacggtgagttca

SEQ ID NO: 38918 - DNA, 120 bp, synthetic construct
  source 1..120: mol_type = other DNA
tgtattcttatttagttcaattccttatttactgaccacttactgtgtacaatattgtattagattcttttaggattacagttgacccttgaacaacttgggggcttggcacactgaccg

SEQ ID NO: 38919 - DNA, 120 bp, synthetic construct
  source 1..120: mol_type = other DNA
gtgtaacagttcagacgtgtgttgttcaatgatcaactatatgtctaaagagtacaaatcagtctgtaaccttccccagcctctccatgctaaaggaactacaggaaactttcgcactca

SEQ ID NO: 38920 - DNA, 120 bp, synthetic construct
  source 1..120: mol_type = other DNA
gcactgcctgttgggaagcttgagggaggctatggacgtgcagcgcttggcagagggtctcgtcatggaaggttccagcaaatgtgagatacttttctgatttcattttctccaaaagaa

SEQ ID NO: 38921 - DNA, 120 bp, synthetic construct
  source 1..120: mol_type = other DNA
aaattctcacaccattaataaaatacatttgcatcagtagcaatatacatctgcattttgcctataatataaatgtatttttccactaaaagatttgatgtttccttgccagcaaataag

SEQ ID NO: 38922 - DNA, 120 bp, synthetic construct
  source 1..120: mol_type = other DNA
caacttttagagtcaggggtacatgtgcaggtttgttacatcactaaattgcgtgacactgagctttggggtacaaatgattcccatcacccaggtagtgagctaaatacctactaaata

SEQ ID NO: 38923 - DNA, 120 bp, synthetic construct
  source 1..120: mol_type = other DNA
ccctgaaaataagatttttaaaatattattttatatttaacaaggagatgggaagtctaagcattccttttggtcttggcttcttattctgcagggtgaccatggtccttgggccctaac

SEQ ID NO: 38924 - DNA, 120 bp, synthetic construct
  source 1..120: mol_type = other DNA
aaaatccatgcttctcaagtcccttatgtaaaatggtgcagtatttgcatataacctacataccttctcttgtgcaatccctaatataatgtaaatgctatgtaatcgttgttatactgt

SEQ ID NO: 38925 - DNA, 120 bp, synthetic construct
  source 1..120: mol_type = other DNA
catcttcatgagggaactgaggtcttggggggtgggggttacccaaataggttcacagaagaaccagaaataaaacctgcctttctagactgtaagtcttgtgattgtcatctaaatggt

SEQ ID NO: 38926 - DNA, 120 bp, synthetic construct
  source 1..120: mol_type = other DNA
cttcacctgtaaaataatttgttgtaaagccccttcccacagggatattattaataattgcgtaacgtgttcacctctcggaaaggagcaaaactttgctcagatcccagaattaacctg

SEQ ID NO: 38927 - DNA, 120 bp, synthetic construct
  source 1..120: mol_type = other DNA
gggaatgactctggcctgatttcttcagtttacattttaaaataggagcttagttagcccccaaataatatgtaattgatgtattagcgttggggagtgaatatttttcaaagcagaaga

SEQ ID NO: 38928 - DNA, 120 bp, synthetic construct
  source 1..120: mol_type = other DNA
catccactaataggtagcaacctgaatgaaaaatactgttataaactttacacaaaaccagagattataaacatttgcttccaaggagagaggtaaaaggtacttgtttgctctgatggg

SEQ ID NO: 38929 - DNA, 120 bp, synthetic construct
  source 1..120: mol_type = other DNA
ccgttagagatgggtgacaactcaagagagattatagcgtcttccttgtgcttgtaaatgtcaaaaataaaagtaatttaaaactaaaacaaaaatgaaaccataattcttaagatgcag

SEQ ID NO: 38930 - DNA, 120 bp, synthetic construct
  source 1..120: mol_type = other DNA
gggctgagctgcaacatcgtatttataacaggaagaaggctctctctctcactacctggcttcaagaaaatgaactgcagcaagacgttcttcaagtgttccacgttagctgcagactcc

SEQ ID NO: 38931 - DNA, 120 bp, synthetic construct
  source 1..120: mol_type = other DNA
agtgaacggcacttaaaaagttcagacacagtgaaaattcaggaatataagacaatgtaaaacactatcagagaaatgaggcaaagaacgatataaaaaaggtagtatcatgttcaagtc

SEQ ID NO: 38932 - DNA, 120 bp, synthetic construct
  source 1..120: mol_type = other DNA
tcctgatttagttttctaccaaaaaccctaagtgaacacagaatctatttaaaacgaaagaaaacaaaaaaatcttgtgtttacttaatagtcattgaaaagaattactacaaatttcta

SEQ ID NO: 38933 - DNA, 120 bp, synthetic construct
  source 1..120: mol_type = other DNA
aaaagaacagccctacagggacactcttccatactgtatacatgccgttgccactacatgtgaatactggcagacgttagtggctaaagataaacattagataaaacataggtcttcact

SEQ ID NO: 38934 - DNA, 120 bp, synthetic construct
  source 1..120: mol_type = other DNA
aacaaaacgactagaaggcacccatgttaatgacaaaactaccaatagtcatttgcttgaactgttttatgatagttttaccagaaaacaaccaaaagaccttttatgcctgtacatgga

SEQ ID NO: 38935 - DNA, 120 bp, synthetic construct
  source 1..120: mol_type = other DNA
accctacaaaactaggacagtgtcctagaatttgtaatggcataaaccagaaacaacataaataaaggaacagaatttacagtacttccatgtgatgggacaccatgaactcattaatat

SEQ ID NO: 38936 - DNA, 120 bp, synthetic construct
  source 1..120: mol_type = other DNA
ataggaaccatcacacaaatgtgctcatctaaactagattttattctaaatctttcctgggctaaaaagagaaaaaaaaaagggcactactactaccatttcagaagtctgtcgtacgta

SEQ ID NO: 38937 - DNA, 120 bp, synthetic construct
  source 1..120: mol_type = other DNA
gacgttcaaatgctccaccaggaaagggaaaaaagcagtagctgcagataatttattatgtatataataatacgtccaatgcacttaaactcttaatttttatactatctacactgttag

SEQ ID NO: 38938 - DNA, 120 bp, synthetic construct
  source 1..120: mol_type = other DNA
ctgcatccaatatagcaaaagttatgtgtgcatcttcttcatactcaacaatttctgatgcctaaacacacagaatagtttttagtcaaattgtttatactcagaatataaaacccaaat

SEQ ID NO: 38939 - DNA, 120 bp, synthetic construct
  source 1..120: mol_type = other DNA
aatatgaccaagctgctgttttctgaacaaaaaaactttcaataaaaagtgcatgattttaaaaaattaaggtaatgttctttaaaaatgcttatactttaaaactcaccattttctgaa

SEQ ID NO: 38940 - DNA, 120 bp, synthetic construct
  source 1..120: mol_type = other DNA
taataaaaatagtagtgatgaagaatgtttaagtccatcttaaaaaatgacactgactagaactcaataaaccaaaatcaactgacaaaagccaaataaagaacacctaacctaataaga

SEQ ID NO: 38941 - DNA, 120 bp, synthetic construct
  source 1..120: mol_type = other DNA
ttataggaagcattatgtttcttcagttcactgcttgattcaatggccatctaactaccttaaagtttgtatcttagcaaaatcacaggtaatatgcaacagacctttaggattcatccc

SEQ ID NO: 38942 - DNA, 120 bp, synthetic construct
  source 1..120: mol_type = other DNA
aaacccggcctcttttacaaaattattcaacagttgaatctgtgaccagttaattagttgtgaatccactcaatcaaatcatctcaattcactatttcctcttttttttttgagatggag

SEQ ID NO: 38943 - DNA, 120 bp, synthetic construct
  source 1..120: mol_type = other DNA
ggataaatataagattagtgattataggtgcacatttcaaaataaaccaggataaagttgggagactattttgtagtttcttcctgatcatataatttcattatttaattaacagttgta

SEQ ID NO: 38944 - DNA, 120 bp, synthetic construct
  source 1..120: mol_type = other DNA
ctaacatttttatacaaatccaagtgatgtttttgttcaatggaatttattttcaaaatggagacactggttttcaaaatcaaaatttaggaaaaaaggtaaatcacatagttgagttat

SEQ ID NO: 38945 - DNA, 120 bp, synthetic construct
  source 1..120: mol_type = other DNA
catccttcttattcttccacctcactgagggcctacgtacccttactttcagaaatatacttctccaccacatgacaagttcccttcaagacaataacatcatcaagttttaagcacctg

SEQ ID NO: 38946 - DNA, 120 bp, synthetic construct
  source 1..120: mol_type = other DNA
tttgctctataaagaatatcaggaccagtcaatacactagcaagaacttcctaccatttttagtaattacatcttatatactagagaaaccaccttttatcttttccttgaaaactttac

SEQ ID NO: 38947 - DNA, 120 bp, synthetic construct
  source 1..120: mol_type = other DNA
ttcaaaggtgttaaaataaaagtgtcttggaattttctggaaatgaatcaaataaaaattatatttgtgtcatttgaatgcaaaagaacacaaaagaacaccatttctgaccatgttaga

SEQ ID NO: 38948 - DNA, 120 bp, synthetic construct
  source 1..120: mol_type = other DNA
atttccatcttcctttggatgcctttaaaagcctgcctcccagctgggagcagtaacacacacctgtagtcccaacagtatgggaggccgaggcaggcagactgctgtgctcagaagttc

SEQ ID NO: 38949 - DNA, 120 bp, synthetic construct
  source 1..120: mol_type = other DNA
tttggaccacgggtgacgcaggtaagtaaaaccacgtaaggcaatactgtggataagaagggactactgtaccagcaacgaacaatcagaaaaggaaattaagaaagcaattccatttac

SEQ ID NO: 38950 - DNA, 120 bp, synthetic construct
  source 1..120: mol_type = other DNA
gatagagatgtaattgtaattgtccaaaacttaacatttgtggcctactttttcattatgcagttctaaatttctctctctttttttttaattcaaacggagtctcgctctgtcgcccat

SEQ ID NO: 38951 - DNA, 120 bp, synthetic construct
  source 1..120: mol_type = other DNA
tcaaaggtgcctgcctgtagtcctaagtactcaggcaacagaggtaggaggatcatttatgcccaaaaatttgatggcagcctggacaacacagcaagaccctattctaaaaaacaaata

SEQ ID NO: 38952 - DNA, 120 bp, synthetic construct
  source 1..120: mol_type = other DNA
aaatctaagatatgatttagattctaaaaatttaccctattatttaaaaaacaaaacttctcccagcgaaaaacctggtgatctttttcagtgaaatattcacaacatttaagaaaaaaa

SEQ ID NO: 38953 - DNA, 120 bp, synthetic construct
  source 1..120: mol_type = other DNA
tctctggaataatggtagtatacaattctcctgactctatgggaatcttcactgtggaaaattatctaccatgctgtgagcaagcccagggagctacctggaaaggccgtttgaatatat

SEQ ID NO: 38954 - DNA, 120 bp, synthetic construct
  source 1..120: mol_type = other DNA
ctccactgcagccaagtccatagccataaaattaaccttcattgtctcgtctctgtcagggcagagcaggaggctttggacaggagatgaggtggggagctattcttagtcccaaataaa

SEQ ID NO: 38955 - DNA, 120 bp, synthetic construct
  source 1..120: mol_type = other DNA
ggttaactttctgatgtctgtgtttaagaaacagattccaacagaaaatgcttcattcaaacccacttctgataccgtaatgtacctccacaacgctaggatgggtttgtggctcttagg

SEQ ID NO: 38956 - DNA, 120 bp, synthetic construct
  source 1..120: mol_type = other DNA
cagctgtctacaatgtggtctttttcagggctagtccccaaagtgtaatgtggctcaaatcaagcatgaaattttttcttccagagttttaatgaaatgtgctggaggaggaagcttgtg

SEQ ID NO: 38957 - DNA, 120 bp, synthetic construct
  source 1..120: mol_type = other DNA
ttagaaagaaaggatattattcgatcacgatctgattcaaactttgcttggatctttgtctctccagggtagaagattaaattcctgtggttttctttccttaggaaaatggactcagac

SEQ ID NO: 38958 - DNA, 120 bp, synthetic construct
  source 1..120: mol_type = other DNA
tctaattgtatttccgatttgatttaaacatttaaacctaaagggcttttttgcaggtgtttgggaattgatgaattacataaattttgaaggaaggtcttgcttaactcatcatcctgt

SEQ ID NO: 38959 - DNA, 120 bp, synthetic construct
  source 1..120: mol_type = other DNA
tggccctgttggtgggatccacatgcaatgccttcaattatggttttctatgggcagctttcccagtgtaatgatctttcatctagaagaagagaatagcctgtgaataggtatttatat

SEQ ID NO: 38960 - DNA, 120 bp, synthetic construct
  source 1..120: mol_type = other DNA
tctggaaatatgtgggtgtgtgattccaacttaatgatctcattcaggaacaacttttgtacatcatgggcagacggggttttgtacaatgcacttgtaagtgtgagagttccctcctat

SEQ ID NO: 38961 - DNA, 120 bp, synthetic construct
  source 1..120: mol_type = other DNA
tatatccagagactgggggtcctgtaaaacatgagatccaacgagccccttatagaaacaccattcaagttccagattcctggaaaagggcaattgacaattgaccaggtaaatattctt

SEQ ID NO: 38962 - DNA, 120 bp, synthetic construct
  source 1..120: mol_type = other DNA
tctcacaagatttgactagctagcttttttgaattgttgcacctatatttattttagagtctgtactgcaatttgcatttcttgtaacacacttttcaggatcgaatatcaaaattatat

SEQ ID NO: 38963 - DNA, 120 bp, synthetic construct
  source 1..120: mol_type = other DNA
aaagctactgaagaaaagtaattatgaaatagggaatacacttcagttcatctaggaaatctgaaattcactgtcaaagtaccccacttaattgaatcaatttcaaaataccattttagg

SEQ ID NO: 38964 - DNA, 120 bp, synthetic construct
  source 1..120: mol_type = other DNA
cagcttttaaaaacaggaatatgaagggccatgaggagacgttagtgggtgatggatatatgttgactatctcgatgatggtaatagtttcacatgtgtatacatctgttaaaacttatc

SEQ ID NO: 38965 - DNA, 120 bp, synthetic construct
  source 1..120: mol_type = other DNA
catgttcagtatctggtttgttgtcgttttcacagtctactttatttgtatttaaataaagctctgaaggtgactggcaagcatattctggggacccagagtatgaatgagaaagaaagg

SEQ ID NO: 38966 - DNA, 120 bp, synthetic construct
  source 1..120: mol_type = other DNA
ctgctccagaaactactggcagaaggaaagagtactagaattcagataaaccacagtgactcgttacttctctttgttactattgggaatcagagacatagattttgttgatattagtta

SEQ ID NO: 38967 - DNA, 120 bp, synthetic construct
  source 1..120: mol_type = other DNA
aatgtcttgaatgttctgaatttatcttttgttctaatgttgagaatctataagttgaggtgagttatcctgagaaaatatgttatagaagaaaatgaaaattggaaaagatggaaagga

SEQ ID NO: 38968 - DNA, 120 bp, synthetic construct
  source 1..120: mol_type = other DNA
atgtagataagtaaatggcagacttgaggtttgaatctacatatgagtgacttcaaagtccatcctttttgtgttagatcatgtagtaatggtggcaattatcattattttaacttgctg

SEQ ID NO: 38969 - DNA, 120 bp, synthetic construct
  source 1..120: mol_type = other DNA
tggtgtaaattaagaaagcagctggctaggtaatttggaggtttctgatgaggaaacttgagggaactcactttatgtagactcagtatattcccactcaaagagaagattaaattattg

SEQ ID NO: 38970 - DNA, 120 bp, synthetic construct
  source 1..120: mol_type = other DNA
tctagtttattgctcagtactgtctgctggagaggaaaacaggtaggataggctgctgagcctatgataataactcataatatgaggtgaaagcatagagacaaaatgagagatgataga

SEQ ID NO: 38971 - DNA, 120 bp, synthetic construct
  source 1..120: mol_type = other DNA
atgttgaattcaacaactgactcctaaaatggtaattttcaatgaatattggagtgatttccaagtgtaaaagcttattaatatccaatacttgtagcagttttatttagtagaattatg

SEQ ID NO: 38972 - DNA, 120 bp, synthetic construct
  source 1..120: mol_type = other DNA
aattgtatatttattggaagtgtcctcacaattttgtacttcctaaataataggaaaaacagttggacatgataaatgcttgtagtataatggtgtaattgaatctgaagtattgcatta

SEQ ID NO: 38973 - DNA, 120 bp, synthetic construct
  source 1..120: mol_type = other DNA
agacaaactagggtaaaaaaaacctttaaaattcatcacaaataagttaaagcagagttttggtgaaatttgtgaaaattacaaaactgcttgtattgaggaagagcaactacataataa

SEQ ID NO: 38974 - DNA, 120 bp, synthetic construct
  source 1..120: mol_type = other DNA
gggtaatctaaatacctaattgtatgtataaatagattgtttttgcaattaaaataactcaagctcaggaagacattctcttaatctttgttccttaattaacccaagtctctctgtcag

SEQ ID NO: 38975 - DNA, 120 bp, synthetic construct
  source 1..120: mol_type = other DNA
gtttgctttgttttacttaggtttctgaaactgatgaaaaagaagacctgctgcatgaaaaccgcttgatgcaagatgaaattgccaggctcaggctggaaaaagacacaataaaaaacc

SEQ ID NO: 38976 - DNA, 120 bp, synthetic construct
  source 1..120: mol_type = other DNA
ttgtttcccgttaaatgtgtgacatgcaaaagtatttattaaatgaaaatattttttatcttttatgtctgatgaaaatttatatcgtgttttaaatgatgtttcttggcctctttaact

SEQ ID NO: 38977 - DNA, 120 bp, synthetic construct
  source 1..120: mol_type = other DNA
tccactagaaagatggcaatatttgactaaaactgcaaagtttgtcccagttgacaaaactctaatcaagcccctgcccttctcattctgtttttccttttaaactttttcttatatttt

SEQ ID NO: 38978 - DNA, 120 bp, synthetic construct
  source 1..120: mol_type = other DNA
ttactgtatttccaactatgttgctgtcggtaagtagagtctgcatacatgtttctggttcatatatgcctagggttccagagcattacatttccatcaaaatgtagatcccgagaatgc

SEQ ID NO: 38979 - DNA, 120 bp, synthetic construct
  source 1..120: mol_type = other DNA
tgctatcatacttgggatttttaaaaaatttcttcaggtagtttgttatttgtatacagaaacacttctgatctttgttagattattttgtatcctgaaaccttatcgaattcatgcatc

SEQ ID NO: 38980 - DNA, 120 bp, synthetic construct
  source 1..120: mol_type = other DNA
aaacaagataaatctccagcacctgagtgaagtgcagatatgtaatttatctgacagagatttccaaataatggtcataacaataatcactgaggtcaagatagctttgcaagaacaagt

SEQ ID NO: 38981 - DNA, 120 bp, synthetic construct
  source 1..120: mol_type = other DNA
gtatatttatgttgctgatccattttgagttaattttggtgggggtgtaaggtctgcaatttattttttttttgcatgtggatatccaggtattccagcagcccttcctgaaaaaactgt

SEQ ID NO: 38982 - DNA, 120 bp, synthetic construct
  source 1..120: mol_type = other DNA
agagatctgaattctccctggcacgtagttctcaaggtcctgcccaatgagggtccttttacctggggtccccagccaccccctccggtgttctcaggctgacagagatttgagttctcc

SEQ ID NO: 38983 - DNA, 120 bp, synthetic construct
  source 1..120: mol_type = other DNA
gaattcaaatctctgtcagccccaaaacactggcaggggtggctggatgccgaggtccttcactgggccagaccctgagacatccataccagggagaattcaaatctctgtcagcccaag

SEQ ID NO: 38984 - DNA, 120 bp, synthetic construct
  source 1..120: mol_type = other DNA
agacttcagtggaggaagtaactgtgagtgtgatggaactagggagagaactaagagtaaaactggagcctgagcctgtgactgaatttctgcagtttcatgatcaaacttgaatgtact

SEQ ID NO: 38985 - DNA, 120 bp, synthetic construct
  source 1..120: mol_type = other DNA
aattgctaaggtatataagtatgaactaaaagggtaagttttgacataaaattgtacaattgtaagggagagagaatgaaaatgtagacttttggatgcaattaaagagaagttgctatc

SEQ ID NO: 38986 - DNA, 120 bp, synthetic construct
  source 1..120: mol_type = other DNA
aaatttttgcatcccaatggcataaagctagaaatccgtaacagaagaaatcttgaaaaatacataaaatagcaaaatttaacatattcataaatggcccatgagttacagaaaaaattt

SEQ ID NO: 38987 - DNA, 120 bp, synthetic construct
  source 1..120: mol_type = other DNA
aggaaatacttccaaactcattttattagggtaccatcattccgataccaaagacagacaaggacactacaagagacgaaaatactaggccaatgtcagtaacgaaccctgattcaaaaa

SEQ ID NO: 38988 - DNA, 120 bp, synthetic construct
  source 1..120: mol_type = other DNA
aaggtcctgtatatgaaaaactataaaacaccaatgaacaaaaatttaaaaacacaagtaaatgaaaaaaaaattcatgcttgtggatgggatgaattaatattgtgaaaatgaacaaaa

SEQ ID NO: 38989 - DNA, 120 bp, synthetic construct
  source 1..120: mol_type = other DNA
actatggcttaatgttgaccaaaaaagacttctaatattgccccctagccttgactttagaacctgaacaaaaaaaagttcatctgaagaacagtcagttacccacccagtgcagggagg

SEQ ID NO: 38990 - DNA, 120 bp, synthetic construct
  source 1..120: mol_type = other DNA
ctagtggaagactttgacatgtaagttctagattatactttcatttataaataactgtgtagcttaatgagatggcccctgttagtatcttaggccatctattgaaggtttactaaattc

SEQ ID NO: 38991 - DNA, 120 bp, synthetic construct
  source 1..120: mol_type = other DNA
attggcattctttttctttcgaatgattcagttcattgaccaacattttattgtcttcttctagtaaaagacggtgctttctgcactcagcttgaaggttttgtactctagcatcacatc

SEQ ID NO: 38992 - DNA, 120 bp, synthetic construct
  source 1..120: mol_type = other DNA
ctggatatctaactgggaaaaaagaagttaagtcaaaacctcaaacctcatacagcataaattccccaaagttcaaaagtttatttgaagacagtgaatccatgaaagcaaaaaagaagc

SEQ ID NO: 38993 - DNA, 120 bp, synthetic construct
  source 1..120: mol_type = other DNA
ccaaacattaatttacctgatttgaattatttcctcctgtcttcaattccacctctgctgatttgagagccggtttaattggttttgtcacatcagcttctatcctatattgctcttctg

SEQ ID NO: 38994 - DNA, 120 bp, synthetic construct
  source 1..120: mol_type = other DNA
aacatcctgcataagtttctattactagtaactctagcaaatattatgaaaaaggacgttgaaaattattcagtaaagttacaagataaaaattatcttttcttcacagtaattactcct

SEQ ID NO: 38995 - DNA, 120 bp, synthetic construct
  source 1..120: mol_type = other DNA
agaaagcaaagcactctggctagtttgcagcatgtgctgtgctgaagctctgctgcaatctgttactagctctgatggagtaacagatactgatttttcatcttatctgaatgaataaaa

SEQ ID NO: 38996 - DNA, 120 bp, synthetic construct
  source 1..120: mol_type = other DNA
cacatctaaataaccctgggtcaaacaggtaatgaaaatagaaatagaaaatagaaaatattctgaactgaataaaaattcatcaaccagaatttgtggaatgcagctacagctgtactt

SEQ ID NO: 38997 - DNA, 120 bp, synthetic construct
  source 1..120: mol_type = other DNA
aacaagaaaattccctcatgagcacgaatgtaaaaattcaaccaatttgtgatgcaacgaagacatcctcccatagtggagtgaataaactgtggttacacagccatacagtggaatatc

SEQ ID NO: 38998 - DNA, 120 bp, synthetic construct
  source 1..120: mol_type = other DNA
attggaggattcatttcaagaattactataaatcaatagtaacaaaaacagtgtgccacaggtacaggctgaatatcccttattcaaaatgcttcagactagaagtttttcagattttgg

SEQ ID NO: 38999 - DNA, 120 bp, synthetic construct
  source 1..120: mol_type = other DNA
tgcattggtcctacctttacacttcatttcatgttgatcaatgagtaatatgacattcttacaattacagcaaagcgagtcaccgtcctctgagactgtttgagatgactgaattatgtc

SEQ ID NO: 39000 - DNA, 120 bp, synthetic construct
  source 1..120: mol_type = other DNA
aatgtcaaagcaggtggtacatgcacccgcatgactttcatgcaagatatccgaatgattaaaccattatactgcaaacattcaacatgctctttaacttgcccaataactgagaaggta

SEQ ID NO: 39001 - DNA, 120 bp, synthetic construct
  source 1..120: mol_type = other DNA
cattaattatgtgttcttctctctgctgaactgtgtgccgcttcatcaccactattcactgccaacctggtttcctcagagtcttaccaaaattgatccctgggcaatttcacaactcac

SEQ ID NO: 39002 - DNA, 120 bp, synthetic construct
  source 1..120: mol_type = other DNA
aaaatcaaaataaacactccgtaggatttcctactagttatatggtggtattccaatgagataaattcattttatcctatgtacttcaaccaaatccatctcatgctcaaagagtcagct

SEQ ID NO: 39003 - DNA, 120 bp, synthetic construct
  source 1..120: mol_type = other DNA
accatgaaagaatatgccttttgtaatcaattttttatcatgcaaaaaagtattttgttatgacatttgtaagtggagactatatttcaaaacaagtttatacagacttcaaaaggtctc

SEQ ID NO: 39004 - DNA, 120 bp, synthetic construct
  source 1..120: mol_type = other DNA
ctgtcaactggcataatgcatttgagaattatccatgttgctgtactggcagtgcattcttttttattgctgagcagtattcaattgcatggctgtaccagtttgtttattcatttgcca

SEQ ID NO: 39005 - DNA, 120 bp, synthetic construct
  source 1..120: mol_type = other DNA
aggaaaaagaatctatgaacacaggaacagaaatcaggagatcttggctctcgccctttcagtgccacaaagctgttttgtgaacctgtaaataatccatttggagtctccatgtttctc

SEQ ID NO: 39006 - DNA, 120 bp, synthetic construct
  source 1..120: mol_type = other DNA
atctcaattttcaagctaaataaaatttcccccactcatccatctacagtgcctagtccagatgctacacatacacatccaagaaataagaaactagtggaatcacctagaaaactttat

SEQ ID NO: 39007 - DNA, 120 bp, synthetic construct
  source 1..120: mol_type = other DNA
tatgacaaagctgctgttttcagaacaaaaaaactttcaataaaaagttcatgattttaaaaaattaaggtaatgttcttttaaaatgcttatactttaaaactcaccattttctgaagg

SEQ ID NO: 39008 - DNA, 120 bp, synthetic construct
  source 1..120: mol_type = other DNA
cctcaagaactgtatgtgaagaaaagcatctgtgattactgcggtagctcatactctcttcagagactaccaggactattgccacacatccctgtccatctgagtcaccatcagaagcct

SEQ ID NO: 39009 - DNA, 120 bp, synthetic construct
  source 1..120: mol_type = other DNA
tgttcactccttccacagctatttaaagagcacccctcatttatgaatataggaactgaggcctgagagtgggtaaatagcagagaagcgatgctaacaggcactctttctgctatacca

SEQ ID NO: 39010 - DNA, 120 bp, synthetic construct
  source 1..120: mol_type = other DNA
taacccagtgagatggcatggttggtattattttcctcatttatccacgtagaaacagaggcctgagagtgcgtaagtagcagagaagtgatgctaaccagtgctctttctgctatacca

SEQ ID NO: 39011 - DNA, 120 bp, synthetic construct
  source 1..120: mol_type = other DNA
ttctccctggacctccccaaccccctctctactaacccccgtttgaacaggaagacacagcctgagccaggtctcccctcacaaatctccccaccagggctggatcgcgcaacaaataga

SEQ ID NO: 39012 - DNA, 120 bp, synthetic construct
  source 1..120: mol_type = other DNA
atgtctccctttgctccacagccaaaatgaagggctcaccaggtcagattgtgtttgttggaagctgtgcagccttggtgtgtatggaacctgttctgatccttctccttgagatttaat

SEQ ID NO: 39013 - DNA, 120 bp, synthetic construct
  source 1..120: mol_type = other DNA
acatctgagaattcagaaagcagatcaaacattctattgctctgtgaccttcaagccctgtagcagcctggggaacagtcataaggacttcagtacttggatgtaagacaaattttgttc

SEQ ID NO: 39014 - DNA, 120 bp, synthetic construct
  source 1..120: mol_type = other DNA
gatttgcctccccagggcatctcatagaagtggaatcacacaccatggggtctttcatgcttggcttctttcacttagcaccatgttttgaggttcatccaggttgggagaacaaatagg

SEQ ID NO: 39015 - DNA, 120 bp, synthetic construct
  source 1..120: mol_type = other DNA
attgggtcctgggtctttcatggggtgatgctgggctggctccctcttggtcttcccaggctggggctgaccttcctcgcagagaggccaggtgcaggttgggaatgaggcttgctgaga

SEQ ID NO: 39016 - DNA, 120 bp, synthetic construct
  source 1..120: mol_type = other DNA
ggtggagttagaaaggcatagatgcagtgttaccggaaggagggccttgagtgtaagttgtccaggtccttggcattttgaacaaagaactgaacaaaacatacaaagtaataaaggaat

SEQ ID NO: 39017 - DNA, 120 bp, synthetic construct
  source 1..120: mol_type = other DNA
gcattctttaaagattttctttaataacttgaaggcactgttacacctttcctgtatcagatttttttttttggaattgaaatccatgagatttataactgtcatgcaaagtaattccat

SEQ ID NO: 39018 - DNA, 120 bp, synthetic construct
  source 1..120: mol_type = other DNA
gaaatgaaatagtcaatttgatacagtggaaaataactaagcatacacaatactggtgaggctggtgaaacagggatgttgagtgcactcttgtcgaaagcctgcattgccatgatttgt

SEQ ID NO: 39019 - DNA, 120 bp, synthetic construct
  source 1..120: mol_type = other DNA
actgttaggagtttcttgggtgttcagaaatattttttgcatatgcaaatgtgcaatacattctttctctgcttttaaaaaatattgtgcctcaatgtgggtgtgctttacctattgcca

SEQ ID NO: 39020 - DNA, 120 bp, synthetic construct
  source 1..120: mol_type = other DNA
gttttggggtttcttattaggttaggtgttctttatttggcttttgtcagttgattttggtttattgagttctagtcagtgtcattttttaagatggacttaaacattcttcatcactac

SEQ ID NO: 39021 - DNA, 120 bp, synthetic construct
  source 1..120: mol_type = other DNA
tcttaggtttggtgtgtctttttaaacttgggaatctaggtatatgctcttaaaaagtacttcttggggaattagaaaagatttctaagataagacattgattttgttatcttagcagtg

SEQ ID NO: 39022 - DNA, 120 bp, synthetic construct
  source 1..120: mol_type = other DNA
cagatcgagacaccatctcaaaaaagaaaaaaagaaaaaatcagttatttaaatttaaaagagtaagtttccccagcactgtttctggcatgatataattaaatgattaaaattatttga

SEQ ID NO: 39023 - DNA, 120 bp, synthetic construct
  source 1..120: mol_type = other DNA
ttgtttcctggtaaaacagaccaaacagagggagcagacagtttgtacatctgtatgagtgttgatgtgctttttattttaagccagggaacacattttatgttatttatgacatccttt

SEQ ID NO: 39024 - DNA, 120 bp, synthetic construct
  source 1..120: mol_type = other DNA
ttctccttgcatcacaaatgttaattcaccctgcccccacacgcattaaaactcagcatatttcacaaattgagtgtttcatttctatttgagatagacttatggtaagtcagctttgct

SEQ ID NO: 39025 - DNA, 120 bp, synthetic construct
  source 1..120: mol_type = other DNA
caaaaatggttcatgtgtattaccatcattcttttgtcaaaaagtgtgtatatgtttgcatttacatatatttgtacatctatatgacagatgtattttaaaagtttcaacttgaagtaa

SEQ ID NO: 39026 - DNA, 120 bp, synthetic construct
  source 1..120: mol_type = other DNA
ttgaatgttttccagcattttgaccttattttttaaaactttgtacctcccagagctgggaagagattccagatttccagacttagtccagagtcatgactaatgctggacttcgtctat

SEQ ID NO: 39027 - DNA, 120 bp, synthetic construct
  source 1..120: mol_type = other DNA
aaaaagtatatgagacaagtcttactcaatttagaacatgtattttgccaaagttaatgacgcacccatgacacagcctcaggaggtcctgacaacatgcgccccggggtggtcggggta

SEQ ID NO: 39028 - DNA, 120 bp, synthetic construct
  source 1..120: mol_type = other DNA
tgacaaagactgtgtcactactttgtggaatgttattttagaacttccagaatgcctcagtaaatcctgactgccatgtaactgtgtactgtgctgctgagctcttaacatgaagcagca

SEQ ID NO: 39029 - DNA, 120 bp, synthetic construct
  source 1..120: mol_type = other DNA
tcttgtttcccatatatatagctatcaaggtcatcttttagtaatgagttaagttctttcttttccaactcaaaatttgtctgcatctttacccaaatatccagatctgatactctaggc

SEQ ID NO: 39030 - DNA, 120 bp, synthetic construct
  source 1..120: mol_type = other DNA
accagggtgcagatagaaagagctccagaagatgccctctatttctggctcaagtaacgggaaaagggtctcctaacattccgagggaatccagaagttcgttcctccccatttttcttt

SEQ ID NO: 39031 - DNA, 120 bp, synthetic construct
  source 1..120: mol_type = other DNA
tttgcttgtatgttgtgttactacttgcttacttaaactcagcaatttaaaccctcaaatgtggtcaaactggtcagataatcccatcaatttcagcttaaaacactgattgattgattg

SEQ ID NO: 39032 - DNA, 120 bp, synthetic construct
  source 1..120: mol_type = other DNA
gggtttgttgagaacagcagcttttttggaggattttagggggagggagattcatttgattgtgcaagatgggcgacagggtgagactccgtttgaattaaaaaaaaaagagagagaaat

SEQ ID NO: 39033 - DNA, 120 bp, synthetic construct
  source 1..120: mol_type = other DNA
ataaagggagaaaacttaagacataaccatttctaatatttggagtttaaattacttttcaatagcaaaccttaagctcaggtgtttgtgtttcctttaacatttttcttttaaaaagtg

SEQ ID NO: 39034 - DNA, 120 bp, synthetic construct
  source 1..120: mol_type = other DNA
ttttcctctctaaataggaacagcttctagattgtgaaggtgaagatggatggaataaactttttgacttgattcagtcagaactttatgtaagacctgatgacgtccatgtgaacatcc

SEQ ID NO: 39035 - DNA, 120 bp, synthetic construct
  source 1..120: mol_type = other DNA
ccttatggttactcagttttgtcatagtcaagcttaaaatgaatgttctaactgctatttcatattttatttttttataatagtataatctttagtgaaaattaaagttcatctgtcatc

SEQ ID NO: 39036 - DNA, 120 bp, synthetic construct
  source 1..120: mol_type = other DNA
aagagctgagagcatagtgaggaagatagaagatatatacttaccttatattaggctcttggaatttgtggattttttcccccatttttggcttgggatgaatcctaaaggtctgttgca

SEQ ID NO: 39037 - DNA, 120 bp, synthetic construct
  source 1..120: mol_type = other DNA
caaacccttaagccaatttttaaattttatttcaggtgctattcgagcacataatggtagtcttcagcatcttacttggcttggcttacagtggaattcattgcctgctttacctggaat

SEQ ID NO: 39038 - DNA, 120 bp, synthetic construct
  source 1..120: mol_type = other DNA
agaggcaggtttcagctatctaaaaaggacaactgttaaaaagtagtttggattgctacgttagagtggtatcattagaagcatttaaaagttgagtgtagaggccgggtgcggtggctc

SEQ ID NO: 39039 - DNA, 120 bp, synthetic construct
  source 1..120: mol_type = other DNA
attttgttatcttagcagtgtaatcaaaacaaatattataacctcaggactaattcttaatgaactttgctgaaattgaaagttgttgctgacaacttaagagcatttcttctcatcgtc

SEQ ID NO: 39040 - DNA, 120 bp, synthetic construct
  source 1..120: mol_type = other DNA
tttttcagtattctcccgaaacaccacctcgatggacagaagatcggaattctttactgaatatgatttgccaacaagtagaggccattaaggtaagtcacttaatttctctagctgtac

SEQ ID NO: 39041 - DNA, 120 bp, synthetic construct
  source 1..120: mol_type = other DNA
tgttgggtatggtgctgtcatttagttttcttcagcagagatcaagtagccacatagctacactagacggcattggatctatctgccatcttgtcaaggcagcagagttgtgttaagaaa

SEQ ID NO: 39042 - DNA, 120 bp, synthetic construct
  source 1..120: mol_type = other DNA
tgcgaagagaacaagtactaaaagtgtgtgctaatcattggataacgactacaatgaacctgaagcccctctctggatcagatagagcatggatgtggtcagccagtgatttctctgacg

SEQ ID NO: 39043 - DNA, 120 bp, synthetic construct
  source 1..120: mol_type = other DNA
ctggtattcaccagatttgtttcgtgttctccgttgttagtcatcaaatttgtctactttttaaatagaaacattagctagagcaaggaacttagaaacactcaagcggcactgaatgtg

SEQ ID NO: 39044 - DNA, 120 bp, synthetic construct
  source 1..120: mol_type = other DNA
acggcctgcttcgggaaatagaggcaaccaatgcagtccttatggagcaaattaaggtgagatcagaaaacctggccaccgtgaaaaccgccagtttggttttctggaccctccacacac

SEQ ID NO: 39045 - DNA, 120 bp, synthetic construct
  source 1..120: mol_type = other DNA
gaaaggaatcaagagcgagagaagtctgcagctaacctggaatacttgaagaacgtcttgctgcagttcattttcttgaagccaggtagtgaaagagagagacttcttcctgttataaat

SEQ ID NO: 39046 - DNA, 120 bp, synthetic construct
  source 1..120: mol_type = other DNA
aaaattccaattgctggtccccaatttctgacccaagattctgcatttttagcaatttgttgctgatgcttctggtctggggcccataccttgagaacccccggtctagaggcctgataa

SEQ ID NO: 39047 - DNA, 120 bp, synthetic construct
  source 1..120: mol_type = other DNA
tgatcatctccagactggcaggaagagaatgcatactcacactgtaagtgcctgatttgatttgcagaggatatagaaccttatcagaaaacagccttccaaggcaagagcaaatgcacc

SEQ ID NO: 39048 - DNA, 120 bp, synthetic construct
  source 1..120: mol_type = other DNA
gaaaatgtttgttccattcaagatacggttacacaaaaagtcatctagttgtgaccttcaaattattacttatatacctacagaaaattcctataaataggctgggcgcgatggctcaca

SEQ ID NO: 39049 - DNA, 120 bp, synthetic construct
  source 1..120: mol_type = other DNA
cacaatttctgcctcactgacgaataacttggggcatgttcttgactgctctgagcccccatttctttatctgtaaaaaggaaataaattacatagttgtgagttattggatgacataat

SEQ ID NO: 39050 - DNA, 120 bp, synthetic construct
  source 1..120: mol_type = other DNA
acccataaaatatgcagccctaacatgatttcatttttgtttcctttcctggaaaaggagaaatcattcagatcagctttcatattgccttatagacgatgacttcaaaatagtttgaaa

SEQ ID NO: 39051 - DNA, 120 bp, synthetic construct
  source 1..120: mol_type = other DNA
gtaacttgatagaggctgttgttacaggaagctgcccatgtgatgaaatgacagagacccgcacacatgcattgctgcaatgtcagattcctggttttgctcctgtactgtagtcacgta

SEQ ID NO: 39052 - DNA, 120 bp, synthetic construct
  source 1..120: mol_type = other DNA
gactcctccttcatgttcagtttcatgatgaaagactgaagtgccacatgcatgccaggtatttgatagctgtgaggtcagaggtggcatctctatggcccatatgggcagtggcgtgat

SEQ ID NO: 39053 - DNA, 120 bp, synthetic construct
  source 1..120: mol_type = other DNA
aggattggttccaggacaccccctccaccccactcccacctcaccctcagagcttaccaaaatctttgaatgctcaagtccctgatataaaatggtatacttacttgcatataacctatg

SEQ ID NO: 39054 - DNA, 120 bp, synthetic construct
  source 1..120: mol_type = other DNA
gtaagttggtggtaccctctctttcagtttgaaggaagaaagtactgtgaacatgactttcagatgctctttgccccttgctgtcatcagtgtggtaagttttactgctaaatgtcaagt

SEQ ID NO: 39055 - DNA, 120 bp, synthetic construct
  source 1..120: mol_type = other DNA
aggcatgagccactgcacctggccagaaccacaatactcttattatgcctaagaaaattagcaataatcttataatatcaactatcagtccatattaaaaatattcccagtagccccaga

SEQ ID NO: 39056 - DNA, 120 bp, synthetic construct
  source 1..120: mol_type = other DNA
atagtctggtcctcagcgctctgcctgagcaagaacccacctcctctcccgtctataggtttattcatttatctatttcttatccatatggactcacagatttctatattttgcatcact

SEQ ID NO: 39057 - DNA, 120 bp, synthetic construct
  source 1..120: mol_type = other DNA
ctggcaaagttttgaacgatactgttttcagcatgattcatggctgcctgcagacatcacctaattcaggaaatacttttgaaactgttcatgtgcagtttgtgaaaacaatccaggaaa

SEQ ID NO: 39058 - DNA, 120 bp, synthetic construct
  source 1..120: mol_type = other DNA
cagctctgcatccaccttaaatgtagagaatcctgggggctctgtctgagtcttgcattccatttccttccctgtagaggtgagacaggtcattacatctccctgtgggaagtgttggat

SEQ ID NO: 39059 - DNA, 120 bp, synthetic construct
  source 1..120: mol_type = other DNA
agttaaaagtaaagccttcactctgatgaaccagtcacgctgcctggtaaaattttagatctcagaagccatttacccttgcaataaaaattagtgacattctggccaggcgtgatggct

SEQ ID NO: 39060 - DNA, 120 bp, synthetic construct
  source 1..120: mol_type = other DNA
agcctctccaggcaagagccctttatctcaccatactattgcaaccacaaaaaagggaatagtacaagaaaagataggccataatagatgactgatgccagaggaatgggatagtaatgt

SEQ ID NO: 39061 - DNA, 120 bp, synthetic construct
  source 1..120: mol_type = other DNA
gtctctaactctcccctagttacgccaaaagattgtccatgagttgaaaactgttagagatgggtgacaactcaagagagattatagcgtcttccttgtgcttgtaaatgtcaaaaataa

SEQ ID NO: 39062 - DNA, 120 bp, synthetic construct
  source 1..120: mol_type = other DNA
gagcaaaattgaaaagttacacatacagacaacttctcaaccaccaggctgtttagtttaagttagaagtcagaagttctgagactctccttttacccaccttgagcaaccgcagcaagt

SEQ ID NO: 39063 - DNA, 120 bp, synthetic construct
  source 1..120: mol_type = other DNA
tgatgagattaaataacgtatgtaaagcccagggcctgggtcataagaactcctcaacaagcagtatgactatattctgaggggtgatttatcagtgagccagggtggaaaaacctcatt

SEQ ID NO: 39064 - DNA, 120 bp, synthetic construct
  source 1..120: mol_type = other DNA
ttcacggtggccaggttttctgatctcaccttaatttgctccataaggactgcattggttgcctctatttcccgaagcaggccgtttaagtgatctgcactttttgtggtggaacggagc

SEQ ID NO: 39065 - DNA, 120 bp, synthetic construct
  source 1..120: mol_type = other DNA
ggccagtagttgcaactgaaaaaaaaaaaagaaaagaaaacactgttaaagtctatactacagttaagactatctaggcaagagctataaatacaaaagcaatagaagttaaagaaagat

SEQ ID NO: 39066 - DNA, 120 bp, synthetic construct
  source 1..120: mol_type = other DNA
tttggtaggagacggtgtagaatgttttatttctgaatctgcatttcgcaaagaaccatttttatagagaggacctccttcactatagtcttcgagttcctgcatgactgaattaagcat

SEQ ID NO: 39067 - DNA, 120 bp, synthetic construct
  source 1..120: mol_type = other DNA
atatgaccaagctgctgttttcagaacaaaaaaactttcaataaaaagttcatgattttaaaaaattaaggtaatgttcattaaaaatgcttatactttaaaactcaccgttttctgaag

SEQ ID NO: 39068 - DNA, 120 bp, synthetic construct
  source 1..120: mol_type = other DNA
cgctaccaagaaaagatgtatccttaggtgactgactagaaaacagagcatcatataacgcagactgcccaattttgttggcaaaagtttcaacaacctcttttaagaaatcttgcttgc

SEQ ID NO: 39069 - DNA, 120 bp, synthetic construct
  source 1..120: mol_type = other DNA
gacctcacgctttagactaacatttaaaatccagctgcttattactggggagaaaaacttatcagtaatatttatctttggaagcatcttcaatgctttttcagcttcaaaaatctgtac

SEQ ID NO: 39070 - DNA, 120 bp, synthetic construct
  source 1..120: mol_type = other DNA
gataaagggaagtcccaagagcacagctgtgtagcaaagaggaagaaaaaccaatccgggttggagaagttggttagtaagggtattccaggtagacagacaatcaatcaatcaatcagt

SEQ ID NO: 39071 - DNA, 120 bp, synthetic construct
  source 1..120: mol_type = other DNA
aagtgcctgcaagccactgaagcagcggcgtagccggcggaggcccactgtgacgagcgtgcggcgccgcccacggaggcccactgtgacgaacctgcgttctgcctcagcactgtgtat

SEQ ID NO: 39072 - DNA, 120 bp, synthetic construct
  source 1..120: mol_type = other DNA
atttagttttcaatgtcttccaatagctgctccatgcattctgtactgtctcctggctggactccatgcaggaagcctgtctcctccacagtgtgcactcactcaggtcattgctaagtt

SEQ ID NO: 39073 - DNA, 120 bp, synthetic construct
  source 1..120: mol_type = other DNA
agtgactctgaggcctttacttggcttccacactaaaatgccttagccccaggaatcagcttctcttttcttcctcttcatatttagatggtgagagaggtagcgtttaagacatacatt

SEQ ID NO: 39074 - DNA, 120 bp, synthetic construct
  source 1..120: mol_type = other DNA
ttccacctgcttctctggcttctttttaaggctccctcctccttccccctttgtccatctttagctacacacctgtgtaatttctattttgatgtcctacaacttaaaacttaacatgtc

SEQ ID NO: 39075 - DNA, 120 bp, synthetic construct
  source 1..120: mol_type = other DNA
taaaggtaaacatatggtctttatcctcatgtattttaagttatctgtgaaaataagtgtgcttaacttctcaactgaaatattaaactgtagtcaaaaaaatagctctagacacaatac

SEQ ID NO: 39076 - DNA, 120 bp, synthetic construct
  source 1..120: mol_type = other DNA
gtgcagaatttacattttatgtgtgcagagacaaaaattgttataagattacaagttaatgtgcaagatgatttccgattcatgagtttcaggttttgatagcatatccttatccactag

SEQ ID NO: 39077 - DNA, 120 bp, synthetic construct
  source 1..120: mol_type = other DNA
gtgtgctttgaaatgttaccttctgctctctgttcccaagtacagagaaataatgttgcaaatctcacttctgctgaacattatgcttcctgatgcatttagcagacactaaacatttgt

SEQ ID NO: 39078 - DNA, 120 bp, synthetic construct
  source 1..120: mol_type = other DNA
attaaatttttttaacacaagtaagtgtcaccattttatgacatgaaataaaaggttatgactgttattgatgttgatgttgacgacctgatcacctggctgaaggagtgtttgtcaggt

SEQ ID NO: 39079 - DNA, 120 bp, synthetic construct
  source 1..120: mol_type = other DNA
ggaaactcaagccaaaacactacttgtttccaacgttttgtttgcagaggatttacaaattacactccaaaacaagatagccacagagcatactacttctcctctgaagtcgctctgagg

SEQ ID NO: 39080 - DNA, 120 bp, synthetic construct
  source 1..120: mol_type = other DNA
tgtgtggagaggaccgggttcctctcctgattcctgctcagttaataacgaatgtcgacaagtcgagaaaattgctcaaatttaccccatcaaagaattaaaaactggtgaaagcttgac

SEQ ID NO: 39081 - DNA, 120 bp, synthetic construct
  source 1..120: mol_type = other DNA
tggtattttctacccctgacccgtgtgcatacttctgtcgtagctctcaccacagtagactctgctatcattgtgtcttccatcctctgaaccctgtgcaaggtctgctcatggtgaatg

SEQ ID NO: 39082 - DNA, 120 bp, synthetic construct
  source 1..120: mol_type = other DNA
gccgattgacccacatggcattgcacaatcagtgctgtatattttggaccttactcatatttggattgttttatattaagagggcagtagaatggcaaacagcaaatggtttggatctaa

SEQ ID NO: 39083 - DNA, 120 bp, synthetic construct
  source 1..120: mol_type = other DNA
tgcaacattcatttgatttaaaatctcaataactccaaagagaagaggagggagaggatccatttcatcaaaccaaacacccctgctccccactccttccttacctccccttttattgat

SEQ ID NO: 39084 - DNA, 120 bp, synthetic construct
  source 1..120: mol_type = other DNA
tggacaaaggcactgggcaagtctggcctgaggggtgaggggcctagcagccctgggcccttgtaaccaagtctgggtgttgtgggaggggggcttagggtcacccggggatgtttcaaa

SEQ ID NO: 39085 - DNA, 120 bp, synthetic construct
  source 1..120: mol_type = other DNA
ggaatagcattcaaggtcttgctttaacacaaaaccccaaaacttggcggtacaaaacaaccattttctgatggatcgggaatccatgtctgaagtctcagctaagaagactccaaggct

SEQ ID NO: 39086 - DNA, 120 bp, synthetic construct
  source 1..120: mol_type = other DNA
tgttctgctcattgtcacctgctcctctgcacaccttccttcatgctcttccctcagcctctccccagctcacacccctttatttgaaactctgctcatttttcaggccctgcttcaatg

SEQ ID NO: 39087 - DNA, 120 bp, synthetic construct
  source 1..120: mol_type = other DNA
aagtaaagagctgaagtaatggaaacagtaagctagaagaatatctggggaaaaagcattccagacacagggaactgctaagtgcagaggtgtgcctggagtctttaagcactagggata

SEQ ID NO: 39088 - DNA, 120 bp, synthetic construct
  source 1..120: mol_type = other DNA
tcttgaccacctaaactgtacattattcctccacgtctgtcccctctgctccaagactgcaggggagagtcttgcacatcatctttgtaaaaacagtctttgttttactcagaaatattt

SEQ ID NO: 39089 - DNA, 120 bp, synthetic construct
  source 1..120: mol_type = other DNA
tccataatgaacagctatttgctcttgaacaagctgcttctcttaggctcaatgtcttctacaaagtgaggactatgctgccttattttactaggttgttataatgatttaacacgataa

SEQ ID NO: 39090 - DNA, 120 bp, synthetic construct
  source 1..120: mol_type = other DNA
caagaactcttaagatgtcatcactgatgctttaaatacactttaattgtgaaataatcagtatactctagatctaacctcacttgtaaaaaatggttgcatactacattaatttctggg

SEQ ID NO: 39091 - DNA, 120 bp, synthetic construct
  source 1..120: mol_type = other DNA
ttaacgggcaaggctgaatatcctagtaaaactataaaatttgttcatcatgaatattagcccaaattagggttagtttgacagcacatagttatcttctattcaatgttgccataggct

SEQ ID NO: 39092 - DNA, 120 bp, synthetic construct
  source 1..120: mol_type = other DNA
ttatagcaccattcaggattgttccataataatcaaagaatatctctaggctttgtatctcttgaaaactcaatgtacagaattctttctgagttaaatattaactttttcactgatgat

SEQ ID NO: 39093 - DNA, 120 bp, synthetic construct
  source 1..120: mol_type = other DNA
caaaaattgctattaaaactcatactgcccatttgaaaaaattttccaacatttatttatttaaaatctatttgtatttaattttcccagattgttaactaaaccatcagttcataggac

SEQ ID NO: 39094 - DNA, 120 bp, synthetic construct
  source 1..120: mol_type = other DNA
tcttttttgctttccacttctggctcatgagcaatcagaaatatcttaagccttgccagtgagaggcgcatcacctcgtatctattactgttttttaggaacttgccaaaggagcaggat

SEQ ID NO: 39095 - DNA, 120 bp, synthetic construct
  source 1..120: mol_type = other DNA
ttcacacctaaagtagtaatactaggaataaaagagggctcgacactgcaggttcttagatacaaaagttaataaagccttgtttttggttgtgaatctttgccttaaaatacacacagc

SEQ ID NO: 39096 - DNA, 120 bp, synthetic construct
  source 1..120: mol_type = other DNA
tctgctttctcctttctgaaacagtcattgcagcagccagaggtgacctgcccaggtgcgtctaaccacccacccagcatacctccccaggcagcgcccaggccaatgtggggaagaggg

SEQ ID NO: 39097 - DNA, 120 bp, synthetic construct
  source 1..120: mol_type = other DNA
actcactctcaagtttacgttaaatactatcccatacaaaaaaacactctttctcttacttcttttcattatgtcctgctaaaaaattctgattggctgcaggcggcaagagggaaaaac

SEQ ID NO: 39098 - DNA, 120 bp, synthetic construct
  source 1..120: mol_type = other DNA
cccttttcttcttcttagaaaggtggttttaaataaagaactgaaggaatggaaagagtaagctaggaggatatctggggaaaaagcatcccagacacagggaactgccaagcacagagg

SEQ ID NO: 39099 - DNA, 120 bp, synthetic construct
  source 1..120: mol_type = other DNA
actgcagaggacagtcttgcacatcatcttactcacattttactcagaaatttcttattgagtcctgctaaatacatgctaggcattagggtttaaaaacaattaaaataaagcatgtca

SEQ ID NO: 39100 - DNA, 120 bp, synthetic construct
  source 1..120: mol_type = other DNA
tgcctttagctaacataagatcatgtaaccaaaaacgtcacataacaaataacatcagtcaatataatgagaagacgaatcctactaaaactgttctttatgttgcccagtccaagtaat

SEQ ID NO: 39101 - DNA, 120 bp, synthetic construct
  source 1..120: mol_type = other DNA
tccatgctgtttatgtaccacattttagttcttaaaacaactaaaacagtcttttccccaagacataaattttcaaaagggcagttaaaggttatctattactattttctacctccagaa

SEQ ID NO: 39102 - DNA, 120 bp, synthetic construct
  source 1..120: mol_type = other DNA
aaagcatacacatttttaaaatgtagttcttaccactaaagtgtctgtttgaaaagctgcagcaacttaaactttaaacaactacataagtaccactgttcttcatcctcacaaactttg

SEQ ID NO: 39103 - DNA, 120 bp, synthetic construct
  source 1..120: mol_type = other DNA
tggctgcaaatggcctcaaaatcccggagcacaagatgcccactgagcccagcgcctgcctgaggtgcctttgacacctggtcctctttgctctgcacccagaacacgaggccatcagcg

SEQ ID NO: 39104 - DNA, 120 bp, synthetic construct
  source 1..120: mol_type = other DNA
tgtttacctttgtatccctggtagcacagacgtatttaatatttaattgttgagagaatgaatgaatatgctccccctatttacctatcactctgctgccctgcaacgggccctcagctt

SEQ ID NO: 39105 - DNA, 120 bp, synthetic construct
  source 1..120: mol_type = other DNA
acactggactgaaccctagcttttggcgatttgctaagttagagaaatcacgtgtttagcattgaacccaagcagcacctgtcttagtctgttatatgctgtttatagcagaaaacgtga

SEQ ID NO: 39106 - DNA, 120 bp, synthetic construct
  source 1..120: mol_type = other DNA
agcgtgcagcaatgtcaacagaggtgcacctgctggagagatttcaggaaatccctaagcagctattgttcataaacagttgtgtgacaatagttatttgcagctcaaacacaaagtcaa

SEQ ID NO: 39107 - DNA, 120 bp, synthetic construct
  source 1..120: mol_type = other DNA
taaaccctgcttgttagggatgtgaaacaaactatcaggggtgcggcctgcaagccgggcttgctctctcccttcctttcacatgttaacctctggctgtggcttcacctgacagtgatt

SEQ ID NO: 39108 - DNA, 120 bp, synthetic construct
  source 1..120: mol_type = other DNA
tgtaggtttttgttaattttgctatggcttagaaagattttgagacagaaagtgtacacctcctttaatgaacagtggctcatgcactacgatttattctgaggctcttaagaccccttc

SEQ ID NO: 39109 - DNA, 120 bp, synthetic construct
  source 1..120: mol_type = other DNA
atccaaacggaacccaaggaaggagtgatttggggtattttctagcaccttctaaatctgcttttctaactaccagaatagggactgagccccttttatcagcactaaagaagacacttt

SEQ ID NO: 39110 - DNA, 120 bp, synthetic construct
  source 1..120: mol_type = other DNA
gaataaggtcatgcttgatccaaatgactgcagacccagcaaaggactcagttctgataagacctcagcaatttcctgggtgaatttcaagccacttcattaataagtcaaagcttcaca

SEQ ID NO: 39111 - DNA, 120 bp, synthetic construct
  source 1..120: mol_type = other DNA
aaaatgactaaaaggtgattcagagttaaaggactctggctaatctggcccaataggattcttgctgacgacaggccatggtggtcagacttcaccttggggacgatggaggatgaggag

SEQ ID NO: 39112 - DNA, 120 bp, synthetic construct
  source 1..120: mol_type = other DNA
tccgtcctgaggagccatgaactgaaacggagactgttttgtttggagctgactgtgaaggaagggcgagaggtggtgtctatgagcatcaagtggaaaaacggaggagacgctcctagc

SEQ ID NO: 39113 - DNA, 120 bp, synthetic construct
  source 1..120: mol_type = other DNA
ctggttgtggaaacctcagagaggtcagggcacaggcccctttatgaacagcaacacacacaaaaaaaactttagctgatttccaatcaaattataatttccctcgtagaacactaatag

SEQ ID NO: 39114 - DNA, 120 bp, synthetic construct
  source 1..120: mol_type = other DNA
gacatcaatgaatagaacagaataggaaatttagaaatacccaaatatatgtaagaatttagcacttgataatggtgatgttttgtattatttaaaaaagatggattgttcataattcat

SEQ ID NO: 39115 - DNA, 120 bp, synthetic construct
  source 1..120: mol_type = other DNA
aatatttaaaacacacctgaaagtgcaggtataattgtatcatctcaattcaaatgttgtctttagtggtattagtaaaaattaaaatatctaacaattattgagctgttatttgtgtta

SEQ ID NO: 39116 - DNA, 120 bp, synthetic construct
  source 1..120: mol_type = other DNA
accatcagttattcactgccattcagaaggtctttagaaatttgctgtgagtatggccctctcaggattttgtgtctctttgttcagtcattcaagtacttaggtcagtaagtcgttaag

SEQ ID NO: 39117 - DNA, 120 bp, synthetic construct
  source 1..120: mol_type = other DNA
gtcttttagtgcatgtaaatgtttgattctgcacagacaggcaagatgttacattggtaaagtatatcaaattagctttaaaaataactttattacagttcctatctctgtcattttaga

SEQ ID NO: 39118 - DNA, 120 bp, synthetic construct
  source 1..120: mol_type = other DNA
aaggttctttttattcaataaagtgataactatccttaatatcccactcaaggttgaagaagaaatgaagaagcatgaaagtaataatgtgggattactagaaaacctgagtaatggtgt

SEQ ID NO: 39119 - DNA, 120 bp, synthetic construct
  source 1..120: mol_type = other DNA
tgtctgcatttctcccactttattcctgttaatagaacccagtattttgctgtgatcaattactttgtatatttgatgagtatcagttgtcctagaattggctgattttatcaagcaaga

SEQ ID NO: 39120 - DNA, 120 bp, synthetic construct
  source 1..120: mol_type = other DNA
agcttcatgagaagtttgtagaacgtacgcataagtggatgggataatactgttaagttctgatattctgatattgtttgaaatactctaagaattttacatttggtaagtttccagatc

SEQ ID NO: 39121 - DNA, 120 bp, synthetic construct
  source 1..120: mol_type = other DNA
tgcaagggtcagcagattataataaaaatataaaaatgtttcacagtaacaaaaatgctagtatgctacctggatgtggacacctaatacatggtacaatccaaactgtatgaggacacc

SEQ ID NO: 39122 - DNA, 120 bp, synthetic construct
  source 1..120: mol_type = other DNA
agaacacctgaaagccagcaatttcctgacactgagaatgaagagtatcacaggtaagcctatggcaacattgaacaggaggtaactttgtgctgtcaaactaatcctaatttgagctaa

SEQ ID NO: 39123 - DNA, 120 bp, synthetic construct
  source 1..120: mol_type = other DNA
taccctgtcttgttctaaaaggaatttctaagttgtttataaaatacataggaatcaagaatataagtagaaagtgtttccaaacaataaacataaagagtatgggttacaggacacaga

SEQ ID NO: 39124 - DNA, 120 bp, synthetic construct
  source 1..120: mol_type = other DNA
atgaaactggttaggacaaggaattttcaaatagacatcaaaagcacaagcaacaaaagcaaagatgtaattacattaaacttgtcaaaagcacaagcaacaaaagcaaagatgtaatta

SEQ ID NO: 39125 - DNA, 120 bp, synthetic construct
  source 1..120: mol_type = other DNA
tcgccttgctgtgtttggtggtgacgtgggacactgcagctcggccagagtggtagaaatgtcctggtgtaggtgagttatccggggatgtactgcccgcctgtgggggcaggggttggg

SEQ ID NO: 39126 - DNA, 120 bp, synthetic construct
  source 1..120: mol_type = other DNA
ataaaatttgagatatacagggttagagtccaacaaattcaaaggaaaattgttgaattatatagccgtagagcaggaatgaaacccaggttctaagttccaagggggccatgagctacc

SEQ ID NO: 39127 - DNA, 120 bp, synthetic construct
  source 1..120: mol_type = other DNA
ttggtagcttggattgacgtttcctgcttggattgacgttttctctctcgtgttcctttgctgggcttgaccttttctctgctgggtttggcattcccttgggtgggctgggtgttttct

SEQ ID NO: 39128 - DNA, 120 bp, synthetic construct
  source 1..120: mol_type = other DNA
accctggatgtggaaacctcagagaggtcagggtacagggccctttatgaacagcaacacaaaaacaaaactttagctgatttccaatcataatttccctcatagaacactaatagactg

SEQ ID NO: 39129 - DNA, 120 bp, synthetic construct
  source 1..120: mol_type = other DNA
caacacaaatcagttaggtagaaaaacaattacttgggctgggcaacataaagaacagttttagtaggattcatcttctcttattatattgactgatgttatttgttatgtgacattttt

SEQ ID NO: 39130 - DNA, 120 bp, synthetic construct
  source 1..120: mol_type = other DNA
ttaaaaaggttctttttattcaataaagtgataactatccttaatatcccactcaaggttgaagaagaaatgaagaagcatgaaagtaataatgtgggattactagaaaacctgactaat

SEQ ID NO: 39131 - DNA, 120 bp, synthetic construct
  source 1..120: mol_type = other DNA
gacaaagggtaaaaagaaacacattaaggaacatccactttctgaggaagaaccgtgtactacccagacgcatcatgcttaagatgcaattggcagcatacaaggaatgctctctaaggt

SEQ ID NO: 39132 - DNA, 120 bp, synthetic construct
  source 1..120: mol_type = other DNA
gtgtgccagacatatgtgatgaggagtgaaagctttagaaagaaaggaggcaggatttaatgtaagcatgcagagtgagaagaatttttcagggaaagaagcagaggaatgacatttggc

SEQ ID NO: 39133 - DNA, 120 bp, synthetic construct
  source 1..120: mol_type = other DNA
tgtgctggagggggctcattggagaaatttgagcaggggagccacaagattaaatttgagtattaaggcattctggttatggtgtaaaatgggttagcaagctttttctttaaaggacca

SEQ ID NO: 39134 - DNA, 120 bp, synthetic construct
  source 1..120: mol_type = other DNA
ttcataatctgacttctgccccactctccatctttagcccttttccctgtgtgccctgtctctggcattactgaactgctggcagtgccctactcactcatccttctattgtaggcaaat

SEQ ID NO: 39135 - DNA, 120 bp, synthetic construct
  source 1..120: mol_type = other DNA
gcccacaggtgcttatttgctgacccttgtgctaaaaggaaggtgctgctaatgcagtgacttttatttgtaaaagtgccctgcatgtgtgacattatcctccctttgagaaaaggatat

SEQ ID NO: 39136 - DNA, 120 bp, synthetic construct
  source 1..120: mol_type = other DNA
ctctgagtatgtggcagagttcctcctaataactgaaaggcagtaaaccatctggcatgttacctctcctgctgaaacttctgtttcttatctctattgctgtgtttcagccacactgaa

SEQ ID NO: 39137 - DNA, 120 bp, synthetic construct
  source 1..120: mol_type = other DNA
gcctggtaattatatgtattttaaaaattctttcggctttttataataagctacattctttatattaatattttttcacttagggagaaaagcccaatattgtggttattcactattctt

SEQ ID NO: 39138 - DNA, 120 bp, synthetic construct
  source 1..120: mol_type = other DNA
cagcattttaaaataattctgtgaagaatgacattggtactttggtaggtattgtatagaatgtgtagactgctttgggcactatggtcattttcactatatcagttctttcagtccatg

SEQ ID NO: 39139 - DNA, 120 bp, synthetic construct
  source 1..120: mol_type = other DNA
tgtaagttgctcatgcagggggatataggttgttcactccttatgagaatcgaatgcctttctgatctgtcaccatcttccgtcacccccaaatgggaccatctagttgcaggaaaacaa

SEQ ID NO: 39140 - DNA, 120 bp, synthetic construct
  source 1..120: mol_type = other DNA
aataagttttgctactgaaaacagattttctcgtttttggacattagttttttaaaaaatgttaatagagaagtcaattgattatttttactgataagaaagtaggaaatgtatagctgg

SEQ ID NO: 39141 - DNA, 120 bp, synthetic construct
  source 1..120: mol_type = other DNA
gcaaagacctgtacaccaacacagtgctgtctggcggcaccaccatgtaccctggcatggcccacagaatgcagaaggagatcgctgccctggcgcctagcatgatgaagatcaggatca

SEQ ID NO: 39142 - DNA, 120 bp, synthetic construct
  source 1..120: mol_type = other DNA
ttgcctctccatacggcagccctttatttggaaacttcctaaatcactttgctgtgtgtgtttacacgggtgggttttgctttacttgccctgagagcacacgggagtgcagcacacacc

SEQ ID NO: 39143 - DNA, 120 bp, synthetic construct
  source 1..120: mol_type = other DNA
ttgataaaaagtcaatgccaattattgcctgataggtgttgtcaaaactgtcatacctgaatctggtgatcaaagatgtctttgcaacgctttgctcccccaggaacaccagcttgaatt

SEQ ID NO: 39144 - DNA, 120 bp, synthetic construct
  source 1..120: mol_type = other DNA
gagagaggacacacactgagcacctgggcttggaccatggtgacctgggacctactctgtatttccttacccaacccgactaccttatcctttgatcaggacataatcaaaaactgctac

SEQ ID NO: 39145 - DNA, 120 bp, synthetic construct
  source 1..120: mol_type = other DNA
tcccgcagcacagaaacacagccatcaactccagcacacgcctgggctcagggggaacacaggacggtaagcccgccctgccacgctgagctgtcccctcctcccagagggagacccgcg

SEQ ID NO: 39146 - DNA, 120 bp, synthetic construct
  source 1..120: mol_type = other DNA
gctctggacacactccatccagggatcccttcctgccatctgggcagcaaccatggggacaaagggaggaagcagagtcctgtttccttgccacttgtccaaggcacttccccatcctga

SEQ ID NO: 39147 - DNA, 120 bp, synthetic construct
  source 1..120: mol_type = other DNA
caggtaaggcttgggtgttcctggggtgcaagggcaggccaggtaagtcttgcctgcaccctaagggccccatgactacatttactaggctcacgccctgcagtcagccaactgctctgc

SEQ ID NO: 39148 - DNA, 120 bp, synthetic construct
  source 1..120: mol_type = other DNA
cctgcgaaagcccaccacacttaggcagtgcgaagtgctcatccgcgagctgtggaataccaacctcctgcagacccaagaggtgaggccctgggtggtgggggtggccctgggcagtct

SEQ ID NO: 39149 - DNA, 120 bp, synthetic construct
  source 1..120: mol_type = other DNA
ttggcagagccatgcacatcctccctggaagcgggagggcttttctggtcccctggctgggctggagctgcgttccaaacacatgatcactctgtctcttgcccacactgcacactcctg

SEQ ID NO: 39150 - DNA, 120 bp, synthetic construct
  source 1..120: mol_type = other DNA
agcagccatgggccagccctccctccgataggcagcctgtgccctggacttaggggcttctctggggggtgccccacctgcccaaagcagcacagcctgaacccaaaactgtgagcagag

SEQ ID NO: 39151 - DNA, 120 bp, synthetic construct
  source 1..120: mol_type = other DNA
aaggagactggtacctggggggtggcgggggtggtaggcaacagccctgccttataacttctttcacctgtgaaatgtttattgcatgttcatcatttgtcaaatatttatcaaatattt

SEQ ID NO: 39152 - DNA, 120 bp, synthetic construct
  source 1..120: mol_type = other DNA
cctgcccctgcccttacctgtcagagggcccagccagtacacctgcacgtactccagtaaggtgtgtcccgagcaggcaaaggtcacagaggcggccagggcagggttgaagaaggcaga

SEQ ID NO: 39153 - DNA, 120 bp, synthetic construct
  source 1..120: mol_type = other DNA
tcgtggaggcaggacccttgacgggagctctccggtgccacccaggacagaggcccgggcaatctgccacagagccgtgtccctgcagagctcccgctcacccgtgcctcagtttcccca

SEQ ID NO: 39154 - DNA, 120 bp, synthetic construct
  source 1..120: mol_type = other DNA
ctgaggacctctcacctgtgtggcctccatgcacactcaggcccgtttgcacccaggatagggggctgctggcccgggtggccaacaaacccacaagaagaggcggtgatttcctgggat

SEQ ID NO: 39155 - DNA, 120 bp, synthetic construct
  source 1..120: mol_type = other DNA
ttcacgtctgccttcttcaaccctgccctggccgcctctgtgacctttgcctgctcgggacacaccttactggagtacgtgcaggtgtactggctgggccctctgacaggtaagggcagg

SEQ ID NO: 39156 - DNA, 120 bp, synthetic construct
  source 1..120: mol_type = other DNA
catctcccgcgggctccttcctgcctcttgttacagaagaagcaggagaggaaagggcaggatgacagggaagagcccagggagtccgccaggtcccaagtctgccaagatgatgctgca

SEQ ID NO: 39157 - DNA, 120 bp, synthetic construct
  source 1..120: mol_type = other DNA
gtcagccactcgctgctgcagggtttccttttgctagagatgagaaggggctgcctggaacttccactcccctctgaccaccctgtatgattcccgtctcatggtgcgtgggcttctccc

SEQ ID NO: 39158 - DNA, 120 bp, synthetic construct
  source 1..120: mol_type = other DNA
tccactcatccagctctactcttgctccagggcttgaaatgcctggaacctaaattcctaactgcccacctcccatgcccctagatgtgccagccacttactaacattttaatggcagtg

SEQ ID NO: 39159 - DNA, 120 bp, synthetic construct
  source 1..120: mol_type = other DNA
agaaatgagctgtcaagccatgaaaacacacagaggaaatataaatgctattaccaggcgaaaggagtcaatcagaaaaggccacatagtgcatgagtccaaccacatgacattctggaa

SEQ ID NO: 39160 - DNA, 120 bp, synthetic construct
  source 1..120: mol_type = other DNA
acgtgaataaacatgcgtggtatacgggtaccccccctccagccatgcaaaatgtgtccctaccagcctatgagaaaggggaggagccccaccttaccctggacatgggaggctcctccg

SEQ ID NO: 39161 - DNA, 120 bp, synthetic construct
  source 1..120: mol_type = other DNA
atgttcttccttccaaaaactaactaacctgaagtataaaacctcagacggcagaattttctatttctggaaaagctggctgcgatttgtttttgggacacagtgaggcaagtccctgtg

SEQ ID NO: 39162 - DNA, 120 bp, synthetic construct
  source 1..120: mol_type = other DNA
gctaccaggaaggatatgaccacttccttcacgcagtgcttggcacccagggccttgatggcctctgcggtcccggcataaggccacttgccaccttcctcctgctcgtggcccacagtc

SEQ ID NO: 39163 - DNA, 120 bp, synthetic construct
  source 1..120: mol_type = other DNA
cagaggattccgatagatcctcatccttgttcggctgacagaactcggtagtgagcggccatcgcgagtgcgcctcactgatgttcacccacgcaagtgcggctctcgccctgccagcac

SEQ ID NO: 39164 - DNA, 120 bp, synthetic construct
  source 1..120: mol_type = other DNA
ttcctaggcacagctccagaccctcagtcagctgcagcaagggacatgggcatggctgcacatatgcgcgtttgatgtgaacatattttcctgttttttaaacagaaataagcataggaa

SEQ ID NO: 39165 - DNA, 120 bp, synthetic construct
  source 1..120: mol_type = other DNA
tccacctctcaggcagggccatgggggcggtgcccagagaacctccatgaatgtgcaaagagagagaggagacacagagaacagaaagaggatctggaactcaaggacgccaccgtgtgg

SEQ ID NO: 39166 - DNA, 120 bp, synthetic construct
  source 1..120: mol_type = other DNA
accacctttgcttaagaccaaggtatgagcagcctgactcagtgggaagcgatccggtcgccattttcagtccttctgtgagtactggaaggaaggcactcctgagccttggcagcatta

SEQ ID NO: 39167 - DNA, 120 bp, synthetic construct
  source 1..120: mol_type = other DNA
cgcagagcaaggctgcctcggggcggctcagtccggcgcttcttaccttacctccgtctcatccttaactcaccacgagcgtccagggtccacatcctcctaaatggccactcgtcttaa

SEQ ID NO: 39168 - DNA, 120 bp, synthetic construct
  source 1..120: mol_type = other DNA
gttgtccatcactaggactttactgccaatccttgcaagatagtggggaactagaataacagacatgggacattaccagttacaaccaaagacaagcttggcacatttgactgtcctcgt

SEQ ID NO: 39169 - DNA, 120 bp, synthetic construct
  source 1..120: mol_type = other DNA
atgccctaccatgatggagacccaagcctctctcatgatgactattcccaagggcactgcagaggggaggagctgtctcctcctccgtgtggcccacgcagagctggtgcaggtctgagt

SEQ ID NO: 39170 - DNA, 120 bp, synthetic construct
  source 1..120: mol_type = other DNA
ccctgaaccctggacagagcaactcgcaaacaggacagagaacagaccgttcagaaacgcagctgggaaacccggcaactgattggcaacagagggtgatatccctcacatggctactct

SEQ ID NO: 39171 - DNA, 120 bp, synthetic construct
  source 1..120: mol_type = other DNA
aattcaaaaacaggcaagagacctgaacagacacttctccaaagaagacttacaaacggccaagccgcagacagaaaatgctgaatgtcactagagaaaccacaatcacaactacaatga

SEQ ID NO: 39172 - DNA, 120 bp, synthetic construct
  source 1..120: mol_type = other DNA
gacgatgtcataattcaggatcaaggtttggaagtggatgcaagctctcagctgaacaagtttatgttcagtaaatccagacgtcctcctgtgctgggggctgtgcgatcccaggagtta

SEQ ID NO: 39173 - DNA, 120 bp, synthetic construct
  source 1..120: mol_type = other DNA
tcttatgaaatgctgcagctgtcaggttgttaaaatccccttctttattgaagaagtacctgaattgacgagagagaagagttgtgaggaggagcgcagagccagactgccaccccagct

SEQ ID NO: 39174 - DNA, 120 bp, synthetic construct
  source 1..120: mol_type = other DNA
ccgcacgcagccacctcatcactgcacctctcctccccggcggagaggaggcctcacaagggtgggcagtgtgtctcagtgccaagttcagagccctgcacacagcaggcgctaagcaac

SEQ ID NO: 39175 - DNA, 120 bp, synthetic construct
  source 1..120: mol_type = other DNA
attgcggaacgaagctgcagggcccaagggggtgacctgtccaaggggcctctctcaagccccgctcccccgaagcctctgaggccgcacctggagtcatccgtccagtcgatgcaggtg

SEQ ID NO: 39176 - DNA, 120 bp, synthetic construct
  source 1..120: mol_type = other DNA
tccggggacagccccacgcacttgacgttgtaccgagtggccaggggcagcgtgtcagatttgttgctgataaagacaaaaaccacagtgtgctgttggtcctcaagtcacatgagggag

SEQ ID NO: 39177 - DNA, 120 bp, synthetic construct
  source 1..120: mol_type = other DNA
ttctagcttctgatttcaggtgagagttgtgtgactcttcctttcacatgaacacgtagtggccactgtaggccattattaactggcctaatttcagcattgtttgtgtcagggaatagg

SEQ ID NO: 39178 - DNA, 120 bp, synthetic construct
  source 1..120: mol_type = other DNA
ggctcccttaattaacgggtgcaccattaaaaggaaggcacagaagacactatcagttttcatatgttacttaaaaaatggtgataatagtaatcagtatcactattatgaataccactt

SEQ ID NO: 39179 - DNA, 120 bp, synthetic construct
  source 1..120: mol_type = other DNA
tttctaccggcactgaaaacacgccgctagttctccaacctgctcagtcataagtttatcacctctcgcacaaagtgctcacctgctcaaatactgaaggtaaactttttcttccaaagt

SEQ ID NO: 39180 - DNA, 120 bp, synthetic construct
  source 1..120: mol_type = other DNA
ataaaaatgggtgccttttaaagacttcttaagatcaggaaaccaaaatcagtcagaaggagccgaatcaggtccacaaggtggatgcctcatgatttcccatagaaaccctcacgaagt

SEQ ID NO: 39181 - DNA, 120 bp, synthetic construct
  source 1..120: mol_type = other DNA
gctgaacctgccaaattctttgaagtgggtcacaatgattgaacagagaaggtgcaagtatgatatacaggaatatcacatgacaagatttagtgggtaggtggttattgccatttggtc

SEQ ID NO: 39182 - DNA, 120 bp, synthetic construct
  source 1..120: mol_type = other DNA
ggataagagcagaaataaatgaaacagccaaaagaaaacaacaaagaaaagcaaagaaataaagctggttctttgaaaatatctataaaattgacaaaccttaactaataatgataaaga

SEQ ID NO: 39183 - DNA, 120 bp, synthetic construct
  source 1..120: mol_type = other DNA
ccttctattgcaggcaaatactttcactctttcaggcctcgctcctgctcttgctgctgtgtggcatgctgtcaccctttcttgccctctaccacttttaatctagctagcctcaatatt

SEQ ID NO: 39184 - DNA, 120 bp, synthetic construct
  source 1..120: mol_type = other DNA
tctttctgaacaactctaacgctgacagtaaaattaacaacctaaaaattaagctccatcacacaggataaattctgagagaaaagatgaggcaggccaccatctttcctgtttgggcaa

SEQ ID NO: 39185 - DNA, 120 bp, synthetic construct
  source 1..120: mol_type = other DNA
gtcctatcacagtggcctgttgcactgtgagcttcttgtgtcaaaggttaattaatcttgtctctctagagtctaatgttcaaatgcatgttcatttaactaggctgtttattaagtata

SEQ ID NO: 39186 - DNA, 120 bp, synthetic construct
  source 1..120: mol_type = other DNA
ttgccctggtcacattccccagggcagctcagggctttgtttagggatttcccatagtcaggtgcctgataagtgttgagatgtgcaaggccacgtgggcagatgggtaggtactctttg

SEQ ID NO: 39187 - DNA, 120 bp, synthetic construct
  source 1..120: mol_type = other DNA
tcattatggagctaggacttatgcagagttgggacactttctattatgtcaggttaatgcaacctaatttactgggtcacatgccctcgatttatgagtatttcaccctacatttttttc

SEQ ID NO: 39188 - DNA, 120 bp, synthetic construct
  source 1..120: mol_type = other DNA
gctggttaattgtcatgataacagtaattttgttagaacaagatgctctgctaccatttgccaaaagagtgtcataataaatatgcaaattgcccaactctaggctcagcagattatcat

SEQ ID NO: 39189 - DNA, 120 bp, synthetic construct
  source 1..120: mol_type = other DNA
agagaagtcaattgatggttttcactgataggaaagtaggaaatgtatagttgggtcagaggccacattgtggatgtcatcatccttacttttgtggagaggaacactttgctccaagta

SEQ ID NO: 39190 - DNA, 120 bp, synthetic construct
  source 1..120: mol_type = other DNA
ttccccttttaaaaaaggggacttgcttaaaaaagaagtctagccacgattgtgtagagcagctgtgctgtgctggagattcacttttgagagagttctcctctgagacctgatctttag

SEQ ID NO: 39191 - DNA, 120 bp, synthetic construct
  source 1..120: mol_type = other DNA
tgccccaaagtatgtcaaaagcattcgggaatgttggttgagtggatgagcaaagccaggcttccccagggctgggtttctgccatccctgttctcatcatgttgtgcagtgattgtcca

SEQ ID NO: 39192 - DNA, 120 bp, synthetic construct
  source 1..120: mol_type = other DNA
gaaaaaaaaaagaaaccatctctttcatttaataggtgagaaagttgaacctggagaaggcagcagcatggtgagctcatgcagggactcctgcctccctgcaactcattctcatatgtc

SEQ ID NO: 39193 - DNA, 120 bp, synthetic construct
  source 1..120: mol_type = other DNA
gtgtatttcttcagttcagtgtgtgtatgtatgtttcttctgcagctcagtgtatgtgtgtattccttcagctcagtatgtgtgtgtgtgtatgtttcttctgcagctgtgtgtgtgtgt

SEQ ID NO: 39194 - DNA, 120 bp, synthetic construct
  source 1..120: mol_type = other DNA
tgagcaggggtgtgggagtccagccctggccttgccaggtggagaggcgcctgggccagacatccgcggcaggaggcgggggaacatgccaagaggcggaaggggcacgcggagaccccc

SEQ ID NO: 39195 - DNA, 120 bp, synthetic construct
  source 1..120: mol_type = other DNA
gacccccaagctgtgcattccttggaagaaccgctgccccagacctccagcggctcttgccacgcccccaaacccgcctgccaactcggatctctagacagcctgagtgctgaagtcggt

SEQ ID NO: 39196 - DNA, 120 bp, synthetic construct
  source 1..120: mol_type = other DNA
ctgcatactggaaggggcggcccctgcacccagtggctcaacgtcagagacttagaccgcctgcagcgcgagtcccagcgggaagtgctgcgcctgcagaggcagttgatgcttcagcag

SEQ ID NO: 39197 - DNA, 120 bp, synthetic construct
  source 1..120: mol_type = other DNA
ataactacaacccatttgaggggcccaatgatcaccctgagggtgagctgcccctcacagctggggactacatatatatcttcggggacatggatgaggatggcttctatgagggggagc

SEQ ID NO: 39198 - DNA, 120 bp, synthetic construct
  source 1..120: mol_type = other DNA
aggtctcagtgagaaccatgtcactctgtggtgagtccctggattcagtgcctgctcagatccccgaggacttcttcatgtgtcaccgatggccagagactccaccctttagctacactt

SEQ ID NO: 39199 - DNA, 120 bp, synthetic construct
  source 1..120: mol_type = other DNA
gagctggtcttccagaaaaggcagttgctaagagtgtggggctctcaggacacccatgatttctacctcagcgagtgcaacaggcaagtgggcaatatccccgggcgcctagtggctgag

SEQ ID NO: 39200 - DNA, 120 bp, synthetic construct
  source 1..120: mol_type = other DNA
agccactgcacacagagggcatttctttatttgccccattttgcagaagagcttcctgaggctcagagaggcccctcatctaaggtcacatcatggctcaaagtcacctcctccatagac

SEQ ID NO: 39201 - DNA, 120 bp, synthetic construct
  source 1..120: mol_type = other DNA
ggttctgggaagggctggtggaggtgggctggtgggaggcggtgatcacagcccagcacctggatatcaccaggggcactggggccaggggccaggtgaggccaggtcggggctatcctt

SEQ ID NO: 39202 - DNA, 120 bp, synthetic construct
  source 1..120: mol_type = other DNA
gagagaaaagctgactcagagaaagggagtgataacagggcatgctggcccacacctgcaatcccagttactctcacgggatctgtttctctgatgtctgggtatgaaaggactttctaa

SEQ ID NO: 39203 - DNA, 120 bp, synthetic construct
  source 1..120: mol_type = other DNA
tcatgttgtcttttctggctgtgggaccctgtgtgagtcacttctccttctgagcctcagtgtcctcatctataaaatggggctttacaaacccctcaccgcagctatattaagaggctt

SEQ ID NO: 39204 - DNA, 120 bp, synthetic construct
  source 1..120: mol_type = other DNA
gtgttccacaagtggggtgcagggctggttcatgaacctccttgcaggaagggaagtccctggttatttcctggccctctcccatgcctcctcataaccttgaccacagtcttctctaca

SEQ ID NO: 39205 - DNA, 120 bp, synthetic construct
  source 1..120: mol_type = other DNA
atgttttaaagaacatattttgccaccccctggtggacagtggctcaccaccggcacaagaggctacacaggcagatgtcaatggggaccaggcagggacaggtattgtcgtgagcctag

SEQ ID NO: 39206 - DNA, 120 bp, synthetic construct
  source 1..120: mol_type = other DNA
tgcaacccaaacctggcgttctgtgaccgagttaaagtttcctcttgggtaaaagatattcttgagccacatccatgtctaggaggaagtaagggcatgagaagcttgaaaggacactgt

SEQ ID NO: 39207 - DNA, 120 bp, synthetic construct
  source 1..120: mol_type = other DNA
tgactggggagggcgacaagggaaagacgtgcggagggggagccgcgggatcgtggagcacggaaagtcagagcttggcgtgaggaaaggagtggggagtggtccctggggaaaagattc

SEQ ID NO: 39208 - DNA, 120 bp, synthetic construct
  source 1..120: mol_type = other DNA
tctgcatttccaacaagctccctggtgatgctgatactcccagtccattgaccacactttggataggaagagtctacacttgctctactcaacttctctccattctgtcctcaaacacac

SEQ ID NO: 39209 - DNA, 120 bp, synthetic construct
  source 1..120: mol_type = other DNA
gtaaccttgtatatgtattggttttttctttgttgagttctcccactgttctgaggcttagaaagtcctttcatacccagacatcagagaaacagatcccgtgagagtaactgggattgc

SEQ ID NO: 39210 - DNA, 120 bp, synthetic construct
  source 1..120: mol_type = other DNA
acaatagcaggggctatggtttgtcctttcccattgacccttctcttgtacattcccccaggactggtgaccagttagaaacatggagcagctctacctggatggaatgaactttaagaa

SEQ ID NO: 39211 - DNA, 120 bp, synthetic construct
  source 1..120: mol_type = other DNA
acaaaaccctattaataaacacaatgcaaacaatgcccgagattatcataaaaacatactagcaagccacaagtaccagagaggggtgaacaggcatatctgctagctctcctcttgcag

SEQ ID NO: 39212 - DNA, 120 bp, synthetic construct
  source 1..120: mol_type = other DNA
aatgtgggaggctaataggatgggtgggttgcaggaggtagaagaggggatggcctagagagtttctccattcagagctggagagttgttgaagggaagggtattttaaaagggctccac

SEQ ID NO: 39213 - DNA, 120 bp, synthetic construct
  source 1..120: mol_type = other DNA
ttcacaacattggtaccatcagcagccgagacgaaatacaggggcagggagaacttcttggcaaaattgaagcttttttgggtcacgtttatgtctgctgtagagagaaggtaggacatt

SEQ ID NO: 39214 - DNA, 120 bp, synthetic construct
  source 1..120: mol_type = other DNA
gtcacaggtaggtgagagacaaactgttgtattctttcgggtttctgaatagcctccgcaaaggaggctatcacatattaacctatctcagtgagcagaggggtgactttgaatagatgg

SEQ ID NO: 39215 - DNA, 120 bp, synthetic construct
  source 1..120: mol_type = other DNA
ggatgacctctgtgttggcagatttgggggtccgccagataggatcctgtgaagagacctcaaaggtctttagtccaatctataaaacatttttatgttgattatatcatttccacaatc

SEQ ID NO: 39216 - DNA, 120 bp, synthetic construct
  source 1..120: mol_type = other DNA
acattggctgtgggttcataaatagctcttattattttgagatacgttcaatcggtatagtttattgagtgtttttagcctaaaggggtgtagaattttattggagaccttttctgcatc

SEQ ID NO: 39217 - DNA, 120 bp, synthetic construct
  source 1..120: mol_type = other DNA
tttaatttctggtgatgcttttatctgctattgtattcctaaattgttttattccttatatgacagatagaagagcctgaaaacaaaaccaaggggtagagggcttacctgagaccacta

SEQ ID NO: 39218 - DNA, 120 bp, synthetic construct
  source 1..120: mol_type = other DNA
ctaaaatgctacaggttttaagtaagtcacatacaaccatctgagcagtgcttttcatgtctggatagaatggagggggctcttaggtcatgccctcctttttcattgtggttaaactac

SEQ ID NO: 39219 - DNA, 120 bp, synthetic construct
  source 1..120: mol_type = other DNA
cttcctctttgcccaggaggaaagctaatataccacttcataagctagctgtaagcattaaaagaccagatgccagtggttcagaagcactcagtcacattagctatgatgattgttatc

SEQ ID NO: 39220 - DNA, 120 bp, synthetic construct
  source 1..120: mol_type = other DNA
caaagtcaggcggtcggcttcgccagcagccgatgagtctcatcctgtggattgcccagcgccagggatcaggatccggagaggtgtccaggaggagcagaccctcagaccaggtaggct

SEQ ID NO: 39221 - DNA, 120 bp, synthetic construct
  source 1..120: mol_type = other DNA
catggtggtcctactcttggtttaaaaaaattaagatgtaagattaaggtagttttgaaggaaaagaaaagtttaaaaagatgtgtaaattgcatgtatatatacatatatacatacatg

SEQ ID NO: 39222 - DNA, 120 bp, synthetic construct
  source 1..120: mol_type = other DNA
cctttgtgagaagcacaagttatgttacatattcttacataagcaaaatggttttatctgtcatagtttacacacacacgtgcacatacacacatgtgcgttcgggtgcgcacacacaca

SEQ ID NO: 39223 - DNA, 120 bp, synthetic construct
  source 1..120: mol_type = other DNA
ctagaaacattcatattgtagaacatattgtcaatcatcaagattccctattttttattctggtaaaactaggattgctgcttatttcccattattttctaacaattgcttcacttattt

SEQ ID NO: 39224 - DNA, 120 bp, synthetic construct
  source 1..120: mol_type = other DNA
cttccctcactggggctagcgcaggtgttcacagctttcctcattgggcccaggccatgggttcatagccatcttcatcaggcaaagccaaggtgttcacagccattttttccgggtcca

SEQ ID NO: 39225 - DNA, 120 bp, synthetic construct
  source 1..120: mol_type = other DNA
agttcacgctacccctcagtaacatcaagcccagggttaagagccattttcactggccccaggccacctgttcatagctgtcttcattgtttccagcccagggcttcccagctgtcttca

SEQ ID NO: 39226 - DNA, 120 bp, synthetic construct
  source 1..120: mol_type = other DNA
ttccatcctagcttattctctgtgtgtcctcagttggggtacctacccggtctctgcctcagtttcctcctctgtgagacagtgatcctaacaggccctacctctgacagtggttttgat

SEQ ID NO: 39227 - DNA, 120 bp, synthetic construct
  source 1..120: mol_type = other DNA
tgctgaaaaatccactggggggccacattttcagttaattcccattaattgcttcttcagaatggttcagttgaagggaagtttattcttggcacagccatcaagtggtagttagtttgg

SEQ ID NO: 39228 - DNA, 120 bp, synthetic construct
  source 1..120: mol_type = other DNA
gtgcacagctcaacacaaagatgagtgttgtaaataaaaattccattaccactgcacaccttaacgtcactctgcccatttatcctccaccacagctgtagctgaaggccagtttaatat

SEQ ID NO: 39229 - DNA, 120 bp, synthetic construct
  source 1..120: mol_type = other DNA
attgtggatgtctttgggagtgtgtgtgcatttccccagaaaacacactcccatctgcaaagcacaacatgaggatcaatgttcaagaaaaattccatcaccactgcacagtttgcataa

SEQ ID NO: 39230 - DNA, 120 bp, synthetic construct
  source 1..120: mol_type = other DNA
tcaaagcacaacacaaggatcaatgtccaagaaaaattccatcaccactgcacagtttccataaatcaatccattcatcctccaccacagctgtacctgaagataagtttaatatccaca

SEQ ID NO: 39231 - DNA, 120 bp, synthetic construct
  source 1..120: mol_type = other DNA
tcagaaagaatgaaaacaattggaaaataacttcaagaaaaaaatgtaaaatggaaacaatacaagaacaatttgtgccctctgaaaaacagaggttaaagtcagaatttttttgttctt

SEQ ID NO: 39232 - DNA, 120 bp, synthetic construct
  source 1..120: mol_type = other DNA
cctctgtgccatccagacggaagagctgcacgttgaatatgcatagcttcctggagaagagctgcacgttgaacatgcatagcttcctggagaagagctgcacgttgaacatgcatagct

SEQ ID NO: 39233 - DNA, 120 bp, synthetic construct
  source 1..120: mol_type = other DNA
ctaaaatatattaaaaatgtcccaacatttcaggacattccaccggcttttcttgctgggcttcctggttttcttcttgggctttctggttttcctgatgggacaacaagaaagtgagcg

SEQ ID NO: 39234 - DNA, 120 bp, synthetic construct
  source 1..120: mol_type = other DNA
tcccttctcctcctgtagggcctgtttctgttcccgcatgaatcccatttcctttcaccctgtggacctccaccagtcctactgttctccaaaataagaacactggaaagaaggtcaagg

SEQ ID NO: 39235 - DNA, 120 bp, synthetic construct
  source 1..120: mol_type = other DNA
aggccaaaactgtgctcaatcatgtgttctgccctcaggactccaggatgctggggcacacgtaggaatcccagaggaaggattccctgtgtcatccgacccagggagcacccttagagc

SEQ ID NO: 39236 - DNA, 120 bp, synthetic construct
  source 1..120: mol_type = other DNA
aatggagatgctctcttaagagtagacttttggcaactgggaacttctagcatggctcttgtgaggaggttatgaattttttcatttattttaacatgaatgggcacatatgccactgag

SEQ ID NO: 39237 - DNA, 120 bp, synthetic construct
  source 1..120: mol_type = other DNA
gtgtttgtgcttctgctcttccttttaacacagtgtgtgtgtgccatgggacctgctgctgctcatgctcacactggctccagcactaggacagcccatcatgggggcagcaggtggggg

SEQ ID NO: 39238 - DNA, 120 bp, synthetic construct
  source 1..120: mol_type = other DNA
tacactttggaagcttacaagttaattttttcatgtgcctgcaacaggactgcaacggtgatggaaatctctgttgagaatgtggacactagaaaatccggggatatgtagtacggaaac

SEQ ID NO: 39239 - DNA, 120 bp, synthetic construct
  source 1..120: mol_type = other DNA
ttaatgatcacactaaagcccactgtgcaatgtacctactcaaacaaaccctgggttagatgaccattgacaccatctgataatgatagtgtttgggatctgaataggttttcattctcc

SEQ ID NO: 39240 - DNA, 120 bp, synthetic construct
  source 1..120: mol_type = other DNA
acacaaatttttctcagaggatatttcctctcaagtccatgttggttggcaagtaactgattttgctccaaagagagaacaaaattagtaaggcaaaagctccctgccccacaatgtgtg

SEQ ID NO: 39241 - DNA, 120 bp, synthetic construct
  source 1..120: mol_type = other DNA
aagcctgaaaaattcatctctacatcatctccatgtgaggacttgggatattaaacttaccttcagctacagctgtggtgaggaatgaatgggttgattttttgcaaaaatgcagtggtg

SEQ ID NO: 39242 - DNA, 120 bp, synthetic construct
  source 1..120: mol_type = other DNA
tcaccatacaagtcttttctttacttggtgacattagaaaagcagatgggagacagtggttgaggcaatggtcctaaagcctcgaagacacttctggaaaggcacaagatttttatgcaa

SEQ ID NO: 39243 - DNA, 120 bp, synthetic construct
  source 1..120: mol_type = other DNA
cacagcttaaatgtttgattccattgttcatcatctgcagagcaaagccccctgaatctgagttgggcttcagaaagacttgcactgtgggttgcacgtataagtgtgcaggcaaatgcc

SEQ ID NO: 39244 - DNA, 120 bp, synthetic construct
  source 1..120: mol_type = other DNA
cgaagcctctctgaggaacaaattcaaatgtctggtcatcctacccattgccctgtattgtcagctgtctggcagtgagcacccctccatgaccaactgaccacagcaagggaccaagtt

SEQ ID NO: 39245 - DNA, 120 bp, synthetic construct
  source 1..120: mol_type = other DNA
aggccaaaaacatccccataaataaccatccgcagctgccctcagcctcctctagaaggcaggtgccccagaagcttcctcacaagctctttgacatttcagcgatatgtgggtggctga

SEQ ID NO: 39246 - DNA, 120 bp, synthetic construct
  source 1..120: mol_type = other DNA
gaggacagctgtgaacacctggcctgggtccaacgagaacagctgagaacacttgggctaagccaataaggacagctgtggcaccggggacgattgccctgaagacagctgttaacatcg

SEQ ID NO: 39247 - DNA, 120 bp, synthetic construct
  source 1..120: mol_type = other DNA
ttcggccaagtgacagttctgagaaacctggctgacaccagtgaagaccgctgtgaaagcatgggctgctcccagttaagacagctttgcatacccggtctgggcccagtcagatcgagt

SEQ ID NO: 39248 - DNA, 120 bp, synthetic construct
  source 1..120: mol_type = other DNA
caggaaggcttccagtcaatagtgggctattagtagctaaattgggaaaatcaaaagttatacttagattttcagctgcactggaatcagagcccctaacccccacattattcatgggtc

SEQ ID NO: 39249 - DNA, 120 bp, synthetic construct
  source 1..120: mol_type = other DNA
gctttggttggcactttcacctcagcacttacctatgcctacaggtttgttcaatggcaactcttggattttgaattaatacccaattatttcatattttaatacccaaactattttaat

SEQ ID NO: 39250 - DNA, 120 bp, synthetic construct
  source 1..120: mol_type = other DNA
ccgcagtggcagcagcgacccgctgagcccaccagggccagggctcgccccacgccgctgagttcctcggcgccagctggcactgccagcacccactgcaccgctcaggaaactgaggca

SEQ ID NO: 39251 - DNA, 120 bp, synthetic construct
  source 1..120: mol_type = other DNA
tgagttgaatgctggctgtaggctgtcttatccccagcaagaaacatgttgtaaagtcttagtaccttcccactggaagatcattagtcatggctactatgtttttaaatgagaattgtt

SEQ ID NO: 39252 - DNA, 120 bp, synthetic construct
  source 1..120: mol_type = other DNA
gctcatattatttgattattattgcaatttgtctttctggaataggaagcaagaggcctgaattctggttcctattctatcaattgtgtgaattctggaaactcagtttacttttctggg

SEQ ID NO: 39253 - DNA, 120 bp, synthetic construct
  source 1..120: mol_type = other DNA
tcataatcacaatttcctccccattttcttagttctcataattttagccacagcccagttggctggaccaatggatggagagaatcactcagtggtatctgagtttttgtttctgggact

SEQ ID NO: 39254 - DNA, 120 bp, synthetic construct
  source 1..120: mol_type = other DNA
tattccttgttcaaaatgagtcataaattcaacacatctctacatctatattatgcccatttaatttctttcagcaatgttttgtagtttttggtgaacaggtactttatgcatatgtac

SEQ ID NO: 39255 - DNA, 120 bp, synthetic construct
  source 1..120: mol_type = other DNA
ttgtctccatccctcacccaatgccaggccctatcaaataaaaatccaaccacaggaggcatttgggttgtaatagcaatatcagattgacttcgtttcttgattctgaatcttggacct

SEQ ID NO: 39256 - DNA, 120 bp, synthetic construct
  source 1..120: mol_type = other DNA
ttcatctctgaactccctacgccagtctcccatgcagaccatccaagagaacaagccagctaccttctcttccatgtcacactatggtaaccagacactccaggacctgctcacttcgga

SEQ ID NO: 39257 - DNA, 120 bp, synthetic construct
  source 1..120: mol_type = other DNA
atgtacagtacaaaaatggaaccttatgcatgggccttaggaatacaggctagtatttcagcacagacttccctgcttgagttcttgctgatgcttgcaccgtgacagtgggcaccaaca

SEQ ID NO: 39258 - DNA, 120 bp, synthetic construct
  source 1..120: mol_type = other DNA
ttatgctgatttccaattggattccctacaatgatttctggttttcatctgctctggatgattactatctcttttaaatttgttgtggcgagttttagggcctaggacagctctatcttg

SEQ ID NO: 39259 - DNA, 120 bp, synthetic construct
  source 1..120: mol_type = other DNA
cctccatagcgtcgaggctgctctggcggtcaccgcagtaacactggccacaacaagcggtggagaacacgcagccttgggtctggaacccgaatgcgcacgtgacaaccaaccggagcg

SEQ ID NO: 39260 - DNA, 120 bp, synthetic construct
  source 1..120: mol_type = other DNA
ctttcccaccattgtacagttgaaaatcttaagtgaaatcattgtaagttggtgactctctgcatttatttattttactactttccttttttcttttaatagttgaaagccatcataagg

SEQ ID NO: 39261 - DNA, 120 bp, synthetic construct
  source 1..120: mol_type = other DNA
ccatctatccagtagacattgtttttcccttgaactgagctgtgtgctgtgttttcgcgtctgcaggacaaggtttatagctcggtgctgcggcagtgctacagcatgtacaaggtaagc

SEQ ID NO: 39262 - DNA, 120 bp, synthetic construct
  source 1..120: mol_type = other DNA
ctgcaatcttttacctcactagctttttaatggtacatttctgaaagccatggaagacggaggcgtcaagcttctgaaagaaagattagagaaattcttccatcgggtaagtattttgaa

SEQ ID NO: 39263 - DNA, 120 bp, synthetic construct
  source 1..120: mol_type = other DNA
aatgggctgtaactgatttacaatgaactacacataaactgtaccctttgatgtgttttcacacatctatacctgtgaaaccatcgcctcagtcaagagagtgaaccgaatcaggcacag

SEQ ID NO: 39264 - DNA, 120 bp, synthetic construct
  source 1..120: mol_type = other DNA
ttccaggagctgcttgacctctgattctgttcttgcctctcctgtggacacactgaacatccccctcacactctctctcttccttccttgtctgctctcatcgcatcctctctcatctga

SEQ ID NO: 39265 - DNA, 120 bp, synthetic construct
  source 1..120: mol_type = other DNA
aatcccagcactttaggagtctgaggcaggaggataacttgtgcccggcagttcaagaccagccctggcaacgtagcaactccttgtctctaccaaaaaaaaaaaaaaaaaaattaaatt

SEQ ID NO: 39266 - DNA, 120 bp, synthetic construct
  source 1..120: mol_type = other DNA
ggccaagtgctgtgttctgaagcaagctgcttaatctcctctgcctcacaaatagaaataacagaaccttgtctcataagaattaaaccgatgacacacagaaaaatccctaagtacagg

SEQ ID NO: 39267 - DNA, 120 bp, synthetic construct
  source 1..120: mol_type = other DNA
ttcaggtgtaatttacagccatgagattagatgaaatgactcaagggcagagtttaattagaagagggcccagagtctgacttctagccacagtgtttcttggataaagacctaataggg

SEQ ID NO: 39268 - DNA, 120 bp, synthetic construct
  source 1..120: mol_type = other DNA
ttctctgttgacttgttgattgtctgtccttctccaacctgctgtcaccccagccttctgactgtgcttggcacatggcgagccctcagggtgctgcaggaagaaagaaggtgacattgg

SEQ ID NO: 39269 - DNA, 120 bp, synthetic construct
  source 1..120: mol_type = other DNA
aatataagaatccctgtctgtcttttcaaatagttttcatggaaccttgtcctgtttgaacttggctgaaaatggaagtaaagatgccctcttgggggcccagagatgacagatgtggct

SEQ ID NO: 39270 - DNA, 120 bp, synthetic construct
  source 1..120: mol_type = other DNA
aaacaaacccatagaactggtaatgggcaatgcaggactccgaatccagctcttgcacactttacaatgctgacctataaggagaggggcttttgttttgttttgttttttttgagacag

SEQ ID NO: 39271 - DNA, 120 bp, synthetic construct
  source 1..120: mol_type = other DNA
caggaaggggaggaaggtgtggggtgatggtcgtagatttgtaaatcttcagtaaaatccactgatgcttcaaaagaaatcggaagctcttcatgccgattttattctgaaacctgatta

SEQ ID NO: 39272 - DNA, 120 bp, synthetic construct
  source 1..120: mol_type = other DNA
gattacaggcgtgagccaccacgcctggcctgaatttaaatacagagaagattgtataagtacaaggggtggatttcttcaaaggagctcaaggggagtgtttaaaagaatgtcttaaag

SEQ ID NO: 39273 - DNA, 120 bp, synthetic construct
  source 1..120: mol_type = other DNA
ggaacacacacatggtttctaaagagaatccgcagttcccagtatcctttgagaaatgaatacataggggagtttgtaaatggatatcgtcacggacgtggcaagttttattatgccagt

SEQ ID NO: 39274 - DNA, 120 bp, synthetic construct
  source 1..120: mol_type = other DNA
accatttctgagtgcacagtccagtggcattaagcacatgcgcattgttgcgcaaccatcaccatccatctacagaactctttttgacaaaaggcatgtcattctcgattaaattacatt

SEQ ID NO: 39275 - DNA, 120 bp, synthetic construct
  source 1..120: mol_type = other DNA
gtgtttttctaagaaatcttttcctaaactgtaaaaagtttttctgtctgcagggccgattaactttcaagaacgggcgtgtgtacgaaggcgcattctccaatgaccacatagctgggt

SEQ ID NO: 39276 - DNA, 120 bp, synthetic construct
  source 1..120: mol_type = other DNA
tcccaaaatactgggattatgggtgtgagccaccacacccggcctagaacaatgctttagattgtatgtgtttattcagttgaattgcgttttcaaaagcaggaatgaatgctcagcgta

SEQ ID NO: 39277 - DNA, 120 bp, synthetic construct
  source 1..120: mol_type = other DNA
ggagaaaccctacttggtgctgctatattatctttttttttgtttttttttttttcttgttgagatagggtcttagggtcttgctccgtcaccttggctggagtgaagtggtgcgatctc

SEQ ID NO: 39278 - DNA, 120 bp, synthetic construct
  source 1..120: mol_type = other DNA
gtgtcataataatagaaataaggcgtgcagtaattcgaatgtgcttgaatcatcctgaaaccaacagccccccaccgctttccaccattcatggaaaaactgtcttctacaaaatcggtc

SEQ ID NO: 39279 - DNA, 120 bp, synthetic construct
  source 1..120: mol_type = other DNA
gcgtaccacatttatcatgaagaattccagtaagtactatttctggacccttgttgggggatggggcacagctaagctgtattattgtcataatgccctcttttcttcagcagtcatttt

SEQ ID NO: 39280 - DNA, 120 bp, synthetic construct
  source 1..120: mol_type = other DNA
acaaggttctgggattacaggtgtgagccaccatgtctggccgcaaatgcccatgttaatccagaatgcttttcaaaattatcagtctttaagatattaatttatggctgggcgcaatgt

SEQ ID NO: 39281 - DNA, 120 bp, synthetic construct
  source 1..120: mol_type = other DNA
ctactaaaaagacactggaaactgaacgttcatgtcgtgctcccttttgaccaacaatttgggagtgtgatttagagatcagagagaggctcagcttcaaacttatcaaagctgatcctt

SEQ ID NO: 39282 - DNA, 120 bp, synthetic construct
  source 1..120: mol_type = other DNA
attttttggctgagcattggcagaatggagttgccatttatgatgatgtggaagacggaggcagggggctgagttttgggagcaaaattaagtggttgattttggacaagttaagcttaa

SEQ ID NO: 39283 - DNA, 120 bp, synthetic construct
  source 1..120: mol_type = other DNA
cctgcacgcccatctcagagtctgatgccgttgactacattgttttcttacaggcaacttttctctctcaagggtctcattctctcggatttttaaaggtgctcaaattaaaaacaacac

SEQ ID NO: 39284 - DNA, 120 bp, synthetic construct
  source 1..120: mol_type = other DNA
ccatagtcaggaaaagcgtcagcttcttgaaatactcttcacagagattcggcctctgtgacccctcgtcatcctaggtttcttctccctctggtgcaaatctgtgggttgtgtcatttt

SEQ ID NO: 39285 - DNA, 120 bp, synthetic construct
  source 1..120: mol_type = other DNA
agagggataactataactactaggaaattacttttgtgagagtaacccgttgtctagttctctaggagagaggattcacttgggatacacagctatccttgtctctaaaggggtttcaaa

SEQ ID NO: 39286 - DNA, 120 bp, synthetic construct
  source 1..120: mol_type = other DNA
gaaggttgggactttcagctccagcccaacctcccaggaagggagaggggctggagattgagttcaataactaatagccagtgacttaatcaggtctacatattggaccctccataaagt

SEQ ID NO: 39287 - DNA, 120 bp, synthetic construct
  source 1..120: mol_type = other DNA
gtgctgggattacaggcatgaaccactgtgcccagccaagaaatgttaacaagtagaagaggggaaaaaatccacctacaaaacctaccaggcctcaggagttttgagcctatcaacact

SEQ ID NO: 39288 - DNA, 120 bp, synthetic construct
  source 1..120: mol_type = other DNA
tcaaaaaataaaaacaaaaagcaacaaagatgtaagctgttgacagcagtaatccacacactgttgtacaaaacctagaggtgctttcacctttgctcgcttctgcgctcttagaggccc

SEQ ID NO: 39289 - DNA, 120 bp, synthetic construct
  source 1..120: mol_type = other DNA
agccagtttcccctacacattttcacacaacgagaggcaaaatgctttcagtctgtgcacaccaagaccacgccgatgactactgtccaagtgaacgtaacaatctgggctggtgaaatg

SEQ ID NO: 39290 - DNA, 120 bp, synthetic construct
  source 1..120: mol_type = other DNA
caacaaccaggaccacagataaccaaaaatgtttaaaagttatcaaagcaatgtatggttaagagaggctgagcagaacaccaggcctgatgatgaaagccacagatttcgttctctgac

SEQ ID NO: 39291 - DNA, 120 bp, synthetic construct
  source 1..120: mol_type = other DNA
aagactcaaattactaaaaccaggaatgaaagaggagacatcactactgactttacaggaaaaacgaaggagtatccggctttacctacaataccatgaaaaaccacgtgccgacaaatc

SEQ ID NO: 39292 - DNA, 120 bp, synthetic construct
  source 1..120: mol_type = other DNA
cttccccctggttttgtttcccatggtttctgttatgtgagggacagtataataaaatattgagggaagggggaagcaaaccgcattcacatgacttttattgcagtagagtgtcatcgt

SEQ ID NO: 39293 - DNA, 120 bp, synthetic construct
  source 1..120: mol_type = other DNA
attacctgggtcattcaaaggaggatgatttttttcttgagatggggtctcaaactttcactcgatacacaaacggacattcttcctactccaattcctgctctgaattacacctccaac

SEQ ID NO: 39294 - DNA, 120 bp, synthetic construct
  source 1..120: mol_type = other DNA
atggtttacaagtcccgtctaccttccagagagggacaggactccctcatcctgacacatcccgctccttcctgttcccccacggcatcatttctgagcctttataaatgaaaacttctc

SEQ ID NO: 39295 - DNA, 120 bp, synthetic construct
  source 1..120: mol_type = other DNA
agcagcacatggaaaaagcacagagaaactagcaggtatcagactctggaaccggttttttaaaaggagacagacaatgaggctggatctgggcgttttctattcaagatcactgaaata

SEQ ID NO: 39296 - DNA, 120 bp, synthetic construct
  source 1..120: mol_type = other DNA
cagttctgtgcagccaccagagctgtgccctgctcaacccctcagatgctattccaagatgacgatgccaacaggatccccagagctgggcgccagattgtcctgtgactccaggcttca

SEQ ID NO: 39297 - DNA, 120 bp, synthetic construct
  source 1..120: mol_type = other DNA
gatccagcaggcccagttgtatgaatttgccttaaagatacagcttcattaatgcaaaacagcatttccacaggcttatgcattgcagcatacatagcaaacaactctgtcgaatactgg

SEQ ID NO: 39298 - DNA, 120 bp, synthetic construct
  source 1..120: mol_type = other DNA
cagtctgtgtgcggctcaaacaggaggcgtgttgtgtaggagaaggcttctagatactaactatgtaaggcatgagagaattagaaaatcagctgtttgcaattcctagtgtaataattg

SEQ ID NO: 39299 - DNA, 120 bp, synthetic construct
  source 1..120: mol_type = other DNA
tccagttcaccacattagccttggtgcctagctcttcttcccaggcattcagctgtgtattgtttacctcaactataatttttttcttaacagcaagttgttcatgtacctactgagacc

SEQ ID NO: 39300 - DNA, 120 bp, synthetic construct
  source 1..120: mol_type = other DNA
gactggtttcatttttaaaaactggagattttgagttgatgtgtaacacattttaatttttcccaattaaaatagtgtgaaatatgcttcatttagcattttcaggaacaggttggtgct

SEQ ID NO: 39301 - DNA, 120 bp, synthetic construct
  source 1..120: mol_type = other DNA
tttgcctgttagaaatgttaaaaatcatgtaaataaaatttgagcagctcttagagtttgttagctttttctctaccagttttagaatctttctgatgtgatatttttctagctttggag

SEQ ID NO: 39302 - DNA, 120 bp, synthetic construct
  source 1..120: mol_type = other DNA
taaagagagattactttcaaaagagcaacaataggccagtacttgattgcacaacagaaatgagagcacaaaccatggagcctcaaagggctgaaatttgccaagagctgccaatctaga

SEQ ID NO: 39303 - DNA, 120 bp, synthetic construct
  source 1..120: mol_type = other DNA
gattttaaactaagtttgatggtaagctttgtaaatataggtgcactaggaaagggcgtgaagctggggagagatgcagtctgatttgtgattttaaaagatcaccccactgctgcagca

SEQ ID NO: 39304 - DNA, 120 bp, synthetic construct
  source 1..120: mol_type = other DNA
agtagcaagagcatcagcctgctgtctttgtcagtagctacttgtatggtctcctaggcagattttatcatctctatattcacttccttcactgtaaaatacggactggattgcattggt

SEQ ID NO: 39305 - DNA, 120 bp, synthetic construct
  source 1..120: mol_type = other DNA
gccttctcatttgtattttttgtgcttttgtctctccatctctccatatttcattttgggtagtttctattgattcatcttccagttcactaagtcttgcttcagctgtgtctcctgtgc

SEQ ID NO: 39306 - DNA, 120 bp, synthetic construct
  source 1..120: mol_type = other DNA
caacctcagtatcttgtcatctgtcttcttgggctggtcagtagggtcttctcattttctgcagcttgcaatggtccctggtggtccagaaacaggaaaggaaatagttttattatggca

SEQ ID NO: 39307 - DNA, 120 bp, synthetic construct
  source 1..120: mol_type = other DNA
ttaagatcatttatgaccttttgagtttatttgtaattctgcatagattccgttcttcccttactgttggattcgagggattcttttagcagggtgacctcgtgtctcaggatacttaac

SEQ ID NO: 39308 - DNA, 120 bp, synthetic construct
  source 1..120: mol_type = other DNA
ccataataaaactatttcctttcctgtttctggaccaccagggaccattgcaagctgcagaaaatgagaagaccctactgaccagcccaagaagacagatgacaagatactgaggttggg

SEQ ID NO: 39309 - DNA, 120 bp, synthetic construct
  source 1..120: mol_type = other DNA
gacacaccgtctgaggcacattatagcgaaatttcaaaacaatggagacaaagagaaaatcgaatgagaaaaacatggtcatacacagaggattaggaatctgaatgccttttgagttct

SEQ ID NO: 39310 - DNA, 120 bp, synthetic construct
  source 1..120: mol_type = other DNA
agaaaaaaattatctatagaaggcagcagccctagatgacttcaaagaacaagcaacttcagggaaaagaaagaaaacactccctatctcctattatgagctgaatattaccttaagtcc

SEQ ID NO: 39311 - DNA, 120 bp, synthetic construct
  source 1..120: mol_type = other DNA
gacagacagacaggtggaggtgaggagtggcctgatagtttcctagttccttgtcctaggtgggttcactggtgaatcctaccaaacatttaagaaaggaataacatccattctctgcag

SEQ ID NO: 39312 - DNA, 120 bp, synthetic construct
  source 1..120: mol_type = other DNA
tatcctcatgggaaaagagaagaaatcttacagactgaagtaaaggattagactaaaattaaattgtcctgttttaaatgttcctttgaatactgccaatggttttgaaagatgccttgt

SEQ ID NO: 39313 - DNA, 120 bp, synthetic construct
  source 1..120: mol_type = other DNA
tatggggactatttactattttagcttttccctgtcattccaggaaaggactagaggttattacaagggcattttgcttttgttttgttagcatgcaccttctaaaattgcaaaccagaa

SEQ ID NO: 39314 - DNA, 120 bp, synthetic construct
  source 1..120: mol_type = other DNA
atgtcactacatggtttttaatgactcactttgtgtggactgtccatcctcccactaaaatactagctttataagagcaagagcttggtcttcttgactgctattatccccaaggcctag

SEQ ID NO: 39315 - DNA, 120 bp, synthetic construct
  source 1..120: mol_type = other DNA
agagccatgatggatttataaatataatgtaattccaatgagagtttacaattcatctgaacaaataaactggcaacagtaaccataaaaataatagcaggagtttgcaattactcagcc

SEQ ID NO: 39316 - DNA, 120 bp, synthetic construct
  source 1..120: mol_type = other DNA
gttgcatgaatatacaacaagttattcaaccattccctaaacatttggattatgtccaggttttagctattataaaacaatgtggttatctctttgaacaccagagtttagttttgcctg

SEQ ID NO: 39317 - DNA, 120 bp, synthetic construct
  source 1..120: mol_type = other DNA
ttccaactgattttcaataaattatttgcatttgctggaaagaaaagctctgttataaacgtattagaaataatttcatccactttatggcttcctttttttcacaatgtcttctgatca

SEQ ID NO: 39318 - DNA, 120 bp, synthetic construct
  source 1..120: mol_type = other DNA
agactgctaacaactgaaaacaaaaaaacaagattcacatcaactgctcaggatgggaaagtggcctctctcagtgccagcaccagcaagaagcaaattagtaggcctttcaaatcaccc

SEQ ID NO: 39319 - DNA, 120 bp, synthetic construct
  source 1..120: mol_type = other DNA
aaaggtctccctccacccccagacacttgggtcaaaaccaattcaatgtgtggttgaaccataacttattttaactggctcctgactgatggatagtttgcttctaatcttctgctatta

SEQ ID NO: 39320 - DNA, 120 bp, synthetic construct
  source 1..120: mol_type = other DNA
agaaaggcaagttttctgggacagtgactcccatatctggctgcataccaaatgacgcctgggatgtctaacaagcagatctcagatgccatgaggaccaggaaactgtcatttttttaa

SEQ ID NO: 39321 - DNA, 120 bp, synthetic construct
  source 1..120: mol_type = other DNA
catgaacaacttgctgttaagaaaaaaattatagttgaggtaaacaatacacagctgaatgcctgggaagaagagctaggcaccaaggctaatgtggtgaactggagcactgaaaagcac

SEQ ID NO: 39322 - DNA, 120 bp, synthetic construct
  source 1..120: mol_type = other DNA
aggactttgctttggctgctcagacacctttttgctttttttcaggtttcccacctccactgcttaaggtttaacttaacaactgaccttcgactgtaaaatgaagcaaagtatctgcac

SEQ ID NO: 39323 - DNA, 120 bp, synthetic construct
  source 1..120: mol_type = other DNA
gaaatgcgaagtgggtagacacaaccatccatttctggaagagggaaggaagcaaacgagtcttgatttctttctttagctgcagatacaaccccaaggaagaaacaaaactcgaattct

SEQ ID NO: 39324 - DNA, 120 bp, synthetic construct
  source 1..120: mol_type = other DNA
cattcctccatgagctgtgctgagagcctgctctccgacaggcatgtggaaagaagtcccagacaagccaggactgcttcacctttctttctttcttagatgctgcctcgaactctgtca

SEQ ID NO: 39325 - DNA, 120 bp, synthetic construct
  source 1..120: mol_type = other DNA
aaagtatatctagattcatacgtgaacttcagagttcagacaattggactgtcttagtctctacacattaggcccccatttaggccccattttatccccttctgtctgatgatctgtgag

SEQ ID NO: 39326 - DNA, 120 bp, synthetic construct
  source 1..120: mol_type = other DNA
agtccatccacagactctgcttcgaagcctgcgtttggctttggcataaacagtgtgagcagcagcagtgtgagtaccacgaccagcaccgccactgccgcctcacagcctttcctcttc

SEQ ID NO: 39327 - DNA, 120 bp, synthetic construct
  source 1..120: mol_type = other DNA
tttcattctccatcagtccctgtacgagcggttaagtcagaggatgctggacatctcgggggaccggggcgtgctgaaggacgtcatccgagaaggagctggagacctagtggcgcctga

SEQ ID NO: 39328 - DNA, 120 bp, synthetic construct
  source 1..120: mol_type = other DNA
ggcgtgagccaccatgctcggccttttaggtggttttgagaggtatttaggtcacttccaatctcgtgcttttccaagtgttgtaaactacaaatattccttcacgtcttcttgtctttt

SEQ ID NO: 39329 - DNA, 120 bp, synthetic construct
  source 1..120: mol_type = other DNA
tctctggtcactgaagctcgaagtggggagcatgaggacaggacgttaccccttgtcaaggcacccaggctgccaagacagagacaagcagcattgctccggccagcacttattgacgct

SEQ ID NO: 39330 - DNA, 120 bp, synthetic construct
  source 1..120: mol_type = other DNA
tccacggttggatgaagggctggtcagaaatgcacactcaggtcccacagtggacctactgaacaggataggcattttagcaaaatcccaggtattcgggtgcaccttaaagttaggaaa

SEQ ID NO: 39331 - DNA, 120 bp, synthetic construct
  source 1..120: mol_type = other DNA
gccgacctcacactgtgctctgtgcccctgccgtggaccaggtgagccatacgtcgccatcaaggcctacactgctgtggagggggacgaggtgtccctgctcgagggtgaagctgttga

SEQ ID NO: 39332 - DNA, 120 bp, synthetic construct
  source 1..120: mol_type = other DNA
aaaattgacaaagacccaccaaatctagcccctactcctaggctgggcccctgcccatctccctggaccacaccactctcaagggctctcgtttgcagacaccccattgccctactaaaa

SEQ ID NO: 39333 - DNA, 120 bp, synthetic construct
  source 1..120: mol_type = other DNA
tttaactgggagcagtattttgttttgctcagtttcataatggagaacagctgttcgcagatgtaggtgctcccgaacatggaaagaatctttgcgcaatggtgcttgtatttcgggtag

SEQ ID NO: 39334 - DNA, 120 bp, synthetic construct
  source 1..120: mol_type = other DNA
tcggccttaaaatagaaatcttagccaatgaaatatgacaagtaaaaggaataagaggtactaggattagaaggtaaggtatatttttattttctttcctttttttcctctctttttttg

SEQ ID NO: 39335 - DNA, 120 bp, synthetic construct
  source 1..120: mol_type = other DNA
gtgaggcactgcacccatccagaaattatctttataacagaaatttgatttgctatacagttgaaacgtggcaataattgtataggaagactatacccctgaacccattcaagaccagcc

SEQ ID NO: 39336 - DNA, 120 bp, synthetic construct
  source 1..120: mol_type = other DNA
aatcactagacagttaccctgtgggtgcctgcaacactttctgggcgttataaggaagatggcctctagtgtgctagtggaactctctggaagctacctggagggtgatgccaagagaat

SEQ ID NO: 39337 - DNA, 120 bp, synthetic construct
  source 1..120: mol_type = other DNA
ctagaggaaagagggaagtgggggcaagggttgcaaaatgaactacggggtactatgctcactactgtaccccaaaccacagcatcacacgatatacccatgtaacaaatctacacgtgt

SEQ ID NO: 39338 - DNA, 120 bp, synthetic construct
  source 1..120: mol_type = other DNA
acgacaaacacgtctgtttcgtacactgcgatgcaggccacttctgccttggacttggccagttctttacactgaaacagaaacaaaaagcgatgtattatctacaagggcagatccaag

SEQ ID NO: 39339 - DNA, 120 bp, synthetic construct
  source 1..120: mol_type = other DNA
gtgactccagttcctagaagagggccttggcttaggaagtgcttcatggatatttgtcaaatgaaaggaatgtgatcagttcttaaacaatgtccctggggaagatatttcgagttttct

SEQ ID NO: 39340 - DNA, 120 bp, synthetic construct
  source 1..120: mol_type = other DNA
tatatcaagttttgtatcatatgtattgctcttaactcagaaaattccaccatttatagcagtggtttatttatttataccattgaaggaaatggtttatttatgaatctatattacgga

SEQ ID NO: 39341 - DNA, 120 bp, synthetic construct
  source 1..120: mol_type = other DNA
ttaccttgttctttctggacttagctctgttacaaccaaggaagtcagctggtctcttgtcttagttctccttccctgtgtgatgacctgataaactctcaagtctgtaagctaagcaat

SEQ ID NO: 39342 - DNA, 120 bp, synthetic construct
  source 1..120: mol_type = other DNA
aaaaattaaataacagcaagcaactgcatgcacgtctgggggcggtgtccggggtgagaaaggccccgccagcaatccatcccacaatcagcgatggctgagggggtctggacctcgcgg

SEQ ID NO: 39343 - DNA, 120 bp, synthetic construct
  source 1..120: mol_type = other DNA
tggtttcgagttctagggggaaaaaggctcgcaaggctgtattctccatccctcaagcccaagctttcttgtttcttaataacagcttcgttgagatccattgtaaaattcacgttttaa

SEQ ID NO: 39344 - DNA, 120 bp, synthetic construct
  source 1..120: mol_type = other DNA
tttgaaccgttccaaaatccaaaacttattgaatgccgctgacctgatgcaagttgaaaattccatacctgtcacctttgcctttattttttttttaagacagtctcgccctgtcgccca

SEQ ID NO: 39345 - DNA, 120 bp, synthetic construct
  source 1..120: mol_type = other DNA
ctccttttactgtattgcttgtgattcccctccactccttgccatcagtatacgtttttttttggggggaaggatacagagtcttgctctgtcacctaggctgaagtgcagtggcacaat

SEQ ID NO: 39346 - DNA, 120 bp, synthetic construct
  source 1..120: mol_type = other DNA
ttagccaggcgcatggtaagctgtgatgataccactgcacttcaatctggaggacagagcagactctgtctcaaaaccaaaccaaaacaaaaaaactaagccctttaaaacctgaaaaat

SEQ ID NO: 39347 - DNA, 120 bp, synthetic construct
  source 1..120: mol_type = other DNA
gctttgggagattttattctgtggtacaagttcttatggtgaaggatttttgagctttattagagtgcagtgaaattttctcaggaaaatgtacttgggacaggaaacacagtgttggct

SEQ ID NO: 39348 - DNA, 120 bp, synthetic construct
  source 1..120: mol_type = other DNA
gcatttcacacacaacaacccatacataaatatcttataattcatcttccaggcacttgagaatgaagggagcattgttaataatttcactggcagggtgggtgtggactaggactgtcc

SEQ ID NO: 39349 - DNA, 120 bp, synthetic construct
  source 1..120: mol_type = other DNA
cccggatgcacccatttccagagagcaggaagcacagagaaggcccgtgggtcgccgtccccagggtgccttccatcctgcaaggcttgctgcatgccctgaaagttatgataaagacat

SEQ ID NO: 39350 - DNA, 120 bp, synthetic construct
  source 1..120: mol_type = other DNA
acatattctttgatgtgcatttgcttggtgagtggaatctagaatgctcaagaaaagactttctaggacctacgcgtctcatggctggatgccgcttttgctactcttcatcttagccaa

SEQ ID NO: 39351 - DNA, 120 bp, synthetic construct
  source 1..120: mol_type = other DNA
ttaaaaatggaaaatcagtaactttacagtgcagaaacctgacagacaccacctcattcaagtgatcaaaattagcatagtcagactgtaatcccagcggtttgggagtcgaggtgggag

SEQ ID NO: 39352 - DNA, 120 bp, synthetic construct
  source 1..120: mol_type = other DNA
tcaaaacaaacaaacaaaaacatggtcatagagtgtgaaataacagacactggagactcaggggtgggaggcaggaggtgggtaagggatgataaattacttcatgggtacaatgtacat

SEQ ID NO: 39353 - DNA, 120 bp, synthetic construct
  source 1..120: mol_type = other DNA
tgagttcctgtcatcctctaactcacattaaaggacaaatgagaggggcagggtggcaggtggccatggattgttgtcccaactgacttgtatcatcatcatagaaaaacaataatacag

SEQ ID NO: 39354 - DNA, 120 bp, synthetic construct
  source 1..120: mol_type = other DNA
ctatgacagtgtatactggaaaaaaaatccctcttcaatggggttgaccccattcttgcttctcctcactcctcaataaaagaaaaccagcattaattagaggaaaaatgttaacaggtt

SEQ ID NO: 39355 - DNA, 120 bp, synthetic construct
  source 1..120: mol_type = other DNA
cagactttacttctagaaaagaagcatgggatagtcacattgcaaagggatgtacatcctgggatgggagaggtcttgagctaatttttgcagccaaccgcacccttctctgataaaggc

SEQ ID NO: 39356 - DNA, 120 bp, synthetic construct
  source 1..120: mol_type = other DNA
tcaagaggtcaaatttgttcatagtgagtgagctacaagttcttttgctgattgtaacattgctgtattaatcaacttatattagctagtcgtatttctttgttggcaaacttaacctaa

SEQ ID NO: 39357 - DNA, 120 bp, synthetic construct
  source 1..120: mol_type = other DNA
ggaggagcttgagaagactgctcacggcaataacagttgaagttacgctcaaacagcaagaaaggccagagcacaatggtttaaaaaacatgggattacaggcatataaaagagcagaat

SEQ ID NO: 39358 - DNA, 120 bp, synthetic construct
  source 1..120: mol_type = other DNA
tccttagctgatgcctttctctatcgaggccagggtccacagtgtcaattctacaatctctacaagcacactggctcgccatcttggtatttcctggctcggcttcactgcttcttccaa

SEQ ID NO: 39359 - DNA, 120 bp, synthetic construct
  source 1..120: mol_type = other DNA
cctggcacacgttcctgaccaaaaagcagccatttgtggggcacaagccaatatttattgcatattcttgccttggtctatctttctgatactaacaccaaattttctaggatagaagac

SEQ ID NO: 39360 - DNA, 120 bp, synthetic construct
  source 1..120: mol_type = other DNA
tcttttaacctcaaggttctgcatctgccaaatgggggaccggataatacttcctccaatctatttcacagctagcaagaaaatacttgtaagccatacttcacattcctgaccaagtct

SEQ ID NO: 39361 - DNA, 120 bp, synthetic construct
  source 1..120: mol_type = other DNA
agccagatggggaaatgttggtaaacaactgagaaacccagttgggaccctaaagattctgtctaaggagaggtacagtatcctaggagtaaggcatatgtcctaagaggaaaataaaat

SEQ ID NO: 39362 - DNA, 120 bp, synthetic construct
  source 1..120: mol_type = other DNA
gacaccacatataacaaaggacaatcaaggaatattacaaaccactccacacacataaattagacaacttagacaaaatggacaaaatgcagtgttcctcctgcaacacaagcaaactca

SEQ ID NO: 39363 - DNA, 120 bp, synthetic construct
  source 1..120: mol_type = other DNA
cttggcatgaagacaccacaacctttagaatttaaagcctccccacctgcaagattacatatataaaactcccattattgtttctataacagtggattaattcaccaaattaaaatagtt

SEQ ID NO: 39364 - DNA, 120 bp, synthetic construct
  source 1..120: mol_type = other DNA
tctcgtttcagatgaacgctgacccaatggtgcgggaccattcggggcatgctctctgccaaatgctgtatttgaaacatcaagtgcattaggatctttttctaaaagttcaaatttcaa

SEQ ID NO: 39365 - DNA, 120 bp, synthetic construct
  source 1..120: mol_type = other DNA
gactcatcttctagagactgtatactttttgaaatatccgccatcaattcatcttgttgagaatgtttagatttctcttcttttaagtctttttctagacagaggatttcatcctcaagt

SEQ ID NO: 39366 - DNA, 120 bp, synthetic construct
  source 1..120: mol_type = other DNA
tctcttggtagaccattcataattaaatgaattattgatactttagtgcataagcctgacagtttttgttttctctatcaactcttgtgtctctgcttgtttttcatgactttctgtggg

SEQ ID NO: 39367 - DNA, 120 bp, synthetic construct
  source 1..120: mol_type = other DNA
attttcctcttaggacatatgccttactcctaggatactgtacctctccttagacagaatctttagggtcccaactgggtttctcagttgtttaccaacatttccccatctggctggatc

SEQ ID NO: 39368 - DNA, 120 bp, synthetic construct
  source 1..120: mol_type = other DNA
aagaaggaaatacctgatactggtaatttacaatgaaaagaagttgaattggcttatggttctgcaaactgtacagggagcatctcctcagcctctgatgaggcctcaggaaggttttac

SEQ ID NO: 39369 - DNA, 120 bp, synthetic construct
  source 1..120: mol_type = other DNA
tggggaaaacacaattccagtgcctactgttgagatgttttccacagttctagctgtggaggaccctaccctgatccagagcaggtgctccaatctctatcaataatgtttgatatgagt

SEQ ID NO: 39370 - DNA, 120 bp, synthetic construct
  source 1..120: mol_type = other DNA
aggtgtaaggaccctgggtccctgaatcaccaattgatggcgtgatgtctgctggtcaggaaaacctcctctgaacaaggaatgaacattggtttactgtaaaattttcaaataatgcaa

SEQ ID NO: 39371 - DNA, 120 bp, synthetic construct
  source 1..120: mol_type = other DNA
atcagggggttaagtgttgggttgaaaaaactgtaaaatagaaaaaagaccttttgctgctcctcaggatggcgggacttgggggccatgtacatgatgatggcactgccaaagaagagt

SEQ ID NO: 39372 - DNA, 120 bp, synthetic construct
  source 1..120: mol_type = other DNA
tgttgggccacattcaaagctgtcctgggccacctgcaatttggacaagcttgctttaagtgatatatatgtacaagttagccatttaaaaatttggcaaattatttgatgactaataaa

SEQ ID NO: 39373 - DNA, 120 bp, synthetic construct
  source 1..120: mol_type = other DNA
cttgagtagcctgaagattgtatgaacctgacaagcattgcctcttcaaggttcacaatagtcccttaaaaccatgatcctctaaagctgattttgtagtcttgattatggcagtggaag

SEQ ID NO: 39374 - DNA, 120 bp, synthetic construct
  source 1..120: mol_type = other DNA
tattagaacctgcctgaagggagggtctcctaagacacaaaccaccactgtagatcgtgtattagaattattctctaatctttattctgaaaggggaagagtgctggattcagagcccac

SEQ ID NO: 39375 - DNA, 120 bp, synthetic construct
  source 1..120: mol_type = other DNA
gtccgatcttagtagaaatggatatgcttacagatgtttgcatgatacgccagtatgcagaaatcaggaaactgccttttgggagcaagtagtcagctgaaagttctgtgaataatggct

SEQ ID NO: 39376 - DNA, 120 bp, synthetic construct
  source 1..120: mol_type = other DNA
cctgcatcaccagtggaaggctgtctgtcatccctgcctaggactttacatgagcaagatgtaaagttttattttgttaaatcactgtgatttgggagtttacctgttgctgtttatcct

SEQ ID NO: 39377 - DNA, 120 bp, synthetic construct
  source 1..120: mol_type = other DNA
tacctccaccaacaatgtgtgagtgtcatcaacatcacatgtaacaccattttcccctcacaatctattgagtaaaaaaatctcattttatagtagatttcctgattgagatagatgaca

SEQ ID NO: 39378 - DNA, 120 bp, synthetic construct
  source 1..120: mol_type = other DNA
acttaacaatcatctagtccgacatttcattttatatgtggggaaaccaatgtgcagaggaattaagtgacttctctaaggtcatgcagtgagtaggtggtaaattgggagaggaaccca

SEQ ID NO: 39379 - DNA, 120 bp, synthetic construct
  source 1..120: mol_type = other DNA
caaaaaaaggagaacaacaaaaaatccaataacagctgcacataccaccagttccgatggaaaaccataaggattctcatctggtctcatactctcaggtagtgctgccacaactctgcg

SEQ ID NO: 39380 - DNA, 120 bp, synthetic construct
  source 1..120: mol_type = other DNA
gtggttgcattttacagcttagtgtatattcatttatataaacattatcacagtcaattggtatcatctttattccagtctgagtgaagtatagcaaccttctgtcatattatgtctctt

SEQ ID NO: 39381 - DNA, 120 bp, synthetic construct
  source 1..120: mol_type = other DNA
aaaaatatagactattgtcctgttgcccaggctggagtgcagtggctattctcaggtgtagtcatagtacactatattctcaaagtctttgagctcaaacaatcctcctgcctcagcttc

SEQ ID NO: 39382 - DNA, 120 bp, synthetic construct
  source 1..120: mol_type = other DNA
tcgaactcctgagcctcacaaatagtaggaattcaagagtaaccacaaaattaattattgatttcaatatatttatgctgtatgaactatgaatggcataagacttgcagaataaggcaa

SEQ ID NO: 39383 - DNA, 120 bp, synthetic construct
  source 1..120: mol_type = other DNA
tcaatagattgtgaggggaaaatggtgttacatgtgatgttgatgacactcacacattgttggtggaggtataaattggcacacattttggatttaaaaaactgaaattatttacccaac

SEQ ID NO: 39384 - DNA, 120 bp, synthetic construct
  source 1..120: mol_type = other DNA
atctcgagagctcctaataccttagctttagagttactagcccttcctcattcctctcatcgccatagtaatgttaaataatgtattaggtaggataaacagcaacaggtaaactcccaa

SEQ ID NO: 39385 - DNA, 120 bp, synthetic construct
  source 1..120: mol_type = other DNA
ccatcttatgttagcttttgtctgtattactctcaaatgaactctgtggtcaaattctaaaagtactttaagcatagaagttataaatgttcaatgaaatcaaatgcccaatgctggaag

SEQ ID NO: 39386 - DNA, 120 bp, synthetic construct
  source 1..120: mol_type = other DNA
aacacaggtgagcgtgttctcacaccctgattacctgggcaagattttccttgggtttataccataaccccagcaggtcaaagaccacattgtaataaactcattagtttgtaaattgca

SEQ ID NO: 39387 - DNA, 120 bp, synthetic construct
  source 1..120: mol_type = other DNA
tcaatcagtagattaactgccaaatcaccaattatcggttcctatttatgacccattgtaaaataaagattgcaattagaacccatttgtagcacatccattagttccttctcaggaacc

SEQ ID NO: 39388 - DNA, 120 bp, synthetic construct
  source 1..120: mol_type = other DNA
cgtcacttcctggacgtgtggctccctcctggctctggcccatgtggttctcatcctaagactgcccttctctgggcctcatgaaatcaaccacttcttctgtgaaatcctgtctgtcct

SEQ ID NO: 39389 - DNA, 120 bp, synthetic construct
  source 1..120: mol_type = other DNA
actgacaatttctgttgtcagagagagtgaatccataaacattcagctggcaatctgaagcaattacacaacaaaatccactttccaacctgccctgagactgtgatggtcacttgtttc

SEQ ID NO: 39390 - DNA, 120 bp, synthetic construct
  source 1..120: mol_type = other DNA
agagatcatgaaatttccaaagatgaagaggaggagagatgaaaagcaattttcaatctctagccaaagataggcattgggctccagacagaaaagtacttaaagctgggggaaaaacaa

SEQ ID NO: 39391 - DNA, 120 bp, synthetic construct
  source 1..120: mol_type = other DNA
aatttattcaaggtcgccaaatcattcagtggtagaaacatgaatcaagaccaggcagtctgactgtaaataaattctgagccactctcttgcagaggacctcctgatattcatctcctg

SEQ ID NO: 39392 - DNA, 120 bp, synthetic construct
  source 1..120: mol_type = other DNA
aattctaagaacatatcctacagaaatattcccatatgcataaatatatacatgtacatatattttaagcagaagcaatacttgtaaattgataaataacctaatatcaatagtgaggtt

SEQ ID NO: 39393 - DNA, 120 bp, synthetic construct
  source 1..120: mol_type = other DNA
attttatctgaaatacaatccaaatagagcttcaagacaaatcccctagcccccatttcagtacaaacattctgaaactgctactgccctgattaccttctgagggacccagacaaagtc

SEQ ID NO: 39394 - DNA, 120 bp, synthetic construct
  source 1..120: mol_type = other DNA
aactttaaaaatagaaaagtcaatcggctagaggccgcagcgggtgaggaatctgctgccctggcctggatgtggagcgcgattccagaatatcacttgaagtcatttcatggaatacaa

SEQ ID NO: 39395 - DNA, 120 bp, synthetic construct
  source 1..120: mol_type = other DNA
gttagaagcacattagagtcacctgggaagcttttaccatccaggtgtccaggctccacccagcccaagcccaattacatcagaatctcccagggtgggacccagactccggtccatttt

SEQ ID NO: 39396 - DNA, 120 bp, synthetic construct
  source 1..120: mol_type = other DNA
attccatcgtctttcatgttagacatggttacacttggacttcggacaggtaagtctgctttctctgcaactcagctattaatctcagccttggtctatccaattctatcgctatcatat

SEQ ID NO: 39397 - DNA, 120 bp, synthetic construct
  source 1..120: mol_type = other DNA
aaggaatggctctctcaaggacctccaaagacgctctcgtggtattaagtttaaagtttcttagcatccctgaaacatattctaatgccatcttctgggtatcttggatatactctagcg

SEQ ID NO: 39398 - DNA, 120 bp, synthetic construct
  source 1..120: mol_type = other DNA
tcatgccagtgcctcctgacctaaaaacacctcgggaatcatctctggtgcttcctttccttcagccagcctcagttacgaggtgctgagaagggaggaaggcagtgaggagaagtgtgg

SEQ ID NO: 39399 - DNA, 120 bp, synthetic construct
  source 1..120: mol_type = other DNA
ctcatgacagtggtaaaaatattaaaacaagatacatgtccaacaacagaaaaataaattatgtacttcttaaatgtattttcacagaatatttaaccacaagagaaaaaaactagggtt

SEQ ID NO: 39400 - DNA, 120 bp, synthetic construct
  source 1..120: mol_type = other DNA
caggagtacaaggtatgggggcgggaggctggcttttttctccctgactgtaggcccatcgaccattaagcctttcctctgcagtgatacctaaccttcaaggaattaaaggcattggta

SEQ ID NO: 39401 - DNA, 120 bp, synthetic construct
  source 1..120: mol_type = other DNA
ggatcaagcagaggctctgaagatccagagacatcctggacattctctgacattctgactgtaaaaatatgccaccatgaattgaaaattgccaaagccacaataattggccatcctttt

SEQ ID NO: 39402 - DNA, 120 bp, synthetic construct
  source 1..120: mol_type = other DNA
ctcctcctcctccttagaagtgactagtattatgcagaaaacatttgggcaacacccatctcatttattccccaaaatttcagtcaattcccttacataaggtggcaggcaaataatgac

SEQ ID NO: 39403 - DNA, 120 bp, synthetic construct
  source 1..120: mol_type = other DNA
aaactgaatatcccagaagcaagttgccaagggctatgaaaacacaaccaagacgagtgaggacatcaaaggcgaaccggtgacttcaggtctcagcaaaggagagccagaggagcagca

SEQ ID NO: 39404 - DNA, 120 bp, synthetic construct
  source 1..120: mol_type = other DNA
cgtatacattaccctttattatgaatgaactgtgctccccctacctccagttcatacattaaagccctaactcccagtgtactataattggaaatagggcctttcaagaggtcatcacgg

SEQ ID NO: 39405 - DNA, 120 bp, synthetic construct
  source 1..120: mol_type = other DNA
agtctcctcatgggtaaagtgcaggtaattagtaccccactcagagagttggaaagattaaaggcagtctaaataatgtgcttagagcagtactggatacacagatgtgttcaatggaag

SEQ ID NO: 39406 - DNA, 120 bp, synthetic construct
  source 1..120: mol_type = other DNA
acactggttagtgaagtgcacaaggcaggtctaaccattctcaagaattcaggaaggaaactaggacataacgcaattgtgattcagatgtagggcactgctatggctagcattttttta

SEQ ID NO: 39407 - DNA, 120 bp, synthetic construct
  source 1..120: mol_type = other DNA
tagttcctcagcaagtcagtgctgcctttaggaaagactgtggaagagtcactgccgagctctgctcacagcccagggtagagtcacacactactctagggctcctgctgacttggtttc

SEQ ID NO: 39408 - DNA, 120 bp, synthetic construct
  source 1..120: mol_type = other DNA
aaaacggggtttctactgctttgtcttcttaaacgcttgtcttctgctgggctctgctccggcagttccatagagcctgtcacttaacacttgtatgttccttttagactgtattccacc

SEQ ID NO: 39409 - DNA, 120 bp, synthetic construct
  source 1..120: mol_type = other DNA
cggaaggaacagggtggaccgttactttggggaggagtgagtagagatcaagggttgttccttcttaaatagtaaagggtttgttgagtttactggttcacatgagaatttctgaacaca

SEQ ID NO: 39410 - DNA, 120 bp, synthetic construct
  source 1..120: mol_type = other DNA
atggccaagtggggtccgttgctgtcttatccaccacctgcaactgtgagtgtcttaatcgactcggtttagggacttttgttttcttcaacttgtctttgctttgaagttttaatatac

SEQ ID NO: 39411 - DNA, 120 bp, synthetic construct
  source 1..120: mol_type = other DNA
atcccacttccttgtatatatccaaaggaatttaagtcaatatgctgaagagatatctccaggctcatgttcattgcagcattattcacaatacccaaatatgaaatcaacacaggtgtc

SEQ ID NO: 39412 - DNA, 120 bp, synthetic construct
  source 1..120: mol_type = other DNA
acaggccgtgtgttacattgcaattattttcatcattcctttaagaaacaaaagatttagcttagatatcttccaatttgtgaatcttttctgattttgacttttttaaaaatgctgtca

SEQ ID NO: 39413 - DNA, 120 bp, synthetic construct
  source 1..120: mol_type = other DNA
aagaaatatggggaaggaatggttccaaagaccatactatgctcactccaccatcgcctctgacactatgctgacttcatgagccctgggtcagaagctgttttctttacacctctaggc

SEQ ID NO: 39414 - DNA, 120 bp, synthetic construct
  source 1..120: mol_type = other DNA
atttgtatgctggtgggagttttgttagatgtagactaagaaagtttacattatttaatgaaaaatacttgaccaatttaaaaaaaaataaaaatatcatgagatggaactaagcatctg

SEQ ID NO: 39415 - DNA, 120 bp, synthetic construct
  source 1..120: mol_type = other DNA
atctatggactcatgattacagatccaagtctcctcctattcaaatagaaagtcttcacaataattttgcattttctggtggattttcatttctgcttatggctctgaggtttggtgcct

SEQ ID NO: 39416 - DNA, 120 bp, synthetic construct
  source 1..120: mol_type = other DNA
gtcttccaccctcacctaagactgaatctgttcacaataaattccaagctacagatctgaaataaatgggctattcatgtaatactgagctcagagtgccttctgagggaggaagagtta

SEQ ID NO: 39417 - DNA, 120 bp, synthetic construct
  source 1..120: mol_type = other DNA
agcaactttaattctgtctgctgacattaattcttatctgctatgtaaagaagcataatcataggttctaggaattgggacatggacatctttgggaggccattattatgcctactacac

SEQ ID NO: 39418 - DNA, 120 bp, synthetic construct
  source 1..120: mol_type = other DNA
atattgccctcatttaactgtaccttcaaaaaggacctgtttttaagagcttttacatgaatcaaaattatgtctagatgtgaggaaatgctttgtgcaactcaactttgccattaaatg

SEQ ID NO: 39419 - DNA, 120 bp, synthetic construct
  source 1..120: mol_type = other DNA
gggtcctggaaccaatcccccatggatactgaggagcaattgtatttgtgttctgtttctaagcaaattgtcataagcttagtgacctaaaccaacacaaattatcttgctgttttgggg

SEQ ID NO: 39420 - DNA, 120 bp, synthetic construct
  source 1..120: mol_type = other DNA
ggaagagaaatgagcgagggacagcagcaataactgaagaactaatggctgaaaatctgctcaaagcaatgatattattccacatattcaaaaagctctgaaaacaccaagaggatgtgt

SEQ ID NO: 39421 - DNA, 120 bp, synthetic construct
  source 1..120: mol_type = other DNA
ggcaataacctctacaggctactttgtgccctgatgttacaggtatacctgctccttttggaacccagaactcctttcattgttaatctctgagggccaagaaacctttaacattttatt

SEQ ID NO: 39422 - DNA, 120 bp, synthetic construct
  source 1..120: mol_type = other DNA
atggctccactcttaaggcaggtaacaggatcgcctataccaccaaaaacacctaacagggaaaaaacacacaaaaagagcaaacagcgtgtaagaactcaaaactcatgttggaaaaac

SEQ ID NO: 39423 - DNA, 120 bp, synthetic construct
  source 1..120: mol_type = other DNA
gacacgttcaaggtcacctggctactaagtggcaaagatgcaatttgaaataaaatccccctctcttcaaagcccatgttcctaaccagcgccacacaatcatcatggtgtcctgataac

SEQ ID NO: 39424 - DNA, 120 bp, synthetic construct
  source 1..120: mol_type = other DNA
tgtaatgtgtttatgattcctccatgacctgcaatgacaaaacagcacacacggaaaggttttaggaaggcttttggtacacgtacaaggcttgtggaattcctcaaataactcatccct

SEQ ID NO: 39425 - DNA, 120 bp, synthetic construct
  source 1..120: mol_type = other DNA
ggtccaaagcactctgaaggatggagaaatactgactctgaattatatattctcaattagatcaatccttagatttcccagcccatcttacctggaacaggcaccaaaaacaggaagagc

SEQ ID NO: 39426 - DNA, 120 bp, synthetic construct
  source 1..120: mol_type = other DNA
acaggtgaacccctggtctaacctgttccttcatagactgggaggcatttttatggcaacaccactatttcataaaagttccttggtgaggaaaaatgccactttttcttgtcaactagt

SEQ ID NO: 39427 - DNA, 120 bp, synthetic construct
  source 1..120: mol_type = other DNA
cgggaatccagggtgtcaactcctcttcatcttgacatagtctaagatgaaggttggctcagccattctcctttgcagccattaatcttgtcacaaccaccattatataagttatacaaa

SEQ ID NO: 39428 - DNA, 120 bp, synthetic construct
  source 1..120: mol_type = other DNA
ggcttcatatgatctttgggatgtggttatctatgcctgcatgcagctaccttccatcttcatctctagtctggaccatttccccaatgttctcaaccaatctttacatcactttttctg

SEQ ID NO: 39429 - DNA, 120 bp, synthetic construct
  source 1..120: mol_type = other DNA
aaaaaaaacaagagtgagtttagaagaggttgcgagaggccaaaggcaagatgacaaatattcattgcaacttgagctgggaattgagactgtagccccaaagtgtacattctagtgggc

SEQ ID NO: 39430 - DNA, 120 bp, synthetic construct
  source 1..120: mol_type = other DNA
actacacgttatttggaaaggatccaaggtaaatgtggatggcatattttttctagcagtacagttactaatcaaatcattgtgaaattatagtttagaaaatttctgtatagtttggaa

SEQ ID NO: 39431 - DNA, 120 bp, synthetic construct
  source 1..120: mol_type = other DNA
caggaagaaaagattagaagcgcccattatttatgtcacacgaggtgcaatggggtggaattgactgagcctgcccacctgttccttgccccgcaaacctcaggcattgaagagaagaca

SEQ ID NO: 39432 - DNA, 120 bp, synthetic construct
  source 1..120: mol_type = other DNA
gctcacgcaaagaggcacgaggaaaaggcttttatagggtgaaaatggaagaaaggcaaattaaacatctaattggttaaggtggagtataagccttattcgaatcattccattcccttg

SEQ ID NO: 39433 - DNA, 120 bp, synthetic construct
  source 1..120: mol_type = other DNA
ctcatttctctacctattcatcttctttccacctccctctctcttttctttattttcttttgtttacttctttcatgtcaataggttagtaagcgccaacttactagactgagcacaagc

SEQ ID NO: 39434 - DNA, 120 bp, synthetic construct
  source 1..120: mol_type = other DNA
gctcccttctcctcgttctcctagctttaatattttgttttgcatttttttagattgttcattcaccagtgccgtacaaacaactgttgttcttccctcagtttcttaattaagaaatta

SEQ ID NO: 39435 - DNA, 120 bp, synthetic construct
  source 1..120: mol_type = other DNA
gttctccatgcatcatgaagccccctgtctgttccttcatggctcctgaatttctacattcctttattacacattctgtcctcagtagtcctagaaaaccaatagatattgaatgtgtgc

SEQ ID NO: 39436 - DNA, 120 bp, synthetic construct
  source 1..120: mol_type = other DNA
tcatgtaaaagtccaaaaatagctaagttgactaggtgcgggtagagggttctttttcaccaagttatgttgtgatttgggctgaaggtcaaccctgccatcctaaacagttgaccattt

SEQ ID NO: 39437 - DNA, 120 bp, synthetic construct
  source 1..120: mol_type = other DNA
ttgccagagctaaatacacgattccattggtgttctttgcacagtaaattgagaaggactagcatcatgttgtttatctttctacctaaaactgtgagactccgaaatcatatgccaggg

SEQ ID NO: 39438 - DNA, 120 bp, synthetic construct
  source 1..120: mol_type = other DNA
tggctctcaggacccccatcgcagtggtgtgaggcacgccccttgatgcgggtattaagagccttcccatcttacctcctggctcttaggacccccatcgcagggggtgaggcacgcccc

SEQ ID NO: 39439 - DNA, 120 bp, synthetic construct
  source 1..120: mol_type = other DNA
agggaaaatgcagaacagaaaaatcctctgattgaaacagataactttacatattttcctccagcatagttttcagaataagaaaattagcaccatgaagacaagtggcaataccagaag

SEQ ID NO: 39440 - DNA, 120 bp, synthetic construct
  source 1..120: mol_type = other DNA
tggcacagagggcccaatgtcctacatctgtttaaagccagagctatgactttagaactcaattcacctgagtgccagtccaaccattccattccatctgttttatctgtgtattcaatg

SEQ ID NO: 39441 - DNA, 120 bp, synthetic construct
  source 1..120: mol_type = other DNA
gtcaatgtccatgctttatatttttacctcttcgttttacctacctttatcatagtggacagaacaatttcttacaagtggttagcacacattcaatatctattggttttctaggactac

SEQ ID NO: 39442 - DNA, 120 bp, synthetic construct
  source 1..120: mol_type = other DNA
tgtgtcggagctcaggaaaagattttcagtgactggtttgccttggaaccttcaactttgtaaaagttgagctttcatctcaaaagacagatcctgagcagactgtcatctctacttcta

SEQ ID NO: 39443 - DNA, 120 bp, synthetic construct
  source 1..120: mol_type = other DNA
atacttttgtaagatcttttgtaaaacttctctttcactcatgattttagtaatatgagtattctctttttttcttagtcagtctagttagaggcttgccaattttgttgatcatttcaa

SEQ ID NO: 39444 - DNA, 120 bp, synthetic construct
  source 1..120: mol_type = other DNA
ctttcagtctctttgtttccatgaatctaaagtgtaaagaaagtgttcctggaccaaacggagagttgggctgctatttctcacagcccaataacaagatgcaaataaactcgggaggaa

SEQ ID NO: 39445 - DNA, 120 bp, synthetic construct
  source 1..120: mol_type = other DNA
gctgctgagggagctttccaggaaatgtctagaaatggggaacatgtcaaagaccaccaaaaaaaaagggacagttcgtacgtatgattacaaagaatattttcaagaatcagcccagat

SEQ ID NO: 39446 - DNA, 120 bp, synthetic construct
  source 1..120: mol_type = other DNA
ggaattaacactgtataaaacactcccaacttcacatgtgacatagcataacaggagacagtagatcacagagttgcaatctttattctgtttctcaaggccagcattccaggtaaccag

SEQ ID NO: 39447 - DNA, 120 bp, synthetic construct
  source 1..120: mol_type = other DNA
ttactgcatattttaaattcattaaggacatgaatattggcccagatgggtggcttatgtctattatcgtagcttttgggagcctaaggcaggtagattgcttgagcccaggtgtctagg

SEQ ID NO: 39448 - DNA, 120 bp, synthetic construct
  source 1..120: mol_type = other DNA
ggctccttccctcgtgtagccaagaatgcattttttgatgagaaatgcaacaaacttaaagggacatgcaagaacaattgcgggaaaaatgaagaacttattgctctctgccagaagtct

SEQ ID NO: 39449 - DNA, 120 bp, synthetic construct
  source 1..120: mol_type = other DNA
atatggctcgagtaaaattgtttttcctgcagaggaggaggctttggttatggggaatcctctggacatgtttcacaatatcactcttcccttctcctttcagggcaatgagggcttcca

SEQ ID NO: 39450 - DNA, 120 bp, synthetic construct
  source 1..120: mol_type = other DNA
ggccatgtctgctggtgtaggacagtctttgccctggggttccccactggcaatgctgaaattttctgcactgtagtctgaggctcccccgactccaaaccttttcacaggtgttaattg

SEQ ID NO: 39451 - DNA, 120 bp, synthetic construct
  source 1..120: mol_type = other DNA
tgaaagacataaaaccctggtgcgaggattagcagcccgtttctgctttgtagaaaaggaacagatgcaacaggggagaaggacttaaggctaagatgaaattaggactcttgggccccg

SEQ ID NO: 39452 - DNA, 120 bp, synthetic construct
  source 1..120: mol_type = other DNA
ggccacagtggaaaagcatgagtctgaaaaagtggcccaagatcagatcacgattgctttggagaccaagtaaggggcttggagagatttaataaagaaaacaatagtaaacttgtaggg

SEQ ID NO: 39453 - DNA, 120 bp, synthetic construct
  source 1..120: mol_type = other DNA
tgccttgtttagaatacactatatttcaaaacatagacctctgaggagaaaaacaaaagaggtgatgtgtgatgacaagcttgggaacccattggagcttaaggggttgatcaagtgggc

SEQ ID NO: 39454 - DNA, 120 bp, synthetic construct
  source 1..120: mol_type = other DNA
gcccctaggtctcaacactgcaattacaggaaaagaagaaactactgaaccacccccaaggatgccacactccaaatgcaacatacagaacacgctataagacaatgtgacatttatttt

SEQ ID NO: 39455 - DNA, 120 bp, synthetic construct
  source 1..120: mol_type = other DNA
gcactacaaacacaatcagaaacccaataacattgctacttatcttctatctccaaaggatggatacagatctgaagtctgtagttcataatgaatgatcagtaaccctttgaaatgtgc

SEQ ID NO: 39456 - DNA, 120 bp, synthetic construct
  source 1..120: mol_type = other DNA
ttcttcttatgtctgtgaccaccatgaactcctgctcttccccaaacaaatctgttgcctttccctttaactttgagcacccctttgtttatttacatggactccattctgttaatagtg

SEQ ID NO: 39457 - DNA, 120 bp, synthetic construct
  source 1..120: mol_type = other DNA
ggtcttacagactggttagcatgttacaatctcagacttaagaataagaaaatctgcataggaatctttgcttcgctcttctgtgagtctcctccagagaaactttcactgggtcattta

SEQ ID NO: 39458 - DNA, 120 bp, synthetic construct
  source 1..120: mol_type = other DNA
ttcttccaacatccaattatcagaatttgatgcagtaagtgattaaagaaacttatcatgggccagttgtcacctatctccgcagtgttgccctgtgctcttggaattggaagacttcct

SEQ ID NO: 39459 - DNA, 120 bp, synthetic construct
  source 1..120: mol_type = other DNA
ccaacaggatagaatcgacatggcagtttatttatgtccctgttctcatgaacattagggggcttttgagaagcgtttgaggacattggcaactttatgatagttatgtttgttctgccc

SEQ ID NO: 39460 - DNA, 120 bp, synthetic construct
  source 1..120: mol_type = other DNA
acgtgtgtttccacttgcacaggatcgtctcaagccagacatgtgaaccactcagccactgaggctctcggagaactcagggaaagagcccctgggcaaggcacaaacgggtttcagctg

SEQ ID NO: 39461 - DNA, 120 bp, synthetic construct
  source 1..120: mol_type = other DNA
atcctacccaacctcccatccctttctaattggcccacagttccaaaggactcattcatctggatctcctcccaagggaagggaaaaagaaaactcaattattacacaacaaatataaac

SEQ ID NO: 39462 - DNA, 120 bp, synthetic construct
  source 1..120: mol_type = other DNA
ttctctttgtgctaaacctggaagaataccctctggaagtcctcttgtgcccctttaaaactacccatttgttctctgtggccttagaagacacaaaatgcagagacccatttataaccc

SEQ ID NO: 39463 - DNA, 120 bp, synthetic construct
  source 1..120: mol_type = other DNA
tctactgttcaccctgcccctttggctcccagatacagacccagaagtcaaccctcaggcagcagatgggaaaatgggtagataaaccccttgcaggtagaaaccgggaggtgggcattt

SEQ ID NO: 39464 - DNA, 120 bp, synthetic construct
  source 1..120: mol_type = other DNA
cggccaggttaccgctttattcttatccatgtacatgtgctccttttatatctaaccttacatattctttcctccatcaattatcttccctttctctggaatgcctcctgcttaaacccc

SEQ ID NO: 39465 - DNA, 120 bp, synthetic construct
  source 1..120: mol_type = other DNA
gtaagaatcaggatcctggggctcagcataggaaagaaactaggtacacagagccctttacagaatgccacctttccaggctttttttctgaacaaagatgttccttaatcaacttatgt

SEQ ID NO: 39466 - DNA, 120 bp, synthetic construct
  source 1..120: mol_type = other DNA
gagggaaggcggtgcaggctcctggagtcctcagtggtgagctctggagttgctctgttccctttttaatttttgtttactttttggctgttttttctttttctttttttcaatgtaaag

SEQ ID NO: 39467 - DNA, 120 bp, synthetic construct
  source 1..120: mol_type = other DNA
atgatcctcagtgcgaggacaaataaaagtagtgattatgtccaccccatcctgccctccgtccagatctgttttcaacttgaggattcatctgccttgtccttgctaagacaccttcag

SEQ ID NO: 39468 - DNA, 120 bp, synthetic construct
  source 1..120: mol_type = other DNA
gtctccacactgagcatctgcctctgacagcatgacatgtgcaccttctgtccctccctcatggaatcatagacagaaaagggacccaggatgtcactaaattgaagccatgccccaatg

SEQ ID NO: 39469 - DNA, 120 bp, synthetic construct
  source 1..120: mol_type = other DNA
tctcatgttgtaaatcatttgttgtctttgcattagctgctactgttctctccctatttccttgctcttctggaagtatttcttctttgtgatattcatcctgagcatcctaggagatac

SEQ ID NO: 39470 - DNA, 120 bp, synthetic construct
  source 1..120: mol_type = other DNA
ggagcatcaactggcctttccccatttgggaaatgcagataagtgtatcaacattattaaattactgcatgattcaaatgaaataaatgcaagtaaattgcttagcacagtgtctagaac

SEQ ID NO: 39471 - DNA, 120 bp, synthetic construct
  source 1..120: mol_type = other DNA
ttcacaccattaactcatagggctttcactgtgacctaaacaggaaatgtactgctctctgtgctttgttgctgagttacagatgctcacagagcttaggtaatttattcaggtaaaccc

SEQ ID NO: 39472 - DNA, 120 bp, synthetic construct
  source 1..120: mol_type = other DNA
aatgccatcgttatgtctgacatagtaagactgtgaagtcagcacccatcccacccacactcacctccttcccccatttataaatatctccaattgctttgtctcaaatcatgaactaaa

SEQ ID NO: 39473 - DNA, 120 bp, synthetic construct
  source 1..120: mol_type = other DNA
ggtgcctgttccaggtaagatgggctgggaaatctaaggattgatctaattgagaatatataattcagagtcagtatttctccatccttcagagtgctttggaccaagcaggtttgttgt

SEQ ID NO: 39474 - DNA, 120 bp, synthetic construct
  source 1..120: mol_type = other DNA
tggaatttacaaaactatcaatacagagagtcatctggaaaaatctccatatattgggacatcaatgaacatgtatctaaatggtccagaggagaaatcacaagatactttagaaaatat

SEQ ID NO: 39475 - DNA, 120 bp, synthetic construct
  source 1..120: mol_type = other DNA
tgaacccttgccataagtgccccatgtggtctcttcactgttctccatcacaactttggctttcagatgactttagcttcgctattcctttattttgtcccggcatgtattgaaagagaa

SEQ ID NO: 39476 - DNA, 120 bp, synthetic construct
  source 1..120: mol_type = other DNA
tgaagtggatgcccttggagctgacgtaggccaaattgattgatcagccaaggaagcactgaaatatggaataactgaacagctgcatagctgagaaaaacacagcatgtacaacaaatt

SEQ ID NO: 39477 - DNA, 120 bp, synthetic construct
  source 1..120: mol_type = other DNA
ctccaggcttgttgcatcccatttttgactgtgagtcatgcttctgcctgtgctgttctatccaattagttgcttctattttgattgagtaacagtgaaaacaaaacaaaacaaaatgtg

SEQ ID NO: 39478 - DNA, 120 bp, synthetic construct
  source 1..120: mol_type = other DNA
ctaccctaaagaaacagaagcttaacatttcctctaacaggtcacctaattaaaacccaaacctccctttgccaatataaccccaaatttcaaactcagagatgaaaatacacaagggct

SEQ ID NO: 39479 - DNA, 120 bp, synthetic construct
  source 1..120: mol_type = other DNA
cttgtcttggcaaaagagagacaaattcccatcttattactccaaagttctatgttagtagactataacagcaactcaaattctgggcattttagatgtacagaattagaaaaatgatca

SEQ ID NO: 39480 - DNA, 120 bp, synthetic construct
  source 1..120: mol_type = other DNA
cttatgataggcattatgccttttacagaggaggctttaaaagggtaaataagctccctaagaagacaatgagaaacagaccaaggattagaacccaagcagattccaaggtctgtgatc

SEQ ID NO: 39481 - DNA, 120 bp, synthetic construct
  source 1..120: mol_type = other DNA
aacacaaatttcacctattgttcaggatatctttttgagaaaggtttttgttaaagaaaatttcagatacaaacataaagaaaattaaacaatcaatccccatattcccagctctcaata

SEQ ID NO: 39482 - DNA, 120 bp, synthetic construct
  source 1..120: mol_type = other DNA
aattttatacctagccaagtaatccttcaagtaatataaaaacaaaagacaaatattttgaatcaatgaagtgtataagaacccaaagaatgcatgcagtacctgtaacttgaaaagact

SEQ ID NO: 39483 - DNA, 120 bp, synthetic construct
  source 1..120: mol_type = other DNA
aatctactgacgaaagccccacgtgtcgggcattttacagacgggacatcctttaatggcaacaggtaggtggttccggccctgtttcacaggtgacaggtatttctccattttcaggtg

SEQ ID NO: 39484 - DNA, 120 bp, synthetic construct
  source 1..120: mol_type = other DNA
cctgtagagtgttatccctctttcaaacatgaggcaccaagagttaagttacttgtccaggttaggtcataaaaatctatctgatgcacaagtagaatgttttactactatcctgatgcc

SEQ ID NO: 39485 - DNA, 120 bp, synthetic construct
  source 1..120: mol_type = other DNA
taaatcactcaccattaaaacaatcctggaccctcaaagggttaggtaccactgtgccaattaccacagtgctaatattcagaggaagatctgaagctgagaagcttaaacttttttccc

SEQ ID NO: 39486 - DNA, 120 bp, synthetic construct
  source 1..120: mol_type = other DNA
gttttgaagaatgggcgggtggtggcctgacatggccatgggggagtagggtggtggtagaaagaatggtggaagctgtgcacattctagatattttaggagattggtgactggatgtga

SEQ ID NO: 39487 - DNA, 120 bp, synthetic construct
  source 1..120: mol_type = other DNA
atttgttctttgcctctttgaattgagtcaacatgtaaactttagtggactcatgcagaagtctggacctcaggcttaagaaacaaatctggtgtccccagaaccacatcactgcttggt

SEQ ID NO: 39488 - DNA, 120 bp, synthetic construct
  source 1..120: mol_type = other DNA
ttgtcttatttcttcacttttgtgaatggacacagcagctgtgcgtattcatttcatggattctaggttaacttgtacagaaaggccatcatactgttctttgaaatgcacatgttttag

SEQ ID NO: 39489 - DNA, 120 bp, synthetic construct
  source 1..120: mol_type = other DNA
gatttattgaatatttttaaaaagctagaagattttgaatgttcacaattcaaagaaatgaaaaatgattgaagtagtaagaagtagtaaatatgctagttagcttgatcattatgcact

SEQ ID NO: 39490 - DNA, 120 bp, synthetic construct
  source 1..120: mol_type = other DNA
accttttgaaattgtcaacggcatgtatatttgcctggttcttcaataaaaattccaccatatgctgtctcctggaatttatagcaaacaaaagtggagtgtttccctcctgtaagaaag

SEQ ID NO: 39491 - DNA, 120 bp, synthetic construct
  source 1..120: mol_type = other DNA
ctcagtcccaacccacagagcttgattctctcctttctttttattattagttccacttttccaaatccagtggagagccttctatgatgggaagtctcagaagagaccagaacatcatcc

SEQ ID NO: 39492 - DNA, 120 bp, synthetic construct
  source 1..120: mol_type = other DNA
ccatttaaacaagagtgggaggaagcacacagagctccctgagcaagacagagagagccatgcggttcctgagtgcagcatgctgcggctgggctggggcagagagggagagccggtcct

SEQ ID NO: 39493 - DNA, 120 bp, synthetic construct
  source 1..120: mol_type = other DNA
atgcagacagagaattgaaaaggaggcaaagtggcgtgtgtgagggagccatcagtggtgccgtgagccaggagactctgacattccaaccccttagacaggcctagaggggcctagtgt

SEQ ID NO: 39494 - DNA, 120 bp, synthetic construct
  source 1..120: mol_type = other DNA
tattgttctctttgcctggatttgggaatagaaactgcttcactggctaagtaaatcataactgtcccaaaatattcttaattactgatttcaataaacatatcccttcgttctaagaac

SEQ ID NO: 39495 - DNA, 120 bp, synthetic construct
  source 1..120: mol_type = other DNA
gtttcttaatttctccgagttacttatttctagtctggaaaacggagaattccatagtgtcttcttcagtgagtgctgggagtgctaaaggaggatccggtgcctggcagaccaggagca

SEQ ID NO: 39496 - DNA, 120 bp, synthetic construct
  source 1..120: mol_type = other DNA
aagagaaggaagataattgggagggtgccaagaaagcctagagaaagtcccttctgggttcagcggccggctgtagccgctctcccaggacgtttgttgacaataaatgaatgaaggtcg

SEQ ID NO: 39497 - DNA, 120 bp, synthetic construct
  source 1..120: mol_type = other DNA
gctacctgaaggtgaaactccaagtcaatttttatttaaataagccatgcttatatcagacctttccttaaacaattcaacatacttaaaaacagactgcctatagaacccccaggctgc

SEQ ID NO: 39498 - DNA, 120 bp, synthetic construct
  source 1..120: mol_type = other DNA
aagacagaagtagaaaggaaaaacaaaaattgatatactgaatatagaggtgggaaatgattgcatactataattcttattagtgaaataaagcactaaaggatacaatatgtaaaggga

SEQ ID NO: 39499 - DNA, 120 bp, synthetic construct
  source 1..120: mol_type = other DNA
gatttgttattaataggaatagcttttttaaagtaccttgatctttgtgtttctaagatttgtcctagtccatttatggatctgaaataaataataaatgaggaagacaaagtttaaaag

SEQ ID NO: 39500 - DNA, 120 bp, synthetic construct
  source 1..120: mol_type = other DNA
ggttacagatgtaacactattttagtttttaaaaaattattgcataatgtcagtctatttattgttctggccttttccaagctaactgttttctgactgaattgtttcaacagattgtgc

SEQ ID NO: 39501 - DNA, 120 bp, synthetic construct
  source 1..120: mol_type = other DNA
tgcatgcagtacctgtaacttgaaaagactgcctgacaatgaaattcaatcaggagatggactaactcgggaatggagaagcaacagtactggtaatgagcaccaaaactattaaaacat

SEQ ID NO: 39502 - DNA, 120 bp, synthetic construct
  source 1..120: mol_type = other DNA
acccattgtgagaaacaggttgactctgtgtagctttccatagtagagtttagagtttcttgtcatgattaccttatcaatgcagtataataactacttacacagcacttacattgtatt

SEQ ID NO: 39503 - DNA, 120 bp, synthetic construct
  source 1..120: mol_type = other DNA
acctaagttcattaatcatatttgctggtgcatgacactctcatcactaatccatagatagcccttctttctaatataaatttatagtgaactcctttgacctcattcctaacataaaag

SEQ ID NO: 39504 - DNA, 120 bp, synthetic construct
  source 1..120: mol_type = other DNA
attatggtaagtgaaaaaagctattcacaaaagaccacatgttgtatgattccatttatataaaataaccaaaataggcaaatctatagagacagaaagtacattaatggttcccaggag

SEQ ID NO: 39505 - DNA, 120 bp, synthetic construct
  source 1..120: mol_type = other DNA
aatgacaacagagtatttagaaaattgcataaacttagtggataaagcagtggcagggtttgagaggattgtctccgatttgaaggaagctctactgtgggtaaaatgctgtcaaacagc

SEQ ID NO: 39506 - DNA, 120 bp, synthetic construct
  source 1..120: mol_type = other DNA
tctcgtatgggttacctctcatcttgggagttaatgatgcccggtcccctctgcgttagattcccatttctcaagtgagatggaaagttagcctttgaaacaaggctttgaagctaagac

SEQ ID NO: 39507 - DNA, 120 bp, synthetic construct
  source 1..120: mol_type = other DNA
ataccctaatactccgtaaaatcttcctagttgtaggaagatctagttatatactagaaaactttatttcagaagacatgtatagcctacatgtaaaagtttttagcagcactgtaatag

SEQ ID NO: 39508 - DNA, 120 bp, synthetic construct
  source 1..120: mol_type = other DNA
ttcttttctttctttctcttttttcggtccggcttctttctttatttctgcagaaaaggacaccctatagcccttcatgaagttaggtctacagtggtgttatttcagagagttcctttg

SEQ ID NO: 39509 - DNA, 120 bp, synthetic construct
  source 1..120: mol_type = other DNA
cagctgtaaatattggcaggctctcatttggggtgattttcatttatttttatatttgatactttctgactgcctggaagtagtaaaacgttagtctaccactgttagctttgagtgaag

SEQ ID NO: 39510 - DNA, 120 bp, synthetic construct
  source 1..120: mol_type = other DNA
agtcattggggggaaacagaagcaaacaaacaaaaaggcaacataatagatattaatattaatacaagaattttaaaagcacagagttctataataataggaaaatagagggaatgattg

SEQ ID NO: 39511 - DNA, 120 bp, synthetic construct
  source 1..120: mol_type = other DNA
gataggtgaactgtgtcattttaataagcataatgtaatcacgtcatattttgttttgtttgcaggcagaaatttagataaggatatccttaaacagctgtttatagctactgtgacaga

SEQ ID NO: 39512 - DNA, 120 bp, synthetic construct
  source 1..120: mol_type = other DNA
aggtctctgtgtgagggaccatggactatatgaagtccctgtgtgaggaccctgtgtgaggaccctgtgaaagccctacagaatctctgtgtggaatgtttgagggaattctatgtgaga

SEQ ID NO: 39513 - DNA, 120 bp, synthetic construct
  source 1..120: mol_type = other DNA
ggatcaagccctcgttggtctggcccaagttcctgcccatgtgggctttcaggatgttttctatatgagtcctctctgtgcatcttaataaatcacttcccgagtcactcctcaagggct

SEQ ID NO: 39514 - DNA, 120 bp, synthetic construct
  source 1..120: mol_type = other DNA
actctgcttttccttgctctccatgggtcacaccaactgcctagtcagtcccaatgagggaatctggatacctcagttagaaatgcagaattcactcgctgtttatgtttgtctcagtgg

SEQ ID NO: 39515 - DNA, 120 bp, synthetic construct
  source 1..120: mol_type = other DNA
gcattgtacacaggctgattttatgtggcataaaagatttcacaaaggctttaaaattatgttcattttacttgatgggtgtgtgttcaattaaaaaaaaaagtccctgtgattgcatat

SEQ ID NO: 39516 - DNA, 120 bp, synthetic construct
  source 1..120: mol_type = other DNA
tacaaagccatattctatagtatcaaaagagggagaacaggcataacgggtagagagcctaattagggaactgacgaggttattctataaaggaacctgggatgtgtgacttagaattac

SEQ ID NO: 39517 - DNA, 120 bp, synthetic construct
  source 1..120: mol_type = other DNA
accactaaagaagttaaccaacaccacctgttccccagtaacctatggaaagaaagaaatgtctcatatgtttctgcctaaattggtctttaatactttagcgattctcttgagtttgga

SEQ ID NO: 39518 - DNA, 120 bp, synthetic construct
  source 1..120: mol_type = other DNA
caccgctccgaggtaggggaagaagggttataaaggggggagtccaccacacatggtcttgaagaagcttttataaaaggcaaaggcatctttgccggacgttgttgcaaaggagtagaa

SEQ ID NO: 39519 - DNA, 120 bp, synthetic construct
  source 1..120: mol_type = other DNA
ctgactagagcactctgcttcacagaggggcgttctgcgcgttcttcctccctggtgtgattttcgttctttttcctctcatggtccccaagaacccaggcacccctcgacgtaggtgcc

SEQ ID NO: 39520 - DNA, 120 bp, synthetic construct
  source 1..120: mol_type = other DNA
gcagcctcctggggccacaccttgaaaaaggtgactttggtcagctctctggtccagacccgccaggtgaggtgggcaaaagaacacctgatggagcctcccggtcctctcatgagccta

SEQ ID NO: 39521 - DNA, 120 bp, synthetic construct
  source 1..120: mol_type = other DNA
tcttagctcagccaacatgtgaagcacagagtccccatcccactgcctctccctttctcgcactctggagtggtggtggggatagaccttccagctctgtgcatgtgtaggtggggggcg

SEQ ID NO: 39522 - DNA, 120 bp, synthetic construct
  source 1..120: mol_type = other DNA
tccctcttcttccaggtcccgcgtttccagtgtcagccagcagggaggccccgtcctcccttccctatgtgtctcctgggcagaaatttgtggtggattgggacagggatggtgcttccc

SEQ ID NO: 39523 - DNA, 120 bp, synthetic construct
  source 1..120: mol_type = other DNA
atttcactgcagcctgcacaaaaaacaaaataaataaaaataacacacaaacacacacgcacacacacagggattttcaatatgaggtccaccatggacgccatcagtccctgttcctct

SEQ ID NO: 39524 - DNA, 120 bp, synthetic construct
  source 1..120: mol_type = other DNA
tcctgagacttcccatcgcagaagtctccactggatttggaaaggtggaactaataataaaaagaaagaagagaatcaagctctgtgggtctggactgagagctccttacctttctcttc

SEQ ID NO: 39525 - DNA, 120 bp, synthetic construct
  source 1..120: mol_type = other DNA
cagtagccaaaaagtgaaaacaacccaaatgttcatcacctgatgaatgaataagtttcaggatatccaccaatggaatattattcagcaataaaaaggtttgatgtaatgatagatgct

SEQ ID NO: 39526 - DNA, 120 bp, synthetic construct
  source 1..120: mol_type = other DNA
aagcaaaagctgagcccagaggacagggcccgtttcccctgaggctgctgtctgtctgtcttcacggacggttctgcccaggagcaaaggcagtcaggccagagaggggtctcatggtgt

SEQ ID NO: 39527 - DNA, 120 bp, synthetic construct
  source 1..120: mol_type = other DNA
agaagggcagaattcttgtttgcttcctcccttgtcaagttagtcagtcaatgctttctcaagatgctcacacatggctttgatacaggatttgaatgagtctttttctgagccactgat

SEQ ID NO: 39528 - DNA, 120 bp, synthetic construct
  source 1..120: mol_type = other DNA
atgagccaccatgcccagcccaattatgaccttctttaatctgcaatctccacacagacaccaccaacccacacaggtgaatacatattagattctcacgaattaaatacgcaacaaatt

SEQ ID NO: 39529 - DNA, 120 bp, synthetic construct
  source 1..120: mol_type = other DNA
cctttggctaatttgattgtctctcctcctggggtctaggacttcaaacacatacagaagcgattgcagaattgaaacaagacacttccacaatatactttttgtatcagtggctcagaa

SEQ ID NO: 39530 - DNA, 120 bp, synthetic construct
  source 1..120: mol_type = other DNA
atacttgctaaatctggccactatgttctttcatgtatttttaattttaaaaaacagtccaacatctcattctagcaatttacctacagaaataaagagaggaaccacattactgggaca

SEQ ID NO: 39531 - DNA, 120 bp, synthetic construct
  source 1..120: mol_type = other DNA
caacgtctttgtccagatgaggacagaagtggggcctgtgaagccccctcaggcacagaccttgatcctaactcaggcccccctcgtctggcaggctccaggcaccctctgtggaggtgt

SEQ ID NO: 39532 - DNA, 120 bp, synthetic construct
  source 1..120: mol_type = other DNA
tggaactggttgcatccccccttggagcggagtcccggtgcactggggaccctgattcttggagtgtagccgccccgggctcacaggcctttgccttggctcctgtgggaatgtgggaag

SEQ ID NO: 39533 - DNA, 120 bp, synthetic construct
  source 1..120: mol_type = other DNA
agatgcagattcagaaatcgcagtggatgaaggggccccagagcctgcctcctccagccccgccgaggcttgaacctcgaggaccccctgcccctgaggtggtcaagcagccaggtacag

SEQ ID NO: 39534 - DNA, 120 bp, synthetic construct
  source 1..120: mol_type = other DNA
agctactcagtagtatgtgtatttccatggatttgagtgtctgtgtatgtgactgtgtgtgtctgtgtgttgctgtgtgtttgtgtctgtgatttgttactgtgtctttgtgtgtctgtg

SEQ ID NO: 39535 - DNA, 120 bp, synthetic construct
  source 1..120: mol_type = other DNA
aggaccacagacccacctgccccggcctggggaccaaggacgccttgggtctccctggagagtctcctgtcaaggagtcacatgggctggctaaggggtcaagtgaggagacggaactcc

SEQ ID NO: 39536 - DNA, 120 bp, synthetic construct
  source 1..120: mol_type = other DNA
catcattatcagtatccctggaaaatcctgggatggagagagctggctggctttttttctgctcggtgggagctgaggagaaggcagctgcctgcaacatggacatggggagaggcggct

SEQ ID NO: 39537 - DNA, 120 bp, synthetic construct
  source 1..120: mol_type = other DNA
tgtggtcatggtgctgggagttggcccagcagcagaagctgatggggcaaagctctctggtatatggcggcctggtccctctgccaagtgacaaagggagccatgtttgggttctctctg

SEQ ID NO: 39538 - DNA, 120 bp, synthetic construct
  source 1..120: mol_type = other DNA
ctgagtgccagggtcagagtagaatctgggccacccatggtgggctcacggccttggcctgctccagatcacagggacctggtacgtgaaggccatggtggtcgataaggactttccgga

SEQ ID NO: 39539 - DNA, 120 bp, synthetic construct
  source 1..120: mol_type = other DNA
gaaggagatactcacctagggcgggaaaaactctgcaggaaaaactttatgacatttatgttgaagaatgtggaaaagagcctgaggatcctcaggaattgagaagcaatgtaaacttgt

SEQ ID NO: 39540 - DNA, 120 bp, synthetic construct
  source 1..120: mol_type = other DNA
ttgttctagtatgtatcaactgcaaaaaacatatattccacgaaaaggttttgaagacacatgggagtggaatgtgcccacatttagagcagagcttttacaggaccacctgtctccagc

SEQ ID NO: 39541 - DNA, 120 bp, synthetic construct
  source 1..120: mol_type = other DNA
tagctgaggctacaggcacgtgccactatgcccaactaattttattttatattttgtagatatgtgggtctctctatgttgcccaggctagtgttgagcgcctcacctcaagcaatcctc

SEQ ID NO: 39542 - DNA, 120 bp, synthetic construct
  source 1..120: mol_type = other DNA
aaaaattctgatgtattctctttcagttgaacgtcctcagatgactttcggcagcctccagagaatcttcccgaaggtgagtgtctctcaaatctaaaggaccagagaacgtttgtccct

SEQ ID NO: 39543 - DNA, 120 bp, synthetic construct
  source 1..120: mol_type = other DNA
tacaagctcagagagcactttcttgtagcctattttacatgtactgttgactatttcgtaagtgaggaagctgaataaaaagtagcttaagggctgggcgcagtgtctcacgactgtaat

SEQ ID NO: 39544 - DNA, 120 bp, synthetic construct
  source 1..120: mol_type = other DNA
aatgattttcaagttcaagggctgggacggtccatttgggagtatgtggaaggagacacagatgaaatcgtcatctggggaacgtggaggaatgaggaagatgcgtgcactgtagaccgt

SEQ ID NO: 39545 - DNA, 120 bp, synthetic construct
  source 1..120: mol_type = other DNA
gctactagatattgagtgccttatcctccatgcaaatacagcagaggataccctaaaagagatactgaagcttttgatttttctttctccctgggatgatgggatccataagttgggtcc

SEQ ID NO: 39546 - DNA, 120 bp, synthetic construct
  source 1..120: mol_type = other DNA
ctccagcctgggcgacagactgtgatcctgtctcaaaaataacacgaaaaagtaatgtatcagaacttggtgtaacttcagccctttacagtgataatcgaggagaaaaacacatttgtg

SEQ ID NO: 39547 - DNA, 120 bp, synthetic construct
  source 1..120: mol_type = other DNA
actccgtctctcatctaacatataggcataaagatgatagtgtcctccttccaaggctggggagaaccgggaggacttgatgtctccattcacacacaatggttggttcgaaaatagact

SEQ ID NO: 39548 - DNA, 120 bp, synthetic construct
  source 1..120: mol_type = other DNA
gagaaaagcagatgggagatgcttatactggtacttggtgtgtgtgtgtgcgtgtgtggtgtgtgtgtaaatgcagaggaaaaaatcggaaattaaacactcagacctcccctcagtagt

SEQ ID NO: 39549 - DNA, 120 bp, synthetic construct
  source 1..120: mol_type = other DNA
ccagcaaaaagagtgtgactcactgaaggctcagaagattgttagcattttttatcgatgaattattttaaaataaaggtatgtgcattttcagacttaatgctattgcacacttagtag

SEQ ID NO: 39550 - DNA, 120 bp, synthetic construct
  source 1..120: mol_type = other DNA
gggggcttcccggatgccccaggtgcacacaaggccatcaaggagctcacagtagggaggggccaacagtcaaagcgattcctaagccatgtgagtggccccggtaacagagcagaggcc

SEQ ID NO: 39551 - DNA, 120 bp, synthetic construct
  source 1..120: mol_type = other DNA
ttaaaaaaaaaaaaagagagagagagagagagagacaagccaagagaaggaagggagggtgtgcgtgttgggtgtgggggtgccgggatgccacagagacagttgggctcatcagaaaag

SEQ ID NO: 39552 - DNA, 120 bp, synthetic construct
  source 1..120: mol_type = other DNA
gtaacttctctgatatttgagcatcatccctgggtctccttgcaaaggcgtcgtctccgttcatggcactgggagcagtctcacctgcgagagaaacagcctgagtctttccagcctcag

SEQ ID NO: 39553 - DNA, 120 bp, synthetic construct
  source 1..120: mol_type = other DNA
tccaaactagcacatttgcggaggtttgctgtacttagtcgtggagttcattcttcagtggcttctacatctgttggaactaaaaaaacagtccaaggccctccaacctcttttattctt

SEQ ID NO: 39554 - DNA, 120 bp, synthetic construct
  source 1..120: mol_type = other DNA
aaagaaaagaaccagctgagtctccgtaagaacagtaagctttgtggtattttaacttaccctcgtcccatctcgtgctcccagcttggttctgtttattgttgatgaaatacagacagg

SEQ ID NO: 39555 - DNA, 120 bp, synthetic construct
  source 1..120: mol_type = other DNA
atttccatcaccaaagtgctatcccttgtgctactcatttttagtaatacccactctcctcccgtccaccatccctaacccctggcaactactaatctttttcatttctacaattttgtc

SEQ ID NO: 39556 - DNA, 120 bp, synthetic construct
  source 1..120: mol_type = other DNA
cgtgttggaccgataggtgacgatgctttctgcgccctggagcagcgtgaagcgcgaggccgggacgaggaagtggcggtgctgcttcttcctgcacagcctgcagctgcaatccacgac

SEQ ID NO: 39557 - DNA, 120 bp, synthetic construct
  source 1..120: mol_type = other DNA
gcacagatgtctttctcattcctgtatccccatctccttacccagagacacttcccaaacaacaagcgaaatagtaacagctttcgctgttacaggaaataaagagtaatgaggtatgta

SEQ ID NO: 39558 - DNA, 120 bp, synthetic construct
  source 1..120: mol_type = other DNA
ctacatttaatcatcatactgccttaggttcctcttggctgggacaacttctcagactttgcttgtttccatgaccttgagagttttcagggtcactagtgaggtattttctagaatatc

SEQ ID NO: 39559 - DNA, 120 bp, synthetic construct
  source 1..120: mol_type = other DNA
aatatttatagaaatgtgtacatacgtgggttagtatacatacatacgtatttcctttctgcttcagcagagagggcctaggaaccactagactctggcagctacgagcacacctagttg

SEQ ID NO: 39560 - DNA, 120 bp, synthetic construct
  source 1..120: mol_type = other DNA
ggaaatgaactagaaacatgtatgaaaaggtagatactggcagagtcagtgagaaacacggtctgattatcccatgtttatatgaaactcagttccacttcggtcgccctgggtaaatga

SEQ ID NO: 39561 - DNA, 120 bp, synthetic construct
  source 1..120: mol_type = other DNA
tccaagtcggggtcgggagccacgcggcggccaagaggtggctgggtaggtggcgacggaagcgccgctggcggcgggtccggaaggcgggccccagagacctgctgccctccgcgccaa

SEQ ID NO: 39562 - DNA, 120 bp, synthetic construct
  source 1..120: mol_type = other DNA
gaaatgaccgtagattggatgttctgctatttcatgagcccccacgttgtttcttcatgtgccaatatacttgtgtctatggccacaaacaacctgcatatcacagtttggaaaacactt

SEQ ID NO: 39563 - DNA, 120 bp, synthetic construct
  source 1..120: mol_type = other DNA
agtaagtgcctcaatgagttaccctaatacctttcccctcctctattatgaccaggatcaaggtttttctgggaatggcaccacagtttctgtgactccaccacaattcctgagacttga

SEQ ID NO: 39564 - DNA, 120 bp, synthetic construct
  source 1..120: mol_type = other DNA
tcctccttaaaaaggaaagaaatcctgccatttgtggcaacatgaatgaacctggagcatgtgaggtcaagtgaaataagccaggcacagagagacaaatagcaagtgatctcacttata

SEQ ID NO: 39565 - DNA, 120 bp, synthetic construct
  source 1..120: mol_type = other DNA
gtttgtgggcataaagttgctcatggttttgaataatgatctctttaatgccttcattgcccatagtgatgtctccttagccactccagacacgggttgcttcatgatttctctcctttt

SEQ ID NO: 39566 - DNA, 120 bp, synthetic construct
  source 1..120: mol_type = other DNA
ctcttataattcagtattaagacgacaaatgataatcaatgtgcaaaccatgtgaatggttcttcacatgcaacacggaacgatatgcaactggtcaagagaagaggctgggccaaggtc

SEQ ID NO: 39567 - DNA, 120 bp, synthetic construct
  source 1..120: mol_type = other DNA
ggaaacctgcctaggtctcctgtttgccatgtgagtgaggtggtggccgtctccagggtggccggtctgacccttctgcaggacgcgcagtccagtccgcccccatttcccaccagggtg

SEQ ID NO: 39568 - DNA, 120 bp, synthetic construct
  source 1..120: mol_type = other DNA
agtaagatcgctgcagttcgtcaacggtgcctataaaagcacaagaaaccaaagtgacaacatccgtggacacacgcgaaccagggaggggtgtacgtaacaaaataagtgtccgtccat

SEQ ID NO: 39569 - DNA, 120 bp, synthetic construct
  source 1..120: mol_type = other DNA
tccagttgaagatttgggatagggaactgctttctcagccagaccagcacacaaaggatgctcgagtgagagccgcagttagctcaggtgatacttacttctgcttcacaaagtcatctg

SEQ ID NO: 39570 - DNA, 120 bp, synthetic construct
  source 1..120: mol_type = other DNA
gaggaagaagggggagaggagagggaggagaggagcaggaaagggaggagaaggaaaggacaggagcaagggggtgtggaggtggcagggggcagggggatctcaccttcttggtcctct

SEQ ID NO: 39571 - DNA, 120 bp, synthetic construct
  source 1..120: mol_type = other DNA
agagagaggggttggggaaggcaggccactcgacgacatacttgtgttagcttccctgtgctggccagcctcttcccagcagtcagccctgaacaccccaagaccttcccaaatcttctt

SEQ ID NO: 39572 - DNA, 120 bp, synthetic construct
  source 1..120: mol_type = other DNA
aagtggatgtcagcatccccatttggcgtgtcaggaagctgaggcacagacacattgcatgaactagaccacagagccaggaaacagaaaatgcaaaatttgaacctgggtcttccggac

SEQ ID NO: 39573 - DNA, 120 bp, synthetic construct
  source 1..120: mol_type = other DNA
tcttcacagtctcagtaaatggcgccattatccacacaaccactcactccagaaactgggagtcatcgatcaccactccccgtttctgatacgctgcatccagaagggcaagctctgaag

SEQ ID NO: 39574 - DNA, 120 bp, synthetic construct
  source 1..120: mol_type = other DNA
taaagcctttaatccatctcatgtggatttttgtagatagtgtaaggaaggggtccagcttcaatcctctgcatacggctagccagttatcacagcaccattgatagaatatggagtctt

SEQ ID NO: 39575 - DNA, 120 bp, synthetic construct
  source 1..120: mol_type = other DNA
actgggtatagagccagaggaatataaagcattctaccataaagacacatgcacctggactattcactgcagcactgttcacaagagcaaaaacgtggaatcaacataaatgcccatcaa

SEQ ID NO: 39576 - DNA, 120 bp, synthetic construct
  source 1..120: mol_type = other DNA
gaaatccggtggatacttgtatttccagccatgatggattaacaggaaccggacttaccgtctcgcctaaatacctataaaccaaaaaaattataaggcttaacgtcatggcaccacctg

SEQ ID NO: 39577 - DNA, 120 bp, synthetic construct
  source 1..120: mol_type = other DNA
acagcattttctgcctcaaaagacatccaagtggagatgtcacgtaggcaggtgaatgtactatgcacttggacctcaaaagtgaagtttgaactgggcttgtagattgtggagtaatta

SEQ ID NO: 39578 - DNA, 120 bp, synthetic construct
  source 1..120: mol_type = other DNA
tcctctcagctagtccatgtttctccaacacaagtttgctgagcatgttttcactccacgtagtccctaccctcaggactggtgggagaagaggctggctcagtgcctggcacttagtaa

SEQ ID NO: 39579 - DNA, 120 bp, synthetic construct
  source 1..120: mol_type = other DNA
tgggaggtgcggaggttggttacgcctgagtgcgtgagcaggagtttggagaggccccagtgctcatcgttatgtgattttctacaaaccttgctcagcagccccagggacatggcaaga

SEQ ID NO: 39580 - DNA, 120 bp, synthetic construct
  source 1..120: mol_type = other DNA
ctctcctgacacccaccctcgcacccacgtgcacataccgctccccatctcccttcatcgtgcatgattcgctacccctcacggcttccctgaacgacaggttccaccctaggtttctga

SEQ ID NO: 39581 - DNA, 120 bp, synthetic construct
  source 1..120: mol_type = other DNA
acacacggattgaaaatatggatgttactctatcccctcaagaaagcgtccagctttatgataccatgatttcagtctgggaaacttgtcccagggatcaggtcaatacacaaacataca

SEQ ID NO: 39582 - DNA, 120 bp, synthetic construct
  source 1..120: mol_type = other DNA
attctttctccgctactgagacacggcgggtaggtccacaggcagatccaactgggagttgaagtgtgagtgagagtgaagaggaaccagcaggcttccggagggttgtgtggtcagtga

SEQ ID NO: 39583 - DNA, 120 bp, synthetic construct
  source 1..120: mol_type = other DNA
tctggatttgggttccggcgtcaaggtgaagataatacctaaagaggaacactgtaaaatgccagaagcaggtatgttatccagcaagatgcaaagttatgtgctttctcatttacacag

SEQ ID NO: 39584 - DNA, 120 bp, synthetic construct
  source 1..120: mol_type = other DNA
cttattcagttcctaaggtgacagtaaccgttttcttccaagatagtattcagaccatttccaggagcccgtttggcatgcagaccacagattcaagccagaatattaaaagagtgtttg

SEQ ID NO: 39585 - DNA, 120 bp, synthetic construct
  source 1..120: mol_type = other DNA
ctgcttcctggcatacaactactacaatttttaaaatctccacaaagtggtgtctttttatatgctagtgagttgactcatggctggcagcacctaggtagctctagtttggggaatagg

SEQ ID NO: 39586 - DNA, 120 bp, synthetic construct
  source 1..120: mol_type = other DNA
ccatatgttcagctagccagaagccgtctgaatcctgtccttttggttttgatggaggttttcattctgtaggcgtgactgattaaactgttgtcctgccactggggatcaaattaacct

SEQ ID NO: 39587 - DNA, 120 bp, synthetic construct
  source 1..120: mol_type = other DNA
gccttcctagcttaccaaccatttcatccatgctctgaaaatcttagcgttcaagactgtattcactttcaataaagccctgtattaaatcactctgtcttgttcatattccatgttgtg

SEQ ID NO: 39588 - DNA, 120 bp, synthetic construct
  source 1..120: mol_type = other DNA
cctactggctaagtcatagtcagcacgaaagaaggaagtcacgacgtctcctttcacagttgtggagggacagaagttagagagcaaggcgcataggcagcaaggaactttcatagaaag

SEQ ID NO: 39589 - DNA, 120 bp, synthetic construct
  source 1..120: mol_type = other DNA
ccctgggacaagtttcccagactgaaatcatggtatcataaagctggacgctttcttgaggggatagagtaacatccatattttcaatccgtgtgtaaataaattaattaatggatgaaa

SEQ ID NO: 39590 - DNA, 120 bp, synthetic construct
  source 1..120: mol_type = other DNA
ggcaattcctcacggacttaagaacagaaataccatttggccctgcaatcccattgctgggactatacccaaaggtacataaacctttctattataaagacgcatgcacatgtatgatca

SEQ ID NO: 39591 - DNA, 120 bp, synthetic construct
  source 1..120: mol_type = other DNA
aggcttgaacaacactatcagacagcatggcctaattgatattcatagatcaacagcagaatgcacattcttctcaagtgctcatagaatgttcaccaagatagaccatattgtgggcca

SEQ ID NO: 39592 - DNA, 120 bp, synthetic construct
  source 1..120: mol_type = other DNA
aagatggcagacagatcccgtgccccactcaatcaacattccattgaactgagaagaaaatgttttcaagggtcaactcttaacagtagaggaaaataagaaaacgtgtcagtggtccgc

SEQ ID NO: 39593 - DNA, 120 bp, synthetic construct
  source 1..120: mol_type = other DNA
ctgccaggcagggcatgctcacagatctggggaacctctgttgctcctggagctccacaatctccttccaggcaccctctccctctggtggctgtgacagcccacatgtggctttgtctc

SEQ ID NO: 39594 - DNA, 120 bp, synthetic construct
  source 1..120: mol_type = other DNA
acattcccccatacctcctttcatccagcacgtatttgttaaggccacacaggcgtaccttgttttgttgcacctcatgttcatactgcttcgcagatgctgcaatttttttttttaatt

SEQ ID NO: 39595 - DNA, 120 bp, synthetic construct
  source 1..120: mol_type = other DNA
ccatcttacggactaggaatctggagctgagaaaatctgaaagacttgccccaagtcacatggttttttctatgggtgacaaatcaagtctatctctggaagtcatgtctaacatctcat

SEQ ID NO: 39596 - DNA, 120 bp, synthetic construct
  source 1..120: mol_type = other DNA
atgaactataattctttacttccatttcatggaccaggaatctggagctcagagaacttagaagatttgtgtcaagtcacatggctttcatatggatgaaaactgaagtgtgtgactcat

SEQ ID NO: 39597 - DNA, 120 bp, synthetic construct
  source 1..120: mol_type = other DNA
ctctgtagttaactttctgcatgcaattttttttttttttttcactcagccctgatgtgtatgagggaacaaatgcctgaggatctttctcaggtagctgagctgaaaagcagctgggct

SEQ ID NO: 39598 - DNA, 120 bp, synthetic construct
  source 1..120: mol_type = other DNA
gcagggactcagctaggcatgtctgccattcagctggagccgcttcctgtgtgctagatctgggaactggggatgataatccttcctggttgatgccatggctaactgacagaacacgag

SEQ ID NO: 39599 - DNA, 120 bp, synthetic construct
  source 1..120: mol_type = other DNA
ggcgatggatctgatcaggcagagggatggggggttctgttctgttgaagagaaatgagcatcgctaatatgaacgtgttcagaggctattactcggtgatttgtaaattattagaagga

SEQ ID NO: 39600 - DNA, 120 bp, synthetic construct
  source 1..120: mol_type = other DNA
aggggaacatgggtccacatacggtggcaatccactaggctgctgagtgaccatcgcagcccttgaggttttagaacaagaaaatcttgctgaaaatgcagaaaaaaaaatgggtattat

SEQ ID NO: 39601 - DNA, 120 bp, synthetic construct
  source 1..120: mol_type = other DNA
ccagtttctctgcatccttgtcaccatttggtgttgtcactatgtcttttattttagctattgtaataagtgtgtagtgatacctcatcgtggtgttattctgcatctagtgaagcaaat

SEQ ID NO: 39602 - DNA, 120 bp, synthetic construct
  source 1..120: mol_type = other DNA
aaaacctttataccagcaaggaaattataaaagcatatataaagtatactgaaggatgtgatttaaaggctgtctgtatatacagatgcatttcaccttataaagtacacgtgcacatca

SEQ ID NO: 39603 - DNA, 120 bp, synthetic construct
  source 1..120: mol_type = other DNA
aacatatcgaaacccggtttccactaaaacgaaacaaaacaaaacaaaaaatagcttgggcagggtggtgcatggctgtagtcctgagatgggaggatcccttgagtccaggagcttgat

SEQ ID NO: 39604 - DNA, 120 bp, synthetic construct
  source 1..120: mol_type = other DNA
ttagtgaactccatctggccaattagaagtcagaacagtaggcggaacaagcgaagcggatgtggcttctatcagtcccggctccagggacggaaccttctcaaagtgggggtggagact

SEQ ID NO: 39605 - DNA, 120 bp, synthetic construct
  source 1..120: mol_type = other DNA
ctcatacacatcagggctgagtgaaaaaaaaaaaaaaaattgcatgcagaaagttaactacagaggccattcatataaaattttaaaacatgcaaaagaagaatatatattttatggata

SEQ ID NO: 39606 - DNA, 120 bp, synthetic construct
  source 1..120: mol_type = other DNA
tgttatgatactggtatcccatctgtcacttgctccccaaatcattcccttcttacaattttctactgtacagcattgaggctgaacgatgagagatttcccatgctctttctactccct

SEQ ID NO: 39607 - DNA, 120 bp, synthetic construct
  source 1..120: mol_type = other DNA
tgctgagcgctgttctaggtgctggagcgacgtcagggaacaaggcagacaggagttcctgacccccgttctagaggaggatgtttccagttgttgggttttgtttgtttgtttcttcta

SEQ ID NO: 39608 - DNA, 120 bp, synthetic construct
  source 1..120: mol_type = other DNA
ttcgaaggaggacactatcatcattatgccaatataatagatgagagacggagtcccagagagatggtaggtgtcttgtcagaggtcctacagctggcaggtgcaggaggggctgagttt

SEQ ID NO: 39609 - DNA, 120 bp, synthetic construct
  source 1..120: mol_type = other DNA
gcgacagagactctgtctctaaataaaaaagaaaaagaaataaaaagaaaattcacttcacaggcagtagatatcccacaggcacgaactcccctacacttctagattgcatcacccgcc

SEQ ID NO: 39610 - DNA, 120 bp, synthetic construct
  source 1..120: mol_type = other DNA
gcagtacttgctatgggactcaacgacttatgacttgaagacttcgcagagctgacctaacctccctgtgcttaccgtgcctcatctgtaataggagaataagaataattagaaaaaata

SEQ ID NO: 39611 - DNA, 120 bp, synthetic construct
  source 1..120: mol_type = other DNA
ttcttttgtctcatgaatgtgttgtaaccaagcgagttatagagaaacgccacacttttgagacaaattaaggggacctttattagctggcgacctacaggcagctaacgctcaaaattc

SEQ ID NO: 39612 - DNA, 120 bp, synthetic construct
  source 1..120: mol_type = other DNA
aatgtgaaatacgactagacatgcgtttaatgggcggtgtgattgctgcattcgtgcgcaatgaatggtccaggccatttgtgtccagtagccgcacaagctgcagggtctcatgtttag

SEQ ID NO: 39613 - DNA, 120 bp, synthetic construct
  source 1..120: mol_type = other DNA
ttacaaagctgctaaaaattgtatctcttccgctccagacccagtaggatagagatgatctgtgtaggcatcaaaaatgtagaacatctgcaagtcatgtgtaggacagactctttcctc

SEQ ID NO: 39614 - DNA, 120 bp, synthetic construct
  source 1..120: mol_type = other DNA
agtggttgtgtgatctgagggaagttacttgacctctccatgcaggaatttctgcctttgcaacgtgggaaaatatggattctgcagggttgacttgacattctcagtgagatgtttatc

SEQ ID NO: 39615 - DNA, 120 bp, synthetic construct
  source 1..120: mol_type = other DNA
tgggatgtgtgtgtgtgtgtgtttatatatgtttgtgttcagtacatattcaaactgttcctgttacggttctgtctttcttgccccagtgtgggctgatagccacgatttggtgaataa

SEQ ID NO: 39616 - DNA, 120 bp, synthetic construct
  source 1..120: mol_type = other DNA
agatattccacgtgaattgtagaatctgcttgtttatgcatgcaaatgtccctcaaggattctgattggcaggcactgcattcattctacagatcaagttggggacaatggactgttaac

SEQ ID NO: 39617 - DNA, 120 bp, synthetic construct
  source 1..120: mol_type = other DNA
ggcccagagatctttttgcaaatgtgtttgcctgtgaattcaacttctttaaaacatataggactgtgcacacagttcagtgtttgaaatccatcctgtgtgagtttccgtagcttgtgg

SEQ ID NO: 39618 - DNA, 120 bp, synthetic construct
  source 1..120: mol_type = other DNA
agatccagtttcaagaatgggcaggtaaacgcagtgtgggaaaggaatgtggaatgagaacttggtggttcaccgctgtactatttgtgtaaatgtttacgtatgtgataagctacatgt

SEQ ID NO: 39619 - DNA, 120 bp, synthetic construct
  source 1..120: mol_type = other DNA
tattttccccatttccatatgtcagctgccttcctccactcccacacacccatcctctagcaacattttcagttccgctttatgaatttcgaaagcagaacaccagagaagttagggaac

SEQ ID NO: 39620 - DNA, 120 bp, synthetic construct
  source 1..120: mol_type = other DNA
aaatgtctaccaatcagtaaagggataaagaagtggtatatccgtacagccgaatgttactgagccgtgacaaagaacacactactgatgcacgtttgagcctccaagacattatgctca

SEQ ID NO: 39621 - DNA, 120 bp, synthetic construct
  source 1..120: mol_type = other DNA
atatccagtccagagcacccaacctgttgtatttcatgatatagtggaaggacacagactaagatggggtcggatctctctccctgatgaatcgctcaatcccccggagcggggctacct

SEQ ID NO: 39622 - DNA, 120 bp, synthetic construct
  source 1..120: mol_type = other DNA
aggtagatttagtcatttgtgcctcctgaaattaaaagacacacatgtctaaatcccaataagatgttggaagaacccaaggatgctctggttctcacaaagcaggtgcaaactgctgct

SEQ ID NO: 39623 - DNA, 120 bp, synthetic construct
  source 1..120: mol_type = other DNA
ttcgggtctccatcccatgggggtgcacgtctcagttttcctctaaccactgcttgagcagcctctgaaacattattttgctctcctgctgcctctctcgctggcgcttctcctctgtct

SEQ ID NO: 39624 - DNA, 120 bp, synthetic construct
  source 1..120: mol_type = other DNA
atctaataaaggatttacaaatgataccaattaatgcatccacgtgacacggggtgcaaaaggatgcaatgcagttcgacgatgtcaattccctgctgacattttccaaccccttcccaa

SEQ ID NO: 39625 - DNA, 120 bp, synthetic construct
  source 1..120: mol_type = other DNA
cacgatcaagtgggttttatagcgggaatgcaagggttgttcttcccacacctgaaaatcaatcaatgtaacccacagattgagagatcagatgaagaacaaaaatgacaggatcacatc

SEQ ID NO: 39626 - DNA, 120 bp, synthetic construct
  source 1..120: mol_type = other DNA
aaaagatgcacctcaacctcaacctttacacgcaattaaggaaaaagggttcagagacctacacgccaaagttcaatactatgacttttggtagaaaccgtaggaggacatctttgtgag

SEQ ID NO: 39627 - DNA, 120 bp, synthetic construct
  source 1..120: mol_type = other DNA
ttggcagtttcttgtaagtcaaacagatgtttaccataggacccagccatcccactcctgggtatctaccctagagaaatgaaaacttaggttcacaaaaaagcccgcactgaattgtaa

SEQ ID NO: 39628 - DNA, 120 bp, synthetic construct
  source 1..120: mol_type = other DNA
acgagttagttccctgacatcctttgggccaccactatctgacacaaacagttaatgtgtgaaacgtttggaaaatgatcttaacccaattatctcccagccaattctcatgtgtcacaa

SEQ ID NO: 39629 - DNA, 120 bp, synthetic construct
  source 1..120: mol_type = other DNA
cttcccgggcgagggacgtgggaactgggctggagggttgggaggcggccgacttctcctgtgattggctggagttttgagctagggcgcgccgctgagaaccgacacgtgctgtttcat

SEQ ID NO: 39630 - DNA, 120 bp, synthetic construct
  source 1..120: mol_type = other DNA
ctgaatagcacatgatggagattcatgaaaattcccccaatgggccaaccaactggaatgtcacgtgagagtagggtttttaggaaaagtttacttgcaaaaataggatgcaggaaggta

SEQ ID NO: 39631 - DNA, 120 bp, synthetic construct
  source 1..120: mol_type = other DNA
aaattacatctccatcagcctcactttatttaacagataagaagaatctagaggcaaacagagcagaggcagcgttagcggctgcaacacagctgtggagttgatcagactccaaatgtg

SEQ ID NO: 39632 - DNA, 120 bp, synthetic construct
  source 1..120: mol_type = other DNA
accactcaatactgccacactgtggataaagtttcaatatgagttttggaggggacattcaaccacagcagggtcccttgtatttacgtgttttttttttttggagacagagtctctgtc

SEQ ID NO: 39633 - DNA, 120 bp, synthetic construct
  source 1..120: mol_type = other DNA
tttaaccatgtgcgtcttcatgctgtgcttggatgtgaagagtttattacaagaggagatcgggcaacggcttttccaagtgtccacatcctgcaggtgtttcttggagtgaatgtagag

SEQ ID NO: 39634 - DNA, 120 bp, synthetic construct
  source 1..120: mol_type = other DNA
tagtcaaaggctttccacgaatgaactccaggattcaccaccacattctgacaaacatcctaggaatacatatcttccattttacacaaactcgtgcagaaaattgaaagtgaggggcca

SEQ ID NO: 39635 - DNA, 120 bp, synthetic construct
  source 1..120: mol_type = other DNA
gactctggctggtgggcgtgtgcagagactcacacaccttcggctctagctggagtctgaagaggagatgctcttttctgcccacagagtaagaggtctcatctggaaatgtacctgtgg

SEQ ID NO: 39636 - DNA, 120 bp, synthetic construct
  source 1..120: mol_type = other DNA
atcaagccaaccctctcagggaaggtgttggattccgatggggtaggtccccaccagcgttcgtttccaggtctgaggcctgtgattggcccaccacgtgcgtgatggtccccctcactg

SEQ ID NO: 39637 - DNA, 120 bp, synthetic construct
  source 1..120: mol_type = other DNA
tccacaaaaacctgttggccttgggggtggtgaaacggtatttcacgggaaccatccaagaacagccaggcctagcatccacacttgccctggaaaccagctggccattttcaaatcaat

SEQ ID NO: 39638 - DNA, 120 bp, synthetic construct
  source 1..120: mol_type = other DNA
gtgggttgggcaacagctagggaaggaggaatcaggaagttgatgagcctagatgccccagctttgcagcccacactttaaggcatcacccgatccaaaccagctgccagccctgccttc

SEQ ID NO: 39639 - DNA, 120 bp, synthetic construct
  source 1..120: mol_type = other DNA
gtctggatgtgtctgctcgcttcttggggctgccgggcttggcctggcttccttcgttgcggcaaatgcctaccttcatcagtggtaagtcgctgctctcatctgcggaatcagagtcgt

SEQ ID NO: 39640 - DNA, 120 bp, synthetic construct
  source 1..120: mol_type = other DNA
agccttctcattggtccccgtctgccaaccagcacgccctttgtggggcgaggtgcctgagctttaaccaatcgggacacaggctcttggtttgcctccatgcccgtcatttgactgggt

SEQ ID NO: 39641 - DNA, 120 bp, synthetic construct
  source 1..120: mol_type = other DNA
ggattctgcacttacatcccctagaaccagaaggctccgcccgaccatgcggtgtaccatgggcctagggtgtacatgttatggccccattattgtgcagaaggtggtctgaatatggaa

SEQ ID NO: 39642 - DNA, 120 bp, synthetic construct
  source 1..120: mol_type = other DNA
gacagtgacaggacaaacagggacagtgaactgcaggaggaaaggttgctcaaaggaccagggtgctcaaaggaggccatcagttcctgctgaaggggagagagaatagcactgaagaag

SEQ ID NO: 39643 - DNA, 120 bp, synthetic construct
  source 1..120: mol_type = other DNA
tggaaaggcacagaaggctccagggccaggctttccttggttctcttccccaaaggaaagtcagttccagtgacgccgcctgtacctacagcccacccccgccccccgcaccagcagaaa

SEQ ID NO: 39644 - DNA, 120 bp, synthetic construct
  source 1..120: mol_type = other DNA
taccaggacgaccgtctccccgcagcccaggctgcccggactggcgccatgagctcccccgacaaggtgtccgtttgtggggccggtttcgacctggagggtggcaaaaaggctggctcc

SEQ ID NO: 39645 - DNA, 120 bp, synthetic construct
  source 1..120: mol_type = other DNA
agagagactctcagccgctcccccggagccggccaccttcccgccattctctggtgtgcggccacaggggatgtccaagaaaccccaaaagcctaagcacagcagccctgggaagaaacc

SEQ ID NO: 39646 - DNA, 120 bp, synthetic construct
  source 1..120: mol_type = other DNA
gagcccttttctgttaagtcctgctcagccacatgggccctcccagggcctggctgtggctgccgcactgctggagtccaacctggagtcacaatgctagggggccacaggtgcacatga

SEQ ID NO: 39647 - DNA, 120 bp, synthetic construct
  source 1..120: mol_type = other DNA
ggcgtgggtttctgtttccctgggtctggagtgtccatttctgcctctctctttcagcggccatgcagttcctcactgacaagttccaggacctttgaagtgagtgttgcacacaccatg

SEQ ID NO: 39648 - DNA, 120 bp, synthetic construct
  source 1..120: mol_type = other DNA
tttgaaccttagttaccaaattctgtcagatctcctccttagcttcagtagccaggtggagacagaaaccacatcctggtgggaagctgagccaaagggaagatacctggagtgcggaag

SEQ ID NO: 39649 - DNA, 120 bp, synthetic construct
  source 1..120: mol_type = other DNA
gatgtctcagcactcccatgtgtgggtgcagtggtaatacctcagagtcgctggttggtgcctcatctagaagtggggagctcccgtgggagggtgccacgacacccgctaaccaagaca

SEQ ID NO: 39650 - DNA, 120 bp, synthetic construct
  source 1..120: mol_type = other DNA
gcgggggatggcgatgctctatatctatatatattgtgctggtgtttttacagccatacgcatttacgagatctcacagacctctgtgtaagttatagcccaatagtcctgactttttag

SEQ ID NO: 39651 - DNA, 120 bp, synthetic construct
  source 1..120: mol_type = other DNA
cctacctagaaaacgcgcgagaatccactgaaaaagcattctaattaaggagaggggatattaagatggccgtatgccccaaagtatacaaaaccagtaggcttcctatatgtcagaaat

SEQ ID NO: 39652 - DNA, 120 bp, synthetic construct
  source 1..120: mol_type = other DNA
tactgtctagaaaggttaggatgaaagaaaggaatgctaagttgtaccacgatacaataagagaatgcacttgctagggtggaggagtcttcttgctatttatttgcaggcttcctaggg

SEQ ID NO: 39653 - DNA, 120 bp, synthetic construct
  source 1..120: mol_type = other DNA
tgttctttggaggtttgagagactttaccagtacaatcattccccccctcccccaaatataaaaagataaaataaaaagccggtcagtgtctgttgcacaaaattacaaccgctctctgc

SEQ ID NO: 39654 - DNA, 120 bp, synthetic construct
  source 1..120: mol_type = other DNA
attgaccttggtgattgcttgtgttgcaatttctaacaggttaaaggaacaagtatgctccaaccccctttgtagaattctcctgctgatactgtgttgcagcacatatcaaggtcacct

SEQ ID NO: 39655 - DNA, 120 bp, synthetic construct
  source 1..120: mol_type = other DNA
ccattcctcagggtcgttttgcagccctttcacattctgaaagacagactaaatagccagatcctaatgctccctcccatccctggcttccttcaccccacccagcaactattgtgtgtg

SEQ ID NO: 39656 - DNA, 120 bp, synthetic construct
  source 1..120: mol_type = other DNA
ctttgtaaggtaatgagattagcaacattagaggtgctgaaacacagcctgagtggtcacttgtaccgtatgctgcagagaggagggttcaaatggtttcagacagccctgtgattcata

SEQ ID NO: 39657 - DNA, 120 bp, synthetic construct
  source 1..120: mol_type = other DNA
tctccgtcaccagccccctcagcaatggtttaatgtgtttcctcaaaaattcctcaatcgatgcatttacatacacatacatgcactaatagaaacatacgcttgtcttttatggggcca

SEQ ID NO: 39658 - DNA, 120 bp, synthetic construct
  source 1..120: mol_type = other DNA
gaaagaaattagacagggaaagggagaggaggaacagcacttgaagcacaaagaccaggccactgaggtgattttggaaactgcaaataagcagacccagtttctattctgtgcacttgt

SEQ ID NO: 39659 - DNA, 120 bp, synthetic construct
  source 1..120: mol_type = other DNA
cttactgagggcctaatacacatcagacactctgtcgtgtggattacataagctgacacttatctttccaacggtcctgcaagttcaatgtcagtcaaattttacagggtgtaatctgga

SEQ ID NO: 39660 - DNA, 120 bp, synthetic construct
  source 1..120: mol_type = other DNA
ctttttccagttctgggaagcatccaccagactcagctcttcccactgctgctattttcttgcaatatatatcaggggcagcttacaaagagacacggtgtcataataagagacaaacaa

SEQ ID NO: 39661 - DNA, 120 bp, synthetic construct
  source 1..120: mol_type = other DNA
tcattcttctgattgtgaacgtacagtttgtccagcaccatttattggggagactgtcctatcctccatgtatgttcttggctcctttgtagaaaatcagttggctgttaatgcttggat

SEQ ID NO: 39662 - DNA, 120 bp, synthetic construct
  source 1..120: mol_type = other DNA
ttttgctcttactgtcttcttttgctgttatgtatttttctctagtagtaaatcttgattccttcctatttatattttagtgtccctattataggtttttgcttcgtggttaccatgatg

SEQ ID NO: 39663 - DNA, 120 bp, synthetic construct
  source 1..120: mol_type = other DNA
aatatggtgtgccttggggaatttgtctttgggttgaattttatttgtcacctctgagcttcctgtgcctgaatgctatgatctttctccagatttgggaaatttcagccgttatttttc

SEQ ID NO: 39664 - DNA, 120 bp, synthetic construct
  source 1..120: mol_type = other DNA
tcatgatttgcatgtaaatgactgctgctggatgatgatctggggacaaatggcatccagagcttatcccaaagggcctgatctcaaggaacctgatggatgttgcctctaggcctggta

SEQ ID NO: 39665 - DNA, 120 bp, synthetic construct
  source 1..120: mol_type = other DNA
atacatttctggcatgtcgcattccatttgtttctgtatctcttactcccagtcctccaatctttctttcctttgctgctgcttcctggccctctcagcaggctcgagccacgtttctcc

SEQ ID NO: 39666 - DNA, 120 bp, synthetic construct
  source 1..120: mol_type = other DNA
ccattacttgagaattggcatcttaacctgagtcttctgatcaacgaacattatatatctctgtttatttaggtctccactttctctcgccagtattttatagtggtctgcatacaggtc

SEQ ID NO: 39667 - DNA, 120 bp, synthetic construct
  source 1..120: mol_type = other DNA
gccatcataaaatgaactggaaagtgttccctcctgtattttctaaaagtgttcttttgggactactactatgttttctttaaatgtatgacactgctaaccagtaaatctattgaagac

SEQ ID NO: 39668 - DNA, 120 bp, synthetic construct
  source 1..120: mol_type = other DNA
acagcattctctcttcttcaagctttgggaagcgtttgagaaggtttggggttaattttctttaaatgcttggtagaactcaccagggaagccatctggtccttagcttttctttaatgg

SEQ ID NO: 39669 - DNA, 120 bp, synthetic construct
  source 1..120: mol_type = other DNA
ctatgtacttgctgtttgttttctattttcccatttgttctttactcctctcgtccattttttttcatctcatcacattttggttgggcgttttaggattccatttgtcttcactactgt

SEQ ID NO: 39670 - DNA, 120 bp, synthetic construct
  source 1..120: mol_type = other DNA
ggtaccatggccacaaccctcaatacattgttgagtagtagtggctacatcaggcatccttgtgctgtttcagacattaagggtaaaagattcggtcttctgccattaaatatgatgtta

SEQ ID NO: 39671 - DNA, 120 bp, synthetic construct
  source 1..120: mol_type = other DNA
tggctttatcagacagaattgcttattttgattgggaataaagatggttgaccaaatgcagctgggatgtgcctcttccccagagaggaagcaaaatattaagtaaatctgcacacttca

SEQ ID NO: 39672 - DNA, 120 bp, synthetic construct
  source 1..120: mol_type = other DNA
gagtttgggggagtgggggagatgttgaccaaagggtacaaactttcagctagacaggaggaataatttcaaaagatctattctacaccgtggtgactatggttaataacaatatgctgt

SEQ ID NO: 39673 - DNA, 120 bp, synthetic construct
  source 1..120: mol_type = other DNA
tgaactaacagccagatccctgcctttcaccatagaaactagtttctgcgatgtctttcacaattaactcgatttcctttctaagaggtagacatgatacccaaataactgcactatgag

SEQ ID NO: 39674 - DNA, 120 bp, synthetic construct
  source 1..120: mol_type = other DNA
ggatatttggaggttccttatgttatcctctcttgtgctgtcgttctcaaaatgtggtcccctaccagcagtgttagcatcaccagggaacttgtttgctaagcaaactcggccgagcct

SEQ ID NO: 39675 - DNA, 120 bp, synthetic construct
  source 1..120: mol_type = other DNA
aatgctggcagcattccttttaaaatccggaacaacccaaagaagcccaattttgctgtcgctattagatctggtactaaatttcctagccagcgctgttaaaaaacaaacagccaacca

SEQ ID NO: 39676 - DNA, 120 bp, synthetic construct
  source 1..120: mol_type = other DNA
ttttcgtgtacttcccttagccgtgtactacccctgttcatagatttaaaacatggctgtgtagagcactgtgagttatgtcttgactcgtgtatgtcacataacagcattggttagatc

SEQ ID NO: 39677 - DNA, 120 bp, synthetic construct
  source 1..120: mol_type = other DNA
cacctcgccttttttaaaaacttaaaaacacatccttgaggctacctgatcgccaagctgagaacagtgttatttcagtgaatggatgtactgaccacactattatgcatcttgtgaagc

SEQ ID NO: 39678 - DNA, 120 bp, synthetic construct
  source 1..120: mol_type = other DNA
acacaaggtatcttgctcattactgtcaaatacctcttcaagaaggatggaccatttgccttttccccatcaatatcggagaaagaaagttttcccagcatctcaccagtagtattgcca

SEQ ID NO: 39679 - DNA, 120 bp, synthetic construct
  source 1..120: mol_type = other DNA
aaataaaataatagcaagaatagaaacaaccagagtgtccatcaatagaagaccagttgaccacactatggtaggtccacacaatggagtaccctctagttgtcgtgaggagtgagggat

SEQ ID NO: 39680 - DNA, 120 bp, synthetic construct
  source 1..120: mol_type = other DNA
atttcatagcaggatcttagtcctcttccaggtactaccgcttcattcctccagaaatatgtggacttgttcatccatcactaggaaaggaggggctttgggatcatttgttcgagtaac

SEQ ID NO: 39681 - DNA, 120 bp, synthetic construct
  source 1..120: mol_type = other DNA
cgagccaacgtttaaagttgagtgattttatgtagaaatctagaattccatcttctcttgaaaaaacagtcaatttggccaccatgagtcgctatccctgcatggcaacaattgcctgga

SEQ ID NO: 39682 - DNA, 120 bp, synthetic construct
  source 1..120: mol_type = other DNA
aaagatttgtcacctggactgttgcatagacctcttcctctctgatttccccatctcccatcttgcctcccccaatccttccatcaaagccaccacaactctttttgtcaagctcagggt

SEQ ID NO: 39683 - DNA, 120 bp, synthetic construct
  source 1..120: mol_type = other DNA
atattgtcctcagtacatccatagggaaatggaggttcagacacataaagtcacttgtccaaagtctcacaaatagaaaatagcaaagctaggagagccctgtcctcgcccgttagtatt

SEQ ID NO: 39684 - DNA, 120 bp, synthetic construct
  source 1..120: mol_type = other DNA
tggtagacaacattggtgacattttgcacctgggcacactaaggtccagggagcaatttgccccaggtcgcactgcaattctgtgacaggactggtgacagaaccactcatgcttcctcc

SEQ ID NO: 39685 - DNA, 120 bp, synthetic construct
  source 1..120: mol_type = other DNA
ctcagtgcagtagtgtttctcttggactcacacaccttttctgctttcatgaaaacccacacattccctccacagcctccccaaaatcttccataatcctctccacacttcaacaattgt

SEQ ID NO: 39686 - DNA, 120 bp, synthetic construct
  source 1..120: mol_type = other DNA
taatttaccttttaaaaattcagcatgtgattaaagatccatccatatttccatgccgcggattcccaatcagtggtgactttgcaacccccagggaacaatgcttggagacactttcgt

SEQ ID NO: 39687 - DNA, 120 bp, synthetic construct
  source 1..120: mol_type = other DNA
tgcaattagtatctagaacaggcaacaaaatatatgagcaacacacaaacctctctcgggtccccttccagttacagctttgctaatgtcaaaccagctttcctctcccatagtaaatgt

SEQ ID NO: 39688 - DNA, 120 bp, synthetic construct
  source 1..120: mol_type = other DNA
tctcaccccctcccccacctcgttgttgtcgatgttgcatttgctgtggcagagacagagcacaagctgtttattcgttttgttgaaagaaatgtaaagagaataaactggacaatatta

SEQ ID NO: 39689 - DNA, 120 bp, synthetic construct
  source 1..120: mol_type = other DNA
ctatctttcacatttccttccttctgcttcttttgctcctctttttctagtttagtgtagtgacatcatagattactgctttgataattttccatttgtctaatggaagcacttaatggc

SEQ ID NO: 39690 - DNA, 120 bp, synthetic construct
  source 1..120: mol_type = other DNA
atacattatttttaactagaaatgctgtgcaatagatcactaaagcttcttgctcctgtctaactggaactttgtactctttgaccaacatcttcccttgccgtatcccccccaagcccc

SEQ ID NO: 39691 - DNA, 120 bp, synthetic construct
  source 1..120: mol_type = other DNA
acttaaacgtccctgcctgacagctttgaagagagcagcagttcttccagcacagtgttcaggctgtgataagggaaggactgcctcctcaagtgggtccctgacccccatgtatcctga

SEQ ID NO: 39692 - DNA, 120 bp, synthetic construct
  source 1..120: mol_type = other DNA
ggaaatcctagattggtgctaaggagttattcaaaaccaagcccagttgttgaaataaatttcagtttctagctcttcatatgggacatctctgcagcacctcatctgcactcttactcc

SEQ ID NO: 39693 - DNA, 120 bp, synthetic construct
  source 1..120: mol_type = other DNA
gccaaactgttgaaaatcaaagacaatgagagaatgtggaaagcagcaaagaaaaacagctcaccacacacaagggatccccagtaagattaacaaccgagttcttatcagaaaccaagg

SEQ ID NO: 39694 - DNA, 120 bp, synthetic construct
  source 1..120: mol_type = other DNA
tacaagacacacacttcggattcaaaggcacaaatagttagaatgtaaaaggttgagaaaataaatacactgaaaacagcaaccgcaagagagctggagtagttttgtcaaccccagaaa

SEQ ID NO: 39695 - DNA, 120 bp, synthetic construct
  source 1..120: mol_type = other DNA
gggaagcttaacagttataagcccctatatcaaaaaagtagaaaaacttcaggtaaacaacctaacaacctaacagtgcatcttaagaaactagaaaagcaagagcaaaccaatctcaaa

SEQ ID NO: 39696 - DNA, 120 bp, synthetic construct
  source 1..120: mol_type = other DNA
cccatgataggctcacagagatcaactctgtagcctcaggattatgtaagagatgctttcctaaacagcactattgtttcaaaagccaaagaaagactctgaggccacctacttccactt

SEQ ID NO: 39697 - DNA, 120 bp, synthetic construct
  source 1..120: mol_type = other DNA
catgcaggaatgaggacggaataacatctcacatgcaggaatgaggacggaataacatctctcttacccccagcaatgcacacagtcttcatatctgaggaaaactgggcggtgtttata

SEQ ID NO: 39698 - DNA, 120 bp, synthetic construct
  source 1..120: mol_type = other DNA
gtatgtgtgtatttaggatgcaaatacttgttgaaacaagaaatgatgtggggaaatctggtggatagggcacaacttggcagtcactcttgaaacccaagtggcagagatgggatttaa

SEQ ID NO: 39699 - DNA, 120 bp, synthetic construct
  source 1..120: mol_type = other DNA
tatctaccgagaggacaggagctatggattctttgggtggcatttgtaactccactgggaatagtatcatcagtgggcatttaatgattagtagtaatgtcggtgaccatttgtctcata

SEQ ID NO: 39700 - DNA, 120 bp, synthetic construct
  source 1..120: mol_type = other DNA
taaataggaggagcgacgtcagcaagaaggctgaacagatgatcccacagtaccactctccccacaaaagtacaactacaaattaatcaaaggcaagaataccaccctggtttcactaga

SEQ ID NO: 39701 - DNA, 120 bp, synthetic construct
  source 1..120: mol_type = other DNA
cctcattagaaaggtttaacagcagagttgaccaaacaggggaaagaatctgtaagctccaagacagaacatatatagaggaggaaaaagacaaaagcattttaaaagagggaagaaggc

SEQ ID NO: 39702 - DNA, 120 bp, synthetic construct
  source 1..120: mol_type = other DNA
gtaacttaaaacatcagaaagtcaaagtgtggagggagggatgagttaaagtgtagagtttgtttttgttcgtttttcctgtgattaaagttaaactgctatctgtttaaaataacctgt

SEQ ID NO: 39703 - DNA, 120 bp, synthetic construct
  source 1..120: mol_type = other DNA
agtgagggactttaataccccactttcagcagtggacagatcatccaaacagaaaattaaccaaacagaaaattaatgtcggcattaaactgcactctagaccccatggacctaacagat

SEQ ID NO: 39704 - DNA, 120 bp, synthetic construct
  source 1..120: mol_type = other DNA
ataatgacattgaagcaggagtaaacactctcccatcaaagaaaagtccaggacctgatggatttgctggtgaattctaccaaacatgtaaagaactggtaccaattcttctcaaaggct

SEQ ID NO: 39705 - DNA, 120 bp, synthetic construct
  source 1..120: mol_type = other DNA
aagactgcaatgtcagacctgaaactgtgaaacttctagaagaaaacataggggaaacgtttcacgaaattgaactgggcaacgattcttttcttcagtaaggcctcgaaagcataggca

SEQ ID NO: 39706 - DNA, 120 bp, synthetic construct
  source 1..120: mol_type = other DNA
taagtgaaataagccaggcacagaaagacaaacaccacatcacctcactcagatgtggaatcttaaaaagttgatttcacagaagcagaaactagagtagtggttaccagaagctgggga

SEQ ID NO: 39707 - DNA, 120 bp, synthetic construct
  source 1..120: mol_type = other DNA
acccagaatcccaacccagagggtaaaagcaagaacatctctgcagctttcacagataactctggacccagccctctcccacctgtacccgtgttctcctgaggtgggccctgtctcagt

SEQ ID NO: 39708 - DNA, 120 bp, synthetic construct
  source 1..120: mol_type = other DNA
ctttatgtcatcctggttttattctagatgaacccatatcaatgtcctcattatgcactgtttgccagcttccccagccacacaggatggtatccgatcactggcttctagggaacagct

SEQ ID NO: 39709 - DNA, 120 bp, synthetic construct
  source 1..120: mol_type = other DNA
taaaattgcttcttttcataccccagagctacagaatgggtgggcagctgactagagtctcccaggctaggtccttaggagactatatatatatgtatcactatcttatgtcccatgaca

SEQ ID NO: 39710 - DNA, 120 bp, synthetic construct
  source 1..120: mol_type = other DNA
gaagctccataaaacctgggcctttcttcctgggaatttccagcagtttggaacaaccttcctacttagaaaatgagtttctttatatgagaatgaaagttgtgctgggagatgacagtg

SEQ ID NO: 39711 - DNA, 120 bp, synthetic construct
  source 1..120: mol_type = other DNA
ttaaatgtgagaaaaacagtgcacagtaatgtgacaatagtgtccacatgaatgaagtagttccagtttccctgggactgagagctttcccgggacaggggcctttaagttttaaaaccg

SEQ ID NO: 39712 - DNA, 120 bp, synthetic construct
  source 1..120: mol_type = other DNA
acggtgaccaagccccttctgctgctccatgcccctgctcgccgcagtgtcccagtcaccaggcctgaaataaatgctggcacgcttgactgtttttgctttgtggcatttgatgtaact

SEQ ID NO: 39713 - DNA, 120 bp, synthetic construct
  source 1..120: mol_type = other DNA
tgttaggactgtgacctatagacaatgctttttccacaggtatcttgctatggccttgaggagggcaattcagtgtaacaatgcagaaaaaatatcatctctccctgcccaaatgcatat

SEQ ID NO: 39714 - DNA, 120 bp, synthetic construct
  source 1..120: mol_type = other DNA
atacttcagcatgtctgcccttttgatcgccaccgtcttccggttcttaaccagcaggtactgcaccagctcagctactttctagctcacagggcccctgggcatgcgcatcagggatgt

SEQ ID NO: 39715 - DNA, 120 bp, synthetic construct
  source 1..120: mol_type = other DNA
ctgggattacggtcgacttttatacagcaattgttatacctcgaaataacacgtactaaatttccatataatgtccacgcttgcacttcaaatttcttccattgatctaaattctgttgt

SEQ ID NO: 39716 - DNA, 120 bp, synthetic construct
  source 1..120: mol_type = other DNA
tatgccagctaacagaatgttaggctctggccatagagagcactgggggtgaccctacgaatcccagcaggaaaattcgtccctcctgctagtagcagtctcccgtttgatgatattcac

SEQ ID NO: 39717 - DNA, 120 bp, synthetic construct
  source 1..120: mol_type = other DNA
ccttcatattggtaccaaataaaataatggactcccagttaagcttgaatttcagatccacagcaaatacttttttagtgtaagtgtgtcctgtatgcaatatttgaggcattcttacac

SEQ ID NO: 39718 - DNA, 120 bp, synthetic construct
  source 1..120: mol_type = other DNA
attttaaaccaactcccatgcacgtacagctaggagcattgagagcagagtctgagtgaggatattgaggctggtgatgaaaagccttggcgagaagtttggacatgttcggacatgcaa

SEQ ID NO: 39719 - DNA, 120 bp, synthetic construct
  source 1..120: mol_type = other DNA
ccacttttctggggttctaggcaatatgtaccaaatcatcttgtttatgtccccgagagcattcatagcaacctttaactgttttcatattccctgatctgtctattgtctgtctcccca

SEQ ID NO: 39720 - DNA, 120 bp, synthetic construct
  source 1..120: mol_type = other DNA
acattgcgggccccttagcccccagcaccaagtacctgataagctttccataaatattagatggtgaactgggaccaggcacttcattctagagagagagctcaggttttgttttggttt

SEQ ID NO: 39721 - DNA, 120 bp, synthetic construct
  source 1..120: mol_type = other DNA
aagaggcagcctttaacctacaaatggcacagattagtaagattattcacaacgcccttggtgggggtgggcgggggagaggaagggaaggagaggagaggtggagggagaaaataggaa

SEQ ID NO: 39722 - DNA, 120 bp, synthetic construct
  source 1..120: mol_type = other DNA
aacttctcgtacagcattgcctcggtcacctcagggtgcaggtcgcccacgtacagggaggccatctgaaaatctgggttcccctcacagtcaccgagggtctcatccgcatctgcatcc

SEQ ID NO: 39723 - DNA, 120 bp, synthetic construct
  source 1..120: mol_type = other DNA
ataagggttcgattcagaagggagcgttatttttatcccctctccacataatggaacgtttaaatggttaaatcaagtaccttgcaggagagggtggggtggccttgagaatacactcaa

SEQ ID NO: 39724 - DNA, 120 bp, synthetic construct
  source 1..120: mol_type = other DNA
gaagcatcaatgtggagactagtgtgtggattcacatgatattttggaagtggaagagacagcgcttgtgagtggattcgaggcaatctcagaggtctatgtacggtcataggaaagaca

SEQ ID NO: 39725 - DNA, 120 bp, synthetic construct
  source 1..120: mol_type = other DNA
caccccaaccccgccactaccaaattcctctaaataaaaataattatgagatacaggccaacaaaaacgtcagcgttaggctgttatttagagagaattggaaagcgtttgaatgtggcc

SEQ ID NO: 39726 - DNA, 120 bp, synthetic construct
  source 1..120: mol_type = other DNA
aaagagcaatctgctcatttaacccttcttatagtgtagaaggcaggtttgcggaggcaatgtacaatgctttttggaaccatctgaaagaacagctattgagtactcctcctgacttca

SEQ ID NO: 39727 - DNA, 120 bp, synthetic construct
  source 1..120: mol_type = other DNA
atagttcattggagaaagtttgaggttctgaacagaacttggctcctttgatttcctttgttgggcagaccttgctatcactgctattaccatggcagaaccgcctaagaaatgagatag

SEQ ID NO: 39728 - DNA, 120 bp, synthetic construct
  source 1..120: mol_type = other DNA
tcgtcgtgcagaaaagtggcaagaatgtggggcatgggtgggtagaccttaccctgaatgtgagttacctaagcatttaaaaatgaaaaggcatgatcatttgggaagttttttagcttt

SEQ ID NO: 39729 - DNA, 120 bp, synthetic construct
  source 1..120: mol_type = other DNA
agcagacatacagccttaagtaatctggtgggggaggggggaactcattaacctacagtcactagcattattttctccattgaaaaatcatttccttgagggctttgaaaactctttgtg

SEQ ID NO: 39730 - DNA, 120 bp, synthetic construct
  source 1..120: mol_type = other DNA
agaatggacaggggacaatagaaacttacttatgggatagacccaaactggttgaaaaaaatcatgtcctcattatttcggcggatggaaggagctgagtacaatttactcagcccaaga

SEQ ID NO: 39731 - DNA, 120 bp, synthetic construct
  source 1..120: mol_type = other DNA
ctgccctctatgcccgaggctccaccctttaagtgaacagagccaggctctgtcctcagagttatcttgtttttgtttttgttttgaagagtaatacatgtttgcagcagaatactttat

SEQ ID NO: 39732 - DNA, 120 bp, synthetic construct
  source 1..120: mol_type = other DNA
tttctgagttttctattctagtccactgggctattagtctattcttgcaccagtgccacaatgtcgtaattacagaggctttatagtgtgcttttctggctgatatcataagtcccctct

SEQ ID NO: 39733 - DNA, 120 bp, synthetic construct
  source 1..120: mol_type = other DNA
cacggtgttatgggacacgtatggatagtaaaatagttactatagtggaacaaattaacataacccattatgtcacatagtgacccatttttggttttggtagcagtaggcgctaaaatc

SEQ ID NO: 39734 - DNA, 120 bp, synthetic construct
  source 1..120: mol_type = other DNA
tataatgctgttgaataatttatagagcattggcactctggtactatctgatctttgaaggtttagtagaattgacctgtaatagcatctgagccaggtgcttcttgggagttattcctt

SEQ ID NO: 39735 - DNA, 120 bp, synthetic construct
  source 1..120: mol_type = other DNA
tatctcgacatttgcttaatagaagactgaacattttttccaggtagaagagcctttgtgctttcagtttgtgttagtaagttctacttttgttgcatcgtgattgcagagggttggttg

SEQ ID NO: 39736 - DNA, 120 bp, synthetic construct
  source 1..120: mol_type = other DNA
agtatctataattcagggctgcttgctctaatccaaccctcattcttcagaaatgccttccttttttctctctacagagccctgccatctcatttgtacacactgtatgtgtctttctgt

SEQ ID NO: 39737 - DNA, 120 bp, synthetic construct
  source 1..120: mol_type = other DNA
tgagtgtgcctaggttgccgtataccaggtcaatattaaaagtaggtcaactctatttttatatacagtcctccctttgcacagttctgatatgcactaaggtcattcaccgtgatttag

SEQ ID NO: 39738 - DNA, 120 bp, synthetic construct
  source 1..120: mol_type = other DNA
gttttagtgcatagtagtggacaaggccagaattgatgtttttctgtaacattaagctagtaatggtagaagcagttagataaattcaagtcccttgactccagtcacaagacttcctct

SEQ ID NO: 39739 - DNA, 120 bp, synthetic construct
  source 1..120: mol_type = other DNA
ggcaccagaaagacagataaattggaaaagaccatctttgtcatctctagcgtcacatgccctccgtggtggacataaagatctattaagcatgtcttttattttctgtgtcgtgatgct

SEQ ID NO: 39740 - DNA, 120 bp, synthetic construct
  source 1..120: mol_type = other DNA
ccttgggattatacggagactttcaactcctggcacaggatggcagagaaagcttgtgatttaataatcatagaagtaaacctccaaagaaggttaaatttccacccaaagtaggaccgt

SEQ ID NO: 39741 - DNA, 120 bp, synthetic construct
  source 1..120: mol_type = other DNA
tctgagtatgtgaactgttaggtattaattgtagtcttcactgtctgggcttatttgtagccgtccttcgtcagaaggcttttcaaatatttcagaggacctgggtgtttggatctaagc

SEQ ID NO: 39742 - DNA, 120 bp, synthetic construct
  source 1..120: mol_type = other DNA
acttttccctctgcttttctcaaactgaaggagttttgccccatagccaccacttgctggttatgtaccaagtctcacctgaagccaacaagtctcagaggttcacccaaggccctcgat

SEQ ID NO: 39743 - DNA, 120 bp, synthetic construct
  source 1..120: mol_type = other DNA
atttacttggagacacagagtgctgtagcctgccatggtgaggtttgtgggaactcaagttctgatcactgggatcagtgattcccctctggctagggctgctttaaatgctccctctgt

SEQ ID NO: 39744 - DNA, 120 bp, synthetic construct
  source 1..120: mol_type = other DNA
gtgagatagcaatctcctctctaaaaaatgggtataaccaatggatccagcactatatattgaatagcctgtcttttcttcagctaaccttcaatggcaaacctctcatgccacgttttc

SEQ ID NO: 39745 - DNA, 120 bp, synthetic construct
  source 1..120: mol_type = other DNA
ttcctgtcacaaatgcctaaaaatatggaagtggctttgtaattgggtaatgactagaggctggaagacttgaggcacatgatatgaaaaccctagattgccttgaagagaccgttggta

SEQ ID NO: 39746 - DNA, 120 bp, synthetic construct
  source 1..120: mol_type = other DNA
gacagaagattgagccatggaagtttactcttggcctgaaacttaatggacttttttcctgctgggttgtgaacctgccccagagcgacaacccctttaatctttccaccttctcccttt

SEQ ID NO: 39747 - DNA, 120 bp, synthetic construct
  source 1..120: mol_type = other DNA
gaaaatttggtctgttgagttttcttctgcttatttatgtagccaggccacagtgcgggaacctagcaaagtaatcccaatgcttgtatagcattgtttgcctctgcaagcaaatcagaa

SEQ ID NO: 39748 - DNA, 120 bp, synthetic construct
  source 1..120: mol_type = other DNA
atcagtcagtctctcctgcttgaatctttgtacttttttactcttcagagataccgccaagcatgcatctgataccatggtggtggcagacaatatgtgcataaatgcaagtcattagga

SEQ ID NO: 39749 - DNA, 120 bp, synthetic construct
  source 1..120: mol_type = other DNA
cacccaggcgtgatttcaaagtcgatgtcctttctgcttctttctacgctgcctgctcttctcttaaaggaagcttatagtaaaaattcttttacatcaatgatgcaatgccctcttcct

SEQ ID NO: 39750 - DNA, 120 bp, synthetic construct
  source 1..120: mol_type = other DNA
aaccaaccgggattgaacaacaacaataccaataattctcagcagatcggtaatatagaaagctatctctttaaactgacaatgggtatcaaaacaatagaccccatcagacaccaccct

SEQ ID NO: 39751 - DNA, 120 bp, synthetic construct
  source 1..120: mol_type = other DNA
ccatcacgtgggtggacttctcctggctgtgcagcatccaggcctgcttttctggccctcacagagtttttgtaagctatgtaatatattttattagagatatcttgtttgtataaaaga

SEQ ID NO: 39752 - DNA, 120 bp, synthetic construct
  source 1..120: mol_type = other DNA
agacatccacaacccaggatcagcaaggaagggatggcacaaactcaacaaatccaataattggcactgagggaacagaaagaatggaagaggctgaaacagacattaagataatatttc

SEQ ID NO: 39753 - DNA, 120 bp, synthetic construct
  source 1..120: mol_type = other DNA
aagggcagtcatttctacttctccctttgacaatatcagccactctctggtcccgtcatccttctgtcccaaaggacctgtaaagcacagccgtataattatatgtatatatttagacag

SEQ ID NO: 39754 - DNA, 120 bp, synthetic construct
  source 1..120: mol_type = other DNA
atacacaaggaactggtttaaggtcacagtgagtatcttggtggggtctgcattaggtggactattctggaacctgatagaaggaagaccacttaaaacaccctaagttgattatttgga

SEQ ID NO: 39755 - DNA, 120 bp, synthetic construct
  source 1..120: mol_type = other DNA
cttttctcctcttctcctccctgaactccacctccgcagtagagagtctttcccttccctttgcattgcatcctgtttctcccttgtctctcctctcctatgtctcacccatccgtccct

SEQ ID NO: 39756 - DNA, 120 bp, synthetic construct
  source 1..120: mol_type = other DNA
ttctgatttgaattctagtgggcattaatgtcagggatgggcgttttggttttccccaggccttttttcattgttacaatagtgctcatattggtacatgtgacccagcaaaaaggtagc

SEQ ID NO: 39757 - DNA, 120 bp, synthetic construct
  source 1..120: mol_type = other DNA
ccattaggagacaatcttggaagtttaaatggtgaggcaaagtgtatgcttcccaagattatttctgaagttggagggaggagacaagagtactcacatacattgcttccgagcatgtaa

SEQ ID NO: 39758 - DNA, 120 bp, synthetic construct
  source 1..120: mol_type = other DNA
ataactgctgctgatctttgcaaacatggattccattcatcctagttgtctgctcatgaggccttaatggcatcattccattaatgatctcagaattcccctccatgcagcactccttat

SEQ ID NO: 39759 - DNA, 120 bp, synthetic construct
  source 1..120: mol_type = other DNA
accacgttctggttatgagttacatctgaggagtaaaggaaggacaagtgaaatgaggggatgggctcaaacattcgtcaagtttattgcttaacctggttagtggatacacaagtgttc

SEQ ID NO: 39760 - DNA, 120 bp, synthetic construct
  source 1..120: mol_type = other DNA
ccaaggtaacatgcctgcttctgtgggcctccaggtcgagcatctgacagagtccaactgtctctcaaggccagtctctggaaggagcgtgtgtcctttctcatgaggatttacggacaa

SEQ ID NO: 39761 - DNA, 120 bp, synthetic construct
  source 1..120: mol_type = other DNA
ggactaaagctagcgtagtgggtatgaagtggtaactcactgtggtttcgatatgcgtttccctaatgactaacgatgttgagaagattttcacgtgcttcttggtcatttgtatatctc

SEQ ID NO: 39762 - DNA, 120 bp, synthetic construct
  source 1..120: mol_type = other DNA
gattctgtcagggactgcaatgaatctgtagattgttctgggtggtactgccatcgtaatgatattaagtcttccaatctatgaacgtgggatgcctttccacgtatttaggtcttcttt

SEQ ID NO: 39763 - DNA, 120 bp, synthetic construct
  source 1..120: mol_type = other DNA
aggtccttttcttgagtaagaggagacaatgatgacggtattatacatacttaccaggcgtaacaacttggggaaacaatcccggatggcactgtccaaaaccaaaaattgaatgaagtg

SEQ ID NO: 39764 - DNA, 120 bp, synthetic construct
  source 1..120: mol_type = other DNA
atcattctcctggcagtgtgaaggcgggcgctcatacccaccatgttcataatgacagctcctcttgtcaaaattatcccggaaagaactcccacctttctttcttccttgaaaagtgct

SEQ ID NO: 39765 - DNA, 120 bp, synthetic construct
  source 1..120: mol_type = other DNA
tcaagtcccaccatgtactggctgatccccccacacagacatagtggtgagtaacctttatgacatcacgtgtgttcctactggtacttcctgtgttagtttggaattctgcctacatca

SEQ ID NO: 39766 - DNA, 120 bp, synthetic construct
  source 1..120: mol_type = other DNA
agggaagaatgtgtggtctgtgtgtccgtgttgcccatgcgagcaagtattagtgtttcgtattacatgcttccacaattaggttacagatacatgtactccaaatcatgttggtaaaca

SEQ ID NO: 39767 - DNA, 120 bp, synthetic construct
  source 1..120: mol_type = other DNA
atacttgtataagaggatgtttatggccgggtcagggttttgtcaagtgcttggggagaagcacttttcctatcgacccatatacagcataatggaaaccgtttattactgacaatcaag

SEQ ID NO: 39768 - DNA, 120 bp, synthetic construct
  source 1..120: mol_type = other DNA
acaatcaaagcagaaccgtggttagatccaggcaaccacattttttaactctccatgtgaattgcagtgtgcaaccaaggttgaaaacaaccgtgttaaagcctcagtttttggcttatg

SEQ ID NO: 39769 - DNA, 120 bp, synthetic construct
  source 1..120: mol_type = other DNA
tagtcacgttgacagctttttcacttttatacacgtattaatttatgtatgtaggcatgcatgtatcacagcttaccgcactgcctagtatgacatatggcttactgcactagactcagt

SEQ ID NO: 39770 - DNA, 120 bp, synthetic construct
  source 1..120: mol_type = other DNA
gcgcttctgaaacactgacatctagcaattttgttcaactctctcacatggtgttttcactttcatcaaggtaggctctatttttttatcatttttcctcaacatagcggtaagacatgg

SEQ ID NO: 39771 - DNA, 120 bp, synthetic construct
  source 1..120: mol_type = other DNA
ctgaatcttcacatcatgacgacttggacacttttattgaaatatcaaattctctttttaaaaaaattcccgattcccctctctccctttcgcccacccccctgagcccatgtttagaag

SEQ ID NO: 39772 - DNA, 120 bp, synthetic construct
  source 1..120: mol_type = other DNA
aagcacctctctgacaggattcggagcactcaatcttcacgtgaatgggagggtgcggaatctcacgtgaccataagagccacatgtacaacagccattggttagctgcggtgctcacag

SEQ ID NO: 39773 - DNA, 120 bp, synthetic construct
  source 1..120: mol_type = other DNA
agtttaggcactgaatttattaggcgctgtgtttactggggtgaggcaggttgataagccatttctcttgcgtgtgatacggcaggatttaacaggaacaacttctccttcttttacctt

SEQ ID NO: 39774 - DNA, 120 bp, synthetic construct
  source 1..120: mol_type = other DNA
cctgtgaaaaaaggcaagatatataatgtttgtgttttcttttaatccttggatttaaaacatcacgtagtttatcaacagttatagaatgactcactggctggattgctcaactggcta

SEQ ID NO: 39775 - DNA, 120 bp, synthetic construct
  source 1..120: mol_type = other DNA
cgcactattcaacccaatagagtctgccctctggctccccaatatttacattcttaccgtgagtaaattatattcaccccatctccaaatcctccagatcttcacctattccagcattaa

SEQ ID NO: 39776 - DNA, 120 bp, synthetic construct
  source 1..120: mol_type = other DNA
cagagtttgcatggaaatctcctagctaaatatccaagttcgtcgcttacaagacctgctttctacacaattcattcaagttttctgacactctatcacaagggtcacctttcctccagt

SEQ ID NO: 39777 - DNA, 120 bp, synthetic construct
  source 1..120: mol_type = other DNA
caattaaactgccaaataagaacataatgatctagacctcctctcatattcccttctcaatgactgagaagtgatccatgttgggagaatctcaggactggtgggcagctgatcaaggaa

SEQ ID NO: 39778 - DNA, 120 bp, synthetic construct
  source 1..120: mol_type = other DNA
accccacaacagggagatacttttctctgcactgtctttaaaggtcacccctgggtgcagctgtgtagagtcatatccatgcttgaaagaagagcaaaagaaaagcagaaaaataaaaag

SEQ ID NO: 39779 - DNA, 120 bp, synthetic construct
  source 1..120: mol_type = other DNA
caacacagctttctacggaacaatagactctatgactctagaatgcatactgaaggaccaagggcgcttaatatccaagaatattaaaacaaagtagaggggatcagaagggacatggct

SEQ ID NO: 39780 - DNA, 120 bp, synthetic construct
  source 1..120: mol_type = other DNA
aacaaaaatgaacaaaacctccaagaaatatgagattatgtgaagagaccaaacctatgactcattggtgtcccacaaagagagggagagagcaagcaacttggaaaacatatttgagga

SEQ ID NO: 39781 - DNA, 120 bp, synthetic construct
  source 1..120: mol_type = other DNA
aaacaatcacttagagacctacaaagaaacttaaataaccacacaatcatagtgggaggcttcaacaccccactgacagtgctagatcactggggcagaaaactaacaaagatattcggg

SEQ ID NO: 39782 - DNA, 120 bp, synthetic construct
  source 1..120: mol_type = other DNA
tgtatgcacataatctagaaaacccagaggaaatcgataaattcctgggagcatacaacctcccaagattgaaccaggatgaaactgaatccctggacagaccaataacgagtttcaaac

SEQ ID NO: 39783 - DNA, 120 bp, synthetic construct
  source 1..120: mol_type = other DNA
gacttcgttttgcatcttaggtaccagtatggccatagtggggtagagcatcaagcagacccttggagtccccagttccaggactggactcttggactgcatttctggacctgccctgag

SEQ ID NO: 39784 - DNA, 120 bp, synthetic construct
  source 1..120: mol_type = other DNA
ataccagacctatcctacaagaaatgctgaggggtgtacttcaatcagaaagaaaaggacgttaatgagcaataaattatcacccgaaggtacaaaagtcactggtaatagtaaggacac

SEQ ID NO: 39785 - DNA, 120 bp, synthetic construct
  source 1..120: mol_type = other DNA
tatgtatatccgagttacacatttgcaagccagtaaatgaattccaattaggtctgcagaaactgcgaactcactagtagatcttggtcagaactctatttactacctggcccgcacatg

SEQ ID NO: 39786 - DNA, 120 bp, synthetic construct
  source 1..120: mol_type = other DNA
ttagcaattaagaacgttttgctggaaggtttcctgggaagaaggatttcacttctcttgggtaaataccctggagtgcgattgctgtataagtgtacctttaacttcatgcaaacctgc

SEQ ID NO: 39787 - DNA, 120 bp, synthetic construct
  source 1..120: mol_type = other DNA
ctgtctttgttggccaattacctttttaaactatccagttctttggtaaaatgtcatatgagtagttcactgggagacaaggaggaaactcagcttcattctttgctgttgatgcatgaa

SEQ ID NO: 39788 - DNA, 120 bp, synthetic construct
  source 1..120: mol_type = other DNA
gagggagcaaatacatatggaatgatgtgtaccatgaaggaaatgtacatggtacatttaaaaacagcatggtgaagtaagggaagtaatgggagagaagtggggtaagtaaggagaggg

SEQ ID NO: 39789 - DNA, 120 bp, synthetic construct
  source 1..120: mol_type = other DNA
aggaagaggaagagacagaatatgaaaggtggctgattttaatataacccagcaacatcaatgaggggaaggaggggcaaaccctttatctttgctcttcactctgtaaacaatctacca

SEQ ID NO: 39790 - DNA, 120 bp, synthetic construct
  source 1..120: mol_type = other DNA
ggcaaaggacctgaatagacatttctccaaagaagacatacacactgactaacaggtgtatgaaaaagtgctcaacatcattaatcatcaggaaaatgcagataaaagctactatgaggc

SEQ ID NO: 39791 - DNA, 120 bp, synthetic construct
  source 1..120: mol_type = other DNA
gacaaaggtatattacagaaacagcgagacaccatttctcgcctaacccgtagaaaaaagtttcaaaagtaaggcaacatgttctgttagtgaggctgtggggaaattgtcattctcata

SEQ ID NO: 39792 - DNA, 120 bp, synthetic construct
  source 1..120: mol_type = other DNA
accgggatattggggtgagggtaccccaaatcaaacagaaacaggttcaactaacaatattacaaatgagtgtcttaaccacgctgaaggagagaggaagaaaagatctaagatacataa

SEQ ID NO: 39793 - DNA, 120 bp, synthetic construct
  source 1..120: mol_type = other DNA
aatccctccctcgccactgggaaagggaggagaataaaacaggtgtgcttgctacaaatgcacaacttcaatctaatcataagaaaacatgagacaaacacaaattgagagacattccac

SEQ ID NO: 39794 - DNA, 120 bp, synthetic construct
  source 1..120: mol_type = other DNA
ttgaatgaataaatggatttttctccagccacactagcctcctttttgttgctctaacactagctcagcaagcatactcccataccgttgagtgtttttctgtaacagcctggctttaga

SEQ ID NO: 39795 - DNA, 120 bp, synthetic construct
  source 1..120: mol_type = other DNA
cttcattgagtttggatgagtgtaaaggttcaactttccactgggcatcactgacaccagagatggggataaatggaatgcttactagtcccaacttggactgccttgttcagtgttatt

SEQ ID NO: 39796 - DNA, 120 bp, synthetic construct
  source 1..120: mol_type = other DNA
ctatatgaatgaaaaggccatctctatggaagatactggtaaacttttttgtcagcttagagcctgttgccctggctttgctcacaaggtttgacactgaaagactgtgaaaccttctga

SEQ ID NO: 39797 - DNA, 120 bp, synthetic construct
  source 1..120: mol_type = other DNA
cacagatttgatgcaatccctacaaaaacaccagtgacattctttacagaaataggaaaagcaatcctaaaatgcatatagtaccacaaaaggcccagaatagccaaagctatcctgagc

SEQ ID NO: 39798 - DNA, 120 bp, synthetic construct
  source 1..120: mol_type = other DNA
gccaggctcactgcctatttattaattataaaacattcatctgccatggtctctgtcctgagactatctagtcacaagattagaacacgtgaatgatccattccacagcttttctgtgtg

SEQ ID NO: 39799 - DNA, 120 bp, synthetic construct
  source 1..120: mol_type = other DNA
aaccagacactagaacgggagttcgcaactcttgctattgctgtatccttgaaaactacagggaaatgtggtgctagaaatggagttctatgtcttctcttcatctgcaattcagtgaat

SEQ ID NO: 39800 - DNA, 120 bp, synthetic construct
  source 1..120: mol_type = other DNA
tatattaagaggcttggacttcctactcctccttgtactttggtataatatccctgcccccacatgcagtgaatggtcaatatcactgaccaaccgatcaacttctagatatacatagca

SEQ ID NO: 39801 - DNA, 120 bp, synthetic construct
  source 1..120: mol_type = other DNA
atctagactctcacctcagtaactgcactggatctcttatggtctctagtttctgtatcgcttcatctcgaaccggtgcacatagcagagccatcaaattgagaatgtagttagaaagat

SEQ ID NO: 39802 - DNA, 120 bp, synthetic construct
  source 1..120: mol_type = other DNA
ctcctccaacacaacaatctaacctgtgaaagttcaactattatctatctggtgtgtactgtagtccttcttaattcctttcccctcatgtcctttatccactcagtcacccaattccag

SEQ ID NO: 39803 - DNA, 120 bp, synthetic construct
  source 1..120: mol_type = other DNA
aacacagtgaaatccaagccctaaataatattattcctcctgcttcatctatccaccccctgagatccctagccactttaacagaccttcattctcttagcttcacttttttctgcaccc

SEQ ID NO: 39804 - DNA, 120 bp, synthetic construct
  source 1..120: mol_type = other DNA
aagtgttggaacttaacagtcgtgagacactgcgcctagccagattacggatttcttggattttggaatatttgcagcatacttgtataccgcaatgagcatttcctttgagcatcatgt

SEQ ID NO: 39805 - DNA, 120 bp, synthetic construct
  source 1..120: mol_type = other DNA
ctcaggggctacacacaagatgaaggctaaaatctccttatagataccacacgaatcttactagatggctctaaagctgaaacctgctcctaaaacagtagtttccaaatctgggtattc

SEQ ID NO: 39806 - DNA, 120 bp, synthetic construct
  source 1..120: mol_type = other DNA
gaagtatgaattgtgccattctgcttactagcagtgaccccaagtggccaccagagaaacacacgtaattcaacttcatattttttccccgtttcagtgttcaagaggttggatcaaatt

SEQ ID NO: 39807 - DNA, 120 bp, synthetic construct
  source 1..120: mol_type = other DNA
tcagttgaaaggattaagtaccagggctcaaaggttctcaaaggaacaactagggtcttcaaacaggcctcgaggggaaggggaattagtggcacttcctttactgaaatcaaagaagtc

SEQ ID NO: 39808 - DNA, 120 bp, synthetic construct
  source 1..120: mol_type = other DNA
aaatatgcaaatcaagaatcattttaaagggctagccacagaagctgtgtggtaaaggggcaagaccataagcctgagaggaatcctacattttggtttgggttctttcagctcaattct

SEQ ID NO: 39809 - DNA, 120 bp, synthetic construct
  source 1..120: mol_type = other DNA
gaaatcccctgggagaggtaatgaggggaaatagaagtgtgggaaaaataaagggagagaactagtggaaaacagcaaatcacattttgcctagggatggcccagatactgtatttaata

SEQ ID NO: 39810 - DNA, 120 bp, synthetic construct
  source 1..120: mol_type = other DNA
gagactcagagaacttaaatcacttctctaagactgccaccagtttacagaaaagtcaggactagaacccatatctcagattgtttattccacaatatatagagccatgcaacagcaatt

SEQ ID NO: 39811 - DNA, 120 bp, synthetic construct
  source 1..120: mol_type = other DNA
tcaatcttcttaatccatcgatccataccctcgaaagaccagcggtttgcaatgtcgtagaccaggatcactccttgtgcaccacgagagtaggagcggaatatggtacaaaatcttccc

SEQ ID NO: 39812 - DNA, 120 bp, synthetic construct
  source 1..120: mol_type = other DNA
ttaaaaatgagggctcttggtaaaatcccttttggctaaggacgggtttggcactatggaatgttaagtgctattctctttggattaatcggtcttacactttttgctgacggctatggg

SEQ ID NO: 39813 - DNA, 120 bp, synthetic construct
  source 1..120: mol_type = other DNA
taccttaggatagaatacaggcttaggacacctgtaagcccgctgttcaagacagccaagcaaactgatcacttataagctttgctgcaggtccctggaaaaaacaaaaaacaaaacaaa

SEQ ID NO: 39814 - DNA, 120 bp, synthetic construct
  source 1..120: mol_type = other DNA
tagacatttgatgaactacttttgatggggtgctatgcaaaatatgaatctggctcaaagacactctggcaaaaagtggcacagaggctatcccttagacattggggaatgtgaaagaag

SEQ ID NO: 39815 - DNA, 120 bp, synthetic construct
  source 1..120: mol_type = other DNA
tccttcaagaaattctaaggggtcattcatcttctgaaactccttgagaattaaaaagatggtatattgcaaggcaagtctcgttatagggggcccagggagtttgtggattgtcttgct

SEQ ID NO: 39816 - DNA, 120 bp, synthetic construct
  source 1..120: mol_type = other DNA
aaggcaattcaccaaaacgtcaatatttcatctcccccaaattggcattgcctgcctgagaaaatggagggcaacaggatgccaacactcagtgccccgttttgtcaggcagcttttctg

SEQ ID NO: 39817 - DNA, 120 bp, synthetic construct
  source 1..120: mol_type = other DNA
aatagtttagtttaatggagctctttggagcattagttcgaataatccccatgtcagaaaaccccaggatgcctccacatggaagtgctacctaaaggataccagtgctaggaattcaat

SEQ ID NO: 39818 - DNA, 120 bp, synthetic construct
  source 1..120: mol_type = other DNA
aaatgtgtccaatcccccaattctgggtccataagtcattctataagcattttgatcagccagtgcctgagcttcccccatcacccaaaaacatatttgctcaactagctgaaaacataa

SEQ ID NO: 39819 - DNA, 120 bp, synthetic construct
  source 1..120: mol_type = other DNA
aaatttaatttaaccaactgttgcctagaaatcgatgataatggccaagctattatggaaatcactgctagaatgggcgagttggcccatgttctagttcagacttgatccgggtggtcc

SEQ ID NO: 39820 - DNA, 120 bp, synthetic construct
  source 1..120: mol_type = other DNA
ttgatcagacattgtggcaatccccacatttcttgccacagggccctgtcaacacagcagccaacaaaggtttactgagtgaagtacatataggtacaaaaagacttatagaaccattat

SEQ ID NO: 39821 - DNA, 120 bp, synthetic construct
  source 1..120: mol_type = other DNA
agcacagaaggtaagtgcgcatttgtaatgggtctgtagccagagacatagcagaagctgcgctatccacagtcacaaccaaaggcaaaggaaggatgccctgcaattttagaaatcttg

SEQ ID NO: 39822 - DNA, 120 bp, synthetic construct
  source 1..120: mol_type = other DNA
cagacccctggcacctagtgggttctgtagtggggctatgcctattaggcatcatgcagaatttaaatgaaccaagttgggcaactttgggctgaggtcagttatgataaataactccta

SEQ ID NO: 39823 - DNA, 120 bp, synthetic construct
  source 1..120: mol_type = other DNA
aggaaagctcagcttgtggaaatttcccattaccagagggaacatgacaatccacggaaaaaaaaatgagtactgaactgtttcctttattccttgtgtataaaatatattatacacttg

SEQ ID NO: 39824 - DNA, 120 bp, synthetic construct
  source 1..120: mol_type = other DNA
agtctctgtcccatatcccaggactatagggagaacaaagtgagctgaccttgtccttagcccaggaagatttggagggagggatgagttggagcgtgcagaattagcaatgcttccttt

SEQ ID NO: 39825 - DNA, 120 bp, synthetic construct
  source 1..120: mol_type = other DNA
actcatgcttcttccacctatgccacccgctggccaggctgaatttggcccattcccttttgttatcgtgccttctttcacattccccaatgtctaagggatagcctctgtgccactttt

SEQ ID NO: 39826 - DNA, 120 bp, synthetic construct
  source 1..120: mol_type = other DNA
tattcatacccctgaagccacaagccttggtgggaataaggaaagtccatgaattcactatgcattaatgcatgcctcttggccaagtggattcttttttcttctccgattgagattttc

SEQ ID NO: 39827 - DNA, 120 bp, synthetic construct
  source 1..120: mol_type = other DNA
cccattttcccagatcaacaattactgtttgtcctttcttgacagagaaaaggaatcaaatgaagtgaataatatggagaggaattttttaaagtgagcagagtggatatttgtaaaggc

SEQ ID NO: 39828 - DNA, 120 bp, synthetic construct
  source 1..120: mol_type = other DNA
agaatgacagcagattcacagagactccagtgcagccatgtggtgggagagttatagacaaaaaagggaaactacatacagaaatcagaagtgagatagagaatggctggattggttaca

SEQ ID NO: 39829 - DNA, 120 bp, synthetic construct
  source 1..120: mol_type = other DNA
tggaaggctctgtggatatgacattggcagtattaaaacatatcccaaacccccaggccaactgttggtctgctcttaaacaatgtcttttcactaggacaagcattgggttttagaggg

SEQ ID NO: 39830 - DNA, 120 bp, synthetic construct
  source 1..120: mol_type = other DNA
tctatgttgctctttttcagagctgcctcttctcacctctgagttttccctgtacctgggatatgggcttccttctgaactccattattcatgttatgcagagtaattctctttggtaaa

SEQ ID NO: 39831 - DNA, 120 bp, synthetic construct
  source 1..120: mol_type = other DNA
ctcagagcttgttcctggcttgtataaaatccattaaaatttctcctttctgtaaataaacagcacccattgcatcttgccttgtcccctgggtagtgatcagcaactttgtccgccatg

SEQ ID NO: 39832 - DNA, 120 bp, synthetic construct
  source 1..120: mol_type = other DNA
atttcttcaataatcaatgacttgtaagactggagacagaagaaaggtgaaaagcaacagcagtggagctgggcattgcgagtcccatctgaactgcgacaaaaaggattcattactaga

SEQ ID NO: 39833 - DNA, 120 bp, synthetic construct
  source 1..120: mol_type = other DNA
gttctacaaagtctcccatagggttcccctgggaattagctccagtcgcccacagtggaaacctgctagcttattcctcccacttaaattggctgcattccttgtatgtctcacctcccc

SEQ ID NO: 39834 - DNA, 120 bp, synthetic construct
  source 1..120: mol_type = other DNA
gtttaccctctggcccagatctttcttcagaagaaacctgagtggtctcacaggtaaaatatcctgatataccaagatcatagagcatccttttgtgccattaactaactaacctacctg

SEQ ID NO: 39835 - DNA, 120 bp, synthetic construct
  source 1..120: mol_type = other DNA
taatgattagagggatgcaatagtgtgtctttaatgtcccgggtcccatcaggctgctgcacagccccatgtgtaagacagatagaagaaacaatatggttggtgcttcaaatcagatga

SEQ ID NO: 39836 - DNA, 120 bp, synthetic construct
  source 1..120: mol_type = other DNA
caggaaagtatagaatgctctggtcacttttttgtgtcatgtcaaacaaacctgctcaggccacagccaaagataattcatttgactgaaatgaagccacctggtaggacaacaacacac

SEQ ID NO: 39837 - DNA, 120 bp, synthetic construct
  source 1..120: mol_type = other DNA
tatacatagacagtaaagttatccaaactagagcagcagcacattcaagtggaactctgtccactttccgacttgactagtgccccaaaacaattggtaccaactatttcccatcttgca

SEQ ID NO: 39838 - DNA, 120 bp, synthetic construct
  source 1..120: mol_type = other DNA
cactcatcccatctcccttcactggaacaccagattttaacgactatctgcacacaaaaaacactgccacaagaaccaagaattaggtgagcaatcacatcacctggttttaacttcata

SEQ ID NO: 39839 - DNA, 120 bp, synthetic construct
  source 1..120: mol_type = other DNA
tcactttgaccaaggtctgcaaaatagcaaagaactgacaaaatggtgcagtttggactcacaggtgaccctacccacgctcctcttcttcttccccatagatccctactctgtgcttca

SEQ ID NO: 39840 - DNA, 120 bp, synthetic construct
  source 1..120: mol_type = other DNA
gtatctaatgtttgaagtatatacattgtagaatgaataaatatagctaattaacatatgcatcatcccacaaagttatcattttgtattgagaacacttaccatctactctcttagcat

SEQ ID NO: 39841 - DNA, 120 bp, synthetic construct
  source 1..120: mol_type = other DNA
atgtatctaatgtttgaagtatatacattgtagaatgaataaatatagctaattaacatatgcatcatcccacaaagttatcattttgtattgagaacacttaccatctactctcttagc

SEQ ID NO: 39842 - DNA, 120 bp, synthetic construct
  source 1..120: mol_type = other DNA
aatgttatccaggagcgagtgcctggagcaggggcttcacaaccccgaccggtgccctgtcccgctgtagttgagctggtattcaagatgcaagaaaaaaaacgctcctcactattccat

SEQ ID NO: 39843 - DNA, 120 bp, synthetic construct
  source 1..120: mol_type = other DNA
ctaacaaatatttaagatgcattgaacattttgttttagaattggcttttcaatcatttcatcacaagcaatgctttcctgccgtttacttactcctacatctactatcttcttttgtat

SEQ ID NO: 39844 - DNA, 120 bp, synthetic construct
  source 1..120: mol_type = other DNA
gaagcacagagtagggatctatggggaagaagaagaggagcgtgggtagggtcacctgtgagtccaaactgcaccattttgtcagttctttgctattttgcagaccttggtcaaagtgaa

SEQ ID NO: 39845 - DNA, 120 bp, synthetic construct
  source 1..120: mol_type = other DNA
tgaaagaaagacacacagagcgggggcggctcaaacaacaacacaggaatattgcagaccattgtggaagtggggggcccgcttaatgccagagcccaccgccgcttacaggctggggtg

SEQ ID NO: 39846 - DNA, 120 bp, synthetic construct
  source 1..120: mol_type = other DNA
gaaattacccatcccaggaatcagaacttgagtttctgcaaaccttgccaccaagggctaagaaacggttccaggtttctcagacaaccttaaaggcagtctaggccataagatctctaa

SEQ ID NO: 39847 - DNA, 120 bp, synthetic construct
  source 1..120: mol_type = other DNA
aattctatgctagaactcacctacgagttagagatcttatggcctagactgcctttaaggttgtctgagaaacctggaaccgtttcttagcccttggtggcaaggtttgcagaaactcaa

SEQ ID NO: 39848 - DNA, 120 bp, synthetic construct
  source 1..120: mol_type = other DNA
aactgcaaaatattgaccccccaaattaaggaagacacaaataaatggaaagacattcatgttcatgagttgaataattaatgttgttaagctggaaatgccagcaaaagagatctacaa

SEQ ID NO: 39849 - DNA, 120 bp, synthetic construct
  source 1..120: mol_type = other DNA
catgggtgaagaagtagtctcaagggaaataaaaaaatatgtgaactaaataaaaatgaaaatatacatgttaaaacatgtggaatacagctaacattatactgagagagaaatttatac

SEQ ID NO: 39850 - DNA, 120 bp, synthetic construct
  source 1..120: mol_type = other DNA
agggtcatgagctactaacgaggctcatagcagcatcattagtagcagtaaggaacagcatcaacataggttacacttaaagggggaagaaaatgaacaagcacgatgcaacattaaaag

SEQ ID NO: 39851 - DNA, 120 bp, synthetic construct
  source 1..120: mol_type = other DNA
gtggcatctagtaaccattatttcaggtgctgctggtaacttttagagatatttggccctttgaagggcatttagttgcttatatcatagggtggggtgtacctcatacctaccattatg

SEQ ID NO: 39852 - DNA, 120 bp, synthetic construct
  source 1..120: mol_type = other DNA
gaggttgatggggtctgttcgtccacatcttcattaggcttctgtggctcactggtcacctttgccatactgaattgtcccagtggtctgctcacagctcctgatcatcctatgtatacc

SEQ ID NO: 39853 - DNA, 120 bp, synthetic construct
  source 1..120: mol_type = other DNA
attgcttttaatgttgcatcgtgcttgttcattttcttccccctttaagtgtaacctatgttgatgctgttccttactgctactaatgatgctgctatgagcctcgttagtagctcatga

SEQ ID NO: 39854 - DNA, 120 bp, synthetic construct
  source 1..120: mol_type = other DNA
cgttatgatttacttccttctgtttgctttgggtttatttttctcttcctttctatattctttaggtaagaaattaggtctctaatttcagacatttccttgtttctaatgtaagcattt

SEQ ID NO: 39855 - DNA, 120 bp, synthetic construct
  source 1..120: mol_type = other DNA
ggcttaataatattttattgtatgtatatacttcaatttgccgatctattgatgaacccttgggttgcttctcctttttgcctattgtgagtaaggttgctatgaacatgggtgtactga

SEQ ID NO: 39856 - DNA, 120 bp, synthetic construct
  source 1..120: mol_type = other DNA
ctggcctttctattccatttcactggtctataagacttcctttatgccaataccacactgttaaattactgtaactctgtaataagttttaacatgaggaagtgtgacgtctccagcttt

SEQ ID NO: 39857 - DNA, 120 bp, synthetic construct
  source 1..120: mol_type = other DNA
ctgacacattttgattgcttctttcctggcattgatgtgatagatacgtagggagcgtcttgtagctaccagattctttctctttggagttgggacacgggtcgcttgctgagcggtgtt

SEQ ID NO: 39858 - DNA, 120 bp, synthetic construct
  source 1..120: mol_type = other DNA
agtctttctggtgatacattttctctagccattaaagacaactttgttcttaatattcactctgtatagggagacagagtgatacagtggaaaggcaccagactgaaaggaccctgggtc

SEQ ID NO: 39859 - DNA, 120 bp, synthetic construct
  source 1..120: mol_type = other DNA
atctgcatagggtgccagttcacctcagcctttaattagccacagaccaaatccttcatccagataaggggtagtcattaagaacctcaaatagggtacttaaagcccagaaaactttgt

SEQ ID NO: 39860 - DNA, 120 bp, synthetic construct
  source 1..120: mol_type = other DNA
aattagtacaagggacactattctgattttgtctgttctgctggggtctggggccagagattagggcaaaacaatggcctcccatgagttcatttaacacaaacaaccacattttttaga

SEQ ID NO: 39861 - DNA, 120 bp, synthetic construct
  source 1..120: mol_type = other DNA
ggagctgaacaacaaagaacaaatgtgagctgattagattttagtgagcactcctcagaacgacggtagattatatggtattttcaagtgtgtgtggaatttttaccaaaagagaccaga

SEQ ID NO: 39862 - DNA, 120 bp, synthetic construct
  source 1..120: mol_type = other DNA
aactgttgtgacaacaacaatgtttcttagagaagtttctgagaagaccagatttgccttgaaatgctcgacgtgtctgctatgttacagatgctttcaaacgtattaacccaggggtcc

SEQ ID NO: 39863 - DNA, 120 bp, synthetic construct
  source 1..120: mol_type = other DNA
tttaaggaatggcggatggctgtcatatctaatactatttgaccctagaccctagcactctgggatttcgtaaatgttgttgttctccaagacttaccagagaatatacagctcagtagg

SEQ ID NO: 39864 - DNA, 120 bp, synthetic construct
  source 1..120: mol_type = other DNA
gtaatttttgatgacgctctccagcatttctgcctttgtgaccggctccttgactcgatatttgtggagcaggaaatgaaccaactcagccaccttcaatttcagtgcttcttggaacat

SEQ ID NO: 39865 - DNA, 120 bp, synthetic construct
  source 1..120: mol_type = other DNA
gagagtctctcagatcaggagctcacatccctgatatggaacagaaggacatgccccaaccaacatctgcccacacctgcccagggtttcctcggaagtacagtaagagatgtctaaatt

SEQ ID NO: 39866 - DNA, 120 bp, synthetic construct
  source 1..120: mol_type = other DNA
gttgatttggggagcagagcacagcaacctgagcttggttgtcactttggcaatgacagttaaggcactcactctgtatttaatttaagtagcatttacatctttgccatattctgttcc

SEQ ID NO: 39867 - DNA, 120 bp, synthetic construct
  source 1..120: mol_type = other DNA
gcaccatcacaggagttgctggtggagcagagccactcctgatttgggtgttgggaccggccggttcccggtgttgcggtgtgacctggtcattctcattcggagacgtgtgatcttgtt

SEQ ID NO: 39868 - DNA, 120 bp, synthetic construct
  source 1..120: mol_type = other DNA
aggaggcagtcctgggacttccacccgaccaggccccagagcccaccgacttaacccctccagaggcttgtcgttcattaccttattcaagatggagaccagcctttttgcggagaaaat

SEQ ID NO: 39869 - DNA, 120 bp, synthetic construct
  source 1..120: mol_type = other DNA
agagctactgttgtcacttcacaaggcattttcttcaacagcaagtcggaaatctcatgagcctaaggcagaatccacctgtggcctctggttacaacccacaggactgaaaatccttcc

SEQ ID NO: 39870 - DNA, 120 bp, synthetic construct
  source 1..120: mol_type = other DNA
ccgtttctgctctcagcaacattctctagtgttccggcttcaagcagcgcttgtcaggtttgaagctagccactattctgagaacgtcagaaaagcatggaccatctcttgcttggtgtt

SEQ ID NO: 39871 - DNA, 120 bp, synthetic construct
  source 1..120: mol_type = other DNA
tgcttgctgaggcagacacttccaaaacgatctctgcagagggtgccttcctggcaaggctgtgggctccatggcacggaagcccagagcattgcccttcggaaagccagtgggtttggg

SEQ ID NO: 39872 - DNA, 120 bp, synthetic construct
  source 1..120: mol_type = other DNA
cgtgccgtttctccaagcactgcaggttccaccgtgtgtcagaggctgcaagtttaacatcctcctgcctgaaaacaaataggtcctttgctgaaaagagggtaaaaaaagagctttgat

SEQ ID NO: 39873 - DNA, 120 bp, synthetic construct
  source 1..120: mol_type = other DNA
cttgtgcactagtgtcatctttcccattgaaatgactgtgaggaccagaatgtgcacatgcagatgggcagctacttgtctgccttggccctttattacacaacttgctgggggtggaga

SEQ ID NO: 39874 - DNA, 120 bp, synthetic construct
  source 1..120: mol_type = other DNA
gttgctgtgtccccctgactccacagcacattaccctgtgaggtgagcaggccaggggagtctggtatttgtaccactgtcaccctagctggtgtctggagaggtgctcaagtggaagca

SEQ ID NO: 39875 - DNA, 120 bp, synthetic construct
  source 1..120: mol_type = other DNA
ctcagatgaattcttacgggcctgtggtggcccttcccacagcgtcccgtagtacccttgccatggacaccacaggacttcctgcacctggcatgctgcccttttgccatctctgggtac

SEQ ID NO: 39876 - DNA, 120 bp, synthetic construct
  source 1..120: mol_type = other DNA
ttcacaatgactctgtgttactggccattccttgtcatggcggtgcctttatataacaggatcttcactttacatacagatgagatcacgtctggctttgtcattgggttaaaaagtgcc

SEQ ID NO: 39877 - DNA, 120 bp, synthetic construct
  source 1..120: mol_type = other DNA
ttcagccaagtggcaagggaaaatgaatcaccatcttatctcaactcttccaatgcatccaaaatgggcaattgtttaactcattctcccaggctcgctctcctagattcataaacagat

SEQ ID NO: 39878 - DNA, 120 bp, synthetic construct
  source 1..120: mol_type = other DNA
agtgagagcttggtgtgaccagggcagggctggttaggagagggcagggcccaggctctgccgggcatcaaggccaggaccctgagggaggctgggcccccccaacccaaccatgaccta

SEQ ID NO: 39879 - DNA, 120 bp, synthetic construct
  source 1..120: mol_type = other DNA
cccatagagggagtcactgcccctgcagtggaccctgggaagttccgggcatggcggtcaggcaagcggatcgtgatatctgcatcctgggctgaccgagggaaggggcttggtatcgtt

SEQ ID NO: 39880 - DNA, 120 bp, synthetic construct
  source 1..120: mol_type = other DNA
agtcacacatattgctgtttatgttatttaggagtaagattcttgcttttgagtcacatggggaaatccctgttattttgtgaattgggacaagataacatagcagaggaattaataatt

SEQ ID NO: 39881 - DNA, 120 bp, synthetic construct
  source 1..120: mol_type = other DNA
cacctactatgcaacaggttgtaggagcgcctacaaatgctcatccacatctttgatcttctctttcctgggcacaagggacgaatacataatcagcacttctgtctggcatcagcacgt

SEQ ID NO: 39882 - DNA, 120 bp, synthetic construct
  source 1..120: mol_type = other DNA
ttccaggttttggcaaatatgactggagctgctataaacattcacgtacataggcttttgtgtgaacataaatttttctttttcccttagatgaaatcgctgagtcacatggcatgtgtt

SEQ ID NO: 39883 - DNA, 120 bp, synthetic construct
  source 1..120: mol_type = other DNA
tcccaccatgctcaggcacagcaccactctggggacaacttgaccaaggggaataagaaacactttatctgggcccactggagcacatgcaaccaatcattaggagtacctggaagagac

SEQ ID NO: 39884 - DNA, 120 bp, synthetic construct
  source 1..120: mol_type = other DNA
cttgacgagtttcattcgccagctgaacctctatggattctgcaaaacacgcccaagcaactctccaggaaacaagaaaatgatggtaaagtagaaagcatttctgtaatcccttttctc

SEQ ID NO: 39885 - DNA, 120 bp, synthetic construct
  source 1..120: mol_type = other DNA
gataggaagtagctgtgtgatgcaggtaacacacatgcttcagaaactgacagacactttcagaagagtgagagtaacctgaaaggacagacagctgctctaagtctgacgtcctcttca

SEQ ID NO: 39886 - DNA, 120 bp, synthetic construct
  source 1..120: mol_type = other DNA
caagtccttcttccgtagctttgataacgaaccaaacccgattcaggaaacgctgggagaggcagggggagggctccagaaaggcagaggagagggccttgtcctcatgaagccacacaa

SEQ ID NO: 39887 - DNA, 120 bp, synthetic construct
  source 1..120: mol_type = other DNA
tttcaacacataaacgcaacctctagtacgctctatgattttaagaaaatatacccaccctcatgagacaaagccctgatagggccaaagctgcctggtattcactcctttcccagtctg

SEQ ID NO: 39888 - DNA, 120 bp, synthetic construct
  source 1..120: mol_type = other DNA
aagaagtctcctgatagcacccccacccccccccagcacttgtcctctgcactcttgtgaccacactgccatcggaatgatcttggtacagggacaatgagattatgtcactcctctact

SEQ ID NO: 39889 - DNA, 120 bp, synthetic construct
  source 1..120: mol_type = other DNA
cttgtttttcactgcctgggtgatatcccattgttggtcgtctcataatttgcctgaccattcctccactgatggagagttacaagttgcttcccacttttgccactagaaatgacatta

SEQ ID NO: 39890 - DNA, 120 bp, synthetic construct
  source 1..120: mol_type = other DNA
tattaattacttccttagaggcctcatctccaaatgcagacaccccggggctgagggcttcaaagtatgaatttggtggaggacataagcattagcaaagaatgcacacatagattaata

SEQ ID NO: 39891 - DNA, 120 bp, synthetic construct
  source 1..120: mol_type = other DNA
gcactatggtacaaccagacaatgatactactactcctcaatgaaaaggaataagttctgagccacacaaagttatacatgactcttcagttcattatgctaggtgaaagaaaccagtct

SEQ ID NO: 39892 - DNA, 120 bp, synthetic construct
  source 1..120: mol_type = other DNA
tgaaatggtctaatgccttagattcgctccacgttattccagaagctgatgtgcaggtaggcaagtgtctaactggaaccagatttgctgtgtatttaaagttgttcatgctgggtatct

SEQ ID NO: 39893 - DNA, 120 bp, synthetic construct
  source 1..120: mol_type = other DNA
gtagatgtaggctattatctctacgattgaaatcaggattgagacacaaagagctataagtaccaaaatgagtaagtggtatgaatactggaagaatatgtaatgtttagtgataatacc

SEQ ID NO: 39894 - DNA, 120 bp, synthetic construct
  source 1..120: mol_type = other DNA
tcacagagtctggccaaccctcctgacagttctgggaatccgtggctgcgtttgctgtctgcacattgggggcccgtggattcctctcccaggaatcaggagctccaggaacaaggcagt

SEQ ID NO: 39895 - DNA, 120 bp, synthetic construct
  source 1..120: mol_type = other DNA
gcccctggcaaactgcatcagaacttatttgcacataaaataaacttgtgttgtggcaagccattcgtggttgttctgttgcaatggctagcagttacttaaactgacatggctagtatt

SEQ ID NO: 39896 - DNA, 120 bp, synthetic construct
  source 1..120: mol_type = other DNA
taaatccagacttcaggccggtggggtcaggggcctgagggagagaagggggaagggaggagggaggacaggacaatgaataggaatagagttgggaaatcccggcaacatcatcaccag

SEQ ID NO: 39897 - DNA, 120 bp, synthetic construct
  source 1..120: mol_type = other DNA
acaccaagtcaacaaaacaatagaaagtggcaaggcccttaattcagtctgtagggagtcgggggagatgaagaggtggtgtgaatcgcccatctgagccagggaagccaggaaggcaga

SEQ ID NO: 39898 - DNA, 120 bp, synthetic construct
  source 1..120: mol_type = other DNA
gctcaggctgccataacaaaatgccattgagtgagtagctaaaacaacagaaatttattttttttctcacagttttgaagtctggaagtcctagatcaaggactggcggggttggcttct

SEQ ID NO: 39899 - DNA, 120 bp, synthetic construct
  source 1..120: mol_type = other DNA
taccactgcacacctatcagaatgtccaaaatccatagaaaaccaaaacaaagaatacaagaccaagaacaattgccagcgaagatgtggagcaacggaaactctccttcattgctggta

SEQ ID NO: 39900 - DNA, 120 bp, synthetic construct
  source 1..120: mol_type = other DNA
cccaggctagccctcctggatttaaaaaccagatgaggaccacatacctcccctgatggaaaaagaacacatcaagtaagctctcttacacagcagtaaatatcctacataaattagtag

SEQ ID NO: 39901 - DNA, 120 bp, synthetic construct
  source 1..120: mol_type = other DNA
tccccccaatgccacttcgggccgactcagagtcagagacttggtctgaggggagcaaacacaatcggcagaggatggcggtccaggctcagtctggcatccaagtcaggaccttgaggg

SEQ ID NO: 39902 - DNA, 120 bp, synthetic construct
  source 1..120: mol_type = other DNA
aggatccagggaggatccaggagagagccattgctagtgtcaatgacagagagcacatgcaaaaccaagtccactgagacccaggcaggctggcactccgagctctaaatccagacttca

SEQ ID NO: 39903 - DNA, 120 bp, synthetic construct
  source 1..120: mol_type = other DNA
ttccttgttaaactgatggggatgtgtggggtccaataaaggaaacatcatgcaccatcctgttgggagcatcctcacctccatgacggtgtttgggcctggggataaggcatctgtagt

SEQ ID NO: 39904 - DNA, 120 bp, synthetic construct
  source 1..120: mol_type = other DNA
catgcatgaaggcctctcccagatctgggatgctggcgaaggtgcaaaggaccactggagggttcaagagaggtagctggcccagaatgatgcagggagccagccaaactattccggaga

SEQ ID NO: 39905 - DNA, 120 bp, synthetic construct
  source 1..120: mol_type = other DNA
gaaggagcgtgtgtgaggccttaggtgagaactgaactgaaccttggaggctctgacaaaggcttacttacagatcttctccttcaatgctcctccagtgcctcgggtcctacttgtcag

SEQ ID NO: 39906 - DNA, 120 bp, synthetic construct
  source 1..120: mol_type = other DNA
gcaaagcccggattctgccaggatggtggtgggggaggagatgggaatggggtttgggggtggggttggtgtttgagggatgggggtggggttggtgttgggggatgggattggtagtga

SEQ ID NO: 39907 - DNA, 120 bp, synthetic construct
  source 1..120: mol_type = other DNA
agaagacgcacaccttcccacgggggctcctccccagccagagctacacttggcaaacctttggtcctaaatgatttattctctgaattgaagaaatacggtttacatatcttctaagta

SEQ ID NO: 39908 - DNA, 120 bp, synthetic construct
  source 1..120: mol_type = other DNA
ctacatgtttttccaatgttcataccactcactcatttcggtacttacagctctttgtgtctcaatcctgatttcaaatgtagagataataggctacatctacttctcgttcctgacttg

SEQ ID NO: 39909 - DNA, 120 bp, synthetic construct
  source 1..120: mol_type = other DNA
cagcaaatctggttccagttaaacactcgcctacctgcatatgagctgctggaataacgtggagtaaatctaaggcattagaccatttcatctctaaataacttaatatgcatttttaaa

SEQ ID NO: 39910 - DNA, 120 bp, synthetic construct
  source 1..120: mol_type = other DNA
cccttgtgcttgtcggataaaccccatggccaccactgataggtttttcatctttataattttgcattttccagaatgtcatataaatagaatcttatactatgtagcctttttagactg

SEQ ID NO: 39911 - DNA, 120 bp, synthetic construct
  source 1..120: mol_type = other DNA
gatgtatcttgagttagttttcatggaatatgtaaggatatgtccaggttattataatttgtgtataggtgtctaattgttccgacaccttttgttggaaaacctgtactttcaccatta

SEQ ID NO: 39912 - DNA, 120 bp, synthetic construct
  source 1..120: mol_type = other DNA
cctcccccataaactgttacatagtaggtgctcaacaaaaacaactgtgattctttggtattacactacccttctcatttctaggaggagtttctgagaaggccaaatttgccgtgacat

SEQ ID NO: 39913 - DNA, 120 bp, synthetic construct
  source 1..120: mol_type = other DNA
agctgggcaatggagacccactggcctggggagagagggagcatgtgagagacctcagctgagtactgaatggaaccttggaggctctaacaaaggcttacttacagatcttctccttca

SEQ ID NO: 39914 - DNA, 120 bp, synthetic construct
  source 1..120: mol_type = other DNA
tgcagatcctgggattcctccctctgctgacctgaagtcccactcttcagaccacagccctcaactctctggtcaccctgaaggcgcaatgagcacagagcacatttggccactgtgccc

SEQ ID NO: 39915 - DNA, 120 bp, synthetic construct
  source 1..120: mol_type = other DNA
ttgctgatactggttttttatttactgtttccattctgtaattttccaggtttgatttgggaagcagagcacagcagcccaaatttgttgtaatggcggcggctacaggtaaggcactaa

SEQ ID NO: 39916 - DNA, 120 bp, synthetic construct
  source 1..120: mol_type = other DNA
ttgacaaatgcctcgtgccgttgtcttagtccctttgggcttccataacaaaaatagtgtagactgggtggcttataaacaacacaactttatttctcacattctagaggttgggaagtc

SEQ ID NO: 39917 - DNA, 120 bp, synthetic construct
  source 1..120: mol_type = other DNA
aaaccttatgaccctcctggagagaagatggtagcagcacaagtaaagggtgagaaactggataagaagctgaaaaaaaaatggagcaaaaccaaacagcaggaactaggtatcgccaga

SEQ ID NO: 39918 - DNA, 120 bp, synthetic construct
  source 1..120: mol_type = other DNA
ggtggggaggggtcttgtaagggcatggaggagtcagcttggggtgcagcaaaggaaagtggggaaccaagacagctgggtggggtgtgctactgggccagtgcctggggagacagcctg

SEQ ID NO: 39919 - DNA, 120 bp, synthetic construct
  source 1..120: mol_type = other DNA
ttacacatttctgcagacagaggttgccaacgcaggactgacaatagcatctgataaaattcaaacaacagctccttttcattatttagaaatgcaggtagaggaaaggaaggttaatcc

SEQ ID NO: 39920 - DNA, 120 bp, synthetic construct
  source 1..120: mol_type = other DNA
atatattacctcctgtaattgattgtagtcaacactttgtgttgaccgagccattacagactctgctacattttcacaatgtgaactttccgttcctttcttgaactctgtccccgcctc

SEQ ID NO: 39921 - DNA, 120 bp, synthetic construct
  source 1..120: mol_type = other DNA
gtcttcccctaaatcaagcatggcagaaagtccgtttctttatagcagaccacgctcttgttaattggatctccaagcgatgagggaatgaacctgtgttttggttatattacatgttca

SEQ ID NO: 39922 - DNA, 120 bp, synthetic construct
  source 1..120: mol_type = other DNA
gaatacaactcaagcaggcggctctccggccccctggccccgcatctgcagcatccattcagccctgaagccgcgccgccatgcggaccccgcggggcgcctcctcccggccccgaggcc

SEQ ID NO: 39923 - DNA, 120 bp, synthetic construct
  source 1..120: mol_type = other DNA
attttaaaaaccagagaacacaacttgttaacacctggaatagctgaaaatcagacataacccggttagtgattgccatccttcctgtcgtcctctgctcagtctccccattctcagaca

SEQ ID NO: 39924 - DNA, 120 bp, synthetic construct
  source 1..120: mol_type = other DNA
tttcctgggctggtattgaatgtctgcagcttttccaggagtataatgcgagttgtcagtggatctatgattcgggggtcttgaggatggtggcccccttctcacagctccactaggcag

SEQ ID NO: 39925 - DNA, 120 bp, synthetic construct
  source 1..120: mol_type = other DNA
ccaaccctgtctgagtatgctcagcaaagcatattcggctcagcaaagttgcagtatccaagatcaatctgcaacagtcggttgtatttctacaccctagcaatgaataacatgaaaata

SEQ ID NO: 39926 - DNA, 120 bp, synthetic construct
  source 1..120: mol_type = other DNA
ctttggtcatggctacccacgaaaaggacacggaagccatcaagtcgctgcaggtggagatgtggccactgttgactgctgagcagaaccacctccttcacctcgttctgcaagaaacca

SEQ ID NO: 39927 - DNA, 120 bp, synthetic construct
  source 1..120: mol_type = other DNA
cgggtctggtgccgatgcatcgatttgcattggaattcacggttctggttccattcgcagaggtatatgcagtctggatcacaacagcttttatttgtaatagggatttttttttttttt

SEQ ID NO: 39928 - DNA, 120 bp, synthetic construct
  source 1..120: mol_type = other DNA
cgttgaaaggattgcaaagacaaacatacaaagaaacaaagaagactgtgcaacagagaccacctgtggtctgtaaagactaacacatttctatcccgcccttgacagaaagagtctgtg

SEQ ID NO: 39929 - DNA, 120 bp, synthetic construct
  source 1..120: mol_type = other DNA
ctgtcgaaatagaaatagaagcagaaaagaacaccctacaagtcccacccatttggaggcactcaactcacagtgacaaccctccacacctctcccctgcaaaaagacgcaaaacaaaaa

SEQ ID NO: 39930 - DNA, 120 bp, synthetic construct
  source 1..120: mol_type = other DNA
cacccccaccccaaggcaaagtgactgaagcgggcagatggcttccttgaaacattttattgacagaattaatgaaggcccaagactttggggcctgggttgtggggggagggtgtttaa

SEQ ID NO: 39931 - DNA, 120 bp, synthetic construct
  source 1..120: mol_type = other DNA
tagtccatctgctttctgtccatagaggttagcctgttctggagatttcctatagatggaattatacgaccaaatgtgaggccgtgtgtgtctggctgctttcacttagcgtaatggttt

SEQ ID NO: 39932 - DNA, 120 bp, synthetic construct
  source 1..120: mol_type = other DNA
gggtattcaattatggcaacagaaaacagactaagacatcttttcatgtgcttcttggccctctgtacctctgctttggaggaatgtctattcaagccctttgcccattttttaattcgg

SEQ ID NO: 39933 - DNA, 120 bp, synthetic construct
  source 1..120: mol_type = other DNA
caaacaaaaacatgaaatttgtgtggttttcattttggttttgctttgtattttagtagagacaggtttccaccatgttggccaggctggtcttgaactcctgacctcgtgatctgccca

SEQ ID NO: 39934 - DNA, 120 bp, synthetic construct
  source 1..120: mol_type = other DNA
tatatatatatgtgtatatatatttgttgttgtcgttgttgttgttgttgagatggagtctcgctctgtcacccaggctggagtgcactggtgcaattgcagttcactgcaacctctgcc

SEQ ID NO: 39935 - DNA, 120 bp, synthetic construct
  source 1..120: mol_type = other DNA
aacccagcatttacattgagtagagggaagactacaccattgttctagatggttcaaaatttggcttatctatagtaaccaggtcattttattcatttacttgtttctattatatattca

SEQ ID NO: 39936 - DNA, 120 bp, synthetic construct
  source 1..120: mol_type = other DNA
gtgtcaaagtggcaccaatctaaaactcacacagatacttaccatcaccttctataacacgattgcagtggaagcaaacatcaccaaatagctgaaaataaaaaaaggtggtcaaagttc

SEQ ID NO: 39937 - DNA, 120 bp, synthetic construct
  source 1..120: mol_type = other DNA
gatgaacttattggcaaatgctttagaaacagccatcgtacttgtatataatatttatgtaagtatgtgttttacacaggaagactgagcgtgggaaatgataaagcaaactgtggactt

SEQ ID NO: 39938 - DNA, 120 bp, synthetic construct
  source 1..120: mol_type = other DNA
ggagagatgctaatgaaaagtggacagaggtgaatccccaagaggaaggacaggcaagaaaacgagataaggcacaaactgataattcaatcacaaaagatgagatggctgaacttatac

SEQ ID NO: 39939 - DNA, 120 bp, synthetic construct
  source 1..120: mol_type = other DNA
acaggcatgagccactgcgcccggccaagaatctttatgcactaaatttttatactaggtggcaaactgagaaaaattcatagcctaacaatttatcataacttattgaagacaaaaaat

SEQ ID NO: 39940 - DNA, 120 bp, synthetic construct
  source 1..120: mol_type = other DNA
tcgatgatagcatggcatttctggcagatgtatttcccaaggcctctggctttctcacgattatgacaggggcgacacaggtgtctaaacagagtcaaaacttaaatttaaaattttagg

SEQ ID NO: 39941 - DNA, 120 bp, synthetic construct
  source 1..120: mol_type = other DNA
attagcaaaaaagtttttatttcatccgaatttttgtttttgattcagcagccacatttttgggctgttttgtgtcatctctgaatctagctttcctttccaaatgagctactaggctct

SEQ ID NO: 39942 - DNA, 120 bp, synthetic construct
  source 1..120: mol_type = other DNA
tgtttacttgaaaagcatatcttagtgatagtgaaatgagtagggctgccctttcctcccacaattatttcatgtatctcatgcatcaatatggctttccactagaagactcaggttcaa

SEQ ID NO: 39943 - DNA, 120 bp, synthetic construct
  source 1..120: mol_type = other DNA
agccttctgtatctgctgggtctgcatccttgaatttgatcaaccaaggataaaaaaaaatgtggaagaaaaaaccccaaacaataaaaaaaaccaatagaaaaataaaaataatacaaa

SEQ ID NO: 39944 - DNA, 120 bp, synthetic construct
  source 1..120: mol_type = other DNA
agttgatcaccagtggccaagtgtttaattcatcatgcctacataatgaagcctccgtaaaaatttaaaaggacagggtgcagacagcttctggatagctgaacacagtgtagtttccca

SEQ ID NO: 39945 - DNA, 120 bp, synthetic construct
  source 1..120: mol_type = other DNA
aggacttagaaatagatttccttgccaccattcatcctgcaaatctcttgcactctgggctatgcttctccagtgtcacaactattgttaattccaggtggagaacttctgctataatga

SEQ ID NO: 39946 - DNA, 120 bp, synthetic construct
  source 1..120: mol_type = other DNA
tgcattttgtgatgggaaaaaagggacacatttgtgaaatccaaactaaggagagagaaatgtgaagcaccaacaaagaacccagccctgagcatgtactaagtcagggttaatcagctg

SEQ ID NO: 39947 - DNA, 120 bp, synthetic construct
  source 1..120: mol_type = other DNA
ctggagaacaacttattgctggatataattgaaagtgaagattatttgttagcagccttggatagttttttttttctctaatatcatttaaccaaaaagaaatgtcttattctccagatg

SEQ ID NO: 39948 - DNA, 120 bp, synthetic construct
  source 1..120: mol_type = other DNA
ctgaggctggaggatcacttgagcttagcagttcaaggctgcaatgagctataatcatgccactacactctagcctgggctatacaatgagactttgtctcaaacaaaacaaaacaataa

SEQ ID NO: 39949 - DNA, 120 bp, synthetic construct
  source 1..120: mol_type = other DNA
gttgctgtaacacgcaaagaacagcaggttgcagaccgtcagccacttcttagatcgaagatcaaacaacactaagaaccgagcagcaaattctatctgatcacaaaaaccctattttat

SEQ ID NO: 39950 - DNA, 120 bp, synthetic construct
  source 1..120: mol_type = other DNA
cactacaccttaaaacacagaaggcattcaataaataatctcaggctctaaccactgtgcagtttggaagaaggaaagcaacatggcagatggctgcagtggctcacgcctgtaatccca

SEQ ID NO: 39951 - DNA, 120 bp, synthetic construct
  source 1..120: mol_type = other DNA
ccgctagttttagaggtaatataatatatattttgcaagaagtattccttttcatcacaagcagggggaaaaaggaaacagaacaatcaccttgctgccccctgaaccagtcaggcttcc

SEQ ID NO: 39952 - DNA, 120 bp, synthetic construct
  source 1..120: mol_type = other DNA
ttgggccgttttagactgcagaatttttctaacgtaattactgacaatgacaacactaagcctcccttgcggacgacatgatgaaaatgcagttagttaccaagtgatcaggaacctact

SEQ ID NO: 39953 - DNA, 120 bp, synthetic construct
  source 1..120: mol_type = other DNA
atttatctacatttcctaattttttaggtttcttttttacaatgaccatgtgaaacagtgaggaggcagggagggagggaaagaaagagacagacagacagatggatgaggacagaggca

SEQ ID NO: 39954 - DNA, 120 bp, synthetic construct
  source 1..120: mol_type = other DNA
ttggaagggagaggagttgtggtcaatgatcaaatcaatcatgcctatgaaaagaagcctccataaaaactcaataggacagtttaggggaacttctgggttgctgaacatatggaggtg

SEQ ID NO: 39955 - DNA, 120 bp, synthetic construct
  source 1..120: mol_type = other DNA
taagagcacattaatagtaccagatgtatttaattttctttttttttttgttgaatgtgaaacattggggccgggcatggtggctcatgcctgtcatcgcagcactttgagaggccgagg

SEQ ID NO: 39956 - DNA, 120 bp, synthetic construct
  source 1..120: mol_type = other DNA
tggtcaacatggtgaaaccccatctctactaaaatacaaaaattagctggatgtggccccatctctactaaagatacaaaaattagctggatgtggtgacatgttcctgtagtcccagct

SEQ ID NO: 39957 - DNA, 120 bp, synthetic construct
  source 1..120: mol_type = other DNA
ggtgaacacgtagtacatcacgctctggcccgccatgaagtgctgctccgccgtctccaggaagcgctccaggtacttctccaggtatctaagggcgcggcgccaccgtcagcctgagag

SEQ ID NO: 39958 - DNA, 120 bp, synthetic construct
  source 1..120: mol_type = other DNA
tcagcagttggtctcccagctgagacgcagacatttgagagcatgagaagaggagcccttcctgctgagccctgtctgaattactgacacacagaattattatttttgagatagcgtttc

SEQ ID NO: 39959 - DNA, 120 bp, synthetic construct
  source 1..120: mol_type = other DNA
gctgccccccacctcctggatggggcggctgctgggtggagacgctcctcacttcccaggtggggcggctgccgggcggaggggctcctcacttctcagacggggcggccgggcagagac

SEQ ID NO: 39960 - DNA, 120 bp, synthetic construct
  source 1..120: mol_type = other DNA
cccgaagtgacagtcggtcacttttattctattgattattctcctgtgtttataatgcgggcggcagggtgggggtttctttaaaatgcttctcctgagcctaaagagcctccccaccca

SEQ ID NO: 39961 - DNA, 120 bp, synthetic construct
  source 1..120: mol_type = other DNA
gctgcggatggaacaccacttcttgaagacccgcgtgagcagctgcgggccctggtgaccccagatccagccgttgtagtggtccacgaagtcccgcatgcacagcgccatgaactcgtg

SEQ ID NO: 39962 - DNA, 120 bp, synthetic construct
  source 1..120: mol_type = other DNA
cacccatggtgtgtaaccatcacaggcccaggccagagtctggtctgcgtaaggactgtcagaagtgatggcttcgccatgtgacacacagggctctgtgaggattggcagcctgggatt

SEQ ID NO: 39963 - DNA, 120 bp, synthetic construct
  source 1..120: mol_type = other DNA
tcgactctgacttctacgctccatgacaaagtcacaccccctttgaccctcagcaagcccgaggggcagttgcatcgtttctactttaggtgccaggaaacctgggcataaagtcaaggg

SEQ ID NO: 39964 - DNA, 120 bp, synthetic construct
  source 1..120: mol_type = other DNA
aggttgcagtgcgccgagattgcaccactgcactccagcctggacatcaagagcaaaactcagtttcaaaaaggaaaaaaaaaaaaaaagaaaaaaggaaacagacaaagatggtgactc

SEQ ID NO: 39965 - DNA, 120 bp, synthetic construct
  source 1..120: mol_type = other DNA
ctgtggtgtgaaccaagacatggtgccccctgcccctgtctttcttctgcagggagaggggctattttggtcctgagtacttttaaccccatgtgaaccacgcggacgggtggacagttg

SEQ ID NO: 39966 - DNA, 120 bp, synthetic construct
  source 1..120: mol_type = other DNA
gagactccgtctcaaaaaaaaaaaaaaaaaatcgagaggtgcagggcaatggagacagaaggccaaaggctgggtcagacccctaccagccaggttcttggcaccagctctgcagacccc

SEQ ID NO: 39967 - DNA, 120 bp, synthetic construct
  source 1..120: mol_type = other DNA
attcttttattcctttaccttcttttttttttatgagtcttgctctgtcgcccaggctggagtgtaatggcccgatctcggttcactaaaacctcttcctactggtttcaagcaattctc

SEQ ID NO: 39968 - DNA, 120 bp, synthetic construct
  source 1..120: mol_type = other DNA
tgattgtatgtgttttccgttgtgtcagtcctaaggggcaggggctcctcgctctcattctgttcctggtgctgacacaggttcagccgacagcaggagctcaacagatactgatgagat

SEQ ID NO: 39969 - DNA, 120 bp, synthetic construct
  source 1..120: mol_type = other DNA
aagacaggccacctctctgaacctgtctgtggacaggggtaacaccagcacccaggacacaggttgctgtggggattaagtgtggtcagggctcagctggatcccagactcagacaggag

SEQ ID NO: 39970 - DNA, 120 bp, synthetic construct
  source 1..120: mol_type = other DNA
ctgaaggcacctagatgtgcagccgctgttgaggacttgtgtccccccccggaaaaaggggctcccccaccagaggaacacactcttttttttttttttttttcacagatggagtcttgc

SEQ ID NO: 39971 - DNA, 120 bp, synthetic construct
  source 1..120: mol_type = other DNA
cacccgggttcaagtgattgtcctgcctcagcctcccgagtagctgggattataggcacctgccaccgcgcctggctaatttttgtatttttagtagagacggggtttcaccatcttggc

SEQ ID NO: 39972 - DNA, 120 bp, synthetic construct
  source 1..120: mol_type = other DNA
tgtaatcccagcactttgggaggccaaggtgggcaaatcatgaggtcaggagttcaagactagcctgcccaatatggtgaaaccccatctctactaaaaaatacaaaaattaaattaact

SEQ ID NO: 39973 - DNA, 120 bp, synthetic construct
  source 1..120: mol_type = other DNA
aggcataaaacaaaatggaaacgggggtgaggagcacaaatactcgcttatatataaagaaaattcactatgaaaatattgccacagccgggcgcaatggctcatgcctgtaatctcagc

SEQ ID NO: 39974 - DNA, 120 bp, synthetic construct
  source 1..120: mol_type = other DNA
tgaggcaggagaatcgcttgaacctgggaagtggaggttgcaatgagtcaagatcgcaccactgcactccagcctgggtgacacagactacatctcaaaaaaaaaaaaaaaaaaaaagtt

SEQ ID NO: 39975 - DNA, 120 bp, synthetic construct
  source 1..120: mol_type = other DNA
gctggggcaaaaatcttaatataaaatgatgcaaaatcacaacaaacctcactaaattagccaaagaagggcaatttattatgctaacggtataattcataatgcatcaaataatactgt

SEQ ID NO: 39976 - DNA, 120 bp, synthetic construct
  source 1..120: mol_type = other DNA
taaagcaccagtttaaaaatgttagaaaaagaaccacaaaataaaacacagaaacatggctggtcatggtggctcctgtctgtaatctcagagcattttgggaggctggggtgggaggat

SEQ ID NO: 39977 - DNA, 120 bp, synthetic construct
  source 1..120: mol_type = other DNA
gatcccagaagacatagctaatctacacaggacaacttccacattagaaacagaattataaaaggactaccattacaaaacaaaagcaccagggcaaaacattttgggagggaatcctgg

SEQ ID NO: 39978 - DNA, 120 bp, synthetic construct
  source 1..120: mol_type = other DNA
tgcaccactgcattccagcctgggtggcacagtgagactctgtctcaaaaaataaaaaaaataaaaaaatgggggtgattcaggaatgcaagtggggtttattcaaagaatgcaaggatg

SEQ ID NO: 39979 - DNA, 120 bp, synthetic construct
  source 1..120: mol_type = other DNA
aaataaataaataaataaataagaacaatgcagccttgtggctgacgcctataatcctagcactttgggaggccaaggctggtgaatggcttgagctcaggagtttgagaccagcccagg

SEQ ID NO: 39980 - DNA, 120 bp, synthetic construct
  source 1..120: mol_type = other DNA
ctcccgggtagctgggactacagatgcgtgccaccacgcctggctaatttttgtatttttagttttaccatgttggccgggctggtctcgaactcctgacctcaagtgatccacccacct

SEQ ID NO: 39981 - DNA, 120 bp, synthetic construct
  source 1..120: mol_type = other DNA
tctcaataaaacaacaactacaacaaaaatagtagcaaaagagagtgctcattctccccccgctcccccagcatcacctactgcgtgttcttgtcattaaccacctttgctaactggata

SEQ ID NO: 39982 - DNA, 120 bp, synthetic construct
  source 1..120: mol_type = other DNA
acctgtaatcccagcactttgggaggctgaggtgggaggatcttgaggccaagagttcaataccagcctgggcaacgcaggaagacctcatctctacaaaaaataaaaataaaaaaatta

SEQ ID NO: 39983 - DNA, 120 bp, synthetic construct
  source 1..120: mol_type = other DNA
aaaatgtgccaagagaaaaatgcactcagggagatgggctgcggggcaggggctactacatacagttgggttagggggtgctgctctgaaaaggggacatttgcgctgaggcctgaagga

SEQ ID NO: 39984 - DNA, 120 bp, synthetic construct
  source 1..120: mol_type = other DNA
tttaaaaaaaaaggtaactcctggaatcaagcaatccacccccttcagcctcctaaagtgctgggattacaggtgtgagccaccacacctggccggaaagatacaatctttttttttgtt

SEQ ID NO: 39985 - DNA, 120 bp, synthetic construct
  source 1..120: mol_type = other DNA
tgaaggggaaggagcaaatgatggtcacagatgatcagggctctctgggtcccgtaactatatctgggacaatgactttcaaacaggtgaagacagacactcttcctgtttcgctctcat

SEQ ID NO: 39986 - DNA, 120 bp, synthetic construct
  source 1..120: mol_type = other DNA
acccacaaataagagccaaatgataaactggggaaagatccttggcacacaaagaccagacaaggggtaaaaccttactgatgagctcaaaccaatcaataagcaacacacaaagaacct

SEQ ID NO: 39987 - DNA, 120 bp, synthetic construct
  source 1..120: mol_type = other DNA
ttcaagtatgcaaacaggaattgtttttcctacttctttcggttaattcattcaaacaatattcaggaagcacctgctaggtgccaggcctggcactaggctctgggatctggacaaggg

SEQ ID NO: 39988 - DNA, 120 bp, synthetic construct
  source 1..120: mol_type = other DNA
ctttctattttgttttcctttgtattcctttgatttggggaccctcttttggggggttgcagctatggaaacacagtgtagcagggtttcgggtcctggagaaggtttgaggctggaaga

SEQ ID NO: 39989 - DNA, 120 bp, synthetic construct
  source 1..120: mol_type = other DNA
ggaggagcgcgactcacccacggtggccgggcagagcctgcctcgaacccggcttctccccgacgccctctctccagccccgggacccaaccgggtggggctgccctcgagggctccgga

SEQ ID NO: 39990 - DNA, 120 bp, synthetic construct
  source 1..120: mol_type = other DNA
attctgctatcgagtcaaatgaaagcaggtcaactaaaacttgcagaaatcttcacaagttgttaaaaattgtcacattgtgctgggcatggtggctcacacctgtaatcccagcacttt

SEQ ID NO: 39991 - DNA, 120 bp, synthetic construct; identical to SEQ ID NO: 13343
  source 1..120: mol_type = other DNA

SEQ ID NO: 39992 - DNA, 120 bp, synthetic construct; identical to SEQ ID NO: 7077
  source 1..120: mol_type = other DNA

SEQ ID NO: 39993 - DNA, 120 bp, synthetic construct; identical to SEQ ID NO: 7078
  source 1..120: mol_type = other DNA

SEQ ID NO: 39994 - DNA, 120 bp, synthetic construct; identical to SEQ ID NO: 20582
  source 1..120: mol_type = other DNA

SEQ ID NO: 39995 - DNA, 120 bp, synthetic construct
  source 1..120: mol_type = other DNA
aatcacttgagcccaggattttgaggctgtggtaagctgattgtgccattgcactccagcttaggcaacagagcaagaccctgtacctaaaagaagaaaagaaaagaaagtcaaaagaca

SEQ ID NO: 39996 - DNA, 120 bp, synthetic construct; identical to SEQ ID NO: 27776
  source 1..120: mol_type = other DNA

SEQ ID NO: 39997 - DNA, 120 bp, synthetic construct
  source 1..120: mol_type = other DNA
agtaccagccactgcaaaatcatgccaaattgtaaagaccatcaagcctaggaagaaactgcatcaactaatgagcaaaataaccagctaacatcataatgacaggatcaaattcacaca

SEQ ID NO: 39998 - DNA, 120 bp, synthetic construct
  source 1..120: mol_type = other DNA
cacaacataccagaatctctgggacgcattcaaagcagtgtgtagagggaaatttatagcactaaatgcccacaagagaaagcaggaaagatctaaaattgacaacctaacatcttaatt

SEQ ID NO: 39999 - DNA, 120 bp, synthetic construct
  source 1..120: mol_type = other DNA
ttcaacaacccttcatgctaaaaactctcaataaattaggtattgatgggacgtatctcaaaataataagagctatctatgacaaacccacagccaatatcatactgaatggacaaaaac

SEQ ID NO: 40000 - DNA, 120 bp, synthetic construct
  source 1..120: mol_type = other DNA
aactatctgatctttgacaaacctgagaaaaacaagcaatggggaaaggattccctatttaataaatggtgctgggaagactggctagccatatgtagaaagctgaaactggatcccttc

SEQ ID NO: 40001 - DNA, 120 bp, synthetic construct
  source 1..120: mol_type = other DNA
atcattctcagcaaactattgcaaggacaaaaaaccaaacaccgcatgttctcactcatgggtgggaattgaacagtgagaacacatggacacaggaaggggaacaccacacactgggga

SEQ ID NO: 40002 - DNA, 120 bp, synthetic construct; identical to SEQ ID NO: 17951
  source 1..120: mol_type = other DNA

SEQ ID NO: 40003 - DNA, 120 bp, synthetic construct; identical to SEQ ID NO: 18624
  source 1..120: mol_type = other DNA

SEQ ID NO: 40004 - DNA, 120 bp, synthetic construct
  source 1..120: mol_type = other DNA
ctcggcctcccaaagtgctgggattagaggcatgagtcaccatgcccagaccctctatctgtttctaggaggttgactactttaggttttttttgttttttttttttgtttgtttgtttt

SEQ ID NO: 40005 - DNA, 120 bp, synthetic construct
  source 1..120: mol_type = other DNA
aaggcaggcggctgggaggtggaggttgtagcaagccgagatcacgccgctgcactccagcctgggcaccattgagcactgagtgaacgagactccgtctgtaatcccggcacctcggga

SEQ ID NO: 40006 - DNA, 120 bp, synthetic construct
  source 1..120: mol_type = other DNA
taagctgagattgagccactgtacttcagcctgggcaacagactgagattaaaaaaaaaaaaaagaaaggaaaggaagaaaggaaggaaggaaggaaggaaggaaggaaggaaggaagga

SEQ ID NO: 40007 - DNA, 120 bp, synthetic construct; identical to SEQ ID NO: 15973
  source 1..120: mol_type = other DNA

SEQ ID NO: 40008 - DNA, 120 bp, synthetic construct; identical to SEQ ID NO: 15974
  source 1..120: mol_type = other DNA

SEQ ID NO: 40009 - DNA, 120 bp, synthetic construct; identical to SEQ ID NO: 15975
  source 1..120: mol_type = other DNA

SEQ ID NO: 40010 - DNA, 120 bp, synthetic construct
  source 1..120: mol_type = other DNA
gagtagctgggattacaggtatgcatcaccatgactggcaaatttttttttttttatctttagtacagacagggtttcaccatgataggcaggctggtctcaaactcctgaccttgtgat

SEQ ID NO: 40011 - DNA, 120 bp, synthetic construct
  source 1..120: mol_type = other DNA
acagagtaagactccgtctcaaaacaaaaacaaaaacaaacaaacaaacaaaaaaacagagccgggcgcagtggctcatgcctgtaatctcaacactttgggaggctgaggcaggtggat

SEQ ID NO: 40012 - DNA, 120 bp, synthetic construct; identical to SEQ ID NO: 21992
  source 1..120: mol_type = other DNA

SEQ ID NO: 40013 - DNA, 120 bp, synthetic construct; identical to SEQ ID NO: 21993
  source 1..120: mol_type = other DNA

SEQ ID NO: 40014 - DNA, 120 bp, synthetic construct; identical to SEQ ID NO: 29131
  source 1..120: mol_type = other DNA

SEQ ID NO: 40015 - DNA, 120 bp, synthetic construct
  source 1..120: mol_type = other DNA
ggagatgatagtgatgatagcgatgaaatgatgatggagataacagcaataataatgatgatggtgatgatgatgatgatgatgatgatgataatgaagagtagtgatgatgcagctgat

SEQ ID NO: 40016 - DNA, 120 bp, synthetic construct; identical to SEQ ID NO: 29132
  source 1..120: mol_type = other DNA

SEQ ID NO: 40017 - DNA, 120 bp, synthetic construct; identical to SEQ ID NO: 29133
  source 1..120: mol_type = other DNA

SEQ ID NO: 40018 - DNA, 120 bp, synthetic construct
  source 1..120: mol_type = other DNA
cttttgtagggacatggatgaaactggaaatcatcattctcagcaaactatcgcaaggacaaaaaaccaaacactgcatgttctcactcataggtgggaattgaacaatgagaacacatg

SEQ ID NO: 40019 - DNA, 120 bp, synthetic construct; identical to SEQ ID NO: 29135
  source 1..120: mol_type = other DNA

SEQ ID NO: 40020 - DNA, 120 bp, synthetic construct; identical to SEQ ID NO: 29136
  source 1..120: mol_type = other DNA

SEQ ID NO: 40021 - DNA, 120 bp, synthetic construct
  source 1..120: mol_type = other DNA
caccttggtcaggttctcaatcttgaccatgtcattgtcggcgtctccccggagcactcgctgccgctcactggccacgtccacatcatcctccacaggcttggtagacacaggcatgcg

SEQ ID NO: 40022 - DNA, 120 bp, synthetic construct; identical to SEQ ID NO: 33174
  source 1..120: mol_type = other DNA

SEQ ID NO: 40023 - DNA, 120 bp, synthetic construct; identical to SEQ ID NO: 15859
  source 1..120: mol_type = other DNA

SEQ ID NO: 40024 - DNA, 120 bp, synthetic construct
  source 1..120: mol_type = other DNA
ggtcgcgccactgcactccagcttggcgacagagcaagattctgtctgaaaaaaaaaaaaaagaaaaaaagctgaaatacaaatgtttcattcaagagcacgtcttccaggatatagaga

SEQ ID NO: 40025 - DNA, 120 bp, synthetic construct
  source 1..120: mol_type = other DNA
ggccatcagagaaatgcaaatcaaaaccacagtgagataccatctcataccagttagaatggcaatcattcaaaagtcaggaaacaacaggtgctggagaggatgaggagaaataggaac

SEQ ID NO: 40026 - DNA, 120 bp, synthetic construct; identical to SEQ ID NO: 18490
  source 1..120: mol_type = other DNA

SEQ ID NO: 40027 - DNA, 120 bp, synthetic construct
  source 1..120: mol_type = other DNA
ggaatccaacttacgagggatgtgaaggacctcttcaaggagaactacaaactgctgctcaaggaaataaaagaggatacaaacaaatggaagaacattccatgctcatgggtaggaaga

SEQ ID NO: 40028 - DNA, 120 bp, synthetic construct
  source 1..120: mol_type = other DNA
aaacagacacttctcaaaagaagacatttatgcagccaaaagacacatgaaaaaacgctcaccatcactggccattagggaaatgcaaatcaaaaccataatgagataccatctcacacc

SEQ ID NO: 40029 - DNA, 120 bp, synthetic construct
  source 1..120: mol_type = other DNA
ccttgcctcaagcaatcttcttgccttgcctcccaaagtgctgggattacgggtgtgagccaccacatctggtcttaaactaacaaatattaaatactgtatttttatctgtatcatagg

SEQ ID NO: 40030 - DNA, 120 bp, synthetic construct
  source 1..120: mol_type = other DNA
tatgcagcccataaaaaatgatgagttcatgtcctttgtagggacatggatgaagctggaaaccatcattctcagcaaactatcgcaaggacaaaaaaccaaacaccgcatgttctcact

SEQ ID NO: 40031 - DNA, 120 bp, synthetic construct; identical to SEQ ID NO: 18489
  source 1..120: mol_type = other DNA

SEQ ID NO: 40032 - DNA, 120 bp, synthetic construct
  source 1..120: mol_type = other DNA
ggacataagcaggggcaaggacttcatgtctaaaacaccaaaagcaatggcaacaaaagctaaaattgacaaatgagatctaattaaactaaagagcttctgcacagcaaaagaaactac

SEQ ID NO: 40033 - DNA, 120 bp, synthetic construct
  source 1..120: mol_type = other DNA
gaggcactacgaggcttaatagctggttgtccacatatgcccagttcccccccaaaacgagattccacagatgccaatgacaatgacctggacaccccaaccctcacacctgccctgaag

SEQ ID NO: 40034 - DNA, 120 bp, synthetic construct
  source 1..120: mol_type = other DNA
tgtgagccccccaccacttcctccctgtgagctccctgtgaggcccccgaccagtccctccctgtgagcagtaatggcgccactgcactccagcttgggcaacggagtaagaccctgtct

SEQ ID NO: 40035 - DNA, 120 bp, synthetic construct
  source 1..120: mol_type = other DNA
ggactctgttcagccctgaaggccaagccacttggtgcctctctgcccgcaggctgacactgacatggagggcagtgtggacaccaggcaggaaaagaagaatggcagccagggcagcag

SEQ ID NO: 40036 - DNA, 120 bp, synthetic construct
  source 1..120: mol_type = other DNA
cttcaaccctcaaagtgctgggattacaggcgtgagccactgcgcccggccgcacctggcctacgttcttaaccctgatctctgtctgccgggacagtcccctcacaggtcaccaatgcc

SEQ ID NO: 40037 - DNA, 120 bp, synthetic construct; identical to SEQ ID NO: 19344
  source 1..120: mol_type = other DNA

SEQ ID NO: 40038 - DNA, 120 bp, synthetic construct; identical to SEQ ID NO: 19345
  source 1..120: mol_type = other DNA

SEQ ID NO: 40039 - DNA, 120 bp, synthetic construct
  source 1..120: mol_type = other DNA
gtgtactacttctacttataaaaaagttaactgtaaaaaagcctcaggcaggtccttcgggaggtgtttcagaagaaggcattgcacagggatctacaactggaaataccatttgaccca

SEQ ID NO: 40040 - DNA, 120 bp, synthetic construct; identical to SEQ ID NO: 4244
  source 1..120: mol_type = other DNA

SEQ ID NO: 40041 - DNA, 120 bp, synthetic construct; identical to SEQ ID NO: 18483
  source 1..120: mol_type = other DNA

SEQ ID NO: 40042 - DNA, 120 bp, synthetic construct; identical to SEQ ID NO: 18484
  source 1..120: mol_type = other DNA

SEQ ID NO: 40043 - DNA, 120 bp, synthetic construct
  source 1..120: mol_type = other DNA
atgaaattctctcaataaattaggtattgatgggacatatctcaaaataataagagctatctatgacaaacccacagccaatatcatactgaatgggcaaaaactggaagcattcccttt

SEQ ID NO: 40044 - DNA, 120 bp, synthetic construct
  source 1..120: mol_type = other DNA
acaaaaacaagaaatggggaaatgattccttatttaataaatggtgctgggaaaactagctagccatatgtagaaagctgaaactggatcccttccttacaccttatacaaaaattaatt

SEQ ID NO: 40045 - DNA, 120 bp, synthetic construct
  source 1..120: mol_type = other DNA
tgtaactaacctgcacgttgtgcacatgtaccttaaaacttgaagtataataatataaaaaaactaaaaaaaaaaaaaaggaaggaaatcgtgttgtggatgaatctagaggacattttg

SEQ ID NO: 40046 - DNA, 120 bp, synthetic construct; identical to SEQ ID NO: 18486
  source 1..120: mol_type = other DNA

SEQ ID NO: 40047 - DNA, 120 bp, synthetic construct
  source 1..120: mol_type = other DNA
ttctcgtaaatttgttggagttcattgtagattctggatattagccctttgtcagatgagtaggttgcgaaaattttctcccatgttgtaggttgcctgttcactctgatggtagtttct

SEQ ID NO: 40048 - DNA, 120 bp, synthetic construct
  source 1..120: mol_type = other DNA
tgggagttcactcatgatttggctctctgtttgtctgttgttgtataggaatgcttgtgatttttgtacattaattttgtatcctgagactttgctgaagttgcttatcagcttaaggag

SEQ ID NO: 40049 - DNA, 120 bp, synthetic construct
  source 1..120: mol_type = other DNA
ttgtagtattctctgatggtagtttgtatttctgtgggatcggtggtgatatcccctttatcattttttattgcatctatttgattcttctctctttttttctttattaatcttgctagc

SEQ ID NO: 40050 - DNA, 120 bp, synthetic construct
  source 1..120: mol_type = other DNA
gtttaaagtctgttttatcagagactaggattgcaacccctgcctttttttgttttccatttgcttggtagatcttcctccatccttttattttgagcctatgtgggtctctgcatgtga

SEQ ID NO: 40051 - DNA, 120 bp, synthetic construct
  source 1..120: mol_type = other DNA
ctctatcagctcctttaagcacttctctgtattcgttattctagttatactttcttctaaatttttttcaaagttttcaacttctttgcctttggtttgcatgtcttcccgtagctcaga

SEQ ID NO: 40052 - DNA, 120 bp, synthetic construct
  source 1..120: mol_type = other DNA
tgacccgattttcccgattttccaggtgccgtctgtcacccctttctttgattaagaaagggaactccctgaccccttgcgcttcccgagtgaggcaatgcctcgccctgcttcggctcg

SEQ ID NO: 40053 - DNA, 120 bp, synthetic construct; identical to SEQ ID NO: 18487
  source 1..120: mol_type = other DNA

SEQ ID NO: 40054 - DNA, 120 bp, synthetic construct
  source 1..120: mol_type = other DNA
aaaagcaatgcaaagtatttactatacatctgaataatatgcacttcataattgtgcctcaccccacctcctaaaatcttatatcgatctgtgttttgggtttgagagccaccttaatgt

SEQ ID NO: 40055 - DNA, 120 bp, synthetic construct
  source 1..120: mol_type = other DNA
caacctattccataatcacatagattaattctcataatagttcttttccctaattcctcttccataaaaagctccacagtaggacgggcatggtggctcacgcctgtaatcccagcactt

SEQ ID NO: 40056 - DNA, 120 bp, synthetic construct
  source 1..120: mol_type = other DNA
tacaacatccttgaaaacagacctcaaatccagctcacagtaaattcaagaagcctgagcaaaggccaaatacagactcccgaatttttttattgtagagaatacctcatactgagttcg

SEQ ID NO: 40057 - DNA, 120 bp, synthetic construct
  source 1..120: mol_type = other DNA
aattgaagctcatcttacttgtaaccagcaggtgacactctctgcatgattttaaattgaggaaagacattcttgggatatcagccttttagtgtctgtttttatgaaagtatctccaac

SEQ ID NO: 40058 - DNA, 120 bp, synthetic construct
  source 1..120: mol_type = other DNA
tgatccgtgtctatacttgagaaccactatcctctcatcagtaaaggggattggagctttctgttttaaatgtttgagcctggagaagggtcaattatctagttgggctagactgtgaaa

SEQ ID NO: 40059 - DNA, 120 bp, synthetic construct
  source 1..120: mol_type = other DNA
tggacaaggaatagtcaacttgtattccaaaacaaaacaaaacacaaaaactaatacacaggacctaagagggcttgagagaggatgagaggttccatttatccaacttcctaggaggaa

SEQ ID NO: 40060 - DNA, 120 bp, synthetic construct
  source 1..120: mol_type = other DNA
aggtgtgctcggagccactgaacattcagtcgctttatttctttgccatcaagcagctgaaaacaagagttcacagatcaacttcaggaccagcacactttgaatgtagcacaattaaca

SEQ ID NO: 40061 - DNA, 120 bp, synthetic construct
  source 1..120: mol_type = other DNA
ccttacagccttgctgataacaagccctactctgatgcaaatatgtctatcagataggtctgctttgcaagataattttctggcattcaagtgagagagctgttcatcccttctgaagaa

SEQ ID NO: 40062 - DNA, 120 bp, synthetic construct
  source 1..120: mol_type = other DNA
tggctgaggaatggtgttggtctgaggaaagaccaaggaactctggggaatctatgagaagtgctcaaaaaatcctggcctaaataaaaatataactaggaaagtaaacctattggtaag

SEQ ID NO: 40063 - DNA, 120 bp, synthetic construct
  source 1..120: mol_type = other DNA
tcaggtccctcaaaacttggaggatcctcccatcttcacaatttcatagcttaattattcaagactctccacaatttaacctaaatctttcttcaaatttaccagttcagtggctctcga

SEQ ID NO: 40064 - DNA, 120 bp, synthetic construct
  source 1..120: mol_type = other DNA
tcagcagctgtggtaagctaacggcttaactcatctttggcagacaagaatttctgcaacagccagattctagtctcgtgtctttaaatttggaacagctgtgatatcggcataattttc

SEQ ID NO: 40065 - DNA, 120 bp, synthetic construct
  source 1..120: mol_type = other DNA
tttatgagtaagagtgaccgctgtgaggaagtaaaaagagtcctagactaaagattgaaaactctcttttcatttgagtcattaaatgctaccagcgtccatacacagcgggtgggcatc

SEQ ID NO: 40066 - DNA, 120 bp, synthetic construct
  source 1..120: mol_type = other DNA
agcctggagaagttggctgggacagatgacaccacttggagaccatatttaggctctcagactttatccaagtgggactgttgtttaaaggtttgaaaaaacatggcttatagttgagaa

SEQ ID NO: 40067 - DNA, 120 bp, synthetic construct
  source 1..120: mol_type = other DNA
tacatacaataaaatctgataaccagcctgggcaacataacgagaccctgtctctacaaataattaaaaaattagctgggcatgatggcacacgcttgtagtcccagttacttgggaggc

SEQ ID NO: 40068 - DNA, 120 bp, synthetic construct
  source 1..120: mol_type = other DNA
ttcagcctccaaaagtgccgggattataggtgtgagccaccatgcctggccaaaagttgacacttctataaccagagagctttgcctctaatagttataaaacagatgttaaaaataaaa

SEQ ID NO: 40069 - DNA, 120 bp, synthetic construct
  source 1..120: mol_type = other DNA
ttttaaacacaagcctggaacagacataatacttgggaacccgcccagaatacagggaattcatcgctttctttcctctggactctatgcctatgtttgtgtagcatattgtgtcattag

SEQ ID NO: 40070 - DNA, 120 bp, synthetic construct
  source 1..120: mol_type = other DNA
gcacatgaagactcagaggcagaaatgccgatttaggaatcaccagaatctcttcatgaggcttcacagtagggtttcctatctagacatgaagcatgttcatcccagctttatttttag

SEQ ID NO: 40071 - DNA, 120 bp, synthetic construct
  source 1..120: mol_type = other DNA
cttttattataagaaacagactcagaaaggttgggcttgcttatgttcacaccacttattagagccctcactgggatgactgtattaaaggaagaaggtctgcactggagaaggggtaaa

SEQ ID NO: 40072 - DNA, 120 bp, synthetic construct
  source 1..120: mol_type = other DNA
gaatgtttggaaaatagtgaaagaatgcaggcaataaaaagtaaattttagatacattcaaaggcttactcctctctgcctgtggacgcttacccctttctgcccgtggacgccaccaag

SEQ ID NO: 40073 - DNA, 120 bp, synthetic construct
  source 1..120: mol_type = other DNA
gcagtggcagaagattttaaattactgccaggaaacaaatcttagcaggagataagagccagagaagtgacagggaagctacagtttacaacagatttgtgaactcagacaagcacagtg

SEQ ID NO: 40074 - DNA, 120 bp, synthetic construct
  source 1..120: mol_type = other DNA
tttttttaattttttaaggaatgtggcacatactatcaatctgttttccagaaagttttgggctgggtatggtggctcatgcctgtaatcccagcagtttgggagatggaggcaggtgga

SEQ ID NO: 40075 - DNA, 120 bp, synthetic construct
  source 1..120: mol_type = other DNA
ttcttttacacattataaaaatgatatatagtcactttagaaaatcgtaaaagtgcagaaagcaaaaggtgaggagaaaaaattcaccttcaaattcccaaagacaatccttttgtcaga

SEQ ID NO: 40076 - DNA, 120 bp, synthetic construct
  source 1..120: mol_type = other DNA
gtttatggcttttatttctgaaaagtaaaaaagcatctacaatggagccttggacaacatgggggttagggagactgacccctcgtgcagttgaaaattcacatataacttctgactccc

SEQ ID NO: 40077 - DNA, 120 bp, synthetic construct
  source 1..120: mol_type = other DNA
gattacagacttgcatgatgttcttctctctggtggctctctaccatagcattaacaatcctttctgtagagtaccatgtgctttgtgatgagccttaaaaatccttatgagtggcgagg

SEQ ID NO: 40078 - DNA, 120 bp, synthetic construct
  source 1..120: mol_type = other DNA
tatgcctttctcacagcaatcctgcacccatgtgaaagctgcattttcaatatgagataaatgtattgtacaaaaagtgcaaggtttttgcacctgctgttgtagctgcagtgatggctt

SEQ ID NO: 40079 - DNA, 120 bp, synthetic construct
  source 1..120: mol_type = other DNA
cccactgggaccctcccataacatgtgaagattattaccattcaaggtgagatttggatgaggacacagagccaaaacatgtaacactgtatctttacagttgttgacatgtgtcttgac

SEQ ID NO: 40080 - DNA, 120 bp, synthetic construct
  source 1..120: mol_type = other DNA
agactatagttggataagaatggaagaagttgaagcagggagattggttaggaggctgttgctgtgtgactgtgagcaagttacttgatctctctgaatcttgggtttcattatctatcc

SEQ ID NO: 40081 - DNA, 120 bp, synthetic construct
  source 1..120: mol_type = other DNA
ccaaaagattttccagagggaaccccccaaaaatgggataaagagtctgaagagatagcagagaggtaaaggacaaagcattagtggcaatgaccaacatctggggccttcttcatcatt

SEQ ID NO: 40082 - DNA, 120 bp, synthetic construct
  source 1..120: mol_type = other DNA
gagtggagagagagtgaaagtgagagaaaagaaagaagaaaataactaagggaaggaggaaagtggggaggaaggaagaacagtgtgaagacaatggcctgaaaactgaaaaagtctgtt

SEQ ID NO: 40083 - DNA, 120 bp, synthetic construct
  source 1..120: mol_type = other DNA
taatttaagatagtaagcgcgcattattatcttccccttgaattccagagggagtctgaagcatgactttcactagtgtgcactgagttccagctctaaagccagaagtcaaactgcaaa

SEQ ID NO: 40084 - DNA, 120 bp, synthetic construct
  source 1..120: mol_type = other DNA
ctttactctgtggattcgccttgaattctttcttgtacaagatccaagaaccctctttcaaggtctgcatcgggacccctttctagtaacaatagaatcctttataattccctacattaa

SEQ ID NO: 40085 - DNA, 120 bp, synthetic construct
  source 1..120: mol_type = other DNA
ctgtgataacagctacattgggctttcctaggttgacaatgtttgccaacctgctcatttcctcttccctggtctttcctttttagccactgttttaagttctggaaaacagttttgctt

SEQ ID NO: 40086 - DNA, 120 bp, synthetic construct
  source 1..120: mol_type = other DNA
gagaagggaggattgcttgagcccatgagttctaggttatagtgagctgtaatcatgccactgcagtctggcctgggctacaaagagagaccctgtctctttaaaaaaaaaaaaaaaaaa

SEQ ID NO: 40087 - DNA, 120 bp, synthetic construct
  source 1..120: mol_type = other DNA
gataaggttcaagaggggaaaagacacaccagagattacatgaattttttcaaattctacatcattttgtggacttttgccataaacagttgtagaagaaattgtcacttcagccaaaaa

SEQ ID NO: 40088 - DNA, 120 bp, synthetic construct
  source 1..120: mol_type = other DNA
attctagagatggaaggtacaaataaaagaaaaattgagcagggtaagaagaacagaaaagtgaggggaggtgctattttagagactggggaggggaaacagaaggcctttctaagggga

SEQ ID NO: 40089 - DNA, 120 bp, synthetic construct
  source 1..120: mol_type = other DNA
cagatactaacatgattgtgaatttgaagtatgaatttatatgttttacaaataactgtggtccctaagaagttatctaaactggttatttacattaaagaagtatctatcatttttccc

SEQ ID NO: 40090 - DNA, 120 bp, synthetic construct
  source 1..120: mol_type = other DNA
tccattaaacccattatcagccagtaacactgcagcttgaactagtatttcagactagcctcagaaaagaaaatgggcagtgaagaacaggacacagggatgagttttgatttgcggaaa

SEQ ID NO: 40091 - DNA, 120 bp, synthetic construct
  source 1..120: mol_type = other DNA
gtcaacatttaagggaccagctcaaagcccacctcactccaactttcttaaccaaatttacattgagcaatctttacctcctccaaacacctgtggtattaatagttggtatggcaatcc

SEQ ID NO: 40092 - DNA, 120 bp, synthetic construct
  source 1..120: mol_type = other DNA
tcccaaagtgctgggattacaggcataagccaccacacctggccctcatactaaacttttagagtacttaattccttgccatttcatttcagccaaatgatttgcaagctgtaaaaatct

SEQ ID NO: 40093 - DNA, 120 bp, synthetic construct
  source 1..120: mol_type = other DNA
gccacctcaactgtgtaaagttgaaatcagaacaaatactctcctcttcccttggtggggaactacatttatggcagttcattgctttactatttggacatttcaaactgtcccaaggtg

SEQ ID NO: 40094 - DNA, 120 bp, synthetic construct
  source 1..120: mol_type = other DNA
ccgccaacccccaaaacctgcaagacacatgttagtgcaagaatcagcaaactatgggccactggccaaatgtttatataaagttttaatggaacacagtcgtgttcattcatttccaca

SEQ ID NO: 40095 - DNA, 120 bp, synthetic construct
  source 1..120: mol_type = other DNA
gaacagtgcattctcaagccagcctgacaaacatttgaggaactctctttgcacattggtgaaatgaaagttcacaagatttgttcagagccaaatgttggcaggtatgagaaagtcatc

SEQ ID NO: 40096 - DNA, 120 bp, synthetic construct
  source 1..120: mol_type = other DNA
tgtgtaaattaatacttttaaattctaacctgattctaaaatgttgacattctgggggataggacaggaggattctggataacctctcttgttcccactcctactgtagccctagcccac

SEQ ID NO: 40097 - DNA, 120 bp, synthetic construct
  source 1..120: mol_type = other DNA
tcagaacaagatgtgcacactctacttaaaacattccaattcagattcactaccatttaaatgctgtacagacacatgtggctactgactactataacggataactcaccttgaaacctt

SEQ ID NO: 40098 - DNA, 120 bp, synthetic construct
  source 1..120: mol_type = other DNA
actgcactccagcctgggtgacagagtgagactccatctcaaaaaaaaaaaataaaaaataaaaaaataataataatcaggggcttgtacaaaccaacaaattcctacagaccaggcgtt

SEQ ID NO: 40099 - DNA, 120 bp, synthetic construct
  source 1..120: mol_type = other DNA
atttaatacatagtttcactatagattaataaggaaacacagataagcaaaccagtaagcagtggctcactcctgtaattccagcactttgggaggctgaggcgggaggattgcttgagc

SEQ ID NO: 40100 - DNA, 120 bp, synthetic construct
  source 1..120: mol_type = other DNA
ttgagggagggagggaaggaaggaaggaaggaaataaagaaagaaaaagaaaaacacagagatgaaatcacagattaagcaaaatgaggggaaaaatagtaaccagaatcccatcggcct

SEQ ID NO: 40101 - DNA, 120 bp, synthetic construct
  source 1..120: mol_type = other DNA
tattaacaagaattagtagtagaatgttcttatgcttataaatcaggttggtttgaactaagcctcactgaccttatccagagccacctgaaccactgcttcgctttctgtgtccaaggc

SEQ ID NO: 40102 - DNA, 120 bp, synthetic construct
  source 1..120: mol_type = other DNA
tctgcaccttcaggttcagacccttcaagatctaccaggacgagtgagaaaaaaacttcaaggcaattcacagacacaggatataggaactgactgttcactaggtttaaatatacatgc

SEQ ID NO: 40103 - DNA, 120 bp, synthetic construct
  source 1..120: mol_type = other DNA
catgggccaccacacccagccaagagtaaatttcaaatgtgtcacctcaaaaggtgtcaagtgaggagatagatatgttaattagcttgctctgatcactccacattttgtgtgtatgtg

SEQ ID NO: 40104 - DNA, 120 bp, synthetic construct
  source 1..120: mol_type = other DNA
ttagtcctcaaaacacgctgaaagttagggttcattcctgtcatatcatttggcagaagaggtagcagaggcttgaaaagtttagctggctgccctaaatcatacagctaataagtgaca

SEQ ID NO: 40105 - DNA, 120 bp, synthetic construct
  source 1..120: mol_type = other DNA
ctggttgtcggatgcatctaatttttttccactttttttttttttttttttttttgagacagtcttgctgtgtcacccaggctgcggtgcagtggcgcaatctcaggtcactgcaagctc

SEQ ID NO: 40106 - DNA, 120 bp, synthetic construct
  source 1..120: mol_type = other DNA
tagaaagtactaaaaaaaaaaaaaagggacagtcatttaaatctctgaacattaaggaagtttggagacagtttgctctctgtcctgccttcctctaggactgtcggaatgaccaactga

SEQ ID NO: 40107 - DNA, 120 bp, synthetic construct
  source 1..120: mol_type = other DNA
ttgcaaatgtagaaccaaggtaaaaggattagagaaacaggacagattgccttaaatctgtctgtattttcttaatcgcaactccctgcagaacctagagcattgccttggatagaggag

SEQ ID NO: 40108 - DNA, 120 bp, synthetic construct
  source 1..120: mol_type = other DNA
ccattcatcaaaggctttagtacagaaatggtcatgaaagtaggaatgactaaaagagactaaagttatataacaaaaccattggtatgtaggaaatatgactcttcttaaatattgtga

SEQ ID NO: 40109 - DNA, 120 bp, synthetic construct
  source 1..120: mol_type = other DNA
ccctcaggtctcagctgagatgaaacctcctcaaagaggcctgccccaaccaccgtatttaaagttaacttgaccattcatcatcctcacactctttgattctttcagatcacattttta

SEQ ID NO: 40110 - DNA, 120 bp, synthetic construct
  source 1..120: mol_type = other DNA
aatgagtttaatagaacattccatatgcagctaggactcaaagggctatacctcagtatattaagcaacacacagcagaacttgcatgtctcagtcttggcaccaaccaggtgaaggaag

SEQ ID NO: 40111 - DNA, 120 bp, synthetic construct
  source 1..120: mol_type = other DNA
gccaacatgttcaggatgttttcaatttggtatttttcacatggatttatttagctaattatttatttatttataatttctgcatctatgttttaggtgaaactgtcctttagttttcct

SEQ ID NO: 40112 - DNA, 120 bp, synthetic construct
  source 1..120: mol_type = other DNA
tggtatcactggattaggactcatttttaatgtgaaatcctcagctttggagagagattgtttcctacttcacagagtagtataaattcagaccccatctgcagatagcagtcaggcctg

SEQ ID NO: 40113 - DNA, 120 bp, synthetic construct
  source 1..120: mol_type = other DNA
ctcatcttccctagagctaaccattattctgatttctgaaaattcccttggttttcttcatggctgtaccaaacaatgtataacccccttaaccaatacagtttactttttcataccttc

SEQ ID NO: 40114 - DNA, 120 bp, synthetic construct
  source 1..120: mol_type = other DNA
ttatacattaatgcatgtgtagagcaaaatctgtcttttacttgcctttggtctgtattaacagccactgaagtaaacctctccctgaaaccagccactgatgcatgaacttgggtccca

SEQ ID NO: 40115 - DNA, 120 bp, synthetic construct
  source 1..120: mol_type = other DNA
atctgtagaatagaggaggctcatacaacatgctttaggaatgtttttctgctccttctgaaacctcatggtgccacaacaattgccacaatggagacaaccaaaaataggaagatcact

SEQ ID NO: 40116 - DNA, 120 bp, synthetic construct
  source 1..120: mol_type = other DNA
aaatttaggtggagggactcctctctgacccattctatgaggccagaataatcctgataccaaaacctggcagagatacaacaacaaaaaaactttgggccagtatccttgatgaacaaa

SEQ ID NO: 40117 - DNA, 120 bp, synthetic construct
  source 1..120: mol_type = other DNA
cctgccttactctagccggcagttgttccattgaagtttagcatgatagtattggtctacttttgtgagctgtggttccaggagcggtttaatattcagagtgtttgtagtattattttg

SEQ ID NO: 40118 - DNA, 120 bp, synthetic construct
  source 1..120: mol_type = other DNA
actacctgacttattttgtgtgatgcttggttttggttgtccattcattacttttgctacatgaatttatattgccttatctgagttgtgttgaactccacaaaaattacatactgggcc

SEQ ID NO: 40119 - DNA, 120 bp, synthetic construct
  source 1..120: mol_type = other DNA
gtgcctatgctttgttttatttagcagggtagaagtttctactaggatatttgtcattaacaacaaaaatccatagcccacatggccccaggaaatggacatcgtgtacacaagaagtat

SEQ ID NO: 40120 - DNA, 120 bp, synthetic construct
  source 1..120: mol_type = other DNA
gccagttactgtgaaagatggtgtggtatattggggaatcacagcatcaggtaagacccaccactgtaatatttttattacatcagcatcagttgataagtgcattgggttggtctctgt

SEQ ID NO: 40121 - DNA, 120 bp, synthetic construct
  source 1..120: mol_type = other DNA
agcacttcgggaggccaaggtgggcggatcatgaagtcaggagttcgagaccagcctgaccaaagtggtgaaatcccgtctctactaaaaatacgacaataataataataataataataa

SEQ ID NO: 40122 - DNA, 120 bp, synthetic construct
  source 1..120: mol_type = other DNA
attctgtttcattttccccaatgtaaaaaacaatgcctctccacaggaatatttggaggtatttggtcctcagctttcaaaatatgataaagtgtctccattttcggcagggcatggcgg

SEQ ID NO: 40123 - DNA, 120 bp, synthetic construct
  source 1..120: mol_type = other DNA
gcctcccaagtagctaggactgtagctatgtgccaccacacctggcacatatatattatagaaaataatgattcttaattcaactgcattttaaaagactaccttaaactcctctaattt

SEQ ID NO: 40124 - DNA, 120 bp, synthetic construct
  source 1..120: mol_type = other DNA
gacacacacacacacactcagacacatatacacacacgagcacaattcaacatttttgtgtgtacattttcagattttatgtacgcatgtatatacacacaagcacacacacttattttt

SEQ ID NO: 40125 - DNA, 120 bp, synthetic construct
  source 1..120: mol_type = other DNA
aaacagcaggccaagcacagaatcctggagaaaactccattaaagggtaagacagaaggtaaggaagaaacaaagagatgcagaagcttagaaaaacatgcaagagggattcttgactgc

SEQ ID NO: 40126 - DNA, 120 bp, synthetic construct
  source 1..120: mol_type = other DNA
agtgtggagggtggggggagggagagaatcaggaaaaataactagtgggtactaggcttaatacctgggtgatgaaataatctctacacaaaaaccccatgacacacatttacctatgta

SEQ ID NO: 40127 - DNA, 120 bp, synthetic construct
  source 1..120: mol_type = other DNA
cctttagactgaaaaaatattttccacatgctgagaagaaaataagtagttgagaattgctgactacataggcactggagggtccaggtaaaagaagcctgcctccttccacctaagcag

SEQ ID NO: 40128 - DNA, 120 bp, synthetic construct
  source 1..120: mol_type = other DNA
gcccaacctgttgtatctgctataacttagcatattcaaaaaatttacgagtggtttcacagagctactacacaagccagaccatttatcaaaatattccatccaaccattctcctactt

SEQ ID NO: 40129 - DNA, 120 bp, synthetic construct
  source 1..120: mol_type = other DNA
ctgacacactaaaaatcaaacttacagggcagcatccaagagatttaaaagaccaagtgctggcatttgcttccaatttaggcagagtgtgaaaaccactagcagagtggaaaagatacc

SEQ ID NO: 40130 - DNA, 120 bp, synthetic construct
  source 1..120: mol_type = other DNA
tgggtggtacatagtagatgtatatatttacagggtgtatgagatattttgacataggcatacaatggataataatcacattagggtgaatggggtatctatcacctcaaaaatttatcc

SEQ ID NO: 40131 - DNA, 120 bp, synthetic construct
  source 1..120: mol_type = other DNA
ccattttgcaggttgtctcttcactttgctgattgtttcctctgcagtccagaaggtttttaacttgatgtgatccatttgtccatttttgttttggttccctgtgcttgtaggggtatt

SEQ ID NO: 40132 - DNA, 120 bp, synthetic construct
  source 1..120: mol_type = other DNA
tgtatttttagtagagacagggtttcaccgttttagccgggatagtctcgatctcctgacctcgtgatccacctgcctcggcctcccaaagtgctgggattacaggcgtgagccaccgcg

SEQ ID NO: 40133 - DNA, 120 bp, synthetic construct
  source 1..120: mol_type = other DNA
taagtgaagacttactcctgccattttgtttgttgttttttgtgatcttctcttccttctttcgttctttcttgtcttccttttagtgaaggtgatcttctctggtggtatgttttaatg

SEQ ID NO: 40134 - DNA, 120 bp, synthetic construct
  source 1..120: mol_type = other DNA
tgtatttcaaatagcctgtcttcaagctcactaattcttccttctgcttgatcaattttgctattaagagactgtgattcattcttcagtatgtgctgctggtgggggaggggaagagtg

SEQ ID NO: 40135 - DNA, 120 bp, synthetic construct
  source 1..120: mol_type = other DNA
cttacaagggttctattgcagcaacagagaaggatctgcttactgaagaaggttttagagctgtctaattagatcctatgtttattgtaaaaacccccaggctttcaagagcctccgcaa

SEQ ID NO: 40136 - DNA, 120 bp, synthetic construct
  source 1..120: mol_type = other DNA
aatgatttcaaaatgtaaaatccattcttagttcacaccctgtacaaaaagaggcagcaggccaaattagcccaggggtcatagttggaggatacctaccttccctgaaaggcatggctg

SEQ ID NO: 40137 - DNA, 120 bp, synthetic construct
  source 1..120: mol_type = other DNA
tacaaacaataaaaatttatttcccacagttctgaaggctgggaagtcattaaaaagtgagcaagatctggatggacagagatgtacccattaggcctgctgagccaccagagagtgatg

SEQ ID NO: 40138 - DNA, 120 bp, synthetic construct
  source 1..120: mol_type = other DNA
ttttctctgtctctatcagccaattctcctgcttcctacttcactgagaaaactaaagttatcaggagaaaaattccacagattctcaccttctcatctacccaccactgggtactgaca

SEQ ID NO: 40139 - DNA, 120 bp, synthetic construct
  source 1..120: mol_type = other DNA
attagtgatgtttgacatcagatcttctaaatttcctgcatttgcaaagatatctgtcatttctccaaacaccagcatcatgagaggaagtccagccccatggatgatggcagccaaagt

SEQ ID NO: 40140 - DNA, 120 bp, synthetic construct
  source 1..120: mol_type = other DNA
ccccttgggaagtgattaatactgcttccctataactcaaggaactagctaaggattgaaagaaaaccaaagggaaaaaaaacagaaatggggtaaagccagctgtgggtgtctatggat

SEQ ID NO: 40141 - DNA, 120 bp, synthetic construct
  source 1..120: mol_type = other DNA
aatagacacaaaactgagtcaatcatcattccctcctttgtgaaaaggcttcatatgataaaagaggtgatgcttccttccagctttgaaagtttaccaagtgtagctgggtgcagtggc

SEQ ID NO: 40142 - DNA, 120 bp, synthetic construct
  source 1..120: mol_type = other DNA
agccatgccctgcaaaggacgtgatctcgtttctttttatggctgcatggtgttcaatgctctatgtgtaccacattttctttatccagtctacaattgatggccatttaggttgattcc

SEQ ID NO: 40143 - DNA, 120 bp, synthetic construct
  source 1..120: mol_type = other DNA
tgtaatcccaacactttgggaggctgagggcaggaggatcacttgagcccaggagtttggtacagcctgggcaacataggagaccctctctctacaaaaaaatttaaaaattgtttgggt

SEQ ID NO: 40144 - DNA, 120 bp, synthetic construct
  source 1..120: mol_type = other DNA
cataaaaaagaaatcagacagtgataaatattcaggagaaaagccatacatggtatgacacagagacaggcagggtcacctggtttagattggctggtcagagaatgtctttctcaggag

SEQ ID NO: 40145 - DNA, 120 bp, synthetic construct
  source 1..120: mol_type = other DNA
ttgtgttgttttaagccactaagtgagtgctattttcctacagcagcaataggaaatgaatacacaatgtcaaaagagggatgataaagaggcagggcagagctggaaggaatcacaggt

SEQ ID NO: 40146 - DNA, 120 bp, synthetic construct
  source 1..120: mol_type = other DNA
gaggaggaaacagattcagacacaggtaggtttttatgattattgcagctgtgaagctcaaggagtgattatccatataaccataaaagtcacccaagttggttggagcaccaaagtgga

SEQ ID NO: 40147 - DNA, 120 bp, synthetic construct
  source 1..120: mol_type = other DNA
tgtttagaaaggcctgtatacaaaggttggcccttggctggaacttggatttggggaggattaccaccattctaactgataagtatggccaaactatctgtacaaacaatatgattcttc

SEQ ID NO: 40148 - DNA, 120 bp, synthetic construct
  source 1..120: mol_type = other DNA
gtatctttctcaaaaggagttgtaaggattaaatgagattaaatatgaaatacttaggacaatgcttggcacacagtgctttatgtgtgctattactactacctcatattaaagctccat

SEQ ID NO: 40149 - DNA, 120 bp, synthetic construct
  source 1..120: mol_type = other DNA
tcatcaaccaaccacacatatatgatacatgtctgattccaagtgtgattaaagaaaagcttctaaaaaaaccactgtgcaaccagaaaatgaaataaagagttacaataaggttttcga

SEQ ID NO: 40150 - DNA, 120 bp, synthetic construct
  source 1..120: mol_type = other DNA
aatctacatacgtggttatcactgagtgctggaatctctctaaaaatattttcttccttgtgcctttgatatttcctgatttgctatgatgaatacatacatacaccctttgcaattaga

SEQ ID NO: 40151 - DNA, 120 bp, synthetic construct
  source 1..120: mol_type = other DNA
agacgtagaagagtgagaagagttaacttgtccaaggttcacagctataactaagccaatatttaaatgccaagtctgttccctgaccaccaaactataaggtgcaacctcagatttctg

SEQ ID NO: 40152 - DNA, 120 bp, synthetic construct
  source 1..120: mol_type = other DNA
agtcctccttttatttttttaacattgacttttgtaaaggaacaagaacagctgtcttacagaatgtcccacatcttgggtatacctgtatcaaactgaatacaaatgggaggtgcaata

SEQ ID NO: 40153 - DNA, 120 bp, synthetic construct
  source 1..120: mol_type = other DNA
ctggctgaaattagctactgaggggttcatttcttttagggaggaatggtatttagaaacccagatctggtactaacagtgctcattgttactgtccctttcagtggactgaaaatgaac

SEQ ID NO: 40154 - DNA, 120 bp, synthetic construct
  source 1..120: mol_type = other DNA
tatgtatcattaaaagaaagaacaaaaaagacagggaaaatgcatatgctgtgctccactcagccaacaaacttctgctctaagcagggatattgattccaaaggctagcttgcgtttct

SEQ ID NO: 40155 - DNA, 120 bp, synthetic construct
  source 1..120: mol_type = other DNA
accaagacgtgaaattttggaagaagatactccgactttagtggaaagacctaaaggaaacgaacagcggcctctgcttctttgagcttggaagagccgctactcgaatgagctcaggct

SEQ ID NO: 40156 - DNA, 120 bp, synthetic construct
  source 1..120: mol_type = other DNA
aggaaaagtacgtgcaatctgcacaattcaaaattgtaaagcaatgctaactcacatcagagcttttcttacttcttatgaacatagaggaaataggtttgttgtatcctctagtctaca

SEQ ID NO: 40157 - DNA, 120 bp, synthetic construct
  source 1..120: mol_type = other DNA
aaactagctcttgctactttcaacagtccttggtttcttgaaagacaccagtcttgcatttgtgccaccaccacttctgtcaagctgaacttggctgttctccttaagcttccttaattt

SEQ ID NO: 40158 - DNA, 120 bp, synthetic construct
  source 1..120: mol_type = other DNA
ctggctgcattaaactatttggacttcaaaggcagaaaaacttagataaggaccatctctgctgattattatgcataggtttgaacgggttacttaactctgctatcccacagttacctt

SEQ ID NO: 40159 - DNA, 120 bp, synthetic construct
  source 1..120: mol_type = other DNA
agtcgcttagtgagttagccatgtgataagtcgatggcaaatggaaacctgaattatactcctctttgaacacttccccatctactacagccagaaatattttctaccactccgcaatcc

SEQ ID NO: 40160 - DNA, 120 bp, synthetic construct
  source 1..120: mol_type = other DNA
catgacttactagctgtgtggctttgaagaaatactccactgctcaaaagacttgatttctgtgtcatttgaagaaatactccactgctcaaaaaccttgatttctgtgtcattcaaata

SEQ ID NO: 40161 - DNA, 120 bp, synthetic construct
  source 1..120: mol_type = other DNA
taaaacgtgcttacagagtttgtgataacctcagaaaatacctatgctaatatgcaaggacaaaaggcaggggaaaattataatagcataatattcactatatcaagcaaattaattggt

SEQ ID NO: 40162 - DNA, 120 bp, synthetic construct
  source 1..120: mol_type = other DNA
ttctttgattcttttttttttctttacttaatttgtgtgtgtgtgagacagggtcttgctctgtcaccaaggttgaagcacagtggcgcaatcacagctcactgcagcctcaacctcctg

SEQ ID NO: 40163 - DNA, 120 bp, synthetic construct
  source 1..120: mol_type = other DNA
tcagggaaattcctttgacattcaacacatatttggttggaacaatcctactatgtacctatttcctcattctcttaatttataaccaaaccctttgccctaagatatcagcactgagga

SEQ ID NO: 40164 - DNA, 120 bp, synthetic construct
  source 1..120: mol_type = other DNA
agctagaaagagggccaagttaacaacacaggttttctgacactgagcttgctgttcattctatcatattgacaggaggattctaacagtgaggattttagattggctagcatgggaatc

SEQ ID NO: 40165 - DNA, 120 bp, synthetic construct
  source 1..120: mol_type = other DNA
actgcatctggcctgttctttttgttttactcgaatgctatgcattacaaccaaagtagtcatgcaggctgggtttatccttgttaccattgcatcatgtggcaaaggcaaaccttctta

SEQ ID NO: 40166 - DNA, 120 bp, synthetic construct
  source 1..120: mol_type = other DNA
gatgtttttcagcccttgctctcctcccttcttccctcctttttaggttccaagtctctactgttttcatctttatgtctatgaagacccagggtttagctccaacttacaaataagaac

SEQ ID NO: 40167 - DNA, 120 bp, synthetic construct
  source 1..120: mol_type = other DNA
agagatagggatccagtttcattcttgtacatgtgactatccaattttctcagcaccgtttattgaatagggtgtcctttccccaatcatgattttgtgtgctttgtcaaagatcagttg

SEQ ID NO: 40168 - DNA, 120 bp, synthetic construct
  source 1..120: mol_type = other DNA
atgttcattgcagtgctattcacaataacaaagacataggattaaccaagatgcccatcaatggtggactgaataaagaaaatgtgacacatatacgccatggaatactacagagccata

SEQ ID NO: 40169 - DNA, 120 bp, synthetic construct
  source 1..120: mol_type = other DNA
tgagaccctgtctctaaagaaaaattaacaaattagccagatgtggtggcatgcacctgtattcttagctactagggatgctgaggcaggaagattacttaagcccagaaatttgaggtt

SEQ ID NO: 40170 - DNA, 120 bp, synthetic construct
  source 1..120: mol_type = other DNA
ctataatccccaaaagcctctacacagagtaagggcttcctcaatattggttcaattaatggataaataaggttgtgctgtgtgtttagtccactgagagttaacaagaggccagtgtgg

SEQ ID NO: 40171 - DNA, 120 bp, synthetic construct
  source 1..120: mol_type = other DNA
gtttgttgtgatttctgcattgtgaggcattggacatcttgtgcagagtgaatatatataagaaaagcatgaagataatccaagaaacctttttcgtcaaacctgaaagactataaagcg

SEQ ID NO: 40172 - DNA, 120 bp, synthetic construct
  source 1..120: mol_type = other DNA
gtcaaggatccccatatattataaaggagatgttttctgagaacctcactgtgttaaagtttagaaaacatttaacaatgacaacatgtgtccttccatctgaggcaaaacacagcacat

SEQ ID NO: 40173 - DNA, 120 bp, synthetic construct
  source 1..120: mol_type = other DNA
ctaccagtaggctgatagtcttggagactaccaggaggttaatagtcgctttgaatttagctgtatccaaattcctataagcctatcaatagaaatagttttggttggggaggacaatgc

SEQ ID NO: 40174 - DNA, 120 bp, synthetic construct
  source 1..120: mol_type = other DNA
gaggcagaggttgcagtgagccaagactgtgccactgtactccagcctgggtgatagagcaaaactccatctcaaaaaaaaaaaaaaaaagtaaacttgacaaatatctgaatgataacc

SEQ ID NO: 40175 - DNA, 120 bp, synthetic construct
  source 1..120: mol_type = other DNA
ctgacctcatgatccacccacctcggcctcacaaagtgctgggattacaggcgagtaactcgtttctaattgatgtttagtctttgccaaaatatcttcaatagggtttttttttctaaa

SEQ ID NO: 40176 - DNA, 120 bp, synthetic construct
  source 1..120: mol_type = other DNA
agtacctgacaaaggtagcattttatatcagtgggaaagtatgcattatttaatactagcattagataagtattgactgtttggaaaaattaggctctttcaccaattgactcttacaca

SEQ ID NO: 40177 - DNA, 120 bp, synthetic construct
  source 1..120: mol_type = other DNA
taaggcaaacaacgaactgggaaaagtatttgccatacatacaataaacaaatatgatcatgagccactataatgaagactaatattttttggaaaatatgggtaaagggcatgaacggg

SEQ ID NO: 40178 - DNA, 120 bp, synthetic construct
  source 1..120: mol_type = other DNA
ccttctacatgataaaaaattttaaaaagaaaaatatcctctgttcgaactgagggtcagtatttgccctcctcaaagaaactgtaggaccaaatccactttgtttcaatcagcctttac

SEQ ID NO: 40179 - DNA, 120 bp, synthetic construct
  source 1..120: mol_type = other DNA
aatttatatctatccatttgtggttcataagcgtgatgattgagctttcacacacatgtgagacgtgcctcacccaatccttgttatgatgtcagcatattacccatctgacgtcaaagt

SEQ ID NO: 40180 - DNA, 120 bp, synthetic construct
  source 1..120: mol_type = other DNA
gcagtaagcggagatcctgccactgcactccagcctgtgcgactgagcgagactgcgtctcaaaaaaaaaaaagaaaaaagaaaaataacacgattacctcatcatttaagatggagttt

SEQ ID NO: 40181 - DNA, 120 bp, synthetic construct
  source 1..120: mol_type = other DNA
agagagagagagagagagagatggagtctcattctgtcgcccaggctgagacatatatatatatatatatatattgtcatatatatgtgtcatatatattgtcatatatatgtgtcatat

SEQ ID NO: 40182 - DNA, 120 bp, synthetic construct
  source 1..120: mol_type = other DNA
agcctcccaaagtgctgggattacaggcgtcagccaccgcgcccagcccatatatttttattctactaaacagaatagtagaataaaattagacatggtagctgaaaaggatgatttttt

SEQ ID NO: 40183 - DNA, 120 bp, synthetic construct
  source 1..120: mol_type = other DNA
actagacgcgccaagaaggagattctacgagcaattcccccctcgggccattgtgttgctgtttattagcccctgggagggcgtcaggacaaaaggaaccctcctcccttcttagtactt

SEQ ID NO: 40184 - DNA, 120 bp, synthetic construct
  source 1..120: mol_type = other DNA
gaaaagcctgagcgcccgcaatgctgcggtggagaggaggaacctgatcaccgtgtgcaggtacggcagcgcagggcgaggggaaccagcctcccgccggggctgagagctctgggcttc

SEQ ID NO: 40185 - DNA, 120 bp, synthetic construct
  source 1..120: mol_type = other DNA
gcggttgcaatgagctgagataacgtcattgcactccagccgggaccacagggggagacttcgtcaaaaaaaaaaaaaaagaactatttatagtaagcctagtattcagagataactggt

SEQ ID NO: 40186 - DNA, 120 bp, synthetic construct
  source 1..120: mol_type = other DNA
cccttatcagagacagttgaaaagaaaaggatttgtatttcaaccttatttaaactaaattttaaattatctttaagaaattttaggaacgtcacactgatttctggggacagctctctg

SEQ ID NO: 40187 - DNA, 120 bp, synthetic construct
  source 1..120: mol_type = other DNA
aagttggaaagaagttgatctggtggaaatataactgggttctaggttgactttatcattaactagtgtgcacttttacaagccatgcaacctttccatttgttcatttttgttgtctgt

SEQ ID NO: 40188 - DNA, 120 bp, synthetic construct
  source 1..120: mol_type = other DNA
cttgtcaaacttttaagtcaatacttttaagagaaacttcccatgcaaagtcataattttcctgttttgtagctaggagggactaataagaggaatataaggagtagtgtgataagcacg

SEQ ID NO: 40189 - DNA, 120 bp, synthetic construct
  source 1..120: mol_type = other DNA
tgttttgtgttgctataaaggaatacctgaggtggggtagtttataaagaaaagaggtttatttagctaacagttctgtaggttgtacaaaaaccgtggccccggcatctgctgagcttc

SEQ ID NO: 40190 - DNA, 120 bp, synthetic construct
  source 1..120: mol_type = other DNA
gaagcaggttcagtattattaaatatttctaaggattcttcatgctctaattagtagatgcgcacaatggaggtaggatgatcctcttttcaacgactagtcctagagtagacatttcag

SEQ ID NO: 40191 - DNA, 120 bp, synthetic construct
  source 1..120: mol_type = other DNA
actatgcagctcaattcatttttgtggtagggcacaatgttgtaactagcacccaagtcaagagaaagaactgttcaaatatcaagacctcctccttgctttcttgtagttaataccctg

SEQ ID NO: 40192 - DNA, 120 bp, synthetic construct
  source 1..120: mol_type = other DNA
acaatccatctgtagtttatttatgatgtgaagtacaggagtcaagattaaatatttcccttaaggaaaatcaactgacctagtaccatttattggaaagaccattgtattagtctgttc

SEQ ID NO: 40193 - DNA, 120 bp, synthetic construct
  source 1..120: mol_type = other DNA
ttctgggatttttattaagcttgcactggtactataaatcagttttgggaaaactgccatctttatgatattaagacttacgtgcaacccatgaacataacctatttctttatatgttta

SEQ ID NO: 40194 - DNA, 120 bp, synthetic construct
  source 1..120: mol_type = other DNA
tgtgtgtgtgtgtgtgtgtgtgtgtttcctcccctgttctgtagaaaagtttgtgtaagactgatatttctttcttaaacatttggaagaattcaccagggaagcaatgtgaaccgcaaa

SEQ ID NO: 40195 - DNA, 120 bp, synthetic construct
  source 1..120: mol_type = other DNA
tctgtcattgttgattgcatgatttatatatgtcagttaagtctagtgttttaattgccttgttcatgtcctctgtattcttacttgttttttgtatactctttagtattgagagagatg

SEQ ID NO: 40196 - DNA, 120 bp, synthetic construct
  source 1..120: mol_type = other DNA
tctattcttttggcagttacctttggtttattacagcttaatgcaaattgtaacttttactacttctccaatagtgttagaaccatttattcccccacatcctaaaacatacttatatat

SEQ ID NO: 40197 - DNA, 120 bp, synthetic construct
  source 1..120: mol_type = other DNA
gtgtcaaagtattcataagaacatagtatacagtagaaatagaccacagtggagtaaacagatggaatgcaccacttaattttagaaagatatcgccaacagtttactagtacccatggc

SEQ ID NO: 40198 - DNA, 120 bp, synthetic construct
  source 1..120: mol_type = other DNA
tatatatatttttaaaactgtgctgtcttgattgtctgtgatacaagtcagctgatgtgtgtgtttgcatagacagaaactgggacctttcattttcgtagcattctagtgttgataaac

SEQ ID NO: 40199 - DNA, 120 bp, synthetic construct
  source 1..120: mol_type = other DNA
acctcaagccatcctgtggcttcagctttgcaaagtgttgggattacaggtgtgagccaccacacctggccctgctttcttcctttatttttaagttgatttttacattgcgtaaaattt

SEQ ID NO: 40200 - DNA, 120 bp, synthetic construct
  source 1..120: mol_type = other DNA
tgggattacaggcgtgagccaccgtgcccagacctgcaaattgttgattctgaaaaattctctgtgtttctgatgtaaaatataagagagaaaataggccttccagtgaacagatatctc

SEQ ID NO: 40201 - DNA, 120 bp, synthetic construct
  source 1..120: mol_type = other DNA
ttttagtcacaatcatgctttctttcttttttttttttttttttgagacagagttttgctcttgttgctcaggccggagtgcagtggcacgatctcggatcactgcaacctcgacctcct

SEQ ID NO: 40202 - DNA, 120 bp, synthetic construct
  source 1..120: mol_type = other DNA
ttctgtaggaacgtaacctatgagtaatgtagaaaaatatttgtgcattttgttgactactgattgatccatataggtctcttgatgatatgaaaatatatgcactaatagccatggctt

SEQ ID NO: 40203 - DNA, 120 bp, synthetic construct
  source 1..120: mol_type = other DNA
gtatcattctcgtttcataggagagttatttcattacacaacaagaatgccatagggtggcatttctgaaagtgtacttctggacccagatgctttcagaggtccacaaagtcaaaatta

SEQ ID NO: 40204 - DNA, 120 bp, synthetic construct
  source 1..120: mol_type = other DNA
gtttaagagaatctagatatgcagccaaaggaacttagtggaggcaaatgttcatataaaaatgaggaaagtggttgcaacagaaaggatgaaaatgtcccagaggaagtgacactgaca

SEQ ID NO: 40205 - DNA, 120 bp, synthetic construct
  source 1..120: mol_type = other DNA
tactgggtacaacgttcaaagcattgtcctaggtgctgagggagatacatagttcagaaagcgtggttctgcctgaaggaattgtgtcctaataagatgaagattgaaaacacaaatggt

SEQ ID NO: 40206 - DNA, 120 bp, synthetic construct
  source 1..120: mol_type = other DNA
tagtcctttcaggctgctttaacaaattgtcttaaaccaggtaatttataaacaacagaaatttattgctcacagttctgcaggctgggaaggctgagatcggggcaccatcagattggg

SEQ ID NO: 40207 - DNA, 120 bp, synthetic construct
  source 1..120: mol_type = other DNA
ggaagcgcatcccaaaggttactagatggtgttttaatcaatttacagagaagcattccaggcattatgtttatttgtttagcatctactttcttaaacttaggtatctttgtaaatgtt

SEQ ID NO: 40208 - DNA, 120 bp, synthetic construct
  source 1..120: mol_type = other DNA
caaaaactatcaatagaaaactatcaatagcaaatgaacagtaaggctatgttgagactcccatgccaagtggttgggtagactcactactatgtaagtggatgcctcctgcgcactaat

SEQ ID NO: 40209 - DNA, 120 bp, synthetic construct
  source 1..120: mol_type = other DNA
aatacttctctccaccctaaccctaccactctaataaaagccactgcaaaagctggataaatatgtagaacattttgttgaagccaggttggagaagttaggcattttgcctgctcagca

SEQ ID NO: 40210 - DNA, 120 bp, synthetic construct
  source 1..120: mol_type = other DNA
tctccaccaaaatttcagggtcatttttcacagaaataaaaaagacaatcctgaaaattaatatggaaccacaaaagaccctgaccaaagcaatcttgagcaaaaagaacaaagctggag

SEQ ID NO: 40211 - DNA, 120 bp, synthetic construct
  source 1..120: mol_type = other DNA
gaacctccatgtaaaccagcaatcccacttgtaggtacatagccaaggaaatgaaatcagtgtctcgaagagttatctctactcccatgttcattgcaggattattcacactagctaaga

SEQ ID NO: 40212 - DNA, 120 bp, synthetic construct
  source 1..120: mol_type = other DNA
ttataagtttattcaaagaaaaaagaagaaagaagagactaaccagtgaagctagacaatacggtatgcattagtagtattaagaaatcttaggaattggttggttgtgggtaggagaaa

SEQ ID NO: 40213 - DNA, 120 bp, synthetic construct
  source 1..120: mol_type = other DNA
ttaaacatcacacaaaaaaaccgtagtaccacctactcttaaaaaaggctgaatgggaagcttagaattccgccctcctgaggctataacagtgtcccagtaccaccattagggttgtat

SEQ ID NO: 40214 - DNA, 120 bp, synthetic construct
  source 1..120: mol_type = other DNA
gacttgttaaaaaatgaacagagcctcagggacctgtgggacaataacaaaagatgacacctgtcagaattcttgaaggagagaagaaagaaggtgggactgaaaaagtactcaacagct

SEQ ID NO: 40215 - DNA, 120 bp, synthetic construct
  source 1..120: mol_type = other DNA
gggtaaatacattaggctttccattttacttttagttttctgtttgttccccctgttcttggtttctctgttttcttttttctgtcttctagggggctgtttgaatactttttagaattc

SEQ ID NO: 40216 - DNA, 120 bp, synthetic construct
  source 1..120: mol_type = other DNA
tttgggagaattttgcgtaagtttggaatcatggtctattaggtagcagttaccagtaaaaactctctgggtcaaatggtgagtgtgagtgagtgtatttgtgtgtgtacatgcacttca

SEQ ID NO: 40217 - DNA, 120 bp, synthetic construct
  source 1..120: mol_type = other DNA
ggtacatagtaggtgtatatattatggggtacatgagatttttttacaggcacacaatgtgtaataatcacatcagcataaataaggtatccatcacttcaagcattcatttttttgcat

SEQ ID NO: 40218 - DNA, 120 bp, synthetic construct
  source 1..120: mol_type = other DNA
ttgattgtttactttgcagtgcagaagctttttaacttgatgtgatctcacttgtccgtttttgctttggttccctgttcttatggggtgtcagtcaagaaatccttgcccagtccaatg

SEQ ID NO: 40219 - DNA, 120 bp, synthetic construct
  source 1..120: mol_type = other DNA
ttggatgccctttatttctttctcttgtctgttaatccctcttattttattgtaaatacaaggttcttttctacttaagcatgatgagatctattccttgtgtttattacccattgacgc

SEQ ID NO: 40220 - DNA, 120 bp, synthetic construct
  source 1..120: mol_type = other DNA
aaagactctgtcattcacttttaaaataatattaaattaaaaatatacagggtagccaggcatggtggcacacttctgtagtccaagctacccaggaagctgaggcaggagggtcacttg

SEQ ID NO: 40221 - DNA, 120 bp, synthetic construct
  source 1..120: mol_type = other DNA
acaagcacacagtaagcatcatattcagtggtaaaaagctgaaagctctctaagatcaagaacatgacaagggaatccattcctaccacttctactcaacatcattctggatctcctagc

SEQ ID NO: 40222 - DNA, 120 bp, synthetic construct
  source 1..120: mol_type = other DNA
tgggattgctgggtcgaatggtagttcttttagctctttgaggaattgccatactgtcttccacaatgactgatgactgacctaatttacatttctaacagcagtgtataagcatcccct

SEQ ID NO: 40223 - DNA, 120 bp, synthetic construct
  source 1..120: mol_type = other DNA
tttgtaccagtaccatgctgttttggtcactgtagccttgtggtatagtttgaagtcaggtaatgtgatgcctctacctttgctatttttgcttaggattgcttctggttatttgggttc

SEQ ID NO: 40224 - DNA, 120 bp, synthetic construct
  source 1..120: mol_type = other DNA
tgtgtctcttccaggtttgggtattaagatgatgttggccttagagaatgaggtggggaggagtccctcttcctcatttttttggaattatttcagtagaaatggtaccagctctcattt

SEQ ID NO: 40225 - DNA, 120 bp, synthetic construct
  source 1..120: mol_type = other DNA
ttgtctgcctcaatgatctgtttaatactgtctgtggagtgttgaagtctcccactattttttccatgggagtttgtgcctctttgtaggtctctaagaacttgctttatgaatctgggt

SEQ ID NO: 40226 - DNA, 120 bp, synthetic construct
  source 1..120: mol_type = other DNA
accagtcttcaggtgctgagattcttttgttagcttggtttcttctgctgtcaatacttgtaattgcattgtgaaattattgtattgtgttattcagctctgtcagacccattgggttct

SEQ ID NO: 40227 - DNA, 120 bp, synthetic construct
  source 1..120: mol_type = other DNA
atcttattagtagttgtgactgagggtcatttgcttgtttcctgggggctccaacccagagagatataggtcagcagcccctcagggcaatcagaccaggatggagggtctgtactgtgg

SEQ ID NO: 40228 - DNA, 120 bp, synthetic construct
  source 1..120: mol_type = other DNA
gacccacttaagcagtttggccgcattttggtagagcagctgtgctttctgggagtcttttctgcccctggtctgctcagactctccaaatcccaaagatgggaatgactgagtcaccca

SEQ ID NO: 40229 - DNA, 120 bp, synthetic construct
  source 1..120: mol_type = other DNA
ggtttgtaggctttctgctgaaaggtttgctgtttgcctgatcgggttccctttgtaggtgaccttccccttttgttttgctgcctttaacattttttctttcattttgactttggcaaa

SEQ ID NO: 40230 - DNA, 120 bp, synthetic construct
  source 1..120: mol_type = other DNA
tgttttcagtccactggtcacaatactcctatgggtggtaccggccaaaccacttcatcgaggtggtggcagtgggattcatgctccttcatgtgtgccagcatctgcagaagtatagcg

SEQ ID NO: 40231 - DNA, 120 bp, synthetic construct
  source 1..120: mol_type = other DNA
cttggttttgcacaggctggagccctgtacctacagccttttcaggcatctctccctgccagcttaagtgtctgttggggaaatgatctcctgctgctaggatcctggcagtctgtggtg

SEQ ID NO: 40232 - DNA, 120 bp, synthetic construct
  source 1..120: mol_type = other DNA
aacaaagaaaagataaataagtggaacgacattaaactgagaagtttcaagccaagtgtagtggctcatacctgtaatcccagtgctttgtgatactgacactggaggattgcttgaggt

SEQ ID NO: 40233 - DNA, 120 bp, synthetic construct
  source 1..120: mol_type = other DNA
atctgtctagatggccagtataaaaaacaatcaaaagataacaagtgttggcaaggatgtggagaaaagggaaccttcctactctattggtgggaatgtagattaggacagccattatgg

SEQ ID NO: 40234 - DNA, 120 bp, synthetic construct
  source 1..120: mol_type = other DNA
ggctaaagggagatggtatcagaagaaaacttggaacttcatgaatgaagaaagagcaacagaaactgtgaatatctaaataaatacagcagagtttttctcctctattaaggtctttca

SEQ ID NO: 40235 - DNA, 120 bp, synthetic construct
  source 1..120: mol_type = other DNA
ggcaatattatcagccaactgacatttataaaacaccccaactttttttttttttttttttttttgagacagagtcccgctctttcccccaggctggagtgcagtggcgcgatcttggct

SEQ ID NO: 40236 - DNA, 120 bp, synthetic construct
  source 1..120: mol_type = other DNA
agccacccacccctagacaggccccagtatatgacgttccccaccctgtgtccatgtgttctcgttgttcaacttccacttatgagtgagaacatgcagtgtttggttttctgatcttgt

SEQ ID NO: 40237 - DNA, 120 bp, synthetic construct
  source 1..120: mol_type = other DNA
aggatacaaatttccaatatcaggaatgaaagagggcatatgactacagaccttacattcaaaggataaaaagttaattgtggaggaaatgggccaatttcttgaaagacaaatcctaac

SEQ ID NO: 40238 - DNA, 120 bp, synthetic construct
  source 1..120: mol_type = other DNA
ttgcaataattcagtcacatcttcaagttctacttctagttctcttgcgatttccatgttatctgcaatgactccttccaccaaagtcttgaacccctctaagtcatccatgagagttgg

SEQ ID NO: 40239 - DNA, 120 bp, synthetic construct
  source 1..120: mol_type = other DNA
ttttttctgaaacttcatgaaccaacctctgctagcttcaaacttttcttctgcggcgtctttgcctctctcatccttcatagcattaaagagaggaccttactgtggattaggctttgg

SEQ ID NO: 40240 - DNA, 120 bp, synthetic construct
  source 1..120: mol_type = other DNA
aaaatctttacagctaggtattagaagaaaacttccttaaagggcatctacagaagtttacaacagggtttctcaacattgatactgttgatattctggatgggtaattcttcattacag

SEQ ID NO: 40241 - DNA, 120 bp, synthetic construct
  source 1..120: mol_type = other DNA
gaaaagtgataacctttaagaataataggctaggattaattgaatacctgtgtgcaaaaaaaaagtgaaccttgttccttacctcacatttagctcaaggtgggttataggtgtaaacac

SEQ ID NO: 40242 - DNA, 120 bp, synthetic construct
  source 1..120: mol_type = other DNA
ggggaggatcccactttcgattataatatgtaagattctaactccttgatcctcacttattttagaaagctggacaatttgtcacagagcccagtaaaaagaagtcccaaggaatactcc

SEQ ID NO: 40243 - DNA, 120 bp, synthetic construct
  source 1..120: mol_type = other DNA
accaaggctgcagtgagccatgattgtgccactccactccagcctggacaacagagggagactctatctccaaaagaaaaaaaaaaaaaagaaagaaaagaaaaagctgagtataccaga

SEQ ID NO: 40244 - DNA, 120 bp, synthetic construct
  source 1..120: mol_type = other DNA
tgctcaggaactctggcttgaacctcaaagctcttcctgacttagatgataaacagttacctccccatgaggccatcttttgaagtacagtgtaaacactgttagaaacaatggataatc

SEQ ID NO: 40245 - DNA, 120 bp, synthetic construct
  source 1..120: mol_type = other DNA
gttttgaatgtctaaaattttataacacaattctcatatacttggttacttgcttctgtttgagtcatattattgtagcattcttaattactgtgtttgttataggtatttctgggtgaa

SEQ ID NO: 40246 - DNA, 120 bp, synthetic construct
  source 1..120: mol_type = other DNA
tcctacatctttctgatgttctaatttcaatgagttgtccttttcaaaatcattttatggtattgttacctcttttccttaaggtgaacaatatcgctgcaagctgctttgctagacgtc

SEQ ID NO: 40247 - DNA, 120 bp, synthetic construct
  source 1..120: mol_type = other DNA
agatagtctcattgttagctgaattacagtactgtagcatttttatctgttgcttcgctgaaaaattttcctcctatgtaaatacaaagtgaaagattataagcaactcgccttaacagt

SEQ ID NO: 40248 - DNA, 120 bp, synthetic construct
  source 1..120: mol_type = other DNA
atgtttcactacctcatgtttttcccccttctttctggggttgtcagtgagaactctaaccaaccaggaaatacaactgactaattatcctccatcagtcaggtcctgcctatctcctaa

SEQ ID NO: 40249 - DNA, 120 bp, synthetic construct
  source 1..120: mol_type = other DNA
cagtaattgtttcccaccttatataaggggttggttaagaagtgccataaatctggtcatgatatgcttatttggtacatttttgtagtaaaatttctttaagtcagattttcatggaaa

SEQ ID NO: 40250 - DNA, 120 bp, synthetic construct
  source 1..120: mol_type = other DNA
ctgagccatatagttccaaagtgagtgattttttttcctaaccaatcttataagttctgaggtgcatcgccagcaagttcagtcaagctgttgctcttctttgaggtctattctactcat

SEQ ID NO: 40251 - DNA, 120 bp, synthetic construct
  source 1..120: mol_type = other DNA
catagatgtggcaccataaacaataactgctttttcattcttgaaccattagtgggaatgtacttcttagtttcctttctcccaggtagaatgcatgcctttatttacttattcaaacct

SEQ ID NO: 40252 - DNA, 120 bp, synthetic construct
  source 1..120: mol_type = other DNA
atttgggattttagttagaaaatggatcagtgtcataattttaccttcaaagctggatggtctaataaatataaacctcaactaataatagtacctttttaaaggaaaagtttctgaact

SEQ ID NO: 40253 - DNA, 120 bp, synthetic construct
  source 1..120: mol_type = other DNA
atgacagcatatctcatctttggaataacatttcttcaagatatagagtagtcagtttcttgctatatgattgtcttttgtggttatttttaaaggaagtcaaagtatttgaggagtggt

SEQ ID NO: 40254 - DNA, 120 bp, synthetic construct
  source 1..120: mol_type = other DNA
gtcctggacccttgtacatttccttaaaacggaaaatcttcttgttcatggacaacctatgctttatctttctctgtggttacctatttggattaccactataggtggttgccattggct

SEQ ID NO: 40255 - DNA, 120 bp, synthetic construct
  source 1..120: mol_type = other DNA
agtagctgggactacaggtgcctgccaccatgcccggctaatttctttgcacttttagtagagagggggtttcaccgtgttagccaggatggtctcctgaccacatgatcctcccacctc

SEQ ID NO: 40256 - DNA, 120 bp, synthetic construct
  source 1..120: mol_type = other DNA
ttcctagggaagactagtcatactagacaactaaagaaagtattaagatgtctctcatattccacttaaaaatactgagtgtagaaaatgtttcctgtgagactaatattcagagtcctg

SEQ ID NO: 40257 - DNA, 120 bp, synthetic construct
  source 1..120: mol_type = other DNA
ttggtgacatttattaatgcttaactagaagcgcaggaaggttcccgtgtgctatttaagcgactgtattagacaaataggatgttaaatggcaagatatttctagtgtctagtcccttt

SEQ ID NO: 40258 - DNA, 120 bp, synthetic construct
  source 1..120: mol_type = other DNA
gcacgaattaatgcagtgacatcaaactgtgcaagcagtcttgagttcttccccaccatgcactcagtattttcttttaaaggcagtttcaacttaagaatgaccatgatggtgcgggaa

SEQ ID NO: 40259 - DNA, 120 bp, synthetic construct
  source 1..120: mol_type = other DNA
tgttacagatggaatgcagaagcagatatctaattatcttgtaaagacactaaagagattagaaaaaaatgtaaaacagagatactggccgggcgcggtggctcacgcctgtaatcccag

SEQ ID NO: 40260 - DNA, 120 bp, synthetic construct
  source 1..120: mol_type = other DNA
actcaaaatctgaaatactcttgtcccaagcattttggaaaaggtatactcaacagaaggttgagtatacctaactaactcaactaactcactcaactcaggtatcaaataactaactca

SEQ ID NO: 40261 - DNA, 120 bp, synthetic construct
  source 1..120: mol_type = other DNA
tttttttggttttttttttttttttttttttttttgagacagtctagttctgtcgcccaggctggagtgcaaaggtacgatctcagctcactgcaacctccacctcccaggctcaagcaa

SEQ ID NO: 40262 - DNA, 120 bp, synthetic construct
  source 1..120: mol_type = other DNA
tatatcacaattatctgtcctgataccacttagattcatattgtagaagcttgtcaccatggacaatctcatacttttgtctaggttaagatcaatgggccaggcgtggtggctcatgcc

SEQ ID NO: 40263 - DNA, 120 bp, synthetic construct
  source 1..120: mol_type = other DNA
ccatgcatctttccatccaataaatttgctgtgcaaatactgaccaggctaagcaagctgaagaatacaagatatggccatgattaaaagtcagatattattctcagtgcagtgggggag

SEQ ID NO: 40264 - DNA, 120 bp, synthetic construct
  source 1..120: mol_type = other DNA
gcctaaaagtagtcccctaaattgtgaggtgattttctagtactctgactgactgccaaaagaaaaatctactctggagaaaggtagcctcagagttgctataaattttcatacagaatg

SEQ ID NO: 40265 - DNA, 120 bp, synthetic construct
  source 1..120: mol_type = other DNA
acttgtgcttagaggaataggcttaaataggcttttgtgtattttaaaaaagaatagaggctggaaattggttaccaaaactttcatctcaagaagctatgaaaaaagaaatacattaaa

SEQ ID NO: 40266 - DNA, 120 bp, synthetic construct
  source 1..120: mol_type = other DNA
cataaaccttcattttatggatcacccttatcaactgaaaacatctaaattccttaatctagtttttaagttgttctacttcttggcccaaacaatctttataagtctgtttgtcttctg

SEQ ID NO: 40267 - DNA, 120 bp, synthetic construct
  source 1..120: mol_type = other DNA
aagaattgtctgtttctgtgattctgtgctagaatatgctggcttctgttttttgttgttgttgtttgtttttctagtttaaatatttggtaatagcttttagaattctctggggacacc

SEQ ID NO: 40268 - DNA, 120 bp, synthetic construct
  source 1..120: mol_type = other DNA
tttcaatagcatcttttttcttttcacctcagtatttccttatttttttgcttgtaaagaatatacattggccgggcacggtggctcacacctataatcccagcactttgggaggccgag

SEQ ID NO: 40269 - DNA, 120 bp, synthetic construct
  source 1..120: mol_type = other DNA
acaaagaaatcatatctctgagatcttaacttccatatcctaatacagggtttgacattctggattttgagaaaatctgggcatttattatgacacattctttcaactaactagctggta

SEQ ID NO: 40270 - DNA, 120 bp, synthetic construct
  source 1..120: mol_type = other DNA
tgtgaatataatggctttggaactcttaagaaaggaagtaagtagggagttatttcaaagtttttatcttagaagttaactaaaaaatgcggcaaaaaaatcttatttttctccccctat

SEQ ID NO: 40271 - DNA, 120 bp, synthetic construct
  source 1..120: mol_type = other DNA
ttaggctaacaaaatgggatttagttctgtgcagataacagaaatattaagagagagtggctagagatactctgttgaaaatgaggaataagtctaatttcaaagccaatttattcaggg

SEQ ID NO: 40272 - DNA, 120 bp, synthetic construct; identical to SEQ ID NO: 21773
  source 1..120: mol_type = other DNA

SEQ ID NO: 40273 - DNA, 120 bp, synthetic construct; identical to SEQ ID NO: 21774
  source 1..120: mol_type = other DNA

SEQ ID NO: 40274 - DNA, 120 bp, synthetic construct
  source 1..120: mol_type = other DNA
tctaaacataataagagctatttatgacaaacccatagccaatatcatactgaatgggaaaaactggaagcattccctttgaaaattggcacaagacaggatgccctctctcaccactcc

SEQ ID NO: 40275 - DNA, 120 bp, synthetic construct
  source 1..120: mol_type = other DNA
tgatctttgacaaacctgacaaaaacaagaaatgggaaaaggattccctatttaacaaatggtgctgggaaaactggctagccatatgtagaaagctgaaactggatcccttccttacac

SEQ ID NO: 40276 - DNA, 120 bp, synthetic construct; identical to SEQ ID NO: 28940
  source 1..120: mol_type = other DNA

SEQ ID NO: 40277 - DNA, 120 bp, synthetic construct
  source 1..120: mol_type = other DNA
atcccatctaggaagtgaggagcgtctctgcccggccgcccatcgtctgagatgtggggagcacctctgccccgccgccctgtctgggatgtgaggagcgcctctgctgggccgcaaccc

SEQ ID NO: 40278 - DNA, 120 bp, synthetic construct; identical to SEQ ID NO: 28941
  source 1..120: mol_type = other DNA

SEQ ID NO: 40279 - DNA, 120 bp, synthetic construct; identical to SEQ ID NO: 28942
  source 1..120: mol_type = other DNA

SEQ ID NO: 40280 - DNA, 120 bp, synthetic construct; identical to SEQ ID NO: 28943
  source 1..120: mol_type = other DNA

SEQ ID NO: 40281 - DNA, 120 bp, synthetic construct
  source 1..120: mol_type = other DNA
ctccagcctgggcaacaagagtgaaactccacctcaaaaaaaaaaaaaagtggggggggggcatgactgtgtttcaataaaactttatttacagacactgaaatttgaattgcataccac

SEQ ID NO: 40282 - DNA, 120 bp, synthetic construct; identical to SEQ ID NO: 28945
  source 1..120: mol_type = other DNA

SEQ ID NO: 40283 - DNA, 120 bp, synthetic construct; identical to SEQ ID NO: 28946
  source 1..120: mol_type = other DNA

SEQ ID NO: 40284 - DNA, 120 bp, synthetic construct; identical to SEQ ID NO: 28947
  source 1..120: mol_type = other DNA

SEQ ID NO: 40285 - DNA, 120 bp, synthetic construct; identical to SEQ ID NO: 28948
  source 1..120: mol_type = other DNA

SEQ ID NO: 40286 - DNA, 120 bp, synthetic construct
  source 1..120: mol_type = other DNA
catgataattgcttgaactcagaagacagaggttgcagagagccgagatgtgccactgaactccagcctgggtgacagaatgagaatctgtctcaaaaaaaaaaaacaacaaaaaacaaa

SEQ ID NO: 40287 - DNA, 120 bp, synthetic construct
  source 1..120: mol_type = other DNA
tatctcctaaaaacaaagacattctcctacattactgaaatacaactataccacactcaggaaatttaacaatggccggccatggtggctcatgcctgtaatcccagttctttgggaggc

SEQ ID NO: 40288 - DNA, 120 bp, synthetic construct; identical to SEQ ID NO: 34238
  source 1..120: mol_type = other DNA

SEQ ID NO: 40289 - DNA, 120 bp, synthetic construct
  source 1..120: mol_type = other DNA
acaatctgacttctttcccaatttggatgtcttttatttgtttctcttacctgatggctctggttaggacttccagtaccatgttgaatacgagtagtgaaaatgggcatccctgtcttg

SEQ ID NO: 40290 - DNA, 120 bp, synthetic construct
  source 1..120: mol_type = other DNA
agaaaattaaaaccatagccatattggagagatgattatgcttttaacgtatgcctaaaaagacaaaaaataggccgggcctggtggctcacgcctataatcctggcactttgggaggct

SEQ ID NO: 40291 - DNA, 120 bp, synthetic construct
  source 1..120: mol_type = other DNA
caggtaagagaaagaaatacagggcatccaaataggaagagaagaagtcaaactatccctgttggcagatggcatgatcctgtatctagaaaactccatagtgtcagcccaaaagctttt

SEQ ID NO: 40292 - DNA, 120 bp, synthetic construct; identical to SEQ ID NO: 30296
  source 1..120: mol_type = other DNA

SEQ ID NO: 40293 - DNA, 120 bp, synthetic construct; identical to SEQ ID NO: 30297
  source 1..120: mol_type = other DNA

SEQ ID NO: 40294 - DNA, 120 bp, synthetic construct
  source 1..120: mol_type = other DNA
atctctccattgcactccagcctgggcaacaagagtgaaactccgtctcaaaagaaaaaaaaaatagaaaaagaaaaataaaagaaatggggtctcactgtgttgcccaggctggtctag

SEQ ID NO: 40295 - DNA, 120 bp, synthetic construct
  source 1..120: mol_type = other DNA
gaatggagtatcgtagtgccttttgtggcaacaaaataggtcgtatttggaatatatctggaagaatgtaagatgttagcaatggtagcttgcctgtagggtagcaatggggggctgtta

SEQ ID NO: 40296 - DNA, 120 bp, synthetic construct
  source 1..120: mol_type = other DNA
ttggtgaatgggtaggtggatggatgaatgaattggtgggtgggtggatgggtggatgaattggtaggtgggtagctgaatggatgaattggttggggggggtggatggatgaattggtg

SEQ ID NO: 40297 - DNA, 120 bp, synthetic construct; identical to SEQ ID NO: 16121
  source 1..120: mol_type = other DNA

SEQ ID NO: 40298 - DNA, 120 bp, synthetic construct
  source 1..120: mol_type = other DNA
gtcccactgcctcctccatcctactctaccctaactgtgggaactcagatcctccgccccggtctcagagcctgttttctttctttctttctttctttctttctttctttctttctttct

SEQ ID NO: 40299 - DNA, 120 bp, synthetic construct; identical to SEQ ID NO: 13852
  source 1..120: mol_type = other DNA

SEQ ID NO: 40300 - DNA, 120 bp, synthetic construct; identical to SEQ ID NO: 13853
  source 1..120: mol_type = other DNA

SEQ ID NO: 40301 - DNA, 120 bp, synthetic construct; identical to SEQ ID NO: 3651
  source 1..120: mol_type = other DNA

SEQ ID NO: 40302 - DNA, 120 bp, synthetic construct; identical to SEQ ID NO: 13855
  source 1..120: mol_type = other DNA

SEQ ID NO: 40303 - DNA, 120 bp, synthetic construct
  source 1..120: mol_type = other DNA
cttgagcccaggagctcaaggctgcagtaagcagtaatcatcccactggaatccagtctgggcaacagagcaaaaccaagaaagaaaagaaaaaaaaagaaaagaaaagaaaagagacag

SEQ ID NO: 40304 - DNA, 120 bp, synthetic construct; identical to SEQ ID NO: 13857
  source 1..120: mol_type = other DNA

SEQ ID NO: 40305 - DNA, 120 bp, synthetic construct; identical to SEQ ID NO: 24930
  source 1..120: mol_type = other DNA

SEQ ID NO: 40306 - DNA, 120 bp, synthetic construct; identical to SEQ ID NO: 24931
  source 1..120: mol_type = other DNA

SEQ ID NO: 40307 - DNA, 120 bp, synthetic construct; identical to SEQ ID NO: 24932
  source 1..120: mol_type = other DNA

SEQ ID NO: 40308 - DNA, 120 bp, synthetic construct; identical to SEQ ID NO: 16122
  source 1..120: mol_type = other DNA

SEQ ID NO: 40309 - DNA, 120 bp, synthetic construct; identical to SEQ ID NO: 16123
  source 1..120: mol_type = other DNA

SEQ ID NO: 40310 - DNA, 120 bp, synthetic construct
  source 1..120: mol_type = other DNA
gagcccacctgggtatgacaccatcaggaaggctacctggaggtggttgatgcctgagctacgtctttttttttttttaccttttacattttttgtggagttggggtctcactatgttgc

SEQ ID NO: 40311 - DNA, 120 bp, synthetic construct; identical to SEQ ID NO: 16124
  source 1..120: mol_type = other DNA

SEQ ID NO: 40312 - DNA, 120 bp, synthetic construct; identical to SEQ ID NO: 16125
  source 1..120: mol_type = other DNA

SEQ ID NO: 40313 - DNA, 120 bp, synthetic construct
  source 1..120: mol_type = other DNA
agaccagcctgaccaacatggcaaaaccttgtctctaccaaaaatataaaaattagctgggcgtggtgacacgtgtctatagtcccagttactcaggaggctgaggcaggagaatcactt

SEQ ID NO: 40314 - DNA, 120 bp, synthetic construct; identical to SEQ ID NO: 16126
  source 1..120: mol_type = other DNA

SEQ ID NO: 40315 - DNA, 120 bp, synthetic construct; identical to SEQ ID NO: 16127
  source 1..120: mol_type = other DNA

SEQ ID NO: 40316 - DNA, 120 bp, synthetic construct; identical to SEQ ID NO: 16128
  source 1..120: mol_type = other DNA

SEQ ID NO: 40317 - DNA, 120 bp, synthetic construct
  source 1..120: mol_type = other DNA
ttgggggatacaaaagggagtggtggaggccgggcacggtggctcacacctgtaatcccagcactttgggaggccaatgcgggcgaatcacctgaggtcaggagttcagggccagtctga

SEQ ID NO: 40318 - DNA, 120 bp, synthetic construct; identical to SEQ ID NO: 16129
  source 1..120: mol_type = other DNA

SEQ ID NO: 40319 - DNA, 120 bp, synthetic construct; identical to SEQ ID NO: 16130
  source 1..120: mol_type = other DNA

SEQ ID NO: 40320 - DNA, 120 bp, synthetic construct
  source 1..120: mol_type = other DNA
gggcatttctcgtttcacaaagattgtctcattaattcttacatgaacccataaggtaggttattattgtttgtttgagatggagtcttgttctgtctcccaggctggagtgcagtggtg

SEQ ID NO: 40321 - DNA, 120 bp, synthetic construct; identical to SEQ ID NO: 12748
  source 1..120: mol_type = other DNA

SEQ ID NO: 40322 - DNA, 120 bp, synthetic construct; identical to SEQ ID NO: 12749
  source 1..120: mol_type = other DNA

SEQ ID NO: 40323 - DNA, 120 bp, synthetic construct
  source 1..120: mol_type = other DNA
aaagcgacagtctcaggggccatcgcaaggtttccagttgcctagacaacaggcccagggtcagagcaacaatccttccagccacctgcctcaactgctgccccaggcaccagccccagt

SEQ ID NO: 40324 - DNA, 120 bp, synthetic construct
  source 1..120: mol_type = other DNA
ggaagggggagctgcgctacatgcactcgcgtgtggtggccaactcggaggagatcgccttctatgggggccatgaggtggggcaggttggggtgccgggcacggagggaagcgtgtggc

SEQ ID NO: 40325 - DNA, 120 bp, synthetic construct
  source 1..120: mol_type = other DNA
gaccttgtctcactggctgtgcaccagcagagaagcaggcttgtccccgaattccacggagaggggcatcccgggtgtgggccagactgcagattcagagaaaaggcccctggacttcag

SEQ ID NO: 40326 - DNA, 120 bp, synthetic construct
  source 1..120: mol_type = other DNA
tcagtgttctgtgtacagtgggcacgtgaatacacatgcagtgggatgtggggagaatcaaatgcagagacgtgaaagcacttggcaaacagtggcaggctaggcagctgtcatcagacg

SEQ ID NO: 40327 - DNA, 120 bp, synthetic construct
  source 1..120: mol_type = other DNA
gcccaaagaaatgggctcagcagaggacagaaacaaggtgactagagagggagtggagaggggacgggagccgcactgtgacatcagccagtcccttatacccccttacaccttgagttt

SEQ ID NO: 40328 - DNA, 120 bp, synthetic construct
  source 1..120: mol_type = other DNA
ggtttcctcgccctgaaacagctcttgcaccctaaggtgttttagaggagtgggaagcctgttctacctgttattttagtgataagattaaatgtttaggtttctgcattcctgttgttt

SEQ ID NO: 40329 - DNA, 120 bp, synthetic construct
  source 1..120: mol_type = other DNA
ttgtacctagtttttcctctttgctatcgccttatccacacgtgttgaaactcactcgcatgtttgctgagttctgtgctcaccatttcgttcctacatctcaatttctcttctatgttc

SEQ ID NO: 40330 - DNA, 120 bp, synthetic construct
  source 1..120: mol_type = other DNA
tatttgctcatctttttgactgctccttttatactgtgtatcaggttagtcatacttaccccaccgtctctatctgatggtttggttagcttcagttcttgggagtatcattcgcctgtc

SEQ ID NO: 40331 - DNA, 120 bp, synthetic construct
  source 1..120: mol_type = other DNA
cagagccagcagcctttgaaggctgtgaagcattccctttcccctggcttgataggctctgtcctgtggccgtctgtttttttttggagggggagcttttgagatggagtctcactctgt

SEQ ID NO: 40332 - DNA, 120 bp, synthetic construct
  source 1..120: mol_type = other DNA
acccttccctttgtccacagcgactgtccagctctcagaacacctggggaggagggctgtgtccttgagagcaccgtgggaaggaaggtccaaggccttcgacctttaggattcacatcc

SEQ ID NO: 40333 - DNA, 120 bp, synthetic construct
  source 1..120: mol_type = other DNA
ggacagagggccggtggaaggagctggctgtacgtagaaacaaaaccagatgcctactggtgcatttaaaaatcaacgttattgagacgtaattaacatactatacaattcttccttttc

SEQ ID NO: 40334 - DNA, 120 bp, synthetic construct
  source 1..120: mol_type = other DNA
tgtgtggttcaccagtccagagttttctcccagtctgtaggttgtctttttcactgtctcgatattgtcctttggtgcacaaaagtgttgagttgaatgaggttcagttgatctgttttt

SEQ ID NO: 40335 - DNA, 120 bp, synthetic construct
  source 1..120: mol_type = other DNA
ctgcagagaggtgctggtccgcccgccttccttcccagacagtagctgccggccaccgtactgactcgccctttgagggcctcagcctggattattcattcaaaacaagggggatgtggt

SEQ ID NO: 40336 - DNA, 120 bp, synthetic construct
  source 1..120: mol_type = other DNA
caggtagagaagtgacaaggaatcactcattcattcactcatttaaccaatgtgccctgaactctgagccgggcaccagaaacccgaggtaaatcaggagacctgcactcagggagtctt

SEQ ID NO: 40337 - DNA, 120 bp, synthetic construct
  source 1..120: mol_type = other DNA
aatgaccctgtttccaaataagctcacactccgaggtagtggggattagggttcccacataggaatttcagaggacagagttccacccatgacactgcctgaggtaagctaaagaccacg

SEQ ID NO: 40338 - DNA, 120 bp, synthetic construct
  source 1..120: mol_type = other DNA
aacagagtgaggtctcgtctcttgaaaacaaagtgcctttcagggcagttccttaaagggggctgacagttgaccctgcacttggattcctggtgaagtgggagtcggatgggactgagg

SEQ ID NO: 40339 - DNA, 120 bp, synthetic construct
  source 1..120: mol_type = other DNA
agggagtgaagattacctcaacatccagagtctaaagtgccaggtgccacggggcggggcagaggctgctaccagggaggaccaacaccacacagatggccccaggtgctctagggaagg

SEQ ID NO: 40340 - DNA, 120 bp, synthetic construct
  source 1..120: mol_type = other DNA
tgagccattaggatggagttgagctgcgaggaacagaacgggcctccccgcaatagtggctaagatcatctgtgagtttatcctactgagctgttaggtcccaagagagccaggccacgg

SEQ ID NO: 40341 - DNA, 120 bp, synthetic construct
  source 1..120: mol_type = other DNA
cagggtgggctccttccgggtgccatgacagaaggatgtgttccaggcctctgtcctcggctcgcagatggtccacttctccctgtatatcttcacctcatgttcccctgtgcatgtctt

SEQ ID NO: 40342 - DNA, 120 bp, synthetic construct
  source 1..120: mol_type = other DNA
ctgtccctctcctggccaggaaataccacacacacttgctacagttcgatggggagggcggctggaagttcgagaagctggactcagctgcccgcctgagcctgacggaggagaagcagc

SEQ ID NO: 40343 - DNA, 120 bp, synthetic construct
  source 1..120: mol_type = other DNA
cgccaccggggcacacgggcctctgcttgccagccaggagtgcggacaccatgttcccagctcagtgccaaagaggggtcaccagggggagctgtctgcggagccagcgcctgcccgaga

SEQ ID NO: 40344 - DNA, 120 bp, synthetic construct
  source 1..120: mol_type = other DNA
tggccaatgatgatgagcatttcttcatgtgtcttttggctgcataaatgtcttcttttgagaagtgtctgttcatatcctttgcccactttttgatggggttgtttgtttttttcttgt

SEQ ID NO: 40345 - DNA, 120 bp, synthetic construct
  source 1..120: mol_type = other DNA
gattcttcctacccatgagcatggaatgttcttccatttgtttgtatcctcttttatttcattgagcagtggtttgtagttcaccttgaagaggtccttcacatcccttgtaagttggat

SEQ ID NO: 40346 - DNA, 120 bp, synthetic construct; identical to SEQ ID NO: 7809
  source 1..120: mol_type = other DNA

SEQ ID NO: 40347 - DNA, 120 bp, synthetic construct; identical to SEQ ID NO: 7810
  source 1..120: mol_type = other DNA

SEQ ID NO: 40348 - DNA, 120 bp, synthetic construct
  source 1..120: mol_type = other DNA
tgagacactatctcacaccagttagaatggcgatcattgaaaagtcaggaaacaacgtgctggagaggatgtggagaaataggaacacttttacactgttggtgggactgtaaactagtt

SEQ ID NO: 40349 - DNA, 120 bp, synthetic construct; identical to SEQ ID NO: 7811
  source 1..120: mol_type = other DNA

SEQ ID NO: 40350 - DNA, 120 bp, synthetic construct
  source 1..120: mol_type = other DNA
actataaatcatgctgctataaagacacatgcacacgtatgtttattgcggcactattcacaatagcaaagacttggaaccaacccaaatgtccaacaatgatagactggataaagaaaa

SEQ ID NO: 40351 - DNA, 120 bp, synthetic construct; identical to SEQ ID NO: 7812
  source 1..120: mol_type = other DNA

SEQ ID NO: 40352 - DNA, 120 bp, synthetic construct
  source 1..120: mol_type = other DNA
ttctccagcacctgttgtttcctgactttttaatgattgccattctaactggtgtgagatgttatctcactgtggttttgatttgcatttctctgatggccagtgatggtgagcattgtt

SEQ ID NO: 40353 - DNA, 120 bp, synthetic construct
  source 1..120: mol_type = other DNA
ccttgaagaggtccttcacatcccttgtaagttggattcctaggtattttattctctttgaagcaattgtgaatgggagttcactcgtgatttggctgtttgttgttggtgtataagaat

SEQ ID NO: 40354 - DNA, 120 bp, synthetic construct
  source 1..120: mol_type = other DNA
tgtttgtagtattctccgatggtagtttgtatttttgtgggatcggtggtgataatcccctttatcattttttattgtgtctatttgattcatctctctttttttctttattagtcttgc

SEQ ID NO: 40355 - DNA, 120 bp, synthetic construct
  source 1..120: mol_type = other DNA
ctttgtaggtcgctcaggacttgctttatgaatctgggtgctcctgtattgggtgcatatatatttaggatagttagctcttcttgttgaattgatccctttaccattatgtaatggcct

SEQ ID NO: 40356 - DNA, 120 bp, synthetic construct
  source 1..120: mol_type = other DNA
ccattctccccgtcactttcaggtacaccaatcagatgtagatttggtcttttcacatagtcccatatttcttggaggctttgctcgtttctgtttgttcttttttctctaaacttccct

SEQ ID NO: 40357 - DNA, 120 bp, synthetic construct; identical to SEQ ID NO: 23124
  source 1..120: mol_type = other DNA

SEQ ID NO: 40358 - DNA, 120 bp, synthetic construct; identical to SEQ ID NO: 23125
  source 1..120: mol_type = other DNA

SEQ ID NO: 40359 - DNA, 120 bp, synthetic construct; identical to SEQ ID NO: 23126
  source 1..120: mol_type = other DNA

SEQ ID NO: 40360 - DNA, 120 bp, synthetic construct; identical to SEQ ID NO: 23127
  source 1..120: mol_type = other DNA

SEQ ID NO: 40361 - DNA, 120 bp, synthetic construct; identical to SEQ ID NO: 23128
  source 1..120: mol_type = other DNA

SEQ ID NO: 40362 - DNA, 120 bp, synthetic construct
  source 1..120: mol_type = other DNA
gaccagtgtcagggcgtctatacaccatgatgccccagctcagttaactcctgtaagtgctgaaaagtatttacttttaaaaaagagggctagatgaaatgtggtctcctgaattgaatc

SEQ ID NO: 40363 - DNA, 120 bp, synthetic construct
  source 1..120: mol_type = other DNA
gtgcaagaattctattactggactcctggccctctactctacccacagttccaaaccctcagccaagattcctgagatattataccactagacaggaatatcagtaagttctattaactt

SEQ ID NO: 40364 - DNA, 120 bp, synthetic construct
  source 1..120: mol_type = other DNA
caaggccacgtgattcttccacaagccccagggtgagagatcgatgccctgctttaccaaatattcttcgccagtacatctgaaattaaacagaaaaagaatataacttcattcctagca

SEQ ID NO: 40365 - DNA, 120 bp, synthetic construct
  source 1..120: mol_type = other DNA
ctgaggcaggagaatggcgtcaacccgggaggtggagcttgcagtgagcggacatcgtgccactgcactccagcctcggtgacagagcgagactccatttcaaaaaaaaaaaaaaaaaaa

SEQ ID NO: 40366 - DNA, 120 bp, synthetic construct
  source 1..120: mol_type = other DNA
ggcccaaaacaataagaaacaaacgtaagaaacattgctgcatgttaaagacaatttttactgcagcagaatactgaggggttgtgccacatgttcacatgcattcgcgcacaactcact

SEQ ID NO: 40367 - DNA, 120 bp, synthetic construct
  source 1..120: mol_type = other DNA
gtgtttttcatcaattagccaatctttctcctttactaggaggtatctcccctagccctttaaaggatgactgaggaaaatagcaaatgactccccagccttgtgttaaccaaggctaac

SEQ ID NO: 40368 - DNA, 120 bp, synthetic construct
  source 1..120: mol_type = other DNA
cagtgctatcatttaaagctgccaaaaagcaatagcgcaatggagatgccaggaagacctgctgaagattgacaagagaactaattgccaccacaagcatactggtatatgcataacaat

SEQ ID NO: 40369 - DNA, 120 bp, synthetic construct
  source 1..120: mol_type = other DNA
tagcagttctctaatgccagcatgaaagtcgggcaaataatctgtaattctcaagagaatctgccgatcaaatgtcttctgatttttgaaattccaatttattaaggtttcataataggt

SEQ ID NO: 40370 - DNA, 120 bp, synthetic construct
  source 1..120: mol_type = other DNA
agggggcctccataacccaagcctccccagacagatcaccacatcactctggattgaaatgagactaaattacgtttcataaactgctttctaaactgtagtgagctaatactacaggta

SEQ ID NO: 40371 - DNA, 120 bp, synthetic construct
  source 1..120: mol_type = other DNA
cagcctgggtgacagagcaagaccctgtctcaaaaaagcgaaacaaagcaaacaaacaaaaaagttcagttgggaaacagtcttgacaaaaatagctgacagtgaacaactgtttcagag

SEQ ID NO: 40372 - DNA, 120 bp, synthetic construct
  source 1..120: mol_type = other DNA
ccaagccccctagtgcagcttcagatgactaagctcttcttacttcttctactcccaagttaaaaaaagaaaaagacttcttctttcaatgatcatgtcttccagccatacatccctgtc

SEQ ID NO: 40373 - DNA, 120 bp, synthetic construct
  source 1..120: mol_type = other DNA
ttcagtccctttattgcttgctctctccaacatttggattttctgactgtactcaaatctagaaaaactcttttctctggatatcaggtcccaaaggctcaggattttcttccctacctc

SEQ ID NO: 40374 - DNA, 120 bp, synthetic construct
  source 1..120: mol_type = other DNA
agcaatgctggcatcctgatctcagactttcagactagaactgagagaaaatacatttctgttgtttaagccacttgctctatggtattttggtatggcagccaggccaatacataattt

SEQ ID NO: 40375 - DNA, 120 bp, synthetic construct
  source 1..120: mol_type = other DNA
aattacattaaaagaaaaaaaagagtccatagatacctaaagaacaaagatctaagggaacaggctagggtcttttttgttttattttatttttagagacagagctgccctcggtcaccc

SEQ ID NO: 40376 - DNA, 120 bp, synthetic construct
  source 1..120: mol_type = other DNA
tttactgtgttcaccacattgtgcaatgtatctccaaagaaaaatccttattcctcctgtgtaactgaggttttgtaccctttgaccatcatctctccattccccacacacctctagcct

SEQ ID NO: 40377 - DNA, 120 bp, synthetic construct
  source 1..120: mol_type = other DNA
aagatagcaagcttaagtcacaaatacaaattatgagcccaggagttcaaagctgcagtgagctatgactgcactactgcacaccagcctgggcaatattgtgagattctgtttcaaaaa

SEQ ID NO: 40378 - DNA, 120 bp, synthetic construct
  source 1..120: mol_type = other DNA
ccagaactctgagggctgtgaaattcctgagtgcttatgttcagaacacaatacagtcgataaaaagtcccctcataaaatgaggtttttaagggtccactgtgactgaaactaggtaag

SEQ ID NO: 40379 - DNA, 120 bp, synthetic construct
  source 1..120: mol_type = other DNA
aaggaaatgagtcagttaccaaagaatatctactgtatgattccacttatatgagggtcttagagtagtcaagttcagagacagaaagtagaatgattgctgccaggggttaggagaggc

SEQ ID NO: 40380 - DNA, 120 bp, synthetic construct
  source 1..120: mol_type = other DNA
tggcttggccaacgtccctgggagaaaataaaacagcatacattatttagactgcttcctaagttaaaaattaagttatctgtgctttggggagagtggtaggacacaaagcacactgct

SEQ ID NO: 40381 - DNA, 120 bp, synthetic construct
  source 1..120: mol_type = other DNA
aatcacttgaaccctagaggtggaggttgcagcgagccaagatcataccactgcactccagcctgggcgacagagcgatactgtctcaaaaaataaattgataaataaataagaataaaa

SEQ ID NO: 40382 - DNA, 120 bp, synthetic construct
  source 1..120: mol_type = other DNA
taaacagtgcacaatggagtgcacagaccccatctgcttccaagttgagctgttcagaaaacccttggcaccttaaatgaacatgcaatcttctcatacagataatccattcattctaag

SEQ ID NO: 40383 - DNA, 120 bp, synthetic construct
  source 1..120: mol_type = other DNA
ccttggtctcccaaagtgctggggttataggcaggaaccactgcatctagccagcctttcgtttattattggaatactgccatgttcatttattcatgttatgagcttggctgctttcac

SEQ ID NO: 40384 - DNA, 120 bp, synthetic construct
  source 1..120: mol_type = other DNA
taatattttactagagccaacaatgtgccatcttttagtactcaacagaaactcaatattgttaataaaaataacagccccaaaataaccagctaaattgacttctttgaagaatggacc

SEQ ID NO: 40385 - DNA, 120 bp, synthetic construct
  source 1..120: mol_type = other DNA
ttttgttcactactgaattcacatccctaaagcacagcacaggccctataagaacaagttgaatgaatcagtgaacaaaagtgaacagctaccagaaaaccccaaaactggctgacactt

SEQ ID NO: 40386 - DNA, 120 bp, synthetic construct
  source 1..120: mol_type = other DNA
aacaacaaatttagcccattttttctgtgaaccctttcttggatgcttccctaacaccttcattctaaagctttagaaagaaaaaataggccaggcacggcggctcatgactgtaatctc

SEQ ID NO: 40387 - DNA, 120 bp, synthetic construct
  source 1..120: mol_type = other DNA
gggtcagtgagccgaaatagcaccattgcactccagcctgggtgacaagagctagattccttctcaaaaaaaaaaaaaaaaatctggttgttgcttcctactatatgcaaatgcatatat

SEQ ID NO: 40388 - DNA, 120 bp, synthetic construct
  source 1..120: mol_type = other DNA
ctcggcctcccaaagtgctgggattacaggcatgagctactgttcccagcctatcacacaatatttcggcaattctttgtctctgggccaaaaaaaaaaaaaaaaagaaagaaaagaaaa

SEQ ID NO: 40389 - DNA, 120 bp, synthetic construct
  source 1..120: mol_type = other DNA
cttttttttttttttttttttttttttttttttttttttgagacggagtctcgctctgtcacccaggctggagtgcagtggcgcgatctcggctcactgcaagctccgcctcccgggttc

SEQ ID NO: 40390 - DNA, 120 bp, synthetic construct
  source 1..120: mol_type = other DNA
aaaaccttaaataaaatttgctgggtgcagtggctcacacctataatcccagcacgttgggaggccgaggtggcagatcacaaggtcaggagatcaagaccatcctcctggctaacaggg

SEQ ID NO: 40391 - DNA, 120 bp, synthetic construct
  source 1..120: mol_type = other DNA
cgtccctgcttagacatcctaagttaaaagtgagacaatactaagtcattaaatatctgaaacttgtatttctcagtaaaatactctattcttgcctttagattgtttgctctagttcag

SEQ ID NO: 40392 - DNA, 120 bp, synthetic construct
  source 1..120: mol_type = other DNA
tctttgccttccacgaaaattgtgagatctccccagccatgtgcaactgtaagtccatgaaacttctttcccttataaattacccagcctcaggtatgtctttattagcagtgtgagaac

SEQ ID NO: 40393 - DNA, 120 bp, synthetic construct
  source 1..120: mol_type = other DNA
catggttaaaggggaccaacagagagttggcagcttccatgtggtgttaggcctgcccttcacctagatttcagaggatgtatggaaatacctggatgtccaggcaaaagtcaactttag

SEQ ID NO: 40394 - DNA, 120 bp, synthetic construct
  source 1..120: mol_type = other DNA
cattctgcctcaaagaggatcaggccagtaggtcaacaatttcagtacaatatgaaatagaagatgctaaggattcctcataagcaaaatgggagactcacaacccagtctgaagatgat

SEQ ID NO: 40395 - DNA, 120 bp, synthetic construct
  source 1..120: mol_type = other DNA
tattccggcccacatactgtacttttcccatggtattcacaacccgcagaccaggagattcccgcaggtgcctacatcaccagggccctgggtttcaaacacaaaactgggtggccattt

SEQ ID NO: 40396 - DNA, 120 bp, synthetic construct
  source 1..120: mol_type = other DNA
ggtcaccagcatcaaagaccaaaggtagataaatctatgaagatgaggaaaaacctgtgcaaaaaggcagaatgcctcttctcctccaaaggatcacagctcctcgccagcaagggaaca

SEQ ID NO: 40397 - DNA, 120 bp, synthetic construct
  source 1..120: mol_type = other DNA
aagcaagtgctgagggattttgtcaccaccaggcctgcctttcaagagttcctcaaggaagcactaaatatagaacagaaaaactggtaccagtgactgcaaaaacataccaaattgtaa

SEQ ID NO: 40398 - DNA, 120 bp, synthetic construct
  source 1..120: mol_type = other DNA
gatcgcgccactgcattcaagcctgggcaacagagcgagactctgtctcaaaaaaaaaaaactcactcaaaactgcacaactatgactgggcgtggtggctcatgcctgtaatcccagca

SEQ ID NO: 40399 - DNA, 120 bp, synthetic construct
  source 1..120: mol_type = other DNA
aatagcaagttctgaaattgaggcaataattaatagcctaccaaccaaaaaaggtccaggaccagacagattcacagccgaattctaccagaggtacaaagaggagctggtaccattcct

SEQ ID NO: 40400 - DNA, 120 bp, synthetic construct
  source 1..120: mol_type = other DNA
tccattcacaattggtacaaagagaataaaatacctaggaatacaacttacaaaagatgtgaaaaacctcctcaaggagaactacaaaccacaaaggaaataagagagtacacaaacaaa

SEQ ID NO: 40401 - DNA, 120 bp, synthetic construct
  source 1..120: mol_type = other DNA
aatgcttttacactgttgatgggagtgtaaattagttcaaccattgtgcaagacagtgtggtgattcctcaaggatctagaaccagaaataccatttgacccagcaatcccattactggg

SEQ ID NO: 40402 - DNA, 120 bp, synthetic construct
  source 1..120: mol_type = other DNA
taaactaggaagtcaatagctgtgccttcacagtctattttccctagatatcctaacaagcaacatagggcaatggctgcctgaaggtaaagaatagagtggaacaaaacaccttactgg

SEQ ID NO: 40403 - DNA, 120 bp, synthetic construct
  source 1..120: mol_type = other DNA
tattgtgaactgcatgtacgaggatctaaattgtgtgttccttatgagaatctaatgcctgatgatgtgtcaccgtttcccatcacccccaaatgggaccatctagttgcaggaaaacaa

SEQ ID NO: 40404 - DNA, 120 bp, synthetic construct
  source 1..120: mol_type = other DNA
tttcatgattcgtcatagttgttgcaagccgaagagctgctgagaactgtaagttttctctcaccgtcagagtgcccatcacaacatcatccttaaggcaaatagcattttaatgagaca

SEQ ID NO: 40405 - DNA, 120 bp, synthetic construct
  source 1..120: mol_type = other DNA
tctcccaaatggcccttccagctgtctgaccttggaggtactaacacaggcaatgtgctcttttatctaagactcatgcctttacttacatcttctgcttcctttccctacttttaatat

SEQ ID NO: 40406 - DNA, 120 bp, synthetic construct
  source 1..120: mol_type = other DNA
tctccgttacacttactgctcttaacacagtgtgaaacgaaatacatggcgtgttctgagtactgtttgatgatcagtactgtatcttcaagtggtcacatttgctacctagtcaaattc

SEQ ID NO: 40407 - DNA, 120 bp, synthetic construct
  source 1..120: mol_type = other DNA
gcaagactccgtctcagaaaaaaaaaaagaagaagaagaaaggagacttcagggtggggcctggcttgttcctttcaaaacacaggtatctatgcccattctctccttagaattgataag

SEQ ID NO: 40408 - DNA, 120 bp, synthetic construct
  source 1..120: mol_type = other DNA
gcatgggagagttgagaacaaaacaaacaaacaaacgaaaaacaaagtctgagcccttgtggagtttacattctagtccagggatcagcagttttcttagacaaagggttgttggaacag

SEQ ID NO: 40409 - DNA, 120 bp, synthetic construct
  source 1..120: mol_type = other DNA
gttctgaatcccccactaggctttaaggcttccctgaactgaggatttacctgtgtcactagcatcttgcacaatgtcctgcactagcaggcattcaaaatttgttgaataaataaattt

SEQ ID NO: 40410 - DNA, 120 bp, synthetic construct
  source 1..120: mol_type = other DNA
ataggatcacttgagcccaagagattgaggctgcagtgagctatgatcatgccactgcactccagcctgggcaacaacgtaagaccttgtctctaataaaatttgtttaattacaaaaag

SEQ ID NO: 40411 - DNA, 120 bp, synthetic construct
  source 1..120: mol_type = other DNA
acaatgtctgagtggttatataggagagggtcgttttttcaagaacacacacaaaggagttaaggagaaggaagcaccatgtggacagcctgcactcacacggttcagaaaaaacagtaa

SEQ ID NO: 40412 - DNA, 120 bp, synthetic construct
  source 1..120: mol_type = other DNA
acacaaatcaaaagtaagataaatgacagcagcccttcctctacctccagaaactgtatttagagttggagccagcagataggagaaagactggaaatactacagccaaaaaggcctttc

SEQ ID NO: 40413 - DNA, 120 bp, synthetic construct
  source 1..120: mol_type = other DNA
aaagtgctgggattacaggcatgagccaccatatccagccacatgtggtgcattttttaaaaaagtctggcagttactttgagagtcaaacatatacctaaaatgtggcccagttatttc

SEQ ID NO: 40414 - DNA, 120 bp, synthetic construct
  source 1..120: mol_type = other DNA
aagtcaagtgcagggacagactacatgctcatcatcagaatctctgtattttttttcaagaccagcctggccaacatggtgaaaccctgtctctactaataatacaaaagttagccaggt

SEQ ID NO: 40415 - DNA, 120 bp, synthetic construct
  source 1..120: mol_type = other DNA
tgcctatgattgagttgctgttcccaaacagtcctcctaagcacaacgacaaaagtagaccaaaaaaagtaagaagaaactgttgaagagttctgtctgataaaagcaaccaaagcggcc

SEQ ID NO: 40416 - DNA, 120 bp, synthetic construct
  source 1..120: mol_type = other DNA
atgagaactacataaaagagcataacaaacatatgggataagatgaaaaaggtctgtcatacgcataacaggcaacctgagagagaagggaaaatgcagcaaaatgggtacttagacaga

SEQ ID NO: 40417 - DNA, 120 bp, synthetic construct
  source 1..120: mol_type = other DNA
atatggaacaatgcgtgtacattatatgcaaatactatgccatgttatatcaggaacttgagcatatgtggatttgggtgtctgaggggagtcttggaaccaattccccagggatctcta

SEQ ID NO: 40418 - DNA, 120 bp, synthetic construct
  source 1..120: mol_type = other DNA
ctggacatgtgtgctgatctcattggattagcatcatctttttatatcaaggaaaatacccatcacacaacgagatgtccctacaacaaaaatcaacctcccacctgttgccgtttcctt

SEQ ID NO: 40419 - DNA, 120 bp, synthetic construct
  source 1..120: mol_type = other DNA
ctgcatttgttggtagaagccaagatagcctcaagttgagaattccagactctactcttccttttttttttcctaggatgacgctagtatatggagttgcactctacctcatagccatag

SEQ ID NO: 40420 - DNA, 120 bp, synthetic construct
  source 1..120: mol_type = other DNA
gaaccaaccaagactcatggatgacaaacctgcccaccctccttgggtcttcagtttgcaacaacgtatcgctgttaggttttcttaaatgttactttagagaagaaaaaatccttttcc

SEQ ID NO: 40421 - DNA, 120 bp, synthetic construct
  source 1..120: mol_type = other DNA
gaggcaggaggatctcttgagcacaggagatcagcttgggcaacatgacaagaccctgtctcaaaaaaacgtacctaaactctctagcaatatataccagtatttagataacagctttaa

SEQ ID NO: 40422 - DNA, 120 bp, synthetic construct
  source 1..120: mol_type = other DNA
tttagaagcaagttcctagagaagacagaccaagtacagctgaatcttgaacagcacaggtttgaagtacatggtccacttatacgcagatggaagaatgccaaacccatgtatacagag

SEQ ID NO: 40423 - DNA, 120 bp, synthetic construct
  source 1..120: mol_type = other DNA
tttacattcccacaaaaatctgcaggaattctgctcgtctgtacaaaaaataaaattgaaaaattagccgggtgtggtggcacatgcctgtagacctagctacttgtgaggctgaggaag

SEQ ID NO: 40424 - DNA, 120 bp, synthetic construct
  source 1..120: mol_type = other DNA
agacttctattatctggcaggcactggacttacaggagtgaacaaaacaaaacaacagataaacatcccggccctcagtgaggttacatatgaaaaatatcagtcaacagtgctacggag

SEQ ID NO: 40425 - DNA, 120 bp, synthetic construct
  source 1..120: mol_type = other DNA
gaaacctattatctgtgcatgttctgcaaaatcgcctgccccaaacaattccatttcctgacctcctcttacactgcccaaactgggaaaacaaggtcaaaaataaatgacagtggttca

SEQ ID NO: 40426 - DNA, 120 bp, synthetic construct
  source 1..120: mol_type = other DNA
aagaaggagcatgtaatgtgtgtgtactccaaaatcatagaagggctcattaattattgcaagggatcctctctctaatccacgggtacagttaccatctcagaccaaataatgtctcat

SEQ ID NO: 40427 - DNA, 120 bp, synthetic construct
  source 1..120: mol_type = other DNA
tgggtgatgtttctcagggctgcttcaagtgggattaggggcggcgtgggaacctaaagtgggagagattaagctgaaggaagattttgtggtaaggggtgatattgtggggttgttaga

SEQ ID NO: 40428 - DNA, 120 bp, synthetic construct
  source 1..120: mol_type = other DNA
aaaactgcttggctgatttgactaataaaggccggtcctctattgaaccgtatagaggtgggaaggccaaaccaaggaattatgtctgacagaagggaagatatgaccgtcgtggccttc

SEQ ID NO: 40429 - DNA, 120 bp, synthetic construct
  source 1..120: mol_type = other DNA
agaaggaaatatgcggaaatggggtgaatgcccggtggatcagagagatagtcatgggggtcaggtgtggtatcaggaataatgtgggaggccggattgaagtctgggccaggaacaatg

SEQ ID NO: 40430 - DNA, 120 bp, synthetic construct
  source 1..120: mol_type = other DNA
gctcagaggcctgacaccaatcttttcagacttagcatttgctaagtcacaaactttttattatacataaaaagttcaaaagtaactctaggccgggcacggtggctcatgcctgtattc

SEQ ID NO: 40431 - DNA, 120 bp, synthetic construct
  source 1..120: mol_type = other DNA
gtgtatgtcaaagtggcacaggcgccaacctgaaaaaggtcccagtggtgaaagccagaacaatttgagcagcaaattaaatactgataatattggattataacccatataacaaaacaa

SEQ ID NO: 40432 - DNA, 120 bp, synthetic construct
  source 1..120: mol_type = other DNA
caatgtttataatggaagggtaatgttagacttaacatgccatctttgtcgttgaaacctttctcatcaagatctcatcaagatctatacaatccagtcaaagctgtactctgaaagcac

SEQ ID NO: 40433 - DNA, 120 bp, synthetic construct
  source 1..120: mol_type = other DNA
ttcctaaatcctacccagttcctccacaggctgcctccttgccgcgtctctcaatctcagtgggagtggcgggcactgcctcttccctcctgcgcgcccggaaccttttgagtgggcaca

SEQ ID NO: 40434 - DNA, 120 bp, synthetic construct
  source 1..120: mol_type = other DNA
aggaaacgggccatcaggctttgtgagtgtagccatcccaacatctacctgctgcatctaccctaggaaattagtacctgcatgcagatattttctggtttgcatttacaaacaaaaatc

SEQ ID NO: 40435 - DNA, 120 bp, synthetic construct
  source 1..120: mol_type = other DNA
acttagttgaatatagcattctgtaattatgcaaagtaaaaacaaatcaaaaccctatacatagaggccaggcacggtggctcacgcctgtaatcctagtactttgggaggccgaggcag

SEQ ID NO: 40436 - DNA, 120 bp, synthetic construct
  source 1..120: mol_type = other DNA
caagtgatctcattgttcaattcccacctatgagtgagaatatgcggtgtttggttttttgttcttgcgatagtttactgagaatgatggtttccaatttcatccatgtccctacaaagg

SEQ ID NO: 40437 - DNA, 120 bp, synthetic construct
  source 1..120: mol_type = other DNA
tcaaggctgcagcgagccatgatcagagtgagaccccactctaaagaaaaagagaaagaaagaaaatagcaggaaagtgttcatttgttctgggtagtaacatggaatgtcttttatctt

SEQ ID NO: 40438 - DNA, 120 bp, synthetic construct
  source 1..120: mol_type = other DNA
aagagaggctatgtgcacagtattcccccacagcccagctcacagctatcagggcctttgactaatatggcaagagaaagttcagtctataatggtgcaaacagttattgtaaataaaat

SEQ ID NO: 40439 - DNA, 120 bp, synthetic construct
  source 1..120: mol_type = other DNA
gccttgcgggttcaagcgattctactgcctcagcctcctgagtagctgggattacaagcacttgccaccatgcctggtaatttttgtatttttagtagagacagggttttgccatgttgg

SEQ ID NO: 40440 - DNA, 120 bp, synthetic construct
  source 1..120: mol_type = other DNA
gccaccacatctggccgaggtaaatgttttaattagagaaaattgaaataaatatctggcccataactatactttctctctgaagttgatggatgtgctgagggtatgggtgtgaatggc

SEQ ID NO: 40441 - DNA, 120 bp, synthetic construct
  source 1..120: mol_type = other DNA
ccactggcacccactgagttggtatgaagagtattttaaactgaaacatttaagacacagcagatacagaaagaagcctttctggagcttcccttatttgactaaagccagagctttcag

SEQ ID NO: 40442 - DNA, 120 bp, synthetic construct
  source 1..120: mol_type = other DNA
ttaaaacaatacccatttattatctcccaattgtggaggtcagaagtctaggctaggttaggctttgctcagggtatcaacaggccaagtcaaagtgtcagccagctgaaatgaactctt

SEQ ID NO: 40443 - DNA, 120 bp, synthetic construct
  source 1..120: mol_type = other DNA
tcaaaatccttcagatcagtacctagattagtgcttgatgaaataaccagggaatgaactggaattgtaggggttaggggagagggagatctttagaattctgcctatcctggagatgga

SEQ ID NO: 40444 - DNA, 120 bp, synthetic construct
  source 1..120: mol_type = other DNA
agtcttttgtttaactaaattttgtagggaagtacaacataccaaaaaagtacaggaaatctaagtggacagcttgatatatatttacaaagtgaacacacctgtatacctgtcactcag

SEQ ID NO: 40445 - DNA, 120 bp, synthetic construct
  source 1..120: mol_type = other DNA
ttgatgggcctttgggtcctttccagtttggcaatacaccctaaagtgttagattagaaaagagttctaatggtcagttaaacccatcatccacaagtatggctaaatggaggcccaaaa

SEQ ID NO: 40446 - DNA, 120 bp, synthetic construct
  source 1..120: mol_type = other DNA
cctcttctgaaacccctgccctctctccagaaattggaaagtggaaatttttgtaaagtattctgaccactttcctccttgctgtcaatggataataaaattcactctttatcatacctc

SEQ ID NO: 40447 - DNA, 120 bp, synthetic construct
  source 1..120: mol_type = other DNA
gaagctggtgactgagaacactgaaggtgaaagacaaagaagctagagatgacttcaaggtctgattcgttctttttcaaattggctaattatttgattgtctcctgttcttcctcatgt

SEQ ID NO: 40448 - DNA, 120 bp, synthetic construct
  source 1..120: mol_type = other DNA
cacttgaaccaaggaggcagaggttgcagtgagccgagtcacgccactgcactccagcctgggagacagagcaagactctgtctcagggaaaaaaaaaaaaattaattaattaattaaat

SEQ ID NO: 40449 - DNA, 120 bp, synthetic construct
  source 1..120: mol_type = other DNA
agtagattcaggtccaatcacttgacaataatgcattctaggtgttgtatacttccattaggaagctccgaatgcctaattttattcgtaactattttcagatctctataaaagatatgg

SEQ ID NO: 40450 - DNA, 120 bp, synthetic construct
  source 1..120: mol_type = other DNA
ctccaaaggacatgaactcattcttttttatggccacatagtattacagacatgcgccaccacgcccaggtaattttgtaattttagtagagacagacagggtttctccatgttggtcag

SEQ ID NO: 40451 - DNA, 120 bp, synthetic construct
  source 1..120: mol_type = other DNA
cctcaaggtccagtatgttcaaaacaggcagagtaactgctagattcttttcctttgttttcaaaataacaagtgtgattctatatcacaatccaaaggtgactggccaatgaattgtta

SEQ ID NO: 40452 - DNA, 120 bp, synthetic construct
  source 1..120: mol_type = other DNA
acagtaatgaaaccaaagagaatgctttttttttttttttttttttgtgacagggtctcactgtttcactcaggttggagtgtgatggcccagttacagcacactacagccccaacctcc

SEQ ID NO: 40453 - DNA, 120 bp, synthetic construct
  source 1..120: mol_type = other DNA
caccaaaaatcagatgaacgatcatagtatgggttttaacttcatatcattgaaagcaacactgaagaaggtaggaaagacagtcttgaattgcggacaccacccctccccaatctctct

SEQ ID NO: 40454 - DNA, 120 bp, synthetic construct
  source 1..120: mol_type = other DNA
gagactcagagacttgctggcttaagctgtgactcagcacattcctagctgtggtggctatggggaggggctacttctgcttaagaaaaggagtactctcaagtgtaatgaagactttgt

SEQ ID NO: 40455 - DNA, 120 bp, synthetic construct
  source 1..120: mol_type = other DNA
cccaagaaggacaggtacaaacaggcccagactacaataaatacttatcttcaatgctcagatgctgatgaacatcctcaagcatcaaaaccatccaggaaaacatgacctcactaaatg

SEQ ID NO: 40456 - DNA, 120 bp, synthetic construct
  source 1..120: mol_type = other DNA
tgcctataatcccagcacatgggaggccaaggcaggagaattgtgtgagcccaggagttcaagaccagcctggaaaatataatgagaccttgcctctacaaaaaaaaattttaaattttt

SEQ ID NO: 40457 - DNA, 120 bp, synthetic construct
  source 1..120: mol_type = other DNA
agcaagactccatctcaaaaaaaaaaaaaaaaaaaaaaaaagaatgggctgtaagatattatttgaagccaggcatggtgactcatgtatgtaattccagcactttgggaggctgaggca

SEQ ID NO: 40458 - DNA, 120 bp, synthetic construct
  source 1..120: mol_type = other DNA
cccaacactgcagcacccaaatatataaagcaaatattattagagctaaagagagaaatacactccaatatgataacagctggagacttcaacaccccactctcagcattggacagatct

SEQ ID NO: 40459 - DNA, 120 bp, synthetic construct
  source 1..120: mol_type = other DNA
aaacttcaaataaacaaccaaactatgcatcttaaagaactaggagaggaagggcaagccaaacccaaaactggtagaagaagagaaattatgaagatcagagcaaaataaatgaaactg

SEQ ID NO: 40460 - DNA, 120 bp, synthetic construct
  source 1..120: mol_type = other DNA
acagacccacagctagtatcatactgaatggggagaaattggaagccttttctctaagatctggaacaaaacaaggatgcccactttcaccactgttattcaacatagtactggaagtcc

SEQ ID NO: 40461 - DNA, 120 bp, synthetic construct
  source 1..120: mol_type = other DNA
cttaccatatacaaatatcaaatcaaaatggattaaaaacttaaatataagacctcatggatgggcgaggtggctcacacctgtaatccctacactttgggaggtcaaggcaggtggatc

SEQ ID NO: 40462 - DNA, 120 bp, synthetic construct
  source 1..120: mol_type = other DNA
gggaacccctgtgcactgttggcaggaatacatattagtccaaccactatggagaatagtttggaggtttctcaaaaaactaaaaatagaacttacatatgtaagtaccaggaatcccac

SEQ ID NO: 40463 - DNA, 120 bp, synthetic construct
  source 1..120: mol_type = other DNA
agcgagactccgtctcaaaaaaaaaaaaaaaaaaaaaaaatttagccgggcatggtggcaggtgcctgtaatcccaactcctcgggatgctgaggcagggagaattgcttgaacccaaga

SEQ ID NO: 40464 - DNA, 120 bp, synthetic construct
  source 1..120: mol_type = other DNA
gtatcttatagtggtttcaactacaggcaggatgtttggaaatgtccagtagcatttttagtcatcgtaatatctgggattgctattggcatgtgtggtcatgggttggggagggaaagc

SEQ ID NO: 40465 - DNA, 120 bp, synthetic construct
  source 1..120: mol_type = other DNA
agattgcgccactggactccagcctgggtgacagaagcaagaccatgtttaaacaacaacaaaaaaaacacaatattagatcttccagttcatgaacacaggatgtctgcatattcgttt

SEQ ID NO: 40466 - DNA, 120 bp, synthetic construct
  source 1..120: mol_type = other DNA
agtggcaaaatcaggcacttgttaataatcttaagcgaaaaactttcagtttgatggcaccattgatatgaagttagctgtgggtttttcatacatggtctttatcatgctgaagacgtt

SEQ ID NO: 40467 - DNA, 120 bp, synthetic construct
  source 1..120: mol_type = other DNA
ggatagaggaccaatttttatccagattatataaagaaccattacaactcaataccaaaacaaataactcagtttaaaaaggggcaaaaattggccaggcactgtggctcacgcctgtaa

SEQ ID NO: 40468 - DNA, 120 bp, synthetic construct
  source 1..120: mol_type = other DNA
taaaagtacaaagcaattataggattccatttaatgaaacacgcagaaaggcaaatctttatagctagaaagttgtctggggctttgggaggccgaggtaggcagattacctgagctctg

SEQ ID NO: 40469 - DNA, 120 bp, synthetic construct
  source 1..120: mol_type = other DNA
ctgggttcaagtgattctcctgtctcagcctcccaagtagctgggattacaagcacccaccaccttgcccagctaattttttgtatttttagtaaagacggggttttgccatgttggcca

SEQ ID NO: 40470 - DNA, 120 bp, synthetic construct
  source 1..120: mol_type = other DNA
ggcatgatcttggctcactgcaacctccacttcctggattcaagcgattctcatgcctcagcctcccgagtagctgggactacaggcatctgccaccacacctggctaatttttgtattt

SEQ ID NO: 40471 - DNA, 120 bp, synthetic construct
  source 1..120: mol_type = other DNA
atgaaataaataaatgtctatttttttcttccactgtcttacagctaaacttgatcctgagataggagtggttcagacagagctgtaggcacgaaggctgacacaggaaagcgcttggca

SEQ ID NO: 40472 - DNA, 120 bp, synthetic construct
  source 1..120: mol_type = other DNA
agtaatgaaaggaaataaagtacacttggaagagggtaagtgggcaacttgagaaatcccatgcacagtttgacctttgacttgtggttttatacactggcatacttccggggtcttatg

SEQ ID NO: 40473 - DNA, 120 bp, synthetic construct
  source 1..120: mol_type = other DNA
cagcactagcataccgaaaagatcatttctgggcccacgttttacctcctggaactttatgatgctcttacactgaagattaccaaaaaaaaaaaaaaatcccctttagcatcggactgc

SEQ ID NO: 40474 - DNA, 120 bp, synthetic construct
  source 1..120: mol_type = other DNA
tctcaaaattaaattaaattaaaaactaaaaaaaatttttaaatgagctgggtgggctggcatgtggctgtagtcctagctacttgggagactgaggcaggtggatcagtcgggacctgg

SEQ ID NO: 40475 - DNA, 120 bp, synthetic construct
  source 1..120: mol_type = other DNA
tttgaggctgcagtgagctatgatcatgtcactgcattccagcctgggtgacaaaggagactatgcctctaaaaaagaaaaataaataaatgaaagctccaatggataaagtagatggca

SEQ ID NO: 40476 - DNA, 120 bp, synthetic construct
  source 1..120: mol_type = other DNA
cctcccaaagtgctggaattacaggcgtgagccactgcgcctggccaaaaacaatatttgaagcaattatgaactgacagtttctcccaaattaatgttagataccaaactacagattca

SEQ ID NO: 40477 - DNA, 120 bp, synthetic construct
  source 1..120: mol_type = other DNA
gcctgtaatcccagcaatttgggaggctgaagtgggcagatcacttgagctcaggaattcaaaaccagcctgggcaacatggcaaaaccccatctctactaaaaatacaaaaaatcagcc

SEQ ID NO: 40478 - DNA, 120 bp, synthetic construct
  source 1..120: mol_type = other DNA
tttgtgggatgcagcaattgcaataaaagggaaatttatgtcattggaaacatatattagaaaaaaaagacaaatccaaaatcaataatgtgtactaccaccttggaaaactagaaatag

SEQ ID NO: 40479 - DNA, 120 bp, synthetic construct
  source 1..120: mol_type = other DNA
aaagagaggtcttagaagccaagatcacaaaatgaatatcggtgaagtatcattttgcttacctcaaagggccttatcaatggcactattccatgggctgccatccaacctgctactaat

SEQ ID NO: 40480 - DNA, 120 bp, synthetic construct
  source 1..120: mol_type = other DNA
ctgctattatgccacaaattatactttaatttaatgaaactagtgttcagcacaatgccagtttaatggggttccaacttaaaaccaataaagcattgagggtaattcaaaacattgtat

SEQ ID NO: 40481 - DNA, 120 bp, synthetic construct
  source 1..120: mol_type = other DNA
ttttctctttcctcttccatttctctagttttcttttcttcaagtaggaaatgattttgtttgctttgcaaagacctaacacacctcagctgtaaagaattcaagccggccgggcttggt

SEQ ID NO: 40482 - DNA, 120 bp, synthetic construct
  source 1..120: mol_type = other DNA
cttggctttgttttctgaaagctgcttcctctttggctaggagctgttcaccttttcctgaagtacgtctaccaacaggggcacactaggaaatgtctaatgaattcctgtagttttatt

SEQ ID NO: 40483 - DNA, 120 bp, synthetic construct
  source 1..120: mol_type = other DNA
gcccagccaccatttatcattttatatctgggctgtcttccaagctagtctctgccgacaatacttcgttctctaatccaatctaaactgtcctgtaccctgtctccagtataatcttta

SEQ ID NO: 40484 - DNA, 120 bp, synthetic construct
  source 1..120: mol_type = other DNA
tccaactcctgacctcaggtgatccacccgccttggcctcccgaagtgctaggattacaagcgtgaaccaatgtgcccagtctcaaagcagtgcatttttatgcataacaagtatttact

SEQ ID NO: 40485 - DNA, 120 bp, synthetic construct
  source 1..120: mol_type = other DNA
ccaaagtgctggaattacaggcatagccaccgcacccaacctcattttgtttttttcaatatccctgtcagggcacaatgaaggatatttttgttggctgaaaagtctattcaaatgttc

SEQ ID NO: 40486 - DNA, 120 bp, synthetic construct
  source 1..120: mol_type = other DNA
tctagggatagcagcctcaaacagatctgctctgttaacttttttctgcataccaaggtacttccattttttaatttaaaaaactgaactttcccaagtgctcaatcaacccagacaaag

SEQ ID NO: 40487 - DNA, 120 bp, synthetic construct
  source 1..120: mol_type = other DNA
gttgcagtgagctgatgtcatgccactgcactccagcctggctgggtgagagcaagactctgtctcaaaaaaaaacaaaaaacaaaacaaaaacaaaaaacaaagttcatacctctttct

SEQ ID NO: 40488 - DNA, 120 bp, synthetic construct
  source 1..120: mol_type = other DNA
gctggtagctataaatacatactttttcttttctttttttttttctaagagatgggatcttgctctgttgcccaggctggagtgcagtggtacaatcatagctcactgcagcctcaaact

SEQ ID NO: 40489 - DNA, 120 bp, synthetic construct
  source 1..120: mol_type = other DNA
ttcaagtgattcttctgcctcagacacctgagtagctgggactaccggagtacaccaccacacctgggtaatttttttgtattttaagtagagacggggtttcactgtgttagccaggat

SEQ ID NO: 40490 - DNA, 120 bp, synthetic construct
  source 1..120: mol_type = other DNA
agaacttgtaagcatagtctatctttccacctaaacccctctaataacccaactccggcaaacctttgaccttgctccaccagggcctaaaacccattaattacaccagtatttcactgt

SEQ ID NO: 40491 - DNA, 120 bp, synthetic construct
  source 1..120: mol_type = other DNA
tctttcccctcccatagtcattctcagatgataaccttatgtcctacttgactgagaaaactgaagtaagtaaaagagaacttcagattctgttcaccgtatctgcccacccacctgcat

SEQ ID NO: 40492 - DNA, 120 bp, synthetic construct
  source 1..120: mol_type = other DNA
cctttaagttttagagtggtttgttaggtagggatagataactggaacaatatgccagagagagcagtgcaggtcttctctaggagaagacagaatctatatactaagagagttgagcca

SEQ ID NO: 40493 - DNA, 120 bp, synthetic construct
  source 1..120: mol_type = other DNA
taagggtgttagaccaatggggataaagtataatattcaagccaaattaattgacctgagtgtactcccccaggatttagaatatagcatgttggctggagtactggggatggtcctaac

SEQ ID NO: 40494 - DNA, 120 bp, synthetic construct
  source 1..120: mol_type = other DNA
tgtgccgcgtgtacatccagtagattgtatcacgatggtggaggttctcaaaaatcaaatgatcaagatgatctattttgtgaatgtcagtaagcctctttctccaggtatcccagtgct

SEQ ID NO: 40495 - DNA, 120 bp, synthetic construct
  source 1..120: mol_type = other DNA
agtctcatattctcaaaattcagtatatacctagatcttacagagcagctggcttgatagaacagtgaattggcctgcctaaggcttaattatagtgtgagcagggataccctgcaaggt

SEQ ID NO: 40496 - DNA, 120 bp, synthetic construct
  source 1..120: mol_type = other DNA
caaatgtcaacctcttaacaaggcctaccccaaccactctgtttaaaattgcaaaacctttctttgccttcctgattacttcttactatgcatctgtctgtaacccttctcaccgtctaa

SEQ ID NO: 40497 - DNA, 120 bp, synthetic construct
  source 1..120: mol_type = other DNA
cccacaaagtacatttactaacacaacctccaggtggagccctttcttttttctcagtacactgttccgcaagtattcactgaatagctaccatgtgacaaaaacgaagtgttaggatac

SEQ ID NO: 40498 - DNA, 120 bp, synthetic construct
  source 1..120: mol_type = other DNA
taagtatattcattgctgtgcaaccatcactaccatccatctctagaacttctttcatcttccaaactgaaacttcttgcccattaaacaactcttcactccaccctgtcctcagtggca

SEQ ID NO: 40499 - DNA, 120 bp, synthetic construct
  source 1..120: mol_type = other DNA
aattgaatcatgcgggtggttaccctcatgctgttcttgtgatggtaagttctcatgagatctgatggttttataaggcactttcccacccctctttgctcagcacttctccttcctgat

SEQ ID NO: 40500 - DNA, 120 bp, synthetic construct
  source 1..120: mol_type = other DNA
gatctgtggaactttgaacttgagagggatgatttagggtatctggtggaagaaatttttaagcagcaaagcattcaagaggaagcagagcataaaagtttggaaaacttgcagcctgat

SEQ ID NO: 40501 - DNA, 120 bp, synthetic construct
  source 1..120: mol_type = other DNA
cacccatgtggaactgtgagtttgccattgaacctcttgcctttgtaaattgcccagtttcgggtatgtctttatcagcagtgtgaaaatggactaatacaggcagcatggaagggaaat

SEQ ID NO: 40502 - DNA, 120 bp, synthetic construct
  source 1..120: mol_type = other DNA
ttacccagtctcaggtatttcttcatagcagtgtgagaatggactaatacaagcagcgaacacacaccactactgtgtgtgcatgattaatgatcatgatgattacagcatcctgggcat

SEQ ID NO: 40503 - DNA, 120 bp, synthetic construct
  source 1..120: mol_type = other DNA
gcaatcctcctgcttcagcctctagaatagctgggactataggtgcgcaccaccacactgggccaaaagtgtcctcctttgatgcataaaagttttaaattttttttaattttgatgaag

SEQ ID NO: 40504 - DNA, 120 bp, synthetic construct
  source 1..120: mol_type = other DNA
atgggatctctgctcagtgcttttccctactgccttagtgtattagtccattcccacactgctgataaagacatacccaagactgggtaatttatcaagaaaaagaggtttaatggactc

SEQ ID NO: 40505 - DNA, 120 bp, synthetic construct
  source 1..120: mol_type = other DNA
actgaggcataagaagactaactttcccaggatctcatagcttgcacatgtgatagcattaatattcaaaccaaggaattctggcatgataatctattattcagtaccctgacatgttcc

SEQ ID NO: 40506 - DNA, 120 bp, synthetic construct
  source 1..120: mol_type = other DNA
agttggagcccaaggatttgcgttttagcaagctccctaggtgacatctaagcctgagaaagtttgagaagcattactgtcaaatatttttttcctggggcgtaaagaccttaatggaga

SEQ ID NO: 40507 - DNA, 120 bp, synthetic construct
  source 1..120: mol_type = other DNA
ggtttttcataacctctgattacagaccatagtagaagggaatgttatttgaaacttagttcaaacagaagcgattcctgtctgtctggcagtggttctgaaaggtgaagccagctggac

SEQ ID NO: 40508 - DNA, 120 bp, synthetic construct
  source 1..120: mol_type = other DNA
tttacaacctacctactctgtctctgtcacatttttccaactaagaaagatacaagcttctactctaggagaacgcccatgcatgtgtgggaaagattctatttccaggatagggttcct

SEQ ID NO: 40509 - DNA, 120 bp, synthetic construct
  source 1..120: mol_type = other DNA
ccagccacaccagatgaggcatgatataggcagttaatacaaaaattacaaaaggatttctggctctgctccaagtggcctatataatctaaggagaagcccaacatcctctctcactta

SEQ ID NO: 40510 - DNA, 120 bp, synthetic construct
  source 1..120: mol_type = other DNA
tcctagcaaggggctagaagaagggggaaagttacatgtcagagagatatttttgtatctttctctttgtgccgcggaattctgatgacagcatctccaacacaaacagcaactttattt

SEQ ID NO: 40511 - DNA, 120 bp, synthetic construct; identical to SEQ ID NO: 20502
  source 1..120: mol_type = other DNA

SEQ ID NO: 40512 - DNA, 120 bp, synthetic construct; identical to SEQ ID NO: 20503
  source 1..120: mol_type = other DNA

SEQ ID NO: 40513 - DNA, 120 bp, synthetic construct
  source 1..120: mol_type = other DNA
tgattcctcagggatctagaactagaaatactatttgacccagccatcccattactgggtatatacccaaaggactataaatcatgctgctataaagacacatgcacacgtatgtttatt

SEQ ID NO: 40514 - DNA, 120 bp, synthetic construct; identical to SEQ ID NO: 20504
  source 1..120: mol_type = other DNA

SEQ ID NO: 40515 - DNA, 120 bp, synthetic construct
  source 1..120: mol_type = other DNA
ttgaacccagtagttcaagaccagcctgggcaacatggcgaaaccctctcttaaaaaaaataaaatagctctccctctccccacggtctccctctccctctctttccacggtctctctct

SEQ ID NO: 40516 - DNA, 120 bp, synthetic construct
  source 1..120: mol_type = other DNA
cttctgggaagtgaggagcccctctgcccggctgccaccccgtctgggaggtgtacccaacagctcattgagaacgggccatgatgacgatggcggttttgtcgaatagaaaagggggaa

SEQ ID NO: 40517 - DNA, 120 bp, synthetic construct
  source 1..120: mol_type = other DNA
aatgctgagagattgtgtcaccaccaggcctgccctaaaagacctcctgaaggatgcgctaaacatggaaaggaaaaaccggtaccagccactgcaaaatcatgccaaaatgtaaagacc

SEQ ID NO: 40518 - DNA, 120 bp, synthetic construct
  source 1..120: mol_type = other DNA
aaaatgaaggcagaaataaagatgttctttgaaaccaacgagaacaaagacacaacataccagaatctctgggacacattcaaagcagtgtgtagagggaaatttatagcactaaatacc

SEQ ID NO: 40519 - DNA, 120 bp, synthetic construct
  source 1..120: mol_type = other DNA
ggtttcatccctgggatgcaaggttggttcaatatacgcaaatcaataaatgtaatccagcatataaacagaaccaaagacaaaaaccacatgattatctcaatagatgcagaaaaggcc

SEQ ID NO: 40520 - DNA, 120 bp, synthetic construct
  source 1..120: mol_type = other DNA
agagcctgcatcgccaagtcaatcctaagccaaaagaacaaagctggaggcatcacactacctggtttcaaactatactacaaggctacagtaaccaaaacagcatggtactggtaccaa

SEQ ID NO: 40521 - DNA, 120 bp, synthetic construct
  source 1..120: mol_type = other DNA
tcagtgtggggattcctcagggatctagaactagaaataccatttgacccagccatcccattactgggtatatacccaaaggactataaatcatgctgctataaagacacatgcacacgt

SEQ ID NO: 40522 - DNA, 120 bp, synthetic construct
  source 1..120: mol_type = other DNA
ctcacacctgacctaaaatctaaatgacttattttcttctgcaatgccgcttgaccccaatacaaaccgacagtagttccaaatagccagaaaatggcactttgaatttttccatcctgc

SEQ ID NO: 40523 - DNA, 120 bp, synthetic construct
  source 1..120: mol_type = other DNA
actgacactgcccgatcgcctcggaagccccctagaccatcacagacgccgagcttccggtaactctcacagtgcaaggtaggcccgtccccttcttaatcaatacggaggctactcact

SEQ ID NO: 40524 - DNA, 120 bp, synthetic construct; identical to SEQ ID NO: 19371
  source 1..120: mol_type = other DNA

SEQ ID NO: 40525 - DNA, 120 bp, synthetic construct; identical to SEQ ID NO: 19372
  source 1..120: mol_type = other DNA

SEQ ID NO: 40526 - DNA, 120 bp, synthetic construct; identical to SEQ ID NO: 19373
  source 1..120: mol_type = other DNA

SEQ ID NO: 40527 - DNA, 120 bp, synthetic construct; identical to SEQ ID NO: 19374
  source 1..120: mol_type = other DNA

SEQ ID NO: 40528 - DNA, 120 bp, synthetic construct
  source 1..120: mol_type = other DNA
tcctgagctcaagcaatgctcccacctcagcctcccaggcagctgggactacaggcatgtgccaccacacccgggtaattttttattttttttatttttttattttttttattgatcatt

SEQ ID NO: 40529 - DNA, 120 bp, synthetic construct
  source 1..120: mol_type = other DNA
ccagacggggtcgcggccgggcagaggcgctcctcacatcccagacgggccggcggggcaaaggcgctctccacatctcagacaatgggcggccgggcagagacgctcctcacttcctag

SEQ ID NO: 40530 - DNA, 120 bp, synthetic construct; identical to SEQ ID NO: 24357
  source 1..120: mol_type = other DNA

SEQ ID NO: 40531 - DNA, 120 bp, synthetic construct; identical to SEQ ID NO: 21923
  source 1..120: mol_type = other DNA

SEQ ID NO: 40532 - DNA, 120 bp, synthetic construct
  source 1..120: mol_type = other DNA
tcccagacggggtcgcggctgggcgccctcatatcccagacggggcggcggggcagaggcgctccccacatctcaggcgatgggcggctgggcagagacgctcctcacttcctagacggg

SEQ ID NO: 40533 - DNA, 120 bp, synthetic construct
  source 1..120: mol_type = other DNA
tgtcaaccaccatgaaatgtttaaacttatttttactaagcgagcataaaactggggtttgtccagtgacagtcattagagaatcagactgcagagaaggaaaagtgcagggtctgggag

SEQ ID NO: 40534 - DNA, 120 bp, synthetic construct
  source 1..120: mol_type = other DNA
cactcacaatacctggtatggtacttctgaactgtgcagaacagtatctgaggtttactgttgatgacactaaagcgttcccagtcctgcaaaaccttctgaaacaacaataaatttgca

SEQ ID NO: 40535 - DNA, 120 bp, synthetic construct
  source 1..120: mol_type = other DNA
atttcctgtcctttggatctaggatattgagtcagaaatgaaggtatccttttttttttttttcttcttaacgtgtctcactctgtcacttaggctggagtgcagcggcgcgatctcagc

SEQ ID NO: 40536 - DNA, 120 bp, synthetic construct
  source 1..120: mol_type = other DNA
gcgtgagccaccgcacccggccagaatttctttaagtctagtagttggaaaaccagaactctatccaaatgatatagatatcttgactgttaagagttggagacgtttcagaagttctca

SEQ ID NO: 40537 - DNA, 120 bp, synthetic construct
  source 1..120: mol_type = other DNA
gtgataaatgacagaggtgattcttacgtatctacattttcaggtaccccacagggtccatccacattgaatcaactgtcttatcttttaaacagacaatactacaaccttatagttata

SEQ ID NO: 40538 - DNA, 120 bp, synthetic construct
  source 1..120: mol_type = other DNA
cttacaacaaccctgaggtagttactattattatccctgttttacagtgaggaaactgaggctcccaaggttaaatgacttgccttttagactggcattagagcctaaacactaaaccac

SEQ ID NO: 40539 - DNA, 120 bp, synthetic construct
  source 1..120: mol_type = other DNA
gttgggcaagaaaaccagggagcctaaatacactcagtagtgtttctccaaggcttagttccagaactctcaagggaaaatagagcccttgcttaaaaaacaaaaaacaaaaaaaccctg

SEQ ID NO: 40540 - DNA, 120 bp, synthetic construct
  source 1..120: mol_type = other DNA
tcacttccatgccatcctaattagcttccacaattataactaaggaaggaaggaaaaggcctatttttcaagggcaaaacatatttaaggattaagtcattaggttcccagggtctacct

SEQ ID NO: 40541 - DNA, 120 bp, synthetic construct
  source 1..120: mol_type = other DNA
atagggccatatttcccagttttatgttgtagcactctgatttgcagttcttattacagcagcaatggccttgtggaagcaaggctaacagctacttccaacagccctgaacaaaaattt

SEQ ID NO: 40542 - DNA, 120 bp, synthetic construct
  source 1..120: mol_type = other DNA
tttgctgattttgtctgctgagattttctcagcggcctgtttggtttttctcagagccactttagtacctgctgtgccattggccattttggctggcgagatggaagatgtgggcagagg

SEQ ID NO: 40543 - DNA, 120 bp, synthetic construct
  source 1..120: mol_type = other DNA
ctgaggacatggaagatgtagagtttgaccttggaaaaggcttggaagtgtcatcactggctgtgggtttacctgctcgtaagcccagtgtctttttgattaagcgtggtgtaaagaagc

SEQ ID NO: 40544 - DNA, 120 bp, synthetic construct
  source 1..120: mol_type = other DNA
ggagataacctgctggttattacctcaacactcatcctttctttaaaaaccactgcgcaacctcttctcctctatcgggttcagcgaagtttttgatggaactgtaaagatgatacatac

SEQ ID NO: 40545 - DNA, 120 bp, synthetic construct
  source 1..120: mol_type = other DNA
gtggatcacagggtatacgtgtattcaggtttattaggccctgccaacctgtccccaaatagcgatactattttgcatgaaagctgtggttactctgcatgcttgctaaaatttgatgtt

SEQ ID NO: 40546 - DNA, 120 bp, synthetic construct
  source 1..120: mol_type = other DNA
catggttattggacatatggatatcctcgtttactaagttaaagttaacctttaactactttccatgtcaatatatccaagaaggccgggcgctgtggctcacacatgtaatcccagcac

SEQ ID NO: 40547 - DNA, 120 bp, synthetic construct
  source 1..120: mol_type = other DNA
tcctgggttcaaacaatcctcctgcctcagctccccaagtagctgggactatgggtgtgcaacaccacgcccagctaattttttttttttttttgagacggaatctaactctgtcaccca

SEQ ID NO: 40548 - DNA, 120 bp, synthetic construct
  source 1..120: mol_type = other DNA
ttcaatgaggaaacaacacagacttatgttcaaacacaactgcaattaggaccaggcctggtggcccacatctgtaatcccagcattttgggagactgagtcgggcagatcacttgagac

SEQ ID NO: 40549 - DNA, 120 bp, synthetic construct
  source 1..120: mol_type = other DNA
tatctagttgaaaacggccctccccaccttaatctctaaactcaatttcttatcttattaaatatgcaaatgtctctgagaaactgggtcaatatttgggccataacaactatgcttagg

SEQ ID NO: 40550 - DNA, 120 bp, synthetic construct
  source 1..120: mol_type = other DNA
caattctaaagttttaaattgcatgctgccttgagttgcatgatgaactctcaagccatgcttctccttcccgcctcgcacataaatcatccttttactcaacatatccacaccgtagat

SEQ ID NO: 40551 - DNA, 120 bp, synthetic construct
  source 1..120: mol_type = other DNA
cttttttaaaactttcttctttcttttttttttttgtttgagacagagttttgttcttgttgcccaggctggagtacaatggtgtgatctcagctcaccgcaacctccacctcccgggtt

SEQ ID NO: 40552 - DNA, 120 bp, synthetic construct
  source 1..120: mol_type = other DNA
tttaccacatggttttctcccactaggcagttacgagctgcaagatctctgtgggaaagagaaccctaatgtgattccattcagatggtgaggaaaatggtcatgaacactctattcttg

SEQ ID NO: 40553 - DNA, 120 bp, synthetic construct
  source 1..120: mol_type = other DNA
gatcacttgaggccagtagtttgagaccagcctggtcaacatagcaagaccccatcactattgcaatttttttttaagagagttctcaggtttgagaatagcaaaggccccttattaata

SEQ ID NO: 40554 - DNA, 120 bp, synthetic construct
  source 1..120: mol_type = other DNA
gagccccacctgcaatactgctttgcaaaatgattttcatcatttccatagtcaaggatttcactgatatatggcagattccttataaaaaaccaacaagaggccgggtgcagtggctca

SEQ ID NO: 40555 - DNA, 120 bp, synthetic construct
  source 1..120: mol_type = other DNA
tttggagataacaaggggttaaagggcaagcatttttggaggaaatctatggttcaggcaaggttcctcacctaaaagttgtaccagattaggatgcttgatttccttcattactgcagc

SEQ ID NO: 40556 - DNA, 120 bp, synthetic construct
  source 1..120: mol_type = other DNA
gacagaacaagaaagaggcccatgactctcagacaagaattctgtccagcaggggtcgttctcaggaagcaaaagagcttattttgcttttataacttttaatttgcttctaacctccca

SEQ ID NO: 40557 - DNA, 120 bp, synthetic construct
  source 1..120: mol_type = other DNA
atcctcctgcctgggcctcccaaggtgctgagattacagactgggccagtatacccagcaagagtttatcttaattgaggtaaataaaaaagttaaatgatgattgcaagggtaaacaca

SEQ ID NO: 40558 - DNA, 120 bp, synthetic construct
  source 1..120: mol_type = other DNA
aggttgcagtgagctgagatcacgccactgcattctagagtgggtgacagagcaagactccatctaaaaaaaagaaaagagccacactggatttcacagaattgcttacaaaatagttgt

SEQ ID NO: 40559 - DNA, 120 bp, synthetic construct
  source 1..120: mol_type = other DNA
taatttttacaaagtaaactcacccatgtaaacatcacccacaccaagaattataacatgatcagcaccccagaagcctcccttatgctctccagctatttgcccttgcagagatagcca

SEQ ID NO: 40560 - DNA, 120 bp, synthetic construct
  source 1..120: mol_type = other DNA
acatgaacaaatgggtgtggctgtattctaataaaatattatttacaaaaaaaagcagacggctggagggccatagttttacctggtggtggtgtgtgtagcagtactgtgttcgcttct

SEQ ID NO: 40561 - DNA, 120 bp, synthetic construct
  source 1..120: mol_type = other DNA
atacaatgttaactgataaactctataccagtgcactgggtgtatatttgtgtactgattataagaacagctaacttatagagcagttcccttcattcttcaccttcaaatctagcttat

SEQ ID NO: 40562 - DNA, 120 bp, synthetic construct
  source 1..120: mol_type = other DNA
aatgaacaaacaaaaaaaaacacggaccacagagttttcagcaagaaaactgtttagtggggtgaggggaatgggcagttaggactcccaaaacacaatcccttccagaatgcaagttta

SEQ ID NO: 40563 - DNA, 120 bp, synthetic construct
  source 1..120: mol_type = other DNA
atccttgtaaccatctgtccttttttagtggccttcagaaacgtttccatagaataactttgtatcagacaccatctcaccttagacacatggatatgagataatgagaaaaaacacaag

SEQ ID NO: 40564 - DNA, 120 bp, synthetic construct
  source 1..120: mol_type = other DNA
ttctgtggattttaagagaaaccactgttggtcataagataaaggccagtcataacccataagtgaggaatcaacagtctttctttatcaatgtttccttgatgactgggctatcttgaa

SEQ ID NO: 40565 - DNA, 120 bp, synthetic construct
  source 1..120: mol_type = other DNA
gatgagccatgttgccagacctcactgctactcagaatgtctgcgaacttgactgcctatctgaggactgttcattcattactagtccacagtgagattaagaacttcaactaaatgtaa

SEQ ID NO: 40566 - DNA, 120 bp, synthetic construct
  source 1..120: mol_type = other DNA
aaaagtgaaaggatgctacatagaagcctcacctttagtgatgctgagtgtgttatcaccacttgctacaaaatcataaagtgcaacgaagagattagggtcactctcagtggctccgag

SEQ ID NO: 40567 - DNA, 120 bp, synthetic construct
  source 1..120: mol_type = other DNA
tcgggcatttattgagtttctactcaaagtggtccaagccttttacgacctgttttttccttaagcctttacagtttctaaatttattcatagtacatagcacaggtgatccctatacca

SEQ ID NO: 40568 - DNA, 120 bp, synthetic construct
  source 1..120: mol_type = other DNA
tgcccgccttggcctcccaaagtgctgggattacaaacgtgagccaccacacccagccaggccaacttatttttaatataaaaatagttttatcatatatgaaaggaaaaacccttgaat

SEQ ID NO: 40569 - DNA, 120 bp, synthetic construct; identical to SEQ ID NO: 9070
  source 1..120: mol_type = other DNA

SEQ ID NO: 40570 - DNA, 120 bp, synthetic construct
  source 1..120: mol_type = other DNA
tggagtgcagtggcgtgatctcggctcactacaacctccacctcccagcagcctgccttggcctcccaaagtgccgagattgcagcctctgcccggccgccaccccgtctgggaagtgag

SEQ ID NO: 40571 - DNA, 120 bp, synthetic construct
  source 1..120: mol_type = other DNA
ccagccaccccgtccgggaggtgaggggcgcctctgcccggctgcccctactgggaagtgaggagcccctctgcccggccaccaccccgtctgggaggtgtacccaacagctcattgaga

SEQ ID NO: 40572 - DNA, 120 bp, synthetic construct; identical to SEQ ID NO: 9071
  source 1..120: mol_type = other DNA

SEQ ID NO: 40573 - DNA, 120 bp, synthetic construct
  source 1..120: mol_type = other DNA
tttcaagctccaaaatgctgccagtttaggagagttttccagtggctgtcagatattgtttaattattattattgagacaaggtcttgccgtgttgtccaggctggtctcaaactcctga

SEQ ID NO: 40574 - DNA, 120 bp, synthetic construct
  source 1..120: mol_type = other DNA
cggtgctgcgctcaatttctcgctgggccttagctgccttcccgcggggcaggccacccacccagcagtggcaacccactcgggtccccttccacactgtggaagctttgttctttcgct

SEQ ID NO: 40575 - DNA, 120 bp, synthetic construct
  source 1..120: mol_type = other DNA
tgatgtagactatttcactagactcctgatttccatgcttccgtgcttgttccctactgtttattctcaacataccagccatctttcagagcataagtcagattgctactcctctgttca

SEQ ID NO: 40576 - DNA, 120 bp, synthetic construct
  source 1..120: mol_type = other DNA
tcagactgctgcactccaacttgggtgacaaagcaagactctgtctcaaaaaaaaaaaaaaaaaaaaaattaagtattggctgggcatagtggcacacaactgtagtcccagctacccag

SEQ ID NO: 40577 - DNA, 120 bp, synthetic construct
  source 1..120: mol_type = other DNA
agtctatgtcactttcctcattggttaagacagacatgtctggatgattcagatgtactgtatacgcccaaatgcaagtgtgtgggctgggaatggtttatttttgaacaaaatgaaatg

SEQ ID NO: 40578 - DNA, 120 bp, synthetic construct
  source 1..120: mol_type = other DNA
ctgtcccaaggaccatacctctgcccagaagcacaaaagttaaactgttctgtgtaaagaggaagtcttagaattccattctctgacaagcaataccacatgcatgtgacatttactcat

SEQ ID NO: 40579 - DNA, 120 bp, synthetic construct
  source 1..120: mol_type = other DNA
acctgcctcagcctcccaaagtgctaggattacaggcatgagccaccatgcccagcctgagtgttaaaagtttttaaagcaaaaagcccaatctttgttaataaacaggaacaaagttaa

SEQ ID NO: 40580 - DNA, 120 bp, synthetic construct
  source 1..120: mol_type = other DNA
taagaatttcaaataccagattgaatatctcattctccggattatagaaaaaaaggtatgggaaaggatcttcatcatccacattctatccatatgtagactctataccatatggtttac

SEQ ID NO: 40581 - DNA, 120 bp, synthetic construct
  source 1..120: mol_type = other DNA
tgtacaggaaataagaagtgtggctactgttacggaagtcaaaagatgagcatgaaacaaagtaaggtagacaggggctggccaaatcaagtgcttagggatttaggattctattccaag

SEQ ID NO: 40582 - DNA, 120 bp, synthetic construct
  source 1..120: mol_type = other DNA
agcctaaagcaatgaataggggaaaagctctccatatcctcttgcttttctacctaaagacaggatacaaattctcctttactggtgacaactatagactcttatcagcccagagatggc

SEQ ID NO: 40583 - DNA, 120 bp, synthetic construct
  source 1..120: mol_type = other DNA
ataatatattctggagactccaaaaggtggaatactacctattgggtcccatgtcatgtatgctattcaggtgatggttacactggaagcccagacttcaccactaggcaatatatccat

SEQ ID NO: 40584 - DNA, 120 bp, synthetic construct
  source 1..120: mol_type = other DNA
cgcctgtaatctcagcactttgtgaggccgaggtggacagatcacatggtcaggagttcgagaccagcctcgccaacatggtgaaaccccgtttctactaaaaatacaaaaattagctgg

SEQ ID NO: 40585 - DNA, 120 bp, synthetic construct
  source 1..120: mol_type = other DNA
agagaggagaatgtctagcttcaaaggacaggttgattctctggttaggggtgaatgttgctgttgactttaaattgaagccaacgctcatttgccattttgaaaatcctaggaccttta

SEQ ID NO: 40586 - DNA, 120 bp, synthetic construct
  source 1..120: mol_type = other DNA
gagttcaagactccaggggagaaagtaattgcagatgtggtggaaacagcaagagaactagaattacaagtggagtctgaagatgtgactgaattgttgcaatctcatgacaaaacctga

SEQ ID NO: 40587 - DNA, 120 bp, synthetic construct
  source 1..120: mol_type = other DNA
tcctagattctccttgaacctgacctctggtcatttcagattaagtaatctcttcctttgcctaagctcaaagcacccattgcctaaaatagcaattgttatactaatatgggacatcct

SEQ ID NO: 40588 - DNA, 120 bp, synthetic construct
  source 1..120: mol_type = other DNA
tgattcagctaaaagccctgcagttaatcagaattactgacctcaagtgtcagtttggcatgtcctttggtggtctcacacactagcccaaactgcttatgaaaatatttcccaaagcta

SEQ ID NO: 40589 - DNA, 120 bp, synthetic construct
  source 1..120: mol_type = other DNA
ttataaactctaggctattggctcctgtattagtttcctgcagctgctataaccatatactagatggcttaacccaacagaaatgcattctctcatagtttgggaggccggaagtctgaa

SEQ ID NO: 40590 - DNA, 120 bp, synthetic construct
  source 1..120: mol_type = other DNA
tgaaatacatgttccacgtctcctctctcctcacccagctcttcattcttctcacaaggatcaaacaggatcttgtctttcgactctatcctcaaggaaatagaggacttgctataattt

SEQ ID NO: 40591 - DNA, 120 bp, synthetic construct
  source 1..120: mol_type = other DNA
aggaaactggaaatgtctgccatttactcccagcaacagggtaatcacaaatttttccaaagtgaatgcacaatgactcagagaacagtttttaaaatttatacagctcggccaggcgcg

SEQ ID NO: 40592 - DNA, 120 bp, synthetic construct
  source 1..120: mol_type = other DNA
accaagagaaacaaagcacctattcactacccttatttcagcagctactggctacccaaagcaatagaattctgatcctccatatagaatgtgttagaagtaagaaggagaaaaaccata

SEQ ID NO: 40593 - DNA, 120 bp, synthetic construct
  source 1..120: mol_type = other DNA
agcctggccaacatggtgaaaccctggtctccactaaaaatacaaaaaattagctgggcccgatggcgtgtgcctataatctcagctactcggtaggctgaggcaggaaaatcacttgaa

SEQ ID NO: 40594 - DNA, 120 bp, synthetic construct
  source 1..120: mol_type = other DNA
aacagaccatgtggtaagatgtagagatacaattctggaataggatttggaattctgcctcctggttcagagatcaattttcttggactatcacaaccagaaagtttaagggacccccac

SEQ ID NO: 40595 - DNA, 120 bp, synthetic construct
  source 1..120: mol_type = other DNA
cggcaacagctgtttatgatgggatttctggttcagctgatttgttgattttctgaccatgaatttaagagatacatctgtttaagaaagagctagaaaatatggtagcctgtcacttca

SEQ ID NO: 40596 - DNA, 120 bp, synthetic construct
  source 1..120: mol_type = other DNA
ttattagattagtatgtatacaattagtacatatctacattatctaattctcgtaataatcctatcaggtaaataacttgtccaagattacacagatttgctccaatttccttcatcttc

SEQ ID NO: 40597 - DNA, 120 bp, synthetic construct
  source 1..120: mol_type = other DNA
ggctcacacctgtaattctggcactttgggagaccaaggtggtaaaatctctggagtttatgatcagcctgggcaacatagtgagacctcatctctacaaaaaatgaataaaatcagcta

SEQ ID NO: 40598 - DNA, 120 bp, synthetic construct
  source 1..120: mol_type = other DNA
caggaggcaaaggttgcagtgagccgagatcaagccactgcattccagcctgggcaacagagcgagactctgtttttaaaaaaaattaaaaaataaatttaaaaaaccccaaaaaatagc

SEQ ID NO: 40599 - DNA, 120 bp, synthetic construct
  source 1..120: mol_type = other DNA
cttgagtatttacactggaaaaatggaaacttaagttcacacaaaaacctgaacacaaatgtttatggcagctctattgaaaattgtcccaaactgggccaggcgcagtggctaacacct

SEQ ID NO: 40600 - DNA, 120 bp, synthetic construct
  source 1..120: mol_type = other DNA
cattgcctatgttatttaggcaaaagataatgaaatatctaagggatgaaaggaatgtgccaatcctctttccctaatagaattcccaaactcaatgttgctagcacctggtactatgac

SEQ ID NO: 40601 - DNA, 120 bp, synthetic construct
  source 1..120: mol_type = other DNA
cagccccagattttccatttgctttttgtgcagagggtatgtgtgcatagaaatgatgtgctaagaatattaaagtagaggaggtaagcaaggaccagatcttagatggccttgaatgtc

SEQ ID NO: 40602 - DNA, 120 bp, synthetic construct
  source 1..120: mol_type = other DNA
aaagaaaatcaaactcatttaacaagtggaaaaaggacatggatagacatttctcaaatagctaacaggtatatgaaaaaatgttcctggcagggcgcggtggctcacgcctgtaatccc

SEQ ID NO: 40603 - DNA, 120 bp, synthetic construct
  source 1..120: mol_type = other DNA
gtcatctgcagcaacacggatggaactgagggtcattatgttaagtgaaataaaccaggcacaaaaagacaaataccacatgttctcgcttttatgtgacagttgatctcatggagcgag

SEQ ID NO: 40604 - DNA, 120 bp, synthetic construct
  source 1..120: mol_type = other DNA
cctgcaatattaggttcctggatacatttaaaataatgctgatgcagttccattttaaaatgacattacagttgtcccacggtttccacagggacccctagcagataccaaaatccacag

SEQ ID NO: 40605 - DNA, 120 bp, synthetic construct
  source 1..120: mol_type = other DNA
gtaacacaaacaggagtaaacccttttgcccaaaaatggggttttaatagtctttcaccaggcataccaccactatgagaaacaataacagttgaagactaagagactggccgggtgcgg

SEQ ID NO: 40606 - DNA, 120 bp, synthetic construct
  source 1..120: mol_type = other DNA
tgagggtggagccctcatgacctaattacctcttaaaaagatcccacctcctactactttttcaatagcaattacgtttccaacatgcaagctttgggggacataatcaaactatggcaa

SEQ ID NO: 40607 - DNA, 120 bp, synthetic construct
  source 1..120: mol_type = other DNA
acagaaatcctcattcactgaaaaaactctgagcaactattcttaccaggaggctgcagttctgatatgactggtgattgcctttataactattggccgtctgtgcaaaatcacactgat

SEQ ID NO: 40608 - DNA, 120 bp, synthetic construct
  source 1..120: mol_type = other DNA
ataaaggaggccttgattggcaggcaccctcctttactgatctcttgctgaatttgtcctactatctattaacccttcatgatacctctaccactctctgtatatacacatacgcaaatg

SEQ ID NO: 40609 - DNA, 120 bp, synthetic construct
  source 1..120: mol_type = other DNA
tttttttttttttgagacggaatcttgctctgtcaccaggctggagtgcaatggcacgatctcagctcactgcaacctccatctccctggttcaagcaattctcctgcctcagcctctct

SEQ ID NO: 40610 - DNA, 120 bp, synthetic construct
  source 1..120: mol_type = other DNA
agaaactccatctctactaaaactacaaaaaattagccgggcgtggtggcacatgcctgtaaccccagctactcgggaggctaatactttgaaatatatatatgtgtgtgtatacatata

SEQ ID NO: 40611 - DNA, 120 bp, synthetic construct
  source 1..120: mol_type = other DNA
gatagtgggggaaccactgtccttaaatggatgtccttaagggagaaaatatctagctcttaattttagtctcttagcagacagatatcctagggaggttttactactgtctggcatgtc

SEQ ID NO: 40612 - DNA, 120 bp, synthetic construct
  source 1..120: mol_type = other DNA
atatggcttttattagcagcagtcagcatttgtttttagtgttgttacatattcttttttttttccagacagattctcattctgtcacccaggctggagggcagaggtgccatcttggct

SEQ ID NO: 40613 - DNA, 120 bp, synthetic construct
  source 1..120: mol_type = other DNA
gacagtccttttctgcaaagttagactatgtattaagaggttatgaaaccagtataaaagtagctttttggttggagaataagaacttctcatacctcagtcatcagtaaccaagggaaa

SEQ ID NO: 40614 - DNA, 120 bp, synthetic construct
  source 1..120: mol_type = other DNA
ttaggaacagagagaataaaaacttatggcaaaagtatcaagatctggactttaaaaagtaagaacatcgggcgggcatggtggctcatgcctgtaattccagcactttgggaggccaag

SEQ ID NO: 40615 - DNA, 120 bp, synthetic construct
  source 1..120: mol_type = other DNA
tgaatgtttttggtatcatagagcaagagtgtctactaggatacacaaaacgcagagaagccctcttgaaagaggactcttggcctgagtcttaaaggaaactcaagagttagccactga

SEQ ID NO: 40616 - DNA, 120 bp, synthetic construct
  source 1..120: mol_type = other DNA
cagtaccagtagcaggtaggaaacagaaaagtaacagagaagaaagagagttcccgtggccaaggtgcataagggtcacctccagggaactattcatattttaaacagaacattatacca

SEQ ID NO: 40617 - DNA, 120 bp, synthetic construct
  source 1..120: mol_type = other DNA
tatcagcagctttgtgaccttgggaaaactgcccaacctcgctgagcttcagttttctcatttatgaaacatgcttaatgatgcttacactatctatatcatggtgctgctgtgaaaagc

SEQ ID NO: 40618 - DNA, 120 bp, synthetic construct
  source 1..120: mol_type = other DNA
aaccaagctgactggcctcacttttaactcagaacctttagcctcaaatgagcccttaacactgcctggtgatcatactgtatttctctagtccattcactttcccactttctagacaat

SEQ ID NO: 40619 - DNA, 120 bp, synthetic construct
  source 1..120: mol_type = other DNA
aatatgtatccctagaaagtacaggttgattttcacttaaaggaagacaatcacaaggctgttaaccttctcaacaaaaagagtgcatctttctatgtatgcagaaagcactcaattcag

SEQ ID NO: 40620 - DNA, 120 bp, synthetic construct
  source 1..120: mol_type = other DNA
catgaggcaccagagagcttctttatctggtttactgaccattctgatgcaggtgctcatatgttaggaaagttcatcaaagatgacatttgtcccatcccattacagtactacttggtt

SEQ ID NO: 40621 - DNA, 120 bp, synthetic construct
  source 1..120: mol_type = other DNA
ttgagatgtttggatgggttaagcgggcattttgacaacatggcttctcttttggcatgttaaattgaggtgtctgacagacatccttgcagtttaaggtaatacttttaaaataaattc

SEQ ID NO: 40622 - DNA, 120 bp, synthetic construct
  source 1..120: mol_type = other DNA
cactccagcctgggtgacagagggagacgctgtcttaaaaaaaaaattggcaatgccctcttctgggctacaactacttaatgagtaatgtatactagccttggaatttatttcacaatt

SEQ ID NO: 40623 - DNA, 120 bp, synthetic construct
  source 1..120: mol_type = other DNA
actcaagggccttcattcacccagttagttattaggagttctgagatcctcagatttcagatttcccacattccactcctttctgcaataccagatgcagcaggtttgccagtaaattca

SEQ ID NO: 40624 - DNA, 120 bp, synthetic construct
  source 1..120: mol_type = other DNA
ggtcctcttcctgaaatgtttttatctcaaaagccaaaagtttgactctttcagtaattctctgctcaaacgttaccccatcagaggctttccccagccacccaatctaaaacagcacat

SEQ ID NO: 40625 - DNA, 120 bp, synthetic construct
  source 1..120: mol_type = other DNA
acactaatggccaaaacatgacaatcttcatgttgttctcgggtgttttttgttgttgttattgttgttgttttgagacagagtttcactcttgttgcccaggctggagtgcaatggtgc

SEQ ID NO: 40626 - DNA, 120 bp, synthetic construct
  source 1..120: mol_type = other DNA
aatttaactcaattctaattccacctacctagagatagtgtcagattccacaagtccagggctcaggcccacatgactgtcccagacttcagatgccatttctgattgattggcaataaa

SEQ ID NO: 40627 - DNA, 120 bp, synthetic construct
  source 1..120: mol_type = other DNA
cgtcactttcagaaaagaaaacccagaatgatgacagtaatgaaatccttcatggaccaatactagactaatggtcttcccagtactttatattcttactacatcacaaagggtaaggat

SEQ ID NO: 40628 - DNA, 120 bp, synthetic construct
  source 1..120: mol_type = other DNA
acgtatatagcagggactctatactcagtagttacagatttagttacgaaaaacaatccacaggaataccttggctctcactctaccaaaggtagatatggctggcatcttgagcatgct

SEQ ID NO: 40629 - DNA, 120 bp, synthetic construct
  source 1..120: mol_type = other DNA
acagcatacatggtatgatggagaaaattatacaaactcacaccaaatatcagcctttctgaatttccaaaaaagggcacaacttgcaaaaaaaaatgagaaccataattttcatgtatc

SEQ ID NO: 40630 - DNA, 120 bp, synthetic construct
  source 1..120: mol_type = other DNA
ccgccaccatgtggcccagctaattttttgtatttttttagtagagatagggtttcaccttgttagccaggatggtctcgatcctggccaaatttttaagtgatagcaacaactggattt

SEQ ID NO: 40631 - DNA, 120 bp, synthetic construct
  source 1..120: mol_type = other DNA
cttaaaaatttctcgaaaacagatacacaaatagccaataaacacttgttaaaaaatgcccaacatcactaataattagggaaatgcatatcaaaacgacaatgagaggccaggcatggt

SEQ ID NO: 40632 - DNA, 120 bp, synthetic construct
  source 1..120: mol_type = other DNA
acagatgcagagcttcagtctggaagaagaaaagagttctggagatggatggtggtcatgtatggttatatggtagtgatggatggttacacaacagtatgaaaagagcaatggctcacg

SEQ ID NO: 40633 - DNA, 120 bp, synthetic construct
  source 1..120: mol_type = other DNA
tagcagattagctcagctaaagatgactgtgaatacacaaaatgtagcatggtgatacaaaaattgaatatatcaaacagaagttatgcaacatgaggacagaatagaatgtccaacata

SEQ ID NO: 40634 - DNA, 120 bp, synthetic construct
  source 1..120: mol_type = other DNA
agctgcaacgagttgtgccacgccactgcactccagcctggatgacagagtgaaaccctgtgccaaaaaaaaaaaaaaaaaagttttccaggtgattttgatacacactcctagtttaaa

SEQ ID NO: 40635 - DNA, 120 bp, synthetic construct
  source 1..120: mol_type = other DNA
acgcgtgagccaccacacctggcaaattatcccattattatctggaagcatttgtgatgagggaatgaggttggatgtgtttaaatcagttattgaaacctactaacacacaggtgtcaa

SEQ ID NO: 40636 - DNA, 120 bp, synthetic construct
  source 1..120: mol_type = other DNA
caggttcaagagattctcgtgcttcagcctcctgagtagctaggattataggtgcacaccactccacctggataatttttgtatttttagtagagatggggttttgccatgttggccaga

SEQ ID NO: 40637 - DNA, 120 bp, synthetic construct
  source 1..120: mol_type = other DNA
aagggccaaccttgcaagcagacctcgctaagcatatcagtctcaatcaggcctgctatgttaattctttctgcacaactgagatgttctctttggaaataacatggttttttgtcttgt

SEQ ID NO: 40638 - DNA, 120 bp, synthetic construct
  source 1..120: mol_type = other DNA
aacagaattggtaactattaatactttttcagcaaagaaaagaaaatcttggctcttatttctgcttattaccaattaatatgcaaatttccagattagctgctaacaatatggaagtgc

SEQ ID NO: 40639 - DNA, 120 bp, synthetic construct
  source 1..120: mol_type = other DNA
accccagaacttttattagattgttgtctcccagtaggaaagtgggtatggggtttgtttttagtttttgcttgattttttcccgtaataaaacatactgcatttgtaaaaagaacaaat

SEQ ID NO: 40640 - DNA, 120 bp, synthetic construct
  source 1..120: mol_type = other DNA
aggcttttaaaatatttccatttatttatttatttatttatttagagatggagtctctcgctctgtcgcccaggctggagtacagtggcctgatctcagctcactgcaacctccacctcc

SEQ ID NO: 40641 - DNA, 120 bp, synthetic construct
  source 1..120: mol_type = other DNA
ctagagtttcagataaatgtagttactagatagaaacatgagtagtgtctccaacgaaggggctcagagtgctgcatgtaacataatgggtgacccaaatatttagcaaccagcagagca

SEQ ID NO: 40642 - DNA, 120 bp, synthetic construct
  source 1..120: mol_type = other DNA
ccttgcatcagccctctattagataggtatcattatcatctctattttacaaataaggacattgaattacagggatgttgaataacatgcccaaggtcacacagctaagaaagtgataaa

SEQ ID NO: 40643 - DNA, 120 bp, synthetic construct
  source 1..120: mol_type = other DNA
agtgtcgtgatccccagtatgcccacataacaacagtcccttccattaccttctgaagtcagctcctctgattctccattcttttctttcttttttttttttttgttagggcctctacca

SEQ ID NO: 40644 - DNA, 120 bp, synthetic construct
  source 1..120: mol_type = other DNA
ttttcaacttttaagttcagggggtacatgtgcagatttgtcacatgggtaaattgtgtgtcactaaggtttggggtacgaataatcctgtcactcaggtagtaagcacggtgcccaaca

SEQ ID NO: 40645 - DNA, 120 bp, synthetic construct
  source 1..120: mol_type = other DNA
atagaagaattatctcatcttcttctctgaagtaggttataagaccctcattccagaggtaccctccctttactcagaggaaaggaatgtccttatctctgaagacacagggacattgag

SEQ ID NO: 40646 - DNA, 120 bp, synthetic construct
  source 1..120: mol_type = other DNA
atgttaaaagcaaatactttaaatgagaaaaaaaatgattttaaaaaacaacaccggccaggtgcggtggctcatgcctataatcccagcactttgagaggctgaagtgggcggatcacc

SEQ ID NO: 40647 - DNA, 120 bp, synthetic construct
  source 1..120: mol_type = other DNA
gcatgacctcagacttgagaatactcaagcttgcaagcttggaaaaatatttgctcagagctgacgccaccttgacaaccacagcatatagccaagatgacttttctctttaaagatagt

SEQ ID NO: 40648 - DNA, 120 bp, synthetic construct
  source 1..120: mol_type = other DNA
ctccttatgtatttgtccattctcacgctactgtgaagaaataccagagactgcataatttataaaggaaagaggtttaactgactcccagttctacatgtctggggaggcctcaggaaa

SEQ ID NO: 40649 - DNA, 120 bp, synthetic construct
  source 1..120: mol_type = other DNA
gggcgtggtggctcatgcctataatcccagcactttgggaggccgaggcaagaggatcacctgagatctggagctcaagaccagcctgaccaacatggagaaaccctgtctctactaaaa

SEQ ID NO: 40650 - DNA, 120 bp, synthetic construct
  source 1..120: mol_type = other DNA
tattctttgacttctaaaactgcctgcatgtattactgtggtaaaaataactaaaagagtccaggcgtggtggctcacacctgtaatcccagtacattgggatgctataggcaggaggat

SEQ ID NO: 40651 - DNA, 120 bp, synthetic construct
  source 1..120: mol_type = other DNA
agcatgggacactataaagctgtcaaaaaggatgagaaatctacaaatactggaatagaaagaccttccagataaataaacacacacacaaaaattgtgggtcgggcacagtagcccatg

SEQ ID NO: 40652 - DNA, 120 bp, synthetic construct
  source 1..120: mol_type = other DNA
cactccagcctgggcaacagagccagactctgcctcaaaaaaaaaaaagaaaagaaaagtgccaatttcaaaatgagtaaaagaaagctactgtaacaaaaaccttcaggtatcaacctt

SEQ ID NO: 40653 - DNA, 120 bp, synthetic construct
  source 1..120: mol_type = other DNA
gtctttataagttgcatattgcaataataagctaaatatatcatgtggttacacagattcttttttttttttggctggactgcagtggcgtgatctgggcctgcaacctccacctcccgg

SEQ ID NO: 40654 - DNA, 120 bp, synthetic construct
  source 1..120: mol_type = other DNA
cctctccttcattagaccatcatatatatctaagactcaatccatagccacatactatacaaatctaaccctggtctaccagtctgaaaacctcatcactggtcaagacagatggggtaa

SEQ ID NO: 40655 - DNA, 120 bp, synthetic construct
  source 1..120: mol_type = other DNA
ttaatctcacatgagcaggagattctcaaagcatggtccccaaccagcagcacctgtaacacctgaaaatttgccagaaatgcaaattcttgagctcctcctcagccctaaatcagaaac

SEQ ID NO: 40656 - DNA, 120 bp, synthetic construct
  source 1..120: mol_type = other DNA
aggtttacaaaacattttcacatacaactcatataatcttcacaatcatcttgaggtaaataatgacaataaaactgatatttattgagcaccacagtgcctggcacttaagagtctcgt

SEQ ID NO: 40657 - DNA, 120 bp, synthetic construct
  source 1..120: mol_type = other DNA
tcctcctgatgtggtacctctcagccttccccactacaatgtgacagaatatgtagactggatgtacttttacaagtatgagccaatttacagatgaggctttcacttcacattttgaga

SEQ ID NO: 40658 - DNA, 120 bp, synthetic construct
  source 1..120: mol_type = other DNA
atagaggattttaccaaaaaaaaaaaaaaacgtatttcataccaggagtgtcctttcaaggtgtttcctccctactgcagtgggttgggttatacaatgcccaaagatttggtgccaagg

SEQ ID NO: 40659 - DNA, 120 bp, synthetic construct
  source 1..120: mol_type = other DNA
gattaccagcatgagccaccgcgcctggcctgaaactcaccaggaacccacaaactggttacaccttatgatttattttgacaaaaatcatgtcagatcctttaaagatgatattcagag

SEQ ID NO: 40660 - DNA, 120 bp, synthetic construct
  source 1..120: mol_type = other DNA
tcactttacttggaattttactgccaagtgggctatgagaacagaatctgtaccacaacttattactttgctaaaaatatggaccccaactacacatctataacttacacagatttggag

SEQ ID NO: 40661 - DNA, 120 bp, synthetic construct
  source 1..120: mol_type = other DNA
cctcaggtgatctgcccacgtcggcctcccaaagtgctgggattataggtgtgagccaccacgcccagcctaaagttaatttttaatagaatttttagaaaatgagagagggaagctaaa

SEQ ID NO: 40662 - DNA, 120 bp, synthetic construct
  source 1..120: mol_type = other DNA
caagagtctaacagacctaacattcatatatgaaattatgtgctaatacctcaatatggcaaactcaagacagtaatttgtacactagattcgagcacctacatttaccatgtaaaggtc

SEQ ID NO: 40663 - DNA, 120 bp, synthetic construct
  source 1..120: mol_type = other DNA
agtctttggcaataaactcgacctattcccattttttcaatcagcttctaacttccaaacttgtcaatagaatcttcatcatcccagttagccaggttctaaatcctggtgtcatctttg

SEQ ID NO: 40664 - DNA, 120 bp, synthetic construct
  source 1..120: mol_type = other DNA
tgtttgttgaatgaatgaaaggacccttgaaattactcctcccatttccactgccaccactcaaggccagtctttcaggtaaagactagccaatcaggtaaatggatataaacttctctg

SEQ ID NO: 40665 - DNA, 120 bp, synthetic construct
  source 1..120: mol_type = other DNA
ccaaaaaaaaaaaaaaaaaaaaaagagtttgggccaggaacggtggtggctcacacccgtaatcccagcactttgagaggccaaggcaggcagattacctgatgtcaggagtatatgaca

SEQ ID NO: 40666 - DNA, 120 bp, synthetic construct
  source 1..120: mol_type = other DNA
taggatacaacccatttccccttcactaacgacgggtttatgctcccacctctgggactgagctaatactgcccttcatccttccctctcctgaagctgccattcactttctttctgcag

SEQ ID NO: 40667 - DNA, 120 bp, synthetic construct
  source 1..120: mol_type = other DNA
actaaaaagtcaaaaagagacaacaacaaacaaacaaaaaaacagatgctccaaggctgtggagaaaagggaacacacacacacacacacacacacacacacacacacacacacacacac

SEQ ID NO: 40668 - DNA, 120 bp, synthetic construct
  source 1..120: mol_type = other DNA
caattgtgtgggccaagttcttaaaataaatttcttagtatatggctgtggctatctgtctgtctgtctatctatctatctatccatccatccatccacccacctacctacccatccatc

SEQ ID NO: 40669 - DNA, 120 bp, synthetic construct
  source 1..120: mol_type = other DNA
ggaggctgaggtgggaggatcacttgagcccaggaatttgagaccagccagggcaacatagtaagaccctgtctctacaaaaagtaaaaaattagctgggcgtggtggcacatgcctgta

SEQ ID NO: 40670 - DNA, 120 bp, synthetic construct; identical to SEQ ID NO: 25289
  source 1..120: mol_type = other DNA

SEQ ID NO: 40671 - DNA, 120 bp, synthetic construct
  source 1..120: mol_type = other DNA
tgaggaatcgccacactgacttccacaatggttgaactagtttacagtcccaccaacagtgtaaaagtgttcctatttctccgcatcctctccagcacctgttgtttcctgacttcatgt

SEQ ID NO: 40672 - DNA, 120 bp, synthetic construct; identical to SEQ ID NO: 25290
  source 1..120: mol_type = other DNA

SEQ ID NO: 40673 - DNA, 120 bp, synthetic construct; identical to SEQ ID NO: 25291
  source 1..120: mol_type = other DNA

SEQ ID NO: 40674 - DNA, 120 bp, synthetic construct; identical to SEQ ID NO: 25292
  source 1..120: mol_type = other DNA

SEQ ID NO: 40675 - DNA, 120 bp, synthetic construct
  source 1..120: mol_type = other DNA
cctcaccagcacttgccatggtccatcttttcagttttagtcgttctcatggaggcgtaatggcatttctttgtagttttcatttgcatacccctgtgactaatgatggtaaacactgtt

SEQ ID NO: 40676 - DNA, 120 bp, synthetic construct; identical to SEQ ID NO: 25293
  source 1..120: mol_type = other DNA

SEQ ID NO: 40677 - DNA, 120 bp, synthetic construct
  source 1..120: mol_type = other DNA
gcacatatacaccgtggaatactatgcagccataaaaaaggaaagagatcgtgtcctttgcaaggacatggatagaactggaagccattatccttagcaaactaacacaggaacagaaaa

SEQ ID NO: 40678 - DNA, 120 bp, synthetic construct; identical to SEQ ID NO: 27115
  source 1..120: mol_type = other DNA

SEQ ID NO: 40679 - DNA, 120 bp, synthetic construct; identical to SEQ ID NO: 33073
  source 1..120: mol_type = other DNA

SEQ ID NO: 40680 - DNA, 120 bp, synthetic construct; identical to SEQ ID NO: 33074
  source 1..120: mol_type = other DNA

SEQ ID NO: 40681 - DNA, 120 bp, synthetic construct; identical to SEQ ID NO: 33075
  source 1..120: mol_type = other DNA

SEQ ID NO: 40682 - DNA, 120 bp, synthetic construct; identical to SEQ ID NO: 17304
  source 1..120: mol_type = other DNA

SEQ ID NO: 40683 - DNA, 120 bp, synthetic construct; identical to SEQ ID NO: 17305
  source 1..120: mol_type = other DNA

SEQ ID NO: 40684 - DNA, 120 bp, synthetic construct; identical to SEQ ID NO: 17306
  source 1..120: mol_type = other DNA

SEQ ID NO: 40685 - DNA, 120 bp, synthetic construct
  source 1..120: mol_type = other DNA
gtccttcccagcgttatccctgagcctgagtcctccccagcgttatccctgagcctgagttccccccagcgttatccctgagcctgagttcctcccagcgttatccctgagcctgagttc

SEQ ID NO: 40686 - DNA, 120 bp, synthetic construct
  source 1..120: mol_type = other DNA
ccagcgttatccctgagcctgagttctcccagcgttatccctgagcctgagttctcccagcgttatccctgagcctgagttcctcccagcgttatccctgagcctgagttcttcccagcg

SEQ ID NO: 40687 - DNA, 120 bp, synthetic construct; identical to SEQ ID NO: 17307
  source 1..120: mol_type = other DNA

SEQ ID NO: 40688 - DNA, 120 bp, synthetic construct; identical to SEQ ID NO: 17308
  source 1..120: mol_type = other DNA

SEQ ID NO: 40689 - DNA, 120 bp, synthetic construct
  source 1..120: mol_type = other DNA
gatcacaccattgcactccagcctgggcgataagagcgaaactccatctcaaaaaaaaaaaaaaaatactctgaagcagcctatgaagccatcagccaggcgcgtgatcaattcagccag

SEQ ID NO: 40690 - DNA, 120 bp, synthetic construct; identical to SEQ ID NO: 17309
  source 1..120: mol_type = other DNA

SEQ ID NO: 40691 - DNA, 120 bp, synthetic construct
  source 1..120: mol_type = other DNA
aggagaatcgcctgaaccaatgagccgagattgcaccattgcactccagcctgagcaacaagagtgaaactccgttaaaaaaaaaatttttgacacagcctgggcaggtttaatcagctg

SEQ ID NO: 40692 - DNA, 120 bp, synthetic construct; identical to SEQ ID NO: 17310
  source 1..120: mol_type = other DNA

SEQ ID NO: 40693 - DNA, 120 bp, synthetic construct; identical to SEQ ID NO: 17311
  source 1..120: mol_type = other DNA

SEQ ID NO: 40694 - DNA, 120 bp, synthetic construct
  source 1..120: mol_type = other DNA
ggaaacacttacaccaataggagcagagccctggggtctagggccgctgtacctctcctctctggtacaaggttcaagaattgcttgaacccaggaggtggaggctgcagtgagctgaga

SEQ ID NO: 40695 - DNA, 120 bp, synthetic construct; identical to SEQ ID NO: 17312
  source 1..120: mol_type = other DNA

SEQ ID NO: 40696 - DNA, 120 bp, synthetic construct; identical to SEQ ID NO: 17313
  source 1..120: mol_type = other DNA

SEQ ID NO: 40697 - DNA, 120 bp, synthetic construct; identical to SEQ ID NO: 17314
  source 1..120: mol_type = other DNA

SEQ ID NO: 40698 - DNA, 120 bp, synthetic construct
  source 1..120: mol_type = other DNA
cctgggtgacagagcaagactccatctcaaaaaaaaaagaaaagaaaagcaagctactccccacagcagcaatggactttctcacatgtggggacaagccaaggtcacatgtcacaaaca

SEQ ID NO: 40699 - DNA, 120 bp, synthetic construct; identical to SEQ ID NO: 17315
  source 1..120: mol_type = other DNA

SEQ ID NO: 40700 - DNA, 120 bp, synthetic construct; identical to SEQ ID NO: 17294
  source 1..120: mol_type = other DNA

SEQ ID NO: 40701 - DNA, 120 bp, synthetic construct; identical to SEQ ID NO: 17295
  source 1..120: mol_type = other DNA

SEQ ID NO: 40702 - DNA, 120 bp, synthetic construct
  source 1..120: mol_type = other DNA
actcatctgtcttaggtaccacaggctcaatacttgtctaggtaaagcaagctcggactggatgaacgatggccagctggtctccatggtgacataagtgccttcgcagatgggtagccg

SEQ ID NO: 40703 - DNA, 120 bp, synthetic construct
  source 1..120: mol_type = other DNA
attacacctagggagggggtcatgccacccagcacagctgtgactgaggtaaaatcgggttaaggtgttcagtggcggcatcaacgaggaaaaaaggtcacatcctgccctgtgcgagcg

SEQ ID NO: 40704 - DNA, 120 bp, synthetic construct; identical to SEQ ID NO: 17296
  source 1..120: mol_type = other DNA

SEQ ID NO: 40705 - DNA, 120 bp, synthetic construct; identical to SEQ ID NO: 17297
  source 1..120: mol_type = other DNA

SEQ ID NO: 40706 - DNA, 120 bp, synthetic construct; identical to SEQ ID NO: 17298
  source 1..120: mol_type = other DNA

SEQ ID NO: 40707 - DNA, 120 bp, synthetic construct
  source 1..120: mol_type = other DNA
tgtgtgtgtgtgtgtgtgtgtgtgtgtgtgtgtggtgtatgcgttttgttttcgttttttttttaaacggagtctcactctgtcgcccaggctggagtgcagtgctgtgatctcagctca

SEQ ID NO: 40708 - DNA, 120 bp, synthetic construct; identical to SEQ ID NO: 17300
  source 1..120: mol_type = other DNA

SEQ ID NO: 40709 - DNA, 120 bp, synthetic construct
  source 1..120: mol_type = other DNA
ctgagggctatgcatgttcctctagacactgttatgtgaactgagggctatgcatgttcctctagatgctgttgttacgtgaactgagggctatgcatgttcctctagatgctgctgtta

SEQ ID NO: 40710 - DNA, 120 bp, synthetic construct
  source 1..120: mol_type = other DNA
actgagggctatgcatgttcctctagacactgttgttatgtgaactgagggctatgcatgttcctctagacactgttatgtgaactgagggctatgcatgttgctctagacactgttgtt

SEQ ID NO: 40711 - DNA, 120 bp, synthetic construct
  source 1..120: mol_type = other DNA
tgaactgagggctatgcatgttcctctagacactgttgttatgtgaactgagggctattcatgttcctctaaacagcactttggctgcatccatgggtactggtatgtagtacactcatt

SEQ ID NO: 40712 - DNA, 120 bp, synthetic construct
  source 1..120: mol_type = other DNA
gtcagtttgaactttccaaaccaatgctttttttttttttttttttttttgagacagtctcactctgttgctcaggctggagtgcagcagcggaatctcagctcaatgcaacctctgcct

SEQ ID NO: 40713 - DNA, 120 bp, synthetic construct; identical to SEQ ID NO: 17301
  source 1..120: mol_type = other DNA

SEQ ID NO: 40714 - DNA, 120 bp, synthetic construct; identical to SEQ ID NO: 17302
  source 1..120: mol_type = other DNA

SEQ ID NO: 40715 - DNA, 120 bp, synthetic construct; identical to SEQ ID NO: 17303
  source 1..120: mol_type = other DNA

SEQ ID NO: 40716 - DNA, 120 bp, synthetic construct
  source 1..120: mol_type = other DNA
tgctttgtgattatttggtattttaggacactccccctcctcaaatcaaatacaaaaactaggctgtaaagtgtctgtcttgtcaggagatcgagaccatcctggctaacaaggtgaaac

SEQ ID NO: 40717 - DNA, 120 bp, synthetic construct; identical to SEQ ID NO: 11832
  source 1..120: mol_type = other DNA

SEQ ID NO: 40718 - DNA, 120 bp, synthetic construct
  source 1..120: mol_type = other DNA
gctacagatagtgcggtttttaaataaatggctacgtaaacacatgcacgtgtgtctactaccatgcaagctcagctattataaccacatagggctgtgcaactcagatcatgaagaaac

SEQ ID NO: 40719 - DNA, 120 bp, synthetic construct
  source 1..120: mol_type = other DNA
cagaaaagagaatagataacgtccttctctgctttttgaaatttagggaggagagtaattctgccagtaaactggaaaatttcccagcacctcccaagatatcagcagagttaggaaccc

SEQ ID NO: 40720 - DNA, 120 bp, synthetic construct
  source 1..120: mol_type = other DNA
gaactgctgggttgtgtggtaattgtaactttttttttcttctttttttttattttctgagacggagttttgcttctgtcacccaggctggagtgcaatggcatgatcttggctcactgc

SEQ ID NO: 40721 - DNA, 120 bp, synthetic construct; identical to SEQ ID NO: 11833
  source 1..120: mol_type = other DNA

SEQ ID NO: 40722 - DNA, 120 bp, synthetic construct
  source 1..120: mol_type = other DNA
aggagcgtctctgcctggccgccatcccatctaggaagtgaggggcgcctcttcccagccgccatcccgtctaggaggtgaggagcgtctctgcccggccgcccatcatctgggatgtgg

SEQ ID NO: 40723 - DNA, 120 bp, synthetic construct
  source 1..120: mol_type = other DNA
catggagaacgggccatgatgaccgtggcggttttgtggagtagaaaggggggaaaggtggggaagggattgagaaatcggatggttgccgtgtctgtgtggaaagaagtagacatggga

SEQ ID NO: 40724 - DNA, 120 bp, synthetic construct
  source 1..120: mol_type = other DNA
tcaagcaatcctccaccacagcctcccgagtagctgggactacaggcgagtgccaccatgcttggctaatttttgtattttttgtagagactgggtttctctattttaaaaaataatttg

SEQ ID NO: 40725 - DNA, 120 bp, synthetic construct
  source 1..120: mol_type = other DNA
agaaaacttagaaaacaaaaaatatgagattgacgcgctgccagctgcgctaagagggcttactatagcattaggagatatacctaatgctaaatgacgagttaatgggtgcagcacacc

SEQ ID NO: 40726 - DNA, 120 bp, synthetic construct; identical to SEQ ID NO: 17953
  source 1..120: mol_type = other DNA

SEQ ID NO: 40727 - DNA, 120 bp, synthetic construct; identical to SEQ ID NO: 17954
  source 1..120: mol_type = other DNA

SEQ ID NO: 40728 - DNA, 120 bp, synthetic construct; identical to SEQ ID NO: 17955
  source 1..120: mol_type = other DNA

SEQ ID NO: 40729 - DNA, 120 bp, synthetic construct; identical to SEQ ID NO: 17956
  source 1..120: mol_type = other DNA

SEQ ID NO: 40730 - DNA, 120 bp, synthetic construct
  source 1..120: mol_type = other DNA
gtttggcctcctcttctagctgttgtggtatcacttttttttttttttttttttttgagacgaagtttcgctcttgttgcccaggctggaacgcaacggtgcaatctcagctcactgcaa

SEQ ID NO: 40731 - DNA, 120 bp, synthetic construct; identical to SEQ ID NO: 13216
  source 1..120: mol_type = other DNA

SEQ ID NO: 40732 - DNA, 120 bp, synthetic construct; identical to SEQ ID NO: 13217
  source 1..120: mol_type = other DNA

SEQ ID NO: 40733 - DNA, 120 bp, synthetic construct
  source 1..120: mol_type = other DNA
ggtctccaactcctgacctcacgtgatccacccactttggcctcccatgatgctgggattacaagtgtaagccaccgtgcccggccctaaactatttatttatttatttatttatttatt

SEQ ID NO: 40734 - DNA, 120 bp, synthetic construct
  source 1..120: mol_type = other DNA
ttgccaggcagagggtctcctcacttctcagacagggcggccgggcagggacgctcctcacctcccagacggggtctcggccgggcagaggcgctcctcacatcccagacggggcggcgg

SEQ ID NO: 40735 - DNA, 120 bp, synthetic construct
  source 1..120: mol_type = other DNA
accgtggaaagagagggaggggagaccgtggaaagagagggagagggagaccgtggaaagagagggagagggagaccgtggaaagagagggagagggagaccgtggaaagagagggagag

SEQ ID NO: 40736 - DNA, 120 bp, synthetic construct; identical to SEQ ID NO: 24717
  source 1..120: mol_type = other DNA

SEQ ID NO: 40737 - DNA, 120 bp, synthetic construct
  source 1..120: mol_type = other DNA
cagaatctacaatgaactcaaacaaatttacaagaaaaaaacaaacaaccccatcaacaagtgggtgaacgatatgaacagacacttctcaaaagaagacatttatgcagccaaaagaca

SEQ ID NO: 40738 - DNA, 120 bp, synthetic construct
  source 1..120: mol_type = other DNA
tgccgggcggagacgctcctcacttcccagacggggtgtctgctgggcggaggggctcctcacttctcagacggggtggctgccaggcagaggggctcctcacttctcagatggggtggc

SEQ ID NO: 40739 - DNA, 120 bp, synthetic construct; identical to SEQ ID NO: 15635
  source 1..120: mol_type = other DNA

SEQ ID NO: 40740 - DNA, 120 bp, synthetic construct; identical to SEQ ID NO: 15636
  source 1..120: mol_type = other DNA

SEQ ID NO: 40741 - DNA, 120 bp, synthetic construct; identical to SEQ ID NO: 15637
  source 1..120: mol_type = other DNA

SEQ ID NO: 40742 - DNA, 120 bp, synthetic construct; identical to SEQ ID NO: 6807
  source 1..120: mol_type = other DNA

SEQ ID NO: 40743 - DNA, 120 bp, synthetic construct; identical to SEQ ID NO: 6808
  source 1..120: mol_type = other DNA

SEQ ID NO: 40744 - DNA, 120 bp, synthetic construct; identical to SEQ ID NO: 2709
  source 1..120: mol_type = other DNA

SEQ ID NO: 40745 - DNA, 120 bp, synthetic construct; identical to SEQ ID NO: 12339
  source 1..120: mol_type = other DNA

SEQ ID NO: 40746 - DNA, 120 bp, synthetic construct
  source 1..120: mol_type = other DNA
tttaaaaaaaaaccctgcatatgaatctgggtgctcctgtattgggtgcatatatatttaggatagttcgctcttcctgttgaattgatccctttaccattatgtaatggccttctttgt

SEQ ID NO: 40747 - DNA, 120 bp, synthetic construct
  source 1..120: mol_type = other DNA
cagagcagaactgaaggagatagagacacaaaaaacccttcaaaaactcaatgaatccaggagctggttttttgaaaaaaaattgatagactgctagcaagactaataaagaagaaaaga

SEQ ID NO: 40748 - DNA, 120 bp, synthetic construct
  source 1..120: mol_type = other DNA
ataagagctatctatgacaaactcacagccaatatcatactgaatgggcaaaacctggaaccattccctttgaaaatgggcacaagacagggatgccctctctcaccactcctattcaac

SEQ ID NO: 40749 - DNA, 120 bp, synthetic construct
  source 1..120: mol_type = other DNA
aggacataggcatgggcaaggacttcatgtctacaacacccaaaagcaatggcaacaaaagccaaaattgacaaatgggatctaattaaactaaagagcttctgcacagcaaaagaaact

SEQ ID NO: 40750 - DNA, 120 bp, synthetic construct; identical to SEQ ID NO: 9076
  source 1..120: mol_type = other DNA

SEQ ID NO: 40751 - DNA, 120 bp, synthetic construct; identical to SEQ ID NO: 9077
  source 1..120: mol_type = other DNA

SEQ ID NO: 40752 - DNA, 120 bp, synthetic construct; identical to SEQ ID NO: 9078
  source 1..120: mol_type = other DNA

SEQ ID NO: 40753 - DNA, 120 bp, synthetic construct
  source 1..120: mol_type = other DNA
cagctgatctctcggcagaaactctacaagccaggagagagtgggggccaatattcaacattcttaaagaaaagaattttcaacccagaatttcatatccagccaaactaagcttcataa

SEQ ID NO: 40754 - DNA, 120 bp, synthetic construct
  source 1..120: mol_type = other DNA
gcaaatccttagagacctagaaagagacttagactcccacacaataataatgggagactttaacaccccactgtcaacattagacagatcaatgagacagaaagttaacaaggatatcca

SEQ ID NO: 40755 - DNA, 120 bp, synthetic construct
  source 1..120: mol_type = other DNA
tgaaactattccaattaatagaaaagagggaatcctccctaactcattttatgaggccagcatcatcctgataccaaagcctggcagagacacaacaaaaaaagagaattttagaccaat

SEQ ID NO: 40756 - DNA, 120 bp, synthetic construct
  source 1..120: mol_type = other DNA
tttttggttccatatgaactttaaagtagttttttccaattctgtgaagaaagtcattggtagcttgatggggatggcattgaatctataaattaccttgggcagtatggccattttcac

SEQ ID NO: 40757 - DNA, 120 bp, synthetic construct
  source 1..120: mol_type = other DNA
gcacccattgactcgtcatttagcattaggtatatctcctaatgttatcccttcccgctcccccgcccacaacaggccccagagtgtgatgtccccttcctgtgtccatgcgttctcatt

SEQ ID NO: 40758 - DNA, 120 bp, synthetic construct
  source 1..120: mol_type = other DNA
agtaggttgcgaaaattttctcccattttgtaggttgcctgttcactctgatagtagtttcttttgctgtgcagaagctctttagtttaattagatcctatttgtcaattctggcttttg

SEQ ID NO: 40759 - DNA, 120 bp, synthetic construct; identical to SEQ ID NO: 11867
  source 1..120: mol_type = other DNA

SEQ ID NO: 40760 - DNA, 120 bp, synthetic construct
  source 1..120: mol_type = other DNA
cccggcaacttttctgctgacgaggccggggcgcagctcttcgcgcagagctacaactccagcgccgaacaggtgctgttccagagcgtggccgccagctgggcgcacgacaccaacatc

SEQ ID NO: 40761 - DNA, 120 bp, synthetic construct
  source 1..120: mol_type = other DNA
gaatggctttctgagcattgatttttcttggagatggggtggggagttactttctgttaaaggaagcattctggagtaggaagccaaattcaaatacacttctccctaggctggtttatg

SEQ ID NO: 40762 - DNA, 120 bp, synthetic construct
  source 1..120: mol_type = other DNA
gtgccctagtgttcccacattgccctgctgcactccagaccatgcagttgtgtagggtctgtggagacagcaggtaaacccaaaggtgttgccctccaactggggctggacggtgcagat

SEQ ID NO: 40763 - DNA, 120 bp, synthetic construct
  source 1..120: mol_type = other DNA
tgatgctcctctttgcctctgggaacctccaggatctgtttagctggctgtagctaattagaaattgtagagtggcaacccccaagccaattttccagctagctgcagatccacgggcct

SEQ ID NO: 40764 - DNA, 120 bp, synthetic construct
  source 1..120: mol_type = other DNA
tccttatctaggagacatgtgggcccagagctgggaaaacatctacgacatggtggtgcctttcccagacaagcccaacctcgatgtcaccagtactatgctgcagcaggtaagctctgg

SEQ ID NO: 40765 - DNA, 120 bp, synthetic construct
  source 1..120: mol_type = other DNA
ggcggaggttgcagtgagctgagattgtgccactacaggccagcctgtgcaaaagagtgagacgctgtctcaaaaaaaaaaaagaaaaaaagaagttacttgtttctactgcggcttcat

SEQ ID NO: 40766 - DNA, 120 bp, synthetic construct
  source 1..120: mol_type = other DNA
aagtgacatcaattacttgctaaaaatggcactggaaaaaattgccttcctgccctttggctacttggtggaccagtggcgctggggggtctttagtgggcgtacccccccttcccgcta

SEQ ID NO: 40767 - DNA, 120 bp, synthetic construct
  source 1..120: mol_type = other DNA
gcaaagggtgtggcaggaggtgtctggctgctctgatggggtggggggcaccaaccacagagctggactgatgtggatgcctgtctcctcgctatgtcatcaaatatttattgagtgggc

SEQ ID NO: 40768 - DNA, 120 bp, synthetic construct
  source 1..120: mol_type = other DNA
ggcggggccgggtagggacagggcagggtacaagggagtgcgagagggataatggcttctggtgagaccacaaacctggagaggggaggcagaggtttgtctgtttccctgcactctgtc

SEQ ID NO: 40769 - DNA, 120 bp, synthetic construct
  source 1..120: mol_type = other DNA
tgtacataaataagtggtgctcaagtcgttttttaaaagattgaaagcctctgtttgtctcctctacaaaaggggctacacttcctctttaccctcattccctgcctatttggctgagca

SEQ ID NO: 40770 - DNA, 120 bp, synthetic construct
  source 1..120: mol_type = other DNA
aggagtacagctcattgcctctccttcctcctgcagtacaacaagatcctgttggatatggaaaccacctacagcgtggccactgtgtgccacccgaatggcagctgcctgcagctcgag

SEQ ID NO: 40771 - DNA, 120 bp, synthetic construct
  source 1..120: mol_type = other DNA
tggtagatgcctgtagtcccagctacttgggaggctgaggcatgagaatcgcttgagcccagcctgggcaatacagcaagaccccgtctctacaaataaaatacaaaaaattagttggat

SEQ ID NO: 40772 - DNA, 120 bp, synthetic construct
  source 1..120: mol_type = other DNA
taatgtggtgttgggagagcctggctgtgtcccctctgtaggctatgtagatgcaggggactcgtggaggtctatgtacgagacaccatccctggagcaagacctggagcggctcttcca

SEQ ID NO: 40773 - DNA, 120 bp, synthetic construct
  source 1..120: mol_type = other DNA
gttctctgtccctgatgggctgttaggaacactttcctggagcagagagaccagacaggccctcagaccatttagaaactataagggaggccccagaggacggcctggctgtgggtctag

SEQ ID NO: 40774 - DNA, 120 bp, synthetic construct
  source 1..120: mol_type = other DNA
gatgtgtgcctcaaagcttgcaaacagtaggtgctcaagaaatgccactatgattagcaggactgggatctggagcgctcttcctgcaggagggcattgagcctaagtaacatttgtctt

SEQ ID NO: 40775 - DNA, 120 bp, synthetic construct
  source 1..120: mol_type = other DNA
aggctcagaagctgccttccttggaggatggcgttttagttacctattgctgtgcaaccaagcaccccagagcttagccttacgaaacaaccagttgattttgcttatgattttatgtgc

SEQ ID NO: 40776 - DNA, 120 bp, synthetic construct
  source 1..120: mol_type = other DNA
tgggcaacatagcgagaccccatttcataaaaaataaataagtaaatgagaacaaggaaggactgacgagagacggtagaaccttctggtttgggcagctctgcagctgccattcatcct

SEQ ID NO: 40777 - DNA, 120 bp, synthetic construct
  source 1..120: mol_type = other DNA
atcaactttctgatgaagatggcccttgacaagatcgcctttatccccttcagctacctcgtcgatcagtggcgctggagggtatttgatggaagcatcaccaaggagaactataaccag

SEQ ID NO: 40778 - DNA, 120 bp, synthetic construct
  source 1..120: mol_type = other DNA
cattactttgtttccttgagaaaattcctcaatttctgtgagcttccatttcctgacctgtgaaccccatttcacaggatgcacgatggctaacttcttagcattctgtctcatacacag

SEQ ID NO: 40779 - DNA, 120 bp, synthetic construct
  source 1..120: mol_type = other DNA
acatttaaaacctcttcagactttaagctggggagaatcctccagccttgactggcagatttctaccagggaattcgtgatgctttggataagatcatgtaggactggcttccctgccca

SEQ ID NO: 40780 - DNA, 120 bp, synthetic construct
  source 1..120: mol_type = other DNA
aagtttcagctgggagtgggtatggagagtggatgtcaggtgggggcaagaggggccatgtccttctgactctgcctccctgtctcatgcctccccaggaccgccatgaagctgggcttc

SEQ ID NO: 40781 - DNA, 120 bp, synthetic construct
  source 1..120: mol_type = other DNA
gtgaatacaattaaaggtcctgccctccccatctgagtctgtgtccctcacagggaagccagggacagggacaggctgctttcctgcctcctggcagtcaagtgggtcccgttactaggt

SEQ ID NO: 40782 - DNA, 120 bp, synthetic construct
  source 1..120: mol_type = other DNA
ttggcctcccaaagtgctaggattacaggtgtgagccaccatacccagcccaaacccaaaaacccttcatagaaaaaaattgttaaaccctgctgtagaacgtctgaaaaaatacagaga

SEQ ID NO: 40783 - DNA, 120 bp, synthetic construct
  source 1..120: mol_type = other DNA
tcctcacttcccagatggaatggcagccgggcagagatgctcctcactttccagactgggcagccaggcagaggggctcctcacatcccagacgatggccggccaggcagagacgctcct

SEQ ID NO: 40784 - DNA, 120 bp, synthetic construct; identical to SEQ ID NO: 12122
  source 1..120: mol_type = other DNA

SEQ ID NO: 40785 - DNA, 120 bp, synthetic construct
  source 1..120: mol_type = other DNA
ttgagaggttttgagtgagtttcttaatcctaagttctagtttgattgcactgtggtctgagagacagtttgttataatttctgttcttttacatttgctgaggagagctttacttccaa

SEQ ID NO: 40786 - DNA, 120 bp, synthetic construct
  source 1..120: mol_type = other DNA
gctgttagtctgatgggcttccctttgtgggtaacccatcctttctctctgactgcccttaacattttttccttcatttccactttggtgaatctgacaattatgtgttttggagttgct

SEQ ID NO: 40787 - DNA, 120 bp, synthetic construct; identical to SEQ ID NO: 12123
  source 1..120: mol_type = other DNA

SEQ ID NO: 40788 - DNA, 120 bp, synthetic construct
  source 1..120: mol_type = other DNA
ctcctcacttcctagatgggatggcggccaggaagaggcactcctcacttcctagatgggagggcggccgggcagagacgctcctcacttcctagatgggatggcggccgggcagagacg

SEQ ID NO: 40789 - DNA, 120 bp, synthetic construct
  source 1..120: mol_type = other DNA
aagaataaaaagaaacgaacaaagcctccaagaaatatgggactgtgaaaagaccaaatctacgtctgattgttgtacctgaaagtgacagggagaatggaaccaagttggaaaacactc

SEQ ID NO: 40790 - DNA, 120 bp, synthetic construct
  source 1..120: mol_type = other DNA
gatctaccaagcaaatggaaaacaaaaaaaggcaggggttgcaatcctagtctctgattaaacagactttaaaccaacaaagatcaaaagagacaaagaaggccattacataatggtaaa

SEQ ID NO: 40791 - DNA, 120 bp, synthetic construct
  source 1..120: mol_type = other DNA
caatcaaaaatgataaaggggatatcaccaccgatcccacagaaatacaaactaccatcagagaatactataaacacctctatgccaataaactagaaaatctagaagaaatgaataaat

SEQ ID NO: 40792 - DNA, 120 bp, synthetic construct
  source 1..120: mol_type = other DNA
caataacagacaaacagagagccaaatcatgagtgaactcccattcacaattgcttcaaagagaataaaatacctaggaatccaacttacaagggatgtgaaggacgtcttcaaggagaa

SEQ ID NO: 40793 - DNA, 120 bp, synthetic construct
  source 1..120: mol_type = other DNA
agacacttctcaaaagaagacatttatgcagccaaaaaaacacatgaaaaaatgctcatcgtcactggccatcagagaaatgcaattcaaaaccacaatgagataccatctcacaccagt

SEQ ID NO: 40794 - DNA, 120 bp, synthetic construct; identical to SEQ ID NO: 12124
  source 1..120: mol_type = other DNA

SEQ ID NO: 40795 - DNA, 120 bp, synthetic construct; identical to SEQ ID NO: 24243
  source 1..120: mol_type = other DNA

SEQ ID NO: 40796 - DNA, 120 bp, synthetic construct; identical to SEQ ID NO: 24244
  source 1..120: mol_type = other DNA

SEQ ID NO: 40797 - DNA, 120 bp, synthetic construct
  source 1..120: mol_type = other DNA
aaatcttacatacacttcagatatagctgccaaccataacaataacgtaatggggcagggcacagtggcttatgcctgtaatctcagcactttgggagaccaaggcaggcggatcacttg

SEQ ID NO: 40798 - DNA, 120 bp, synthetic construct
  source 1..120: mol_type = other DNA
cgccatcccatctaggaggtgaggagcgtctctgcccggccgcccatcgtctgagatgtggggatgaggagatcctctgcctggcaaccgccccgtctgagaagtgaggagcccctccgc

SEQ ID NO: 40799 - DNA, 120 bp, synthetic construct; identical to SEQ ID NO: 18001
  source 1..120: mol_type = other DNA

SEQ ID NO: 40800 - DNA, 120 bp, synthetic construct
  source 1..120: mol_type = other DNA
cccagcgtatattttattttactttatttaattttttaaagacagggtcttgctctgccacccacgctggagtgccatggaatgatcatagctaactgcagccttgaactcctgggtgat

SEQ ID NO: 40801 - DNA, 120 bp, synthetic construct
  source 1..120: mol_type = other DNA
aagtaactggtacacctgacctagcaaccaaaagaacaatgtgtcaactatgcttggctatttttttttttttgagacagagttttgctctgttgcccaggctggagtgcaatggcgcga

SEQ ID NO: 40802 - DNA, 120 bp, synthetic construct
  source 1..120: mol_type = other DNA
gagctgttgggcacacctcccagacagggtggtggccgggcagaggggctcctcacttcccagtaggggcggccgggcagaggcgcccctcacctcccggacggggcggctggccgggca

SEQ ID NO: 40803 - DNA, 120 bp, synthetic construct
  source 1..120: mol_type = other DNA
ctgattttttaaaaatgtattctagagatggggtttcgccatgttgccaaggctggtcttgaactcctggcctcaagtgatccttctgccttggcctctgaaagtgctgggattataggt

SEQ ID NO: 40804 - DNA, 120 bp, synthetic construct
  source 1..120: mol_type = other DNA
cttctagggtttttatggttttaagcctaacatttaagtctttaatccatcttgaattaagttttgtgtaaggtgtaaggaagggatccagtttcagctttctacatatggctaacctgt

SEQ ID NO: 40805 - DNA, 120 bp, synthetic construct
  source 1..120: mol_type = other DNA
agtgtaagactgccacctctttaggtttctgtacagccaatagtaatctcctaatggcttcctgatgtttgataggtgttccctcggaagttaggaattcccctctctccatattgctgc

SEQ ID NO: 40806 - DNA, 120 bp, synthetic construct; identical to SEQ ID NO: 14486
  source 1..120: mol_type = other DNA

SEQ ID NO: 40807 - DNA, 120 bp, synthetic construct
  source 1..120: mol_type = other DNA
tcagcctcccaaagtgctggggttacaggcgtgagccaccggacccagcctgcattattactatttaattttgtgtgaaacacaaaacctttaatgtaaatgataaaaatatcagtaagt

SEQ ID NO: 40808 - DNA, 120 bp, synthetic construct; identical to SEQ ID NO: 14487
  source 1..120: mol_type = other DNA

SEQ ID NO: 40809 - DNA, 120 bp, synthetic construct
  source 1..120: mol_type = other DNA
ggagaattgcttgaacctgggaggcggaggttgcagtgagaagaggttgcagtgagaaaagattgtgctactaccctccagcctgggcaacagcaagactctgcctcaaaaattaattaa

SEQ ID NO: 40810 - DNA, 120 bp, synthetic construct; identical to SEQ ID NO: 7010
  source 1..120: mol_type = other DNA

SEQ ID NO: 40811 - DNA, 120 bp, synthetic construct
  source 1..120: mol_type = other DNA
ctgccgggtggagacgctcctcacttcccagacggggtggctgccgggcggaggggcttctcacttctcagacggggcggttgccaggcagagggtctcctcacttctcagacggggcgg

SEQ ID NO: 40812 - DNA, 120 bp, synthetic construct; identical to SEQ ID NO: 7011
  source 1..120: mol_type = other DNA

SEQ ID NO: 40813 - DNA, 120 bp, synthetic construct; identical to SEQ ID NO: 2727
  source 1..120: mol_type = other DNA

SEQ ID NO: 40814 - DNA, 120 bp, synthetic construct
  source 1..120: mol_type = other DNA
ggctgcagtgagccatgctcatgacacatgacaatgcactccaacctggagagaagagcaaaacttcatctcaaaaaaaataaaaaaacaaaaaaaaaacgggctgggcgaaatgactca

SEQ ID NO: 40815 - DNA, 120 bp, synthetic construct; identical to SEQ ID NO: 33597
  source 1..120: mol_type = other DNA

SEQ ID NO: 40816 - DNA, 120 bp, synthetic construct; identical to SEQ ID NO: 33598
  source 1..120: mol_type = other DNA

SEQ ID NO: 40817 - DNA, 120 bp, synthetic construct; identical to SEQ ID NO: 24358
  source 1..120: mol_type = other DNA

SEQ ID NO: 40818 - DNA, 120 bp, synthetic construct; identical to SEQ ID NO: 25300
  source 1..120: mol_type = other DNA

SEQ ID NO: 40819 - DNA, 120 bp, synthetic construct; identical to SEQ ID NO: 25301
  source 1..120: mol_type = other DNA

SEQ ID NO: 40820 - DNA, 120 bp, synthetic construct; identical to SEQ ID NO: 25302
  source 1..120: mol_type = other DNA

SEQ ID NO: 40821 - DNA, 120 bp, synthetic construct; identical to SEQ ID NO: 25303
  source 1..120: mol_type = other DNA

SEQ ID NO: 40822 - DNA, 120 bp, synthetic construct
  source 1..120: mol_type = other DNA
atgcagtccatgactaagatctaccgtggacccctggactggcctgctagcccatgctccgatgttgatgacatcgaaggcaccactcccgaggaaatctcaactgcatgacctctacta

SEQ ID NO: 40823 - DNA, 120 bp, synthetic construct; identical to SEQ ID NO: 21223
  source 1..120: mol_type = other DNA

SEQ ID NO: 40824 - DNA, 120 bp, synthetic construct; identical to SEQ ID NO: 21224
  source 1..120: mol_type = other DNA

SEQ ID NO: 40825 - DNA, 120 bp, synthetic construct
  source 1..120: mol_type = other DNA
ggtattttgacctcctcccatgaatcacaaatgttcttaatggcctttagattggtgaggaagattttcaattcacctaggtccctaagaggaatcactgtctatgacagccatagcctt

SEQ ID NO: 40826 - DNA, 120 bp, synthetic construct; identical to SEQ ID NO: 24021
  source 1..120: mol_type = other DNA

SEQ ID NO: 40827 - DNA, 120 bp, synthetic construct; identical to SEQ ID NO: 24022
  source 1..120: mol_type = other DNA

SEQ ID NO: 40828 - DNA, 120 bp, synthetic construct; identical to SEQ ID NO: 24023
  source 1..120: mol_type = other DNA

SEQ ID NO: 40829 - DNA, 120 bp, synthetic construct; identical to SEQ ID NO: 24024
  source 1..120: mol_type = other DNA

SEQ ID NO: 40830 - DNA, 120 bp, synthetic construct; identical to SEQ ID NO: 24025
  source 1..120: mol_type = other DNA

SEQ ID NO: 40831 - DNA, 120 bp, synthetic construct
  source 1..120: mol_type = other DNA
tttgtctcttttgatctttgttggtttaaagtctgttttatcagagactaggcttagactcccacacaataataatgggagactttaacaccccattgtcaacattagatcaacgagaca

SEQ ID NO: 40832 - DNA, 120 bp, synthetic construct
  source 1..120: mol_type = other DNA
acaagaaatggatactttccttgacacatacaccctcccaagactaaaccaggaagaagttgactctctgaatagaccaataacaggctctgaaattgtggcaataatcaatagcttacc

SEQ ID NO: 40833 - DNA, 120 bp, synthetic construct
  source 1..120: mol_type = other DNA
caaagtctcaggatacaaaatcaatgtacaaaaatcacaagcattcttataccccaataacagacaaacagagagtcaaatcatgcgtgaactcccattcacaattgcttcaaagagaat

SEQ ID NO: 40834 - DNA, 120 bp, synthetic construct
  source 1..120: mol_type = other DNA
atgaactcaaacaaatttacaagaaaaaaacaaacaaccccatcaaaaagtgggcgaaggacatgaacagacacttctcaaaagaagacatctatgcagccaaaaaacacatgaaaaaat

SEQ ID NO: 40835 - DNA, 120 bp, synthetic construct
  source 1..120: mol_type = other DNA
tgaggggggagggatagctttaggagatagacctaatgctaaatgacgagttaatgggtgcagcacaccagcatggcacatgtatacatatgtaactaacctgcacattgtgcacatgta

SEQ ID NO: 40836 - DNA, 120 bp, synthetic construct; identical to SEQ ID NO: 17110
  source 1..120: mol_type = other DNA

SEQ ID NO: 40837 - DNA, 120 bp, synthetic construct; identical to SEQ ID NO: 17111
  source 1..120: mol_type = other DNA

SEQ ID NO: 40838 - DNA, 120 bp, synthetic construct; identical to SEQ ID NO: 17112
  source 1..120: mol_type = other DNA

SEQ ID NO: 40839 - DNA, 120 bp, synthetic construct
  source 1..120: mol_type = other DNA
acagtaatttcttttgtttttttaatttataaagaaacggggtataattggctcatggttccacaggctatacaggaagcgtggctggggaggcctcaggaaacttacagtcatggcaga

SEQ ID NO: 40840 - DNA, 120 bp, synthetic construct
  source 1..120: mol_type = other DNA
aaatacaccagtgccaaaagagagccgccagccaaaacaaaggggctgcgagccccaggcaggtccaaaacctagcaaggcagtcactgaattgttttttggtttcttcttttttggttt

SEQ ID NO: 40841 - DNA, 120 bp, synthetic construct; identical to SEQ ID NO: 26007
  source 1..120: mol_type = other DNA

SEQ ID NO: 40842 - DNA, 120 bp, synthetic construct
  source 1..120: mol_type = other DNA
ccagtaatgggattgctgggtcaaatgtctaaaacatcaaaagcagtggcaacaaaagccaaaattgacaaatgggatctaattaaactaaacagcttctgcacagcaaaagaaactacc

SEQ ID NO: 40843 - DNA, 120 bp, synthetic construct
  source 1..120: mol_type = other DNA
ggattacaggctgggagctactgcgctgactgcaaaataggttcttttatcattctaatttttacagctgaggaaactgaagcacagagcaatttaagtgacttgcacgattgtgtgcta

SEQ ID NO: 40844 - DNA, 120 bp, synthetic construct
  source 1..120: mol_type = other DNA
ctgctaattccattttcttttcctgtcttttaactaaaatattgacgcactttctgtatgtttgaaaaatatttcataaaatttaatccacttaaagaaacccactcctttcccccaaat

SEQ ID NO: 40845 - DNA, 120 bp, synthetic construct
  source 1..120: mol_type = other DNA
gaggtgtggctctcttctgcataatactttcctctgctggttcatagctatcagtctgcagacaagctctactatttatgttaaaaacaaaagaacctcttttgtcctggcctgttacca

SEQ ID NO: 40846 - DNA, 120 bp, synthetic construct
  source 1..120: mol_type = other DNA
gaggtgctccccacctctcagacgatgggcggccgggcagagacgctcctcacttcctagatgggatggcggcggggaagtggcgctcctcgcttcctagatgggatggcggacgggcag

SEQ ID NO: 40847 - DNA, 120 bp, synthetic construct
  source 1..120: mol_type = other DNA
atgagaattttgaaaaatgtgggtagtgaaggtcttaccagatatttaaagcagaagttctcaagcattagtgtacaaaaacctgcatggttgcattttaaaaatgaatctgtcacagga

SEQ ID NO: 40848 - DNA, 120 bp, synthetic construct; identical to SEQ ID NO: 22019
  source 1..120: mol_type = other DNA

SEQ ID NO: 40849 - DNA, 120 bp, synthetic construct; identical to SEQ ID NO: 22020
  source 1..120: mol_type = other DNA

SEQ ID NO: 40850 - DNA, 120 bp, synthetic construct
  source 1..120: mol_type = other DNA
ttgcctcactcgggaagcacaaggggtcagggagttccctttcctagtcaaagaaacgggtcacctggaaaatcgggtcactcccacccaaatactgtgcttttccgacaggcttaaaaa

SEQ ID NO: 40851 - DNA, 120 bp, synthetic construct
  source 1..120: mol_type = other DNA
cgatcaactggatgaaaggctatcaatgatggaagatgaaatgaatgaaatggagtgagaaggaagtttagagaaaaaagaataaaaagaaacgagcaaagcctccaagaaatatgggac

SEQ ID NO: 40852 - DNA, 120 bp, synthetic construct
  source 1..120: mol_type = other DNA
taggatcacaacccctgccttttttttgttttccatttgcttggtagatcttcctccatccttttattttgagcctatgtgtgtctctgcacgtgagatgggtttcctgaatacagcaca

SEQ ID NO: 40853 - DNA, 120 bp, synthetic construct
  source 1..120: mol_type = other DNA
atagaccgctagcaagactaataaagaaaaaaagagagaagaatcaaatagacgcaataaaaaatgataaaggggatatcaccaccgatcccacagaaatacaaactaccatcagagaat

SEQ ID NO: 40854 - DNA, 120 bp, synthetic construct
  source 1..120: mol_type = other DNA
tgagtgaactcccattcacaattgcttcaaagagaataaaatacctaggaatccaacttacaagggatgtgaaggacctcttcaaggagaactacaaaccagtgctcaaggaaataaaag

SEQ ID NO: 40855 - DNA, 120 bp, synthetic construct
  source 1..120: mol_type = other DNA
caaaatgggagaaaattttcgcaacctgctcatctgacaaagggctaatatccagaatctacaatgaactcaaacaaatttacaagaaaaaaacaaacaaccccatcaaaaagtgggtga

SEQ ID NO: 40856 - DNA, 120 bp, synthetic construct; identical to SEQ ID NO: 35125
  source 1..120: mol_type = other DNA

SEQ ID NO: 40857 - DNA, 120 bp, synthetic construct
  source 1..120: mol_type = other DNA
agcgcctcttcccggccgtcatcctgtctaggaagtgaggagtgtctctgcccagccgcccatcctctgggatgtggggagcacctctgccctgccgccccatctgagatgtgaagagcg

SEQ ID NO: 40858 - DNA, 120 bp, synthetic construct; identical to SEQ ID NO: 11155
  source 1..120: mol_type = other DNA

SEQ ID NO: 40859 - DNA, 120 bp, synthetic construct; identical to SEQ ID NO: 11156
  source 1..120: mol_type = other DNA

SEQ ID NO: 40860 - DNA, 120 bp, synthetic construct
  source 1..120: mol_type = other DNA
gaggatgtggagaaataggaacacttttacactgttggtgggactgtaaattagttcaatcattgtggaagacagtgtggcaattcctcaaggatctagaactagaaataccatttgacc

SEQ ID NO: 40861 - DNA, 120 bp, synthetic construct
  source 1..120: mol_type = other DNA
tcaagcaattctcctgcctcagcctcctgagtaactgggactataggtaggcaccaccacccctggctaatttttctatttttagtagacatggagtttcatcatattggccaggctggt

SEQ ID NO: 40862 - DNA, 120 bp, synthetic construct
  source 1..120: mol_type = other DNA
gttaccctggtctccacttggagcttcagccaagattctgagacaacagaggaagtcccatttaacattctctttcatgggtgtcatagctcattgctattgcttattattttaggtttg

SEQ ID NO: 40863 - DNA, 120 bp, synthetic construct
  source 1..120: mol_type = other DNA
gtgtccagcctcacaagcaacatctttaaggtaaggagagaatcaaggaagtccaagatatgccaagatgggaacactgatcctttcatttcagggtttctgcctgagaatccacagctc

SEQ ID NO: 40864 - DNA, 120 bp, synthetic construct
  source 1..120: mol_type = other DNA
tgagcctcagtttccacatgctgaattggggataataatagataactgctagggttatagaggtggttgaacgaaacacctgcacagtttgtggcacactaaatgctctctcaataaatg

SEQ ID NO: 40865 - DNA, 120 bp, synthetic construct; identical to SEQ ID NO: 16295
  source 1..120: mol_type = other DNA

SEQ ID NO: 40866 - DNA, 120 bp, synthetic construct; identical to SEQ ID NO: 16296
  source 1..120: mol_type = other DNA

SEQ ID NO: 40867 - DNA, 120 bp, synthetic construct; identical to SEQ ID NO: 16297
  source 1..120: mol_type = other DNA

SEQ ID NO: 40868 - DNA, 120 bp, synthetic construct; identical to SEQ ID NO: 16298
  source 1..120: mol_type = other DNA

SEQ ID NO: 40869 - DNA, 120 bp, synthetic construct; identical to SEQ ID NO: 16299
  source 1..120: mol_type = other DNA

SEQ ID NO: 40870 - DNA, 120 bp, synthetic construct; identical to SEQ ID NO: 16300
  source 1..120: mol_type = other DNA

SEQ ID NO: 40871 - DNA, 120 bp, synthetic construct
  source 1..120: mol_type = other DNA
ataaacgtgccttttcctctgcccagtgtttcctcctaagacttggcaggtactgtctttcatggtccctaggaatttctgcttttctgtgaggatttttgctcttctcaccagctgtga

SEQ ID NO: 40872 - DNA, 120 bp, synthetic construct
  source 1..120: mol_type = other DNA
tgtgaactgtttaaagagttatacaaaataaatgcatttgacactcctgattcattgctcatgagaggcaaggagtttagtgaccctatacatcatacctttgaccatatgtggagaacc

SEQ ID NO: 40873 - DNA, 120 bp, synthetic construct
  source 1..120: mol_type = other DNA
atttttcttcttgcagaaagcctatagaaggatgtgcaagtaggagaaatattgctgaattcttttcccagcatggaagaaccctggggaaggaatgcattcctgggggtaggtctatag

SEQ ID NO: 40874 - DNA, 120 bp, synthetic construct
  source 1..120: mol_type = other DNA
cctccccccaaaaatcacactagctcaccagcaatggatccaaaccaagaagaaactcctaatttacctgagaaagtattcagaagggcaattattaagctaatcaaagaggcaccagaa

SEQ ID NO: 40875 - DNA, 120 bp, synthetic construct
  source 1..120: mol_type = other DNA
gaattcactactagaaagccagcactacaagaactgctaaaaggagctttaaatcttgaaacaaatcctggaaacacatcaaaatagaacctttttaaagcataaacctcacatgaccta

SEQ ID NO: 40876 - DNA, 120 bp, synthetic construct
  source 1..120: mol_type = other DNA
gtggaaattaaataacctgttcctgaatgatcattggatcaacaatgaaatcaagatggaaatttaaaaatttctcacactgaaggataatagtgacacaagctatcaaaacttctagga

SEQ ID NO: 40877 - DNA, 120 bp, synthetic construct
  source 1..120: mol_type = other DNA
atccatggtatgctgattttgctgagggttttaatcataagaggatgctggatttttgtcaaatgctttttctacatctattgagataataatgtgatttttgtttttaattctgtttat

SEQ ID NO: 40878 - DNA, 120 bp, synthetic construct; identical to SEQ ID NO: 734
  source 1..120: mol_type = other DNA

SEQ ID NO: 40879 - DNA, 120 bp, synthetic construct; identical to SEQ ID NO: 733
  source 1..120: mol_type = other DNA

SEQ ID NO: 40880 - DNA, 120 bp, synthetic construct
  source 1..120: mol_type = other DNA
tgggaattgaacaatgagaacacatggacacaggaaggggaacatcacacactgggcctgttatggggtggggggaggggggagggataacattaggcgatatacctaatgttaaatgac

SEQ ID NO: 40881 - DNA, 120 bp, synthetic construct; identical to SEQ ID NO: 16301
  source 1..120: mol_type = other DNA

SEQ ID NO: 40882 - DNA, 120 bp, synthetic construct
  source 1..120: mol_type = other DNA
tgaccacagaaagacagagtcattgtgcctgcaaagcctaaatcccctgccctggggctgccatgaacaaatgctatgagtcttattaaaactgcaggtgtgcagtgtataacctgaaca

SEQ ID NO: 40883 - DNA, 120 bp, synthetic construct; identical to SEQ ID NO: 16302
  source 1..120: mol_type = other DNA

SEQ ID NO: 40884 - DNA, 120 bp, synthetic construct
  source 1..120: mol_type = other DNA
gaggcatgagaatcacttgaatctgggaggtggaggttacagtgagccgagattgtgccactgcactgcagcccaggtgacagagtgagactctgtctcaaaaaaaaaaaaaaaaaaaaa

SEQ ID NO: 40885 - DNA, 120 bp, synthetic construct
  source 1..120: mol_type = other DNA
gtctagggtagaaggtgagagcaactatgctgagcttagagtcccttagattcttatgtagcccagatgccacctgcctttcctcagcacaggctaattgtcataggtcttctgagaagc

SEQ ID NO: 40886 - DNA, 120 bp, synthetic construct
  source 1..120: mol_type = other DNA
agaccatgctgttttgctgactatggccttatagtacattttgaaatcaggtaatgtgatgcctccagatttgttctttttggatagtcttgctttggctatgatgactctttttttggt

SEQ ID NO: 40887 - DNA, 120 bp, synthetic construct
  source 1..120: mol_type = other DNA
gcgagattaaaatggtaatacaaaaattatcaacaacaacaacaacgacaacaaaaaagccatgaccagatgaattcacagctgaattctaccagacattcaaagaagaattggtaccaa

SEQ ID NO: 40888 - DNA, 120 bp, synthetic construct
  source 1..120: mol_type = other DNA
tggagctcccaaatttatgaaacagttactactagacctaagaaataatataaacagcaacacaataatagtgggggacttcaatactccactgacagaactaaacaggtcatcaagaca

SEQ ID NO: 40889 - DNA, 120 bp, synthetic construct
  source 1..120: mol_type = other DNA
acagagaaaaacacactgaaaagcctcaacaatagaattgaacaagcagaagaaataacttcagagcttgaagacaagattttgacttagccaaatccaacaaagacaaagaaaaaaaaa

SEQ ID NO: 40890 - DNA, 120 bp, synthetic construct
  source 1..120: mol_type = other DNA
ttttaaaatccctaataaaaacttgctggttttgctgctcggggtcaccatcatagtcctaccactatgtgatgacagccccagaggcccagctgtaaaatttctgtctttgtactcgtt

SEQ ID NO: 40891 - DNA, 120 bp, synthetic construct
  source 1..120: mol_type = other DNA
tgagggcattgattgttttgcaggaagtcagggaccctgaatggagggatcggccagagctgaggcagaagaacataaattgtgaagatttcatggatatttatcacttcccaaaattaa

SEQ ID NO: 40892 - DNA, 120 bp, synthetic construct
  source 1..120: mol_type = other DNA
tctgctcaggagctggtacagtaatcttcaattcttattccatagaaaaaaaggagacagaaatgtcagacactgtgatggttaatactgagtgtcaattgattgaattgaaggatacaa

SEQ ID NO: 40893 - DNA, 120 bp, synthetic construct; identical to SEQ ID NO: 16300
  source 1..120: mol_type = other DNA

SEQ ID NO: 40894 - DNA, 120 bp, synthetic construct; identical to SEQ ID NO: 16299
  source 1..120: mol_type = other DNA

SEQ ID NO: 40895 - DNA, 120 bp, synthetic construct; identical to SEQ ID NO: 16298
  source 1..120: mol_type = other DNA

SEQ ID NO: 40896 - DNA, 120 bp, synthetic construct
  source 1..120: mol_type = other DNA
agacaatagtgcctagtaatgaggaggaggaagaaccaacttggaggtgggttgccgttttgagaaggtggtcaaggtaagcttcattgagaagttgacaaaaatatttagcaaggaaat

SEQ ID NO: 40897 - DNA, 120 bp, synthetic construct
  source 1..120: mol_type = other DNA
tcacagatttcccacaggaatgtgctgtcctgaaatgtgtctaaaggtcaacatttgaaaaacagaaagaatggaaaagaaagtcagcaaagtccagcatcatgacttggcagtgtcccc

SEQ ID NO: 40898 - DNA, 120 bp, synthetic construct
  source 1..120: mol_type = other DNA
gacaaagttatctcctgaagcacatggatacttttgagcaggtttttcagatcaaacataaggctttgcagaagtctagcactttgcattgttctccacatctaagagtcttaggggagc

SEQ ID NO: 40899 - DNA, 120 bp, synthetic construct
  source 1..120: mol_type = other DNA
accaaaacctgcatttgtttctcattttctcatatttttcaattcagacactgaggatgtaggtgttggggcatcggcagagtgcttaagagctagacgtgatgtgaaccagacctgggt

SEQ ID NO: 40900 - DNA, 120 bp, synthetic construct
  source 1..120: mol_type = other DNA
tggtaaatcacagcaacaacttttggtttttttctttttagagggagtctcactctgtcactcaggttggagtgaagtgacatggtctcggctcactgcaacctcctcctcccgggttca

SEQ ID NO: 40901 - DNA, 120 bp, synthetic construct
  source 1..120: mol_type = other DNA
gctggctttatcagcagccttttgtcatacacaggctggaggtgagtgaagctccaaagtcaagttgggattacttctgagcatgtcatgtaacaccctctcattaaacggtggttatct

SEQ ID NO: 40902 - DNA, 120 bp, synthetic construct; identical to SEQ ID NO: 16305
  source 1..120: mol_type = other DNA

SEQ ID NO: 40903 - DNA, 120 bp, synthetic construct
  source 1..120: mol_type = other DNA
caaacatatattctcagcagcttagaaaactccagtagaaaatgagcatgtttttctccaaaggcctcaacaaaattctctgggttgactctcactggaccaacttgggccatgtgtcca

SEQ ID NO: 40904 - DNA, 120 bp, synthetic construct
  source 1..120: mol_type = other DNA
actatgtgctaggccttgttccaagcacttcactttcttttttcctttctttttctttttctttctttttttttttttttttttgagacagagtctcactctgtcacccaggctagagtg

SEQ ID NO: 40905 - DNA, 120 bp, synthetic construct
  source 1..120: mol_type = other DNA
tggtttaagaacagggactgtggggctgaacactctgagacccaatcttggccctgccacttactagctatgtgaccttgggcaagctacttggcctctctgtttctcagtttccccatc

SEQ ID NO: 40906 - DNA, 120 bp, synthetic construct
  source 1..120: mol_type = other DNA
tccagtaactgaacttccagtctggagcccatgcccctatacctgagtcagataggaagatgcactgacaagggataaacctcaagccttttcattgcttataagcaagtgcctcagctg

SEQ ID NO: 40907 - DNA, 120 bp, synthetic construct
  source 1..120: mol_type = other DNA
taaaggaatatctgacactgggtaatttataaagaaaaaagtttaattggctcacagttatgcagggtgtacaggaagcatggtgctggcatctgcttctggtgagggcctcaggaagat

SEQ ID NO: 40908 - DNA, 120 bp, synthetic construct; identical to SEQ ID NO: 40880
  source 1..120: mol_type = other DNA

SEQ ID NO: 40909 - DNA, 120 bp, synthetic construct; identical to SEQ ID NO: 16308
  source 1..120: mol_type = other DNA

SEQ ID NO: 40910 - DNA, 120 bp, synthetic construct
  source 1..120: mol_type = other DNA
tttgaatctaataatagcaaatcaagcctgggcaacacagcgagactctgtctctaccaaaaatgtttaaaacaaaattagccaggcatggtggcacatacctgcagtcctagctactca

SEQ ID NO: 40911 - DNA, 120 bp, synthetic construct
  source 1..120: mol_type = other DNA
tagaatggaaagggagtgaattgctgggaacaactatcccatctatgacccactgtattttaagcacaaggggatttattacatggaaatgggcgttcacaaaactgtcagaagtgttga

SEQ ID NO: 40912 - DNA, 120 bp, synthetic construct
  source 1..120: mol_type = other DNA
ctcctgtgcctttcttccttccaagctcatgctctctctctcccataccatactgccttcatggaagattatatatatatatatatatatatatatatatatatatagacagatatatag

SEQ ID NO: 40913 - DNA, 120 bp, synthetic construct; identical to SEQ ID NO: 16287
  source 1..120: mol_type = other DNA

SEQ ID NO: 40914 - DNA, 120 bp, synthetic construct; identical to SEQ ID NO: 16288
  source 1..120: mol_type = other DNA

SEQ ID NO: 40915 - DNA, 120 bp, synthetic construct; identical to SEQ ID NO: 16289
  source 1..120: mol_type = other DNA

SEQ ID NO: 40916 - DNA, 120 bp, synthetic construct; identical to SEQ ID NO: 16290
  source 1..120: mol_type = other DNA

SEQ ID NO: 40917 - DNA, 120 bp, synthetic construct; identical to SEQ ID NO: 16291
  source 1..120: mol_type = other DNA

SEQ ID NO: 40918 - DNA, 120 bp, synthetic construct; identical to SEQ ID NO: 16292
  source 1..120: mol_type = other DNA

SEQ ID NO: 40919 - DNA, 120 bp, synthetic construct; identical to SEQ ID NO: 16293
  source 1..120: mol_type = other DNA

SEQ ID NO: 40920 - DNA, 120 bp, synthetic construct; identical to SEQ ID NO: 16294
  source 1..120: mol_type = other DNA

SEQ ID NO: 40921 - DNA, 120 bp, synthetic construct; identical to SEQ ID NO: 11044
  source 1..120: mol_type = other DNA

SEQ ID NO: 40922 - DNA, 120 bp, synthetic construct
  source 1..120: mol_type = other DNA
tatcacatggggagaaaccttggacgatacccagctttcaagggcagaagtccctgcggctttccgcagtgcactgtgcccctggtttattgagactagagaatggcgatgacttttacc

SEQ ID NO: 40923 - DNA, 120 bp, synthetic construct; identical to SEQ ID NO: 11045
  source 1..120: mol_type = other DNA

SEQ ID NO: 40924 - DNA, 120 bp, synthetic construct
  source 1..120: mol_type = other DNA
ttctcaaaagaagacatttatgcagccaacagacacatgaaaaaatgctcatcatcaccggccatcagagaaatgcaaatcaaaaccacaatgagataccatctcacagcagttagaatg

SEQ ID NO: 40925 - DNA, 120 bp, synthetic construct; identical to SEQ ID NO: 11046
  source 1..120: mol_type = other DNA

SEQ ID NO: 40926 - DNA, 120 bp, synthetic construct; identical to SEQ ID NO: 13095
  source 1..120: mol_type = other DNA

SEQ ID NO: 40927 - DNA, 120 bp, synthetic construct
  source 1..120: mol_type = other DNA
tgggtatatacccagtaatgggattgctgagtcaaatggtatttctagttctagatccttgaggaatcgccacactgtcttccacaatggttgaattagtttacattcccaccagcagtg

SEQ ID NO: 40928 - DNA, 120 bp, synthetic construct; identical to SEQ ID NO: 13096
  source 1..120: mol_type = other DNA

SEQ ID NO: 40929 - DNA, 120 bp, synthetic construct
  source 1..120: mol_type = other DNA
cctcggcctccgaaagtgctggaattacaggcatgagccactacgcccagccagcaatagttctttttctaatcctttgaatgaatcaatcaaaataaagtcaacaagacacttgaatta

SEQ ID NO: 40930 - DNA, 120 bp, synthetic construct; identical to SEQ ID NO: 13097
  source 1..120: mol_type = other DNA

SEQ ID NO: 40931 - DNA, 120 bp, synthetic construct
  source 1..120: mol_type = other DNA
gagaagtgtctgttcatatgcttcacccactttttgatggggttgtttgtttttttcttgtaaatttgtttgagttcattgtagattctggatattagccctttgtcagatgagtaggtt

SEQ ID NO: 40932 - DNA, 120 bp, synthetic construct
  source 1..120: mol_type = other DNA
ggcaaactgaatccagcagcacatcaaaaagtttatccaccatgatcaagtgggcttcatccctgggatgcaaggctggttcaatatacacaaatcaataaatgtaatccagcatataaa

SEQ ID NO: 40933 - DNA, 120 bp, synthetic construct
  source 1..120: mol_type = other DNA
cctgcatcgtcaagtcaatcctaagccagaagaacaaagctggaggcatcacgctacctgacttcaaactatactacaaggctacagtaaccaaaacagcatggtactggtaccaaaaca

SEQ ID NO: 40934 - DNA, 120 bp, synthetic construct; identical to SEQ ID NO: 11015
  source 1..120: mol_type = other DNA

SEQ ID NO: 40935 - DNA, 120 bp, synthetic construct
  source 1..120: mol_type = other DNA
tttcagaaaagttgtaaagaatttagtatagtttggatatctcctccaaatctcatgttgagatgtaatcccccgtgttggaggtggggcctggtaggaggtgtttggatcacgtgggtg

SEQ ID NO: 40936 - DNA, 120 bp, synthetic construct; identical to SEQ ID NO: 11016
  source 1..120: mol_type = other DNA

SEQ ID NO: 40937 - DNA, 120 bp, synthetic construct
  source 1..120: mol_type = other DNA
acaggtatcactgattttttaatagactcactactcactccatgtggtttaaataagggatgaagccttccaattccctgcaaagcttccacgctgagccaatgttgcaacaactcttca

SEQ ID NO: 40938 - DNA, 120 bp, synthetic construct
  source 1..120: mol_type = other DNA
agatagtgttttcttaggaagaaaacctttttcctggcctcattatgtcttctcgccttgaaaatgtggcactttccctttttctggtttagaaatgcttttggtcttggggcaaccgtc

SEQ ID NO: 40939 - DNA, 120 bp, synthetic construct
  source 1..120: mol_type = other DNA
aggcatcttgggattctttgtagggagcagaggaggaatgcaattattcaacttcatattgcaagtggagactttaacattggcagggttcaagtctcaagcctcaaatttggagcataa

SEQ ID NO: 40940 - DNA, 120 bp, synthetic construct
  source 1..120: mol_type = other DNA
gggagacaattgggcgtgataagtcaccatggcagctggcatgtggttacttgctggacaagtagagggaagccttgggggagagggaatttccgagcctcttatttaaaaagagaaaac

SEQ ID NO: 40941 - DNA, 120 bp, synthetic construct
  source 1..120: mol_type = other DNA
ggaggagtttggactaaatgagatctcccatttttccagtgcagacatcctagggcttgttaactatgtcaaagccagaagaaaaagagaagacaacatccaggttttgatttccctggt

SEQ ID NO: 40942 - DNA, 120 bp, synthetic construct
  source 1..120: mol_type = other DNA
tgagcccagtacttgaccataacaagtatagaattgacactagacgttgttatttaatagctcttccaaactagaaaactcagagctctgtctggtgggctggatgggattctattgtga

SEQ ID NO: 40943 - DNA, 120 bp, synthetic construct
  source 1..120: mol_type = other DNA
ccaaaggaaatgctacaagtactcatgcatgtgtccatggttttatagatgcagagactgaagctcaaagtgtgtaagtaccttcccaaaggattcacatctactaagtgactgagcaga

SEQ ID NO: 40944 - DNA, 120 bp, synthetic construct
  source 1..120: mol_type = other DNA
ttctttagtggagtgaaagcagcagactgctcaaaaaatcctgccagtcacagcaagcaacctttctcctctctctctcttcgtccccaccagaagatactttgaatttaaattttagaa

SEQ ID NO: 40945 - DNA, 120 bp, synthetic construct
  source 1..120: mol_type = other DNA
tgcttgtcctaggagggcaacagagttgacgtgagcaacagatgattaattccctgcagtggcaaagggctactcttctcatctacagaactatcatcctttaattagttaataaaacct

SEQ ID NO: 40946 - DNA, 120 bp, synthetic construct
  source 1..120: mol_type = other DNA
atggctacaaggatttttttttcaatgggtaataacccagaatgaacattaacaagtaaaagtacagttgagcaatgtgagccagttatttccccagcagtagtgtggtgttctgtatca

SEQ ID NO: 40947 - DNA, 120 bp, synthetic construct
  source 1..120: mol_type = other DNA
attttagaactacaaaacagccatggctactatggacccataaaatagcggcttgtgcagaatatctccactgcataaagatcaatgaattcagacagactgcattcattgggagaggtt

SEQ ID NO: 40948 - DNA, 120 bp, synthetic construct
  source 1..120: mol_type = other DNA
gacttctatgttgatacaaccttagtgtagtgaccggcatatcatgtgttctcgtgagcactttaaaggtggatagagccagtgaatgaataaacaaactgcagagcacagatgggaaat

SEQ ID NO: 40949 - DNA, 120 bp, synthetic construct
  source 1..120: mol_type = other DNA
gagaaattgaaggcatattagaggacattttcatccaatgctctcattttcacaaataagaaaatcaggaagtgattgctcaagggcacacagggcattagaggcagagctccagccaga

SEQ ID NO: 40950 - DNA, 120 bp, synthetic construct
  source 1..120: mol_type = other DNA
gctgaattattttggcattcctgtgatttggcttccctcagagcagattaagaagctttagaaaagaggcgagaactataaaggagaaaaaagggaagaagcctaagagcctggggtatc

SEQ ID NO: 40951 - DNA, 120 bp, synthetic construct
  source 1..120: mol_type = other DNA
ccagagaaaaattcagcaggtcacctgctgcgctctgctgcaaatgaccaatgatgtagatccaaacttgtaaggtcacacatacacatttccaacaaaaaagagatatacatttccaac

SEQ ID NO: 40952 - DNA, 120 bp, synthetic construct
  source 1..120: mol_type = other DNA
ggctgcctctgcctagcacggacttttaaaacccttctaccacggtagcatgcaaagaagaaagatattccttcagtcgtctataaatacatagagggagtgatgattttatggtaggca

SEQ ID NO: 40953 - DNA, 120 bp, synthetic construct
  source 1..120: mol_type = other DNA
tttctggactgtggacatgtgagaaaaatcccaaaatgagtggctttattttacagccatgaccagctgttcactcatgttactatgtcagatctgtttgattaatggtgcccacacata

SEQ ID NO: 40954 - DNA, 120 bp, synthetic construct
  source 1..120: mol_type = other DNA
gtgtgtgcaaagatatctccagccaagcggccagatacttcctggggccagcagccatgtatccaaggggttatggaacaattagaaaaacagtagtgtcacacaaaaaaaaaaaaaaaa

SEQ ID NO: 40955 - DNA, 120 bp, synthetic construct
  source 1..120: mol_type = other DNA
tagaagcacctagaacactgcctggcccatggtgagcacgatgtaattattagctattattattgtcggatgctccataatgaggaagttagttctagaggtgagacagacactttttca

SEQ ID NO: 40956 - DNA, 120 bp, synthetic construct
  source 1..120: mol_type = other DNA
gactgtttgtgctgctgtaactaaatagctgagactggatagtttatttaaaaacgagatttatttctcacatttctggaagccaggaagtccaggatcaaggtgccagcatctggtgag

SEQ ID NO: 40957 - DNA, 120 bp, synthetic construct
  source 1..120: mol_type = other DNA
tgctcatgctgctcctctgcctgaaacagtatttcccccttgtactcctctaactcctttcctaatgccatctcttcttttagcacactttacatatcctcctaaactcagcttaagtat

SEQ ID NO: 40958 - DNA, 120 bp, synthetic construct
  source 1..120: mol_type = other DNA
taaatcatcaagcaaaagcagatgacttcactattcaacatccctgcctcatgaaagcctgggcacacaggacaatattggcaccagctagctcaagtgaacccagtattagctcttttc

SEQ ID NO: 40959 - DNA, 120 bp, synthetic construct
  source 1..120: mol_type = other DNA
gttcaaggataccatgctgcatttaagtcaagtctctttagccatgtcctcttagctgtgacagtttctcagacttttcttatttttaatgaccttgacagttttgaggagtattgatca

SEQ ID NO: 40960 - DNA, 120 bp, synthetic construct
  source 1..120: mol_type = other DNA
acaaagctatcttaccaaggggaaattgttttactattgctgcttataagccacagaaagtctctgttctctggatccctgcttggctttggtaaagctacagttagagactcaacctct

SEQ ID NO: 40961 - DNA, 120 bp, synthetic construct
  source 1..120: mol_type = other DNA
taacttaggcaagaatagccacagagtaagagagagaccctcagtgtagagatccacagtcctgactttgccatcaagatgctattatgaaagaggacaagatctttacatctctgaatc

SEQ ID NO: 40962 - DNA, 120 bp, synthetic construct
  source 1..120: mol_type = other DNA
catctgcctgccttactttgttatcagcttcttagatgtggttctgtaagttttgcttaggaaggaagtagtaacaaaagctcttggctaattgtctttggtgacaaataccacagatgg

SEQ ID NO: 40963 - DNA, 120 bp, synthetic construct
  source 1..120: mol_type = other DNA
caagacattttttgtccctctcctagaggtcactctgggaagttcagcagtttcagcaatgcttaccaatgctcagatctctggacctatttaaaccaatagcaaatacttttggatcac

SEQ ID NO: 40964 - DNA, 120 bp, synthetic construct
  source 1..120: mol_type = other DNA
atgggaaactaatgatagacaaaaggttatatagtaaagtctgttatgtagatttccctgtgccatcttcaggcaagcaagggcctaaggtcatccctggtgatcaacctttgtccttct

SEQ ID NO: 40965 - DNA, 120 bp, synthetic construct
  source 1..120: mol_type = other DNA
cagccagtgtgttcatttttcccttagggcaccctgcccttctacatatagtagaaactcaggaatttggttaagcaactttctattttccccaaaccttaaaagagctgtctgcaatga

SEQ ID NO: 40966 - DNA, 120 bp, synthetic construct
  source 1..120: mol_type = other DNA
cttcatcaatattatcatagctttttcttgttagattataggatcccaggcttatgtcctcagagaacagaatggagagcagatttatagacagggaaggggattggacaggactgtggg

SEQ ID NO: 40967 - DNA, 120 bp, synthetic construct
  source 1..120: mol_type = other DNA
gtgccaagatcagcctgggagtttatacaacacttattttagcttcagacatactttagcccctagaaaagaaagtgaacaggaagagaccctcgagatatctttggatgcatcaagaat

SEQ ID NO: 40968 - DNA, 120 bp, synthetic construct
  source 1..120: mol_type = other DNA
ctgtaacatataacagtaattagagttttctacttgtgaccttaaggtgtgttgtcatggtcttgacatttctgcagaagtaaactattcaattcagtagtttctgtgtttgcagttata

SEQ ID NO: 40969 - DNA, 120 bp, synthetic construct
  source 1..120: mol_type = other DNA
acccccaccccgcaatactacacagagatgaaaaatgtgtttaggtagaagatcctcctaaataagaaggaagggtctggaaagctgttatctgggttgtattacaactttgtgtttttt

SEQ ID NO: 40970 - DNA, 120 bp, synthetic construct
  source 1..120: mol_type = other DNA
tgattgttcaccatcatatcccagtatctagcacagtgcctaagggataggaggggctcagtaaatatctcttgcaaggatgttgttaaattgtaaactctgccaaggcctttatgttga

SEQ ID NO: 40971 - DNA, 120 bp, synthetic construct
  source 1..120: mol_type = other DNA
gtgtgtgtgtgtgtgtatatatataaagaattccccacttaatatttatacatccaaaaactgacaaaaataatgtctgaactcatgtctgacattcagattcctccgcccaaaggcaat

SEQ ID NO: 40972 - DNA, 120 bp, synthetic construct
  source 1..120: mol_type = other DNA
gcctaacagtttatttaagccaaatttatagtttctgaagcgctagaaggctgctgtccaaggggactacttttttttttttttttagatggagtcttgctctgtcgccaggctggagtg

SEQ ID NO: 40973 - DNA, 120 bp, synthetic construct
  source 1..120: mol_type = other DNA
ctagttaactatatgtgctatcaaagtgagaccccatttatcttttaatctgtttctgattgtttttccagtgtctacttaactgagactcttacaggtaattttgtaggatactaggtg

SEQ ID NO: 40974 - DNA, 120 bp, synthetic construct
  source 1..120: mol_type = other DNA
tgccaggccaaatattaacaggtatatatatttgcatacataaatatttacctctatgtcttgtgtgtttttgttatgagacagagtctcactctgtcgcccaggctggagtgcagtggc

SEQ ID NO: 40975 - DNA, 120 bp, synthetic construct
  source 1..120: mol_type = other DNA
cctcccatctcagcttcccaaagtgctgagattataggcatgagccaccatgcctggctagttaatggttattaagtaatacaaacatttctgtgaattccaccagatcattgactttgg

SEQ ID NO: 40976 - DNA, 120 bp, synthetic construct
  source 1..120: mol_type = other DNA
atattggcctcttaataaatattcgagaattaaagaaaggccacaaaccaggagatacttgacagagcaggaggtgacttggtgacttgagcttttgaggctcacctccattgaatctgt

SEQ ID NO: 40977 - DNA, 120 bp, synthetic construct
  source 1..120: mol_type = other DNA
aattctttcattaaatattattagagcttcttagaggctcaaaccaatgctgatgtttgtagagaagttgcattgtgcttgagatccttatatctggtgaaggtaatttttgcccacatt

SEQ ID NO: 40978 - DNA, 120 bp, synthetic construct
  source 1..120: mol_type = other DNA
aaaaaatgctcatcatcactggccatcagagaaatgcaaatgaaaaccacaatgagataccatctcacaccagttagaatggcaatcattaaaaagtcaggaaacaacaggtgctggaga

SEQ ID NO: 40979 - DNA, 120 bp, synthetic construct
  source 1..120: mol_type = other DNA
ttcagggaactgaagatgtctaggtgtctgggtcaccctgagagggggagtttattaaaatgaatcctctcttctacaaattcatgctaaattgttccacgtctaatggtaatttctcca

SEQ ID NO: 40980 - DNA, 120 bp, synthetic construct
  source 1..120: mol_type = other DNA
atcagaaaaggttacatgtgcttgactgtataatttgctagccatttgtttagtcctgactctctaatcaaatgccaggaggatccagagagcaacagcaaaggtcatttctagtgcctg

SEQ ID NO: 40981 - DNA, 120 bp, synthetic construct
  source 1..120: mol_type = other DNA
gtccatggtacaaagtaggtactcgtaagtattcgtttagttaaggaaaattgttgggatcttagacttaagctcaaagcctccattcaaagaaagtggccaaaatgtcccccctctgga

SEQ ID NO: 40982 - DNA, 120 bp, synthetic construct
  source 1..120: mol_type = other DNA
agataaaagattgggcaaagtaatttagtcccagtcccagatactacgtgtttcagtctgtgctcgtgggtatgtaaaggtttcagatgggctttccatgaaaaacagcaatgaggcaaa

SEQ ID NO: 40983 - DNA, 120 bp, synthetic construct
  source 1..120: mol_type = other DNA
ctgaggggggaattcatggacatttatggtcacattatcctgattggctgagggagtcagcaggcttctagccagttttcttgctgttcacagaaataaaagctcagtgtctttgaaaat

SEQ ID NO: 40984 - DNA, 120 bp, synthetic construct
  source 1..120: mol_type = other DNA
cttagggagtttacatcttgatgataaggccactgaggtaactaaagaggaaatggattcagcataggctttggaagttcacttctgttacctagtaactgtgtgactttgggcaagtct

SEQ ID NO: 40985 - DNA, 120 bp, synthetic construct
  source 1..120: mol_type = other DNA
atactacctttctgcctgtataggtcagaatctattaagagtgagtaggaatggattacaccccacagtcatgaagggccttaaatgatagtagcacactagtgtcatatgtcaagtggc

SEQ ID NO: 40986 - DNA, 120 bp, synthetic construct
  source 1..120: mol_type = other DNA
atctagggactctgtccttcataggacaagttgctaatttgggggtgttctcagggagaggaaaatgtctatatgctcatatgcacagattatccaaatcaaaactctttctccccattg

SEQ ID NO: 40987 - DNA, 120 bp, synthetic construct
  source 1..120: mol_type = other DNA
gaggggtactcaattggattaagaagccagggcccacagaacagatgttttcaccctactaacccaattgctgtctgctttttagttgccacagtctaaacattctttaatgcattgtct

SEQ ID NO: 40988 - DNA, 120 bp, synthetic construct
  source 1..120: mol_type = other DNA
actttgtcacttggccactgtgggctctgacgccctctagtgacagaaaaattctttggtagaagaagtaatatccctagatagcagtctacagaattgtttaagcaattatctttactt

SEQ ID NO: 40989 - DNA, 120 bp, synthetic construct
  source 1..120: mol_type = other DNA
cctgttggccaatgctaaagttttggacttgccagcctctacaatcacgtgagccaactcctatctatctttccatttattcattctcttggttctatttctctagagaaccctgactaa

SEQ ID NO: 40990 - DNA, 120 bp, synthetic construct
  source 1..120: mol_type = other DNA
gggtaggggaagggggtatggcatagaaagagcaggaccttgggagcaagaatatctaagtttaattcctgactctgctatttattaactaaccatctttgccaatgttgcttaagcttt

SEQ ID NO: 40991 - DNA, 120 bp, synthetic construct
  source 1..120: mol_type = other DNA
gagcttggtggacgatgccaaaggaatactgaaacctttagtgtgtccagtctggaactgcatccaaattcaggttcagtaatgatgtcattatccaaacataccttctgtaaaattcat

SEQ ID NO: 40992 - DNA, 120 bp, synthetic construct
  source 1..120: mol_type = other DNA
ccttcccatcctcctgaccaccggggcttttcgtgagctcgtctctgatctcgcgcaagagtgacacacaggtgttcaaagacgcttctggggagtgagggaagcggtttacgagtgact

SEQ ID NO: 40993 - DNA, 120 bp, synthetic construct
  source 1..120: mol_type = other DNA
agcacaaacaaattgcacgtgtgtaaacaaactgtacaatgattgatgaaagatgagggaaggtggtttggaagactccaagaagcataataccgtcatcctgactggaaggtagatgga

SEQ ID NO: 40994 - DNA, 120 bp, synthetic construct
  source 1..120: mol_type = other DNA
aatgggtgcctcacagttaatccacaatacaatgccaagaaaggagcaactgtgcttagcacctgtttcaagtaaacacctcctgaaactctcagatgtatgaagatgtattggaaaagg

SEQ ID NO: 40995 - DNA, 120 bp, synthetic construct
  source 1..120: mol_type = other DNA
aataaagagtatcacagtcatgctctgaagcaagaagtcaattatagggaggtaggcggattcagtgagagaggaggaaagcagacccacactgtggcagatgagacacacacactcacc

SEQ ID NO: 40996 - DNA, 120 bp, synthetic construct
  source 1..120: mol_type = other DNA
tgattcatcagtaactgtccccagagcccagcatacctgtggtacggccagaagcatacagggatagcactgcctggatggccacgtacatggcagggacattgaaggtctcaaacatga

SEQ ID NO: 40997 - DNA, 120 bp, synthetic construct
  source 1..120: mol_type = other DNA
gctgtgaacatgagagaggaatgtggatttggtcctggttggttgggagaggtgatattgttagaagttttaaacaggactgaaaagagaggacaaggaagaaaatgaagtgtataaggc

SEQ ID NO: 40998 - DNA, 120 bp, synthetic construct
  source 1..120: mol_type = other DNA
caaaattccccttcttagagcccctgcgaggtcctgcgaggaccaacgcccaggacaaaacaagttagaaccaaatcaaaaagtgtgggctttaaaaaaaaaaaaaaaaaggcagtcgca

SEQ ID NO: 40999 - DNA, 120 bp, synthetic construct
  source 1..120: mol_type = other DNA
attcttgagaaggacattagtccattcaagagggcagaaccctgctgttaaaattggtaactaaatttcaacatgagttttgagggggacaaacattcaaaccatagcaccgcctgtgtg

SEQ ID NO: 41000 - DNA, 120 bp, synthetic construct; identical to SEQ ID NO: 20617
  source 1..120: mol_type = other DNA

SEQ ID NO: 41001 - DNA, 120 bp, synthetic construct; identical to SEQ ID NO: 7242
  source 1..120: mol_type = other DNA

SEQ ID NO: 41002 - DNA, 120 bp, synthetic construct; identical to SEQ ID NO: 7243
  source 1..120: mol_type = other DNA

SEQ ID NO: 41003 - DNA, 120 bp, synthetic construct
  source 1..120: mol_type = other DNA
cccaaagtgctgggattacaggcatgagccactgtgccaagcaaagtatagaacaatgtatatcctatgatttgtgttaaagggaccaaagggaaaaaaaagacgtgtgtctgtgtgttt

SEQ ID NO: 41004 - DNA, 120 bp, synthetic construct; identical to SEQ ID NO: 9485
  source 1..120: mol_type = other DNA

SEQ ID NO: 41005 - DNA, 120 bp, synthetic construct; identical to SEQ ID NO: 9486
  source 1..120: mol_type = other DNA

SEQ ID NO: 41006 - DNA, 120 bp, synthetic construct; identical to SEQ ID NO: 9487
  source 1..120: mol_type = other DNA

SEQ ID NO: 41007 - DNA, 120 bp, synthetic construct; identical to SEQ ID NO: 9488
  source 1..120: mol_type = other DNA

SEQ ID NO: 41008 - DNA, 120 bp, synthetic construct; identical to SEQ ID NO: 9489
  source 1..120: mol_type = other DNA

SEQ ID NO: 41009 - DNA, 120 bp, synthetic construct; identical to SEQ ID NO: 19742
  source 1..120: mol_type = other DNA

SEQ ID NO: 41010 - DNA, 120 bp, synthetic construct; identical to SEQ ID NO: 19743
  source 1..120: mol_type = other DNA

SEQ ID NO: 41011 - DNA, 120 bp, synthetic construct
  source 1..120: mol_type = other DNA
atttattgagcatttatttatacccactatgtgccgtaaacaaggtgctgagtaatgagatgtgaacagaatagtccttcttcttgtcctcatggagcacacagcctagtcggggacaat

SEQ ID NO: 41012 - DNA, 120 bp, synthetic construct; identical to SEQ ID NO: 21367
  source 1..120: mol_type = other DNA

SEQ ID NO: 41013 - DNA, 120 bp, synthetic construct; identical to SEQ ID NO: 21368
  source 1..120: mol_type = other DNA

SEQ ID NO: 41014 - DNA, 120 bp, synthetic construct; identical to SEQ ID NO: 21369
  source 1..120: mol_type = other DNA

SEQ ID NO: 41015 - DNA, 120 bp, synthetic construct
  source 1..120: mol_type = other DNA
gaggcagaggttgcagtgagccaagattgcgccactgcactccagcctgggtgtcagatcgagactcggtctcaaaaaaaaaaaaaaaagaaaaaaaaaaagaaaaaattgacacatgcc

SEQ ID NO: 41016 - DNA, 120 bp, synthetic construct; identical to SEQ ID NO: 30415
  source 1..120: mol_type = other DNA

SEQ ID NO: 41017 - DNA, 120 bp, synthetic construct; identical to SEQ ID NO: 30416
  source 1..120: mol_type = other DNA

SEQ ID NO: 41018 - DNA, 120 bp, synthetic construct; identical to SEQ ID NO: 30417
  source 1..120: mol_type = other DNA

SEQ ID NO: 41019 - DNA, 120 bp, synthetic construct; identical to SEQ ID NO: 30418
  source 1..120: mol_type = other DNA

SEQ ID NO: 41020 - DNA, 120 bp, synthetic construct; identical to SEQ ID NO: 30419
  source 1..120: mol_type = other DNA

SEQ ID NO: 41021 - DNA, 120 bp, synthetic construct; identical to SEQ ID NO: 30420
  source 1..120: mol_type = other DNA

SEQ ID NO: 41022 - DNA, 120 bp, synthetic construct
  source 1..120: mol_type = other DNA
acacccaatattatactcctcatttccttacagttttcataacccttattttaacagctatatgataatctgtctagtaggtatttcctgcttagcagttccactatttttagtcatttt

SEQ ID NO: 41023 - DNA, 120 bp, synthetic construct
  source 1..120: mol_type = other DNA
tttctatcttaattatatgaaagcttccagagaataagcagaatgtggtatctatgtacaatggaatattattcagccttaaaaagaaaggaatcctggcacatgcttcaacatggatga

SEQ ID NO: 41024 - DNA, 120 bp, synthetic construct
  source 1..120: mol_type = other DNA
acttcactgctattagcagatttaatctcctcagcccgagtaggcgcattgaaataaataccatgttgtggagtgctttttaggttccctatttgcagcctgtgtttgagtatgacttca

SEQ ID NO: 41025 - DNA, 120 bp, synthetic construct
  source 1..120: mol_type = other DNA
aacgagtccccattatttcccctctccctccaccttgttttttgtttttgagatggagttaactcttgttgcccaggctggagtacagtggcaccacctcagctcactgtaacctctgcc

SEQ ID NO: 41026 - DNA, 120 bp, synthetic construct; identical to SEQ ID NO: 30422
  source 1..120: mol_type = other DNA

SEQ ID NO: 41027 - DNA, 120 bp, synthetic construct
  source 1..120: mol_type = other DNA
agaaaataaaagtctttttttttttttttttttttttttttttgagacggagtcttactccatcgcccaggctggaatgcagtggtgcgatctcagctcactgcaacctccgcctcccac

SEQ ID NO: 41028 - DNA, 120 bp, synthetic construct; identical to SEQ ID NO: 30423
  source 1..120: mol_type = other DNA

SEQ ID NO: 41029 - DNA, 120 bp, synthetic construct; identical to SEQ ID NO: 30424
  source 1..120: mol_type = other DNA

SEQ ID NO: 41030 - DNA, 120 bp, synthetic construct; identical to SEQ ID NO: 30425
  source 1..120: mol_type = other DNA

SEQ ID NO: 41031 - DNA, 120 bp, synthetic construct; identical to SEQ ID NO: 30426
  source 1..120: mol_type = other DNA

SEQ ID NO: 41032 - DNA, 120 bp, synthetic construct
  source 1..120: mol_type = other DNA
gcaccattgcaccccagctgggcaacaagagcgaaactccgtctcaaaaaaaaaaaaaatttaaaagccaagaaggggagattgtacattttggcttgcagaaggctctgcaatgccgct

SEQ ID NO: 41033 - DNA, 120 bp, synthetic construct
  source 1..120: mol_type = other DNA
ttaaagccacccaaagacctgtattaatacttttagctgtatagtctttaagctctttttcttttttttttggagatggagtttcactcttgttgtccaggctggagtgcaatggcacga

SEQ ID NO: 41034 - DNA, 120 bp, synthetic construct; identical to SEQ ID NO: 30427
  source 1..120: mol_type = other DNA

SEQ ID NO: 41035 - DNA, 120 bp, synthetic construct; identical to SEQ ID NO: 30428
  source 1..120: mol_type = other DNA

SEQ ID NO: 41036 - DNA, 120 bp, synthetic construct
  source 1..120: mol_type = other DNA
ctttcctccatggaagaatatttgactatttgatccaagctcccttgccactccaaatctgttagaaatgtaagtcagaattgagccccttcatagtggctcacatctataatcctaggg

SEQ ID NO: 41037 - DNA, 120 bp, synthetic construct
  source 1..120: mol_type = other DNA
cgctagagtatatccaagatacccagaagatggcattagaatatgtttcagggatgctaagaaactttaaacttaataccacgagagcgtctttggaggtccttgagagagccattcctt

SEQ ID NO: 41038 - DNA, 120 bp, synthetic construct
  source 1..120: mol_type = other DNA
acctgtagacatcatttcagatatgatagcgatagaattggatagaccaaggctgagattaatagctgagttgcagagaaagcagacttacctgtccgaagtccaagtgtaaccatgtct

SEQ ID NO: 41039 - DNA, 120 bp, synthetic construct
  source 1..120: mol_type = other DNA
gtagctgggactacaggtgcacgccaccacacccagcgaatttttttttttgtatttcagtagagacggtgtttcaccatgttgcccaggctggtctcgaactcctgagctcaggcaatc

SEQ ID NO: 41040 - DNA, 120 bp, synthetic construct
  source 1..120: mol_type = other DNA
aatctgtaactgctggcagtttcctctgctttatgatgggattaagattgaacagtgttccctgctgctgctttcactgatgaggagacacagctaatgtcaggcgggattgaagtggga

SEQ ID NO: 41041 - DNA, 120 bp, synthetic construct
  source 1..120: mol_type = other DNA
cactacagcagctgttacctggcaggctaacgcacagaaacgggcattcttaggcctcaatattaaacttcaacttagtcatcaagacccatactttggaaagaagtccctttcttcgtg

SEQ ID NO: 41042 - DNA, 120 bp, synthetic construct
  source 1..120: mol_type = other DNA
tacctgtgtgctttcactggttccacagcctcatttggtcagctgtgctagccacatagaccaacagagtgggtgccctgaagatgtgcttttggcttcagaagaggtcgtctctctccc

SEQ ID NO: 41043 - DNA, 120 bp, synthetic construct; identical to SEQ ID NO: 30436
  source 1..120: mol_type = other DNA

SEQ ID NO: 41044 - DNA, 120 bp, synthetic construct
  source 1..120: mol_type = other DNA
agagcaagacctcaactctacaaaaaaaaatttttaattagctgcaagtggtcgcccacacctgtagttccagctacttgaggggctgaggtgggaggactgcttgagcccaggaggtcg

SEQ ID NO: 41045 - DNA, 120 bp, synthetic construct; identical to SEQ ID NO: 30437
  source 1..120: mol_type = other DNA

SEQ ID NO: 41046 - DNA, 120 bp, synthetic construct; identical to SEQ ID NO: 30282
  source 1..120: mol_type = other DNA

SEQ ID NO: 41047 - DNA, 120 bp, synthetic construct; identical to SEQ ID NO: 30438
  source 1..120: mol_type = other DNA

SEQ ID NO: 41048 - DNA, 120 bp, synthetic construct
  source 1..120: mol_type = other DNA
catctacattaggtatctctcctaatgctctccctcccctaacaggcccaccaacaggcccggatgtgtggtgttctcctccctgtgtccatgtcttctcattgttcaactcccacttac

SEQ ID NO: 41049 - DNA, 120 bp, synthetic construct; identical to SEQ ID NO: 30439
  source 1..120: mol_type = other DNA

SEQ ID NO: 41050 - DNA, 120 bp, synthetic construct
  source 1..120: mol_type = other DNA
ggtggaatacagtctaaaaggaacatacaagtgttaagtgacaggctctatggaactgccggagcagagcccagcagaagacaagcgtttaagaagacaaagcagtagaaaccccgtttt

SEQ ID NO: 41051 - DNA, 120 bp, synthetic construct
  source 1..120: mol_type = other DNA
tgtgttcagaaattctcatgtgaaccagtaaactcaacaaaccctttactatttaagaaggaacaacccttgatctctactcactcctccccaaagtaacggtccaccctgttccttccg

SEQ ID NO: 41052 - DNA, 120 bp, synthetic construct; identical to SEQ ID NO: 30440
  source 1..120: mol_type = other DNA

SEQ ID NO: 41053 - DNA, 120 bp, synthetic construct
  source 1..120: mol_type = other DNA
caccattacactccaccctgggcaactccatctcaaaaacataaaaataaataattttttaatttagaaagaatttcaagctcagcaaaagtgatacactctttattcagatttacctac

SEQ ID NO: 41054 - DNA, 120 bp, synthetic construct
  source 1..120: mol_type = other DNA
gtatattaaaacttcaaagcaaagacaagttgaagaaaacaaaagtccctaaaccgagtcgattaagacactcacagttgcaggtggtggataagacagcaacggaccccacttggccat

SEQ ID NO: 41055 - DNA, 120 bp, synthetic construct; identical to SEQ ID NO: 30441
  source 1..120: mol_type = other DNA

SEQ ID NO: 41056 - DNA, 120 bp, synthetic construct; identical to SEQ ID NO: 30442
  source 1..120: mol_type = other DNA

SEQ ID NO: 41057 - DNA, 120 bp, synthetic construct
  source 1..120: mol_type = other DNA
atttaaagggatgactaggctgcatagttttcagagaatatttcacaactccggtctcacttctctgagccaaacttttcaaatgaagtcttttgcatttttcaactttttttgaaataa

SEQ ID NO: 41058 - DNA, 120 bp, synthetic construct
  source 1..120: mol_type = other DNA
tactctattcttaaactttcatccattagtttaagtatccattggtgactcttgtttttttctttttttttgacagaatcttgttctgtttcctaggctggagtgcagtggcacaatctc

SEQ ID NO: 41059 - DNA, 120 bp, synthetic construct
  source 1..120: mol_type = other DNA
ggcgcagtggctcacacctgtagtcccagcactttgggaggccgaggatgtggatcacgacccgtggtcaggagatcgagaccatcctggctaacacggtgaaaccccgtctctactaaa

SEQ ID NO: 41060 - DNA, 120 bp, synthetic construct
  source 1..120: mol_type = other DNA
tcccaaagtgctgagattacagccatgagccactgcgcctggctttttttttttttttttaaatagtcattccacatattgtgagatgcattgttacaggaagtcccttgccctcccaaa

SEQ ID NO: 41061 - DNA, 120 bp, synthetic construct; identical to SEQ ID NO: 30389
  source 1..120: mol_type = other DNA

SEQ ID NO: 41062 - DNA, 120 bp, synthetic construct; identical to SEQ ID NO: 30390
  source 1..120: mol_type = other DNA

SEQ ID NO: 41063 - DNA, 120 bp, synthetic construct; identical to SEQ ID NO: 30391
  source 1..120: mol_type = other DNA

SEQ ID NO: 41064 - DNA, 120 bp, synthetic construct; identical to SEQ ID NO: 30392
  source 1..120: mol_type = other DNA

SEQ ID NO: 41065 - DNA, 120 bp, synthetic construct; identical to SEQ ID NO: 30393
  source 1..120: mol_type = other DNA

SEQ ID NO: 41066 - DNA, 120 bp, synthetic construct; identical to SEQ ID NO: 30394
  source 1..120: mol_type = other DNA

SEQ ID NO: 41067 - DNA, 120 bp, synthetic construct; identical to SEQ ID NO: 30395
  source 1..120: mol_type = other DNA

SEQ ID NO: 41068 - DNA, 120 bp, synthetic construct; identical to SEQ ID NO: 30396
  source 1..120: mol_type = other DNA

SEQ ID NO: 41069 - DNA, 120 bp, synthetic construct
  source 1..120: mol_type = other DNA
ccattgcactccagcccgggcaacaagagcgaaactccgtctcaaaaaaaaaaaaaattgggggcaaataataatatattgtatgtacagagagaagcattggaaagatacacaggaata

SEQ ID NO: 41070 - DNA, 120 bp, synthetic construct; identical to SEQ ID NO: 30397
  source 1..120: mol_type = other DNA

SEQ ID NO: 41071 - DNA, 120 bp, synthetic construct; identical to SEQ ID NO: 30398
  source 1..120: mol_type = other DNA

SEQ ID NO: 41072 - DNA, 120 bp, synthetic construct
  source 1..120: mol_type = other DNA
tgcagtgagccgtgatcacaccactgtactccagcctgggtgacagagtgagactgtgtctccaaaaaaaaaaaaaaaaaaaaaaaaaaaaaaaaaaaaaaaaaaggacatatgagttat

SEQ ID NO: 41073 - DNA, 120 bp, synthetic construct; identical to SEQ ID NO: 30399
  source 1..120: mol_type = other DNA

SEQ ID NO: 41074 - DNA, 120 bp, synthetic construct
  source 1..120: mol_type = other DNA
attgctttttgtttgttttttttaacttttcagattttttttttttttttttcgagacaggatctcgctctgtcacccgggctacagggcagtggggcagtcatagttcactgcaacctc

SEQ ID NO: 41075 - DNA, 120 bp, synthetic construct; identical to SEQ ID NO: 30400
  source 1..120: mol_type = other DNA

SEQ ID NO: 41076 - DNA, 120 bp, synthetic construct; identical to SEQ ID NO: 30401
  source 1..120: mol_type = other DNA

SEQ ID NO: 41077 - DNA, 120 bp, synthetic construct; identical to SEQ ID NO: 30402
  source 1..120: mol_type = other DNA

SEQ ID NO: 41078 - DNA, 120 bp, synthetic construct; identical to SEQ ID NO: 30403
  source 1..120: mol_type = other DNA

SEQ ID NO: 41079 - DNA, 120 bp, synthetic construct; identical to SEQ ID NO: 30404
  source 1..120: mol_type = other DNA

SEQ ID NO: 41080 - DNA, 120 bp, synthetic construct; identical to SEQ ID NO: 30405
  source 1..120: mol_type = other DNA

SEQ ID NO: 41081 - DNA, 120 bp, synthetic construct; identical to SEQ ID NO: 30406
  source 1..120: mol_type = other DNA

SEQ ID NO: 41082 - DNA, 120 bp, synthetic construct
  source 1..120: mol_type = other DNA
ttcacacctgtaattccagcattttgggagggctaaggtgggtggatcacttgaggccaggagttagagaccagcccagccaacatggtgaaaccttgtctctactaaaaaatacaaaaa

SEQ ID NO: 41083 - DNA, 120 bp, synthetic construct; identical to SEQ ID NO: 30407
  source 1..120: mol_type = other DNA

SEQ ID NO: 41084 - DNA, 120 bp, synthetic construct; identical to SEQ ID NO: 30408
  source 1..120: mol_type = other DNA

SEQ ID NO: 41085 - DNA, 120 bp, synthetic construct; identical to SEQ ID NO: 30409
  source 1..120: mol_type = other DNA

SEQ ID NO: 41086 - DNA, 120 bp, synthetic construct
  source 1..120: mol_type = other DNA
ttagccattctttttaatatttatttatttttttttaattaaagaaacataggccgggcacggtggcttatgcctgtaatcccagcactttgggaggcagaggcaggcgggtcatgaggt

SEQ ID NO: 41087 - DNA, 120 bp, synthetic construct
  source 1..120: mol_type = other DNA
tttgcataccttctggtcctgccttctttctcttttccttctgggaattgtaatccacaaatgctaaatcttttcttatatatcccagatgtccctgaggctctgggctctgtttttttt

SEQ ID NO: 41088 - DNA, 120 bp, synthetic construct
  source 1..120: mol_type = other DNA
ccagctaagttttgtatttttagtagagttgtggtttcatcatgttggccaggatggtctcgatctcttgaccttgtgatctgcccacctcagcctcccacagtgttgggattacaggcg

SEQ ID NO: 41089 - DNA, 120 bp, synthetic construct
  source 1..120: mol_type = other DNA
tctcaggtgatctacccgcctcgacctcctaaagtgctgggataacaggcgtgagccaccgcgcccggccttagcagctctttctaaggatttgatataatttatttacctgatctctga

SEQ ID NO: 41090 - DNA, 120 bp, synthetic construct
  source 1..120: mol_type = other DNA
caatttgcctgtctcgaccacccaaagtgctgggattacaggtgtgagccactgtgcccggcctagaaacattatttactctctcctgaaattcagtcacaaggatttaaaaaatttttt

SEQ ID NO: 41091 - DNA, 120 bp, synthetic construct
  source 1..120: mol_type = other DNA
acgtaggttgattccagatcttggttattgtgaatagtgctacagtaaacatgggagtgcagatagctctttaacatactgatttcatttcctttggatatatgcccagtagtgggattg

SEQ ID NO: 41092 - DNA, 120 bp, synthetic construct
  source 1..120: mol_type = other DNA
cctgtgttcaagcaattctcccgcctccacttcttgagtagctggggttacaggtatgcaccaccacacccggttaattttttttgtatttttagtaaagacggggtttctccatgttgg

SEQ ID NO: 41093 - DNA, 120 bp, synthetic construct
  source 1..120: mol_type = other DNA
agctctgagttcacaagagatctggtcatgtagaagtgtgtggcaactgcctcccactcttttgttcttgcttttgccatgtgaagtgcctgctcccacttcaccttcctctgtgagtca

SEQ ID NO: 41094 - DNA, 120 bp, synthetic construct; identical to SEQ ID NO: 30271
  source 1..120: mol_type = other DNA

SEQ ID NO: 41095 - DNA, 120 bp, synthetic construct
  source 1..120: mol_type = other DNA
gctgttgagtcgttaatgggtaaggctggaagccagagggcctctgtgctagtttacaaggaggctcatatctcctacagtggaagggaatgacatagctcagacaattaggaagaccta

SEQ ID NO: 41096 - DNA, 120 bp, synthetic construct
  source 1..120: mol_type = other DNA
aattttcaaattcagaatccactggcattattcctaggaagaaagaccctaccataccatggcatatgctgtgaaaacgccctcaatcttcctcaaagggacctgtagccatttacttag

SEQ ID NO: 41097 - DNA, 120 bp, synthetic construct
  source 1..120: mol_type = other DNA
gaatgtctgacacatacaaaaagaaagaaagaaaagacagaaagaaaagaaagagaaagaagaaagaaaaagaaagaaagaaagaaaaagaaagaaagaaagaaaaagagaggaaagaaa

SEQ ID NO: 41098 - DNA, 120 bp, synthetic construct
  source 1..120: mol_type = other DNA
ggctgccccctaagcttcggggtctgcgtgatcatcttctggcaatctagaagggatgctgtttggaagctgtgcttaccatcattacgctgacattgatttttaaattgtccattagtg

SEQ ID NO: 41099 - DNA, 120 bp, synthetic construct
  source 1..120: mol_type = other DNA
caacagagcaagactccatctcataaataaataaataaataaataaactgtacctttagagtcccagtgagatcttattttccttctaaagaaattgctgacagtggcccctaatgtcat

SEQ ID NO: 41100 - DNA, 120 bp, synthetic construct
  source 1..120: mol_type = other DNA
taagagtttcccaactgatgtcagtcgttaaaacaaagaaaaaatactgatagcaattttatatcatgtaaaatagatgtcccctaggtttccatctacatctaacattttatgattcta

SEQ ID NO: 41101 - DNA, 120 bp, synthetic construct
  source 1..120: mol_type = other DNA
gccaatcttcagattcagaaatcccagtgaatcctatgcaggagaaataaaaagaaatctatacctagaaatatgagactgaaaacgaagaacaacgtggacaaacagtctttgcctttc

SEQ ID NO: 41102 - DNA, 120 bp, synthetic construct; identical to SEQ ID NO: 41054
  source 1..120: mol_type = other DNA

SEQ ID NO: 41103 - DNA, 120 bp, synthetic construct
  source 1..120: mol_type = other DNA
atgatggcttatgcctgtaatctcagcactttgggaggccgaggcaggcggatcacctgaggtcaggagttagagaccagcctggccaacatggtgaaaccccatctctactaaaaatac

SEQ ID NO: 41104 - DNA, 120 bp, synthetic construct
  source 1..120: mol_type = other DNA
tagcccttacatttaactcagtgataaattttgagttaatttgtgtatatgaaatgagaaagtaaataaatgttcatcctctcactccatggatatcaattattcccacatcatttgttg

SEQ ID NO: 41105 - DNA, 120 bp, synthetic construct; identical to SEQ ID NO: 30280
  source 1..120: mol_type = other DNA

SEQ ID NO: 41106 - DNA, 120 bp, synthetic construct; identical to SEQ ID NO: 30281
  source 1..120: mol_type = other DNA

SEQ ID NO: 41107 - DNA, 120 bp, synthetic construct; identical to SEQ ID NO: 30439
  source 1..120: mol_type = other DNA

SEQ ID NO: 41108 - DNA, 120 bp, synthetic construct
  source 1..120: mol_type = other DNA
tggggtacatgtgcagaacgtgcaggtttgttacacaggtatacacgtgccacggtggtttgctgcacccaccaacccgtcatctacattaggtatctctcctaatgctctccctcccct

SEQ ID NO: 41109 - DNA, 120 bp, synthetic construct; identical to SEQ ID NO: 30438
  source 1..120: mol_type = other DNA

SEQ ID NO: 41110 - DNA, 120 bp, synthetic construct; identical to SEQ ID NO: 30282
  source 1..120: mol_type = other DNA

SEQ ID NO: 41111 - DNA, 120 bp, synthetic construct; identical to SEQ ID NO: 30437
  source 1..120: mol_type = other DNA

SEQ ID NO: 41112 - DNA, 120 bp, synthetic construct
  source 1..120: mol_type = other DNA
aggctgcagtgagctgtgatcacaccactgcacttcagcgtgggcaacagagcaaggctctgtctctaaatagtaagtatttatttattttatatctataacccatttaccctgcaacat

SEQ ID NO: 41113 - DNA, 120 bp, synthetic construct; identical to SEQ ID NO: 30436
  source 1..120: mol_type = other DNA

SEQ ID NO: 41114 - DNA, 120 bp, synthetic construct
  source 1..120: mol_type = other DNA
gagcaggaaaattgtgcatatttaaggtgcacagtgtgatgatttgatacaggtatgtacatcgtggaatgcttaccacaatcaagctaatgaagacatccatcacctcacacagctacc

SEQ ID NO: 41115 - DNA, 120 bp, synthetic construct
  source 1..120: mol_type = other DNA
caaaggtttatttctttgcacgtggttcacgtctggtgtggtcggcagtaggctccaccaccgtgttgtggctgcccttctggaacacatcgcctcaggtccccgctgccggggaggaga

SEQ ID NO: 41116 - DNA, 120 bp, synthetic construct
  source 1..120: mol_type = other DNA
acactgttcaatcttaatcccatcataaagcagaggaaactgccagcagttacagattgctcctcacggggtgggaattttcttgtttgacagtttagctccctggactttatagaagtt

SEQ ID NO: 41117 - DNA, 120 bp, synthetic construct
  source 1..120: mol_type = other DNA
aaaaataaaatatatttacaatactgaaatacttccagttggccgggcatggtggctcatgtctgtaatcccagcactttgggaggccaaggcgggtggattgcctgagctcaggagttc

SEQ ID NO: 41118 - DNA, 120 bp, synthetic construct
  source 1..120: mol_type = other DNA
atatgatagcgatagaattggatagaccaaggctgagattaatagctgagttgcagagaaagcagacttacctgtccgaagtccaagtgtaaccatgtctaacatgaaagacgatggaat

SEQ ID NO: 41119 - DNA, 120 bp, synthetic construct; identical to SEQ ID NO: 41037
  source 1..120: mol_type = other DNA

SEQ ID NO: 41120 - DNA, 120 bp, synthetic construct
  source 1..120: mol_type = other DNA
ccacacttctcctcactgccttcctcccttctcagcacctcgtaactgaggctggctgaaggaaaggaagcaccagagatgattcccgaggtgtttttaggtcaggaggcactggcatga

SEQ ID NO: 41121 - DNA, 120 bp, synthetic construct
  source 1..120: mol_type = other DNA
ttatcagggaaagaacctattgggtttagtgttcttacagacagcatttctttttggaaatgaactatcttatgtggtttttcttttcatattcctaatgaaatcattttggttgctttt

SEQ ID NO: 41122 - DNA, 120 bp, synthetic construct
  source 1..120: mol_type = other DNA
aaccctagtttttttctcttgtggttaaatattctgtgaaaatacatttaagaagtacataatttatttttctgttgttggacatgtatcttgttttaatatttttaccactgtcatgag

SEQ ID NO: 41123 - DNA, 120 bp, synthetic construct; identical to SEQ ID NO: 1709
  source 1..120: mol_type = other DNA

SEQ ID NO: 41124 - DNA, 120 bp, synthetic construct; identical to SEQ ID NO: 1708
  source 1..120: mol_type = other DNA

SEQ ID NO: 41125 - DNA, 120 bp, synthetic construct
  source 1..120: mol_type = other DNA
ctttggggcaacattttctttggttgaaaaattaccctgtaccttccagattagaatttctgggtgtgaggcctagtaatctgtattttaaacaactccacaagtgacctcattgccaat

SEQ ID NO: 41126 - DNA, 120 bp, synthetic construct
  source 1..120: mol_type = other DNA
gattcctaaagcacctgagctgtctagtagcggaagaaatggtatttcccaaggttctccgctggaagactgcgctgtgtgcccttcctttttccactccctcccccgtccccatgccat

SEQ ID NO: 41127 - DNA, 120 bp, synthetic construct
  source 1..120: mol_type = other DNA
cttggctgacttttaaattttttcatagaggtggggtctcccaatattgcccaggctggtctcaaactcctggactcaagtgatcctccctcctcagcctcctaaagtgctaggatgatg

SEQ ID NO: 41128 - DNA, 120 bp, synthetic construct
  source 1..120: mol_type = other DNA
ttttgtaacatacttgattgacactgtggccagatatagaattcttgggtcgtaccttcttcccttgaagactctaagtgtggccctatgtgtcctagtgttaaatgtagccgtgttgaa

SEQ ID NO: 41129 - DNA, 120 bp, synthetic construct
  source 1..120: mol_type = other DNA
agtgttaacatttataactttatgtttactaatgcctctgatactttatcagttttaaataatatcttttgatttcactgtaagaggcaagtgtctttacactctctccttctttccttg

SEQ ID NO: 41130 - DNA, 120 bp, synthetic construct
  source 1..120: mol_type = other DNA
cctgtaatcccagctactctggaggcagaggcaggagaattgcttgaattctgggaggtggagtctcccagagatccgagattgggctactgcacttgagcctggttgacagagtgagac

SEQ ID NO: 41131 - DNA, 120 bp, synthetic construct
  source 1..120: mol_type = other DNA
tgtgttaccatttgtgtaaaataaaactgtgtgctagccgggcgcaatggctcacacctataatgccaacactttaggaggctgaggtgggcggatcatgagctcaggagtttgagacca

SEQ ID NO: 41132 - DNA, 120 bp, synthetic construct; identical to SEQ ID NO: 30287
  source 1..120: mol_type = other DNA

SEQ ID NO: 41133 - DNA, 120 bp, synthetic construct
  source 1..120: mol_type = other DNA
gtgcatacagtttttcctgtatttcgagtcttttttacttaaaaagaactagcagtgtttgattatggagttcagcagtgttagtaatttattagtctctgcacagtgtgccatttcaga

SEQ ID NO: 41134 - DNA, 120 bp, synthetic construct; identical to SEQ ID NO: 30288
  source 1..120: mol_type = other DNA

SEQ ID NO: 41135 - DNA, 120 bp, synthetic construct
  source 1..120: mol_type = other DNA
taaaaaaatgctagccatagcagtgccctacatctgaatcacaattgcgttatgtcctagtttccttcctgaattcttgagaatggttagacctgccttgtgcacttcactaaccagtgt

SEQ ID NO: 41136 - DNA, 120 bp, synthetic construct; identical to SEQ ID NO: 30289
  source 1..120: mol_type = other DNA

SEQ ID NO: 41137 - DNA, 120 bp, synthetic construct
  source 1..120: mol_type = other DNA
gtgagccaccgcgcccggcctacctctgcgatttttgttgctttccattttctctgtcctttggaaccttgtgacttttaaaaaattgggaaatgtccacattatagtatagtttaaatg

SEQ ID NO: 41138 - DNA, 120 bp, synthetic construct; identical to SEQ ID NO: 21709
  source 1..120: mol_type = other DNA

SEQ ID NO: 41139 - DNA, 120 bp, synthetic construct
  source 1..120: mol_type = other DNA
ctttatatttttatttatttatttatttttgagacagagtctcgctctgttgcccgggctggagttcaatgtcgtgatcttggctcactacaacctccgcctcccagattcaagcaattc

SEQ ID NO: 41140 - DNA, 120 bp, synthetic construct; identical to SEQ ID NO: 21710
  source 1..120: mol_type = other DNA

SEQ ID NO: 41141 - DNA, 120 bp, synthetic construct
  source 1..120: mol_type = other DNA
atttgtggcatgaatgaagtttaaaattatagaaaaaacaggctgagcacagtggctcatacctataatcccagcactttgggaggccaaggcaggaggattatttaagcccaagagttc

SEQ ID NO: 41142 - DNA, 120 bp, synthetic construct
  source 1..120: mol_type = other DNA
cattcattgcaacaatttctgtgtgcctcctatgcataagacagcatactaggcacaggataaacatatacacatacacacacacacacacacacacacacacacacacacagagtacaa

SEQ ID NO: 41143 - DNA, 120 bp, synthetic construct
  source 1..120: mol_type = other DNA
cctgacctcaggtgatctggcctcctctgcctcccaaagggttgggattacaggcgtgagccaccatgcccagcctatagaacagttaaattgtttctcttttttttttttttttttttt

SEQ ID NO: 41144 - DNA, 120 bp, synthetic construct; identical to SEQ ID NO: 21705
  source 1..120: mol_type = other DNA

SEQ ID NO: 41145 - DNA, 120 bp, synthetic construct
  source 1..120: mol_type = other DNA
ccattttgtaggttgcctgttcactctgatggtagtttcttttgctgtgaagaagctctttagtttaattagatcccatttgtcaattttgtcttttgttgccattgcttttggtgtttt

SEQ ID NO: 41146 - DNA, 120 bp, synthetic construct; identical to SEQ ID NO: 21706
  source 1..120: mol_type = other DNA

SEQ ID NO: 41147 - DNA, 120 bp, synthetic construct; identical to SEQ ID NO: 21707
  source 1..120: mol_type = other DNA

SEQ ID NO: 41148 - DNA, 120 bp, synthetic construct
  source 1..120: mol_type = other DNA
aacccatctgtacatcaccatcatcaaagaccaaaagtagataaaaccacaaagttggggaaaaaacagaacagaaaaactggaaactctaaaacaccgagcacctctcctcctccaaag

SEQ ID NO: 41149 - DNA, 120 bp, synthetic construct
  source 1..120: mol_type = other DNA
aaggaagcgctaaacatggaaaggaacaaccggtaccagccgctgcaaaatcatgccaaaatgtaaagaccattgagactaggaagaaactgcatcaactaatgagcaaaatcaccagct

SEQ ID NO: 41150 - DNA, 120 bp, synthetic construct
  source 1..120: mol_type = other DNA
acatcacaattaaaagaactagaaaagcaagagcaaacacattgaaaagctagcagaaggcaagaaataactaaaatcagagcagaactgaaggaaatagagacacaaaaaacccttcaa

SEQ ID NO: 41151 - DNA, 120 bp, synthetic construct
  source 1..120: mol_type = other DNA
atttcaaaataataagagctatctatgacaaacccacagccaatatcatactgaatgggcaaaaactggaagcattccctttgaaaactggcacaagacagggatgccctctctcaccgc

SEQ ID NO: 41152 - DNA, 120 bp, synthetic construct
  source 1..120: mol_type = other DNA
aacgttagacctaaaaccataaaaaccctagaagaaaacctaggcattaccattgaggacataggcatgggcaaggacttcatgtccaaaacaccaaaagcaatggcaacaaaagacaaa

SEQ ID NO: 41153 - DNA, 120 bp, synthetic construct
  source 1..120: mol_type = other DNA
gggaggggggagggatagcattgggagatatacctaatgctagatgacatgttagtgggtgcagcgcaccagcatggcacatgtatacatatgtaactaacctgcacaatgtgcacatgt

SEQ ID NO: 41154 - DNA, 120 bp, synthetic construct; identical to SEQ ID NO: 21708
  source 1..120: mol_type = other DNA

SEQ ID NO: 41155 - DNA, 120 bp, synthetic construct
  source 1..120: mol_type = other DNA
agctgacagtgattttgacagtgatttaaacccgcttttgttgttgttggcttttcgttgtttggttttgtgtgttgtgcgtgtgtgtggcggtttttcccccgtggtgcattttatttt

SEQ ID NO: 41156 - DNA, 120 bp, synthetic construct; identical to SEQ ID NO: 21651
  source 1..120: mol_type = other DNA

SEQ ID NO: 41157 - DNA, 120 bp, synthetic construct; identical to SEQ ID NO: 21652
  source 1..120: mol_type = other DNA

SEQ ID NO: 41158 - DNA, 120 bp, synthetic construct; identical to SEQ ID NO: 21653
  source 1..120: mol_type = other DNA

SEQ ID NO: 41159 - DNA, 120 bp, synthetic construct; identical to SEQ ID NO: 21654
  source 1..120: mol_type = other DNA

SEQ ID NO: 41160 - DNA, 120 bp, synthetic construct
  source 1..120: mol_type = other DNA
gcggccagtcggcgagctgggcaataaggaaacggtttattaggagggagtggtggagctgggccaggcaggaagacgctggaataagaaacatttttgctccagcccccatcccagtcc

SEQ ID NO: 41161 - DNA, 120 bp, synthetic construct
  source 1..120: mol_type = other DNA
atatatatattttttctcatgtaatcctggccgcaacctagtggaagaggggttactatccccttcctacagaaaaggaaacagacatgaatatgggacttgtccaaaactccttggatg

SEQ ID NO: 41162 - DNA, 120 bp, synthetic construct
  source 1..120: mol_type = other DNA
gtgggcaatttgtacacgtccaccgagacccatgtctttttcttcctttgagggactcatctaaccccaaacaactggaggaataacaatgaccaaggaatgatttattatcagcaattt

SEQ ID NO: 41163 - DNA, 120 bp, synthetic construct
  source 1..120: mol_type = other DNA
tttcttgctgattccaggactgaatcagagtctggagtgagggtgaaaccagtgaatatgcttttctcagtgagcacttcaggtgattctgatgcgtgataaagtagaaggagggtggac

SEQ ID NO: 41164 - DNA, 120 bp, synthetic construct
  source 1..120: mol_type = other DNA
ctttgcatggttgttatagccctgagggctcagacatgggctgccaccactggatagggacagagcgaagagagcacttgattaggagtctggaaacctgggatgtacgcctgctggtgc

SEQ ID NO: 41165 - DNA, 120 bp, synthetic construct
  source 1..120: mol_type = other DNA
cagggtgagtactgggggagcagttaggaaacaggaacctggatacagaaagggctatctgggcccagatcagctctgcctggggctgaacttgagaagctggggagaatgtaggagctt

SEQ ID NO: 41166 - DNA, 120 bp, synthetic construct
  source 1..120: mol_type = other DNA
atcttcttggcccctgccctcccttccctcctttcctctcatgctctggccaataaaggggctgggggcgggggagcgggtgggcaggactctgggatctaactggcagagtggtctggc

SEQ ID NO: 41167 - DNA, 120 bp, synthetic construct
  source 1..120: mol_type = other DNA
ccagtgtgtaaccctcaccttcccctctggccatcaggaaaaggccgctatggcgaagtgtggcggggcttgtggcacggtgagagtgtggccgtcaagatcttctcctcgagggatgaa

SEQ ID NO: 41168 - DNA, 120 bp, synthetic construct
  source 1..120: mol_type = other DNA
tcacccaacctttctgcacacaggcttcatcgcctcagacatgacctcccgcaactcgagcacgcagctgtggctcatcacgcactaccacgagcacggctccctctacgactttctgca

SEQ ID NO: 41169 - DNA, 120 bp, synthetic construct
  source 1..120: mol_type = other DNA
agcgattacctggacatcggcaacaacccgagagtgggcaccaagcggtacatggcacccgaggtgctggacgagcagatccgcacggactgctttgagtcctacaagtggactgacatc

SEQ ID NO: 41170 - DNA, 120 bp, synthetic construct
  source 1..120: mol_type = other DNA
ttagaacagtatctagagctaaatattagtggctgttattgttgtagatagaatgagtgcctgacatcatattgtccccattttacagttgaggagacgggggcacagaatgacagtggg

SEQ ID NO: 41171 - DNA, 120 bp, synthetic construct
  source 1..120: mol_type = other DNA
gttttcagaaagctcctactaaaaactgtgaacttgggataccaagaggagggggtcagtgctggctgcaggagtcagcagaggcctgtgccatccctgacactgggtgatgttatgtgg

SEQ ID NO: 41172 - DNA, 120 bp, synthetic construct
  source 1..120: mol_type = other DNA
tgcttcatctcatagatactgagtgtcctggttagggcacctctctaggtactccctctttcaaccctggcccatgctccctgcccccagggccatctggtcattctgggattttaagaa

SEQ ID NO: 41173 - DNA, 120 bp, synthetic construct
  source 1..120: mol_type = other DNA
tgtatgcattcctgtacacacacacatacactcactttcaggagccagaagtggggccagctcatttcaggccctgggatgggttgatgagcttcctgggatgggttgatgagctttttg

SEQ ID NO: 41174 - DNA, 120 bp, synthetic construct
  source 1..120: mol_type = other DNA
acagtccagagaagcctaaagtgattcaatagcccaggagcacctgattcctttctgcctgcagggggctgggggggtggggggcagtggatggtgccctatctgggtagaggtagtgtg

SEQ ID NO: 41175 - DNA, 120 bp, synthetic construct
  source 1..120: mol_type = other DNA
gcatgatcccagctcaccgcaacgtctacctcccaggttcaaatcattctcttgcctcagactcccgagtagctgggattacaggcacatgccaccatgcctggctaattttgtatattt

SEQ ID NO: 41176 - DNA, 120 bp, synthetic construct
  source 1..120: mol_type = other DNA
cagagtagcctccccaggccggcatcttatgtgtgtcttccaccatcctcatggtggcacttttctaggcctgtctcccagcattgtgcaaggctcggaagagaaccaggaagtgaaact

SEQ ID NO: 41177 - DNA, 120 bp, synthetic construct
  source 1..120: mol_type = other DNA
catgtctacttctttctacacagacacggcaaccatccgatttctcaatcttttccccacctttcccccacttctattccaccaaaccgccattgtcatcctggcccgttctcaaggagc

SEQ ID NO: 41178 - DNA, 120 bp, synthetic construct
  source 1..120: mol_type = other DNA
atcacaggcactcggcaggctgaggcaggagaatcaggcagggaggttgcagtgagctgagatggcagcagtacagtccagccttggctcggcatcagagggagaccgtggaaagagagg

SEQ ID NO: 41179 - DNA, 120 bp, synthetic construct
  source 1..120: mol_type = other DNA
aacacatttcgcagatatatctatctgcatgcatgacacggtccctcaccccttcaaggttttgctcaaaatgtcactttctcagggaggctttctctgagctccttttaaattcaactc

SEQ ID NO: 41180 - DNA, 120 bp, synthetic construct
  source 1..120: mol_type = other DNA
ctgcctgtctcggcctcccaaaatgctgggattacaggcatgagccaccatacccagccggttttttttttttttttttttttttggggggggggtattctatcatgttttgattttaaa

SEQ ID NO: 41181 - DNA, 120 bp, synthetic construct; identical to SEQ ID NO: 25776
  source 1..120: mol_type = other DNA

SEQ ID NO: 41182 - DNA, 120 bp, synthetic construct
  source 1..120: mol_type = other DNA
ttgcagtgagctgaaatcatgccactgcactccagcctgggtgacaggtttttctgagactccatctcaaaaaaaaaaaaagtattgtgcaaacaattgcttacactgctaccaaagtaa

SEQ ID NO: 41183 - DNA, 120 bp, synthetic construct
  source 1..120: mol_type = other DNA
gtgcacattgtgcaggttagttacatatgtatacatgtgccatgctggtgcgctgcacccactaacgtgtcatctagcattaggtatatctcccaatgctatccctcccccctcccccga

SEQ ID NO: 41184 - DNA, 120 bp, synthetic construct
  source 1..120: mol_type = other DNA
ggccatggcaaggaggttgagtgatagcctaataatctaagagcatgggggccttgaatgtgagattttaaaaatattgcaactgggcgtggtggcttacgcctgtaatcccagcacttt

SEQ ID NO: 41185 - DNA, 120 bp, synthetic construct; identical to SEQ ID NO: 11296
  source 1..120: mol_type = other DNA

SEQ ID NO: 41186 - DNA, 120 bp, synthetic construct; identical to SEQ ID NO: 3173
  source 1..120: mol_type = other DNA

SEQ ID NO: 41187 - DNA, 120 bp, synthetic construct; identical to SEQ ID NO: 11298
  source 1..120: mol_type = other DNA

SEQ ID NO: 41188 - DNA, 120 bp, synthetic construct; identical to SEQ ID NO: 11299
  source 1..120: mol_type = other DNA

SEQ ID NO: 41189 - DNA, 120 bp, synthetic construct; identical to SEQ ID NO: 11300
  source 1..120: mol_type = other DNA

SEQ ID NO: 41190 - DNA, 120 bp, synthetic construct; identical to SEQ ID NO: 11301
  source 1..120: mol_type = other DNA

SEQ ID NO: 41191 - DNA, 120 bp, synthetic construct; identical to SEQ ID NO: 11302
  source 1..120: mol_type = other DNA

SEQ ID NO: 41192 - DNA, 120 bp, synthetic construct
  source 1..120: mol_type = other DNA
gttttgaaagggaatgcttccagtttttgcccattcagtatgatattggctatgggtttgtcataaatagctcttattattttgagatacatcccatcaatacctaatttattgagagtt

SEQ ID NO: 41193 - DNA, 120 bp, synthetic construct
  source 1..120: mol_type = other DNA
gatcgccagcctggttgacagcgcgagactcccgctcaaaataagaaaaaaaaaaagtactcgtgctttttttcctcctcaaaacaacatatcttgcaaaaaagtaacccacaattacag

SEQ ID NO: 41194 - DNA, 120 bp, synthetic construct
  source 1..120: mol_type = other DNA
ttaagtactcctgagtcatattctacactttttattcatttttcaatattttaaaatgaatgccatttatgcagccaaaatacacatgaaaaaatgctcatcatcactggccatcagaga

SEQ ID NO: 41195 - DNA, 120 bp, synthetic construct
  source 1..120: mol_type = other DNA
aagaacaaaaaaccaaacaccgcatattctcactcataggtgggaattgagcaatgagatcacatggacacaggaagggcaacatcacactctggggactgttgtcgggtgaggggagag

SEQ ID NO: 41196 - DNA, 120 bp, synthetic construct; identical to SEQ ID NO: 31477
  source 1..120: mol_type = other DNA

SEQ ID NO: 41197 - DNA, 120 bp, synthetic construct
  source 1..120: mol_type = other DNA
tatagcagcatgatttataatcctttgggtatatacccagtaatgggatggctgtgtcaaatggtatttctagttctagatccctgaggaatcaccacactgacttccacaatggttgaa

SEQ ID NO: 41198 - DNA, 120 bp, synthetic construct; identical to SEQ ID NO: 29695
  source 1..120: mol_type = other DNA

SEQ ID NO: 41199 - DNA, 120 bp, synthetic construct
  source 1..120: mol_type = other DNA
tttggctgcataaatgtcttcttttgagaagtgtctgttcatatcctttgcaaactttttgatggggttgtttgtttttttcttgtaaatttgtttgatttcattgtcgagtctagatat

SEQ ID NO: 41200 - DNA, 120 bp, synthetic construct
  source 1..120: mol_type = other DNA
tccttgaagaggtccttcacatcccttgtaagttggattcctaggtattttattctctttgaagcaactgtgaatggtagttcactcatgatttggctctctgtttgtctgttattggta

SEQ ID NO: 41201 - DNA, 120 bp, synthetic construct
  source 1..120: mol_type = other DNA
agatcctgttattggtctattcagagattcaacttcttcccggtttagtcttgggagggtgtatgtgttgaggaatttatccatttcttctagattttctagtttatttgtgtagaggtg

SEQ ID NO: 41202 - DNA, 120 bp, synthetic construct
  source 1..120: mol_type = other DNA
gtaggtcactaaggacttgctttatgaatctgggtgctcctgttttgggtgcatatatatttaggatagttagctcttcttgttgaattgatccctttaccattatgtaatggccttctt

SEQ ID NO: 41203 - DNA, 120 bp, synthetic construct
  source 1..120: mol_type = other DNA
tatttcttggaggctttgctcatttctttttattcttttttctctaaacttgtttcatttcattcatttcatcttccatcactgataccctttcttccagttgatcgcatcggctcctga

SEQ ID NO: 41204 - DNA, 120 bp, synthetic construct; identical to SEQ ID NO: 29696
  source 1..120: mol_type = other DNA

SEQ ID NO: 41205 - DNA, 120 bp, synthetic construct
  source 1..120: mol_type = other DNA
aaaccataaactccctagaagaaaacctaggcaataccattcaggacataggcacgggcagacttcatgtctcaaacccccaaagcaatggcaacaaaagccaaaattgacaaatcggat

SEQ ID NO: 41206 - DNA, 120 bp, synthetic construct
  source 1..120: mol_type = other DNA
ctgtggctgcatactttctaatcatttctcttaaggtaatagtcattttgaaatatcactgtctagcttttgaatgtgtttgctcttgcttttctagttcttttaatcacttcttttttc

SEQ ID NO: 41207 - DNA, 120 bp, synthetic construct
  source 1..120: mol_type = other DNA
tgtacaaaaatcacaagcattcttatacaccaataacagacagagagtgaaatcatgagtgaactcccatttacaattgcttcaaagagaatgagatacttaggaatccaacttacaagg

SEQ ID NO: 41208 - DNA, 120 bp, synthetic construct
  source 1..120: mol_type = other DNA
aacagccccatcaaaaagtgggcaaaggacatggacagacacttctcaaaagaagacatttatgcagccaaaaaacacatgaaaaaatgctcatcatcactggccatcagagaaatgcaa

SEQ ID NO: 41209 - DNA, 120 bp, synthetic construct; identical to SEQ ID NO: 29697
  source 1..120: mol_type = other DNA

SEQ ID NO: 41210 - DNA, 120 bp, synthetic construct
  source 1..120: mol_type = other DNA
tggtagctctatttttagtgttttgaggaacctccaaactgttctccatagtggtcatactaatttacattcccaccaacattgtatgcaggttgccttttctctacatcctcaccagca

SEQ ID NO: 41211 - DNA, 120 bp, synthetic construct
  source 1..120: mol_type = other DNA
gtaatgggatggctgggtcaaatggtatttctagttctagatccctgaggaattgccacactgacttccacaatggttgaactagtttacagtcccaccaacagtgtaaaagtgttccta

SEQ ID NO: 41212 - DNA, 120 bp, synthetic construct
  source 1..120: mol_type = other DNA
cctgggatgcaaggctggttcaacatacaaaaatcaataaacgtaatccagcatatagacagaaccaaagacaaaaaccacatgattatctcaatagatgcagaaaaggcctttgacaaa

SEQ ID NO: 41213 - DNA, 120 bp, synthetic construct
  source 1..120: mol_type = other DNA
gaaataacgccgcatatctacaactatctgatctttgacaaacctgagaaaaaccagcaatggggaaaggattccctatttaataaatggtgctgggaaaactggctagccatatgtaga

SEQ ID NO: 41214 - DNA, 120 bp, synthetic construct; identical to SEQ ID NO: 29698
  source 1..120: mol_type = other DNA

SEQ ID NO: 41215 - DNA, 120 bp, synthetic construct; identical to SEQ ID NO: 29699
  source 1..120: mol_type = other DNA

SEQ ID NO: 41216 - DNA, 120 bp, synthetic construct; identical to SEQ ID NO: 29700
  source 1..120: mol_type = other DNA

SEQ ID NO: 41217 - DNA, 120 bp, synthetic construct; identical to SEQ ID NO: 21935
  source 1..120: mol_type = other DNA

SEQ ID NO: 41218 - DNA, 120 bp, synthetic construct
  source 1..120: mol_type = other DNA
aaatcctttacagacaagcaaatgctgagagatttcgtcaccaccaggcctgccctaaaagagctcctgaaggaagcactaaacatggaaaggaacaaccggtaccagccactgcaaaaa

SEQ ID NO: 41219 - DNA, 120 bp, synthetic construct
  source 1..120: mol_type = other DNA
aggaaagatctaaaattgacaccctaacatcacaatcaaaagaagtagagaagcaagagcatacacactcaaaagctagcagaaggcaagaaataactaagatcagagcacaactgaagg

SEQ ID NO: 41220 - DNA, 120 bp, synthetic construct
  source 1..120: mol_type = other DNA
aaggctggttcaacatacgaaaatcaataaatgtaatccagcatataaacagaaccaaaggcaaaaaccacatgattatctcaatagatgcagaaaaggcctttgacaaaattaaacaac

SEQ ID NO: 41221 - DNA, 120 bp, synthetic construct
  source 1..120: mol_type = other DNA
caaacctgacaaaaagaagaaatggggaaaggattccctatttaataaatggtgctgggaaaactggctacccatatgtagaaagctgaaactggatcccttccttacaccttatacaaa

SEQ ID NO: 41222 - DNA, 120 bp, synthetic construct
  source 1..120: mol_type = other DNA
ccaacaatgatagactggattaagaaaatgtggcacgtatacaccatatactatgcagccataaaaaaggatgagttcatgtcctttgtagggacatggatgaagctggaaaccatcatt

SEQ ID NO: 41223 - DNA, 120 bp, synthetic construct; identical to SEQ ID NO: 21936
  source 1..120: mol_type = other DNA

SEQ ID NO: 41224 - DNA, 120 bp, synthetic construct
  source 1..120: mol_type = other DNA
atgattgccattctaactggtgtgagatgatatctcattgtggttttgatttgcatttctctgatggccagtgatgatgagcattttttcatgtgttttttggctgcacaaggttttttt

SEQ ID NO: 41225 - DNA, 120 bp, synthetic construct
  source 1..120: mol_type = other DNA
atatgtaccacatttcctttatccagtctctcactcatgggcatttgggttgattccacgtcactgctactgtgaatagtgccgcaatgaacatgtgcatgcatgtatctttgtaataga

SEQ ID NO: 41226 - DNA, 120 bp, synthetic construct
  source 1..120: mol_type = other DNA
agtttttgggtttacatttgagtttttaatctatcttgagttaatttttgtataaggtggaacaaaggggtccagtttcaattttctgcatgtggctagccagttctcccagtaccattt

SEQ ID NO: 41227 - DNA, 120 bp, synthetic construct
  source 1..120: mol_type = other DNA
gacttgccagtagctgggattacagacgtgcactgccacacttggctaatttttgtatttttagtagatacaaggtttcactgtgttggtcaggctggtctccaactcctgtcctcatgt

SEQ ID NO: 41228 - DNA, 120 bp, synthetic construct
  source 1..120: mol_type = other DNA
cccttgttagctgtattcctaggtattttattctctttgtagcaactgtgagtgggagttcattcatgatttcactctctgcttttctgttgttggtgtaggagtgctagttatttttgc

SEQ ID NO: 41229 - DNA, 120 bp, synthetic construct
  source 1..120: mol_type = other DNA
tccccattgcttgtttttctcaggtttgtcaaagaccagatagttgtagatatgtggccttatttctgagggctctgttttgttccattgatctatatctctgttttggtatgagtacca

SEQ ID NO: 41230 - DNA, 120 bp, synthetic construct
  source 1..120: mol_type = other DNA
ggttttcatctttggttctgtttatatgctagattacatttattgatttgcgtatattgaaccagccttgcatcccagggatgaagcccacttgatcatggtggataagctttttgatgt

SEQ ID NO: 41231 - DNA, 120 bp, synthetic construct
  source 1..120: mol_type = other DNA
tgcaatttctgttcttttacatttgctgaggagagctttacttccaactatgtggtcaattttggaataggtgtggtgtggtgctgaaaaaaatgtatattctgttgatttggggtggag

SEQ ID NO: 41232 - DNA, 120 bp, synthetic construct
  source 1..120: mol_type = other DNA
ggagctcttgtagggcaggcctggtggtgacaaaatctctcagcatttgcttgtctgtaaaggattttatttctccttcacttatgaagcttagtttggctggatatgaaattctgggtt

SEQ ID NO: 41233 - DNA, 120 bp, synthetic construct
  source 1..120: mol_type = other DNA
tcaaagtcattctccattcagctttattccgttgctggtgaggaactgcgttcctttggaggaggagaggcgctctcctttatagagtttccagtttttctgctctgttttttctccatc

SEQ ID NO: 41234 - DNA, 120 bp, synthetic construct; identical to SEQ ID NO: 11475
  source 1..120: mol_type = other DNA

SEQ ID NO: 41235 - DNA, 120 bp, synthetic construct
  source 1..120: mol_type = other DNA
cgtacaagtctgaagttagttcaaataaaaagttaaaaaggaaagagagaaatagaaaatcactattagggccgggcatggtggctcacgtctgtaatcccagcactttgggaggccaag

SEQ ID NO: 41236 - DNA, 120 bp, synthetic construct
  source 1..120: mol_type = other DNA
agggtagggaacggggctgtgctgaaggcgaccggcggagcccagcacttgggtagacaggaaggacacggtgctcctcggtcctcccaggcctcagtttccccatctgaccacgcatgg

SEQ ID NO: 41237 - DNA, 120 bp, synthetic construct
  source 1..120: mol_type = other DNA
atcaggaacctcgtacagggactgtgtagacaaggtatgtggccagttttctcaaggggcttttatcggttctataaatcaagtttgattccttaaaggaaagcacaacattccagtcaa

SEQ ID NO: 41238 - DNA, 120 bp, synthetic construct
  source 1..120: mol_type = other DNA
taagtgtcttagtctgtgttgctataaaggagtacctgagactgggtaatttataaagaaaagaggtttatttgattcactgcaggctgtacaggaagcatggcacaggcatctgcttct

SEQ ID NO: 41239 - DNA, 120 bp, synthetic construct
  source 1..120: mol_type = other DNA
catcacctccatctttatgtccatgtgcgcgcattgtttagcccatgcttataagtgagaatatgcagtgtttgattttgtgtttctgagttagttcacttaggataatggcctccagct

SEQ ID NO: 41240 - DNA, 120 bp, synthetic construct
  source 1..120: mol_type = other DNA
agtgcatgtcctttgtagggacatggatgaagctggaaaccattattatcagcaaactatcacaaggaaaaaaaccaaacaccgcatgttctcactcataggtgggaattaaacaatgag

SEQ ID NO: 41241 - DNA, 120 bp, synthetic construct
  source 1..120: mol_type = other DNA
agaataaccaatatagagaagtgcttaaaggagctgatggagctgaaagccaaggctcaagaactacgtgaagaatgcagaagcctcaggagctgatgtgatcaactggaagaaagggta

SEQ ID NO: 41242 - DNA, 120 bp, synthetic construct
  source 1..120: mol_type = other DNA
atcctagtctctgataaaacagactttaaaccaacaaagatcaaaagagacaaagaaggccattacataatggtaaagggatcaattcaacaagaagagctaactatccgaaatatatat

SEQ ID NO: 41243 - DNA, 120 bp, synthetic construct
  source 1..120: mol_type = other DNA
tacacaaataaattagaaaatctagaagaaatggataaattcctcgacacatacactctcccaagactaaaccaggaagaagttgaatctctgaatagaccaataacaggagctgaaatt

SEQ ID NO: 41244 - DNA, 120 bp, synthetic construct
  source 1..120: mol_type = other DNA
ttaggaatccaacttacaagggacctgaaggacctcttcaaggagaactacaaaccactgctcaatgaaataaaacaggatacaaagaaatggaagaagattccatgctcatgggtagga

SEQ ID NO: 41245 - DNA, 120 bp, synthetic construct
  source 1..120: mol_type = other DNA
tttacaagaaaaaaacaaacaaccccatcgaaaagtgggcaaaggatatgagcagatacttctcaaaagaagacatttatgcagccaaaagacacatgaaaaaatgctcatcatcactgg

SEQ ID NO: 41246 - DNA, 120 bp, synthetic construct; identical to SEQ ID NO: 26482
  source 1..120: mol_type = other DNA

SEQ ID NO: 41247 - DNA, 120 bp, synthetic construct; identical to SEQ ID NO: 26483
  source 1..120: mol_type = other DNA

SEQ ID NO: 41248 - DNA, 120 bp, synthetic construct; identical to SEQ ID NO: 26484
  source 1..120: mol_type = other DNA

SEQ ID NO: 41249 - DNA, 120 bp, synthetic construct; identical to SEQ ID NO: 26485
  source 1..120: mol_type = other DNA

SEQ ID NO: 41250 - DNA, 120 bp, synthetic construct; identical to SEQ ID NO: 26486
  source 1..120: mol_type = other DNA

SEQ ID NO: 41251 - DNA, 120 bp, synthetic construct; identical to SEQ ID NO: 33080
  source 1..120: mol_type = other DNA

SEQ ID NO: 41252 - DNA, 120 bp, synthetic construct; identical to SEQ ID NO: 10822
  source 1..120: mol_type = other DNA

SEQ ID NO: 41253 - DNA, 120 bp, synthetic construct
  source 1..120: mol_type = other DNA
gggtggctgccgggcggagaggctcctcacttctcagacggggcagctgccgggcggaggggctcctcacttctcagacggggtggttgccaggcagagggtctcctcacttctcagatg

SEQ ID NO: 41254 - DNA, 120 bp, synthetic construct; identical to SEQ ID NO: 10823
  source 1..120: mol_type = other DNA

SEQ ID NO: 41255 - DNA, 120 bp, synthetic construct
  source 1..120: mol_type = other DNA
agcagtgtagaagcgttccctgtttaccacatccacacacaaacatctactgttttttgattttttagttatggccattcttgcaggagtaagtggtattgcattgtgattttgatttgc

SEQ ID NO: 41256 - DNA, 120 bp, synthetic construct
  source 1..120: mol_type = other DNA
aataatgccgcaataaacatactttgacaaactgagaaaaacaagcaatggggaaaggattccctatttaataaatggtgctgggaaaactggctagccatatgtagaaagctgaaactg

SEQ ID NO: 41257 - DNA, 120 bp, synthetic construct; identical to SEQ ID NO: 26264
  source 1..120: mol_type = other DNA

SEQ ID NO: 41258 - DNA, 120 bp, synthetic construct; identical to SEQ ID NO: 26265
  source 1..120: mol_type = other DNA

SEQ ID NO: 41259 - DNA, 120 bp, synthetic construct; identical to SEQ ID NO: 15680
  source 1..120: mol_type = other DNA

SEQ ID NO: 41260 - DNA, 120 bp, synthetic construct; identical to SEQ ID NO: 15681
  source 1..120: mol_type = other DNA

SEQ ID NO: 41261 - DNA, 120 bp, synthetic construct
  source 1..120: mol_type = other DNA
gtgcatcataagcagtcacatcttcccttggggccagtggctgacgctaatctaatacatcaaaaccatgagatgctatgaaacccggagcaaacgcttgatgccaaattctcccagctt

SEQ ID NO: 41262 - DNA, 120 bp, synthetic construct
  source 1..120: mol_type = other DNA
tgcctggccatcagcacgaatcatgctatttcccacaactcggagagaaatgtgttggaatgaaggtggcaaccaactctagcagatttccttccaaatctggagggcttaaggagacag

SEQ ID NO: 41263 - DNA, 120 bp, synthetic construct; identical to SEQ ID NO: 15682
  source 1..120: mol_type = other DNA

SEQ ID NO: 41264 - DNA, 120 bp, synthetic construct; identical to SEQ ID NO: 15672
  source 1..120: mol_type = other DNA

SEQ ID NO: 41265 - DNA, 120 bp, synthetic construct; identical to SEQ ID NO: 15673
  source 1..120: mol_type = other DNA

SEQ ID NO: 41266 - DNA, 120 bp, synthetic construct; identical to SEQ ID NO: 15674
  source 1..120: mol_type = other DNA

SEQ ID NO: 41267 - DNA, 120 bp, synthetic construct
  source 1..120: mol_type = other DNA
aactggaagaaagggtatcagcaatggaagatgaaatgaataaaatgaagcgagaagagaagtttagagaaaaaagaataaaaagaaatgaacaaagcctccaagaaatatgggactatg

SEQ ID NO: 41268 - DNA, 120 bp, synthetic construct
  source 1..120: mol_type = other DNA
aaaaaggcaggggttgcaatcctagtctgataaaacagactttaatccaacaaagatcaaaagagacaaagaaggccattacataatggtaaagggatcaattcaacaagaagagctaac

SEQ ID NO: 41269 - DNA, 120 bp, synthetic construct
  source 1..120: mol_type = other DNA
aaaagagacaagaatcaaatagatgcaataaaaaatgataaagcagatatcaccactgatcccacagaaatacaaactgccatcagagataccataaacacctctatgcaaataaactag

SEQ ID NO: 41270 - DNA, 120 bp, synthetic construct
  source 1..120: mol_type = other DNA
cagcccaaaatctccttgagctgataggcaacttccgcaaagtctgaggatacaaaatcaatgtgcaaaaatcacagtctttcttatacaccagtaacagataaacagagagccaaatca

SEQ ID NO: 41271 - DNA, 120 bp, synthetic construct
  source 1..120: mol_type = other DNA
tgggtgcagcacaccaacatggcacatgtatacatatgtaacaaacctgcacgttgtgcacatgtaccctaaaacttaaagtataattaaaaaaaggcaactgatttctatgtattaatt

SEQ ID NO: 41272 - DNA, 120 bp, synthetic construct; identical to SEQ ID NO: 15675
  source 1..120: mol_type = other DNA

SEQ ID NO: 41273 - DNA, 120 bp, synthetic construct
  source 1..120: mol_type = other DNA
ggtatatacccaaaggattataaatcatgctgctataaagacacatgcacacatatgtttattgtggcactattcacaatagcaaagacttggaaccaacccaaatgtccaacagtgatt

SEQ ID NO: 41274 - DNA, 120 bp, synthetic construct; identical to SEQ ID NO: 15677
  source 1..120: mol_type = other DNA

SEQ ID NO: 41275 - DNA, 120 bp, synthetic construct; identical to SEQ ID NO: 15678
  source 1..120: mol_type = other DNA

SEQ ID NO: 41276 - DNA, 120 bp, synthetic construct; identical to SEQ ID NO: 15679
  source 1..120: mol_type = other DNA

SEQ ID NO: 41277 - DNA, 120 bp, synthetic construct; identical to SEQ ID NO: 27000
  source 1..120: mol_type = other DNA

SEQ ID NO: 41278 - DNA, 120 bp, synthetic construct; identical to SEQ ID NO: 27001
  source 1..120: mol_type = other DNA

SEQ ID NO: 41279 - DNA, 120 bp, synthetic construct
  source 1..120: mol_type = other DNA
cagaaaccaaaacagcatggtactgctaccaaaacagacatacagatcaatggaacagaacagagccctcagaaataatgccacatatctacaactatctgatctttgacaaacctgaca

SEQ ID NO: 41280 - DNA, 120 bp, synthetic construct
  source 1..120: mol_type = other DNA
tataaagacacatgcacacgtatgttcattgcagcactatttacaatagcaaagacttggaaccaacccaaatgtccaacaacgatagactggattaagaaaatgtggcacatatacacc

SEQ ID NO: 41281 - DNA, 120 bp, synthetic construct; identical to SEQ ID NO: 27002
  source 1..120: mol_type = other DNA

SEQ ID NO: 41282 - DNA, 120 bp, synthetic construct; identical to SEQ ID NO: 27003
  source 1..120: mol_type = other DNA

SEQ ID NO: 41283 - DNA, 120 bp, synthetic construct
  source 1..120: mol_type = other DNA
tatatacacacatatacacacatatatatactttaagttctggggtacatgtgcagaatgtgcaggttacataggtatacacgtgccagggtggtttgctgcacccattaacccgtcatc

SEQ ID NO: 41284 - DNA, 120 bp, synthetic construct
  source 1..120: mol_type = other DNA
tcgggttacccacaaagggaagcccgtcaaactcacagctgttctctccacagaaagtctacaagccagaagagagtgggggctaatattcaacattcttaatttttgatcttttttaat

SEQ ID NO: 41285 - DNA, 120 bp, synthetic construct; identical to SEQ ID NO: 5591
  source 1..120: mol_type = other DNA

SEQ ID NO: 41286 - DNA, 120 bp, synthetic construct; identical to SEQ ID NO: 27360
  source 1..120: mol_type = other DNA

SEQ ID NO: 41287 - DNA, 120 bp, synthetic construct; identical to SEQ ID NO: 27361
  source 1..120: mol_type = other DNA

SEQ ID NO: 41288 - DNA, 120 bp, synthetic construct; identical to SEQ ID NO: 27353
  source 1..120: mol_type = other DNA

SEQ ID NO: 41289 - DNA, 120 bp, synthetic construct; identical to SEQ ID NO: 27354
  source 1..120: mol_type = other DNA

SEQ ID NO: 41290 - DNA, 120 bp, synthetic construct; identical to SEQ ID NO: 27355
  source 1..120: mol_type = other DNA

SEQ ID NO: 41291 - DNA, 120 bp, synthetic construct; identical to SEQ ID NO: 27356
  source 1..120: mol_type = other DNA

SEQ ID NO: 41292 - DNA, 120 bp, synthetic construct; identical to SEQ ID NO: 27357
  source 1..120: mol_type = other DNA

SEQ ID NO: 41293 - DNA, 120 bp, synthetic construct; identical to SEQ ID NO: 27358
  source 1..120: mol_type = other DNA

SEQ ID NO: 41294 - DNA, 120 bp, synthetic construct; identical to SEQ ID NO: 27359
  source 1..120: mol_type = other DNA

SEQ ID NO: 41295 - DNA, 120 bp, synthetic construct; identical to SEQ ID NO: 27362
  source 1..120: mol_type = other DNA

SEQ ID NO: 41296 - DNA, 120 bp, synthetic construct; identical to SEQ ID NO: 27363
  source 1..120: mol_type = other DNA

SEQ ID NO: 41297 - DNA, 120 bp, synthetic construct; identical to SEQ ID NO: 27364
  source 1..120: mol_type = other DNA

SEQ ID NO: 41298 - DNA, 120 bp, synthetic construct; identical to SEQ ID NO: 27365
  source 1..120: mol_type = other DNA

SEQ ID NO: 41299 - DNA, 120 bp, synthetic construct; identical to SEQ ID NO: 27366
  source 1..120: mol_type = other DNA

SEQ ID NO: 41300 - DNA, 120 bp, synthetic construct; identical to SEQ ID NO: 12879
  source 1..120: mol_type = other DNA

SEQ ID NO: 41301 - DNA, 120 bp, synthetic construct
  source 1..120: mol_type = other DNA
tctataaaattagaataagagttgttcagatatagtatctcataggaagcattcaaataccttaactatcggggaggagccaagatggccgaataggaacagctccggtctacagctccc

SEQ ID NO: 41302 - DNA, 120 bp, synthetic construct
  source 1..120: mol_type = other DNA
taaaacgcagagcgcctctcctcctccaaaggaacgcagttcctcaccagcaacggaacaaagctggatggagaatgactttgacgagctgagagaagaaggcttcagaaaatcaaatta

SEQ ID NO: 41303 - DNA, 120 bp, synthetic construct
  source 1..120: mol_type = other DNA
gagactaggaagaaactgcatcaactaatgagcaaaatcaccagctaacatcataatgacaggatcaaattcacacataacaatattaactttaaatgtaaatggactaaattctccaat

SEQ ID NO: 41304 - DNA, 120 bp, synthetic construct
  source 1..120: mol_type = other DNA
gaactgaaggaaatagagacacaaaaaacccttcaaaaaatcaatgaatccaggaagctggttttttgaaaggatcaacaaaattgatagaccgctagcaagactaataaagaaaaaaag

SEQ ID NO: 41305 - DNA, 120 bp, synthetic construct
  source 1..120: mol_type = other DNA
gcaaaaactggaagcattccctttggaaactggcacaagacagggatgccctctctcaccactcctattcaacatagtgttggaagttctggccagggcaatcaggcaggagaaggaaat

SEQ ID NO: 41306 - DNA, 120 bp, synthetic construct
  source 1..120: mol_type = other DNA
tagccatatgtagaaagctaaaactggatcccttccttacaccttatacaaaaatcaatttaagatggattaaagatttaaacgttagacctaaaaccataaaaaccctagaagaaaacc

SEQ ID NO: 41307 - DNA, 120 bp, synthetic construct
  source 1..120: mol_type = other DNA
tatcctttgtagggacatggatgaaattggaaatcatcattctcagtaaactatcacaagaacaaaaaaccaaacaccgtatattctcactcataggtgggaattgaacaatgagatcag

SEQ ID NO: 41308 - DNA, 120 bp, synthetic construct
  source 1..120: mol_type = other DNA
gcacacctgctgtctctttacagcttttggcatcttaacgtctacacttgaagagcattaaaacaaagggatctagaactagaaataccattttgacccagccattctattactgggtat

SEQ ID NO: 41309 - DNA, 120 bp, synthetic construct
  source 1..120: mol_type = other DNA
caggcagatcatgaggtcagaagatcgagaccatcctggccaacatgggaaaccccatctatactaaaatttcaaaaatcagttgggtgtagtggcgcgtgcctgtaatcccagttactc

SEQ ID NO: 41310 - DNA, 120 bp, synthetic construct
  source 1..120: mol_type = other DNA
acggcggaagccattccttattttgtctcacaggggacctcatggaagttctgccaattaactcaggtagtggtcataagttgaaaaaagctcccaaatgaattttgtgatataacctca

SEQ ID NO: 41311 - DNA, 120 bp, synthetic construct
  source 1..120: mol_type = other DNA
agaaatattctacccaaatgagaaggaaccagaaaaataattctggtaatatgacaaaacaaggctctataaaacatgcaaaagaacacactaacggtccagcaatggatccagatcaag

SEQ ID NO: 41312 - DNA, 120 bp, synthetic construct; identical to SEQ ID NO: 12883
  source 1..120: mol_type = other DNA

SEQ ID NO: 41313 - DNA, 120 bp, synthetic construct
  source 1..120: mol_type = other DNA
gatatctcatagtggttttgatttgcatttctctgatggccagtgatgatgagcatttcttcatgtgttttttacaaacagagagccaaatcatgagtgaactcccattcacaattgctt

SEQ ID NO: 41314 - DNA, 120 bp, synthetic construct
  source 1..120: mol_type = other DNA
caaccccatcaaaaagtgggcgaaggacatgagcagacacttctcaaaagaaaatagatactttaatacattagtgttgaaaatatgtcagtacaatcagtatgcaaagcaatttggcaa

SEQ ID NO: 41315 - DNA, 120 bp, synthetic construct
  source 1..120: mol_type = other DNA
gcttaaatccaggagtttgaggttgcagtgagctatgattatgccaccgcactccagcctgggcaatagaacaacactcttctctgaaaaagaaaaaattatttttctcagcaaggttct

SEQ ID NO: 41316 - DNA, 120 bp, synthetic construct; identical to SEQ ID NO: 25510
  source 1..120: mol_type = other DNA

SEQ ID NO: 41317 - DNA, 120 bp, synthetic construct; identical to SEQ ID NO: 25511
  source 1..120: mol_type = other DNA

SEQ ID NO: 41318 - DNA, 120 bp, synthetic construct
  source 1..120: mol_type = other DNA
ttctcactgttcaattcccatctatgagtgagaacatgcggtgtttcgttttttgtccttgcgatagtttactgagaatgatgatttccaatttcatccatgtccctacaaaggacatga

SEQ ID NO: 41319 - DNA, 120 bp, synthetic construct
  source 1..120: mol_type = other DNA
gttgaacaatgagaacatatggacacagggaggggaacatcacgcaccagggcctattgggggtggggaactatgggagcgatagcattaggagaaatacctaatgtagatgatgggttg

SEQ ID NO: 41320 - DNA, 120 bp, synthetic construct
  source 1..120: mol_type = other DNA
aacatcacaattaaaagatctagaaaagcaagagcaaacacattcaaaatctagcagaaggcaagaaataactaaaatcagagcagaactgaaggaaatagagacacaaaaaacccttca

SEQ ID NO: 41321 - DNA, 120 bp, synthetic construct
  source 1..120: mol_type = other DNA
accaaagctgggcagagacacaactaaaaaagagaattttagaccaatatccttgatgaacattgatgcaaaaatcctcaataaaatactggcaaaacgaatccagcagcacatcaaaaa

SEQ ID NO: 41322 - DNA, 120 bp, synthetic construct
  source 1..120: mol_type = other DNA
gaaaaaactactttaaagttcatagggaaccaaaaaagagcccgcattgccaagtcaatcctaagccaaaagaacaaagctggaggcatcacactacctgacttcaaactatactacaag

SEQ ID NO: 41323 - DNA, 120 bp, synthetic construct
  source 1..120: mol_type = other DNA
ccaaaggactataaatcatgctgctataaagacacatgcacacgtatgtttattgtggcactattcacaatagcaaagacttggaaccaacccaaacgtccaacaatgatagactagatt

SEQ ID NO: 41324 - DNA, 120 bp, synthetic construct
  source 1..120: mol_type = other DNA
attaggtatatctcctaatactatccctccccgctacccccaccccacaacagtccccagagtgtaatattccccttcctgtgtccatgtgttctcattgttcaatgcccatctatgaat

SEQ ID NO: 41325 - DNA, 120 bp, synthetic construct
  source 1..120: mol_type = other DNA
aatctttaatccatcttgaattaatttttgtataaggtgtaaggaagggatccagttccagctttctacatatggctacccagttttcccagcaccatttattaaatggggaatcctttc

SEQ ID NO: 41326 - DNA, 120 bp, synthetic construct
  source 1..120: mol_type = other DNA
ggccagaacttccaacactctgttgaataggagtggtgagagagggcatccctgtcttgtgccagttttcaaagggaatgcttccagtttttgcccattcagtatgatattagctgtgag

SEQ ID NO: 41327 - DNA, 120 bp, synthetic construct
  source 1..120: mol_type = other DNA
ttgcgtctttgttctcgttggtttcaaagaatatctttatttctgccttcatttcattatatacccagtagtcattcaggaacaggttgttcagtttccatgtagttgagcggttttgag

SEQ ID NO: 41328 - DNA, 120 bp, synthetic construct
  source 1..120: mol_type = other DNA
tctgccgagagatccgctgttagtctgatgggcttccctttgtgggtaacctgacatttctctctgcctgcccttaacattttttccttcatttcaactttggtgaatctgacaattatg

SEQ ID NO: 41329 - DNA, 120 bp, synthetic construct
  source 1..120: mol_type = other DNA
ctagaggtccacttcagaccctgtttgcctgggtatcagcagcggtggctgcagaacagcagattttcgtgaaccacaaatgctgctgtctaatcgttcctctggaagttttgtctcaga

SEQ ID NO: 41330 - DNA, 120 bp, synthetic construct; identical to SEQ ID NO: 25512
  source 1..120: mol_type = other DNA

SEQ ID NO: 41331 - DNA, 120 bp, synthetic construct; identical to SEQ ID NO: 25513
  source 1..120: mol_type = other DNA

SEQ ID NO: 41332 - DNA, 120 bp, synthetic construct
  source 1..120: mol_type = other DNA
tggattcgtgctccagaaagaggtggggtggggggggggggaaagaaaagattaaaaaaaaaaagtcggatagtggagattcagcaaatacgggaaaaggaaaaaaacaaaaaccaaaaa

SEQ ID NO: 41333 - DNA, 120 bp, synthetic construct; identical to SEQ ID NO: 26618
  source 1..120: mol_type = other DNA

SEQ ID NO: 41334 - DNA, 120 bp, synthetic construct
  source 1..120: mol_type = other DNA
tgtctgacagccttgaagagagcagtggttctcccagcacgcagctggagatctgagaacgggcagactgcctcctcaagtgggtccctgacccctgacccccgagcagcctaactggga

SEQ ID NO: 41335 - DNA, 120 bp, synthetic construct
  source 1..120: mol_type = other DNA
aacagctgatctctcggcagaaaccctacaagccagaagagagtgggggccaatattcaacattcttaaagaaaagaattttcaacccagaatttcatatccagccaaactaagcttcat

SEQ ID NO: 41336 - DNA, 120 bp, synthetic construct
  source 1..120: mol_type = other DNA
acatagttggaagtaaagctctcctcagcaaatgtaaaagaacagaaattataacaaactgtctctcagaccacagtgcaatcaaactagaactcaggattaagaatctcactcaaagcc

SEQ ID NO: 41337 - DNA, 120 bp, synthetic construct
  source 1..120: mol_type = other DNA
tactggcaaaccgaatccagcagcacatcaaaaagcttatccaccatgaccaagtgggcttcatccctgggatgcaaggctggttcaatatacgcaaatcaataaatgtaatccagcata

SEQ ID NO: 41338 - DNA, 120 bp, synthetic construct
  source 1..120: mol_type = other DNA
gcttacctacaactatctgatctttgacaaaccttagaaaaacaagcaatggggaaaggattccctatttaataaatggtgctgggaaaactggctagccatatgtagaaagctgaaact

SEQ ID NO: 41339 - DNA, 120 bp, synthetic construct
  source 1..120: mol_type = other DNA
gcagacataaaaaatgatgagttcatgtcctttgtagggacatggatgaaattggaaaccatcattctcagtaaactatcgcaagatcaaaaaaccaaacactgcatattctcactcata

SEQ ID NO: 41340 - DNA, 120 bp, synthetic construct; identical to SEQ ID NO: 26619
  source 1..120: mol_type = other DNA

SEQ ID NO: 41341 - DNA, 120 bp, synthetic construct; identical to SEQ ID NO: 26620
  source 1..120: mol_type = other DNA

SEQ ID NO: 41342 - DNA, 120 bp, synthetic construct; identical to SEQ ID NO: 26621
  source 1..120: mol_type = other DNA

SEQ ID NO: 41343 - DNA, 120 bp, synthetic construct; identical to SEQ ID NO: 26622
  source 1..120: mol_type = other DNA

SEQ ID NO: 41344 - DNA, 120 bp, synthetic construct
  source 1..120: mol_type = other DNA
ccccgaatttcatatccagccaaattaagcttcataagtgaaggacaaataaaatactttatagacaagcaaatgctgagagattttgtcaccaccacgcctgccctaaaagagctcctg

SEQ ID NO: 41345 - DNA, 120 bp, synthetic construct
  source 1..120: mol_type = other DNA
actcaggattaagaatctcactcaaaaccactcaactacatggaaactgaacaagcttctcctgaatgactactgggtacgtaacaaaatgaaggcagaaacaaagatgttctttgaaac

SEQ ID NO: 41346 - DNA, 120 bp, synthetic construct
  source 1..120: mol_type = other DNA
gcaaaaatcctcaataaaatactggcaaaccgaatccagcagcacatcaaaaagcttatctgccatgatcaagtgggcttcatccctgggatgcaaggctggttcaatatacgcaaatca

SEQ ID NO: 41347 - DNA, 120 bp, synthetic construct
  source 1..120: mol_type = other DNA
ctactttaaagttcatgtggaatcaaaaaagagcctgcatcgccatgtcaatcctaagccaaaagaacaaagctggaggcatcacactacctgacttcaaactatactacaaggctacag

SEQ ID NO: 41348 - DNA, 120 bp, synthetic construct
  source 1..120: mol_type = other DNA
atctcacatcagttagaatggcaatcattaaaaagtcagaaaacaacaggggctgaagaagatgtggagaaataggaacacttttacactgttggtgggactgtaaactagttcaaccat

SEQ ID NO: 41349 - DNA, 120 bp, synthetic construct; identical to SEQ ID NO: 15538
  source 1..120: mol_type = other DNA

SEQ ID NO: 41350 - DNA, 120 bp, synthetic construct; identical to SEQ ID NO: 15539
  source 1..120: mol_type = other DNA

SEQ ID NO: 41351 - DNA, 120 bp, synthetic construct; identical to SEQ ID NO: 15540
  source 1..120: mol_type = other DNA

SEQ ID NO: 41352 - DNA, 120 bp, synthetic construct; identical to SEQ ID NO: 15541
  source 1..120: mol_type = other DNA

SEQ ID NO: 41353 - DNA, 120 bp, synthetic construct; identical to SEQ ID NO: 15542
  source 1..120: mol_type = other DNA

SEQ ID NO: 41354 - DNA, 120 bp, synthetic construct; identical to SEQ ID NO: 15543
  source 1..120: mol_type = other DNA

SEQ ID NO: 41355 - DNA, 120 bp, synthetic construct; identical to SEQ ID NO: 15544
  source 1..120: mol_type = other DNA

SEQ ID NO: 41356 - DNA, 120 bp, synthetic construct; identical to SEQ ID NO: 15545
  source 1..120: mol_type = other DNA

SEQ ID NO: 41357 - DNA, 120 bp, synthetic construct; identical to SEQ ID NO: 15546
  source 1..120: mol_type = other DNA

SEQ ID NO: 41358 - DNA, 120 bp, synthetic construct; identical to SEQ ID NO: 15547
  source 1..120: mol_type = other DNA

SEQ ID NO: 41359 - DNA, 120 bp, synthetic construct; identical to SEQ ID NO: 15548
  source 1..120: mol_type = other DNA

SEQ ID NO: 41360 - DNA, 120 bp, synthetic construct
  source 1..120: mol_type = other DNA
acacacacacacacacacacacacaaaaaaaaaaaaaaaaaaaaaaaaaaaacagaaaaatgggtgcagtagacccaagacccccactctggcacagtgctgacaaggtccaagcaaggg

SEQ ID NO: 41361 - DNA, 120 bp, synthetic construct
  source 1..120: mol_type = other DNA
gctggtaccatatccttctgaaactattccaatcaatagaaaaagagggaatcctccctaacacattttatgaggccagcatcattctgataccaaagcctggcagagacacaacaaaaa

SEQ ID NO: 41362 - DNA, 120 bp, synthetic construct
  source 1..120: mol_type = other DNA
atttaaagattcaatgccatccccatcaagctaccaatgcctttcttcacagaattgggaaaaactactttaaagttcatatggaaccaaaaaagagcctgcattgccacgacaatccta

SEQ ID NO: 41363 - DNA, 120 bp, synthetic construct; identical to SEQ ID NO: 24389
  source 1..120: mol_type = other DNA

SEQ ID NO: 41364 - DNA, 120 bp, synthetic construct
  source 1..120: mol_type = other DNA
atgaagtccttgcccatgcctatgtcctgaatggtattgcctaggttttcttctagggtttttatggttttaggtctaacgttgaagtctttaatccatcttgaattaatttttgtataa

SEQ ID NO: 41365 - DNA, 120 bp, synthetic construct
  source 1..120: mol_type = other DNA
aacttccaacactatgttgaataggagtggtgagagagggcatccctgttttgtgccagttttcaaagggaatgcttccagtttttgcccattcagtatgatattggctgtgggtttgtc

SEQ ID NO: 41366 - DNA, 120 bp, synthetic construct
  source 1..120: mol_type = other DNA
tctcatagtggttttgatttgcatttctctgatggccagtgatgatgagcattttttcatgtgttttttggctgcataaatgtcttcttttgagaagtgtctgttcatgtcatgttgcgg

SEQ ID NO: 41367 - DNA, 120 bp, synthetic construct; identical to SEQ ID NO: 32118
  source 1..120: mol_type = other DNA

SEQ ID NO: 41368 - DNA, 120 bp, synthetic construct
  source 1..120: mol_type = other DNA
agaagctctttagtttaattagatcccatttgtcagttttggcttttgttgccattgcttttggtgttttagacatgaagtccttgcccatgcctatgtcctgaatggtaatgcctaggt

SEQ ID NO: 41369 - DNA, 120 bp, synthetic construct
  source 1..120: mol_type = other DNA
attgaataccctttatttccttctcctgcctaattgccctggccagaacttccagcactatgttgaataggagtggtgagagagggcatccctgtcttgtgccagttttcaaagggaatg

SEQ ID NO: 41370 - DNA, 120 bp, synthetic construct
  source 1..120: mol_type = other DNA
ttgttgatcctttcaaaaaaccagctcctggattcattaattttttgaagggttttttttcccccatttccttcagttctgctctgattttagttatttcttgccttctgctagcttttg

SEQ ID NO: 41371 - DNA, 120 bp, synthetic construct
  source 1..120: mol_type = other DNA
ttatccaatttgccagtctgtgtcttttaattggcgcatttagtccatttacatttaaagttaatattgttatgtatgactttgatcctgtcattatgatgttagctggtaattttcctc

SEQ ID NO: 41372 - DNA, 120 bp, synthetic construct
  source 1..120: mol_type = other DNA
tccagttgattgcatcagctcctgaggcttctgcattctccacgtagttctcgcgccttggctttcagctccatcagctcctttaagcacttctctgtattggttattctagttatacat

SEQ ID NO: 41373 - DNA, 120 bp, synthetic construct; identical to SEQ ID NO: 32119
  source 1..120: mol_type = other DNA

SEQ ID NO: 41374 - DNA, 120 bp, synthetic construct
  source 1..120: mol_type = other DNA
ataaacattgttccttatgtaaacagaaaaggaaacatataataagaaatttcaggcaaggagccaagatggccgaataggaacagctccgatctacagctcccagcgtgagctacgcag

SEQ ID NO: 41375 - DNA, 120 bp, synthetic construct
  source 1..120: mol_type = other DNA
aaacagaacagaaaaactggaaactctaaaaagcagagcgcctctcctcctccaaaggatcacagttcctcaccagcaacggaacaaagctggacggagaatgactttgatgagctgaga

SEQ ID NO: 41376 - DNA, 120 bp, synthetic construct
  source 1..120: mol_type = other DNA
aagacacagactggcaaattggataaagagtcaagacccatcagtgtgcagtattcaggaaacccatctcacgtgcagagacacacataggctcaaaataaaaggatggaggaagatcta

SEQ ID NO: 41377 - DNA, 120 bp, synthetic construct
  source 1..120: mol_type = other DNA
gaaagcacaaaagatccaaaattgacaccctaacatcacaattaaaagaactagagaagcaagagcaaacacattcaaaagctagcagaaggcaagaaataactaaaatcagagcagaac

SEQ ID NO: 41378 - DNA, 120 bp, synthetic construct
  source 1..120: mol_type = other DNA
acaaaaacaacatgattatctcaatagatgcagaaaaggcctttgacaaaattcatgctaaaaactctcaataaattaggtattgattggacgtatttcaaaataataagagctatctat

SEQ ID NO: 41379 - DNA, 120 bp, synthetic construct
  source 1..120: mol_type = other DNA
caaagctggaggcatcacactacctgacttcaagccatactacaaggctacagtaaccaaaacagcatggtactggtaccaaaactgagatatagatcaatggaacagaacagagccctc

SEQ ID NO: 41380 - DNA, 120 bp, synthetic construct
  source 1..120: mol_type = other DNA
aaattggaaatcatcattctcagtaaactatcgcaagaacaaaaaaccaaaccgcatattctcactcataggtgggaattgaacaatgagaacacatggacacaggaagggaacatcaca

SEQ ID NO: 41381 - DNA, 120 bp, synthetic construct; identical to SEQ ID NO: 32120
  source 1..120: mol_type = other DNA

SEQ ID NO: 41382 - DNA, 120 bp, synthetic construct; identical to SEQ ID NO: 32121
  source 1..120: mol_type = other DNA

SEQ ID NO: 41383 - DNA, 120 bp, synthetic construct; identical to SEQ ID NO: 32122
  source 1..120: mol_type = other DNA

SEQ ID NO: 41384 - DNA, 120 bp, synthetic construct
  source 1..120: mol_type = other DNA
tttctctgatggccagtgatggtgagcattttttcatgtgttttttggctgcataaatgtcttcttttgagaagtgtctgttcatgtccttcgcccacttttggatggggttctttgttt

SEQ ID NO: 41385 - DNA, 120 bp, synthetic construct
  source 1..120: mol_type = other DNA
acatcccttgtaagttggattcctaggtattttattctctttgaagcaattgtgaatgggagttcactcatgatttggctctctgtttgtctgtttttggtgtataagaatgcttgtgat

SEQ ID NO: 41386 - DNA, 120 bp, synthetic construct
  source 1..120: mol_type = other DNA
tttcctctttttctattgattggaatagtttcagaaggaatggtaccagttccttcttgtacctctggtagaattcggctgtgaatccatctgatcctggactgtttttggttggtaagc

SEQ ID NO: 41387 - DNA, 120 bp, synthetic construct
  source 1..120: mol_type = other DNA
ctaatgttgacagtggggcgttaaagtctcccattattgtgtgggagtctaagtctctttgtaggtaactcaggacttgctttatgaatctgggtgctcccatattgggtgcatatatat

SEQ ID NO: 41388 - DNA, 120 bp, synthetic construct
  source 1..120: mol_type = other DNA
tcctgaatctgaatgttgccctgccttgctggattggggaagttctcctggataatatcctgcagagtgttttccaacttggttccattctccccatcactttcaggtacaccaatcaga

SEQ ID NO: 41389 - DNA, 120 bp, synthetic construct; identical to SEQ ID NO: 33081
  source 1..120: mol_type = other DNA

SEQ ID NO: 41390 - DNA, 120 bp, synthetic construct; identical to SEQ ID NO: 33082
  source 1..120: mol_type = other DNA

SEQ ID NO: 41391 - DNA, 120 bp, synthetic construct
  source 1..120: mol_type = other DNA
tgatgggagaaaatatggcagggagaccccagtgccggctgtgaggtcacattttatctattcttggggcttcatgtttggatgtagaggatacccagctggccctcaaaaggtttgatg

SEQ ID NO: 41392 - DNA, 120 bp, synthetic construct
  source 1..120: mol_type = other DNA
gtctgtgcagcgtggcccaaggtgcagtggggcaaaggacaacaggaaatcagaaagacaggttttggctttggaagaaggaaactctgctttacaggaggttgttcagaaatggaaatg

SEQ ID NO: 41393 - DNA, 120 bp, synthetic construct
  source 1..120: mol_type = other DNA
gagagagagagagagggagagagagagagagggagagagggagagagggagagagagagggagagggagagagagagggagagggagagagagagaaggagagagagagagggtgagaga

SEQ ID NO: 41394 - DNA, 120 bp, synthetic construct; identical to SEQ ID NO: 15599
  source 1..120: mol_type = other DNA

SEQ ID NO: 41395 - DNA, 120 bp, synthetic construct
  source 1..120: mol_type = other DNA
taatatccagaatctacaatgaactcaaacaaatttacgagaaaaaaacaaacaaccccatcaaaaagtgggcaaaggacatgaacagaaacttctcaaaagaagacatttatgcagcca

SEQ ID NO: 41396 - DNA, 120 bp, synthetic construct; identical to SEQ ID NO: 15600
  source 1..120: mol_type = other DNA

SEQ ID NO: 41397 - DNA, 120 bp, synthetic construct; identical to SEQ ID NO: 15601
  source 1..120: mol_type = other DNA

SEQ ID NO: 41398 - DNA, 120 bp, synthetic construct; identical to SEQ ID NO: 15602
  source 1..120: mol_type = other DNA

SEQ ID NO: 41399 - DNA, 120 bp, synthetic construct
  source 1..120: mol_type = other DNA
gatcacgccactgcactccagtctgagtgacagagcgagactgtctcaaaaagaaaaaaaaaaattaaaaagacactatgacaggttgtgagacagggatggcagggaaattataggatt

SEQ ID NO: 41400 - DNA, 120 bp, synthetic construct
  source 1..120: mol_type = other DNA
ggacggggtggctgccgggcggagacgctcctcacttcccagacggggtggctgctgggcggaggggctcctcacttctcagacggggcggctgccgggcggaggggctcctcacttctc

SEQ ID NO: 41401 - DNA, 120 bp, synthetic construct; identical to SEQ ID NO: 15603
  source 1..120: mol_type = other DNA

SEQ ID NO: 41402 - DNA, 120 bp, synthetic construct
  source 1..120: mol_type = other DNA
ggttgtttaattttgtcaaaggccttttctgcatctattgagataatcatatggtttttgtctttgtttctgtttatatgctggattacgtttattgattttcatatgttgaaccagcct

SEQ ID NO: 41403 - DNA, 120 bp, synthetic construct
  source 1..120: mol_type = other DNA
ttctcttgtgggcatttagtgctataaatttccctctacacactgctttaaatgtgtcccagagattctggtatgttgtgtctttgttctcataggtttcaaagaacatctttatttctg

SEQ ID NO: 41404 - DNA, 120 bp, synthetic construct
  source 1..120: mol_type = other DNA
ccttgatatatacaccctcccaagactaaaccaggaagaagttgaatctctgaatagaccaataacaggctctgaaattgaggcaataattaatagcctaccaaccaaaaaaagtccagg

SEQ ID NO: 41405 - DNA, 120 bp, synthetic construct
  source 1..120: mol_type = other DNA
aggaatccaacttacaagggacatgaaggacctcttcaaggagaactacaaaccattcctcaatgaaataaaagaggatacaaacaagtggaagaacattccatgctcgtgggtaggaag

SEQ ID NO: 41406 - DNA, 120 bp, synthetic construct; identical to SEQ ID NO: 15604
  source 1..120: mol_type = other DNA

SEQ ID NO: 41407 - DNA, 120 bp, synthetic construct; identical to SEQ ID NO: 28713
  source 1..120: mol_type = other DNA

SEQ ID NO: 41408 - DNA, 120 bp, synthetic construct; identical to SEQ ID NO: 28714
  source 1..120: mol_type = other DNA

SEQ ID NO: 41409 - DNA, 120 bp, synthetic construct; identical to SEQ ID NO: 28715
  source 1..120: mol_type = other DNA

SEQ ID NO: 41410 - DNA, 120 bp, synthetic construct; identical to SEQ ID NO: 28716
  source 1..120: mol_type = other DNA

SEQ ID NO: 41411 - DNA, 120 bp, synthetic construct
  source 1..120: mol_type = other DNA
ggaggaagagagagaagaggagaaagagagaaattgacctcatcagaattattactattattattattattgagacagggtcttgctctgttgcccaggcttgagtgcagtgaggcaatc

SEQ ID NO: 41412 - DNA, 120 bp, synthetic construct; identical to SEQ ID NO: 28696
  source 1..120: mol_type = other DNA

SEQ ID NO: 41413 - DNA, 120 bp, synthetic construct; identical to SEQ ID NO: 28697
  source 1..120: mol_type = other DNA

SEQ ID NO: 41414 - DNA, 120 bp, synthetic construct; identical to SEQ ID NO: 28698
  source 1..120: mol_type = other DNA

SEQ ID NO: 41415 - DNA, 120 bp, synthetic construct; identical to SEQ ID NO: 28699
  source 1..120: mol_type = other DNA

SEQ ID NO: 41416 - DNA, 120 bp, synthetic construct; identical to SEQ ID NO: 28700
  source 1..120: mol_type = other DNA

SEQ ID NO: 41417 - DNA, 120 bp, synthetic construct; identical to SEQ ID NO: 28701
  source 1..120: mol_type = other DNA

SEQ ID NO: 41418 - DNA, 120 bp, synthetic construct; identical to SEQ ID NO: 28702
  source 1..120: mol_type = other DNA

SEQ ID NO: 41419 - DNA, 120 bp, synthetic construct; identical to SEQ ID NO: 28703
  source 1..120: mol_type = other DNA

SEQ ID NO: 41420 - DNA, 120 bp, synthetic construct; identical to SEQ ID NO: 28704
  source 1..120: mol_type = other DNA

SEQ ID NO: 41421 - DNA, 120 bp, synthetic construct
  source 1..120: mol_type = other DNA
cgcagtgccagctctaccggggagttgcacgggaggggggcgcagtgccagctctaccggggaggtgcacgggagggggggcgcagtgccagctctaccggggaggtgcacgggaggggg

SEQ ID NO: 41422 - DNA, 120 bp, synthetic construct; identical to SEQ ID NO: 28707
  source 1..120: mol_type = other DNA

SEQ ID NO: 41423 - DNA, 120 bp, synthetic construct; identical to SEQ ID NO: 28708
  source 1..120: mol_type = other DNA

SEQ ID NO: 41424 - DNA, 120 bp, synthetic construct; identical to SEQ ID NO: 28709
  source 1..120: mol_type = other DNA

SEQ ID NO: 41425 - DNA, 120 bp, synthetic construct; identical to SEQ ID NO: 28710
  source 1..120: mol_type = other DNA

SEQ ID NO: 41426 - DNA, 120 bp, synthetic construct
  source 1..120: mol_type = other DNA
agatcatgctactgcactccagcctgggcgacgaagccagactccgtctcaaaaaaaaaaaagaattcctgggctcaaacaatcctcctgcctcagcctcctgagtggctgggattacag

SEQ ID NO: 41427 - DNA, 120 bp, synthetic construct
  source 1..120: mol_type = other DNA
cggggtcagtggtggtgcagagccggggaccggggtcagtggtgctggagagccggggactggggtcagtggtgctggagagccgggagccggggtcagtggtgctggagaaccaggggc

SEQ ID NO: 41428 - DNA, 120 bp, synthetic construct; identical to SEQ ID NO: 8832
  source 1..120: mol_type = other DNA

SEQ ID NO: 41429 - DNA, 120 bp, synthetic construct; identical to SEQ ID NO: 23311
  source 1..120: mol_type = other DNA

SEQ ID NO: 41430 - DNA, 120 bp, synthetic construct; identical to SEQ ID NO: 23312
  source 1..120: mol_type = other DNA

SEQ ID NO: 41431 - DNA, 120 bp, synthetic construct
  source 1..120: mol_type = other DNA
gatggcatttatccacccatccatataccagtccatctactcattgtagtccatccatctgtccgtcaacctatcatccatctgttcactcatttacccatctacccacccatccatcat

SEQ ID NO: 41432 - DNA, 120 bp, synthetic construct
  source 1..120: mol_type = other DNA
tcatctgtcatccattcatccatccacccccccacgcacccacttctctacattgttccgttcatccaacaagtactcattacacccttctctgcatgctggcaccaggggtttgaacat

SEQ ID NO: 41433 - DNA, 120 bp, synthetic construct; identical to SEQ ID NO: 23313
  source 1..120: mol_type = other DNA

SEQ ID NO: 41434 - DNA, 120 bp, synthetic construct; identical to SEQ ID NO: 23314
  source 1..120: mol_type = other DNA

SEQ ID NO: 41435 - DNA, 120 bp, synthetic construct
  source 1..120: mol_type = other DNA
aagaagaaagagaagaatcaaatagatgcaataaaaaatgataaaggggatatcaccaccagtcccacagaaatacaaactaccattagagaatactataaacacctctacgcaaataaa

SEQ ID NO: 41436 - DNA, 120 bp, synthetic construct
  source 1..120: mol_type = other DNA
tgatgcccaggttttcttctagggtttttatggttttaggtctaacgtttaagtctttaatccatcttgaattgatttttgtataaggtgtaaggaagggatccagtttcagctttctac

SEQ ID NO: 41437 - DNA, 120 bp, synthetic construct
  source 1..120: mol_type = other DNA
tggggtggggggaggggggagggatagcattgggagatatacctaatgctagatgacgagttagtgggtgcagtacaccagcatggcacatgtatgcatatgtaactaacctgcacaatg

SEQ ID NO: 41438 - DNA, 120 bp, synthetic construct
  source 1..120: mol_type = other DNA
acatggacacaggaaggggaacatcacacaccggggcctgttgtggggtggggggaggggggagggctagcattaggagatatacctaatgttaaataacgagttaatgggtgcagcaca

SEQ ID NO: 41439 - DNA, 120 bp, synthetic construct; identical to SEQ ID NO: 9954
  source 1..120: mol_type = other DNA

SEQ ID NO: 41440 - DNA, 120 bp, synthetic construct; identical to SEQ ID NO: 9955
  source 1..120: mol_type = other DNA

SEQ ID NO: 41441 - DNA, 120 bp, synthetic construct
  source 1..120: mol_type = other DNA
cttcctctccccaggtccacacattcccgactccacagccagtctttctttctttccttcttttctttttttttaatttaagttttagggtacatgtgcacaatgtgcaggttagttaca

SEQ ID NO: 41442 - DNA, 120 bp, synthetic construct
  source 1..120: mol_type = other DNA
agaagtgtctgttcatatccttcgcccactttttgatggggctgtttgttttttttcttgtagatttgtttgagttcattgtagattctggatattagtcctttgtcagatgagtagatt

SEQ ID NO: 41443 - DNA, 120 bp, synthetic construct
  source 1..120: mol_type = other DNA
agtcccacagaaatacaaactaccattagagaatactataaacacctctacgcaaataaactagaaaatctagaagaaatggataaattcctcgacacatacaccctcccaagactaaac

SEQ ID NO: 41444 - DNA, 120 bp, synthetic construct
  source 1..120: mol_type = other DNA
agatcaaactgcaaggcggcagcgagcctgggggaggggcgcccaccattggccaggcttgcttaggtaaacaaagcagccgggaagctcgaactgggtggagcccaccacagctcaagg

SEQ ID NO: 41445 - DNA, 120 bp, synthetic construct
  source 1..120: mol_type = other DNA
caggagaatttccccaatctagcaaggcaggccaacgttcagattcgggaaatacagagaatgccacaaagatactcctcaagaagagcaactccaagacacataattgtcagattcacc

SEQ ID NO: 41446 - DNA, 120 bp, synthetic construct
  source 1..120: mol_type = other DNA
gcacccagattcataaagcaagtcctgagtgacctacaaagagacttagactcccacacattaataatgggagactttaacaccccactgtcaacattagacagatcaaggagacagaaa

SEQ ID NO: 41447 - DNA, 120 bp, synthetic construct
  source 1..120: mol_type = other DNA
cagtaacaggatctgaaattggggcaataatcaatagtttaccaaccaaaaagagtccaggaccagatggattcacagccgaattctaccagaggtacaaggaggaactggtaccattcc

SEQ ID NO: 41448 - DNA, 120 bp, synthetic construct
  source 1..120: mol_type = other DNA
tacaagggatgtgaaggacctcttcaaggagaactacaaaccactgctcaaggaaatgaaagaggatacaaacaaatggaagaacattccatgctcatgggtaggaagaatcaatatcgt

SEQ ID NO: 41449 - DNA, 120 bp, synthetic construct
  source 1..120: mol_type = other DNA
atgtctttttttgagaagtgtttgttcatatccttcgcccactttttgaatggggttgtttttttcttgtaaatttgtttgagttcattgtagattctggatattagccctttgtcagat

SEQ ID NO: 41450 - DNA, 120 bp, synthetic construct; identical to SEQ ID NO: 9956
  source 1..120: mol_type = other DNA

SEQ ID NO: 41451 - DNA, 120 bp, synthetic construct; identical to SEQ ID NO: 9957
  source 1..120: mol_type = other DNA

SEQ ID NO: 41452 - DNA, 120 bp, synthetic construct; identical to SEQ ID NO: 9958
  source 1..120: mol_type = other DNA

SEQ ID NO: 41453 - DNA, 120 bp, synthetic construct; identical to SEQ ID NO: 9959
  source 1..120: mol_type = other DNA

SEQ ID NO: 41454 - DNA, 120 bp, synthetic construct; identical to SEQ ID NO: 9960
  source 1..120: mol_type = other DNA

SEQ ID NO: 41455 - DNA, 120 bp, synthetic construct; identical to SEQ ID NO: 9961
  source 1..120: mol_type = other DNA

SEQ ID NO: 41456 - DNA, 120 bp, synthetic construct; identical to SEQ ID NO: 9962
  source 1..120: mol_type = other DNA

SEQ ID NO: 41457 - DNA, 120 bp, synthetic construct
  source 1..120: mol_type = other DNA
atacctctactccctccttagtgaccgatcatgcacccctcaccatcccattaaaacctaatcaccgttaccccactcaatgccaatatctcatcccacagcatgctttaaaaggattaa

SEQ ID NO: 41458 - DNA, 120 bp, synthetic construct
  source 1..120: mol_type = other DNA
gaattcttacacaagagccaggaccgcgtcctgtagcctttctgtccaaacaacttgaccttactgttttagcccagccctcatgtctgcatgcagcggctgccactgccttaatacttt

SEQ ID NO: 41459 - DNA, 120 bp, synthetic construct; identical to SEQ ID NO: 9963
  source 1..120: mol_type = other DNA

SEQ ID NO: 41460 - DNA, 120 bp, synthetic construct; identical to SEQ ID NO: 9964
  source 1..120: mol_type = other DNA

SEQ ID NO: 41461 - DNA, 120 bp, synthetic construct; identical to SEQ ID NO: 9965
  source 1..120: mol_type = other DNA

SEQ ID NO: 41462 - DNA, 120 bp, synthetic construct; identical to SEQ ID NO: 9966
  source 1..120: mol_type = other DNA

SEQ ID NO: 41463 - DNA, 120 bp, synthetic construct; identical to SEQ ID NO: 9967
  source 1..120: mol_type = other DNA

SEQ ID NO: 41464 - DNA, 120 bp, synthetic construct; identical to SEQ ID NO: 9968
  source 1..120: mol_type = other DNA

SEQ ID NO: 41465 - DNA, 120 bp, synthetic construct; identical to SEQ ID NO: 9969
  source 1..120: mol_type = other DNA

SEQ ID NO: 41466 - DNA, 120 bp, synthetic construct
  source 1..120: mol_type = other DNA
tctgagctcaagcgatccacttgccccaggctccgaaagtgctgggattacaggtgcgagcgaccatgatctttttttttttttttttttttttttttttttgtgacggagtcttgcttt

SEQ ID NO: 41467 - DNA, 120 bp, synthetic construct
  source 1..120: mol_type = other DNA
tgtttactcccctctgcctcccggtgtttactccctgtgtcctggtgttactcccctgctttcaggtgatccacccgcctgggccccccaaagagctgggattacaggcgagagccacca

SEQ ID NO: 41468 - DNA, 120 bp, synthetic construct
  source 1..120: mol_type = other DNA
tgagcagccccacctctgccccatcggagtgggcgctgaacgaacatgcctgcatttccttcttcggtgtttaccctctgtctcccggtgtttactcccctctccctcccggtgtttact

SEQ ID NO: 41469 - DNA, 120 bp, synthetic construct
  source 1..120: mol_type = other DNA
ccggtgtttactcccctctgcctcccggtgtttactcccctctgcctcccggtgttcactcccccctgcctcccggtgtttactcccctctgcctcccggtgtttactcccccctgcctc

SEQ ID NO: 41470 - DNA, 120 bp, synthetic construct
  source 1..120: mol_type = other DNA
gtttactcccctctgcctcccggtgttcactcccccctccctcccggtgttcactcccctctccctcccggtgttcactcccctctgcctcccggtgtttactcccctctgcctcccggt

SEQ ID NO: 41471 - DNA, 120 bp, synthetic construct
  source 1..120: mol_type = other DNA
ccctcttcctcccggtgtttactcccctctgcctcccggtgttcactcccctctccctcccggtgtttactcccctctgcctcccggtgttcactcccctctgcctcccggtgtttactc

SEQ ID NO: 41472 - DNA, 120 bp, synthetic construct; identical to SEQ ID NO: 2274
  source 1..120: mol_type = other DNA

SEQ ID NO: 41473 - DNA, 120 bp, synthetic construct; identical to SEQ ID NO: 9970
  source 1..120: mol_type = other DNA

SEQ ID NO: 41474 - DNA, 120 bp, synthetic construct; identical to SEQ ID NO: 9971
  source 1..120: mol_type = other DNA

SEQ ID NO: 41475 - DNA, 120 bp, synthetic construct; identical to SEQ ID NO: 9972
  source 1..120: mol_type = other DNA

SEQ ID NO: 41476 - DNA, 120 bp, synthetic construct
  source 1..120: mol_type = other DNA
gagaatgacttgaatccaggaggctgagtttgcactgagccggattgggccattacactccagcctgggtgacaagattgaaactctgtctcaaaaaaaaagaatgatgaagccacatgg

SEQ ID NO: 41477 - DNA, 120 bp, synthetic construct
  source 1..120: mol_type = other DNA
cctgtgacctgagtttacctgtgtagcaaacctgtctgtgacctgagtttacctgtgtagcaaacctgcctgtgacctgagtttacctgtgtaacgaacctgcctgtgacctgagtttac

SEQ ID NO: 41478 - DNA, 120 bp, synthetic construct; identical to SEQ ID NO: 9975
  source 1..120: mol_type = other DNA

SEQ ID NO: 41479 - DNA, 120 bp, synthetic construct; identical to SEQ ID NO: 9976
  source 1..120: mol_type = other DNA

SEQ ID NO: 41480 - DNA, 120 bp, synthetic construct; identical to SEQ ID NO: 9977
  source 1..120: mol_type = other DNA

SEQ ID NO: 41481 - DNA, 120 bp, synthetic construct; identical to SEQ ID NO: 9978
  source 1..120: mol_type = other DNA

SEQ ID NO: 41482 - DNA, 120 bp, synthetic construct
  source 1..120: mol_type = other DNA
cactcagatgtagttcagaccctggatcacagccgcccagaccccactcagatgtagttcagaccctggatcacagccgtccagaccccactcagacgcagttgggaccctggatcacag

SEQ ID NO: 41483 - DNA, 120 bp, synthetic construct; identical to SEQ ID NO: 9979
  source 1..120: mol_type = other DNA

SEQ ID NO: 41484 - DNA, 120 bp, synthetic construct; identical to SEQ ID NO: 9980
  source 1..120: mol_type = other DNA

SEQ ID NO: 41485 - DNA, 120 bp, synthetic construct; identical to SEQ ID NO: 9981
  source 1..120: mol_type = other DNA

SEQ ID NO: 41486 - DNA, 120 bp, synthetic construct; identical to SEQ ID NO: 9982
  source 1..120: mol_type = other DNA

SEQ ID NO: 41487 - DNA, 120 bp, synthetic construct; identical to SEQ ID NO: 9983
  source 1..120: mol_type = other DNA

SEQ ID NO: 41488 - DNA, 120 bp, synthetic construct; identical to SEQ ID NO: 9984
  source 1..120: mol_type = other DNA

SEQ ID NO: 41489 - DNA, 120 bp, synthetic construct; identical to SEQ ID NO: 9985
  source 1..120: mol_type = other DNA

SEQ ID NO: 41490 - DNA, 120 bp, synthetic construct
  source 1..120: mol_type = other DNA
gtctaaaacaccaaaagcaatggcaacaaaagccagaattgacaaatgggatctaattaaactaaagagcttctgcacagcaaaagaaactaccagcagagtgaacaggcaacctacaaa

SEQ ID NO: 41491 - DNA, 120 bp, synthetic construct; identical to SEQ ID NO: 9986
  source 1..120: mol_type = other DNA

SEQ ID NO: 41492 - DNA, 120 bp, synthetic construct; identical to SEQ ID NO: 9987
  source 1..120: mol_type = other DNA

SEQ ID NO: 41493 - DNA, 120 bp, synthetic construct; identical to SEQ ID NO: 9988
  source 1..120: mol_type = other DNA

SEQ ID NO: 41494 - DNA, 120 bp, synthetic construct; identical to SEQ ID NO: 9947
  source 1..120: mol_type = other DNA

SEQ ID NO: 41495 - DNA, 120 bp, synthetic construct; identical to SEQ ID NO: 9989
  source 1..120: mol_type = other DNA

SEQ ID NO: 41496 - DNA, 120 bp, synthetic construct; identical to SEQ ID NO: 9990
  source 1..120: mol_type = other DNA

SEQ ID NO: 41497 - DNA, 120 bp, synthetic construct; identical to SEQ ID NO: 9991
  source 1..120: mol_type = other DNA

SEQ ID NO: 41498 - DNA, 120 bp, synthetic construct; identical to SEQ ID NO: 9992
  source 1..120: mol_type = other DNA

SEQ ID NO: 41499 - DNA, 120 bp, synthetic construct; identical to SEQ ID NO: 9993
  source 1..120: mol_type = other DNA

SEQ ID NO: 41500 - DNA, 120 bp, synthetic construct; identical to SEQ ID NO: 9994
  source 1..120: mol_type = other DNA

SEQ ID NO: 41501 - DNA, 120 bp, synthetic construct; identical to SEQ ID NO: 9995
  source 1..120: mol_type = other DNA

SEQ ID NO: 41502 - DNA, 120 bp, synthetic construct
  source 1..120: mol_type = other DNA
aaatttattattattattttttaaatggcatcttgctctgtcgctcaggctggaatgcaatggcattatcttgggtcactgcaacttctgcctcccaagttcaagcagttctccctgcct

SEQ ID NO: 41503 - DNA, 120 bp, synthetic construct
  source 1..120: mol_type = other DNA
aggagaccaggcgctcgccaatacactcaatcccactccaccaggagaccaggcgctagtcaatacacgcaatcccactctaccaggagaccgggcactcgccaacacacacaatcccac

SEQ ID NO: 41504 - DNA, 120 bp, synthetic construct
  source 1..120: mol_type = other DNA
caccgggagaccaggcgctagtcaatacacgcaatcccactccaccgggagaccagacgctagtcaatacacgcaatcccactccaccaggagaccgggcactcgccaatacacgcaatc

SEQ ID NO: 41505 - DNA, 120 bp, synthetic construct; identical to SEQ ID NO: 9996
  source 1..120: mol_type = other DNA

SEQ ID NO: 41506 - DNA, 120 bp, synthetic construct; identical to SEQ ID NO: 9997
  source 1..120: mol_type = other DNA

SEQ ID NO: 41507 - DNA, 120 bp, synthetic construct
  source 1..120: mol_type = other DNA
gataatgatggcaatggtgatgatggtgatggtaatgatggtggtgatgatgatggtgatggtgatgatgatggtaatggtggtggtgatgatggtgatggtgataatgatggtaatggt

SEQ ID NO: 41508 - DNA, 120 bp, synthetic construct; identical to SEQ ID NO: 41449
  source 1..120: mol_type = other DNA

SEQ ID NO: 41509 - DNA, 120 bp, synthetic construct
  source 1..120: mol_type = other DNA
atttttgtacattgattttgtatcctgagactttgctgaagttgcttatcagcttgagggaattttgggctgagacgatggggttttctagatatacagtcatgtcatctgcaaacaggg

SEQ ID NO: 41510 - DNA, 120 bp, synthetic construct
  source 1..120: mol_type = other DNA
tgatatcccctttatcattttttattgcatctctttgattcttctctcttttcttctttattagtcttgctagtggtctatcacattttgttgatcttttcaaaaaaacagctcctggat

SEQ ID NO: 41511 - DNA, 120 bp, synthetic construct
  source 1..120: mol_type = other DNA
gttttccatttgcttggtagatcttcctccatccctttgagcctatgtgtgtctctgcagctgagatgggtttcctgaatacagcacactgatgggtcttgactctttttccaatttgcc

SEQ ID NO: 41512 - DNA, 120 bp, synthetic construct
  source 1..120: mol_type = other DNA
tggtctttccacatagtcccatatttcttggaggctttcttcatttctttttattcttttttctctaaacttctcttcttgattcatttcattcatttgatcttccatcactgataccct

SEQ ID NO: 41513 - DNA, 120 bp, synthetic construct; identical to SEQ ID NO: 9949
  source 1..120: mol_type = other DNA

SEQ ID NO: 41514 - DNA, 120 bp, synthetic construct
  source 1..120: mol_type = other DNA
aacaggccccggtgtgtgatgttccccttcctgtgtgcatgtgttctcattcttcaattcccacctatgagtgaggacatgcggtgtttggttttttgtccttgtgatagtttgctgaga

SEQ ID NO: 41515 - DNA, 120 bp, synthetic construct
  source 1..120: mol_type = other DNA
atgcggcgttatttctgagggctctgttctgttccattgatctatatctctgttttggtaccagtaccatgctgttttggttactgtagccttgtaatatagtttgaagtcaggtagtgt

SEQ ID NO: 41516 - DNA, 120 bp, synthetic construct; identical to SEQ ID NO: 9953
  source 1..120: mol_type = other DNA

SEQ ID NO: 41517 - DNA, 120 bp, synthetic construct; identical to SEQ ID NO: 16965
  source 1..120: mol_type = other DNA

SEQ ID NO: 41518 - DNA, 120 bp, synthetic construct; identical to SEQ ID NO: 14514
  source 1..120: mol_type = other DNA

SEQ ID NO: 41519 - DNA, 120 bp, synthetic construct; identical to SEQ ID NO: 31943
  source 1..120: mol_type = other DNA

SEQ ID NO: 41520 - DNA, 120 bp, synthetic construct; identical to SEQ ID NO: 31944
  source 1..120: mol_type = other DNA

SEQ ID NO: 41521 - DNA, 120 bp, synthetic construct; identical to SEQ ID NO: 31945
  source 1..120: mol_type = other DNA

SEQ ID NO: 41522 - DNA, 120 bp, synthetic construct
  source 1..120: mol_type = other DNA
cctctcaaatctagtggcctggttttattgagtgggggaaggcacatattttccaagattaactgccccgcaacagggaatttcgcaggatttcagtattttcgactccccaggtgacgc

SEQ ID NO: 41523 - DNA, 120 bp, synthetic construct; identical to SEQ ID NO: 29120
  source 1..120: mol_type = other DNA

SEQ ID NO: 41524 - DNA, 120 bp, synthetic construct
  source 1..120: mol_type = other DNA
ctgaatggtattgcctaggttttcttctaaggtttttatggttttaggtctaacattgaagtctttaatccatcctgaattaatttttgtataaggcgtaaggaaggggtccagtttcag

SEQ ID NO: 41525 - DNA, 120 bp, synthetic construct; identical to SEQ ID NO: 29121
  source 1..120: mol_type = other DNA

SEQ ID NO: 41526 - DNA, 120 bp, synthetic construct; identical to SEQ ID NO: 29122
  source 1..120: mol_type = other DNA

SEQ ID NO: 41527 - DNA, 120 bp, synthetic construct; identical to SEQ ID NO: 8982
  source 1..120: mol_type = other DNA

SEQ ID NO: 41528 - DNA, 120 bp, synthetic construct
  source 1..120: mol_type = other DNA
cagtgagccgagatcgcgccactgcactccaagcctggggcgacagagagagactctgtctcaaaaaaaaaaaaaaaaaaaaaaaaaaaatcaacaaaatgcaatgtgagatcatgcata

SEQ ID NO: 41529 - DNA, 120 bp, synthetic construct; identical to SEQ ID NO: 26271
  source 1..120: mol_type = other DNA

SEQ ID NO: 41530 - DNA, 120 bp, synthetic construct
  source 1..120: mol_type = other DNA
acattttcttaatccagtctatcattgttggacatttgggttggttccaagtctttgctattgtgaatagtgccgcaataaacataggtgtgcatgtgtctttatagcagcatgatttat

SEQ ID NO: 41531 - DNA, 120 bp, synthetic construct
  source 1..120: mol_type = other DNA
actgcccaaggtaatttacagattcaatgccatccccatcaagctaccaatgactttcttcacagaattggaaaaaactactttaaagttcatatggaaccaaaaaagagcccgcatcac

SEQ ID NO: 41532 - DNA, 120 bp, synthetic construct; identical to SEQ ID NO: 26272
  source 1..120: mol_type = other DNA

SEQ ID NO: 41533 - DNA, 120 bp, synthetic construct; identical to SEQ ID NO: 26269
  source 1..120: mol_type = other DNA

SEQ ID NO: 41534 - DNA, 120 bp, synthetic construct; identical to SEQ ID NO: 26270
  source 1..120: mol_type = other DNA

SEQ ID NO: 41535 - DNA, 120 bp, synthetic construct; identical to SEQ ID NO: 26273
  source 1..120: mol_type = other DNA

SEQ ID NO: 41536 - DNA, 120 bp, synthetic construct; identical to SEQ ID NO: 26274
  source 1..120: mol_type = other DNA

SEQ ID NO: 41537 - DNA, 120 bp, synthetic construct
  source 1..120: mol_type = other DNA
cagtcccaccaacagtgtaagagtgttcctatttctccacatccccttcaacacctgttgtttcctgactttttaatgatcgtcattctaactggtgtgagatgatatctcattttggtt

SEQ ID NO: 41538 - DNA, 120 bp, synthetic construct
  source 1..120: mol_type = other DNA
tatgtacatatatacatagcacttgacacatagtgaatactctatagattttaggatgtagcatcaccaccaccaccatcaccacaccactaccatcaccaccaccattatccccatcac

SEQ ID NO: 41539 - DNA, 120 bp, synthetic construct; identical to SEQ ID NO: 26276
  source 1..120: mol_type = other DNA

SEQ ID NO: 41540 - DNA, 120 bp, synthetic construct; identical to SEQ ID NO: 24612
  source 1..120: mol_type = other DNA

SEQ ID NO: 41541 - DNA, 120 bp, synthetic construct
  source 1..120: mol_type = other DNA
tgggaaacagagtgaagatcctgtctcaaaaaaagaaagagagagagagaaagagagaaagaaaggagtggagagaaggaaggaaggaaggagagacagagagaaagaaaggaagaaagg

SEQ ID NO: 41542 - DNA, 120 bp, synthetic construct
  source 1..120: mol_type = other DNA
taaagtactgattcatactacaatgtggatgaacctgaaaaatattttgcaaatgccaggtatagtggctcatccctatcatctcagcactttgggaggccaaagcaggaggtatcgctt

SEQ ID NO: 41543 - DNA, 120 bp, synthetic construct; identical to SEQ ID NO: 4035
  source 1..120: mol_type = other DNA

SEQ ID NO: 41544 - DNA, 120 bp, synthetic construct; identical to SEQ ID NO: 31775
  source 1..120: mol_type = other DNA

SEQ ID NO: 41545 - DNA, 120 bp, synthetic construct; identical to SEQ ID NO: 31776
  source 1..120: mol_type = other DNA

SEQ ID NO: 41546 - DNA, 120 bp, synthetic construct; identical to SEQ ID NO: 31777
  source 1..120: mol_type = other DNA

SEQ ID NO: 41547 - DNA, 120 bp, synthetic construct; identical to SEQ ID NO: 31778
  source 1..120: mol_type = other DNA

SEQ ID NO: 41548 - DNA, 120 bp, synthetic construct; identical to SEQ ID NO: 31779
  source 1..120: mol_type = other DNA

SEQ ID NO: 41549 - DNA, 120 bp, synthetic construct; identical to SEQ ID NO: 15929
  source 1..120: mol_type = other DNA

SEQ ID NO: 41550 - DNA, 120 bp, synthetic construct; identical to SEQ ID NO: 28993
  source 1..120: mol_type = other DNA

SEQ ID NO: 41551 - DNA, 120 bp, synthetic construct
  source 1..120: mol_type = other DNA
atctagaactagaaataccatttgacccagccatcccattactgggtatatacccaaaggattataaatcatactgctataaaggcacatgcacaagtatgtttattgtggcactattca

SEQ ID NO: 41552 - DNA, 120 bp, synthetic construct; identical to SEQ ID NO: 11150
  source 1..120: mol_type = other DNA

SEQ ID NO: 41553 - DNA, 120 bp, synthetic construct
  source 1..120: mol_type = other DNA
caatggttgaactagagagcccgcatcgccaagtcaatcctaagccaaaagaacaaagctggaggcatcacactacctgacttcaaactatactacaaggctacagtaaccaaaacagca

SEQ ID NO: 41554 - DNA, 120 bp, synthetic construct; identical to SEQ ID NO: 11151
  source 1..120: mol_type = other DNA

SEQ ID NO: 41555 - DNA, 120 bp, synthetic construct
  source 1..120: mol_type = other DNA
gcattgttttgaatgaaggagaatgcttttcaatttactttccatcttctaggcagattctgctgagaaacttagagaatatgggctttcccacatctgtagccatcctgtgctggtgac

SEQ ID NO: 41556 - DNA, 120 bp, synthetic construct; identical to SEQ ID NO: 28380
  source 1..120: mol_type = other DNA

SEQ ID NO: 41557 - DNA, 120 bp, synthetic construct; identical to SEQ ID NO: 28381
  source 1..120: mol_type = other DNA

SEQ ID NO: 41558 - DNA, 120 bp, synthetic construct
  source 1..120: mol_type = other DNA
cccagtaatgggattgctgggtcaaatggtatttctggttctaaatctttgaggatcaccacactgtcttccacaatgattgaactaatttacattctcaccaacggtgtaaaagagttt

SEQ ID NO: 41559 - DNA, 120 bp, synthetic construct
  source 1..120: mol_type = other DNA
atatgtaggggtattagttgtatggccctgtgctgacagatttgagctttgaggggcactggtagggtctgatttcctggggtaatgttaatgttggcgattaggaagactaaggtacag

SEQ ID NO: 41560 - DNA, 120 bp, synthetic construct; identical to SEQ ID NO: 11466
  source 1..120: mol_type = other DNA

SEQ ID NO: 41561 - DNA, 120 bp, synthetic construct; identical to SEQ ID NO: 11467
  source 1..120: mol_type = other DNA

SEQ ID NO: 41562 - DNA, 120 bp, synthetic construct; identical to SEQ ID NO: 11468
  source 1..120: mol_type = other DNA

SEQ ID NO: 41563 - DNA, 120 bp, synthetic construct
  source 1..120: mol_type = other DNA
ctctcttcttttttcatactaactcatttctgttaattgaggaagcaacaaaaaataggatcagtaccaaaggactagcctccttcctccacagagccctggtcctcttgccttctgcta

SEQ ID NO: 41564 - DNA, 120 bp, synthetic construct; identical to SEQ ID NO: 31891
  source 1..120: mol_type = other DNA

SEQ ID NO: 41565 - DNA, 120 bp, synthetic construct; identical to SEQ ID NO: 31892
  source 1..120: mol_type = other DNA

SEQ ID NO: 41566 - DNA, 120 bp, synthetic construct; identical to SEQ ID NO: 31893
  source 1..120: mol_type = other DNA

SEQ ID NO: 41567 - DNA, 120 bp, synthetic construct; identical to SEQ ID NO: 31894
  source 1..120: mol_type = other DNA

SEQ ID NO: 41568 - DNA, 120 bp, synthetic construct; identical to SEQ ID NO: 31895
  source 1..120: mol_type = other DNA

SEQ ID NO: 41569 - DNA, 120 bp, synthetic construct; identical to SEQ ID NO: 31896
  source 1..120: mol_type = other DNA

SEQ ID NO: 41570 - DNA, 120 bp, synthetic construct; identical to SEQ ID NO: 31897
  source 1..120: mol_type = other DNA

SEQ ID NO: 41571 - DNA, 120 bp, synthetic construct; identical to SEQ ID NO: 31898
  source 1..120: mol_type = other DNA

SEQ ID NO: 41572 - DNA, 120 bp, synthetic construct; identical to SEQ ID NO: 31899
  source 1..120: mol_type = other DNA

SEQ ID NO: 41573 - DNA, 120 bp, synthetic construct; identical to SEQ ID NO: 31900
  source 1..120: mol_type = other DNA

SEQ ID NO: 41574 - DNA, 120 bp, synthetic construct; identical to SEQ ID NO: 31901
  source 1..120: mol_type = other DNA

SEQ ID NO: 41575 - DNA, 120 bp, synthetic construct
  source 1..120: mol_type = other DNA
ggctctaataaaggtggggggcacactgcccggatccaggccgagatagggaaagactcgagacagcaagcacggtctgtgtcagaattctggagggggagactttagcatagatgggta

SEQ ID NO: 41576 - DNA, 120 bp, synthetic construct; identical to SEQ ID NO: 28056
  source 1..120: mol_type = other DNA

SEQ ID NO: 41577 - DNA, 120 bp, synthetic construct
  source 1..120: mol_type = other DNA
cattttatctaaaattttaaaaaataaaattaggctgggtgcagtggctcatgcctgcaatcctagcactttgtcatttacaaggcgggtgaattacctgaggtgggagttcaagaccag

SEQ ID NO: 41578 - DNA, 120 bp, synthetic construct
  source 1..120: mol_type = other DNA
gctaccataacaaataccacaaactgagtgacttaaacaacaaacatttattttctcacagttctggaggctagatctccaagatcgaggtcacgacaggtttggtttctcatgaggcct

SEQ ID NO: 41579 - DNA, 120 bp, synthetic construct; identical to SEQ ID NO: 28058
  source 1..120: mol_type = other DNA

SEQ ID NO: 41580 - DNA, 120 bp, synthetic construct
  source 1..120: mol_type = other DNA
ttcctttctttctttttttatttttttgagacaggttcttaatttgtcactcaggctggagtgcagtggcatgacttcagctcactacaacctccacctcctgggctcaagtgatactcc

SEQ ID NO: 41581 - DNA, 120 bp, synthetic construct
  source 1..120: mol_type = other DNA
gttttgttcttagaaatagggtagatttaatagacggaaggaaaaaaaagacaaaggaaggaaggaaagaaggaaggaaggaaggagggagggagggaaggaaggaaggaaggaagaagg

SEQ ID NO: 41582 - DNA, 120 bp, synthetic construct; identical to SEQ ID NO: 28059
  source 1..120: mol_type = other DNA

SEQ ID NO: 41583 - DNA, 120 bp, synthetic construct; identical to SEQ ID NO: 28060
  source 1..120: mol_type = other DNA

SEQ ID NO: 41584 - DNA, 120 bp, synthetic construct; identical to SEQ ID NO: 28061
  source 1..120: mol_type = other DNA

SEQ ID NO: 41585 - DNA, 120 bp, synthetic construct; identical to SEQ ID NO: 28062
  source 1..120: mol_type = other DNA

SEQ ID NO: 41586 - DNA, 120 bp, synthetic construct
  source 1..120: mol_type = other DNA
gtccagtgatggtgagcattttttcatgtgttttttggctgcataaatgtcttgagaagtgtctgttcatgtcctttgcccactttttgaggggttgtttgtttttttcttgtaaatttg

SEQ ID NO: 41587 - DNA, 120 bp, synthetic construct
  source 1..120: mol_type = other DNA
cttgtaaggtggattcctaggtattttattctctttgaagcaattgtgaatgggcgttcactcatgatttggctctctgtttgtctgttattggtgtataagaatgcttgtgatttttgt

SEQ ID NO: 41588 - DNA, 120 bp, synthetic construct
  source 1..120: mol_type = other DNA
cttcctggtttagtcttgggagagtgtatgtgtcaaggaatttatccatttcttctagagtttctagtttatttgcgtagaggtgtttgtagtattctctgatgtaaataaaatatctct

SEQ ID NO: 41589 - DNA, 120 bp, synthetic construct
  source 1..120: mol_type = other DNA
gttcatgacacatgcacacgtatgtttattgcggcattattcacaatagcaaagacttggaaccaacccaaatgtccaacaatgatagactggattaagaaaatgtggcacatatacacc

SEQ ID NO: 41590 - DNA, 120 bp, synthetic construct
  source 1..120: mol_type = other DNA
agtctttgctattgtgaatagtgccgcaataaacatacatgtgcatgtgtctttatagctgcatgatttataatcctttgtgtatatacccagaaatgggatggctgggtcaaatgatat

SEQ ID NO: 41591 - DNA, 120 bp, synthetic construct; identical to SEQ ID NO: 28048
  source 1..120: mol_type = other DNA

SEQ ID NO: 41592 - DNA, 120 bp, synthetic construct
  source 1..120: mol_type = other DNA
tgctatttctagttctagatccctgagaaatcgccacaccaacttccacaatggttgaaatggtttacagtcccaccaacagcataaaagtgttcctatatctctacatcctctccagca

SEQ ID NO: 41593 - DNA, 120 bp, synthetic construct
  source 1..120: mol_type = other DNA
tcattggtagcttgatggggatggcattgaatctataaattaccttgggcagtatggccattttcacgatattgattcttcctacccatgagcatggaattttcttccatttgtttgtat

SEQ ID NO: 41594 - DNA, 120 bp, synthetic construct
  source 1..120: mol_type = other DNA
ttgaactttgttggtttaaagtctgttttagcagagactgggattgcaaaccctgcctttttttgttttccatttgcttggtagatcttcctccatccctttattttgagcctatgtgtg

SEQ ID NO: 41595 - DNA, 120 bp, synthetic construct
  source 1..120: mol_type = other DNA
ttggttttcagctccatcaggtcctttaaggacttctctgcattggttattctagttatctggtcgtctaattttttttcaaagcttttaacttctttgccattcattcgaatttcctcc

SEQ ID NO: 41596 - DNA, 120 bp, synthetic construct; identical to SEQ ID NO: 28049
  source 1..120: mol_type = other DNA

SEQ ID NO: 41597 - DNA, 120 bp, synthetic construct; identical to SEQ ID NO: 28050
  source 1..120: mol_type = other DNA

SEQ ID NO: 41598 - DNA, 120 bp, synthetic construct; identical to SEQ ID NO: 28051
  source 1..120: mol_type = other DNA

SEQ ID NO: 41599 - DNA, 120 bp, synthetic construct; identical to SEQ ID NO: 28052
  source 1..120: mol_type = other DNA

SEQ ID NO: 41600 - DNA, 120 bp, synthetic construct; identical to SEQ ID NO: 28053
  source 1..120: mol_type = other DNA

SEQ ID NO: 41601 - DNA, 120 bp, synthetic construct
  source 1..120: mol_type = other DNA
gacatgaagtccttgcccatgcctatgtctgaatggtattgcctaggttttcttctagggtttttatggttttaggtctaacatttaagtctttaatccatcttgaattaatttttgtat

SEQ ID NO: 41602 - DNA, 120 bp, synthetic construct; identical to SEQ ID NO: 28054
  source 1..120: mol_type = other DNA

SEQ ID NO: 41603 - DNA, 120 bp, synthetic construct
  source 1..120: mol_type = other DNA
cagcaacggaacaaagctggacggaaaatgactttgacgagttgagagaagaaggcttcagacgatcaaactactccgaactacaggaggaaattcaaatcaaaggcaaagaagttaaaa

SEQ ID NO: 41604 - DNA, 120 bp, synthetic construct; identical to SEQ ID NO: 28055
  source 1..120: mol_type = other DNA

SEQ ID NO: 41605 - DNA, 120 bp, synthetic construct; identical to SEQ ID NO: 13432
  source 1..120: mol_type = other DNA

SEQ ID NO: 41606 - DNA, 120 bp, synthetic construct; identical to SEQ ID NO: 13433
  source 1..120: mol_type = other DNA

SEQ ID NO: 41607 - DNA, 120 bp, synthetic construct; identical to SEQ ID NO: 13421
  source 1..120: mol_type = other DNA

SEQ ID NO: 41608 - DNA, 120 bp, synthetic construct
  source 1..120: mol_type = other DNA
gctcctcatttcctagacgggatggcggccgggcagagacgctcctcactttccagactgggcagccaggcagaggggctcctcacatcccagacgatgggcggccaggcagagacgctc

SEQ ID NO: 41609 - DNA, 120 bp, synthetic construct; identical to SEQ ID NO: 13422
  source 1..120: mol_type = other DNA

SEQ ID NO: 41610 - DNA, 120 bp, synthetic construct; identical to SEQ ID NO: 13423
  source 1..120: mol_type = other DNA

SEQ ID NO: 41611 - DNA, 120 bp, synthetic construct; identical to SEQ ID NO: 13424
  source 1..120: mol_type = other DNA

SEQ ID NO: 41612 - DNA, 120 bp, synthetic construct; identical to SEQ ID NO: 13425
  source 1..120: mol_type = other DNA

SEQ ID NO: 41613 - DNA, 120 bp, synthetic construct; identical to SEQ ID NO: 13426
  source 1..120: mol_type = other DNA

SEQ ID NO: 41614 - DNA, 120 bp, synthetic construct; identical to SEQ ID NO: 13427
  source 1..120: mol_type = other DNA

SEQ ID NO: 41615 - DNA, 120 bp, synthetic construct; identical to SEQ ID NO: 13428
  source 1..120: mol_type = other DNA

SEQ ID NO: 41616 - DNA, 120 bp, synthetic construct; identical to SEQ ID NO: 13429
  source 1..120: mol_type = other DNA

SEQ ID NO: 41617 - DNA, 120 bp, synthetic construct; identical to SEQ ID NO: 13430
  source 1..120: mol_type = other DNA

SEQ ID NO: 41618 - DNA, 120 bp, synthetic construct; identical to SEQ ID NO: 13431
  source 1..120: mol_type = other DNA

SEQ ID NO: 41619 - DNA, 120 bp, synthetic construct; identical to SEQ ID NO: 13434
  source 1..120: mol_type = other DNA

SEQ ID NO: 41620 - DNA, 120 bp, synthetic construct; identical to SEQ ID NO: 13435
  source 1..120: mol_type = other DNA

SEQ ID NO: 41621 - DNA, 120 bp, synthetic construct; identical to SEQ ID NO: 13436
  source 1..120: mol_type = other DNA

SEQ ID NO: 41622 - DNA, 120 bp, synthetic construct; identical to SEQ ID NO: 13437
  source 1..120: mol_type = other DNA

SEQ ID NO: 41623 - DNA, 120 bp, synthetic construct; identical to SEQ ID NO: 19592
  source 1..120: mol_type = other DNA

SEQ ID NO: 41624 - DNA, 120 bp, synthetic construct; identical to SEQ ID NO: 19593
  source 1..120: mol_type = other DNA

SEQ ID NO: 41625 - DNA, 120 bp, synthetic construct; identical to SEQ ID NO: 19594
  source 1..120: mol_type = other DNA

SEQ ID NO: 41626 - DNA, 120 bp, synthetic construct; identical to SEQ ID NO: 19595
  source 1..120: mol_type = other DNA

SEQ ID NO: 41627 - DNA, 120 bp, synthetic construct
  source 1..120: mol_type = other DNA
gagtagctgggaccacaggtgagtaccgccatattttaaattttctttctttctttttgagacagggtcttgctctgtcgcccaggctgaagtgcaatggtgcgatctcggctaattgca

SEQ ID NO: 41628 - DNA, 120 bp, synthetic construct; identical to SEQ ID NO: 19596
  source 1..120: mol_type = other DNA

SEQ ID NO: 41629 - DNA, 120 bp, synthetic construct; identical to SEQ ID NO: 19589
  source 1..120: mol_type = other DNA

SEQ ID NO: 41630 - DNA, 120 bp, synthetic construct
  source 1..120: mol_type = other DNA
gtgactatggaaattgctactttgcattcagtgttgtgggatttgcacgggcagtactcattttccctcatacttcggattgaccacagttgttacggcactcttataaataggattttc

SEQ ID NO: 41631 - DNA, 120 bp, synthetic construct
  source 1..120: mol_type = other DNA
ctgttattttgctatttgcctgttagacatgactgatgacatatctgaaagacaagtatgttgagagttgctggtgtaaaatacgtttgaaatagttgatctacaaaggccatgggaaaa

SEQ ID NO: 41632 - DNA, 120 bp, synthetic construct
  source 1..120: mol_type = other DNA
agaaagctcattctgtgttgcactgagcctgagttagtgcaatggaagaacagaataccagcaaccagattccagaagtatcatctttctaacagggctatgtcctcccccagaaaggtc

SEQ ID NO: 41633 - DNA, 120 bp, synthetic construct; identical to SEQ ID NO: 19590
  source 1..120: mol_type = other DNA

SEQ ID NO: 41634 - DNA, 120 bp, synthetic construct; identical to SEQ ID NO: 19591
  source 1..120: mol_type = other DNA

SEQ ID NO: 41635 - DNA, 120 bp, synthetic construct
  source 1..120: mol_type = other DNA
agtactcagaagactgaggggagaggattatttgagcccaagagtttgaggctgcagtgagctatgattgcaccactgcactctagcctgggcaacagaatgagatcgtgtctcagggag

SEQ ID NO: 41636 - DNA, 120 bp, synthetic construct; identical to SEQ ID NO: 19582
  source 1..120: mol_type = other DNA

SEQ ID NO: 41637 - DNA, 120 bp, synthetic construct; identical to SEQ ID NO: 19583
  source 1..120: mol_type = other DNA

SEQ ID NO: 41638 - DNA, 120 bp, synthetic construct; identical to SEQ ID NO: 27804
  source 1..120: mol_type = other DNA

SEQ ID NO: 41639 - DNA, 120 bp, synthetic construct
  source 1..120: mol_type = other DNA
tataaccaaactttatgttaatttttttttctatttttgcagagacagggtctcactatgttacccaggctggtcttgaactcctggtctcaagcaatcctcccacctcagcctcccaaa

SEQ ID NO: 41640 - DNA, 120 bp, synthetic construct
  source 1..120: mol_type = other DNA
accagtcatctcattagcacgcaaaaagaccttacattttgaagactcctaaacagggcagagaacaaatatgtatttcttattatgtcacagggagcaattcctccagggacaggagca

SEQ ID NO: 41641 - DNA, 120 bp, synthetic construct
  source 1..120: mol_type = other DNA
acctgcctcggcctctgaaagtgctgggattacaggcgtgagccaccgcccctgttctgataattttttaaaaataatttaatcaatttccatagctaaggctttgtaaaatgaaggttc

SEQ ID NO: 41642 - DNA, 120 bp, synthetic construct; identical to SEQ ID NO: 27800
  source 1..120: mol_type = other DNA

SEQ ID NO: 41643 - DNA, 120 bp, synthetic construct; identical to SEQ ID NO: 33542
  source 1..120: mol_type = other DNA

SEQ ID NO: 41644 - DNA, 120 bp, synthetic construct; identical to SEQ ID NO: 33543
  source 1..120: mol_type = other DNA

SEQ ID NO: 41645 - DNA, 120 bp, synthetic construct
  source 1..120: mol_type = other DNA
cagccctgggagtggctgtctccttaatattttcttccctgggcccctgacttgcctcatcctagtcctggccctgtgtcatatataagcgttttttgtgtttttttttttttttttttg

SEQ ID NO: 41646 - DNA, 120 bp, synthetic construct; identical to SEQ ID NO: 33545
  source 1..120: mol_type = other DNA

SEQ ID NO: 41647 - DNA, 120 bp, synthetic construct; identical to SEQ ID NO: 33546
  source 1..120: mol_type = other DNA

SEQ ID NO: 41648 - DNA, 120 bp, synthetic construct; identical to SEQ ID NO: 33547
  source 1..120: mol_type = other DNA

SEQ ID NO: 41649 - DNA, 120 bp, synthetic construct; identical to SEQ ID NO: 33548
  source 1..120: mol_type = other DNA

SEQ ID NO: 41650 - DNA, 120 bp, synthetic construct
  source 1..120: mol_type = other DNA
tttattgttgagttttgaaagtaaaaaaatatattctaattttttttttttttttgaggcggagtccggctctgtcacccaggctggaatgcagtggtgcgatctcggctcactgcaagc

SEQ ID NO: 41651 - DNA, 120 bp, synthetic construct
  source 1..120: mol_type = other DNA
cacaatggttgcactagtttacagtcccaccaacagtgtaaaagtgttcctatttgtccacatcctctccagcacctgttgtttcctgactttttaatgattgccattctaactggtgtg

SEQ ID NO: 41652 - DNA, 120 bp, synthetic construct; identical to SEQ ID NO: 35370
  source 1..120: mol_type = other DNA

SEQ ID NO: 41653 - DNA, 120 bp, synthetic construct; identical to SEQ ID NO: 16510
  source 1..120: mol_type = other DNA

SEQ ID NO: 41654 - DNA, 120 bp, synthetic construct; identical to SEQ ID NO: 16511
  source 1..120: mol_type = other DNA

SEQ ID NO: 41655 - DNA, 120 bp, synthetic construct
  source 1..120: mol_type = other DNA
tagactcatttaaacgctaaaggctatgtcattgtaatattataaatgagcggtgtgtgtgtatttgggtgtatattatatatataggactttgaaatgagcatcttactgctcattcag

SEQ ID NO: 41656 - DNA, 120 bp, synthetic construct; identical to SEQ ID NO: 28367
  source 1..120: mol_type = other DNA

SEQ ID NO: 41657 - DNA, 120 bp, synthetic construct
  source 1..120: mol_type = other DNA
tatctcattgtggttttgatttgcatttctctgatggccagtgatgatgagcattttttcatgtgttctttggctgcataaatgtcttcttttgagaagtgtctgttcatgtccttcgcc

SEQ ID NO: 41658 - DNA, 120 bp, synthetic construct
  source 1..120: mol_type = other DNA
ttccatttgtttgtatcctctttgatttcattgagcagtggtttgtagttctccttgaagaggtccttcacatcccttgtaagttggattcctaggtattttattctctttgaagcaatt

SEQ ID NO: 41659 - DNA, 120 bp, synthetic construct; identical to SEQ ID NO: 28368
  source 1..120: mol_type = other DNA

SEQ ID NO: 41660 - DNA, 120 bp, synthetic construct
  source 1..120: mol_type = other DNA
cttggttttttgtccttgcgatagtttgctgagtatgatggtttccagcttcatccatgtccctacaaaggacatgaactcatcattttttatggctgcatagtattccatggtgtatat

SEQ ID NO: 41661 - DNA, 120 bp, synthetic construct
  source 1..120: mol_type = other DNA
catgagactttggtgaagttgcctgtcagctaaggagattttgggccgagactatggggttttctagatatacaatcatgtcatagtaaagcactcctcagcaaatgtaaaagaacagaa

SEQ ID NO: 41662 - DNA, 120 bp, synthetic construct
  source 1..120: mol_type = other DNA
gagggaatcctccctagctcattttatgaggccagcctcatcctgttaccaaagcctggcagagacacaacaaaaaaagagaattttagaccaatatccctgatgaacatcgatgcaaaa

SEQ ID NO: 41663 - DNA, 120 bp, synthetic construct
  source 1..120: mol_type = other DNA
gtggggagagggtcagcagacaaacatgtgaacaaaggtctttgcatcatagacaaggtaaaggattaagtgctgtgcttttagatatgcatacacataaacatctcaatgctttacgaa

SEQ ID NO: 41664 - DNA, 120 bp, synthetic construct; identical to SEQ ID NO: 24509
  source 1..120: mol_type = other DNA

SEQ ID NO: 41665 - DNA, 120 bp, synthetic construct
  source 1..120: mol_type = other DNA
tttttgcacattgattttgtatcctgagactttgttgaagttgcttaccagcttaaggagattttgggctgagatgatggggttttctagatatacaatcatgtcatctgcaaacaggga

SEQ ID NO: 41666 - DNA, 120 bp, synthetic construct
  source 1..120: mol_type = other DNA
ttctagattttctagtttatttgcatagaggtgtttatagtattctctgatgctagtttgtatttctgtgggatcagtggtgatgtccccttttcattttttattgtgtctatttgattc

SEQ ID NO: 41667 - DNA, 120 bp, synthetic construct
  source 1..120: mol_type = other DNA
tttctgtcttgttgatccatctaatgttgacagtggggtgttaaaatctcccgttattattgtgtgggagtctaagtctctttgtaggtctctaagaacttgctttgtgaatctgggtgc

SEQ ID NO: 41668 - DNA, 120 bp, synthetic construct
  source 1..120: mol_type = other DNA
gcaggccaacattcagattcaggaaatacagagaacgccacaaagatactcctcgagaagagcaactccaggacacataattgtcagattcaccaaagttgaaatgaaggaaaaaatgtt

SEQ ID NO: 41669 - DNA, 120 bp, synthetic construct
  source 1..120: mol_type = other DNA
gtagaggttgcagtgagctgagattgtgccattgcactccagcctgggcaacagagccagactgtctcaaaaataaataaataaaacaaatcggcacaggccctcaataaataaagatcc

SEQ ID NO: 41670 - DNA, 120 bp, synthetic construct
  source 1..120: mol_type = other DNA
ctcaagtgatcctcccagctcagcctcccgagtagctgggactacaggcacacaaaaccatgcccggctaatttttgtgttttttgtagagatgaggtttcaccatgttgcccaggctgg

SEQ ID NO: 41671 - DNA, 120 bp, synthetic construct; identical to SEQ ID NO: 19581
  source 1..120: mol_type = other DNA

SEQ ID NO: 41672 - DNA, 120 bp, synthetic construct; identical to SEQ ID NO: 7768
  source 1..120: mol_type = other DNA

SEQ ID NO: 41673 - DNA, 120 bp, synthetic construct; identical to SEQ ID NO: 7769
  source 1..120: mol_type = other DNA

SEQ ID NO: 41674 - DNA, 120 bp, synthetic construct
  source 1..120: mol_type = other DNA
aaattcactgacaattgccctgcagaagaagtattataccaagttacagatcaagcagcagtgtatgggggaggagggctttccccaaaaccacaccaaatctatagtgccattttaaaa

SEQ ID NO: 41675 - DNA, 120 bp, synthetic construct
  source 1..120: mol_type = other DNA
ttttttatttatttttatttatttatttattattattatactttaagttttagggtacatgtgcacaatgtgcaggttagttacatatgtatacatgtgccatgctggtgtgctgcaccc

SEQ ID NO: 41676 - DNA, 120 bp, synthetic construct
  source 1..120: mol_type = other DNA
aagtttaagtctttaatccttcttgaattaatttttgtataaggtgtaaggaagggatccagtttcagctttctacatatggctagccagttttcccagcaccatttattaaatagggaa

SEQ ID NO: 41677 - DNA, 120 bp, synthetic construct
  source 1..120: mol_type = other DNA
gtgctgggattacaggcatgagccaccacacccggccaaaatttgccagtttttagacctcatataactggtatcatacagtgtataccatttgctgtctcaattcgttaacctgacaaa

SEQ ID NO: 41678 - DNA, 120 bp, synthetic construct
  source 1..120: mol_type = other DNA
tcatgtccctcgcccactttttgatggggttgtttgttttttccttgtaaatttgtttgagttcattgtagattctggatattagccctttgtcagatgagtaggttgcgaaaattttct

SEQ ID NO: 41679 - DNA, 120 bp, synthetic construct
  source 1..120: mol_type = other DNA
atcagcttaaggagattttgggctgagacgatggggttttctagataaataatcatgtcgtctgcaaacagggacaatttgacttcctcttttcctaattgaataccctttatttccttc

SEQ ID NO: 41680 - DNA, 120 bp, synthetic construct
  source 1..120: mol_type = other DNA
gcctattattggtctattcagagattcaacttcttcctggtttagtcttgggagagtgtatgtgtcgaggaatgtatccatttcttctagattttctagtttatttgcgtagaggtgttt

SEQ ID NO: 41681 - DNA, 120 bp, synthetic construct
  source 1..120: mol_type = other DNA
gttgaattgatccctttaccattatgtaatggccttctttgtctcttttgatctttgttggtttaaagtctgttttatcagagactaggattgcaacctctgcctttttttgttttccat

SEQ ID NO: 41682 - DNA, 120 bp, synthetic construct
  source 1..120: mol_type = other DNA
tccacatcactttcaggtacaccaatcagacgtagatttggtcttttcacatagtcccatatttcttggaggctttgctcatttctttttattcttttttctctaaacttcccttctcgc

SEQ ID NO: 41683 - DNA, 120 bp, synthetic construct
  source 1..120: mol_type = other DNA
ccttgagctgtggtgggctccacccagttcgagcttccaggctgctttgtttacctaagcaagcctgggcaatggcgggcgcccctcccccagcctcgttgccaccttgcagtttgatct

SEQ ID NO: 41684 - DNA, 120 bp, synthetic construct; identical to SEQ ID NO: 25460
  source 1..120: mol_type = other DNA

SEQ ID NO: 41685 - DNA, 120 bp, synthetic construct
  source 1..120: mol_type = other DNA
agtgatggtgagcattttttcatgtgttttttggctgcataaatgtcttcttttgagaagtgtctgttcatgtccttcgcccactttttgatggggttgtttgtttttttctgtaaattt

SEQ ID NO: 41686 - DNA, 120 bp, synthetic construct
  source 1..120: mol_type = other DNA
atgagcatggaatgttcttccatttgtttgtatcctcttttatttccttgaacagcgatttgtagttgtccttgaagaggtccttcacatcccttgtaagttggattcctaggtatttta

SEQ ID NO: 41687 - DNA, 120 bp, synthetic construct
  source 1..120: mol_type = other DNA
tctttttctattgattgtaatagtttcagaaggaatggtaccagttcctccttgtacctctggtagaattcggctgtgaatccatctggtcctggactctttttggttggtaagctattg

SEQ ID NO: 41688 - DNA, 120 bp, synthetic construct
  source 1..120: mol_type = other DNA
gtggagagttctgtagatgtctattaggtccgcttggtgcagagctgagttcaattcctgggtatccttgttaactttctgtctcgttgatctgtctaatattgacagtgggatgttaaa

SEQ ID NO: 41689 - DNA, 120 bp, synthetic construct
  source 1..120: mol_type = other DNA
tctggctacccttaacattttttccttcatttcaactttggtgaattggacaattatgtgtcttggagttgctcttctcgaggagtatctttgtggcgttctctgtatttcctgaatctg

SEQ ID NO: 41690 - DNA, 120 bp, synthetic construct
  source 1..120: mol_type = other DNA
aggtctgttggagtaccctgcagtgtgaggtgtcagtgtgcccctgctcatggtgcctaccagttaggctgctcgggggtcaggggtcagcgatccacttgaggaggcagtctgcccgtt

SEQ ID NO: 41691 - DNA, 120 bp, synthetic construct; identical to SEQ ID NO: 25461
  source 1..120: mol_type = other DNA

SEQ ID NO: 41692 - DNA, 120 bp, synthetic construct; identical to SEQ ID NO: 25462
  source 1..120: mol_type = other DNA

SEQ ID NO: 41693 - DNA, 120 bp, synthetic construct; identical to SEQ ID NO: 25463
  source 1..120: mol_type = other DNA

SEQ ID NO: 41694 - DNA, 120 bp, synthetic construct
  source 1..120: mol_type = other DNA
ttggttccaagtctttgctattgtgaataatgccacaataaacatacgtgtgcatgtgtctttatagcagcatgatttatagtccttcgggtatatacccagtaatgggatggctgggac

SEQ ID NO: 41695 - DNA, 120 bp, synthetic construct
  source 1..120: mol_type = other DNA
caggtagtgtgatgcctccagctttgttcttttggcttaggattgacatggcgatgtgggctcttttttggttccatatgaactttaaagtagttttttccaattctgtgaagaaagtca

SEQ ID NO: 41696 - DNA, 120 bp, synthetic construct
  source 1..120: mol_type = other DNA
gctgctggattcggtttgccagtattttattgaggatttttgcatcaatgttcatcaaggatattggtctaaaattctcttttttggttgtgtctctgcccggctttggtatcaggatga

SEQ ID NO: 41697 - DNA, 120 bp, synthetic construct
  source 1..120: mol_type = other DNA
tttctttatgtacccagtagtcattcaggagcagcttgttcagtttccatgtagttgagcggttttgcgtgagattcttaatcctgagttgtagtttgattgcactgtggtctcagagat

SEQ ID NO: 41698 - DNA, 120 bp, synthetic construct
  source 1..120: mol_type = other DNA
tgaagcttagtttggctggatatgaaattctgggttgaaaattcttttctttaacaatgttgaatattgtcccccactctcttctggcttgtagagtttctgccgagagatccactgtta

SEQ ID NO: 41699 - DNA, 120 bp, synthetic construct
  source 1..120: mol_type = other DNA
acttttggtctttgatgatggtgatgtacagatgggtttttggtgtggatgtcctttctgtttgttatctaacagacaggaccctcagctgcaggtctgttggagtactgggccctgtga

SEQ ID NO: 41700 - DNA, 120 bp, synthetic construct
  source 1..120: mol_type = other DNA
attcaccaaagttgaaatgaaggaaaaaatgttaagggcagccagaaagaaaggcagggttacccacaaagggaagcccatcagactaacagctgatctctcggcagaaactctacaagc

SEQ ID NO: 41701 - DNA, 120 bp, synthetic construct
  source 1..120: mol_type = other DNA
gcggacctaatacccatctacagaactctccaccccaaatcaacagaatatacatttttttcagcacaaaaccacacctattccaaaactgaccacatagttggaagtaaagcactcctc

SEQ ID NO: 41702 - DNA, 120 bp, synthetic construct
  source 1..120: mol_type = other DNA
tgatgaacattgatgcaaaaatcctcaataaaatactggcaaaccaaatccagcggcacatcaaaaagcttatccaccatgatcaagtgggcttcatccctgggatgcaaggctggttca

SEQ ID NO: 41703 - DNA, 120 bp, synthetic construct
  source 1..120: mol_type = other DNA
cttcaaactatactacaaggctacagtaaccaaaacagcatggtactggtaccaaaacagagatatagatcaatggaacagatcagagccctcagaaataacgctgcatatctacaacta

SEQ ID NO: 41704 - DNA, 120 bp, synthetic construct
  source 1..120: mol_type = other DNA
cacatgcacacatatgtttattgtggcactatgcacaatagcaaagacttggaaccaaccaaatatccaacaatgatagactggattaagaaaatgtggcacatatacaccgtggaatac

SEQ ID NO: 41705 - DNA, 120 bp, synthetic construct
  source 1..120: mol_type = other DNA
tggtgacagaatctctcagcatttgctagtctgtaaagtattttatttctccttcacttatgaagcttagtttggctggatatgaaattctgggttgaaaattcttttctttaagaatgt

SEQ ID NO: 41706 - DNA, 120 bp, synthetic construct
  source 1..120: mol_type = other DNA
atttggtaacactattcagaagtaggagagtatcatgtatacattacgtatacatatacaagttttcatgtgcgtccgtgtgaagagaccaccaaacaggctttgtgtgagcaacatggc

SEQ ID NO: 41707 - DNA, 120 bp, synthetic construct
  source 1..120: mol_type = other DNA
gtatttacttcaagagttaagagtggcagtttggggatagcaccaggagatatcagttgtgatggcttggaaaaacagtgtaaaccagcagtgtaaacaagagcagggcatgtatgagta

SEQ ID NO: 41708 - DNA, 120 bp, synthetic construct
  source 1..120: mol_type = other DNA
catcatctgcctttgctggtgtgtggcgattaggcctggtggaactgccatcaataaatcaagcgtgatcagggtgaggaacaggaaagaaagaaatttggggaaatggggttaatgtca

SEQ ID NO: 41709 - DNA, 120 bp, synthetic construct
  source 1..120: mol_type = other DNA
aaaaggccatgctgtagcaggcgagtgataacaggctttaatctttttaaagtgtgctgtgggatgggatattggcgttgagtggggtaagggtgattaggttttaatgagatggtaagg

SEQ ID NO: 41710 - DNA, 120 bp, synthetic construct
  source 1..120: mol_type = other DNA
atcttgtagggtggaaaaattgaaagtgccgttttctggctatttggaactactcttgagtttgtattggggtcaagcggcattgcagaagaaaataagactcttagattttaggtcagg

SEQ ID NO: 41711 - DNA, 120 bp, synthetic construct
  source 1..120: mol_type = other DNA
gggcgtacaggtgcaggtcacaggggatacgatggcttggcttgggctcagaggcctgacacaagtaaacctaaatatacatagccatacagacagcttcaaacagagatcttagagttt

SEQ ID NO: 41712 - DNA, 120 bp, synthetic construct; identical to SEQ ID NO: 7767
  source 1..120: mol_type = other DNA

SEQ ID NO: 41713 - DNA, 120 bp, synthetic construct
  source 1..120: mol_type = other DNA
aactgtgggagttcagtcaggctggtgggaaatattttaaaaatagttatagaaatagaaacaaaccttcttggaaggccagagggtttgcataagctgcagtaatagatcaggctggag

SEQ ID NO: 41714 - DNA, 120 bp, synthetic construct
  source 1..120: mol_type = other DNA
gattaggtttagggtagaagaggatgcaaaggtaaataaaatatgacacactttgttatggtgtggctgtgtccccatccaaatctcatcttgacctgtagatctcgtaatccccacatg

SEQ ID NO: 41715 - DNA, 120 bp, synthetic construct
  source 1..120: mol_type = other DNA
ggggcggccgggcagagacgctcctcaactcccagatggggtggcggccgggcagaggcgctcctcacatcccagacagggcggcggggcagaggcgctccccacatcccagacgatggg

SEQ ID NO: 41716 - DNA, 120 bp, synthetic construct; identical to SEQ ID NO: 26891
  source 1..120: mol_type = other DNA

SEQ ID NO: 41717 - DNA, 120 bp, synthetic construct
  source 1..120: mol_type = other DNA
ttagggtacatgtgcacaacgtgcaggtttgttacatatgtatacatatgccatgctggtgtgctgcacccattaactcgtcatttagcattaggtatatctcctaatgctatccctccc

SEQ ID NO: 41718 - DNA, 120 bp, synthetic construct
  source 1..120: mol_type = other DNA
gtgtaaggaagggatccagtttcagctttccatatatggctagccagttactttcaaaaaacttactatgaacttaaattgaatagcaggtattacatctcttcaaaattctgtagtcat

SEQ ID NO: 41719 - DNA, 120 bp, synthetic construct; identical to SEQ ID NO: 26892
  source 1..120: mol_type = other DNA

SEQ ID NO: 41720 - DNA, 120 bp, synthetic construct
  source 1..120: mol_type = other DNA
cccattttgtaggttgcctgttcactctgatggtagtttcttttgctgtgcagaagctcttgagtttaattaggtcccatttgtcaattttgtcttttgttgccattgcttttggtgttt

SEQ ID NO: 41721 - DNA, 120 bp, synthetic construct
  source 1..120: mol_type = other DNA
atttgacttcctcttttcctaattgaataccgtttatttccttctcctgcctaattgccctggccagaacttccaacactatgttgaataggagtggtgagagagggcatccctgtcttg

SEQ ID NO: 41722 - DNA, 120 bp, synthetic construct
  source 1..120: mol_type = other DNA
cggtctatttattttgtcgatcctttcaaaaaaccagctcctggattcattaattttttgaagggttttttgtgtctctatttccttcagttctgctctgattttagttatttcttgcct

SEQ ID NO: 41723 - DNA, 120 bp, synthetic construct
  source 1..120: mol_type = other DNA
tgtgttttatcagagagtaggattgcaacacctgcctttttttgttttccatttgcttggtagattttcctcaatctttttattttgagcctatgtgtgtctctgcacgtgagatgggtt

SEQ ID NO: 41724 - DNA, 120 bp, synthetic construct
  source 1..120: mol_type = other DNA
agttatacattcttctaaatttttttcaaagttttcaacttctttgcctttggtttgaatgtcctcccgtagctcagagtaatttgatcgtctgaagccttcttctctcagctggtgaaa

SEQ ID NO: 41725 - DNA, 120 bp, synthetic construct
  source 1..120: mol_type = other DNA
gctcatgctgggagctgtagaccagagctgttcctattcgtccatcttggctcctccccctggtagttttttttaatggacgcttgacattcgaaagctcttttagaacttaaaaaattt

SEQ ID NO: 41726 - DNA, 120 bp, synthetic construct; identical to SEQ ID NO: 26893
  source 1..120: mol_type = other DNA

SEQ ID NO: 41727 - DNA, 120 bp, synthetic construct; identical to SEQ ID NO: 26894
  source 1..120: mol_type = other DNA

SEQ ID NO: 41728 - DNA, 120 bp, synthetic construct; identical to SEQ ID NO: 26895
  source 1..120: mol_type = other DNA

SEQ ID NO: 41729 - DNA, 120 bp, synthetic construct
  source 1..120: mol_type = other DNA
tccacaatggttgaactagtttacagtcccaccaacagtgtaaaagtgttcctatttctccacaccctttccagcacctgttgtttcctgacttattaatgattgccgttctaactggtg

SEQ ID NO: 41730 - DNA, 120 bp, synthetic construct
  source 1..120: mol_type = other DNA
ttcttttggcttaggattgccttggcgatgcaggctcttttttggttccatacaaactttaaagtagttttttccaattctgtgaagaaagtcattggtagcttgatggggatggcattg

SEQ ID NO: 41731 - DNA, 120 bp, synthetic construct
  source 1..120: mol_type = other DNA
agggatgaagcccacttaatcatggtggataagctttttgatgtgctgctggattcgttttgccagtattttattgaggatttttgcatcaatgttcatcaaggatattggtctaaaatt

SEQ ID NO: 41732 - DNA, 120 bp, synthetic construct
  source 1..120: mol_type = other DNA
tctctgttcttttacatttgctgaggagagctttacttccaagtacgtggtcatttttggaataggtgtggtgtggtgctgaaaaaaatgtatattctgttgatttggggtggagagttc

SEQ ID NO: 41733 - DNA, 120 bp, synthetic construct
  source 1..120: mol_type = other DNA
aagaatgttgaatattggcccccactctcttctggcttgtagggtttctgccgagagatccgctgttagtctgatgggcttccctatgagggtaacccgacctttctctctggctgccct

SEQ ID NO: 41734 - DNA, 120 bp, synthetic construct
  source 1..120: mol_type = other DNA
cgtgtgaggtgtcagtgtgcccctgctggggggtgcctcccagttaggctgcttcggggtcaggggtcaggcacccacttgaggaggcagtctgcccgttctcagatctccagctgcgtg

SEQ ID NO: 41735 - DNA, 120 bp, synthetic construct; identical to SEQ ID NO: 26896
  source 1..120: mol_type = other DNA

SEQ ID NO: 41736 - DNA, 120 bp, synthetic construct
  source 1..120: mol_type = other DNA
tgtcttcttttgagaagtgtctgttcatgtccttcgcccactttttgagggggttgtttttttttttcttgtaaatttgttttgagttcattgtagattctggatattagccctttgtca

SEQ ID NO: 41737 - DNA, 120 bp, synthetic construct
  source 1..120: mol_type = other DNA
attgtgaatgggagttcactcatgatttggctctctgtttgtctattattggtgtataagagtgcttgtgatttttgtacattgattttgtatcctgagagtttgctgaagttgcttatc

SEQ ID NO: 41738 - DNA, 120 bp, synthetic construct
  source 1..120: mol_type = other DNA
attggaatagtttcagaaggaatggtaccacttcctccttgtacctctggtagaattcgtctgtgaatccatctggtcctggactctttttggttggtaaactattgattattgccacaa

SEQ ID NO: 41739 - DNA, 120 bp, synthetic construct
  source 1..120: mol_type = other DNA
tatccttgttgactttctgtctcgttgatctgtttaatgttgacagtggggtgttaaagtctcccattattaatgtgtgggagtctaagtctctttgtaggtcactcaggacttgcttta

SEQ ID NO: 41740 - DNA, 120 bp, synthetic construct
  source 1..120: mol_type = other DNA
cagacgtagatttggtcttttcacatagtctcatatttcttggaggctttgctcgtttctttttattcttttttctctaaactttccttctcacttcatttcattcatttcatcttccat

SEQ ID NO: 41741 - DNA, 120 bp, synthetic construct
  source 1..120: mol_type = other DNA
caatcagcgagactccatgggtgtaggaccctccgagccaggtgcgggatataatcttgtggtgcgtcgtgttttaagccggtcggaaaagcgcagtattcgggtgggagtggcccgatt

SEQ ID NO: 41742 - DNA, 120 bp, synthetic construct; identical to SEQ ID NO: 26897
  source 1..120: mol_type = other DNA

SEQ ID NO: 41743 - DNA, 120 bp, synthetic construct
  source 1..120: mol_type = other DNA
gaaagaagagacattgtattagcatttagacatgcttccatgtgagagtccaaggagcatttgaaatgacttagtgaaaatctgtctgttctcagccactctaatcccacccccatgcat

SEQ ID NO: 41744 - DNA, 120 bp, synthetic construct
  source 1..120: mol_type = other DNA
aagtaaaggtaatccataatcccccaacctagaaacaatcattctcaatgtttacttgaatttctatcaacttcttactaggcatatgtacaagttttactgctgttgttgaaaatgtgc

SEQ ID NO: 41745 - DNA, 120 bp, synthetic construct
  source 1..120: mol_type = other DNA
tcctaccatctgatgattttgaccaagtcatgccttctctgagtctcagttttctcttctctaagatagtgagattgagactgacaccgagcattgcctgggaatcacataagataatgc

SEQ ID NO: 41746 - DNA, 120 bp, synthetic construct
  source 1..120: mol_type = other DNA
taacttaaaatctaccttttcccagagtgaagcaggtcaaatccttcatttattttttcaaaaggtaaaacatgggttattaacgcatccagtgaaaacttcttagccataaaatcagcc

SEQ ID NO: 41747 - DNA, 120 bp, synthetic construct
  source 1..120: mol_type = other DNA
taggaaatgcccagaaaacggttttttaatgaaagaatggatgaataaattggagtgcacttaatttttcctaataaaggaataaagtggtagatatcatcacaaatatatattaagtcc

SEQ ID NO: 41748 - DNA, 120 bp, synthetic construct
  source 1..120: mol_type = other DNA
caaagatgatgtaagtactgcaagattggaaatagtatttcatatcaataacgccaactgaggccgggcgtggtagctcgttcctatattctcagcatttttggagggtgaggtaggaga

SEQ ID NO: 41749 - DNA, 120 bp, synthetic construct
  source 1..120: mol_type = other DNA
gtcatttcctttagcacctcctggatgggtttcttgtagtcttgagggttgatgcattcagtggcacccaactctttggcctttgcaaatttgtccttgttgatgtccaccgcaatgatt

SEQ ID NO: 41750 - DNA, 120 bp, synthetic construct
  source 1..120: mol_type = other DNA
gacgaggcaattgaacaagggactaagagctaaagtcacagaaatttggaaaagatgccatctacatttttttaattggccaggggatatttattaaacctagtctcccatagtccgcct

SEQ ID NO: 41751 - DNA, 120 bp, synthetic construct
  source 1..120: mol_type = other DNA
aaatctacaaaaataatcttcgattcttgtgagacattccttccctttgggttcctgacagtctgcgtgtaactgtttttatcacccattgccattcttaccttggcaacattgactgca

SEQ ID NO: 41752 - DNA, 120 bp, synthetic construct
  source 1..120: mol_type = other DNA
ttgaggaaaactatcaaaaatgggacaaagaacaattccagaaattcctctggaaatttcaaccctccacaataagttaggcacttttaggataagaactgactttgaaatgtttttagc

SEQ ID NO: 41753 - DNA, 120 bp, synthetic construct
  source 1..120: mol_type = other DNA
catttaagcatggctgaaagtaataaggcagacattgttgatggtggatggctctttctatgtttctttcatttcctttcacctagtctgcttcattgattccttgctcaggaagagaga

SEQ ID NO: 41754 - DNA, 120 bp, synthetic construct
  source 1..120: mol_type = other DNA
cccagttccctgaaattgcgcttccaaaatgttttcaagggttttgctaataatccctactatcccaagtatgaaagattcagtttatcctcaaggttgaccaggctgaaaccctcctct

SEQ ID NO: 41755 - DNA, 120 bp, synthetic construct
  source 1..120: mol_type = other DNA
ttaggccaaaaggatctgagtttataaggatatatttaccttcctgcctgggatgacatctctttctctctcttttcctattctcctcttttaattttctctctccaccacttctgtgtg

SEQ ID NO: 41756 - DNA, 120 bp, synthetic construct
  source 1..120: mol_type = other DNA
caatatgtagtcttttatccctcacctcccctttcaaccttccccctcgagttcccaaagttcatgatatcattctcatgcctttgcatcctcatagcctaactctctcttataaatgag

SEQ ID NO: 41757 - DNA, 120 bp, synthetic construct
  source 1..120: mol_type = other DNA
gtgaggtggaataagaacagtaacaatgggccacccatgtgatttccaaccagtcttattgatatgaacctgttttgtcacagagtgtatagagaagcctcagagcctttaaactgagtt

SEQ ID NO: 41758 - DNA, 120 bp, synthetic construct
  source 1..120: mol_type = other DNA
gatacagattctatacattctttttgaaggtatttaggaatagcttatttccactgtagttcagtatacattacatattatagcatatattgcatatcatatttcagtgtatcatttcta

SEQ ID NO: 41759 - DNA, 120 bp, synthetic construct
  source 1..120: mol_type = other DNA
gtcacccccccccactttatttgttttcatatatcatgagaagtcaaagaatcaaagcaatatattctcacagccatgcacattttctccctgtcttcagtcctgtgtctgtcactctca

SEQ ID NO: 41760 - DNA, 120 bp, synthetic construct
  source 1..120: mol_type = other DNA
caccccccaccccgctttagcatttttgacaaaacaatcaggttacccacatttacatggcccttcttaattggcgaagctctttcattaacatcatcccatttaatcttggttaagctg

SEQ ID NO: 41761 - DNA, 120 bp, synthetic construct
  source 1..120: mol_type = other DNA
tggggcattttatttgagttcctaagaaatttcctgtatttagaactcttggaccttcactacttgtaaatgtgagtctatcctttaccttaccctagcttttaccccagggatttggta

SEQ ID NO: 41762 - DNA, 120 bp, synthetic construct
  source 1..120: mol_type = other DNA
cctaaacatcaacactaagaggtaggttcccatattatgtccattttagagattataaaaactgagacttagaaagatttgtaacttgctctggtagcacatctagtatggagtgttggg

SEQ ID NO: 41763 - DNA, 120 bp, synthetic construct
  source 1..120: mol_type = other DNA
gctggggcaaaggattcagttattttttaaaggtttctgatatatattaccaaattgcttttccaaaagtatgtatcaattactactgaaagtacatgaaagtgcccaactcaccttatt

SEQ ID NO: 41764 - DNA, 120 bp, synthetic construct
  source 1..120: mol_type = other DNA
gtgcctcatgtaaatgcaggtgacaaaattcattttaatagctggttgtaagtgttaaatgttagaggtaggaaatagaattggcttatttttctaagcttcagagaaaatgtaagacaa

SEQ ID NO: 41765 - DNA, 120 bp, synthetic construct
  source 1..120: mol_type = other DNA
atcattgttggattcagctagggtaagtaggagaattgaagagaagattttccaaataaatcaaagtttagaaaaggtgctccattccagactgctataactgaggataagaagagatac

SEQ ID NO: 41766 - DNA, 120 bp, synthetic construct
  source 1..120: mol_type = other DNA
tgaacccagtactttcaaccagatattttgacggtgaacaagataaacaattatatcaccgaaatttgtctcctgtccacttgacggtctccctcttaagtggattcctattctactgtc

SEQ ID NO: 41767 - DNA, 120 bp, synthetic construct
  source 1..120: mol_type = other DNA
ttataattatgccacttcacttcagccttggtgacagagtgagaccctgtctcaaaaaaaagaaaaaaaagtcagctgacatttattgggagcttaccatatgacaggcggcactgtgct

SEQ ID NO: 41768 - DNA, 120 bp, synthetic construct
  source 1..120: mol_type = other DNA
gaaatttcagggcatgtcacggatcataccatggtgtcaagccgaccgatgacttcaaacgaaaaatccacacctccatcagtcatttcctttagcacttcctgaatgggtttcttgtag

SEQ ID NO: 41769 - DNA, 120 bp, synthetic construct
  source 1..120: mol_type = other DNA
ttatgagtatcctcatcttctgttcttgggtaggatcactttgaccatctgctaacacgtatgaggcaactgaacaaggggctaagtgctaaagtcacagaaatttggaaaagatgcctt

SEQ ID NO: 41770 - DNA, 120 bp, synthetic construct
  source 1..120: mol_type = other DNA
tgacatctttattcgtaacaactttttatctgcaataaattggtgaaatttctagcatgtgtactcaattctttctgggccatttttctactcataatcgacactttaaatctacaaaaa

SEQ ID NO: 41771 - DNA, 120 bp, synthetic construct
  source 1..120: mol_type = other DNA
taggtcttttttttttgagaaaaacaaaaatgggacaaagaagaattccagaaatttctctgaaaacttcagctcttcacaacaagttaggcactttcttttaggataagaatggactta

SEQ ID NO: 41772 - DNA, 120 bp, synthetic construct
  source 1..120: mol_type = other DNA
tctcttttgatcctcacatatctccaggctctaacctggtgcctggcttctagtagatactcggtacataatggttgaagggtacaatacatgagtgcctgaatgcatacatgcttgggt

SEQ ID NO: 41773 - DNA, 120 bp, synthetic construct
  source 1..120: mol_type = other DNA
ttacctcccatagcacagctgctttgcatttgattacctagaaaatcaaacagagagatggtgacagtgttttcccactcttgaagtcataagttgtgtcttttcatctttgtacatgta

SEQ ID NO: 41774 - DNA, 120 bp, synthetic construct
  source 1..120: mol_type = other DNA
agcttatccatagatgttcttaaaaataaagttcagcatatatttctagtgcttggcagtgtactgtaaaacccatcttcgttgtggtaaagcatgtataattcgcagagccctttctag

SEQ ID NO: 41775 - DNA, 120 bp, synthetic construct
  source 1..120: mol_type = other DNA
aatggggaagatactgttccataggatttttgtggaaattccctgaattgtatcataatggaccccttttaatcagaatttgcatgttgatgtcttgcttaaccttgatgattctaatgc

SEQ ID NO: 41776 - DNA, 120 bp, synthetic construct
  source 1..120: mol_type = other DNA
tcagccactcccttcccatccctatgcatttgggtcaagtcaagtgaagggaagttcatgttttttggttttctcttgtgttttcttcaatcttaagctcactcaaaacctcctgagtat

SEQ ID NO: 41777 - DNA, 120 bp, synthetic construct
  source 1..120: mol_type = other DNA
tgtaatcttacgacctcggagtaatcatggtcaatgttttcttgaattctatcagctttttctagatacagatacactttctattgtcctttttgaaaatttgggatcatcttataaata

SEQ ID NO: 41778 - DNA, 120 bp, synthetic construct
  source 1..120: mol_type = other DNA
acatgagaaaatgcatgtaagacacttagtagaacagctggtgctctgtgggtgctagtgtctttccttcctcaagaatatttgtcggataaagtatctagtatgatagttttgtgagtt

SEQ ID NO: 41779 - DNA, 120 bp, synthetic construct
  source 1..120: mol_type = other DNA
tgttattaatgcatccagtgaaaacttcttagccataaagtcagccacaagtttggggacagattctttactcttaaagcctgaaaagaagaaaatatcattgatagattcaaccagggt

SEQ ID NO: 41780 - DNA, 120 bp, synthetic construct
  source 1..120: mol_type = other DNA
attgcttttcaaaaacttgccttgtcactcataaaaggagagaaattcttaggttaatgagaatttggctctgaagcctaactacatacctccaaaaatagctcctttccacgtgcgtcc

SEQ ID NO: 41781 - DNA, 120 bp, synthetic construct
  source 1..120: mol_type = other DNA
ggaagatatagaaaaagagcataaggagaaaagctatagccctggaaaaaattggattctcttgatactttattcctctgtggcatttgtcccaggtcaaggctgctgggaactttgatc

SEQ ID NO: 41782 - DNA, 120 bp, synthetic construct
  source 1..120: mol_type = other DNA
aaactaaaaattaataaagcatatttgtagtggctgtgttaaaaaaaacaagccctttttcttttctcgaggaaatatgacttgagacaggtttgcttagctgattgaatggaagacttc

SEQ ID NO: 41783 - DNA, 120 bp, synthetic construct
  source 1..120: mol_type = other DNA
gaaaaatattccactttaactctcaataattaactcctttcttcatttttgttcagtagtcgtgaccagtatatccctcctttaaaaaatacacttgtgaacaacacagcaatgaaacat

SEQ ID NO: 41784 - DNA, 120 bp, synthetic construct
  source 1..120: mol_type = other DNA
gaggtatgtataggtgctctctaattgttgattgaattacaacatgaattagttcacagatctaaaatttcatgatcccataaacagcaaattcagaagaaaaattattgaaaatgacat

SEQ ID NO: 41785 - DNA, 120 bp, synthetic construct
  source 1..120: mol_type = other DNA
agaaatagggtctagtcacaactatgtcatttgtcattgcctgccaaggcattgttttttagtttgggtttataagtgcctgaagaatcctaaagagaaaatacaagtgtgggaaacaag

SEQ ID NO: 41786 - DNA, 120 bp, synthetic construct
  source 1..120: mol_type = other DNA
taagcatggccaaaggtaataaggcagacattgttgatggtggatggctcctgctatgtttctttcattttctttcacctagtcagtttcattgattccatgctcaggaagagagaccat

SEQ ID NO: 41787 - DNA, 120 bp, synthetic construct; identical to SEQ ID NO: 25675
  source 1..120: mol_type = other DNA

SEQ ID NO: 41788 - DNA, 120 bp, synthetic construct
  source 1..120: mol_type = other DNA
tccccagagtgtgatattccccttcctgtgtccatgtgatctcattgttcaatttccacctatgagtgagaatatgcggtgtttggttttttgttcttgcgatagtttactgagaatgat

SEQ ID NO: 41789 - DNA, 120 bp, synthetic construct; identical to SEQ ID NO: 25676
  source 1..120: mol_type = other DNA

SEQ ID NO: 41790 - DNA, 120 bp, synthetic construct
  source 1..120: mol_type = other DNA
tggggtgcaggttgtttttgattacatggataagttctttagtggtggtttttgagatttgctgcatgtgtcacccgagcagtgtacactgtatccaacgtgtagtcttttatccctaac

SEQ ID NO: 41791 - DNA, 120 bp, synthetic construct
  source 1..120: mol_type = other DNA
agtattgtcacaatttaggattgaggaaaataaaatgcaggacgggtaaacataaatgaaatgctgtcaaaaagctaagttattgatgttgcactcaagaggggaggattatctatttca

SEQ ID NO: 41792 - DNA, 120 bp, synthetic construct
  source 1..120: mol_type = other DNA
agtcatgattagcttggaataaactatcactttacggcaaatttatttaatgtaggaaataaagacaatagatacagattctatatattctttttgaaggtatttaggaatagcttattt

SEQ ID NO: 41793 - DNA, 120 bp, synthetic construct; identical to SEQ ID NO: 25674
  source 1..120: mol_type = other DNA

SEQ ID NO: 41794 - DNA, 120 bp, synthetic construct
  source 1..120: mol_type = other DNA
taatgctatccctcccccctccccccaccccacaacagtctccagagtgtgatgttccccttcctgtgtccatgtgttctcattgttcaattcctatctatgagtgagaacatgcggtgt

SEQ ID NO: 41795 - DNA, 120 bp, synthetic construct
  source 1..120: mol_type = other DNA
gtcaaagatcagatagttgtagatatgtggcgttatttctgagggctctgatctgttccattgatctacatctctgttttggtaccagtaccatgctgtttttgttactgtagccttgta

SEQ ID NO: 41796 - DNA, 120 bp, synthetic construct
  source 1..120: mol_type = other DNA
taaaagagttcctgaaggaagaactaaacatagaaaggaacaaccggtaccagctgctgcaaaatcatgccaaaatgtaaagaccatcgagactaggaagaaactgcatcaactaatgag

SEQ ID NO: 41797 - DNA, 120 bp, synthetic construct
  source 1..120: mol_type = other DNA
ctttgaaaccaatgaaaacaaatacacagcattcgagaatctctgggacacattcaaagcagtgtgtagagagaaatttacagcactaaatgcccacaagagaaagcaggaaagatctaa

SEQ ID NO: 41798 - DNA, 120 bp, synthetic construct
  source 1..120: mol_type = other DNA
ataaatgtaatctgcatataaacagaaccaaagacaaaaaccacatgattatctcaatagatgcagaaaaggcctttgacaaaattcaacaatgcttcatgctaaaaactctcaataaac

SEQ ID NO: 41799 - DNA, 120 bp, synthetic construct; identical to SEQ ID NO: 31567
  source 1..120: mol_type = other DNA

SEQ ID NO: 41800 - DNA, 120 bp, synthetic construct
  source 1..120: mol_type = other DNA
gcattttttcatgtgtcttttggctgcataaatgtcttcttttgagaagtgtctgttcatatcctttgcccactttttgatggggtcgtttgtttttttcttgtaaatttgtttgagttc

SEQ ID NO: 41801 - DNA, 120 bp, synthetic construct
  source 1..120: mol_type = other DNA
ttgttgaattttgtcgaaggccttttctgcatctattgagataatcatatggtttttgttgttggttctgtttgtatgctggattacgtttattgatttgcgtatgttgaaccagccttg

SEQ ID NO: 41802 - DNA, 120 bp, synthetic construct; identical to SEQ ID NO: 12569
  source 1..120: mol_type = other DNA

SEQ ID NO: 41803 - DNA, 120 bp, synthetic construct
  source 1..120: mol_type = other DNA
gcacctctgggggcagggcacagacaaacaaaaagacagcagtaacctctgcagacttatatgtccctgtctgacagctttgaagagagcagtggttctcccagcacgcagctggagatc

SEQ ID NO: 41804 - DNA, 120 bp, synthetic construct
  source 1..120: mol_type = other DNA
gagaatggaaccaagttggaaaacactctgcaggatattatccaggagaacttctgcaatctagcaaggcagccaacattcagattcaggaaatacagagaacgccacaaagatactcct

SEQ ID NO: 41805 - DNA, 120 bp, synthetic construct
  source 1..120: mol_type = other DNA
taactatcctaaatatatatgcacccaatacagaagcacccagattcataaagcaagtcctgagtgacctacaaagagacttagactcccacacattaataatgggagactttaacaccc

SEQ ID NO: 41806 - DNA, 120 bp, synthetic construct
  source 1..120: mol_type = other DNA
aaatagacgcaataaaaaatgataaaggggatatcaccactgatcccacagaaatacaaactaccatcagagaatactacaaatacctctacgcaaataaagtagaaaatctagaagaaa

SEQ ID NO: 41807 - DNA, 120 bp, synthetic construct
  source 1..120: mol_type = other DNA
agcaacttcagcaaagtctcaggatacaaaatcaatgtacaaaaatcacaagcatttttatacaccaataacagacaaacagagagccaaatcatgagtgaactcccattcacaattgct

SEQ ID NO: 41808 - DNA, 120 bp, synthetic construct
  source 1..120: mol_type = other DNA
aaacctaggcattactattcaggacataggcatgggcaaggacttcatgactaaaacaccaaaagcaatggcaacaaaagccaaaattgacgaattaaactaaagagcttctgcacagca

SEQ ID NO: 41809 - DNA, 120 bp, synthetic construct; identical to SEQ ID NO: 10854
  source 1..120: mol_type = other DNA

SEQ ID NO: 41810 - DNA, 120 bp, synthetic construct
  source 1..120: mol_type = other DNA
tggattataaaacttcggaaagatttgcttaaatattttgttgcttaaaagaaaataattggccgagtgtggtagctcacgcctgtagtcccagcattttgggaggctgaggcaggtaga

SEQ ID NO: 41811 - DNA, 120 bp, synthetic construct; identical to SEQ ID NO: 10855
  source 1..120: mol_type = other DNA

SEQ ID NO: 41812 - DNA, 120 bp, synthetic construct
  source 1..120: mol_type = other DNA
gcctgaaattgcgccattgcagctccagcctgggcgacaagagcaagactctgtcttaaaaaaaaagtcataagagaaaacctgtttattattcattgagtggaagtggatcatcataaa

SEQ ID NO: 41813 - DNA, 120 bp, synthetic construct
  source 1..120: mol_type = other DNA
ggattacaggtgtgagccaccgcgcccagccacattttctttatacattcatctgctgatggacatttagattgcttccacttctttgctattttgaataattctgcgatgaatatgggt

SEQ ID NO: 41814 - DNA, 120 bp, synthetic construct; identical to SEQ ID NO: 10858
  source 1..120: mol_type = other DNA

SEQ ID NO: 41815 - DNA, 120 bp, synthetic construct
  source 1..120: mol_type = other DNA
ttttggtgtcttagatttgaagtccttgcccatgcctatgtcctgaatggtattgcctaggttttcttctagggtttttatggttttaggtctaacatttaagtctttaatccatcttga

SEQ ID NO: 41816 - DNA, 120 bp, synthetic construct
  source 1..120: mol_type = other DNA
ttttcaaagggaatgcttccagtttttgcccattcagtatgatactggctatgggtttgtcatagatagctgttattattttgagatacgtcccatcaatacctaatttattgagagttt

SEQ ID NO: 41817 - DNA, 120 bp, synthetic construct
  source 1..120: mol_type = other DNA
gtttgctcttgcttttctagttcttttaattgtgatgttagttttgagcctatgtgtgtctctgcacgtgagatgggtttcctgaatacagcacactgatgggtcttgactctttatcca

SEQ ID NO: 41818 - DNA, 120 bp, synthetic construct
  source 1..120: mol_type = other DNA
tctcgagccttggctttcagctccatcagctcctttaagcacttctctatattggttattctagttatatattcatctaaatttttttcaaagttttcaacttctttgcctttggtttga

SEQ ID NO: 41819 - DNA, 120 bp, synthetic construct
  source 1..120: mol_type = other DNA
aaaatgactttgagaaatgaaaaatacctttttttttttttttttttttggggagggggtttggctttgtcacgccaggctggagtgcagtggcgtgatctttgctcactgcaagctccg

SEQ ID NO: 41820 - DNA, 120 bp, synthetic construct; identical to SEQ ID NO: 10859
  source 1..120: mol_type = other DNA

SEQ ID NO: 41821 - DNA, 120 bp, synthetic construct
  source 1..120: mol_type = other DNA
ggagggaatgccagggacaaatatgacgcccttggcctggccctttgccttcaggacagggctggccacaaacagaagtccattgcctctggttcaagtccatagacaattcctgatgtt

SEQ ID NO: 41822 - DNA, 120 bp, synthetic construct
  source 1..120: mol_type = other DNA
tatgttcctttaatctgaaagagttcctcagtcttttgtttgttttagtctttcaagacattaacattttcctccgggcacggtggctcacacctgtaatgggagcctgagcaggaggat

SEQ ID NO: 41823 - DNA, 120 bp, synthetic construct
  source 1..120: mol_type = other DNA
aaaaaaaaagtctgggcgcagtagctcacgactataatcccagcactttgggaggccgaggcgggcgattcacgagttcaggagattgagaccatcctggctaacatggtgaaaccccgt

SEQ ID NO: 41824 - DNA, 120 bp, synthetic construct; identical to SEQ ID NO: 14045
  source 1..120: mol_type = other DNA

SEQ ID NO: 41825 - DNA, 120 bp, synthetic construct; identical to SEQ ID NO: 14046
  source 1..120: mol_type = other DNA

SEQ ID NO: 41826 - DNA, 120 bp, synthetic construct; identical to SEQ ID NO: 14047
  source 1..120: mol_type = other DNA

SEQ ID NO: 41827 - DNA, 120 bp, synthetic construct
  source 1..120: mol_type = other DNA
aatcaaagagtttgggaaaacggattcatctaaatcagcctgaagtctaaacatgtgtgtgttactgacatgctcatattcccacatggcacatgttcctagtgtgtgacttctgtgtgg

SEQ ID NO: 41828 - DNA, 120 bp, synthetic construct
  source 1..120: mol_type = other DNA
aaataaaaactccatcacttaaactatggacaccataaaatataagatgcaccacaatttcagaaaaattaaatacaaaaatgaatcctagaatgaaatacagcatcgctgcgctgtagg

SEQ ID NO: 41829 - DNA, 120 bp, synthetic construct; identical to SEQ ID NO: 14048
  source 1..120: mol_type = other DNA

SEQ ID NO: 41830 - DNA, 120 bp, synthetic construct; identical to SEQ ID NO: 14049
  source 1..120: mol_type = other DNA

SEQ ID NO: 41831 - DNA, 120 bp, synthetic construct; identical to SEQ ID NO: 14050
  source 1..120: mol_type = other DNA

SEQ ID NO: 41832 - DNA, 120 bp, synthetic construct; identical to SEQ ID NO: 14051
  source 1..120: mol_type = other DNA

SEQ ID NO: 41833 - DNA, 120 bp, synthetic construct; identical to SEQ ID NO: 14052
  source 1..120: mol_type = other DNA

SEQ ID NO: 41834 - DNA, 120 bp, synthetic construct; identical to SEQ ID NO: 14053
  source 1..120: mol_type = other DNA

SEQ ID NO: 41835 - DNA, 120 bp, synthetic construct
  source 1..120: mol_type = other DNA
ataatgaaacatgcacgaccctaagatttttatactggtgtaccgcgggacccagcacccaggcgcagggtgaacataggtgtaccccgggacccagcatccacacgtagagtgaacata

SEQ ID NO: 41836 - DNA, 120 bp, synthetic construct; identical to SEQ ID NO: 14054
  source 1..120: mol_type = other DNA

SEQ ID NO: 41837 - DNA, 120 bp, synthetic construct; identical to SEQ ID NO: 14055
  source 1..120: mol_type = other DNA

SEQ ID NO: 41838 - DNA, 120 bp, synthetic construct; identical to SEQ ID NO: 14056
  source 1..120: mol_type = other DNA

SEQ ID NO: 41839 - DNA, 120 bp, synthetic construct; identical to SEQ ID NO: 31421
  source 1..120: mol_type = other DNA

SEQ ID NO: 41840 - DNA, 120 bp, synthetic construct; identical to SEQ ID NO: 31422
  source 1..120: mol_type = other DNA

SEQ ID NO: 41841 - DNA, 120 bp, synthetic construct
  source 1..120: mol_type = other DNA
aaatattcctcatctttattcttttcttagtaaacctctctctctctctgcctctctctctctctctgcctctctctctctctgctgtccacttggctttgctattccatagaaggtgga

SEQ ID NO: 41842 - DNA, 120 bp, synthetic construct; identical to SEQ ID NO: 27148
  source 1..120: mol_type = other DNA

SEQ ID NO: 41843 - DNA, 120 bp, synthetic construct
  source 1..120: mol_type = other DNA
gggtctgctgatggcgctcatcgtgctgctcatcgtggcgggcaatgtgctggtgatcgtggccatcgccaagacgccgcggctgcagacgctcaccaacctcttcatcatgtccctggc

SEQ ID NO: 41844 - DNA, 120 bp, synthetic construct
  source 1..120: mol_type = other DNA
cgagctggtgcccgaccgcctcttcgtcttcttcaactggctgggctacgccaactcggccttcaaccccatcatctactgccgcagccccgacttccgcaaggccttccagggactgct

SEQ ID NO: 41845 - DNA, 120 bp, synthetic construct
  source 1..120: mol_type = other DNA
caggctgagggatttctacctcacactgtgcatttgcacagcagatagaaagacttgtttatattaaacagcttatttatgtatcaatattagttggaaggaccaggcgcagagcctctc

SEQ ID NO: 41846 - DNA, 120 bp, synthetic construct
  source 1..120: mol_type = other DNA
tattcttatgaaaatgtggacttttggcaacttctggtgcgagttttggacttccattgatgtgctgtgcgtcacggccagcattgagaccctgtgcgtgatcgcagtggatcgctactt

SEQ ID NO: 41847 - DNA, 120 bp, synthetic construct
  source 1..120: mol_type = other DNA
ttaaagacccccccccccaacagaacactaaacagactatttaacttgagggtaataaacttagaataaaattgtaaaattgtatagagatatgcagaaggaagggcatccttctgcctt

SEQ ID NO: 41848 - DNA, 120 bp, synthetic construct
  source 1..120: mol_type = other DNA
gtagggctgacgatgggggctgcattgcaggggagaaaggggcctccttgggaaccctgggccaagcagacgctgtggccagaggagtcatccatggcagtaaagggcctatggactgca

SEQ ID NO: 41849 - DNA, 120 bp, synthetic construct
  source 1..120: mol_type = other DNA
cacgggtcaaatgcaggaggccacacctgcctgcccaggaggactgcaggagccggatccttaacacctggaggggagcgggtgggtgcggtggcgtacatctgtaactccagcactttg

SEQ ID NO: 41850 - DNA, 120 bp, synthetic construct
  source 1..120: mol_type = other DNA
gagcctttgggtacaggtcactcaaggcaggtgttctgcaccatccatcttcatatcgtctctctcactcgcacccttgcatcactgtgcttctgagagttgggcgcttaccttaatcta

SEQ ID NO: 41851 - DNA, 120 bp, synthetic construct; identical to SEQ ID NO: 25281
  source 1..120: mol_type = other DNA

SEQ ID NO: 41852 - DNA, 120 bp, synthetic construct; identical to SEQ ID NO: 25282
  source 1..120: mol_type = other DNA

SEQ ID NO: 41853 - DNA, 120 bp, synthetic construct; identical to SEQ ID NO: 5286
  source 1..120: mol_type = other DNA

SEQ ID NO: 41854 - DNA, 120 bp, synthetic construct
  source 1..120: mol_type = other DNA
cacacctgtaatcctagcattttgggggaccaaggcaggaggatcactgaaggcctggagtgcaagacagcaacacagtgagaccctttctctattaaaaaaaaaaaaaattaaacattt

SEQ ID NO: 41855 - DNA, 120 bp, synthetic construct
  source 1..120: mol_type = other DNA
cccgcctcggcctcccaaactgggattacagccaccatgcctggctcagaaagtattttttatagaactaatccaaatggtccaatttctatggagcaaattttctttgtaatgcctaaa

SEQ ID NO: 41856 - DNA, 120 bp, synthetic construct; identical to SEQ ID NO: 25286
  source 1..120: mol_type = other DNA

SEQ ID NO: 41857 - DNA, 120 bp, synthetic construct; identical to SEQ ID NO: 25287
  source 1..120: mol_type = other DNA

SEQ ID NO: 41858 - DNA, 120 bp, synthetic construct; identical to SEQ ID NO: 11170
  source 1..120: mol_type = other DNA

SEQ ID NO: 41859 - DNA, 120 bp, synthetic construct; identical to SEQ ID NO: 11171
  source 1..120: mol_type = other DNA

SEQ ID NO: 41860 - DNA, 120 bp, synthetic construct; identical to SEQ ID NO: 11172
  source 1..120: mol_type = other DNA

SEQ ID NO: 41861 - DNA, 120 bp, synthetic construct
  source 1..120: mol_type = other DNA
tgcagtgagccaagatcatgccactgcacttcagcctgggtgacagagccagactctgtcccaaaaacaaaacaaaacaaaaacagtatgatattcttaaaacagatacttggcttctag

SEQ ID NO: 41862 - DNA, 120 bp, synthetic construct; identical to SEQ ID NO: 11174
  source 1..120: mol_type = other DNA

SEQ ID NO: 41863 - DNA, 120 bp, synthetic construct; identical to SEQ ID NO: 28568
  source 1..120: mol_type = other DNA

SEQ ID NO: 41864 - DNA, 120 bp, synthetic construct; identical to SEQ ID NO: 28569
  source 1..120: mol_type = other DNA

SEQ ID NO: 41865 - DNA, 120 bp, synthetic construct; identical to SEQ ID NO: 28570
  source 1..120: mol_type = other DNA

SEQ ID NO: 41866 - DNA, 120 bp, synthetic construct; identical to SEQ ID NO: 25591
  source 1..120: mol_type = other DNA

SEQ ID NO: 41867 - DNA, 120 bp, synthetic construct; identical to SEQ ID NO: 25592
  source 1..120: mol_type = other DNA

SEQ ID NO: 41868 - DNA, 120 bp, synthetic construct
  source 1..120: mol_type = other DNA
tgcccggccgccaccccgtctgggaagtgaggagcgtctctgccaggccgcccatcgtctgggatgtgaggagcccttctgcctggctgcccagtctggaaagtgaggagcgtctctgcc

SEQ ID NO: 41869 - DNA, 120 bp, synthetic construct; identical to SEQ ID NO: 25593
  source 1..120: mol_type = other DNA

SEQ ID NO: 41870 - DNA, 120 bp, synthetic construct
  source 1..120: mol_type = other DNA
tgaggcaatgatttggattcaggtccaccaaaaagatagcaataacagcaacaacaatgccacaaaccacatatgataccctgcctgcatttttctcttctcaactagccttggtgtcat

SEQ ID NO: 41871 - DNA, 120 bp, synthetic construct
  source 1..120: mol_type = other DNA
tgcacccactaacgtgtcatctagcattaggtatatctcccaatgctatccctcccccctcccccgaccccaccacagtccccagagtgtgatattccccttcctgtgtccatgtgatct

SEQ ID NO: 41872 - DNA, 120 bp, synthetic construct
  source 1..120: mol_type = other DNA
ttttgtataaggtgtaaggaagggatccagtttcagctttctacatatggctagccagttttcccagcaccatttgttaaatagggaatcctttccccattgcttgtttttgtcaggttt

SEQ ID NO: 41873 - DNA, 120 bp, synthetic construct; identical to SEQ ID NO: 6769
  source 1..120: mol_type = other DNA

SEQ ID NO: 41874 - DNA, 120 bp, synthetic construct
  source 1..120: mol_type = other DNA
aactcctgacctcaggtgatccgacccccttggcctcccaaagtactgggattacaggcatgagcccctgtgcctggccttttttttttttttttttttttttttttttttttatgatac

SEQ ID NO: 41875 - DNA, 120 bp, synthetic construct
  source 1..120: mol_type = other DNA
ctccaacaacagaagtggcatctgtgtattcataatcagcatttaccctggcaggagactaatcagataggccggtctcagacattaatcctaccatctgatatttttggtgaaggaaaa

SEQ ID NO: 41876 - DNA, 120 bp, synthetic construct; identical to SEQ ID NO: 35428
  source 1..120: mol_type = other DNA

SEQ ID NO: 41877 - DNA, 120 bp, synthetic construct; identical to SEQ ID NO: 6767
  source 1..120: mol_type = other DNA

SEQ ID NO: 41878 - DNA, 120 bp, synthetic construct; identical to SEQ ID NO: 35430
  source 1..120: mol_type = other DNA

SEQ ID NO: 41879 - DNA, 120 bp, synthetic construct; identical to SEQ ID NO: 35431
  source 1..120: mol_type = other DNA

SEQ ID NO: 41880 - DNA, 120 bp, synthetic construct
  source 1..120: mol_type = other DNA
tattaatgcaaccttaaataggccagaaaaatagaactccatcttcttttttattgagacaggatcttgctctgttgcccaggctggagtgcaatggcacaatcatggctcagtgcagcc

SEQ ID NO: 41881 - DNA, 120 bp, synthetic construct; identical to SEQ ID NO: 35432
  source 1..120: mol_type = other DNA

SEQ ID NO: 41882 - DNA, 120 bp, synthetic construct
  source 1..120: mol_type = other DNA
cataaaaaatgatgagttcacgtcctttgtagggacatggatgaaattggaaaccatcattctcagtaaactatcgcaagaacaaaaaaaccaaacaccgcatattctcactcataggtg

SEQ ID NO: 41883 - DNA, 120 bp, synthetic construct; identical to SEQ ID NO: 35433
  source 1..120: mol_type = other DNA

SEQ ID NO: 41884 - DNA, 120 bp, synthetic construct
  source 1..120: mol_type = other DNA
aaatttgtttgagttcattgtagattctggttattagccctttgtcagatgagtaggttgcaaaaattttctcccattttgtaggttgcctgttcactctgatggtagtttcttttgctg

SEQ ID NO: 41885 - DNA, 120 bp, synthetic construct; identical to SEQ ID NO: 35434
  source 1..120: mol_type = other DNA

SEQ ID NO: 41886 - DNA, 120 bp, synthetic construct; identical to SEQ ID NO: 35435
  source 1..120: mol_type = other DNA

SEQ ID NO: 41887 - DNA, 120 bp, synthetic construct; identical to SEQ ID NO: 35436
  source 1..120: mol_type = other DNA

SEQ ID NO: 41888 - DNA, 120 bp, synthetic construct; identical to SEQ ID NO: 35437
  source 1..120: mol_type = other DNA

SEQ ID NO: 41889 - DNA, 120 bp, synthetic construct; identical to SEQ ID NO: 20986
  source 1..120: mol_type = other DNA

SEQ ID NO: 41890 - DNA, 120 bp, synthetic construct; identical to SEQ ID NO: 20987
  source 1..120: mol_type = other DNA

SEQ ID NO: 41891 - DNA, 120 bp, synthetic construct
  source 1..120: mol_type = other DNA
gagaatatgcggtgtttggttttttgttcttgcgatagtttactgagaatgatgagttccaatttcatctatgtccctacaaaggacgtgaactcatcattttttatggctgcatagtat

SEQ ID NO: 41892 - DNA, 120 bp, synthetic construct
  source 1..120: mol_type = other DNA
atcagatagttgtagacatgcggcgttatttctggaagcattccctttgaaaactggcacaagacagggatgccctctctcatcactcctattcaacatagtgttggaagttctggccag

SEQ ID NO: 41893 - DNA, 120 bp, synthetic construct
  source 1..120: mol_type = other DNA
ttgctcatagcctacaaaactgtgcagcatgttactgtactcaatactgtaggcaactgtaacacccctgcaacacacgggtaagtatgttgtgtatctgaacataccgaaacatagaaa

SEQ ID NO: 41894 - DNA, 120 bp, synthetic construct; identical to SEQ ID NO: 20988
  source 1..120: mol_type = other DNA

SEQ ID NO: 41895 - DNA, 120 bp, synthetic construct; identical to SEQ ID NO: 20989
  source 1..120: mol_type = other DNA

SEQ ID NO: 41896 - DNA, 120 bp, synthetic construct
  source 1..120: mol_type = other DNA
atacccaaaggactacaaatcatgctgctataaagacacatgcacacatatgtttactgcggcactattcacaatagcaaagacttggaaacaacccaaatgtccaacaatgatagactg

SEQ ID NO: 41897 - DNA, 120 bp, synthetic construct
  source 1..120: mol_type = other DNA
gtctcatgcgctcctggtgacagccaaacaggtaaaatccttctggagggaaacttggcaatatatcaaaagcgttctgaaagctcacgtcctctaatcagtaattctattgttaaaaac

SEQ ID NO: 41898 - DNA, 120 bp, synthetic construct; identical to SEQ ID NO: 20991
  source 1..120: mol_type = other DNA

SEQ ID NO: 41899 - DNA, 120 bp, synthetic construct; identical to SEQ ID NO: 20992
  source 1..120: mol_type = other DNA

SEQ ID NO: 41900 - DNA, 120 bp, synthetic construct; identical to SEQ ID NO: 20993
  source 1..120: mol_type = other DNA

SEQ ID NO: 41901 - DNA, 120 bp, synthetic construct; identical to SEQ ID NO: 20994
  source 1..120: mol_type = other DNA

SEQ ID NO: 41902 - DNA, 120 bp, synthetic construct; identical to SEQ ID NO: 20995
  source 1..120: mol_type = other DNA

SEQ ID NO: 41903 - DNA, 120 bp, synthetic construct; identical to SEQ ID NO: 20996
  source 1..120: mol_type = other DNA

SEQ ID NO: 41904 - DNA, 120 bp, synthetic construct; identical to SEQ ID NO: 20997
  source 1..120: mol_type = other DNA

SEQ ID NO: 41905 - DNA, 120 bp, synthetic construct; identical to SEQ ID NO: 20998
  source 1..120: mol_type = other DNA

SEQ ID NO: 41906 - DNA, 120 bp, synthetic construct; identical to SEQ ID NO: 20999
  source 1..120: mol_type = other DNA

SEQ ID NO: 41907 - DNA, 120 bp, synthetic construct; identical to SEQ ID NO: 21000
  source 1..120: mol_type = other DNA

SEQ ID NO: 41908 - DNA, 120 bp, synthetic construct; identical to SEQ ID NO: 21001
  source 1..120: mol_type = other DNA

SEQ ID NO: 41909 - DNA, 120 bp, synthetic construct; identical to SEQ ID NO: 21002
  source 1..120: mol_type = other DNA

SEQ ID NO: 41910 - DNA, 120 bp, synthetic construct
  source 1..120: mol_type = other DNA
tatttctgtagagatggggtctccctatgttgcccaggctggtctcaaactcctaggctcaagtcatcctccttcctcggcctcccaaaatgctgggattacaggtgtgatcagcctgta

SEQ ID NO: 41911 - DNA, 120 bp, synthetic construct; identical to SEQ ID NO: 21003
  source 1..120: mol_type = other DNA

SEQ ID NO: 41912 - DNA, 120 bp, synthetic construct; identical to SEQ ID NO: 21004
  source 1..120: mol_type = other DNA

SEQ ID NO: 41913 - DNA, 120 bp, synthetic construct; identical to SEQ ID NO: 21005
  source 1..120: mol_type = other DNA

SEQ ID NO: 41914 - DNA, 120 bp, synthetic construct; identical to SEQ ID NO: 21006
  source 1..120: mol_type = other DNA

SEQ ID NO: 41915 - DNA, 120 bp, synthetic construct; identical to SEQ ID NO: 21007
  source 1..120: mol_type = other DNA

SEQ ID NO: 41916 - DNA, 120 bp, synthetic construct; identical to SEQ ID NO: 21008
  source 1..120: mol_type = other DNA

SEQ ID NO: 41917 - DNA, 120 bp, synthetic construct; identical to SEQ ID NO: 21009
  source 1..120: mol_type = other DNA

SEQ ID NO: 41918 - DNA, 120 bp, synthetic construct; identical to SEQ ID NO: 21010
  source 1..120: mol_type = other DNA

SEQ ID NO: 41919 - DNA, 120 bp, synthetic construct; identical to SEQ ID NO: 21011
  source 1..120: mol_type = other DNA

SEQ ID NO: 41920 - DNA, 120 bp, synthetic construct; identical to SEQ ID NO: 21012
  source 1..120: mol_type = other DNA

SEQ ID NO: 41921 - DNA, 120 bp, synthetic construct; identical to SEQ ID NO: 21013
  source 1..120: mol_type = other DNA

SEQ ID NO: 41922 - DNA, 120 bp, synthetic construct; identical to SEQ ID NO: 21014
  source 1..120: mol_type = other DNA

SEQ ID NO: 41923 - DNA, 120 bp, synthetic construct; identical to SEQ ID NO: 21015
  source 1..120: mol_type = other DNA

SEQ ID NO: 41924 - DNA, 120 bp, synthetic construct; identical to SEQ ID NO: 21016
  source 1..120: mol_type = other DNA

SEQ ID NO: 41925 - DNA, 120 bp, synthetic construct; identical to SEQ ID NO: 28192
  source 1..120: mol_type = other DNA

SEQ ID NO: 41926 - DNA, 120 bp, synthetic construct
  source 1..120: mol_type = other DNA
gtggtgtggtgctgaaaaaaatgtatattctgttgatttggggtggaaagttctgtagatgtctattaggtctgcttggtgcagagctgagttcaattcctgggtatccttgttaacttt

SEQ ID NO: 41927 - DNA, 120 bp, synthetic construct
  source 1..120: mol_type = other DNA
ttttccaacttggttccattctccctttcactttcaggtacaccaatcagacgtagatttggtcttttcacatagtcccatatttcttggaggctttgttcatttctttttactcttttt

SEQ ID NO: 41928 - DNA, 120 bp, synthetic construct
  source 1..120: mol_type = other DNA
taatagacatctacagaactctccaccccagatcaacagaatatacattcttttcagcaccacaccacaccaatccaaaattgaccacatagttggaagtaaagcactcctcagcaaatg

SEQ ID NO: 41929 - DNA, 120 bp, synthetic construct
  source 1..120: mol_type = other DNA
tatgaggccagcatcatcctgataccaaagactggcagagacacaacaaaaaaacagaattttagaccaatatccctgatgaacatcaatgcaaaaatcctcaataaaatactggcaaac

SEQ ID NO: 41930 - DNA, 120 bp, synthetic construct
  source 1..120: mol_type = other DNA
atctgttaaatttactttgtctaaagtttcttttaaatggtacataaaaaatatatggccacgcgcaatggctcacgcctgtaatcccagcactttggggcggcggatcacctgaggtca

SEQ ID NO: 41931 - DNA, 120 bp, synthetic construct; identical to SEQ ID NO: 25515
  source 1..120: mol_type = other DNA

SEQ ID NO: 41932 - DNA, 120 bp, synthetic construct
  source 1..120: mol_type = other DNA
ggggagaaagcactaaaacgggagacaagttaaaatttctttttaattgataggtcacgttctcactctatttgcctttaagggaagaaagcaatcaagttaatatgttttccttcattg

SEQ ID NO: 41933 - DNA, 120 bp, synthetic construct; identical to SEQ ID NO: 20568
  source 1..120: mol_type = other DNA

SEQ ID NO: 41934 - DNA, 120 bp, synthetic construct; identical to SEQ ID NO: 20569
  source 1..120: mol_type = other DNA

SEQ ID NO: 41935 - DNA, 120 bp, synthetic construct; identical to SEQ ID NO: 22129
  source 1..120: mol_type = other DNA

SEQ ID NO: 41936 - DNA, 120 bp, synthetic construct; identical to SEQ ID NO: 22130
  source 1..120: mol_type = other DNA

SEQ ID NO: 41937 - DNA, 120 bp, synthetic construct; identical to SEQ ID NO: 22131
  source 1..120: mol_type = other DNA

SEQ ID NO: 41938 - DNA, 120 bp, synthetic construct; identical to SEQ ID NO: 22132
  source 1..120: mol_type = other DNA

SEQ ID NO: 41939 - DNA, 120 bp, synthetic construct; identical to SEQ ID NO: 22133
  source 1..120: mol_type = other DNA

SEQ ID NO: 41940 - DNA, 120 bp, synthetic construct; identical to SEQ ID NO: 22134
  source 1..120: mol_type = other DNA

SEQ ID NO: 41941 - DNA, 120 bp, synthetic construct; identical to SEQ ID NO: 22135
  source 1..120: mol_type = other DNA

SEQ ID NO: 41942 - DNA, 120 bp, synthetic construct; identical to SEQ ID NO: 22136
  source 1..120: mol_type = other DNA

SEQ ID NO: 41943 - DNA, 120 bp, synthetic construct; identical to SEQ ID NO: 22137
  source 1..120: mol_type = other DNA

SEQ ID NO: 41944 - DNA, 120 bp, synthetic construct; identical to SEQ ID NO: 22138
  source 1..120: mol_type = other DNA

SEQ ID NO: 41945 - DNA, 120 bp, synthetic construct
  source 1..120: mol_type = other DNA
cctcggccccggcgctcggagcgcggcggctgcctgggctttaatggctgctccgcggagcagcgcctagggctggaaggcggctgcggctcaggaagtcacccgagcaagcctccttcg

SEQ ID NO: 41946 - DNA, 120 bp, synthetic construct; identical to SEQ ID NO: 22117
  source 1..120: mol_type = other DNA

SEQ ID NO: 41947 - DNA, 120 bp, synthetic construct; identical to SEQ ID NO: 22118
  source 1..120: mol_type = other DNA

SEQ ID NO: 41948 - DNA, 120 bp, synthetic construct; identical to SEQ ID NO: 22119
  source 1..120: mol_type = other DNA

SEQ ID NO: 41949 - DNA, 120 bp, synthetic construct; identical to SEQ ID NO: 22120
  source 1..120: mol_type = other DNA

SEQ ID NO: 41950 - DNA, 120 bp, synthetic construct; identical to SEQ ID NO: 22121
  source 1..120: mol_type = other DNA

SEQ ID NO: 41951 - DNA, 120 bp, synthetic construct; identical to SEQ ID NO: 22122
  source 1..120: mol_type = other DNA

SEQ ID NO: 41952 - DNA, 120 bp, synthetic construct; identical to SEQ ID NO: 22123
  source 1..120: mol_type = other DNA

SEQ ID NO: 41953 - DNA, 120 bp, synthetic construct; identical to SEQ ID NO: 22124
  source 1..120: mol_type = other DNA

SEQ ID NO: 41954 - DNA, 120 bp, synthetic construct
  source 1..120: mol_type = other DNA
gagactccttttagaacgtgaatgagaagcagcacgagagttgctgtcagactccccgattgctccatcttttttcttcttcttcttcttcttcttcttcttcttcttcttcttcttctt

SEQ ID NO: 41955 - DNA, 120 bp, synthetic construct; identical to SEQ ID NO: 22126
  source 1..120: mol_type = other DNA

SEQ ID NO: 41956 - DNA, 120 bp, synthetic construct; identical to SEQ ID NO: 22127
  source 1..120: mol_type = other DNA

SEQ ID NO: 41957 - DNA, 120 bp, synthetic construct; identical to SEQ ID NO: 22128
  source 1..120: mol_type = other DNA

SEQ ID NO: 41958 - DNA, 120 bp, synthetic construct
  source 1..120: mol_type = other DNA
actccagcctggataacaagagcaaaagtccatcacacacacacacacacacacacacacacacccacaaaaaaaaaaaaaaaaaaaaaaaggccaggcacaatggctcacacctgtaat

SEQ ID NO: 41959 - DNA, 120 bp, synthetic construct
  source 1..120: mol_type = other DNA
gacgcttcacataagtgaaggaacaccgtatttgtctttttctaactggcttatttcacttagcgtaatgtcctcaatgttcatccatgttgtagcatgtgttagaatttccttcctttt

SEQ ID NO: 41960 - DNA, 120 bp, synthetic construct
  source 1..120: mol_type = other DNA
gcatttcatatgtgtttgaggaacaaacagcaaggtgaccagcatggggagagtgaagaatgagggaaaccttgaatgagaataaagcaattccattttggatgctaatctgccatattc

SEQ ID NO: 41961 - DNA, 120 bp, synthetic construct; identical to SEQ ID NO: 10293
  source 1..120: mol_type = other DNA

SEQ ID NO: 41962 - DNA, 120 bp, synthetic construct
  source 1..120: mol_type = other DNA
cctcccaaagtgctgggattacaggtgtgagccaccaggcccggccatggccagctaattttttgtattttttagaagagatggggtttcatgatgttagccaggatggtctcaatctcc

SEQ ID NO: 41963 - DNA, 120 bp, synthetic construct
  source 1..120: mol_type = other DNA
catgacgtccaccccgtcaggagctgctccaggaccacattccccttgcggcaggccagatggagtgccgtgcagccgtctccctccccacaggtctcgttcacctcctcacgggagcca

SEQ ID NO: 41964 - DNA, 120 bp, synthetic construct; identical to SEQ ID NO: 10669
  source 1..120: mol_type = other DNA

SEQ ID NO: 41965 - DNA, 120 bp, synthetic construct
  source 1..120: mol_type = other DNA
acgggcatttctgactggttatcatataaaagacttcacgatacaggccatgatgtgctgagaaagaagaagtcaggaaaccctctgcaagtcaggatccaatagaagaattcataaaaa

SEQ ID NO: 41966 - DNA, 120 bp, synthetic construct; identical to SEQ ID NO: 10294
  source 1..120: mol_type = other DNA

SEQ ID NO: 41967 - DNA, 120 bp, synthetic construct
  source 1..120: mol_type = other DNA
tgattctcctgcctcagcctcccaagtaactgggactacaggcatgcaccaccacgcccagccattttttgtactttcagtagaggcgggttttaccatgttggtcgggctggtctcaaa

SEQ ID NO: 41968 - DNA, 120 bp, synthetic construct; identical to SEQ ID NO: 10295
  source 1..120: mol_type = other DNA

SEQ ID NO: 41969 - DNA, 120 bp, synthetic construct; identical to SEQ ID NO: 10296
  source 1..120: mol_type = other DNA

SEQ ID NO: 41970 - DNA, 120 bp, synthetic construct; identical to SEQ ID NO: 10666
  source 1..120: mol_type = other DNA

SEQ ID NO: 41971 - DNA, 120 bp, synthetic construct
  source 1..120: mol_type = other DNA
aagacatatcttagtgctttgtcatttgacattttaactgagaaaataatacactttgataagtttgacttacagttcccttccccttcaggtatctgctgtgcgtttcagtcaacaata

SEQ ID NO: 41972 - DNA, 120 bp, synthetic construct
  source 1..120: mol_type = other DNA
gcctgcctcagcctcccaaagtactgggattacaggcgtgagccacggcgcccagcccttctattatttatttactacgataaaatgtagtgtattaaataatcctgctacaagagcatt

SEQ ID NO: 41973 - DNA, 120 bp, synthetic construct
  source 1..120: mol_type = other DNA
gacttctgctgtacctgctgcctctcattttaacccattaaaaatactaaagttgttttccttgtagacatctttcacctccttggttaggtctattccgaagtattttattttatttta

SEQ ID NO: 41974 - DNA, 120 bp, synthetic construct
  source 1..120: mol_type = other DNA
tgaggtcaggagcgggagacggatcatgaggtcaggagttcgagaccagcctggccaacatggtgaaatcccatctctactaaaaatacaaaagttagccgggtgtggtggcgctcacct

SEQ ID NO: 41975 - DNA, 120 bp, synthetic construct
  source 1..120: mol_type = other DNA
acaaaaatatggaaccagctcaaatgcccgtcaatcaatgagtggataaagaaaccgtgatatacatacatatatatatatatatgaggaataccacctcagccataataaggaataaat

SEQ ID NO: 41976 - DNA, 120 bp, synthetic construct
  source 1..120: mol_type = other DNA
ataatttttaataaatgctgagacataaaagtagataaaggagtggtaaataacacagaaacacaactttggtgcctacagaaagtgactggaacagaagcaagccagtttgtcttgcag

SEQ ID NO: 41977 - DNA, 120 bp, synthetic construct
  source 1..120: mol_type = other DNA
attaaaaatcaatgcaggtgtactggtctaagcagcctagcatctgaagaacaagactatcagtaaaaaagtaacagagaaaataaaaaaaaaattctcaagaagagatagtctgcaggt

SEQ ID NO: 41978 - DNA, 120 bp, synthetic construct; identical to SEQ ID NO: 10297
  source 1..120: mol_type = other DNA

SEQ ID NO: 41979 - DNA, 120 bp, synthetic construct; identical to SEQ ID NO: 10298
  source 1..120: mol_type = other DNA

SEQ ID NO: 41980 - DNA, 120 bp, synthetic construct
  source 1..120: mol_type = other DNA
ttggagacagggcctagtgggaggcatttgggtaatggcagtggattccttatgaatggcttggtcccatccccatggtaataagcaaattctcattatggtaatttaaaaggctgtggt

SEQ ID NO: 41981 - DNA, 120 bp, synthetic construct; identical to SEQ ID NO: 10299
  source 1..120: mol_type = other DNA

SEQ ID NO: 41982 - DNA, 120 bp, synthetic construct
  source 1..120: mol_type = other DNA
gcttggtgatgttcggaaagcctgatggatgttacacaccagttagtagatgggtagtgttggatgagagcccaaaaatggctctttattgtcattctttaggattacaacacagtttat

SEQ ID NO: 41983 - DNA, 120 bp, synthetic construct
  source 1..120: mol_type = other DNA
aaagtctacattgacatttcatgtcttttgaaagtgttgaccatgaaccaatccccacctctcttttagaacaaggaggtaaataaagtctgttaagtcaccagcataaatctggagaca

SEQ ID NO: 41984 - DNA, 120 bp, synthetic construct
  source 1..120: mol_type = other DNA
acgaatgtggtgcatgtggaggtcctcaccaacttcaacggtcacctcagcaggctgcacagcagcagccatgggcgctcctgccatcctgtccccagctcctgcctcatagatctcaga

SEQ ID NO: 41985 - DNA, 120 bp, synthetic construct; identical to SEQ ID NO: 35756
  source 1..120: mol_type = other DNA

SEQ ID NO: 41986 - DNA, 120 bp, synthetic construct; identical to SEQ ID NO: 35757
  source 1..120: mol_type = other DNA

SEQ ID NO: 41987 - DNA, 120 bp, synthetic construct
  source 1..120: mol_type = other DNA
caacctccacctcctgggtccaggtgattctcattcaagtgcctaagcctcccaagtagctgggattacaggagcccaaccccatgctcagctaatgtttgtattttagtagagatgggg

SEQ ID NO: 41988 - DNA, 120 bp, synthetic construct; identical to SEQ ID NO: 10300
  source 1..120: mol_type = other DNA

SEQ ID NO: 41989 - DNA, 120 bp, synthetic construct
  source 1..120: mol_type = other DNA
tatcacgaagtcaagagacggagaccatcctgcctaacacgttgaaaccccgtctctactaaaaatacaaaaaattagctggacatggtaacgggtgcctgtagtcccagctaatcagga

SEQ ID NO: 41990 - DNA, 120 bp, synthetic construct
  source 1..120: mol_type = other DNA
ttgttgagaaaaaataaatttgtgcatttaagaagttaaaaaaaaaaaaaaaagaaatgggtctcactttattgcccagtctggtcttgaactcctacactcgagcagtcctctcaactt

SEQ ID NO: 41991 - DNA, 120 bp, synthetic construct
  source 1..120: mol_type = other DNA
ctcccaagtagctgggactacaggtgcccgccaccatgcccagctaattttttttttttttttgagatggagtctcgcttggttgcccaggctggagtgcagtggtgcaatctcagctca

SEQ ID NO: 41992 - DNA, 120 bp, synthetic construct
  source 1..120: mol_type = other DNA
catgccactgcactccagctggggcaacagagcaaaacatcgtccaaaaaaataaaaataaaaataaaaatgaaaaagaggtgccatgtgtacaaaaatcaatgcacatttatgaaattt

SEQ ID NO: 41993 - DNA, 120 bp, synthetic construct
  source 1..120: mol_type = other DNA
actctggctggtcagctgggacttgcttttactgctcttgcatgactgcaggctggccaggatctggctctggatggcttggacccaggcatcccgctcctcatacgtcgtggcttcaaa

SEQ ID NO: 41994 - DNA, 120 bp, synthetic construct
  source 1..120: mol_type = other DNA
gtgaaaccctgtctttacaaaaaaaaaaaaaaaaagaaaagaaaaaagaaaaaaaaattagctgggcatggtgtcacatgcctgtaattccagttactcgggaggctgaggcaggagaat

SEQ ID NO: 41995 - DNA, 120 bp, synthetic construct
  source 1..120: mol_type = other DNA
ctctgtggacctctcgggatcccgaagaccccttccagaaggcctaagaggtcataactgttcttttttttttttttttttttttttttgagaccaagttttactcttgttgcccaggct

SEQ ID NO: 41996 - DNA, 120 bp, synthetic construct
  source 1..120: mol_type = other DNA
ggcaacgtaacgaaactgtgtctctatcaaacatataagaaaattagcctggcgtggtgccacacatctgtggtcccagctacacaggagcctgaggtgagaggattgcttgagctgaga

SEQ ID NO: 41997 - DNA, 120 bp, synthetic construct
  source 1..120: mol_type = other DNA
acaatctcagctctctgcaacctccgcctcccaagttcaagcggttctcctgcctcagcctccagaataggtgggactacaggtgcgtgccaccatgcccagctaagtttttgtattttt

SEQ ID NO: 41998 - DNA, 120 bp, synthetic construct; identical to SEQ ID NO: 35751
  source 1..120: mol_type = other DNA

SEQ ID NO: 41999 - DNA, 120 bp, synthetic construct; identical to SEQ ID NO: 433
  source 1..120: mol_type = other DNA

SEQ ID NO: 42000 - DNA, 120 bp, synthetic construct; identical to SEQ ID NO: 35752
  source 1..120: mol_type = other DNA

SEQ ID NO: 42001 - DNA, 120 bp, synthetic construct
  source 1..120: mol_type = other DNA
aatggggtgaacccaggaggcagagcttacagtgagccgagttcgcgccactgcactccaggccgggagacaaagtgagactccgtctcaaaaaaaaaaaaaaaaaagaaagaaaagttt

SEQ ID NO: 42002 - DNA, 120 bp, synthetic construct; identical to SEQ ID NO: 370
  source 1..120: mol_type = other DNA

SEQ ID NO: 42003 - DNA, 120 bp, synthetic construct
  source 1..120: mol_type = other DNA
gtttgtcatagatggcttttattacattgagctatgacccttgtatgctgattttgctgagggttttaatcataaaaggatgctgcattttgtcaaatgctttctctgcatctgttaaga

SEQ ID NO: 42004 - DNA, 120 bp, synthetic construct
  source 1..120: mol_type = other DNA
tcctcaactctcatcttacacaaaaatcaactcaagatggatcaaggacataaatctatgacctgaaaccataaaagttctagaagataacattggaaaaacccgtctagacactggctt

SEQ ID NO: 42005 - DNA, 120 bp, synthetic construct
  source 1..120: mol_type = other DNA
aataaaacaaagactaaagtttatatttttcactctccttttgggcaggacaaattttatatatgtttttaaagaattagtaacttttttcctttttccgagacagggtctccctttgtt

SEQ ID NO: 42006 - DNA, 120 bp, synthetic construct; identical to SEQ ID NO: 10846
  source 1..120: mol_type = other DNA

SEQ ID NO: 42007 - DNA, 120 bp, synthetic construct
  source 1..120: mol_type = other DNA
agctggaccgtactgctgccatctcggctcactgcaacctccctgcctgattctcctgcttcagcctgccgagtgcctgcgattgcaggcgcgcgccgccacgcctgactggtgttcgta

SEQ ID NO: 42008 - DNA, 120 bp, synthetic construct
  source 1..120: mol_type = other DNA
gggaggtgaggggcccctctgcctggccgcccctactgggaagtgaggagcccctcttcccggccaccaccccgtctgggaggtgtacccatcagctcattgagaacgggccatgatgac

SEQ ID NO: 42009 - DNA, 120 bp, synthetic construct; identical to SEQ ID NO: 10847
  source 1..120: mol_type = other DNA

SEQ ID NO: 42010 - DNA, 120 bp, synthetic construct; identical to SEQ ID NO: 10848
  source 1..120: mol_type = other DNA

SEQ ID NO: 42011 - DNA, 120 bp, synthetic construct
  source 1..120: mol_type = other DNA
gtaggagcttttgcctacaaggcccttccagcatcaaaggcagaggcagtgtaggaagcaaagcatggcccaagtccctcttggggcttttattattctggcctctttttagaggaaaaa

SEQ ID NO: 42012 - DNA, 120 bp, synthetic construct
  source 1..120: mol_type = other DNA
atttaaacatgccctactcctgcttatttccctcaatgttatgttaaatcctcatttatttgccaacaagccatacacagccaagttttccggttgacttaaacagcaagaatacaagtg

SEQ ID NO: 42013 - DNA, 120 bp, synthetic construct; identical to SEQ ID NO: 10849
  source 1..120: mol_type = other DNA

SEQ ID NO: 42014 - DNA, 120 bp, synthetic construct
  source 1..120: mol_type = other DNA
tgctcactgcaacctccacctcccaggtccaggcaattctcctgcctcagccttgtgagtaggtggaactacagtcatgcgccactacacccagctaatttttgtattttttttttagta

SEQ ID NO: 42015 - DNA, 120 bp, synthetic construct; identical to SEQ ID NO: 10850
  source 1..120: mol_type = other DNA

SEQ ID NO: 42016 - DNA, 120 bp, synthetic construct; identical to SEQ ID NO: 10851
  source 1..120: mol_type = other DNA

SEQ ID NO: 42017 - DNA, 120 bp, synthetic construct
  source 1..120: mol_type = other DNA
tgttgagacggagaaggtaagcaacctccccaaggtcacatgactgctaagggtggggccatagtttgatcccagctagtctgaattccccagttgcttaagcatgattatcagaaagta

SEQ ID NO: 42018 - DNA, 120 bp, synthetic construct
  source 1..120: mol_type = other DNA
gtgggaggccgaggcgggcatatcacgaagtcaagagacggagaccatcctgcctaacacgttgaaaccccgtctctactaaaaatacaaaaaattagctggacatggtaacgggtgcct

SEQ ID NO: 42019 - DNA, 120 bp, synthetic construct; identical to SEQ ID NO: 10300
  source 1..120: mol_type = other DNA

SEQ ID NO: 42020 - DNA, 120 bp, synthetic construct
  source 1..120: mol_type = other DNA
tcgtatatttttaaaagaattttttttttattttttttgagacagagtctcactctgttgcccaggcagtggcacaatcgttgctcactgcaacctccacctcctgggtccaggtgattc

SEQ ID NO: 42021 - DNA, 120 bp, synthetic construct
  source 1..120: mol_type = other DNA
ctcaggaaacttagaatcatggcagagggggaagtccttcaggaaacttacaatcatggcagaagggcaggtccgacttccatggtggccgcacagagagtgggaacatgtgaaggagca

SEQ ID NO: 42022 - DNA, 120 bp, synthetic construct
  source 1..120: mol_type = other DNA
gatgctgctgctctcctggcccctcgtgcagtgccattgggactaaggttttcattcatcaccagcttcctgagattttagtcctaagaaaagcaaagggtagttcattacttgaagcca

SEQ ID NO: 42023 - DNA, 120 bp, synthetic construct
  source 1..120: mol_type = other DNA
cagttgaataaataagttgataaatttttataaatgattacatcctttttcttttctccctctatacatatagctttggagtttaacctttctgccaatccagagtcaagcacaatattc

SEQ ID NO: 42024 - DNA, 120 bp, synthetic construct
  source 1..120: mol_type = other DNA
gctgtctctactaaaaaaaaaaatacaaaaattagctgggcgtagtggcgcatgactgtagttccagctactcacaaggctgaggcaggagaattgcttggacctgggaggtggaggttg

SEQ ID NO: 42025 - DNA, 120 bp, synthetic construct
  source 1..120: mol_type = other DNA
tagaatacatcttatattttgcctataaaatagacctgtcttttaaaacttactgacatcttgatttattttatgcaaagttgattttagacaactcaaagccaaaatttacctcttctg

SEQ ID NO: 42026 - DNA, 120 bp, synthetic construct
  source 1..120: mol_type = other DNA
gggcatgtttaaatttacattacatcaaatgaaaaagttaataacctaaaacttttgagtagcataaacttggatgtggtaaatgaatgtggtcagaggtctgcgtaagaggaggcccaa

SEQ ID NO: 42027 - DNA, 120 bp, synthetic construct
  source 1..120: mol_type = other DNA
cctttgatgctgggagggccttgtaggcaaaagttactaccactgaagagtgagggacatggaatagcttttcttttactgcttccatgctctctaggtgtgagaagcccatgcctctgg

SEQ ID NO: 42028 - DNA, 120 bp, synthetic construct
  source 1..120: mol_type = other DNA
acagttgcttcttcttatttctacaactaagaataaaaaaaaaaactggtcacttctgatacaaataccataaaataaaagtagttgttaacatcttactgattactcctatgtaaaatg

SEQ ID NO: 42029 - DNA, 120 bp, synthetic construct; identical to SEQ ID NO: 427
  source 1..120: mol_type = other DNA

SEQ ID NO: 42030 - DNA, 120 bp, synthetic construct
  source 1..120: mol_type = other DNA
taactctgcttttactttccaggcctgcttttactttccaggcagaaaattgggagatccttctcagaagaaactgaaatgtcttcaataaagatccccaaataatacactgaggtctcc

SEQ ID NO: 42031 - DNA, 120 bp, synthetic construct; identical to SEQ ID NO: 42005
  source 1..120: mol_type = other DNA

SEQ ID NO: 42032 - DNA, 120 bp, synthetic construct
  source 1..120: mol_type = other DNA
caggtcatagatttatgtccttgatccatcttgagttgatttttgtgtaaggtgagagttgaggatccagtttcattctcccgcatgtggtttgccaattatcccagcaccatttgttga

SEQ ID NO: 42033 - DNA, 120 bp, synthetic construct
  source 1..120: mol_type = other DNA
atgcagcatccttttatgattaaaaccctcagcaaaatcagcatagaagggtcacagctcaatataagaaaagccatctatgacaaacccacaaccaacataatactgaaagggggaaaa

SEQ ID NO: 42034 - DNA, 120 bp, synthetic construct
  source 1..120: mol_type = other DNA
aactgaattgtcaaacacttgtcgaagttttggatttactcaaaattctatgctcagcagctggaggtaggaagagtaagggccctcccttactcttatggagaggcatactttctcaca

SEQ ID NO: 42035 - DNA, 120 bp, synthetic construct
  source 1..120: mol_type = other DNA
agccgagattgcaccactgcactccagcctgggcgacagagcgagactccgtctcaaaaataaataaattaattaattaattaatagaaattctcagctgctttttattgctgcagaaaa

SEQ ID NO: 42036 - DNA, 120 bp, synthetic construct; identical to SEQ ID NO: 35752
  source 1..120: mol_type = other DNA

SEQ ID NO: 42037 - DNA, 120 bp, synthetic construct
  source 1..120: mol_type = other DNA
catcccgattttcctaaaaggcttctcagtgcctagagatagagggaaagtggagatgggaagatacatgtgtttgcagacttgtattttgaaaaaaaccttgcataagtgatctcagcg

SEQ ID NO: 42038 - DNA, 120 bp, synthetic construct; identical to SEQ ID NO: 35751
  source 1..120: mol_type = other DNA

SEQ ID NO: 42039 - DNA, 120 bp, synthetic construct
  source 1..120: mol_type = other DNA
aggtcaggagatcgagaccatcctggctaacacggcaaaaccccgtctctactaaaaatacaaaaacttagctgggcgtggtggcacgcacctgtagtcccacctattctggaggctgag

SEQ ID NO: 42040 - DNA, 120 bp, synthetic construct
  source 1..120: mol_type = other DNA
tgccacacatctgtggtcccagctacaaaggagcctgaggtgagaggattgcttgagctgagatcatgccaatgcactccagccaagtgacagagtgaaactcggtctaaaaaaccagtt

SEQ ID NO: 42041 - DNA, 120 bp, synthetic construct; identical to SEQ ID NO: 41995
  source 1..120: mol_type = other DNA

SEQ ID NO: 42042 - DNA, 120 bp, synthetic construct
  source 1..120: mol_type = other DNA
ctgcctcagcctcctgagtaactggaattacaggcatgtgccaccatgcccagctaatttttttttcttttttttttttgtaaagacagggtttcaccatgttggccaggatggtcttga

SEQ ID NO: 42043 - DNA, 120 bp, synthetic construct
  source 1..120: mol_type = other DNA
ttattggcatgaggagaggggggcgggttgagcttggggctggtggtgctggagataccggggctgaagcatatggagtcacccagcccggtgtccatgtccttggataggccattgctt

SEQ ID NO: 42044 - DNA, 120 bp, synthetic construct; identical to SEQ ID NO: 428
  source 1..120: mol_type = other DNA

SEQ ID NO: 42045 - DNA, 120 bp, synthetic construct
  source 1..120: mol_type = other DNA
ggagatcaataccattctggctaacatggtgaaaccccgtctctgctaaaaatacaaaaaaaaaacttagccaggtgtggtggcgggcacctgtagtcccagctacttggaaggctgagg

SEQ ID NO: 42046 - DNA, 120 bp, synthetic construct
  source 1..120: mol_type = other DNA
gagatactgtacctggtcttatttttttcttttcttaagatacagggtctcaacatctggcccaggctggactcaaactgctgagctcaagtaattcccccacctcagcctccgaagtag

SEQ ID NO: 42047 - DNA, 120 bp, synthetic construct
  source 1..120: mol_type = other DNA
attttttattttttattttttgagactgagtctcactctgtctcccaggttggacttcagtggcacaatctcagctcactgcaaacttcacctcctgggttcaagcgattctcctgcctc

SEQ ID NO: 42048 - DNA, 120 bp, synthetic construct; identical to SEQ ID NO: 429
  source 1..120: mol_type = other DNA

SEQ ID NO: 42049 - DNA, 120 bp, synthetic construct
  source 1..120: mol_type = other DNA
ctggctaattttgtatttttagtaggtatggggtttctccatgttgatcaggctggttttgaactcctgacctcaggtgatccacccgcctcggcttcccaaagtgttaggattacaggc

SEQ ID NO: 42050 - DNA, 120 bp, synthetic construct
  source 1..120: mol_type = other DNA
ttgagggctgttagatagatgttctaagctgacaccaataccaggggacctaaaatgccttcacatttctctagagttggggtataagaaagccagctattaaataggatttggctcaag

SEQ ID NO: 42051 - DNA, 120 bp, synthetic construct; identical to SEQ ID NO: 15625
  source 1..120: mol_type = other DNA

SEQ ID NO: 42052 - DNA, 120 bp, synthetic construct
  source 1..120: mol_type = other DNA
ttacagctctgaggactggaggaacaccaggatccttagtctcgggccgaattggataaaacgacatgaacacacatggagtagttttaaggagtggagagtttaatagtaaagaaagaa

SEQ ID NO: 42053 - DNA, 120 bp, synthetic construct
  source 1..120: mol_type = other DNA
catggatgaagactctcaatggtcacataaagtgaagggttctgatgggcgaccactatccagtccaaataatttaaagtgatgtgtgcatcctttgggtatttgaagcacagaactgtt

SEQ ID NO: 42054 - DNA, 120 bp, synthetic construct
  source 1..120: mol_type = other DNA
aggggttggctttgactgtggtatggaaaattatatggaatggagcaaaattacaaatgagatcgtggtatttggcacgtggtacccttttcctcacatactctttgccatccccactta

SEQ ID NO: 42055 - DNA, 120 bp, synthetic construct
  source 1..120: mol_type = other DNA
aaaaaaagatgttctttgaaaccaatgagaacaaacacacaacataccagaatctctgggacacatttaaagcagtgtgtagagggaaatttatagcactcaatgcccacaagagaaagc

SEQ ID NO: 42056 - DNA, 120 bp, synthetic construct
  source 1..120: mol_type = other DNA
catatatgtataattatggtgctacgtgtcagggatacaaagaaaatattttatttaagattgtccttttctggggggaggagccaagatggccgaataggaacagctccggtctacagc

SEQ ID NO: 42057 - DNA, 120 bp, synthetic construct
  source 1..120: mol_type = other DNA
gacatccacaccgaaaacccatctgtacatcaccatcatcaaagaccaaaagtagataaaaccacaaagatggggaaaaaacagaacagaaaaactggaaactctaaaacgcagagcgcc

SEQ ID NO: 42058 - DNA, 120 bp, synthetic construct
  source 1..120: mol_type = other DNA
ctgcaagccagaagagactgggggccaatattcaacattcttaaagaaaagaattttcaacccagaatttcatatccagccaaactaagcttcataagtgaaggagaaataaaatacttt

SEQ ID NO: 42059 - DNA, 120 bp, synthetic construct
  source 1..120: mol_type = other DNA
ctcagcaccacaccacacctattccaaaattgaccacatagttggaagtaaagttctcctcagcaaatgtaaaagaagacaaattataacaaactatctctcagaccacagtgcaatcaa

SEQ ID NO: 42060 - DNA, 120 bp, synthetic construct
  source 1..120: mol_type = other DNA
aggccagcatcattctgataccaaagcctggcagagacacaaccaaaaaagagaattttagaccaatatccttgatgaacattgatgcaaaaatcctcaataaaatactggcaaaccgaa

SEQ ID NO: 42061 - DNA, 120 bp, synthetic construct
  source 1..120: mol_type = other DNA
aacaaagctggaggcatcagactacctgacttcaaactatactacaagtctacagtaaccaaaagagcatggtactggtaccaaaacagagatatagatcaatggaacagaacagagccc

SEQ ID NO: 42062 - DNA, 120 bp, synthetic construct
  source 1..120: mol_type = other DNA
cgtatgtttattgtggcattattcacaatagcaaagacttggaaccaacccaaatgtccaacaatgatagactggattaagaaaatgtggcacatatacaccatggaatactaggcagcc

SEQ ID NO: 42063 - DNA, 120 bp, synthetic construct
  source 1..120: mol_type = other DNA
aggagtttatccatgtcttctagattttctagtttatttgtgtagagttgtttgtagtattctctgatggtagtttgtatttctgtgggatcggtggtgatatcccctttatcatttttt

SEQ ID NO: 42064 - DNA, 120 bp, synthetic construct; identical to SEQ ID NO: 15622
  source 1..120: mol_type = other DNA

SEQ ID NO: 42065 - DNA, 120 bp, synthetic construct; identical to SEQ ID NO: 15623
  source 1..120: mol_type = other DNA

SEQ ID NO: 42066 - DNA, 120 bp, synthetic construct
  source 1..120: mol_type = other DNA
ttcaacaacgcttcatgctaaaaactctcaataaattaggtattgatggaatatatctcaaaataataagagctatctatatctatgacaaacccacagccaatatcatactgaatgggc

SEQ ID NO: 42067 - DNA, 120 bp, synthetic construct
  source 1..120: mol_type = other DNA
gagccctcagaaataatgccgcatatctacaaccatctgatctttgacaaatctgagaaaaacaagcaatggggaaaggattccctgtttaataaatggtgctgggaaaactggctagcc

SEQ ID NO: 42068 - DNA, 120 bp, synthetic construct
  source 1..120: mol_type = other DNA
tagcaaagacttggaaccaacccaaatgtcccaacaatgatagactggattaagaaaatgtggcacatatacaccatggaatagtatgcagccataaaaaatgatgagttcatgtccttt

SEQ ID NO: 42069 - DNA, 120 bp, synthetic construct; identical to SEQ ID NO: 15624
  source 1..120: mol_type = other DNA

SEQ ID NO: 42070 - DNA, 120 bp, synthetic construct
  source 1..120: mol_type = other DNA
caaaacaatatgtacatacaccattaatcaatttttattttaaaaatatataaatggccgggcacagtggctcatgcctgtaatccctgcactttgggaggccgagacgggcagatcgcg

SEQ ID NO: 42071 - DNA, 120 bp, synthetic construct; identical to SEQ ID NO: 30075
  source 1..120: mol_type = other DNA

SEQ ID NO: 42072 - DNA, 120 bp, synthetic construct; identical to SEQ ID NO: 30076
  source 1..120: mol_type = other DNA

SEQ ID NO: 42073 - DNA, 120 bp, synthetic construct
  source 1..120: mol_type = other DNA
taaagggtcaagacccatcagtgtgctgtattcaggaaacccatctcatgtggagacacaaataggctcaaaataaagggatggaggaagatctgtcaagcaaatgaaaacaaaaaaagg

SEQ ID NO: 42074 - DNA, 120 bp, synthetic construct
  source 1..120: mol_type = other DNA
tctagaagaaatggataaattcctcgacacatacaccctcccaagactaaaccaagaagaagttgaatctctggatagaccaataacaggctctgaaatggaggcaataattaatagctt

SEQ ID NO: 42075 - DNA, 120 bp, synthetic construct
  source 1..120: mol_type = other DNA
cttaagctgataggcaacttcagcaaagtctcaggatacaaaatcaatgtgaaaaattcacaagcattcttatacagcgataacagacagagagccaaatcatcagtgaactcccattca

SEQ ID NO: 42076 - DNA, 120 bp, synthetic construct; identical to SEQ ID NO: 7607
  source 1..120: mol_type = other DNA

SEQ ID NO: 42077 - DNA, 120 bp, synthetic construct
  source 1..120: mol_type = other DNA
aagaggatacaaagaaatggaagaacattccatgctcatgggtaggaagaatcaatatcatgaaaagggccatactgcccaagataatttatagattcaatgccatccccatcaagctac

SEQ ID NO: 42078 - DNA, 120 bp, synthetic construct
  source 1..120: mol_type = other DNA
ctttgacactgttggtgggactgtaaactagttcaatcattgtggaagtcagtgtggtgattcctcagggatctagaactagaaataccatttgacccagccatcccattactgggtata

SEQ ID NO: 42079 - DNA, 120 bp, synthetic construct
  source 1..120: mol_type = other DNA
gctcaggacattctccccatagcatcatcctctagttcctctccataatgataaatagaaattgaagctcctgacttccacaatggttgaactagtttacagtcccaccaacagtgtaaa

SEQ ID NO: 42080 - DNA, 120 bp, synthetic construct
  source 1..120: mol_type = other DNA
ctttgttcttttggcttaggattcctcagggatctagaactagaaataccattttacccagccatcccattactgggtatatacccaaaggactataaatcatgctgctataaagacaca

SEQ ID NO: 42081 - DNA, 120 bp, synthetic construct
  source 1..120: mol_type = other DNA
agaactacaaaccactgctcaatgaaataaaagaggatagagacaaatggaagaacattccatgctcatgggtaggaagaatcaatatcgtgaaaatggccatactgcccaaggtaattt

SEQ ID NO: 42082 - DNA, 120 bp, synthetic construct
  source 1..120: mol_type = other DNA
caaccctatcaaaaagtgggcaaaggatatgaacagacacttctcaaaagaagatatttatgcagccaaaagacgcatgaaaaaatgctcatcatcactggccatcacagaaatgcaaat

SEQ ID NO: 42083 - DNA, 120 bp, synthetic construct
  source 1..120: mol_type = other DNA
gtgtcccagacattctggtatgttgtgtctttcttctcgttggtttcaaagaacatctttatttctgccttcattttgttatgtacccagtagtcattcaggagcaggttgttcagtttc

SEQ ID NO: 42084 - DNA, 120 bp, synthetic construct
  source 1..120: mol_type = other DNA
aattcaagatggattaaagactacacattagacctcaaaccatgaaaaccctagaaaaaaacctaggcaatcccattcaggatataggcatgggcaaggacttcatgtctaaaacaccaa

SEQ ID NO: 42085 - DNA, 120 bp, synthetic construct
  source 1..120: mol_type = other DNA
accggggcctgttgtggggtgggggaatggggggagggatagcattaggagatatacctaatgtaaatgacgagttaatgggttcagcacaccaacatggcacatgtatacatatgtaac

SEQ ID NO: 42086 - DNA, 120 bp, synthetic construct
  source 1..120: mol_type = other DNA
ccaataacaggctctgaaattgaggcaatgattaatagcttaccaaccaaaaaaaggccaacagcaaatggattcacagctgaattctatcagaggtacaagaggagatggtaccattcc

SEQ ID NO: 42087 - DNA, 120 bp, synthetic construct
  source 1..120: mol_type = other DNA
ctcaacgaaataaaagagaatacaaacaaatggaagaacattccatgctcatgggtaggaagaatcaatatcatgaaaatggccatactgcccaaggtaatttacagattcaatgccatc

SEQ ID NO: 42088 - DNA, 120 bp, synthetic construct
  source 1..120: mol_type = other DNA
ctggattaagaaaatgtggcacatatacaccatggaatactatgaagccataaaaaattatgagttcacgtccttcgtagggccatggatgaagctggaaaccatcattctcagcgaact

SEQ ID NO: 42089 - DNA, 120 bp, synthetic construct
  source 1..120: mol_type = other DNA
tatggagataattgtggctgttgtcattggttctgtttatgtgatgaattacatttattaatttgcatatgttgaaccagccttgcatctcagggatgaagctgactagatcgtggtgga

SEQ ID NO: 42090 - DNA, 120 bp, synthetic construct
  source 1..120: mol_type = other DNA
aaatgtcttcttttgagaagtgtctgttcatgtcctttgcccactttttgatggggttgtttttttcttataaatttgtttgagttcattgtagattctggatattagccctttgtcaga

SEQ ID NO: 42091 - DNA, 120 bp, synthetic construct
  source 1..120: mol_type = other DNA
tctttaatttcattgagcagtggtttgtagttctccttgaagaggtccttcacgtccgttgtaagttggattcctaggtattttattctctttgaagcaattgtgaatgggagttcactc

SEQ ID NO: 42092 - DNA, 120 bp, synthetic construct
  source 1..120: mol_type = other DNA
tacatcacactccacttctctaacaatttttgttatttctattatttttttgttttgttttgttttattactattattatactttaagttttagggtacatgtgcacaatgtgcaggtta

SEQ ID NO: 42093 - DNA, 120 bp, synthetic construct
  source 1..120: mol_type = other DNA
tcctctccagcacctgttgtttcctgactttttaatgattgccattctaactggtgtgagatgatatctcattgcggttttgatttgcatttctctgatggccagtgatgatgagcattt

SEQ ID NO: 42094 - DNA, 120 bp, synthetic construct
  source 1..120: mol_type = other DNA
cttacaagggatgtgaaggaactcttcaaggagaactacaaaccactggtcaaggaaataaaagaggatacaaacaaatggaagaacattccatgctcatgggtaggaagaatcaatatc

SEQ ID NO: 42095 - DNA, 120 bp, synthetic construct
  source 1..120: mol_type = other DNA
ctctttttggttggtaaactattgattattgccacaatttcagctcctgttattggtctattcagagattcaacttcttcctggtttagtcttgggagagtgtatgtgtctacgaatgta

SEQ ID NO: 42096 - DNA, 120 bp, synthetic construct
  source 1..120: mol_type = other DNA
ggtccacttggtgcagagctgagttcaattcctgggtatcgttgttgactttctgtctcgttgatctgtctaatgttgacagtggggtgttaaagtctcccattattaatgtgtgggagt

SEQ ID NO: 42097 - DNA, 120 bp, synthetic construct
  source 1..120: mol_type = other DNA
tcctgcagagtgttttccaacttggttccattctccgcgtcactttcaggtacaccaatcagacgtagatttggtcttttcacatagtcccatatttcttggaggctttgctcatttctt

SEQ ID NO: 42098 - DNA, 120 bp, synthetic construct
  source 1..120: mol_type = other DNA
atcagcgagattccgtgggcgtagggccctccgagccaggtgtgggatatagtctcgtggtgcgccgttttttaagccggtctgaaaagcacaatattcgggtgggagtgacccgatttt

SEQ ID NO: 42099 - DNA, 120 bp, synthetic construct
  source 1..120: mol_type = other DNA
aaaattttctcccattttgtgggttgcctgttcactctgatggtagtttcttttgctgtgcagaagctctttagtttaattagatcccatttgtcaattttggctttggttgccattgct

SEQ ID NO: 42100 - DNA, 120 bp, synthetic construct; identical to SEQ ID NO: 7610
  source 1..120: mol_type = other DNA

SEQ ID NO: 42101 - DNA, 120 bp, synthetic construct
  source 1..120: mol_type = other DNA
gaaataaaggggattcaattaggaaaacaggaagtcacattggccctgtttgcagatgacataattgtacatttagaaaacctcatcatctcagcccaaaatctccttaagctgataagc

SEQ ID NO: 42102 - DNA, 120 bp, synthetic construct
  source 1..120: mol_type = other DNA
ctaattaaactaaagagcttctgcacagcaaaagaaactaccatcagagtaaacaggccacctacagaatgggagaaaatttttgcaatctactcatctgacaaagggctaatatccaga

SEQ ID NO: 42103 - DNA, 120 bp, synthetic construct; identical to SEQ ID NO: 7600
  source 1..120: mol_type = other DNA

SEQ ID NO: 42104 - DNA, 120 bp, synthetic construct
  source 1..120: mol_type = other DNA
agagagaaaggtcgggttacccacaaagggaagcccatcagactaacagcggatctctcggcagaaactctacaagccagaagagagtgggagccaatattcaacattcttaaggaaaag

SEQ ID NO: 42105 - DNA, 120 bp, synthetic construct
  source 1..120: mol_type = other DNA
tcagcaaatgtaaaagaacagaaattataacaaactgtccctcagaccacagtgcgatcaaactagaacgcaggattaagaatctcattcaaaacagctcaactacgtagaaactgaaca

SEQ ID NO: 42106 - DNA, 120 bp, synthetic construct; identical to SEQ ID NO: 42091
  source 1..120: mol_type = other DNA

SEQ ID NO: 42107 - DNA, 120 bp, synthetic construct
  source 1..120: mol_type = other DNA
tgagataccatctcacaccagttagaatggccatcattaaaaagtcaggaaacaacaggtgctggagaggatgtggagaaataggaacacttttacactgttggtgggactgtaattagt

SEQ ID NO: 42108 - DNA, 120 bp, synthetic construct
  source 1..120: mol_type = other DNA
tcctccatccctttattttaagcctatgtgtgtcctgcacttgagatgggtctcctgaatacagcacactgatggatcttgactgtttatccaatttgccagtctgtgtcttttaattgg

SEQ ID NO: 42109 - DNA, 120 bp, synthetic construct; identical to SEQ ID NO: 2795
  source 1..120: mol_type = other DNA

SEQ ID NO: 42110 - DNA, 120 bp, synthetic construct; identical to SEQ ID NO: 7602
  source 1..120: mol_type = other DNA

SEQ ID NO: 42111 - DNA, 120 bp, synthetic construct
  source 1..120: mol_type = other DNA
gtgccagacagtgggcgcaggtcagtgggtgcgtgcaccgtgcgcgagccaaagcagggtgaggcattgcctcactcgggaagcgcaaggggtcagggagttccctttcctagtcaaaga

SEQ ID NO: 42112 - DNA, 120 bp, synthetic construct
  source 1..120: mol_type = other DNA
taaacttcccttctcgcttcatttcattcatttcatcttccattgctgataccctttcttccagttgatcgcatcggctcctgaggcttctgcattcttcacgtagttctcgagccttgg

SEQ ID NO: 42113 - DNA, 120 bp, synthetic construct
  source 1..120: mol_type = other DNA
acccatctcacgtgcagagacacacatagggtcaaaataaaaggatggaggaagatctactaagcaaatggaaaacaaaaaaaggcaggggttgcaatcctagtctctgataaaacacac

SEQ ID NO: 42114 - DNA, 120 bp, synthetic construct
  source 1..120: mol_type = other DNA
atagatagactgctagcaagactaataaagaaaaaaagagagaagaatcaaatagacgcaataaaaaatgataaaggggatatcaccactgatcccacagaaatacaaactaccatcaga

SEQ ID NO: 42115 - DNA, 120 bp, synthetic construct
  source 1..120: mol_type = other DNA
aaggaaataaagggtattcaattaggaaaagaggaagtcaaattgtccctctttgcagacgacatgattgtatatctagaaaactccattgactcagcccaaaatctccttaagctgata

SEQ ID NO: 42116 - DNA, 120 bp, synthetic construct
  source 1..120: mol_type = other DNA
aatatccagaatctacaatgaactcaaacaaatttacaagaaaaaaacaaacaaccccatcaaaaagtgggcaaaggacatgaacagacacttctcaaaagaagatatttatgcagccaa

SEQ ID NO: 42117 - DNA, 120 bp, synthetic construct; identical to SEQ ID NO: 7603
  source 1..120: mol_type = other DNA

SEQ ID NO: 42118 - DNA, 120 bp, synthetic construct
  source 1..120: mol_type = other DNA
atccgacaaagggctaatatccagaatctacaatgaaatcaaacaaatttacaaaaaaaaacaaacaaccccatcaaaaagtgggcaaaggatatgaacagacacttctcaaaagaagac

SEQ ID NO: 42119 - DNA, 120 bp, synthetic construct; identical to SEQ ID NO: 7604
  source 1..120: mol_type = other DNA

SEQ ID NO: 42120 - DNA, 120 bp, synthetic construct; identical to SEQ ID NO: 7605
  source 1..120: mol_type = other DNA

SEQ ID NO: 42121 - DNA, 120 bp, synthetic construct
  source 1..120: mol_type = other DNA
aaatttgtttgagttctttgtagattctggatattagccctttgtcagatgagtaagttgtgaaaattttctcccattttgtaggttgcctgttcactctgatggtagtttcttttgctg

SEQ ID NO: 42122 - DNA, 120 bp, synthetic construct
  source 1..120: mol_type = other DNA
tcatgtcccctgagccgtaaaaccaataagtttttattagcaattttcaaagggaagggagtgtacgaatagggtgtggatcacagagatcacacatttcaagggcaacaaaagatcaca

SEQ ID NO: 42123 - DNA, 120 bp, synthetic construct
  source 1..120: mol_type = other DNA
agagcagccattttggagggcccccccccccccaccccaggaatgcattcttttcccagggctgttcattattaatattccttactggggaaagaattcagtgatatttctcttacctgt

SEQ ID NO: 42124 - DNA, 120 bp, synthetic construct
  source 1..120: mol_type = other DNA
cgctgctgatagccaggcaaacagggtctggagtgaacctctagcaacagacctgcagctgaggatcctgtctgttgaaaggaaaactaacaaacagaaaggacatccacaccaaaaacc

SEQ ID NO: 42125 - DNA, 120 bp, synthetic construct
  source 1..120: mol_type = other DNA
ctccttgagaagagcaactccaagacacataattgtcagattcaccaaagttgcaatgaagtaaaaaatcttaagggcagccagagagaaaggtcgggttacccacaaagggaagcccat

SEQ ID NO: 42126 - DNA, 120 bp, synthetic construct
  source 1..120: mol_type = other DNA
agaatatacatttttttcagcaccacaccacacctattccaaaattgaccacatacttggaagtaaagctctcctcagcaaatgtaaaagaacagagattataacaaactgtctctcaga

SEQ ID NO: 42127 - DNA, 120 bp, synthetic construct
  source 1..120: mol_type = other DNA
attcagcagcacatcaaaaagcttatccaccatgatcaagtgggcttcatccctgcgatgcaaggctggttcaatatatgccaatcaataaatgtaatccagcatataaacaaaaccaaa

SEQ ID NO: 42128 - DNA, 120 bp, synthetic construct
  source 1..120: mol_type = other DNA
cctcagaaataacgccgcatatctacaactgtctgatctttgacaaacctgagaaaaacaagcaatggggaaaggattccctatttaataaatggtgctgggaaaactggctagccatat

SEQ ID NO: 42129 - DNA, 120 bp, synthetic construct
  source 1..120: mol_type = other DNA
atacccaaaggactataaatcatgctgttataaagacacatgtacacgtatgtttattgcggcactattcacagtagcaaagacttggaagcaacccaaatgtccaacaatgatagactg

SEQ ID NO: 42130 - DNA, 120 bp, synthetic construct
  source 1..120: mol_type = other DNA
ctacagaaggaaattcaaaccaaaggcaaataagttgaaaactttgaaaaaaatttagaagaatgtataactagaataaccaatacagagaagtgcttaaaggagctgatggagctgaaa

SEQ ID NO: 42131 - DNA, 120 bp, synthetic construct
  source 1..120: mol_type = other DNA
ttacagacaagcaaatgctgagagattttgtcaccaccaggccttccctaaaagagctcctgaaggaagcgctaaacagggaaaggaacaaccggtaccagccactgcaaaatcatgcca

SEQ ID NO: 42132 - DNA, 120 bp, synthetic construct
  source 1..120: mol_type = other DNA
gatgttctttgaaaccaacgagaacaaagacacaacataccattatctgtgggacgcattcagaggagtgtgtagagggaaatttatagcactaaatgcccacaagagaaagcaggaaag

SEQ ID NO: 42133 - DNA, 120 bp, synthetic construct
  source 1..120: mol_type = other DNA
cattggctcagaccaaaatctccttaagctgataagcaacttcagcaaagtctcaggatacaaaatcaatgtacaaaaatcacaagcattcttatacaccaataacagacaaacagagag

SEQ ID NO: 42134 - DNA, 120 bp, synthetic construct
  source 1..120: mol_type = other DNA
aagaaaacctaggcattaccattcaggacataggcatgggcaaggacttcatgtccaaaacaccaaaagcaatggcaacaaaagccaaaattgacaaatgggatctaattaaactcaaga

SEQ ID NO: 42135 - DNA, 120 bp, synthetic construct
  source 1..120: mol_type = other DNA
gggactgtggtggggtggggggaggggggagggatagcattgggagatatacctaatgcttgatgacgagttagtgggtgcagcacaccagcatggcacatgtatacatatgtaactaac

SEQ ID NO: 42136 - DNA, 120 bp, synthetic construct
  source 1..120: mol_type = other DNA
aatagaagaagaatatgtagggctcctcaaatggccttgcctgaaaaactagagaatagacatggaaagcattctgtgatattttggtccagcctcgctcccataactactcatctttgc

SEQ ID NO: 42137 - DNA, 120 bp, synthetic construct
  source 1..120: mol_type = other DNA
gcggctgggaagagacgctcctcacttcctagatgggatggcggccgggcggagacgctcctcactttccagactgggcagccaggcagaggggctcctcacatcccagacgatgggcgg

SEQ ID NO: 42138 - DNA, 120 bp, synthetic construct
  source 1..120: mol_type = other DNA
caatctgatttctctatcttttccccacctctcccccttttctattccacaaaaccgccgtcgtcatcatggcccgttctcaatgagctgttgggtacacctcccagacggggtggtggc

SEQ ID NO: 42139 - DNA, 120 bp, synthetic construct; identical to SEQ ID NO: 2147
  source 1..120: mol_type = other DNA

SEQ ID NO: 42140 - DNA, 120 bp, synthetic construct; identical to SEQ ID NO: 28926
  source 1..120: mol_type = other DNA

SEQ ID NO: 42141 - DNA, 120 bp, synthetic construct
  source 1..120: mol_type = other DNA
ctttgctattgtgaatagtgccacaataaatgtatgtgtgcatgtatctttacagcagcatggtttataatcctttgggtatatacccagtaatgggatggctgggtcaaatggtatttc

SEQ ID NO: 42142 - DNA, 120 bp, synthetic construct
  source 1..120: mol_type = other DNA
catgcacatgtagtctcagctactcaggagtctgaggtagcagaattgcttgagcccaggaattcaagttcagcctgggcaacataatgagatccccatctctaaaacaattaaatttct

SEQ ID NO: 42143 - DNA, 120 bp, synthetic construct
  source 1..120: mol_type = other DNA
atatacgtacgcgtgtatatacacgcgtgtatatagacgtgtgtatatagacgtgtgtatacacgtgtgtgtatacacgtgtgtgtacacacgtgtgtgtatacacacacgtgtgtgtat

SEQ ID NO: 42144 - DNA, 120 bp, synthetic construct; identical to SEQ ID NO: 28928
  source 1..120: mol_type = other DNA

SEQ ID NO: 42145 - DNA, 120 bp, synthetic construct; identical to SEQ ID NO: 28929
  source 1..120: mol_type = other DNA

SEQ ID NO: 42146 - DNA, 120 bp, synthetic construct
  source 1..120: mol_type = other DNA
gggctacacactaaagtaactgggtagtttaaaacaacatcaacaaaaaaaacaacaattaagctcaggttctaccccctagagattctaagattctagttcttagactagaatctgttc

SEQ ID NO: 42147 - DNA, 120 bp, synthetic construct
  source 1..120: mol_type = other DNA
ctgctgttcaagcgattctcatacctcagccatccaagtagctgggattataggattacaggtgcccaacaccatgcccagctaatttttgtctttttagtagagacagggtttctccat

SEQ ID NO: 42148 - DNA, 120 bp, synthetic construct; identical to SEQ ID NO: 28930
  source 1..120: mol_type = other DNA

SEQ ID NO: 42149 - DNA, 120 bp, synthetic construct
  source 1..120: mol_type = other DNA
caccccccagcaggggcacactgacacctcacacggcagggtattccaacagacctgcagctgacggtcatgtctgttagaaggaaaactaacaaacagaaaggacatccacatcaaaaa

SEQ ID NO: 42150 - DNA, 120 bp, synthetic construct
  source 1..120: mol_type = other DNA
agggaagcccatcagactaacagcggatctctcggcagaaaccctacaagccagaagagagtgggggccaatattcaacattgttaaagaaaagaattttcaacccagaatttcatatcc

SEQ ID NO: 42151 - DNA, 120 bp, synthetic construct
  source 1..120: mol_type = other DNA
aagtcaacaaggatacccaggaattgaactcagctctgcaccaagcggacctaatagacatctacagaactctccaccccaaatcaacagaatatacattttttcagcaccacaccacac

SEQ ID NO: 42152 - DNA, 120 bp, synthetic construct
  source 1..120: mol_type = other DNA
tgaggccagcatcattctgataccaaagccaggcagagacacaaccaaaaaagagaattttagaccaatatccttgatgaacattgatgcaaaaatcctcaataaaatactggcaaaccg

SEQ ID NO: 42153 - DNA, 120 bp, synthetic construct
  source 1..120: mol_type = other DNA
agattcaatgccatccccataaagctaccaatgactttcctcacagaattggaaaaaaactactttaaagttcatatggaatcaaaaaagagcccgcatcaccaaggcaatcctaagcca

SEQ ID NO: 42154 - DNA, 120 bp, synthetic construct
  source 1..120: mol_type = other DNA
tgtaattagttcaaccattgtggaagtcagtgtggcgattcttcagggatctagaactagaaataccatttgacccagccatcccattactgggtatatacccaaaggactataaatcat

SEQ ID NO: 42155 - DNA, 120 bp, synthetic construct; identical to SEQ ID NO: 28931
  source 1..120: mol_type = other DNA

SEQ ID NO: 42156 - DNA, 120 bp, synthetic construct; identical to SEQ ID NO: 31850
  source 1..120: mol_type = other DNA

SEQ ID NO: 42157 - DNA, 120 bp, synthetic construct; identical to SEQ ID NO: 31851
  source 1..120: mol_type = other DNA

SEQ ID NO: 42158 - DNA, 120 bp, synthetic construct; identical to SEQ ID NO: 7440
  source 1..120: mol_type = other DNA

SEQ ID NO: 42159 - DNA, 120 bp, synthetic construct; identical to SEQ ID NO: 7441
  source 1..120: mol_type = other DNA

SEQ ID NO: 42160 - DNA, 120 bp, synthetic construct; identical to SEQ ID NO: 7442
  source 1..120: mol_type = other DNA

SEQ ID NO: 42161 - DNA, 120 bp, synthetic construct
  source 1..120: mol_type = other DNA
cctttgggtatatacccagtaatgggatggctgggtcaaatggtatttctagttctagatccctgaggagtcgccacactgacttccacaatggttgaactagtctatttatttttttgt

SEQ ID NO: 42162 - DNA, 120 bp, synthetic construct; identical to SEQ ID NO: 33165
  source 1..120: mol_type = other DNA

SEQ ID NO: 42163 - DNA, 120 bp, synthetic construct; identical to SEQ ID NO: 23231
  source 1..120: mol_type = other DNA

SEQ ID NO: 42164 - DNA, 120 bp, synthetic construct
  source 1..120: mol_type = other DNA
cggctgggcagagacgctcctcacttcctagacggggtggcagccgggcagaggctgtaatcttagcactttgggaggccaaggcaggcggctaggaggtggaggttgtagcgagccgag

SEQ ID NO: 42165 - DNA, 120 bp, synthetic construct; identical to SEQ ID NO: 23232
  source 1..120: mol_type = other DNA

SEQ ID NO: 42166 - DNA, 120 bp, synthetic construct; identical to SEQ ID NO: 23233
  source 1..120: mol_type = other DNA

SEQ ID NO: 42167 - DNA, 120 bp, synthetic construct; identical to SEQ ID NO: 23234
  source 1..120: mol_type = other DNA

SEQ ID NO: 42168 - DNA, 120 bp, synthetic construct; identical to SEQ ID NO: 23235
  source 1..120: mol_type = other DNA

SEQ ID NO: 42169 - DNA, 120 bp, synthetic construct
  source 1..120: mol_type = other DNA
cccaccttcattttgttatgtacccagtagtcattcaggagccagttgttcagtttccatgtagttgagtggttttgagtgagtttcttaatcctgagttctagtttgattgcactgtgg

SEQ ID NO: 42170 - DNA, 120 bp, synthetic construct
  source 1..120: mol_type = other DNA
catttacatttaaggttaatattgttatgtgtgaatttgatcctgtcattatgatgttagctggttattttgctcgttaattgatgcagtttcttcctaggatcgatggtctttacaatt

SEQ ID NO: 42171 - DNA, 120 bp, synthetic construct
  source 1..120: mol_type = other DNA
agggagcaaaacaatcctagtggccaagcaataaacacacagacagtcacataactatagaaagtgctgtgtgagagtccaggtgcagaggctcacaactgtaatcccagcactttggga

SEQ ID NO: 42172 - DNA, 120 bp, synthetic construct; identical to SEQ ID NO: 28509
  source 1..120: mol_type = other DNA

SEQ ID NO: 42173 - DNA, 120 bp, synthetic construct
  source 1..120: mol_type = other DNA
tttaaacatcctaatcataggacttttttttttttttttttttttttttttttggagacggagtctcgctgtcgcccaggctggagtgcagtggcgcaatctcggttcactgcaggctcc

SEQ ID NO: 42174 - DNA, 120 bp, synthetic construct
  source 1..120: mol_type = other DNA
ccgtaggtgcccaccatcatgcccggctaaattttctattttttgtagagatgggggtctcgctgtgttgcccaggctggtcttggactcaagcaatctgcctgtctcagcctaccaaaa

SEQ ID NO: 42175 - DNA, 120 bp, synthetic construct; identical to SEQ ID NO: 4703
  source 1..120: mol_type = other DNA

SEQ ID NO: 42176 - DNA, 120 bp, synthetic construct; identical to SEQ ID NO: 21817
  source 1..120: mol_type = other DNA

SEQ ID NO: 42177 - DNA, 120 bp, synthetic construct
  source 1..120: mol_type = other DNA
tcccctgtctcagcctcctgagtagctgggactacaggtgtgtgccaccatgtctgactaatttctttttttttttttttttttgtatttttagtagagatggggtttcaccatgttggc

SEQ ID NO: 42178 - DNA, 120 bp, synthetic construct
  source 1..120: mol_type = other DNA
gagatggaggttgcagtgagccaagatagtgccactacactccagcctgggcaacaatagcaaaactacatctcaaaagaaaaaaaaacccaaaaaccttatggggagaaactttgagac

SEQ ID NO: 42179 - DNA, 120 bp, synthetic construct; identical to SEQ ID NO: 21819
  source 1..120: mol_type = other DNA

SEQ ID NO: 42180 - DNA, 120 bp, synthetic construct; identical to SEQ ID NO: 21820
  source 1..120: mol_type = other DNA

SEQ ID NO: 42181 - DNA, 120 bp, synthetic construct
  source 1..120: mol_type = other DNA
ttccttccttccccttccttctttccccttccttccttccttccttctttccttccttccttccttcctctttctctctctctttctttcttttctttctctctcctttctttctttttt

SEQ ID NO: 42182 - DNA, 120 bp, synthetic construct; identical to SEQ ID NO: 6792
  source 1..120: mol_type = other DNA

SEQ ID NO: 42183 - DNA, 120 bp, synthetic construct; identical to SEQ ID NO: 6793
  source 1..120: mol_type = other DNA

SEQ ID NO: 42184 - DNA, 120 bp, synthetic construct; identical to SEQ ID NO: 6794
  source 1..120: mol_type = other DNA

SEQ ID NO: 42185 - DNA, 120 bp, synthetic construct; identical to SEQ ID NO: 6795
  source 1..120: mol_type = other DNA

SEQ ID NO: 42186 - DNA, 120 bp, synthetic construct
  source 1..120: mol_type = other DNA
cgggtgaatgcgcgggctgcgagcacggcaaggtctctcaggcttgtggacgtgggtacgggcgtctcggcaccctgagctttctcccctacccgccccagcgtgccggggaatgctgtg

SEQ ID NO: 42187 - DNA, 120 bp, synthetic construct
  source 1..120: mol_type = other DNA
gcaaaaagagcaaaactccgtctcaaaaaaaaaaaaaaaaaaaaaagcagggggcggtttcagggataaaagtggggaatcctcggagcttttccagccggccctcccggtcgccctttg

SEQ ID NO: 42188 - DNA, 120 bp, synthetic construct
  source 1..120: mol_type = other DNA
ttgcagacggagtctcgttcactcagtgctcaatggtgcccaggctggagtgcagtggcgtgatctcggcccgctacaacctccacctcccagccgcctgccttggtctcccaaagtgcc

SEQ ID NO: 42189 - DNA, 120 bp, synthetic construct
  source 1..120: mol_type = other DNA
gatgcttgaaggcagcatgctcattaagagtcatcaccactccctaatctcaagtacccagggacacaaacactgcggagggccgcagggtcctctgcctaggaaaaccagaaacccttg

SEQ ID NO: 42190 - DNA, 120 bp, synthetic construct; identical to SEQ ID NO: 22238
  source 1..120: mol_type = other DNA

SEQ ID NO: 42191 - DNA, 120 bp, synthetic construct; identical to SEQ ID NO: 22239
  source 1..120: mol_type = other DNA

SEQ ID NO: 42192 - DNA, 120 bp, synthetic construct
  source 1..120: mol_type = other DNA
gtgtacctgaaagtgacagggagaatggaaccaagttggagaacactctgcaggatattatccaggagaacttccccaatctagcaaggcaggccaacattcagattcaggaaatacaga

SEQ ID NO: 42193 - DNA, 120 bp, synthetic construct
  source 1..120: mol_type = other DNA
ctcccattattaatgtgtgggagtctaagtctctttgtaggtcactcaggacttgctttatgaatctgggtgctcctgtattgggtgcatatatatttaggatagttagctcttgttgtt

SEQ ID NO: 42194 - DNA, 120 bp, synthetic construct
  source 1..120: mol_type = other DNA
ttgaatctctgaatagaccaataacaggatctgaaattgtggcaataatcaatagcttaccaaccaaaaagagtccaggaccagaaggattcacagcggaattctaccagaggtacaagg

SEQ ID NO: 42195 - DNA, 120 bp, synthetic construct
  source 1..120: mol_type = other DNA
tcatgagtgaattcccattcacaattgcttcaaagagaataaaatacctaggagtccaacttacaagggatgtgaaggacctcttcaaggagaactacaaaccactgctcaaggaaataa

SEQ ID NO: 42196 - DNA, 120 bp, synthetic construct
  source 1..120: mol_type = other DNA
atgtggagaaataggaacacttttacactgttggtgggactgtaaactagttcaaccattgtggaagtcagtgtggtgattcctcagggatctagaactagaaataccattgacccagcc

SEQ ID NO: 42197 - DNA, 120 bp, synthetic construct; identical to SEQ ID NO: 26493
  source 1..120: mol_type = other DNA

SEQ ID NO: 42198 - DNA, 120 bp, synthetic construct; identical to SEQ ID NO: 9762
  source 1..120: mol_type = other DNA

SEQ ID NO: 42199 - DNA, 120 bp, synthetic construct; identical to SEQ ID NO: 9763
  source 1..120: mol_type = other DNA

SEQ ID NO: 42200 - DNA, 120 bp, synthetic construct
  source 1..120: mol_type = other DNA
taatatatataatgaatattggttcattttgcctttatggttctgattacaataaagactagactgacttgggaggccgaggcgggtggatcatgaggtcaggagatcgagaccatcctg

SEQ ID NO: 42201 - DNA, 120 bp, synthetic construct; identical to SEQ ID NO: 9765
  source 1..120: mol_type = other DNA

SEQ ID NO: 42202 - DNA, 120 bp, synthetic construct; identical to SEQ ID NO: 30026
  source 1..120: mol_type = other DNA

SEQ ID NO: 42203 - DNA, 120 bp, synthetic construct; identical to SEQ ID NO: 7407
  source 1..120: mol_type = other DNA

SEQ ID NO: 42204 - DNA, 120 bp, synthetic construct; identical to SEQ ID NO: 7408
  source 1..120: mol_type = other DNA

SEQ ID NO: 42205 - DNA, 120 bp, synthetic construct
  source 1..120: mol_type = other DNA
ctgacagctgtcactcagcaccccaccccctggggaagagggggccgattcaatcagagccccagaggaaacgcattgataggcgattatttatttatttatgcaaaagtgagccgactt

SEQ ID NO: 42206 - DNA, 120 bp, synthetic construct
  source 1..120: mol_type = other DNA
tctgtcttccggcggtggcagcgacgcgggcgcccggctgctgaggagaggagtcgtggaggagccctgagccgcccgccgtcgctgacagcatggctcgcgcctcggctcacattctcc

SEQ ID NO: 42207 - DNA, 120 bp, synthetic construct
  source 1..120: mol_type = other DNA
tccttgtagattctgtatagtagtcctttgtcagatgcatactttgagaagattttctcccactctgtgggttctctgtttactctgctgattcttttgctgtgcagaagccttttagtt

SEQ ID NO: 42208 - DNA, 120 bp, synthetic construct
  source 1..120: mol_type = other DNA
cagatgtgatggcggccgggaagaggcgctcctcacttcctagatgggatggcagccgggcagagacgctcctcactttccagactgggcagccaggcagaggggctcctcacatcccag

SEQ ID NO: 42209 - DNA, 120 bp, synthetic construct; identical to SEQ ID NO: 28337
  source 1..120: mol_type = other DNA

SEQ ID NO: 42210 - DNA, 120 bp, synthetic construct; identical to SEQ ID NO: 28338
  source 1..120: mol_type = other DNA

SEQ ID NO: 42211 - DNA, 120 bp, synthetic construct; identical to SEQ ID NO: 28339
  source 1..120: mol_type = other DNA

SEQ ID NO: 42212 - DNA, 120 bp, synthetic construct
  source 1..120: mol_type = other DNA
ctgtgtcaaatggtatttctagttctagatccctgaggaattgccacactgacttccacaatggttgaactagtttacagtcccaccaacagtgtaaaatgttcctatttctccacatcc

SEQ ID NO: 42213 - DNA, 120 bp, synthetic construct; identical to SEQ ID NO: 11974
  source 1..120: mol_type = other DNA

SEQ ID NO: 42214 - DNA, 120 bp, synthetic construct; identical to SEQ ID NO: 11975
  source 1..120: mol_type = other DNA

SEQ ID NO: 42215 - DNA, 120 bp, synthetic construct; identical to SEQ ID NO: 14682
  source 1..120: mol_type = other DNA

SEQ ID NO: 42216 - DNA, 120 bp, synthetic construct; identical to SEQ ID NO: 14683
  source 1..120: mol_type = other DNA

SEQ ID NO: 42217 - DNA, 120 bp, synthetic construct; identical to SEQ ID NO: 14684
  source 1..120: mol_type = other DNA

SEQ ID NO: 42218 - DNA, 120 bp, synthetic construct; identical to SEQ ID NO: 14685
  source 1..120: mol_type = other DNA

SEQ ID NO: 42219 - DNA, 120 bp, synthetic construct; identical to SEQ ID NO: 14686
  source 1..120: mol_type = other DNA

SEQ ID NO: 42220 - DNA, 120 bp, synthetic construct; identical to SEQ ID NO: 14687
  source 1..120: mol_type = other DNA

SEQ ID NO: 42221 - DNA, 120 bp, synthetic construct; identical to SEQ ID NO: 14688
  source 1..120: mol_type = other DNA

SEQ ID NO: 42222 - DNA, 120 bp, synthetic construct; identical to SEQ ID NO: 14689
  source 1..120: mol_type = other DNA

SEQ ID NO: 42223 - DNA, 120 bp, synthetic construct; identical to SEQ ID NO: 14690
  source 1..120: mol_type = other DNA

SEQ ID NO: 42224 - DNA, 120 bp, synthetic construct
  source 1..120: mol_type = other DNA
aagcaccctggatttaggaagtcccgggagcagcgcggcggcacctccctcacccaaggggccgcggcgacggtcacggggcgcggcgccaccgtgagcgacccaggccaggattctaaa

SEQ ID NO: 42225 - DNA, 120 bp, synthetic construct
  source 1..120: mol_type = other DNA
gagtggatgcaacggacaggatacggtggaggatttgtattcttcagacatctttttcggaagcttgcttatcacttttggggtggctttagggtctgtaaaataaaagatttagaactg

SEQ ID NO: 42226 - DNA, 120 bp, synthetic construct
  source 1..120: mol_type = other DNA
ataataggggtgtcatgggttttatgtgtatggtgagaaaacatgaagatctccctgatgtgtttttaagatactgggtttcagttagggtgttatcaaaggacctggatggctttgtaa

SEQ ID NO: 42227 - DNA, 120 bp, synthetic construct
  source 1..120: mol_type = other DNA
gctctgaagcaactttacgtccaattcatgttcctaccttcaagaagaaaatatcaaagataactttcattatagaatctactataactttgcttagactgttgccccatacttagtgac

SEQ ID NO: 42228 - DNA, 120 bp, synthetic construct
  source 1..120: mol_type = other DNA
attgaaagcactggatctaaactaaaaaatgaggtctagtttcttcactgttacagatctgggcaagtttcttgaccaataaagcacgacagtcagcacctgtactgctactctcacaac

SEQ ID NO: 42229 - DNA, 120 bp, synthetic construct
  source 1..120: mol_type = other DNA
tttgggatagaaaagtatgtgttgttttaaggttgaaccaaatcgtacactccaagagatagtatcaaattaagaaaaatttactaattacattccatcatcaatctggggatgtgacta

SEQ ID NO: 42230 - DNA, 120 bp, synthetic construct
  source 1..120: mol_type = other DNA
cgtcacagaaacagaagtgtcttgcctgtatttaagacccgatttagatgccacatctccatgaactcttttgcagcacctgtgttactgagcaatatattatgcttgattttgccatgt

SEQ ID NO: 42231 - DNA, 120 bp, synthetic construct
  source 1..120: mol_type = other DNA
cagggactggaaataaagataaacaagttatgggtaagtagaccaacgcagtaagagtagattaaatcaccccgaggaaaaatccgatagagcaaactcagtactgtgagaggcaatctc

SEQ ID NO: 42232 - DNA, 120 bp, synthetic construct
  source 1..120: mol_type = other DNA
acctccaaaatattctaccctggtttttttccgtctatcatttcttctctgtgtctatgcctcttccatagccctatacctaaatgttggtattactgaggtctatcctcaagccacttt

SEQ ID NO: 42233 - DNA, 120 bp, synthetic construct
  source 1..120: mol_type = other DNA
tgaaggattttgtgtgctaagctaaggaacatggacagttcagagctactgaaggagtttaatcagaggagtgacacagtcagatttatgttttagaaagaagttcctggcatcccggaa

SEQ ID NO: 42234 - DNA, 120 bp, synthetic construct
  source 1..120: mol_type = other DNA
ggaaaatagctaggggaaccatcaccaatttctattatatacacagttgtacagacaacctggagaaggtatctgttgatacatacataaacacacacacacacacacacacacacacac

SEQ ID NO: 42235 - DNA, 120 bp, synthetic construct
  source 1..120: mol_type = other DNA
tccaccaaacaatggctaatgcatttgagaggggaaaaaaatcccagtagatctgttaattgggaatcactgtgctacaaatgcttgaagtataagcaaacattttcctatgatgagttc

SEQ ID NO: 42236 - DNA, 120 bp, synthetic construct
  source 1..120: mol_type = other DNA
acgtatatttctaatctttttttttttttttgaggcagacttttgctcttgttgcccaggctcgagtgcaatgacacgatcttggctcactgcaacctctgactcccgggttcaagcgat

SEQ ID NO: 42237 - DNA, 120 bp, synthetic construct
  source 1..120: mol_type = other DNA
gcatgtctaacaagctccgagatgatgctgatcctgctggtctaggtcactaggaagtgcctagacaacacgtttatggatatttgactggtaatttgtgtttagaatattgcaacagtt

SEQ ID NO: 42238 - DNA, 120 bp, synthetic construct
  source 1..120: mol_type = other DNA
aacagatatatttctatatttaatgtctacattatgtgtgtatgtgtgttcatgtatgtatacacacagacacatacatgattagataagtgtcctattattcagtgcttcaagtaaagg

SEQ ID NO: 42239 - DNA, 120 bp, synthetic construct
  source 1..120: mol_type = other DNA
tgaaacatgctaacaatgattaggatttttgtgtgcagttggacccactcttccactattagggaaacagtatagcgaagcgaagggaagctcaaagtgaataacaggatgcaaacaggg

SEQ ID NO: 42240 - DNA, 120 bp, synthetic construct
  source 1..120: mol_type = other DNA
ttatttgaccccattgtttatcatggatctttcttgactttattttaaattaaaaattacaagtgctctgttcttggtcttccttttgcagatgctttaacagttcattcccagttcatt

SEQ ID NO: 42241 - DNA, 120 bp, synthetic construct
  source 1..120: mol_type = other DNA
tatattatgtattttgctgctttcctgtctcttttaaatttactgatttaatggatttctctttgatcattacctagtcttgcatggttctagaatccttgcttatttggccatgaacag

SEQ ID NO: 42242 - DNA, 120 bp, synthetic construct
  source 1..120: mol_type = other DNA
gagccatgatcgtgccactgaacttcaggagtgagactgtttcacacacacacaaaagacggagacaagtagtctgatgggattggttgacataaagaaccttaatgaattgtacctact

SEQ ID NO: 42243 - DNA, 120 bp, synthetic construct
  source 1..120: mol_type = other DNA
cgaaagtggcacatattccaaatctggacacttggaaaagtgtgatagcttgctttggtgaggatagaaattttgggcattgtatgctacttgctttattgggatacatgtcaaattttc

SEQ ID NO: 42244 - DNA, 120 bp, synthetic construct
  source 1..120: mol_type = other DNA
atgtggcatttagggagtaggggaaatctgagcttagatgtctaaggaaggaaagtaccgtattaggaaacatggatatggttaaatgcatgtgggaataaaacttgagtcatctgtggt

SEQ ID NO: 42245 - DNA, 120 bp, synthetic construct
  source 1..120: mol_type = other DNA
tacctccttaggggcactttaattgtaagtttctcatcatggtttgagggtgtataaagtcagcatagacttcgttacctctgtccttgattgtcagtgattgattccaggcattaccct

SEQ ID NO: 42246 - DNA, 120 bp, synthetic construct
  source 1..120: mol_type = other DNA
ggtagaaacctccagtgatcattccgccaaatgaacttgtcacttttcctacttatgtagtagttacacatattatctatcatccttccaacatttggaattataagcattgttgtttag

SEQ ID NO: 42247 - DNA, 120 bp, synthetic construct
  source 1..120: mol_type = other DNA
tacactgcaaatatgaaagactgcagacaggttttatatgtggaactctgctcagactgagagaaagtctagttattagtaaatctctagttttttcagagctggattattttgtcacat

SEQ ID NO: 42248 - DNA, 120 bp, synthetic construct
  source 1..120: mol_type = other DNA
tagtcacagtaattaacagtttttacccaaatgctggacaagaagattccaaacatcagaaatccatctctcaataaggtgtatagttgctttttttctcctcaccaccaccagttccct

SEQ ID NO: 42249 - DNA, 120 bp, synthetic construct
  source 1..120: mol_type = other DNA
agtaacatgctgtacaggtctgtagccttggagcaataagttatactgtatagcgtaagtgtatggtagactataccatctaggtttgtgtaagtacactctatgatgtttgcatgatga

SEQ ID NO: 42250 - DNA, 120 bp, synthetic construct
  source 1..120: mol_type = other DNA
aaacacacctcttgggttttctactaagggcctaatgaaatcccgtatttcaggtgaaatagacagatatgtactgattgacgtaacacttggcaagttggtttaaattatgggccattt

SEQ ID NO: 42251 - DNA, 120 bp, synthetic construct
  source 1..120: mol_type = other DNA
gcagtgagcagagatcacaccactgcactccagcccgggtgacaatgcgagactccatctgaaaaaaaaaaaaaatttattaaaagtttaagacatctttctaggttagcttcaatttat

SEQ ID NO: 42252 - DNA, 120 bp, synthetic construct
  source 1..120: mol_type = other DNA
caacacacactggggccgtttagaggctgcagggtgggaggagggagagaggatcaggaaaaataactgataagtactaggcttaatacctgggtgatgaaataatctgtacaacaaacc

SEQ ID NO: 42253 - DNA, 120 bp, synthetic construct
  source 1..120: mol_type = other DNA
accaaagccacacagctagtaatagacagagacaggagtccagaccaaatctgtctgactacacagtacaattcttaaactaaaccatactgtgtttctccttacatgaaaaacagggtg

SEQ ID NO: 42254 - DNA, 120 bp, synthetic construct
  source 1..120: mol_type = other DNA
ctaattttagaacttcctttccttgtaggctctgaatggctttgtattagttgtcactacagatgctttggtcttttatgcttcttctactatacaagattatctagggtttcagcaggt

SEQ ID NO: 42255 - DNA, 120 bp, synthetic construct
  source 1..120: mol_type = other DNA
agagcttcaactatattatatacccagtggaaaccactgaagggttttgttacagggggtgtgtatatttcaacttgtgtttcagatgcaacttttggaaattgtgtaatggttggcatc

SEQ ID NO: 42256 - DNA, 120 bp, synthetic construct
  source 1..120: mol_type = other DNA
ggggatgtgacttatttgagcaagagcattcatgttgggaactgatgacaagtaacttttggcttatctgttgtagtgccagtctctttagctttttctaccttaggttctatcttaggt

SEQ ID NO: 42257 - DNA, 120 bp, synthetic construct
  source 1..120: mol_type = other DNA
ggaaagtaaattttgttttgcctttatttctacagaagccactggtctcccccagacagtagtctgttataacccagaccagattcctccagaaaactctcctttaatggagaggtgctt

SEQ ID NO: 42258 - DNA, 120 bp, synthetic construct
  source 1..120: mol_type = other DNA
tttcttgttacaaagtctgaacacctgcataggagttgactgtagggaacagcttaggattcctcagagtggacttgtctgttatctcattgtatccttagctcatgttaccaagtacag

SEQ ID NO: 42259 - DNA, 120 bp, synthetic construct
  source 1..120: mol_type = other DNA
ctgtacactgtgtttaagtgttattacagaagagtcaaaagttaaaaatgcaaaagtttatgaagtaaaaatgttacagtaaactgtgctgggattacaggcataagccactgcacctgg

SEQ ID NO: 42260 - DNA, 120 bp, synthetic construct
  source 1..120: mol_type = other DNA
ctggtgtgcaaggagctgtgtgaggtgaaaatgatagggtaatggcaagcttggaaaatgatataggttttcatgttatgaccattaggaacaaggagtggttcacttatccctttagaa

SEQ ID NO: 42261 - DNA, 120 bp, synthetic construct
  source 1..120: mol_type = other DNA
agccccagaagttttagtaactttcagaaaattgtgagcaggagtctgatattaaacatttatatcatatcaaacatatcagtgcttttctcctttctaatgtgggaatgcagagaggta

SEQ ID NO: 42262 - DNA, 120 bp, synthetic construct
  source 1..120: mol_type = other DNA
agtattaggctgtaggaaaatattccctatttaaaatgaaaataattttttccccaacttatgttctctctatactttcctgtgttactagaattgtttggtacataatcttccctttaa

SEQ ID NO: 42263 - DNA, 120 bp, synthetic construct
  source 1..120: mol_type = other DNA
tttcccggctgcgctgtattttgatcaggggattttgtctgtggttctctgtctggattgtgttgttctattaatagctccattagtgcagttgtctattttgtctagcattacactgtc

SEQ ID NO: 42264 - DNA, 120 bp, synthetic construct
  source 1..120: mol_type = other DNA
ggatggatttcagtttttttgaaatttgtggtgacttattttatgatctaatacatggtctatgttggtaaaatatcccatgtaatcctatgaagaatacatgttctgtagtttgggagt

SEQ ID NO: 42265 - DNA, 120 bp, synthetic construct
  source 1..120: mol_type = other DNA
attcttaactttctaattcctaatttttttatttttttattattattatttttgagacaggatcttactctgtcacctatgctggaatgcagtggcacaaatgtggctcactgaagcctt

SEQ ID NO: 42266 - DNA, 120 bp, synthetic construct
  source 1..120: mol_type = other DNA
agagcatttacgaaaacgaaatacgaagttgccttttatgtttaccactggagaagctgtgttgtatgaggcaaccaacccttttcctgccataatggatcccttaccactaaggactaa

SEQ ID NO: 42267 - DNA, 120 bp, synthetic construct
  source 1..120: mol_type = other DNA
gagctggactaccctatggggagttttgaaccatccccataccccactacttctagtttagaagattttgtcacttgtttacaacttcctgaaaaccaaaagcatggattaaatccacag

SEQ ID NO: 42268 - DNA, 120 bp, synthetic construct
  source 1..120: mol_type = other DNA
attcctccacattacctcccctatcctcatctcatcctttaaggtagaatggctttcttttctggctttcttaaaagaggtaactcagctggctttctgtcatggaaatcaagcttgata

SEQ ID NO: 42269 - DNA, 120 bp, synthetic construct
  source 1..120: mol_type = other DNA
tctattggattacactgctgtgtacagtatgtttaaagagaatggtgacatgaattgtgttatgagtaatgagaaaaaatcattttaaactcaccattatctggccaggtaatactaact

SEQ ID NO: 42270 - DNA, 120 bp, synthetic construct
  source 1..120: mol_type = other DNA
tgaaatgagacagctgcatcactcatctgtaccatgttcaaaatttcctgtcaaattaatggaaaaacaggttataaatgcaactaatacataatatgtcctcagtatgtcttcactgtg

SEQ ID NO: 42271 - DNA, 120 bp, synthetic construct
  source 1..120: mol_type = other DNA
tttctgcacacaaatattatttgtgtttcctaaatccaaccattttcattaattcaggcatattttaactccactgcttacctactttcttcaggtaaagggcaaataatgatcgaaaaa

SEQ ID NO: 42272 - DNA, 120 bp, synthetic construct
  source 1..120: mol_type = other DNA
aaaagaaaaaatgacaccatcttttattcttttttttttttttttttgagagagagtcttactctgccgcccaaactggagtgcagtggcacaatcttggctcactgcaacctctacctc

SEQ ID NO: 42273 - DNA, 120 bp, synthetic construct
  source 1..120: mol_type = other DNA
ttttcagtcaaaactttaaacctgtagaatcaatttaagtgttggaaaaaatttgtctgaaacatttcataatttgtttccagcatgaggtatctaaggatttagaccagaggtctagat

SEQ ID NO: 42274 - DNA, 120 bp, synthetic construct; identical to SEQ ID NO: 26099
  source 1..120: mol_type = other DNA

SEQ ID NO: 42275 - DNA, 120 bp, synthetic construct; identical to SEQ ID NO: 26100
  source 1..120: mol_type = other DNA

SEQ ID NO: 42276 - DNA, 120 bp, synthetic construct; identical to SEQ ID NO: 26086
  source 1..120: mol_type = other DNA

SEQ ID NO: 42277 - DNA, 120 bp, synthetic construct; identical to SEQ ID NO: 26087
  source 1..120: mol_type = other DNA

SEQ ID NO: 42278 - DNA, 120 bp, synthetic construct; identical to SEQ ID NO: 26088
  source 1..120: mol_type = other DNA

SEQ ID NO: 42279 - DNA, 120 bp, synthetic construct; identical to SEQ ID NO: 26091
  source 1..120: mol_type = other DNA

SEQ ID NO: 42280 - DNA, 120 bp, synthetic construct
  source 1..120: mol_type = other DNA
gcaagtggaggccctcagtcacggagtccacccgggcagtcagcgactgaggaagagcgcccgcgagtggaggccctcagtcacggagtccacccgggcagtcagcgactgaggaagagc

SEQ ID NO: 42281 - DNA, 120 bp, synthetic construct
  source 1..120: mol_type = other DNA
ccgggagtggaggccctcagtcacggagtccacccgggcagtcagcgactggggaagagcgcccgcgagtggaggccctcagacacggagtccacccgggcagtcagcgactggggaaga

SEQ ID NO: 42282 - DNA, 120 bp, synthetic construct
  source 1..120: mol_type = other DNA
ccgcgaggggaggccctcagtcacggagtccacccgggcagtcagcgactgaggaagagcgcccgcgagtggaggccgtcagtcacggagtccacccaggcctggcatgtggctgtgtcc

SEQ ID NO: 42283 - DNA, 120 bp, synthetic construct; identical to SEQ ID NO: 26089
  source 1..120: mol_type = other DNA

SEQ ID NO: 42284 - DNA, 120 bp, synthetic construct; identical to SEQ ID NO: 26090
  source 1..120: mol_type = other DNA

SEQ ID NO: 42285 - DNA, 120 bp, synthetic construct; identical to SEQ ID NO: 26092
  source 1..120: mol_type = other DNA

SEQ ID NO: 42286 - DNA, 120 bp, synthetic construct
  source 1..120: mol_type = other DNA
tgctgggttcttaaggaaagaggccaccgtgaaagacaggagtgagacccaacctgagaagacgagctggagggaacagagatgcacagaatgaagaaaagacagaggcaggaaaggaaa

SEQ ID NO: 42287 - DNA, 120 bp, synthetic construct
  source 1..120: mol_type = other DNA
cattcaactgagacttgggggctccatcagcggtggtgtgagtgagtacctgggaaaactaagtcagcaaagatgcaagcaactccaggccaacagggctgctcaggcagagtggaggat

SEQ ID NO: 42288 - DNA, 120 bp, synthetic construct
  source 1..120: mol_type = other DNA
gcgcagggtgaggcagggccagagcgtgcacgaacacacgggtgcagggcgaggcaggcgcagggcgaggcagggccagagtgtgcacgggcgcagggcgaggtgggtgcagatgtggca

SEQ ID NO: 42289 - DNA, 120 bp, synthetic construct; identical to SEQ ID NO: 26093
  source 1..120: mol_type = other DNA

SEQ ID NO: 42290 - DNA, 120 bp, synthetic construct; identical to SEQ ID NO: 26094
  source 1..120: mol_type = other DNA

SEQ ID NO: 42291 - DNA, 120 bp, synthetic construct; identical to SEQ ID NO: 26095
  source 1..120: mol_type = other DNA

SEQ ID NO: 42292 - DNA, 120 bp, synthetic construct; identical to SEQ ID NO: 26096
  source 1..120: mol_type = other DNA

SEQ ID NO: 42293 - DNA, 120 bp, synthetic construct; identical to SEQ ID NO: 26097
  source 1..120: mol_type = other DNA

SEQ ID NO: 42294 - DNA, 120 bp, synthetic construct; identical to SEQ ID NO: 26098
  source 1..120: mol_type = other DNA

SEQ ID NO: 42295 - DNA, 120 bp, synthetic construct; identical to SEQ ID NO: 14510
  source 1..120: mol_type = other DNA

SEQ ID NO: 42296 - DNA, 120 bp, synthetic construct
  source 1..120: mol_type = other DNA
taaacatttcttgaagcagaagcaacaggtgttttttgtttgtttttgtttttttttaatatacggagtctcactctgttgcccaggctggtgtgcagtggcacggtctcagcttactgc

SEQ ID NO: 42297 - DNA, 120 bp, synthetic construct
  source 1..120: mol_type = other DNA
catataaagtagaatattctcacttaatccagacttaattttttagattcaaacagccagtaatctactgtccagctgggagctggaggtggtgggggtagaactgagggggaagagatg

SEQ ID NO: 42298 - DNA, 120 bp, synthetic construct; identical to SEQ ID NO: 35278
  source 1..120: mol_type = other DNA

SEQ ID NO: 42299 - DNA, 120 bp, synthetic construct; identical to SEQ ID NO: 35279
  source 1..120: mol_type = other DNA

SEQ ID NO: 42300 - DNA, 120 bp, synthetic construct
  source 1..120: mol_type = other DNA
taaacatacgtgtgcatgtgtctttatagcagcatgatttgtagtcctttgggtatatatccagtaacgggatggctgggtcaaatggcatttctagttctagatccctgaggaatcgcc

SEQ ID NO: 42301 - DNA, 120 bp, synthetic construct
  source 1..120: mol_type = other DNA
gtcaggtagcatgatgcctccagctttgttcttttggcttaggattgacttggcgatgcgggctcttttttggttccatatgaactttaaagtagttttttccaattctgtgaagaaagt

SEQ ID NO: 42302 - DNA, 120 bp, synthetic construct
  source 1..120: mol_type = other DNA
gtgtatattgaaccagccttgcatcccagggatgaagcccacttgatcatggttgataagctttttgatgtgctgctggattcagtttgccagtattttattgaggatttttgcatcaat

SEQ ID NO: 42303 - DNA, 120 bp, synthetic construct
  source 1..120: mol_type = other DNA
tttggaataggtgtggtgcggtgctgaaaaaaatgtatattctgttgatttggggtgaagagttctgtagatgtctattaggtccacttggtgcagagctgagttcaattcctgggtatc

SEQ ID NO: 42304 - DNA, 120 bp, synthetic construct
  source 1..120: mol_type = other DNA
ccactgttagtctgatgggcttccctttgtgggtaacccgacctttctctctggcttcccttaacattttttccttcatttcaactttggtgaatctgacaattatgtgtcttggagttg

SEQ ID NO: 42305 - DNA, 120 bp, synthetic construct
  source 1..120: mol_type = other DNA
ttggaggaggagaggctctctgctttttagagttgccagtttttctgctgttttttccccatctttgtggttttatctacttttggtctttgatgatggtgatgtacagatgggtttttg

SEQ ID NO: 42306 - DNA, 120 bp, synthetic construct
  source 1..120: mol_type = other DNA
tcccggccgtcatcctgtctaggaagtgaggagcgtctctgcccagccgcccatcatctgggatgtggggagcatctctgccccgtcgccccgtctgagatgtgaagagcgcctctgccc

SEQ ID NO: 42307 - DNA, 120 bp, synthetic construct
  source 1..120: mol_type = other DNA
tgttcatgtgttttttggctgcatagatgtcttcttttgagaagtgtctgttcatgtccttcacccactttttgatggggttgtttgtttttttcttgtaaatttgtttgagttcattgt

SEQ ID NO: 42308 - DNA, 120 bp, synthetic construct; identical to SEQ ID NO: 6995
  source 1..120: mol_type = other DNA

SEQ ID NO: 42309 - DNA, 120 bp, synthetic construct; identical to SEQ ID NO: 7429
  source 1..120: mol_type = other DNA

SEQ ID NO: 42310 - DNA, 120 bp, synthetic construct; identical to SEQ ID NO: 32041
  source 1..120: mol_type = other DNA

SEQ ID NO: 42311 - DNA, 120 bp, synthetic construct
  source 1..120: mol_type = other DNA
gtgttgccagaggctcaggtggaggggtgtggggtaggaacagaagtgacggctaataggtatgaagtttcttttatggggtgatgggtatgttctaaaattgattattaaagaaaaaat

SEQ ID NO: 42312 - DNA, 120 bp, synthetic construct; identical to SEQ ID NO: 10449
  source 1..120: mol_type = other DNA

SEQ ID NO: 42313 - DNA, 120 bp, synthetic construct; identical to SEQ ID NO: 10450
  source 1..120: mol_type = other DNA

SEQ ID NO: 42314 - DNA, 120 bp, synthetic construct; identical to SEQ ID NO: 10451
  source 1..120: mol_type = other DNA

SEQ ID NO: 42315 - DNA, 120 bp, synthetic construct; identical to SEQ ID NO: 10452
  source 1..120: mol_type = other DNA

SEQ ID NO: 42316 - DNA, 120 bp, synthetic construct; identical to SEQ ID NO: 10453
  source 1..120: mol_type = other DNA

SEQ ID NO: 42317 - DNA, 120 bp, synthetic construct; identical to SEQ ID NO: 10454
  source 1..120: mol_type = other DNA

SEQ ID NO: 42318 - DNA, 120 bp, synthetic construct; identical to SEQ ID NO: 10455
  source 1..120: mol_type = other DNA

SEQ ID NO: 42319 - DNA, 120 bp, synthetic construct; identical to SEQ ID NO: 10456
  source 1..120: mol_type = other DNA

SEQ ID NO: 42320 - DNA, 120 bp, synthetic construct; identical to SEQ ID NO: 10457
  source 1..120: mol_type = other DNA

SEQ ID NO: 42321 - DNA, 120 bp, synthetic construct; identical to SEQ ID NO: 10458
  source 1..120: mol_type = other DNA

SEQ ID NO: 42322 - DNA, 120 bp, synthetic construct; identical to SEQ ID NO: 10459
  source 1..120: mol_type = other DNA

SEQ ID NO: 42323 - DNA, 120 bp, synthetic construct; identical to SEQ ID NO: 10460
  source 1..120: mol_type = other DNA

SEQ ID NO: 42324 - DNA, 120 bp, synthetic construct; identical to SEQ ID NO: 10461
  source 1..120: mol_type = other DNA

SEQ ID NO: 42325 - DNA, 120 bp, synthetic construct; identical to SEQ ID NO: 10462
  source 1..120: mol_type = other DNA

SEQ ID NO: 42326 - DNA, 120 bp, synthetic construct; identical to SEQ ID NO: 10463
  source 1..120: mol_type = other DNA

SEQ ID NO: 42327 - DNA, 120 bp, synthetic construct; identical to SEQ ID NO: 10464
  source 1..120: mol_type = other DNA

SEQ ID NO: 42328 - DNA, 120 bp, synthetic construct; identical to SEQ ID NO: 10465
  source 1..120: mol_type = other DNA

SEQ ID NO: 42329 - DNA, 120 bp, synthetic construct; identical to SEQ ID NO: 10466
  source 1..120: mol_type = other DNA

SEQ ID NO: 42330 - DNA, 120 bp, synthetic construct; identical to SEQ ID NO: 10467
  source 1..120: mol_type = other DNA

SEQ ID NO: 42331 - DNA, 120 bp, synthetic construct; identical to SEQ ID NO: 10468
  source 1..120: mol_type = other DNA

SEQ ID NO: 42332 - DNA, 120 bp, synthetic construct; identical to SEQ ID NO: 10469
  source 1..120: mol_type = other DNA

SEQ ID NO: 42333 - DNA, 120 bp, synthetic construct; identical to SEQ ID NO: 10470
  source 1..120: mol_type = other DNA

SEQ ID NO: 42334 - DNA, 120 bp, synthetic construct
  source 1..120: mol_type = other DNA
tcaaactcccgacctcaggtgatctgcccaccttggcctaccaaagtgctgggattacaggcatgagccaccgcacccagcccattttcatcactcctaatagccatggagtatgccatt

SEQ ID NO: 42335 - DNA, 120 bp, synthetic construct; identical to SEQ ID NO: 10471
  source 1..120: mol_type = other DNA

SEQ ID NO: 42336 - DNA, 120 bp, synthetic construct; identical to SEQ ID NO: 10472
  source 1..120: mol_type = other DNA

SEQ ID NO: 42337 - DNA, 120 bp, synthetic construct; identical to SEQ ID NO: 10473
  source 1..120: mol_type = other DNA

SEQ ID NO: 42338 - DNA, 120 bp, synthetic construct
  source 1..120: mol_type = other DNA
tgcctcagactcctgagtagctgggattacaggcatgtgccaccatgcccagctggtctttgtatttttagtagcaatggggttttaccatattggtcaggctggtctcgaactcctgac

SEQ ID NO: 42339 - DNA, 120 bp, synthetic construct
  source 1..120: mol_type = other DNA
tctcctgacctcatgatccgccctcctcagcctcccaaagtgctgggattacaggcatgagccaccgcaccctgccatgttaaatgttttgtcccagtgtgctgtcacatagtcttgtgt

SEQ ID NO: 42340 - DNA, 120 bp, synthetic construct; identical to SEQ ID NO: 10474
  source 1..120: mol_type = other DNA

SEQ ID NO: 42341 - DNA, 120 bp, synthetic construct; identical to SEQ ID NO: 10475
  source 1..120: mol_type = other DNA

SEQ ID NO: 42342 - DNA, 120 bp, synthetic construct; identical to SEQ ID NO: 10476
  source 1..120: mol_type = other DNA

SEQ ID NO: 42343 - DNA, 120 bp, synthetic construct; identical to SEQ ID NO: 10477
  source 1..120: mol_type = other DNA

SEQ ID NO: 42344 - DNA, 120 bp, synthetic construct; identical to SEQ ID NO: 10478
  source 1..120: mol_type = other DNA

SEQ ID NO: 42345 - DNA, 120 bp, synthetic construct; identical to SEQ ID NO: 10479
  source 1..120: mol_type = other DNA

SEQ ID NO: 42346 - DNA, 120 bp, synthetic construct; identical to SEQ ID NO: 10480
  source 1..120: mol_type = other DNA

SEQ ID NO: 42347 - DNA, 120 bp, synthetic construct; identical to SEQ ID NO: 7682
  source 1..120: mol_type = other DNA

SEQ ID NO: 42348 - DNA, 120 bp, synthetic construct; identical to SEQ ID NO: 7683
  source 1..120: mol_type = other DNA

SEQ ID NO: 42349 - DNA, 120 bp, synthetic construct; identical to SEQ ID NO: 7684
  source 1..120: mol_type = other DNA

SEQ ID NO: 42350 - DNA, 120 bp, synthetic construct; identical to SEQ ID NO: 7685
  source 1..120: mol_type = other DNA

SEQ ID NO: 42351 - DNA, 120 bp, synthetic construct; identical to SEQ ID NO: 7686
  source 1..120: mol_type = other DNA

SEQ ID NO: 42352 - DNA, 120 bp, synthetic construct; identical to SEQ ID NO: 7761
  source 1..120: mol_type = other DNA

SEQ ID NO: 42353 - DNA, 120 bp, synthetic construct
  source 1..120: mol_type = other DNA
tgcttgggaccagaagtgtttcagatttggggttttttttggggggagggtgggattttggataatttgcatatacatagtgagatatcttgggcataggacccaagtctaaacatgaaa

SEQ ID NO: 42354 - DNA, 120 bp, synthetic construct
  source 1..120: mol_type = other DNA
atatcattaatacagtgaaaaaataatgtgttccgtgtagctaagcagcacagtagcatcaccagaatccctgtacgggttgagccttcctaatctgagtatctgaaatctgaaatgtca

SEQ ID NO: 42355 - DNA, 120 bp, synthetic construct; identical to SEQ ID NO: 7760
  source 1..120: mol_type = other DNA

SEQ ID NO: 42356 - DNA, 120 bp, synthetic construct
  source 1..120: mol_type = other DNA
taattagatcccatttgtcaattttggcttttgttgccattgcttttggtgttttagtcatgaagtccttgcccatgcctatgtcctgaatcgtattgcctaggttttcttctagggttt

SEQ ID NO: 42357 - DNA, 120 bp, synthetic construct
  source 1..120: mol_type = other DNA
taagctgagatgatgccactgcactccagcctggatgacagagtgagaccctgactcaaataataataatattagtaacaacacatctctttaccagcaacacttgagcatgtactgcat

SEQ ID NO: 42358 - DNA, 120 bp, synthetic construct; identical to SEQ ID NO: 14638
  source 1..120: mol_type = other DNA

SEQ ID NO: 42359 - DNA, 120 bp, synthetic construct; identical to SEQ ID NO: 33060
  source 1..120: mol_type = other DNA

SEQ ID NO: 42360 - DNA, 120 bp, synthetic construct
  source 1..120: mol_type = other DNA
gtatttttagtagagatggggttttgccatgttggccaggctggtctcgaattcttgagctgaaaacatccacccgcctcggccttccaaagtgctgggatgacaggggtgagctaccgt

SEQ ID NO: 42361 - DNA, 120 bp, synthetic construct; identical to SEQ ID NO: 33061
  source 1..120: mol_type = other DNA

SEQ ID NO: 42362 - DNA, 120 bp, synthetic construct; identical to SEQ ID NO: 33062
  source 1..120: mol_type = other DNA

SEQ ID NO: 42363 - DNA, 120 bp, synthetic construct
  source 1..120: mol_type = other DNA
gagagctctgtagatgtctattaggtccacttggtgtagagctgagttcaattcctggatatccttgtgaactttctgtctcgttgatctgtctaatgttgatagtgaggtgttaaagtc

SEQ ID NO: 42364 - DNA, 120 bp, synthetic construct
  source 1..120: mol_type = other DNA
ggggaaattctcctggataatatcctgcagtgttttccaacttggttccattctccctgtcactttcaggtacaccaatcagacgtagatttggtcttttcacatagtcccatatttctt

SEQ ID NO: 42365 - DNA, 120 bp, synthetic construct; identical to SEQ ID NO: 28204
  source 1..120: mol_type = other DNA

SEQ ID NO: 42366 - DNA, 120 bp, synthetic construct; identical to SEQ ID NO: 28205
  source 1..120: mol_type = other DNA

SEQ ID NO: 42367 - DNA, 120 bp, synthetic construct
  source 1..120: mol_type = other DNA
taggagctggtaccattccttatgaaactattccaatcaatgggaaaagggaatcctctgagttcacgtcctttgtagggacatggatgaagctggaaaccatcattctcagcaaaatat

SEQ ID NO: 42368 - DNA, 120 bp, synthetic construct
  source 1..120: mol_type = other DNA
gcaataaatctacgtgtgcatgtgtctttatagcagcatgatttataatcctctgggtatacacccagtaatgggatggctgggtcaaatggtatttctagttctagatccctgaggaat

SEQ ID NO: 42369 - DNA, 120 bp, synthetic construct
  source 1..120: mol_type = other DNA
tagtatagtttgaagtcaggtagcatgctgcctccagctttgctcctttggcttaggattgacttggcaatgcaggctcttttttggttccatatgaactttaaagtagttttttccaat

SEQ ID NO: 42370 - DNA, 120 bp, synthetic construct
  source 1..120: mol_type = other DNA
caagcctaaattccatgcatatcctttgaactgtcaattctgttttatggatttttcttaaaaaactgtcaaagatctacaatgaactcaaacaaatttacaagaaaaaaacaaacaacc

SEQ ID NO: 42371 - DNA, 120 bp, synthetic construct
  source 1..120: mol_type = other DNA
ctccaaaactgaccacatagttggaagtaaagaactcctcagcaaatgtaaaagaacagaaattataacaaactgtctctcagaccacagtgcaatcaaactagaactcaggattaagaa

SEQ ID NO: 42372 - DNA, 120 bp, synthetic construct
  source 1..120: mol_type = other DNA
cagcgaatatcatactgaatggacacaaactggaagcattccctttgaaaactggcacaagacagggatgccctctctcaccactcctattcaacatagtgttggaagttctggccaggg

SEQ ID NO: 42373 - DNA, 120 bp, synthetic construct
  source 1..120: mol_type = other DNA
taaatttgtttgagttctttgtagattctggatattggcccattgtcagatgagtaggttgcaaaaattttctcccattctgtaggttgcctgttcactctgatggtagtttcttttgct

SEQ ID NO: 42374 - DNA, 120 bp, synthetic construct; identical to SEQ ID NO: 42373
  source 1..120: mol_type = other DNA

SEQ ID NO: 42375 - DNA, 120 bp, synthetic construct
  source 1..120: mol_type = other DNA
ggtatacaatcatgtcatctgcaaacagggacaatttgacttcctcttttccgaattgaataccctttatttctttctcctgcctgactgccctggccagaacttccaacactatgttga

SEQ ID NO: 42376 - DNA, 120 bp, synthetic construct
  source 1..120: mol_type = other DNA
atatatatatatattttttttttttttttttttttttggcagggggtgagggcataagagaaggctggtcccaacctacagtatgaaaaacactgccacagcacagcagttaaggtatgt

SEQ ID NO: 42377 - DNA, 120 bp, synthetic construct
  source 1..120: mol_type = other DNA
tgtctctgcccggcagcccatcgtctgagatgtggggaccacctctgccccgccgccccgtctgggatgggaggagcgcctctgcccggccgcgaccccgtctgggaactgaggagtgtc

SEQ ID NO: 42378 - DNA, 120 bp, synthetic construct; identical to SEQ ID NO: 13677
  source 1..120: mol_type = other DNA

SEQ ID NO: 42379 - DNA, 120 bp, synthetic construct; identical to SEQ ID NO: 13678
  source 1..120: mol_type = other DNA

SEQ ID NO: 42380 - DNA, 120 bp, synthetic construct
  source 1..120: mol_type = other DNA
taactgtttctcttaagtaccagcacaggaatgctatgatttatacataattatttttgttttcacgtcagtagtcttttgttccccccattgaatttggtgattcccccccgccccccg

SEQ ID NO: 42381 - DNA, 120 bp, synthetic construct
  source 1..120: mol_type = other DNA
ggtattagctaagcttcctaaacacatggatgtttgtgtaagattagtatggtttcattaaaaccaggttgtcagccagatgtggtggctcacgcttgtaatcccagcactttgggaggc

SEQ ID NO: 42382 - DNA, 120 bp, synthetic construct
  source 1..120: mol_type = other DNA
ttaggtaaacaaagcagccgggaagctcgaactgggtggagcccaccacagctcaagaaggcctgcctgcctctgtaggctccacctctgggggcagggcacagacaaacaaaaagacag

SEQ ID NO: 42383 - DNA, 120 bp, synthetic construct
  source 1..120: mol_type = other DNA
tatgtgaaaagaccaaatctacgtctgattggtgtacctgaaagtgaaggggagaatggaaccaagttggaaaacactctgcaggatattatccaggagaacttccccaatctagcaagg

SEQ ID NO: 42384 - DNA, 120 bp, synthetic construct
  source 1..120: mol_type = other DNA
tacaggagcacccagattcataaagcaagtcctgagtgacctacaaagagacttagactcccacacattaataatgggagactttaacaccccactgtcaacattagacagatcagcgag

SEQ ID NO: 42385 - DNA, 120 bp, synthetic construct
  source 1..120: mol_type = other DNA
gaaatggataaattcctcaacacatacactctcccaagactaaaccaggaagaagttgaatctctgaatagaccaataacaggagctgaaattatggcaataatcaatagtttaccaacc

SEQ ID NO: 42386 - DNA, 120 bp, synthetic construct
  source 1..120: mol_type = other DNA
acttaaaagggatgtgaaggacctcttcaaggagaactacaaaccactgctcaaggaaataaaagaggatacaaacaaatggaagaacattccatgctcatgggtaggaagaatcaatat

SEQ ID NO: 42387 - DNA, 120 bp, synthetic construct
  source 1..120: mol_type = other DNA
aaacagctccatcaaaaagtgggcgaaggacatgaacagacacttctcaaaagaagacatttatgcagccaaaaaacacatgaaaaaatgctcatcatcactggccatcagagaaatgca

SEQ ID NO: 42388 - DNA, 120 bp, synthetic construct; identical to SEQ ID NO: 15616
  source 1..120: mol_type = other DNA

SEQ ID NO: 42389 - DNA, 120 bp, synthetic construct
  source 1..120: mol_type = other DNA
agtgctgggattacaggcgtgagccaccacgcccggccaggcattaattactttttaaccttgctgtatatatctgttctttagtaggctagagatcttttaaaggcaaatatttggatc

SEQ ID NO: 42390 - DNA, 120 bp, synthetic construct
  source 1..120: mol_type = other DNA
gttgtttcctgactttttaatggttgcctttctaactggtgtgagatggtatctcattgtggttctgatttgcatttctctgatggccagtgatggtgagcattttttcatgtgtttttt

SEQ ID NO: 42391 - DNA, 120 bp, synthetic construct; identical to SEQ ID NO: 15618
  source 1..120: mol_type = other DNA

SEQ ID NO: 42392 - DNA, 120 bp, synthetic construct; identical to SEQ ID NO: 15619
  source 1..120: mol_type = other DNA

SEQ ID NO: 42393 - DNA, 120 bp, synthetic construct
  source 1..120: mol_type = other DNA
agtgctgggattacagacgtgagccaccgtgcccagcctcttcttgcttttattattatttttttatttttcatgtttcatccagattgctggctctgatttttctttgagttctctgta

SEQ ID NO: 42394 - DNA, 120 bp, synthetic construct; identical to SEQ ID NO: 15620
  source 1..120: mol_type = other DNA

SEQ ID NO: 42395 - DNA, 120 bp, synthetic construct
  source 1..120: mol_type = other DNA
ttttttttttttttttttgagttttcgtagagacaaggtcttgctatgttgcacaggctggtcttgaactcctgagctcaagtgatccacccggcttagcctcccaaagtgctgggatta

SEQ ID NO: 42396 - DNA, 120 bp, synthetic construct
  source 1..120: mol_type = other DNA
acccaggaggtggaggttgcggtgagctgagatcatgccattgcactccagcctgggtaccaagagcgaaacaccatttcaaaaaaaaaagaaaaacacaaaaatatagccgggtctggt

SEQ ID NO: 42397 - DNA, 120 bp, synthetic construct; identical to SEQ ID NO: 33340
  source 1..120: mol_type = other DNA

SEQ ID NO: 42398 - DNA, 120 bp, synthetic construct; identical to SEQ ID NO: 33341
  source 1..120: mol_type = other DNA

SEQ ID NO: 42399 - DNA, 120 bp, synthetic construct; identical to SEQ ID NO: 33342
  source 1..120: mol_type = other DNA

SEQ ID NO: 42400 - DNA, 120 bp, synthetic construct; identical to SEQ ID NO: 12613
  source 1..120: mol_type = other DNA

SEQ ID NO: 42401 - DNA, 120 bp, synthetic construct; identical to SEQ ID NO: 33874
  source 1..120: mol_type = other DNA

SEQ ID NO: 42402 - DNA, 120 bp, synthetic construct
  source 1..120: mol_type = other DNA
tcaaggagaactacaaaccactgctcaccgaaataaaaaaggatacaaacaaatggaagaacattccatgctcatggataggaagaatcaatatcgtgaaaatggccatactgcccaagg

SEQ ID NO: 42403 - DNA, 120 bp, synthetic construct; identical to SEQ ID NO: 14276
  source 1..120: mol_type = other DNA

SEQ ID NO: 42404 - DNA, 120 bp, synthetic construct; identical to SEQ ID NO: 14277
  source 1..120: mol_type = other DNA

SEQ ID NO: 42405 - DNA, 120 bp, synthetic construct
  source 1..120: mol_type = other DNA
ttattgtactttaagttctgggatacatatgcagaacgtgcaggtttgttacatagtatacatgggctatggtggtggctgcacccatcaacctgtcgtctacattaggtatttctccta

SEQ ID NO: 42406 - DNA, 120 bp, synthetic construct; identical to SEQ ID NO: 14278
  source 1..120: mol_type = other DNA

SEQ ID NO: 42407 - DNA, 120 bp, synthetic construct
  source 1..120: mol_type = other DNA
ggtgtgagatggtatctcattgtggttttgatttgcatttctctaatgaccagtgatgatgagctttttttcatacgtgtgttggctgcataaatgtcttcttttgagaagtgtctgttc

SEQ ID NO: 42408 - DNA, 120 bp, synthetic construct
  source 1..120: mol_type = other DNA
tcctgacttttctgtcttcatttcgttatgtacccagtagttattcaggagcaggttgttcagtttccatgtagttgagcggttttgagtgagtttcttaatcctgagttctagtttgat

SEQ ID NO: 42409 - DNA, 120 bp, synthetic construct
  source 1..120: mol_type = other DNA
tctgtaaagtattttatttttccttcacttatgaagcttagtttggatggatatgaaattctgagttgaaaactcttttctttaagaatgttgaatattggcccccactctcttctggct

SEQ ID NO: 42410 - DNA, 120 bp, synthetic construct
  source 1..120: mol_type = other DNA
ggtttttggtgtaggtgtcctttctgtttgttagttttccttctaatagacaggaccctcagctgcaggtctgttggagtttgctagaggtccactccagaccctgtttgcctgggtatc

SEQ ID NO: 42411 - DNA, 120 bp, synthetic construct; identical to SEQ ID NO: 14279
  source 1..120: mol_type = other DNA

SEQ ID NO: 42412 - DNA, 120 bp, synthetic construct
  source 1..120: mol_type = other DNA
cctgcagaactgggagccaaataaacctcttttgtttggaaattacccagcctcaggtattcctttatagcaatgcgaatggactaatacaacaggggtgtgtgtgtgtgaacaatagta

SEQ ID NO: 42413 - DNA, 120 bp, synthetic construct; identical to SEQ ID NO: 28313
  source 1..120: mol_type = other DNA

SEQ ID NO: 42414 - DNA, 120 bp, synthetic construct
  source 1..120: mol_type = other DNA
tgtttttctcaggtttgtcaaagatcagatagttgtagatatgcagcgttatcaacaaacaaccctatcaaaaagtgggtgaaggacatgaacaggcacttctcaaaagaagacatttat

SEQ ID NO: 42415 - DNA, 120 bp, synthetic construct
  source 1..120: mol_type = other DNA
taatttattgagagtttttagcatgaagggttgttgaattttgtcaaaggccttttctgcatctgttaagataatcatgtggtttttgtcgttgattctgtttatatgctggattatgtt

SEQ ID NO: 42416 - DNA, 120 bp, synthetic construct
  source 1..120: mol_type = other DNA
ctgctcctgaatgactactgggtacataatgaaatgaaggcagaaataaagatgttctttgaaaccaacgagaacaaagacacaacataccagaatctctgggacacattcaaagcagtg

SEQ ID NO: 42417 - DNA, 120 bp, synthetic construct; identical to SEQ ID NO: 19602
  source 1..120: mol_type = other DNA

SEQ ID NO: 42418 - DNA, 120 bp, synthetic construct
  source 1..120: mol_type = other DNA
gtctgagaagtaaggagcccctccgcccagcagccaccccgtctgggaagtgaggagcgtctccgcccggcagccaccttgtccgggagggaggtggggggatcagccccccgcccggcc

SEQ ID NO: 42419 - DNA, 120 bp, synthetic construct
  source 1..120: mol_type = other DNA
aaaagaaacaggattttcagtaattttttttctttcctttttttttttttttttttggagatggagttttgctcttgttgccgaggctggagtgcaatggtgcgatctcagctaaccgca

SEQ ID NO: 42420 - DNA, 120 bp, synthetic construct
  source 1..120: mol_type = other DNA
attacacgcgtgagccaccacgcccagccagattttccaactttcattaatgacatatagtttccaccctctgcagtcttctaacccctactagttcctagcataagaatctgtttttag

SEQ ID NO: 42421 - DNA, 120 bp, synthetic construct
  source 1..120: mol_type = other DNA
aacctccctgcctcgggctcccgtgattctcctgcctcggcctgcctagtgcctgggattgcagtcacgcgccgccacgcctgactggtttttgtgtttttggtggagatggggtttcgc

SEQ ID NO: 42422 - DNA, 120 bp, synthetic construct
  source 1..120: mol_type = other DNA
cctgtctgggaagtgaggagagcctctgcccggccgcccatcgtctgggaggtgaggagcccctctgcccagccgcccttcgtctgggaggtgaggaacgcctctgcccggctgcaccgt

SEQ ID NO: 42423 - DNA, 120 bp, synthetic construct; identical to SEQ ID NO: 29722
  source 1..120: mol_type = other DNA

SEQ ID NO: 42424 - DNA, 120 bp, synthetic construct; identical to SEQ ID NO: 28123
  source 1..120: mol_type = other DNA

SEQ ID NO: 42425 - DNA, 120 bp, synthetic construct; identical to SEQ ID NO: 32953
  source 1..120: mol_type = other DNA

SEQ ID NO: 42426 - DNA, 120 bp, synthetic construct; identical to SEQ ID NO: 30070
  source 1..120: mol_type = other DNA

SEQ ID NO: 42427 - DNA, 120 bp, synthetic construct; identical to SEQ ID NO: 30071
  source 1..120: mol_type = other DNA

SEQ ID NO: 42428 - DNA, 120 bp, synthetic construct; identical to SEQ ID NO: 30072
  source 1..120: mol_type = other DNA

SEQ ID NO: 42429 - DNA, 120 bp, synthetic construct
  source 1..120: mol_type = other DNA
aaaattgactgaaataaacttatttatttctggagtggctcagtagagattcagggtgactatacacatacagatgttataggcaaaaggccaggggaagagacatgcaatagtccatct

SEQ ID NO: 42430 - DNA, 120 bp, synthetic construct; identical to SEQ ID NO: 10005
  source 1..120: mol_type = other DNA

SEQ ID NO: 42431 - DNA, 120 bp, synthetic construct; identical to SEQ ID NO: 10006
  source 1..120: mol_type = other DNA

SEQ ID NO: 42432 - DNA, 120 bp, synthetic construct; identical to SEQ ID NO: 10007
  source 1..120: mol_type = other DNA

SEQ ID NO: 42433 - DNA, 120 bp, synthetic construct; identical to SEQ ID NO: 10008
  source 1..120: mol_type = other DNA

SEQ ID NO: 42434 - DNA, 120 bp, synthetic construct; identical to SEQ ID NO: 10009
  source 1..120: mol_type = other DNA

SEQ ID NO: 42435 - DNA, 120 bp, synthetic construct; identical to SEQ ID NO: 10010
  source 1..120: mol_type = other DNA

SEQ ID NO: 42436 - DNA, 120 bp, synthetic construct
  source 1..120: mol_type = other DNA
aacagcagcctcaacatcacctgggatctcgtcagaaatgcaaattcttccctcaccccaagtcagctgtgagtgaactccaggaaacagcatgatctgattaaattttttttatcaaac

SEQ ID NO: 42437 - DNA, 120 bp, synthetic construct; identical to SEQ ID NO: 10011
  source 1..120: mol_type = other DNA

SEQ ID NO: 42438 - DNA, 120 bp, synthetic construct; identical to SEQ ID NO: 10012
  source 1..120: mol_type = other DNA

SEQ ID NO: 42439 - DNA, 120 bp, synthetic construct; identical to SEQ ID NO: 10013
  source 1..120: mol_type = other DNA

SEQ ID NO: 42440 - DNA, 120 bp, synthetic construct
  source 1..120: mol_type = other DNA
gtggataaaatactactaataatatccaccaaattttgggtacttatgatgtaccattgtgcttgtttttttcacacattatctcatcatctctattacttgttaaaatctccactgcca

SEQ ID NO: 42441 - DNA, 120 bp, synthetic construct
  source 1..120: mol_type = other DNA
tttaaccagaggcgatgtgtccagtcaccagcatagagccatcctctgtgtcaccatccacacgcagggccttctggcagacctcatgcaatgccctccatgttaatattcatcagaaaa

SEQ ID NO: 42442 - DNA, 120 bp, synthetic construct; identical to SEQ ID NO: 10015
  source 1..120: mol_type = other DNA

SEQ ID NO: 42443 - DNA, 120 bp, synthetic construct
  source 1..120: mol_type = other DNA
ctcagaagatagcccaggcattatgcaacacatgactgtcattggtgacagggaaggagtcacttgtgccattttcaatgttttcctaccaggtttatagctttctatcctttatatcca

SEQ ID NO: 42444 - DNA, 120 bp, synthetic construct; identical to SEQ ID NO: 10016
  source 1..120: mol_type = other DNA

SEQ ID NO: 42445 - DNA, 120 bp, synthetic construct; identical to SEQ ID NO: 10017
  source 1..120: mol_type = other DNA

SEQ ID NO: 42446 - DNA, 120 bp, synthetic construct; identical to SEQ ID NO: 10018
  source 1..120: mol_type = other DNA

SEQ ID NO: 42447 - DNA, 120 bp, synthetic construct; identical to SEQ ID NO: 10019
  source 1..120: mol_type = other DNA

SEQ ID NO: 42448 - DNA, 120 bp, synthetic construct
  source 1..120: mol_type = other DNA
tgctcataaaagaaaactttccacattgttttaacaaaccccacagctgagagtcaggcctgaatctttgatgtgtgcccattcacaacgttgaccctattggtttgtggtggggcaggg

SEQ ID NO: 42449 - DNA, 120 bp, synthetic construct; identical to SEQ ID NO: 10020
  source 1..120: mol_type = other DNA

SEQ ID NO: 42450 - DNA, 120 bp, synthetic construct
  source 1..120: mol_type = other DNA
gaaatgtgcgatatttgacccttgatatgtaagtaattttggagatggttgtcctaatttattttcagaggaggaacgtaggatgggtgttgagagtgacctccacaccaggggcacaga

SEQ ID NO: 42451 - DNA, 120 bp, synthetic construct
  source 1..120: mol_type = other DNA
aaatgaaaatgaaaagttatcaaaaactattaaaattatcagtaattgccgggcacgttggctcacgcctataatcctagcactttgggaggccagcgcaggaggattgcctgatttcag

SEQ ID NO: 42452 - DNA, 120 bp, synthetic construct; identical to SEQ ID NO: 10022
  source 1..120: mol_type = other DNA

SEQ ID NO: 42453 - DNA, 120 bp, synthetic construct
  source 1..120: mol_type = other DNA
tgcttcttgtaaggctctcaggacagccttgggccagctccatttccctgtatttcctatgcatgaactctttgtgtacgtcataagggtttcttctactctagcacaggagaggcaaca

SEQ ID NO: 42454 - DNA, 120 bp, synthetic construct
  source 1..120: mol_type = other DNA
ctagtggtcggagttattgagaaaccaggatagggttcatggagttgcttgtgctcagaaatagcatttctattttcttaggagagaggggcataaaatttatttttatgaaaaagatca

SEQ ID NO: 42455 - DNA, 120 bp, synthetic construct
  source 1..120: mol_type = other DNA
cttggttaagctaacagtggtcagatctgttgtttttaactcatgttttctctttaacaattactagtaatctgctgggggataattctcaacagaagaagtcatattcccatgacaaat

SEQ ID NO: 42456 - DNA, 120 bp, synthetic construct; identical to SEQ ID NO: 10023
  source 1..120: mol_type = other DNA

SEQ ID NO: 42457 - DNA, 120 bp, synthetic construct
  source 1..120: mol_type = other DNA
ttcataacttttgtcttaaggtactgaaaactagtcaggctagttaatgcaaaagggtatattagatatgataatgggaaatcaaagccagggctacattaagaatttgataaaaactct

SEQ ID NO: 42458 - DNA, 120 bp, synthetic construct; identical to SEQ ID NO: 10024
  source 1..120: mol_type = other DNA

SEQ ID NO: 42459 - DNA, 120 bp, synthetic construct
  source 1..120: mol_type = other DNA
tgagggcaatattttaaagaaatgctcattagtcattcctttaaattgtgtgtgtgagagagagaaaaatgaaaattagtcatttcaaatgctgcaagatgcagaaggaactcatcatca

SEQ ID NO: 42460 - DNA, 120 bp, synthetic construct; identical to SEQ ID NO: 10025
  source 1..120: mol_type = other DNA

SEQ ID NO: 42461 - DNA, 120 bp, synthetic construct; identical to SEQ ID NO: 10026
  source 1..120: mol_type = other DNA

SEQ ID NO: 42462 - DNA, 120 bp, synthetic construct; identical to SEQ ID NO: 10027
  source 1..120: mol_type = other DNA

SEQ ID NO: 42463 - DNA, 120 bp, synthetic construct; identical to SEQ ID NO: 10028
  source 1..120: mol_type = other DNA

SEQ ID NO: 42464 - DNA, 120 bp, synthetic construct
  source 1..120: mol_type = other DNA
actctaatggtagtttcttttgctgtgcaaaagctctttagtttaattagatcccatttgtcaattttgtcttttgttgccattgcttttggtgttttagacatgaagtccttgcccatg

SEQ ID NO: 42465 - DNA, 120 bp, synthetic construct
  source 1..120: mol_type = other DNA
aggagattttgggctgagacgatggggttttctagatatagaatcatgtcgtctgcaaacagggataatttgacttcctcttttccaattgaataccctttatttccttctcctgcctaa

SEQ ID NO: 42466 - DNA, 120 bp, synthetic construct
  source 1..120: mol_type = other DNA
ggtggtgatatcccctttatcattttttactgcatctatttgattcttctctcttttcttctttattagtctggctagtggtctataaattttgttgatcctttcaaaaaaacagctcct

SEQ ID NO: 42467 - DNA, 120 bp, synthetic construct
  source 1..120: mol_type = other DNA
gtgtgtctctgcacatgagatgcgtttcctgaatacagcacactgatgggtcttgactctttatccaatttgccagtctgtgtcttttaattggagcatttagtccatttacatttaaag

SEQ ID NO: 42468 - DNA, 120 bp, synthetic construct; identical to SEQ ID NO: 7247
  source 1..120: mol_type = other DNA

SEQ ID NO: 42469 - DNA, 120 bp, synthetic construct
  source 1..120: mol_type = other DNA
ataatcccagcactttcagaggctgaggagggcgaattgtctgagttcaggaatttgagaccagcctgggcaacatggtgaaaccctgtctctactacaaatacaaacaattagctgggc

SEQ ID NO: 42470 - DNA, 120 bp, synthetic construct
  source 1..120: mol_type = other DNA
tccaaaagtaagaaagaaagaaagaaagaaagaaagaaagaaagagagagggagagggagggagggagggagggagggggaggaggagagatagataataagacagaaaatatatttcaa

SEQ ID NO: 42471 - DNA, 120 bp, synthetic construct
  source 1..120: mol_type = other DNA
tttgtttttttgataaaagtcattgtaactggggtgagatgatgatatggttaggtatccacccaagtctcatcttgaattgtaatccccataatccctacatgtcgagggagagacctg

SEQ ID NO: 42472 - DNA, 120 bp, synthetic construct; identical to SEQ ID NO: 9675
  source 1..120: mol_type = other DNA

SEQ ID NO: 42473 - DNA, 120 bp, synthetic construct
  source 1..120: mol_type = other DNA
aaacccacagccaatatcatactgaatgggcaaaaactggaagcattctctttgaaaactggcacaagacagggatgccctctctcaccactcctgttcaacatagtgttggaagttgtg

SEQ ID NO: 42474 - DNA, 120 bp, synthetic construct
  source 1..120: mol_type = other DNA
ccttatacaaaaatcaattcaagatggattaaagacttaaacgttagacctaaaaccataaaaaccctagaagaaaacctaggcattaccattcaggacataggcaagggcaaggacttc

SEQ ID NO: 42475 - DNA, 120 bp, synthetic construct; identical to SEQ ID NO: 9676
  source 1..120: mol_type = other DNA

SEQ ID NO: 42476 - DNA, 120 bp, synthetic construct; identical to SEQ ID NO: 9677
  source 1..120: mol_type = other DNA

SEQ ID NO: 42477 - DNA, 120 bp, synthetic construct; identical to SEQ ID NO: 19894
  source 1..120: mol_type = other DNA

SEQ ID NO: 42478 - DNA, 120 bp, synthetic construct; identical to SEQ ID NO: 19895
  source 1..120: mol_type = other DNA

SEQ ID NO: 42479 - DNA, 120 bp, synthetic construct
  source 1..120: mol_type = other DNA
ggctggcggcctggactcctgggtctgagggaggagaggctgggggtccagactcctgggtctgagggaggaggggctgggggcctggactcctgggtctgagggaggaggggctgggcc

SEQ ID NO: 42480 - DNA, 120 bp, synthetic construct
  source 1..120: mol_type = other DNA
aggagatgcttagctattgaagagcttctctccactcttgtattttctttatgagttcttctgagagattttcactgtgactgttttgacctctgtatattcatggaaaccgtactctcc

SEQ ID NO: 42481 - DNA, 120 bp, synthetic construct
  source 1..120: mol_type = other DNA
cactcatgcacatgtaggcttacagaagaataagatcttgatccttttttacccctcccttcttgtgatgtagacaggtatgtagaagacatcattttctgctgggtaacctaatactct

SEQ ID NO: 42482 - DNA, 120 bp, synthetic construct
  source 1..120: mol_type = other DNA
aatcccagagccaacactatgatcagagatgcaaaatcaagatttgcatactctgtatcaccttcaaacacactggggtctgcataacaccatttttcgctctttgaggactctgttctc

SEQ ID NO: 42483 - DNA, 120 bp, synthetic construct
  source 1..120: mol_type = other DNA
ccctcaacataccacatgtaatgttccatgcaagaaagccctcttctctactaactgatatcctacacttgctttctgccctagaggaagtttcatctcttctgttaggagaagttttct

SEQ ID NO: 42484 - DNA, 120 bp, synthetic construct
  source 1..120: mol_type = other DNA
ataaaatgactaaacttgcctaaacaaaatcaactaagcatattgccactactttctgtatttacatatatatgtgcatacttaaaaagtctatataccctagtttcaaaagcaattgaa

SEQ ID NO: 42485 - DNA, 120 bp, synthetic construct
  source 1..120: mol_type = other DNA
ggatagccattttggtcgtacattgtgtccctgagaagtggtagtctgaatttataaaagatagaatagtcactatgctgtagggggaaagatatggtttgctagaagctagaatttgtt

SEQ ID NO: 42486 - DNA, 120 bp, synthetic construct
  source 1..120: mol_type = other DNA
gggacaatgccagaaaattattatcttctaggatatgtagtaacaagatggtcccctctgtttttcataatagaggaaattcctgatcagggattcccaagaccctcagtggggtgatgt

SEQ ID NO: 42487 - DNA, 120 bp, synthetic construct
  source 1..120: mol_type = other DNA
gggtgacagagtgagactccagctcaaaaaaaaaaaaaaaaaaaaaaaaaagaagaaagaaaagaaaagagagaaagagaaagagagagagagagacgaaagaaagaaagaaagaaagaa

SEQ ID NO: 42488 - DNA, 120 bp, synthetic construct
  source 1..120: mol_type = other DNA
agtgctgggattacaggcatgagccaccgcacccagccttttgtttgtttttcaaggcagcaactgcttttctagaaggataggtaattccaaatgaaaaatccaagtctgaaaaagttc

SEQ ID NO: 42489 - DNA, 120 bp, synthetic construct
  source 1..120: mol_type = other DNA
atcttaggcaacttaaatatatcaaacagaattgttccttactgcaagagcttatacattctaaaccatcctattctaatcaaagcatgagttcattggtaatggctataattgcaggac

SEQ ID NO: 42490 - DNA, 120 bp, synthetic construct
  source 1..120: mol_type = other DNA
ctgaaacaaataggactaagagcacatagaaggtagggagtgatagaggggatgaatgctgttttcaaatacatggatggctgttatatagaaagagtctatagggcaaaggtggaacca

SEQ ID NO: 42491 - DNA, 120 bp, synthetic construct
  source 1..120: mol_type = other DNA
tcacttgtaaagataacacattgctgggcctgttaacaagggcttcaaaatgctaaaatattgcaattaaaccaaatattgaatcgaaacagctaacagaggttcagattcattctttgg

SEQ ID NO: 42492 - DNA, 120 bp, synthetic construct
  source 1..120: mol_type = other DNA
ctttctcttactcttctctgactctgcaaatcttctttatcttccaaagccaagaaaaagcttccataaagttatttctaactgaatacagctcagcccccatatctaactagattaagc

SEQ ID NO: 42493 - DNA, 120 bp, synthetic construct
  source 1..120: mol_type = other DNA
atgtagctggggctctttcatgtgatgggccattggcctatgggctagtctatgaaatgtattaggtaggtcatgatatggtaacagtctcaaaggaaacattttaaggtgtttgaatgg

SEQ ID NO: 42494 - DNA, 120 bp, synthetic construct
  source 1..120: mol_type = other DNA
ttcactcaaccacccctggatgaggcaataggctaaagcttagtgagtgagtatcccctttgcgtaagttttttctcctaacaatagatgaatatttaatggtaaaggagcccagggctt

SEQ ID NO: 42495 - DNA, 120 bp, synthetic construct
  source 1..120: mol_type = other DNA
cctaagattttcctacttggatgtcttgagatgaacaggaaaatccaagactgtccaacttacttggactgtaaactccatgaggtccgggatcaagtcctctttgttctttttggcatt

SEQ ID NO: 42496 - DNA, 120 bp, synthetic construct
  source 1..120: mol_type = other DNA
gggcaacacaaaaacaggatgatttcattctcactgggagttagattgcttttaaacaccaaactggcacagcattgtcacctaggaaggtgtgcagatgggaagtaatcttactcaata

SEQ ID NO: 42497 - DNA, 120 bp, synthetic construct
  source 1..120: mol_type = other DNA
atctatctaaagtataccgtattatttcatatgtgcctataaactcttatttattttaggcgataaaatgtgcattaaaaggaagaaataggttgcttccttagtagactctaaacaaga

SEQ ID NO: 42498 - DNA, 120 bp, synthetic construct
  source 1..120: mol_type = other DNA
aaagttcaagttcacttttggcattatcagacaccaaaaacgatgaaggacgaaaagttaacaaagtggtttctactcacagtcggcatcagctaacacaatgcaagggctctttcctcc

SEQ ID NO: 42499 - DNA, 120 bp, synthetic construct
  source 1..120: mol_type = other DNA
ctgtggtagcagtaacaataacgtatcactgcatacctctcctcattagtatctatgacagaaggctcatttaattgcggattgacagtcgtctctctatctctttctttctctgtcttc

SEQ ID NO: 42500 - DNA, 120 bp, synthetic construct; identical to SEQ ID NO: 32629
  source 1..120: mol_type = other DNA

SEQ ID NO: 42501 - DNA, 120 bp, synthetic construct; identical to SEQ ID NO: 32630
  source 1..120: mol_type = other DNA

SEQ ID NO: 42502 - DNA, 120 bp, synthetic construct; identical to SEQ ID NO: 32631
  source 1..120: mol_type = other DNA

SEQ ID NO: 42503 - DNA, 120 bp, synthetic construct
  source 1..120: mol_type = other DNA
aaaagttagtctaggtaccactgagggaagctgagtttctggctctctttcacagtgtccaggagaaagacaaccccaaataaggtgcaaagggtgagactctactatttaattttcata

SEQ ID NO: 42504 - DNA, 120 bp, synthetic construct
  source 1..120: mol_type = other DNA
tagttcctagctgttgttgattgttgagggcataactgctgagttgcaaattcccattggcattacttagtaaattgttaagtaaatactgtcatcccattcatgattcaacatcacagg

SEQ ID NO: 42505 - DNA, 120 bp, synthetic construct
  source 1..120: mol_type = other DNA
tctgctggtttgacaaccactgtgtttccacagctcagtgcaggccctatcttccaaatgagcataaccaacgggaaattccactagaaagcaatatgtaacaatagattctttgtattg

SEQ ID NO: 42506 - DNA, 120 bp, synthetic construct
  source 1..120: mol_type = other DNA
tatattccatgcagtgcttcaaatgcctctggtattcttttttccattttgattaaaaaatgtgtgtcatgagttgaacactctgggagctactgttctgcatgatgagatgtctcaatg

SEQ ID NO: 42507 - DNA, 120 bp, synthetic construct
  source 1..120: mol_type = other DNA
acctttcatcttctaggaggcctgatttgaaaattatctttattctctaagtgttataaaaaagggacgagaaaggaagtaggaggtctctggcgaagagaagaaccacattccaatttg

SEQ ID NO: 42508 - DNA, 120 bp, synthetic construct
  source 1..120: mol_type = other DNA
aaacacagtcccatcttgctttgaagatatttgaaacgagtccgtgtgaactggcttgtttgattagtctggtctaactacactgagtttgaccaggcacagatgaccataactgactta

SEQ ID NO: 42509 - DNA, 120 bp, synthetic construct
  source 1..120: mol_type = other DNA
aagggtagtgagattctgatttctaaaccccagtgctctttctatctcattttgatgttctcctgctaaccagctttctaggaatcggtcacaatttgatatacacataacatctgagaa

SEQ ID NO: 42510 - DNA, 120 bp, synthetic construct
  source 1..120: mol_type = other DNA
tgcttgaaacctgatcttggtatttgtttatgttaaattggcttcatcataatgcccaattgagacaacagaaacaaggaaataccctcccccaactatattatgctctgactcatctaa

SEQ ID NO: 42511 - DNA, 120 bp, synthetic construct
  source 1..120: mol_type = other DNA
ctcataagcaggcactgtgtctccattatcccaaagtctaacacattgcgcacattcaactactgtatgttggaattactcctgctgaataatctttacatgatgagctccacgtaccta

SEQ ID NO: 42512 - DNA, 120 bp, synthetic construct
  source 1..120: mol_type = other DNA
cttttgtacatagaactggccactacatggaattgtatagctccacaaatagtggctatatcacaggccagtaggttgcaatattttgcaggagacacaattccctttaagaattggggg

SEQ ID NO: 42513 - DNA, 120 bp, synthetic construct
  source 1..120: mol_type = other DNA
agggatacggagaactggcttcaagataagtaactctcccatatggaaagcacatccctaaagaatgctgctataaataaagatgttcttatgattatgtcctttggatcatgcgccccc

SEQ ID NO: 42514 - DNA, 120 bp, synthetic construct
  source 1..120: mol_type = other DNA
gttaaaactttaaattttaatataactctcagcaatttctccctctctcaatagagggagattcactctgttgcctaggctggtgtgcagtggcacaaacatggctcaccaaagcctaga

SEQ ID NO: 42515 - DNA, 120 bp, synthetic construct
  source 1..120: mol_type = other DNA
gctcaaatatcaatctacctaaaaccttgccagactagtccagcttgatgatggctactagctaagagcctactaagctccaggcactaaggaaagttctttaaagccccatagttacta

SEQ ID NO: 42516 - DNA, 120 bp, synthetic construct
  source 1..120: mol_type = other DNA
cactgaagtgaaaagaaaacagttcccacccacatctgtactttgctttgtaacctccatttgttcttgcccttcctcttttctttataataccgttgaaaggcggtatgtagcccattg

SEQ ID NO: 42517 - DNA, 120 bp, synthetic construct
  source 1..120: mol_type = other DNA
attcttctttgaaaggtgaagaataaatttctctcttatttctgggaatggcttatagggcacaggcttctggggctcctatagaccttgccagggatgatcagtatttctatgcccaat

SEQ ID NO: 42518 - DNA, 120 bp, synthetic construct
  source 1..120: mol_type = other DNA
tctcaaagaaggttaagtacaaacattgaaaatctacgctcttactatagatggtgacttgaactaggtcctgaggactacactgtggacatgtacagaggcagtgactagcaagcaatt

SEQ ID NO: 42519 - DNA, 120 bp, synthetic construct
  source 1..120: mol_type = other DNA
tattatgctatctaattttttattttttattttttgagacggagtttcgctcttgtcacccagctggactgcaatgatgcgatctcggctcactgcaagctctgcctcccgggttcaagt

SEQ ID NO: 42520 - DNA, 120 bp, synthetic construct
  source 1..120: mol_type = other DNA
aatttcatatgaataaagcatttctctcctttttccttttctttttttttttggctggagtgcagtggtatgatctcggctcactgcaacctctgcctcacgggctaaagcaattctcct

SEQ ID NO: 42521 - DNA, 120 bp, synthetic construct
  source 1..120: mol_type = other DNA
gtatgcaatcagttcaacactagaaaatacatactggagaaaacaatctagaaaacaatgcttttacctgaaatggccatgaatttgaggcaaagcaaaggcttttgtgggcttggtctt

SEQ ID NO: 42522 - DNA, 120 bp, synthetic construct
  source 1..120: mol_type = other DNA
ggtctcctctatacttccattggacaatttgtcactttttaaatagtcatttttaagtgtctgccttccatcaagggctgtgtatggttttccagtctatcttcagtgtccaacagccct

SEQ ID NO: 42523 - DNA, 120 bp, synthetic construct
  source 1..120: mol_type = other DNA
ttctgaagcttgctcatgcacactgtcccccagccctatctctcacacactttccttcttctgttaatgacacaaataatccctaggtacccttttgtatcactttgttctatacaagta

SEQ ID NO: 42524 - DNA, 120 bp, synthetic construct
  source 1..120: mol_type = other DNA
agaatcaattacattttgctaggcctgtggtcggactttctagttctcgcccgagtcctcttatccttaggtctgtgataatctgtggtttcaagttctcaataatatgctctcaatata

SEQ ID NO: 42525 - DNA, 120 bp, synthetic construct
  source 1..120: mol_type = other DNA
gatgtaacagtgcagtctacaaattatgaattatgccattctcccacaaacagaggcgtttcagcatgaaaagggaatttggcataggtaatgtgatgacctagatggttagaaggccag

SEQ ID NO: 42526 - DNA, 120 bp, synthetic construct
  source 1..120: mol_type = other DNA
aagaatttcttttaagattttccaaacgagagggagggtgatgagagtccccatttaatgtcatccatgtgaattttcaaacttgagaactgagtcacagcataggctgcatgggtggtg

SEQ ID NO: 42527 - DNA, 120 bp, synthetic construct
  source 1..120: mol_type = other DNA
ccagggttgggggagggaacggttcaggcaaagtttttagagatgtgagatttgtgcaaattccccagtgaacaaatttccattagtaagtcaaacgttacaatgaatcaggtagagata

SEQ ID NO: 42528 - DNA, 120 bp, synthetic construct
  source 1..120: mol_type = other DNA
cccactattaaaatcaatgattggttctgtcactggtttgtagccatcatcatgtttctgcttagctctggcactttctgaaaggaaagtttctgatgtggctgagtgctagtttctgga

SEQ ID NO: 42529 - DNA, 120 bp, synthetic construct
  source 1..120: mol_type = other DNA
gcttcagttggaaggaagttaaaaacatttcccaagtgaaagcagcatcacagcacaatcagctttgcgttgaacataagtcctttcctgttttaagcacctctcagtgatcttcctcaa

SEQ ID NO: 42530 - DNA, 120 bp, synthetic construct
  source 1..120: mol_type = other DNA
gtcaaagcagaaaacctatttcctttcaatttccctattgttctctttttctaagttggctgcaaactttctcttattggcctgggaacagctgagcagcagctggaaagaccatggtaa

SEQ ID NO: 42531 - DNA, 120 bp, synthetic construct
  source 1..120: mol_type = other DNA
ggagaagacgtgaggcatacttgtaggaaacaggtctaggaaaggttgggtaaaagggaatattctggaaaaactggaaaggattcagaaaaataggactaggatcactaacgttaaatc

SEQ ID NO: 42532 - DNA, 120 bp, synthetic construct
  source 1..120: mol_type = other DNA
taggtcagtcactttccctagaggggagttgttgcacagtgacttcgaagtgaataggtttcaatctcaaaatcatctctctgtgttaagggttcattaggtctgtgcttgtatgttaga

SEQ ID NO: 42533 - DNA, 120 bp, synthetic construct
  source 1..120: mol_type = other DNA
gttttattcatttgtttgttttggagttctaggatctgacaggaaagcagtgtgaaacaggcaaagttcagagttactctcagaacgactcaagcaggatccatttcctagttcccccca

SEQ ID NO: 42534 - DNA, 120 bp, synthetic construct; identical to SEQ ID NO: 3957
  source 1..120: mol_type = other DNA

SEQ ID NO: 42535 - DNA, 120 bp, synthetic construct; identical to SEQ ID NO: 13192
  source 1..120: mol_type = other DNA

SEQ ID NO: 42536 - DNA, 120 bp, synthetic construct; identical to SEQ ID NO: 13193
  source 1..120: mol_type = other DNA

SEQ ID NO: 42537 - DNA, 120 bp, synthetic construct; identical to SEQ ID NO: 13194
  source 1..120: mol_type = other DNA

SEQ ID NO: 42538 - DNA, 120 bp, synthetic construct; identical to SEQ ID NO: 13195
  source 1..120: mol_type = other DNA

SEQ ID NO: 42539 - DNA, 120 bp, synthetic construct; identical to SEQ ID NO: 12019
  source 1..120: mol_type = other DNA

SEQ ID NO: 42540 - DNA, 120 bp, synthetic construct; identical to SEQ ID NO: 12020
  source 1..120: mol_type = other DNA

SEQ ID NO: 42541 - DNA, 120 bp, synthetic construct; identical to SEQ ID NO: 12021
  source 1..120: mol_type = other DNA

SEQ ID NO: 42542 - DNA, 120 bp, synthetic construct; identical to SEQ ID NO: 12022
  source 1..120: mol_type = other DNA

SEQ ID NO: 42543 - DNA, 120 bp, synthetic construct
  source 1..120: mol_type = other DNA
tgagccaagattgtgccattgcactccagcctgggtgacagagtgagactccatcacaaaaaaaaaataataataaataaacagaaattagtgctaaggtattgctatggctgctgcatt

SEQ ID NO: 42544 - DNA, 120 bp, synthetic construct
  source 1..120: mol_type = other DNA
ataatgaacatctggtacttctgatctttaagactataaaaagtttaactatcagagtccagaatcaagatggccgaataggagcagctccgatctgcatctcccagcgtgatcaatgca

SEQ ID NO: 42545 - DNA, 120 bp, synthetic construct
  source 1..120: mol_type = other DNA
tctgccccagcctttcctgggtgggtctctaggtatagccggcgttaatcttgccacgtgtcagaagtgtgttaagtgaatccattgcgtggtctcacgtaattctcctagtaagtggaa

SEQ ID NO: 42546 - DNA, 120 bp, synthetic construct
  source 1..120: mol_type = other DNA
tatctttctccaggtgtgtatcagcctctgcctccctctgtgagagccatgttagcagtttactttccagcacaaattggtactatattgcatattcatatgtgtgtgtgttgtgtgtat

SEQ ID NO: 42547 - DNA, 120 bp, synthetic construct
  source 1..120: mol_type = other DNA
cttcctcttttatttatttatttttatttttcctgagatggagtctctgttgctcaggctggagtgcagtggtgcgatcttggctcactgcaccttctacctcccgtgttcaagtgattt

SEQ ID NO: 42548 - DNA, 120 bp, synthetic construct
  source 1..120: mol_type = other DNA
gattacaggcatcagccaccgcacctggcccattctgtttcttttatgactttttacatctattttggtggtggagagggtctttcttctgcttattatcaagagctctgtaaagataac

SEQ ID NO: 42549 - DNA, 120 bp, synthetic construct
  source 1..120: mol_type = other DNA
tgtacttccggccttgggccattggctggctgtggccttcgccctgatagtttgttcactggcagtggtgacagcagcagcaaacagcttagttgagcaaatggagcagaatggtcaatg

SEQ ID NO: 42550 - DNA, 120 bp, synthetic construct
  source 1..120: mol_type = other DNA
acggagtcttgctttgttgcccaggctggagtgcagtttccttttaaagtgattgtatttaagccaacaagtgacacaacataaaggagggtatatacagcataaagaaagaacactggc

SEQ ID NO: 42551 - DNA, 120 bp, synthetic construct
  source 1..120: mol_type = other DNA
catccaggggttggcaaactaaggctacaggccagtctgctgcttttgtaaatcaagtttcactgggacacaacacactcattgccttctgagttgtctacagccgcctttgagctgcaa

SEQ ID NO: 42552 - DNA, 120 bp, synthetic construct
  source 1..120: mol_type = other DNA
ctttagaaagtaggtgtgtggctgcggtgaggagctctgggcttgtcgggggccactgagctgtaagctgcttgcctggcctgcagcatgttcctgtcccaggccactgggtggggcagc

SEQ ID NO: 42553 - DNA, 120 bp, synthetic construct
  source 1..120: mol_type = other DNA
ttctactttttcagtagtttccaagcatcttttttttgttgttgttacgtcattggtgtcttttttttttttttttgagacagagtctctgtcgcccaggctggagtgcagtggtgcgat

SEQ ID NO: 42554 - DNA, 120 bp, synthetic construct
  source 1..120: mol_type = other DNA
ctctggaggccactgggggacgggacctgggctctggctgaactcccaggaggaggctacttcctggtgtgccagcccctccctgccaggtggccccaggggccgtttaccaaggggttt

SEQ ID NO: 42555 - DNA, 120 bp, synthetic construct
  source 1..120: mol_type = other DNA
tgcctcagcctcccgagtagctgtgactacaggcgcctgccacgatgcttggctaattttgtattttttttagtagagatggggtttcaccatgtgggccaggctggtcttgaactcctg

SEQ ID NO: 42556 - DNA, 120 bp, synthetic construct
  source 1..120: mol_type = other DNA
tggtttttgccattaaaaatggcaactacttttgcaccaacccaatatgaaaacaaaaagcaccttaaataccagaactccactcggggcttttgctcctagggtagaattggtgggaat

SEQ ID NO: 42557 - DNA, 120 bp, synthetic construct
  source 1..120: mol_type = other DNA
ggagctgacactccacaaatgatgctggagctgggtgggccgggctgcggttgaggaagtgatcaggatcacgtaggtgggcgggcaaagggagcttctgggaccagccttgaaagatgg

SEQ ID NO: 42558 - DNA, 120 bp, synthetic construct
  source 1..120: mol_type = other DNA
cagaagctgaaatgacagcagtggtactgcctggtaaaagaattggttctgtgacccgggaagctttggttggccttgatttcttctctggaggcttggaaacgcttcctctcttcttct

SEQ ID NO: 42559 - DNA, 120 bp, synthetic construct
  source 1..120: mol_type = other DNA
agaagcagagatctgaatagtcaacccactcttcacaaagcttagaaagcggccgggcacagtggctcatgcctgtaatcccaacactttgggaggccaaggcgggcggatcacttgagg

SEQ ID NO: 42560 - DNA, 120 bp, synthetic construct
  source 1..120: mol_type = other DNA
tttttgtgtttttagtagagatggggtttcaccatgtgggccaggctggtcttgaactcgacctcccgtgatctgctcacctcagcctcccaaagcctcagcctcttacagtgttgggat

SEQ ID NO: 42561 - DNA, 120 bp, synthetic construct
  source 1..120: mol_type = other DNA
cacaagctctcaaagagcacaggaagaaatcatgtctttatgcacacgtgtgtgcatgtgtggtatgtatgcatggtgtgtgcacgtgtgcattgtgtgcatgattgcattgtgtggtgt

SEQ ID NO: 42562 - DNA, 120 bp, synthetic construct
  source 1..120: mol_type = other DNA
gtgtgcacgtgtgcactgtgtatgcatggtgtgtgcacgtgtgcactgtgtggtgtgtatgcatggtgtgtgcacatgtgcactgtgtatgcatggtaatgtgcacgcgtgcactgtgtg

SEQ ID NO: 42563 - DNA, 120 bp, synthetic construct; identical to SEQ ID NO: 35147
  source 1..120: mol_type = other DNA

SEQ ID NO: 42564 - DNA, 120 bp, synthetic construct; identical to SEQ ID NO: 35148
  source 1..120: mol_type = other DNA

SEQ ID NO: 42565 - DNA, 120 bp, synthetic construct
  source 1..120: mol_type = other DNA
aggagatgggacaacagctgggtatggtggctcacacctgtaatcccagctactcaggctgagacagtaggatagctcgaggccaggagttcaagatcagtctgcacaacatagcgagac

SEQ ID NO: 42566 - DNA, 120 bp, synthetic construct; identical to SEQ ID NO: 24687
  source 1..120: mol_type = other DNA

SEQ ID NO: 42567 - DNA, 120 bp, synthetic construct; identical to SEQ ID NO: 24688
  source 1..120: mol_type = other DNA

SEQ ID NO: 42568 - DNA, 120 bp, synthetic construct; identical to SEQ ID NO: 24689
  source 1..120: mol_type = other DNA

SEQ ID NO: 42569 - DNA, 120 bp, synthetic construct; identical to SEQ ID NO: 24690
  source 1..120: mol_type = other DNA

SEQ ID NO: 42570 - DNA, 120 bp, synthetic construct; identical to SEQ ID NO: 24691
  source 1..120: mol_type = other DNA

SEQ ID NO: 42571 - DNA, 120 bp, synthetic construct
  source 1..120: mol_type = other DNA
tcttcttggagtctcagggcaaaccctttcgagcagcacctcccagtggccagaagctgaaatgacagcagtggtactgcctggtaaaagaattggttctgtgacccgggaagctttggt

SEQ ID NO: 42572 - DNA, 120 bp, synthetic construct; identical to SEQ ID NO: 13652
  source 1..120: mol_type = other DNA

SEQ ID NO: 42573 - DNA, 120 bp, synthetic construct
  source 1..120: mol_type = other DNA
atttcaatgtataaatagtatttagacaactttttgggtattgatatatctaaagtaaggccgggcgcagtggcttacgcctgtaatcccagcactttgggagaccaaggcgggcagatc

SEQ ID NO: 42574 - DNA, 120 bp, synthetic construct
  source 1..120: mol_type = other DNA
aacattctacagctactaaaatgataagcacagagaatgttacaatattaaattaaaagggatataaagtggctgggtgcggtggctcacgcctgtaatcccagcactttgggaggccga

SEQ ID NO: 42575 - DNA, 120 bp, synthetic construct
  source 1..120: mol_type = other DNA
caaacctgacaaaaacaagaaatggggaaatgattccctgtttaataaatagtgctgggaaaactggctagccatatgtagaaagctgaaactggatcccttccttacaccttatacaaa

SEQ ID NO: 42576 - DNA, 120 bp, synthetic construct
  source 1..120: mol_type = other DNA
ggtggaaattgaacaataagaacacatggacacaggaaggggaacatcatacaccagggcctgttgaggggtggggggaggggggagggatagcattaggagatatacctaatgttaaat

SEQ ID NO: 42577 - DNA, 120 bp, synthetic construct; identical to SEQ ID NO: 20431
  source 1..120: mol_type = other DNA

SEQ ID NO: 42578 - DNA, 120 bp, synthetic construct; identical to SEQ ID NO: 20432
  source 1..120: mol_type = other DNA

SEQ ID NO: 42579 - DNA, 120 bp, synthetic construct; identical to SEQ ID NO: 20421
  source 1..120: mol_type = other DNA

SEQ ID NO: 42580 - DNA, 120 bp, synthetic construct; identical to SEQ ID NO: 20422
  source 1..120: mol_type = other DNA

SEQ ID NO: 42581 - DNA, 120 bp, synthetic construct; identical to SEQ ID NO: 20423
  source 1..120: mol_type = other DNA

SEQ ID NO: 42582 - DNA, 120 bp, synthetic construct; identical to SEQ ID NO: 20424
  source 1..120: mol_type = other DNA

SEQ ID NO: 42583 - DNA, 120 bp, synthetic construct
  source 1..120: mol_type = other DNA
tgactagcgatgttgagcatcttttcatatgtttcatggccatttgtatatcttctttagtgtaacgtctattaaaatattttgcccacttaattgggtgggtacaagttcttttcagat

SEQ ID NO: 42584 - DNA, 120 bp, synthetic construct
  source 1..120: mol_type = other DNA
caagggacgtgaaggacctcttcaaggagaactacaaaccactgctcaatgaaataaaagaggatgcaaacaaatggaagaacattccatgctcatgggtaggaagaatcaatatcgtga

SEQ ID NO: 42585 - DNA, 120 bp, synthetic construct
  source 1..120: mol_type = other DNA
acatgaaaaaatgctcaccatcactggccatcagagaaatgcaaatcaaaaccacaatgagataccatctcacaccagttagaatggcaatcattaaaaagttaggaaacaacaggtgct

SEQ ID NO: 42586 - DNA, 120 bp, synthetic construct; identical to SEQ ID NO: 20426
  source 1..120: mol_type = other DNA

SEQ ID NO: 42587 - DNA, 120 bp, synthetic construct
  source 1..120: mol_type = other DNA
tgtttattgtggcactattcacaacagcaaagacttggaaccaacctaaatgtccaacaatgatagactggattaagaaaatgtggcacatatacaccatggaatactatgcagccataa

SEQ ID NO: 42588 - DNA, 120 bp, synthetic construct; identical to SEQ ID NO: 20428
  source 1..120: mol_type = other DNA

SEQ ID NO: 42589 - DNA, 120 bp, synthetic construct
  source 1..120: mol_type = other DNA
atcgccacactgacttccacaagggttgaactagtttacagtcccaccaacagtgtaaaagtgttcctatttctccacatcctctccagcacctgttgtttcctgactttttaatgattg

SEQ ID NO: 42590 - DNA, 120 bp, synthetic construct
  source 1..120: mol_type = other DNA
ggtagcttgatggggatggcattgaatctgtaaattaccttgggcagtatggccattttcatgatattgattcttcctacccaagagcatggaatgttcttccatttgtttgtatcctct

SEQ ID NO: 42591 - DNA, 120 bp, synthetic construct
  source 1..120: mol_type = other DNA
gtctaaaattctctttcttggttgtgtctctgccaggctttggtatcagaatgatgctggcctcataaaatgagttagggaggattccctctttttctattgattggaatagtttcataa

SEQ ID NO: 42592 - DNA, 120 bp, synthetic construct; identical to SEQ ID NO: 20429
  source 1..120: mol_type = other DNA

SEQ ID NO: 42593 - DNA, 120 bp, synthetic construct
  source 1..120: mol_type = other DNA
agctttaggatcctgaaggtcacttgactcttatgtcagtattctttctactacagagctgcagtaccactgcagggcaaatcagtttgggaaatgatagagtaaacaacttcttaaccc

SEQ ID NO: 42594 - DNA, 120 bp, synthetic construct
  source 1..120: mol_type = other DNA
ccttttttggttatcagttgtggtttataataatgaggagaaggaggaaagggttgaaaaaccaaacagaaggcccaagacatattttagacagtgacagccatcccctcaacactgacc

SEQ ID NO: 42595 - DNA, 120 bp, synthetic construct; identical to SEQ ID NO: 20328
  source 1..120: mol_type = other DNA

SEQ ID NO: 42596 - DNA, 120 bp, synthetic construct; identical to SEQ ID NO: 20329
  source 1..120: mol_type = other DNA

SEQ ID NO: 42597 - DNA, 120 bp, synthetic construct
  source 1..120: mol_type = other DNA
gcctctggttgcatgagatatctttttccatcctttcactgtcagcctatttgtgtctttataggtcaagtgggtttcttgtaggcagcatatagttgggccttgtttcttagtccatta

SEQ ID NO: 42598 - DNA, 120 bp, synthetic construct
  source 1..120: mol_type = other DNA
ggacttcatactagagttatgagtgaattacacactataattacagtgttggagtattctgagttcgttaatgcacttaattttactagtgggttttataaattcaaatgttttcttttt

SEQ ID NO: 42599 - DNA, 120 bp, synthetic construct
  source 1..120: mol_type = other DNA
aaaaacagagcagaaaaactggaaactctaaaaagcagagcgcctctcctcctccaaaggaacgcagctcctcagcagcaacggaacaaagctggatggacaatgactttgaagagttga

SEQ ID NO: 42600 - DNA, 120 bp, synthetic construct
  source 1..120: mol_type = other DNA
tggaaaggaacaactggtaccagccactgcaaaaacatgccaaaatgtaaagactgtcaaggccaggaagaaactgcatcaactaatgagcaaaataaccagctaacatcataatgacag

SEQ ID NO: 42601 - DNA, 120 bp, synthetic construct
  source 1..120: mol_type = other DNA
atttagtgctataaatttccctctacacactgctttgaatgtgtcccagagattctggtatgttgtgtctttgttctcgttggtttcaaagaacatctttatttgtgccttcatttcgtt

SEQ ID NO: 42602 - DNA, 120 bp, synthetic construct
  source 1..120: mol_type = other DNA
cagaaccaaagacaaaaaccacatgattatctcaatagatgcagaaaaggcctttgacaaaattcaacaacccttcatgctagaaactctcaataaatgaggtattgatgggatgtatct

SEQ ID NO: 42603 - DNA, 120 bp, synthetic construct
  source 1..120: mol_type = other DNA
aagaaatggggaaaggattccctatttaataaatggtgctgggaaaactggctagccatatgtagaaagctgaaactggatcccttccttacaccgtatacaaaaattaattcaagatgg

SEQ ID NO: 42604 - DNA, 120 bp, synthetic construct
  source 1..120: mol_type = other DNA
aaatgtggcacatatacaccatggaatactatgcagccataaaaaatgatgagttcatgtcctttgtagggacatggatgaaactggaaaccatcattctcagcaagctatctcaaggac

SEQ ID NO: 42605 - DNA, 120 bp, synthetic construct
  source 1..120: mol_type = other DNA
cctaatgctatccgtccccactccccccaccccaccacagtccccagagtgtgatattctccttcctgtgtccatgtgatctcattgttcaattcccacctatgagtgagaatatgcggt

SEQ ID NO: 42606 - DNA, 120 bp, synthetic construct
  source 1..120: mol_type = other DNA
ttgcttgtttttctcaggtttgtcaaagatcagatagttgtagatatgctgcattatttctgagggctctgttctgttccattgatctatatctctgttttggtaccagtaccatgctgt

SEQ ID NO: 42607 - DNA, 120 bp, synthetic construct
  source 1..120: mol_type = other DNA
tggtgagagagggcatccctgtcttgtgccggttttcaaagggaatgcttccagtttttgggcattcagtatgatattggctgtgggtttgtcatagataactcttattattttgaaata

SEQ ID NO: 42608 - DNA, 120 bp, synthetic construct
  source 1..120: mol_type = other DNA
ctgaataacctgctcctgaatgactactgggtacataacgaaatgaaggcacaaataaagatgttctttgaaaccaacgagaacaaagacacaacataccagaatctctgggacacattc

SEQ ID NO: 42609 - DNA, 120 bp, synthetic construct
  source 1..120: mol_type = other DNA
ttgcagcggctggtactggttgttcctttccatgtttagtgcttccttcaggagctcttttagggcaggcctagtggtgacaaaatctctcagcatttgcttgtctgtaaaggattttat

SEQ ID NO: 42610 - DNA, 120 bp, synthetic construct
  source 1..120: mol_type = other DNA
ggtttttggtgtggatgtcctttctatttgttaattttccttctaacagacaggaccctccgctgcaggtctgttggaataccctgccgtgtgaggtgtcagtgtgcccctgctgggagg

SEQ ID NO: 42611 - DNA, 120 bp, synthetic construct; identical to SEQ ID NO: 17398
  source 1..120: mol_type = other DNA

SEQ ID NO: 42612 - DNA, 120 bp, synthetic construct; identical to SEQ ID NO: 17399
  source 1..120: mol_type = other DNA

SEQ ID NO: 42613 - DNA, 120 bp, synthetic construct
  source 1..120: mol_type = other DNA
cctcccaaagtgctgggattacaggtgtgagtcactgtgctcagccttataatttttatacctagttgaatgagcctcaattttacagaagaggaaacagataatcagagaggttgggta

SEQ ID NO: 42614 - DNA, 120 bp, synthetic construct
  source 1..120: mol_type = other DNA
tggcgccattaagaaactggtacccaaataaggcatcttccttccaggagtcccgcacgcgctctggggaaggcagttgttgagcaagttgtgggatctgagctcttggtccttccaacc

SEQ ID NO: 42615 - DNA, 120 bp, synthetic construct; identical to SEQ ID NO: 17379
  source 1..120: mol_type = other DNA

SEQ ID NO: 42616 - DNA, 120 bp, synthetic construct; identical to SEQ ID NO: 17380
  source 1..120: mol_type = other DNA

SEQ ID NO: 42617 - DNA, 120 bp, synthetic construct; identical to SEQ ID NO: 17381
  source 1..120: mol_type = other DNA

SEQ ID NO: 42618 - DNA, 120 bp, synthetic construct
  source 1..120: mol_type = other DNA
gtcttccctgggaggagaaggcccaaggtttcccctccacttcaagatctgggctccgaggctccggagcccccttcactgggccgcgtttcttgtgccacctcttccttaggctccttc

SEQ ID NO: 42619 - DNA, 120 bp, synthetic construct
  source 1..120: mol_type = other DNA
agtaaaaactactctttttctggattccaagctctccatgggctcgattcctatccaggagcccataccctcgctgtagcacgacatggccctcagccaagttcactagcatcctggctt

SEQ ID NO: 42620 - DNA, 120 bp, synthetic construct
  source 1..120: mol_type = other DNA
ggcatagttcagtcaaataatggacaggactgattttttccttgataaagtgagtcacaggtcccttgttattctcatcagagttccgcatagtgattcagtcaggactgggaatcaagt

SEQ ID NO: 42621 - DNA, 120 bp, synthetic construct
  source 1..120: mol_type = other DNA
tccgtctccctgtcccagcaacagcagagatctgatgaaagacagatgaaaactttcctaaaatgctgatagaaagctcacatgaaaactgaccaactgactctttgccgaaatattcaa

SEQ ID NO: 42622 - DNA, 120 bp, synthetic construct
  source 1..120: mol_type = other DNA
cattgtagttccacaaaccttccgaagatattttgcagtttgacacatgtgaccctggtattttcctggaaggaggcctttatctgtcattcttccattagtggcccctgggatgttaga

SEQ ID NO: 42623 - DNA, 120 bp, synthetic construct
  source 1..120: mol_type = other DNA
caggatggtgtcatttcattttctcaatggtcctgcaagtgaggggtatctcctttgggtagatgaagaaacagcttcagagaatgaagcaatgtgcccaggccatccagctacttgcct

SEQ ID NO: 42624 - DNA, 120 bp, synthetic construct
  source 1..120: mol_type = other DNA
cttgaaccctggaagtggaggttgcagtgagccgagatcgagccactgcactccagcctgagcaacacagtgagactccacctcaaaataaaaaagaacatgccttggagggcatcgagt

SEQ ID NO: 42625 - DNA, 120 bp, synthetic construct
  source 1..120: mol_type = other DNA
aaatgaattcaggagttcatttaaggtgttcatgaagaatcttggctccatgaactgtagtggaggcaaaactccacctcttcccatttcagctaggtctgagaatcggcataagacaga

SEQ ID NO: 42626 - DNA, 120 bp, synthetic construct
  source 1..120: mol_type = other DNA
gtcctcaaagcactgtagtcataggaggaatgacactgctgtgcaggggcgggaagtgggagggctctgccctgtgcctcgacacacctgcaggaggcatgactttccttgggattctta

SEQ ID NO: 42627 - DNA, 120 bp, synthetic construct
  source 1..120: mol_type = other DNA
ggtaggaagagatgactgttacccccattttatagctaagaaaactgagacaaaggagaaaaaagttattctgtacctgctgttcttaagctaccaggccacatcccatcgtttctgatg

SEQ ID NO: 42628 - DNA, 120 bp, synthetic construct
  source 1..120: mol_type = other DNA
accaacctccttggtaactttaaacagccatttaattttgttcatgctcttgcaggtcaggaatttaggaaaggcttcactgggcagttcatctgtggccatgtagcatcagctgaaggg

SEQ ID NO: 42629 - DNA, 120 bp, synthetic construct
  source 1..120: mol_type = other DNA
gattcaattactcaccatatgatcaccccttaaatctaatatttcaccactacaccttgggtgaacatgaatgtcagagggccattactgtggccccacagatccagagcatctgtgtga

SEQ ID NO: 42630 - DNA, 120 bp, synthetic construct
  source 1..120: mol_type = other DNA
tttgtcacaagcctgggcaatgtagagagaccccatctctacaaaaaaaattgaaaattagctaggggccgaggcgggtggatcacaaggtcaggagatcgagaccatcctggctaacac

SEQ ID NO: 42631 - DNA, 120 bp, synthetic construct
  source 1..120: mol_type = other DNA
ctgagagataagatgctctcagagctaggcttagagggaggagcagaaccctcaggccagtgatgactataggcataatgataatgatcattgttcccatccattggcatttactgcgtg

SEQ ID NO: 42632 - DNA, 120 bp, synthetic construct
  source 1..120: mol_type = other DNA
atttggcttttgtaaagtgagtggctaagagcacaggagttgagttttatgttgaaaattcactaattcagactggttccaagatggccgaataggaacagctccagtctacagctccca

SEQ ID NO: 42633 - DNA, 120 bp, synthetic construct
  source 1..120: mol_type = other DNA
gtaaataaaaccacaaagatggggaaaaacagagcagaaaagctgaacattctacaaatcagagtgcctctccccttccaaaggaaggcagctcctcgcgagtggtggaacaaagctgga

SEQ ID NO: 42634 - DNA, 120 bp, synthetic construct
  source 1..120: mol_type = other DNA
gaactcctgaaggaagcactaaacatggaaatgaacaactggtaccagccactgcaaaaacatgccacattgtaaagaccatcaatgctaggaagaaactgcatcaactaatgagcaaaa

SEQ ID NO: 42635 - DNA, 120 bp, synthetic construct
  source 1..120: mol_type = other DNA
gatcagagcagaactgaaggaggtagagacacaaaaatcccttcaaaaaatcaatgagtccaggagctgattttttgaaaggatcaacaaaattgatagactgctagcaagactaataaa

SEQ ID NO: 42636 - DNA, 120 bp, synthetic construct
  source 1..120: mol_type = other DNA
catctgagaagtgaggagcccctccatctgagaagtgaggagcccctccgcccggcagccgccccttctgagaagtgaggagcccctccgcccggcagccgccccgtctgggaagtgagg

SEQ ID NO: 42637 - DNA, 120 bp, synthetic construct
  source 1..120: mol_type = other DNA
ctgaatagaccaataacaggctctgaaattgaggcaataattaacagcctaccaacccagaaaagttcaggaccagatggattcacagccgaattctaccagaggtacaaggaggagctg

SEQ ID NO: 42638 - DNA, 120 bp, synthetic construct
  source 1..120: mol_type = other DNA
tgtatatttagaaaaccccattgtctcagcccaaaatctccttaaagctgataggcaacttcagcaaagtctcaggatacaaaatcaatgtgcaagaatcacaagcattcttatacacca

SEQ ID NO: 42639 - DNA, 120 bp, synthetic construct
  source 1..120: mol_type = other DNA
agaatgggaaaaaaattttgcaatctactcagctgacaaaaggctgatatccagaatctacaaacaactcaaacaaacttacaagaaaaaaacaaccccatcaaaaagtgggcaaaggat

SEQ ID NO: 42640 - DNA, 120 bp, synthetic construct
  source 1..120: mol_type = other DNA
tcctctcatgttgttctttctttacagcaaagttggcccgagatgaccaaattcacattctcaagcaacaccgacgtaaagaactggaaacacggcaaaaacaatatcggtgagttatga

SEQ ID NO: 42641 - DNA, 120 bp, synthetic construct
  source 1..120: mol_type = other DNA
actagcaaacctaacccagaagtatataaaaggcattaaacaatatgaacatgtgggatttagcccaggaatgcaaagttggtttaacatccaaaaatcaattaattgaattcaccatat

SEQ ID NO: 42642 - DNA, 120 bp, synthetic construct
  source 1..120: mol_type = other DNA
ataccccacaaattaatgtacacgttcaacacaacccttatcaaaattctagctgatttctttgcagaaattgacaagctgtcaattctgcaaattcatatggaaatggaagggacccag

SEQ ID NO: 42643 - DNA, 120 bp, synthetic construct
  source 1..120: mol_type = other DNA
acagctgcttgggaaacagtctgctagctcctgactgttcaacagagagttacaatatgacagcatttccactcttaagcatattcccaacagaaatggaaacatatgcccacacaaaaa

SEQ ID NO: 42644 - DNA, 120 bp, synthetic construct
  source 1..120: mol_type = other DNA
agttctccagagaaaatttgtgaatctccaataagcacgtgaaaatatgctcaacattattaatcatcaggaaatttcaaatcaaaaccacaagatacaattctaaccactaaaatggtt

SEQ ID NO: 42645 - DNA, 120 bp, synthetic construct
  source 1..120: mol_type = other DNA
atgctaaatggaaaactcacttacggaagaccccatattgtgtgattctatctgtatgaaatgtccagaataggcaaacccacagagtcaggttagtaggtgagtagttgcctagcacta

SEQ ID NO: 42646 - DNA, 120 bp, synthetic construct
  source 1..120: mol_type = other DNA
aattaccaaatagtaaaagttattagtatacattgacaaatttctcctcaaaaatctttaaccatttgggaggctgaggtgggtggatcaccaggtcaggagatcgagaccatcctggct

SEQ ID NO: 42647 - DNA, 120 bp, synthetic construct
  source 1..120: mol_type = other DNA
cactctgttcattgaaagacaccaggagagagtgaaggcaagtcatggagtgattgacgagaattattcctagtatgtgaaggacctacaaatctttaagaaggggagtgtcattcacta

SEQ ID NO: 42648 - DNA, 120 bp, synthetic construct
  source 1..120: mol_type = other DNA
ttaagggtttataaatgtgtgatttgttttagagtatttgtgcacaagcctctcagctcaggcaccatatgatgtgtttccagacttccatacctggtgcagtgcacacgttgtgcttga

SEQ ID NO: 42649 - DNA, 120 bp, synthetic construct
  source 1..120: mol_type = other DNA
gacctgcacttttcactcatcactaagtattgaagaggatctggttgacacagatagatgtggttcatgcagttaacttcttcatggcatatcagtatctgaataacccatgcgctcgtc

SEQ ID NO: 42650 - DNA, 120 bp, synthetic construct
  source 1..120: mol_type = other DNA
gggtttcctcctttgcttaagaaaaccctttccatcccagtgttacacaaatacttcccccgtaattttgtctaatacttttataatttcccctttgagtttagagctttcattcatcta

SEQ ID NO: 42651 - DNA, 120 bp, synthetic construct
  source 1..120: mol_type = other DNA
acacagcgtgtctttccacctctctagatcctgtgtcaacgtacttccatagaatttctagttttcttcatgcaggtccttcacctttctagctactctacatttagcatttgctgttct

SEQ ID NO: 42652 - DNA, 120 bp, synthetic construct
  source 1..120: mol_type = other DNA
cttgtcattgagaaaaatgacgagacaagtctcaatcattttaggaaatttatttgcgaaagttaaggacgcatgcccgggagacagcactatgcctttctctgaaggtgattttgaggg

SEQ ID NO: 42653 - DNA, 120 bp, synthetic construct
  source 1..120: mol_type = other DNA
ggacagtggtttggttttggaaaggtgggacaacttgggggaggggagcttccaggtcataggcagattcaaagagtttctgattggcaactgcttaaaagaattattatctaaaaactt

SEQ ID NO: 42654 - DNA, 120 bp, synthetic construct
  source 1..120: mol_type = other DNA
ttctgcccataaatcctatccaactatgagacagcatcaaagtcactcggagcctgctctggtttaggggctgccctattcttgaattgttctttgctcaattaaactgctaaatttaat

SEQ ID NO: 42655 - DNA, 120 bp, synthetic construct
  source 1..120: mol_type = other DNA
ccatttgctggcacagatgcccttgcatggctcattgtttacatactgaaaaacatctagctccactgagcttttaaaattaactagagcccttgaactgtccaggcaaagagaaaatca

SEQ ID NO: 42656 - DNA, 120 bp, synthetic construct
  source 1..120: mol_type = other DNA
ctaaacaatgagtggattattcatgagttttccaggagaggggtgggcaattccaggaactgaaggttcctcccttttttagaccatatagggtaacttcctgacattactatggcattt

SEQ ID NO: 42657 - DNA, 120 bp, synthetic construct
  source 1..120: mol_type = other DNA
gcacagcaaagttggtgcgactggactttggaagaggtcccagaaccttactggacacagggtcagcctatgatgtgttgactttattttgagtacatcaatctccctgtgtaacatcgt

SEQ ID NO: 42658 - DNA, 120 bp, synthetic construct
  source 1..120: mol_type = other DNA
ctgcttgttaaacatatggatcccccgaccctatcccaggactactgagtgtagggatctttaaatctgcacattgaccctatagggaattttaaaaatcatgtcagtttggcgaaacta

SEQ ID NO: 42659 - DNA, 120 bp, synthetic construct
  source 1..120: mol_type = other DNA
gaggacacaaacaaatggaagaacattccatgctcatggataggaagaatcaatatcatgaaaatggccatactcccaaggtaatttatagatcaatgccatccccatcaaactaccaat

SEQ ID NO: 42660 - DNA, 120 bp, synthetic construct
  source 1..120: mol_type = other DNA
ctgttggtgggactgtaaactagttcaaccattgtggaagacagtgtgacgattcctcaaggatctagaactagaaataccatttgacccagccatcccattatcgggtatatacccaaa

SEQ ID NO: 42661 - DNA, 120 bp, synthetic construct
  source 1..120: mol_type = other DNA
taaacattgtgtcggtgttttggggggtacaataatctattttaagcttcatggccatcctgggaggtaaataatattattgaccatttctaggtgaggaaactgagtctccaaggggtc

SEQ ID NO: 42662 - DNA, 120 bp, synthetic construct
  source 1..120: mol_type = other DNA
agtccattttaacagggtttaatgagcacctatcctgtggtatagaaggtaactgtgcacctccttttcatgtatccccatcatggctaacaacagcctagacatatggttctcaatcct

SEQ ID NO: 42663 - DNA, 120 bp, synthetic construct
  source 1..120: mol_type = other DNA
ttctccacatcgtcctgtcattagccccttgagtgatggcctattggcaggagcagagcgaaggaatcctgagaggggcccttctgcccctcctggcccagcaggctggacagtaagctt

SEQ ID NO: 42664 - DNA, 120 bp, synthetic construct
  source 1..120: mol_type = other DNA
atgtgttcacctccccactcgctgtttgcagcctggaagacgattgcagggggtggcagggctgaaaagacaatgtcctcattaaaggaaattgagaaagagagtttccttcccagtggg

SEQ ID NO: 42665 - DNA, 120 bp, synthetic construct
  source 1..120: mol_type = other DNA
gggagaagtgatggcggaggaaagagaggccggaagaggagggggcctgctggcctggcactggaaagcaaagcgtgggtttgtatatgggaagaagaccacatcccctcttatcgtcat

SEQ ID NO: 42666 - DNA, 120 bp, synthetic construct
  source 1..120: mol_type = other DNA
tggcacaggagaaagctgaagatgcaggagaaagctaggtcactgcccctaggccaggtgatcaaggtggctgttacctgcctgtgtggccttgaaaaagcctggtgccctctctggctt

SEQ ID NO: 42667 - DNA, 120 bp, synthetic construct
  source 1..120: mol_type = other DNA
aaggagagaagcatttgctaagctaagaaaggatggaaggggattgctgttctgcctggatgcacccctagacctggcagggcaggcaggagagacccccagtgtctcttgcttatccta

SEQ ID NO: 42668 - DNA, 120 bp, synthetic construct
  source 1..120: mol_type = other DNA
gcagtaagagaatggcatagtctattgggacagccacatcaaaataccacagaccagatggcttaaacggcagatatttgtctctcacaggtccggaggctagaagtccaagattagggt

SEQ ID NO: 42669 - DNA, 120 bp, synthetic construct
  source 1..120: mol_type = other DNA
tgaatgaatgaacacatgtgtgaatggaattcaaggcactgcaggctattctggagggtactggcctgtctcttcgacaggtgaggtgcagtagaacagcatcccgtatagatgccagtt

SEQ ID NO: 42670 - DNA, 120 bp, synthetic construct
  source 1..120: mol_type = other DNA
tggcacaaatcaatcatttgtgcttctgaacagagcaaaggcagaacttggcttgtgttttaggtatttacacaaaagcaactttgggttcctttggactaggatgtgtttgatgagagc

SEQ ID NO: 42671 - DNA, 120 bp, synthetic construct
  source 1..120: mol_type = other DNA
atgctcgagtctgggaacataatgtcaatattttcactatcagtatcaataattacaggagctacccttgattaggggcctgtggtgggacaggcattgtgacaggtgctttacacacaa

SEQ ID NO: 42672 - DNA, 120 bp, synthetic construct
  source 1..120: mol_type = other DNA
atacacaccagcatgattcttaatccccacagtcattcacgctgcccatctggcagcaccttaatgatctacagcaagcttgtggcctactaaaaacgcctccattgttttttaaaatgt

SEQ ID NO: 42673 - DNA, 120 bp, synthetic construct
  source 1..120: mol_type = other DNA
tcaagattggattagcagccattccttctgggtagagtctgatggtcacttcagctctcaaagtccagctatccagccatagtcctagaaggcaagacatcactgtgcccgaccaaccca

SEQ ID NO: 42674 - DNA, 120 bp, synthetic construct
  source 1..120: mol_type = other DNA
tggctctgactggggttgagttcgccagttttgacttatgtgtagagtccggcagcatcattttttggcatttaactcgtcacatctatttcacctaacctctttcttcttagtaaactg

SEQ ID NO: 42675 - DNA, 120 bp, synthetic construct
  source 1..120: mol_type = other DNA
ggtgaagctgtggactaagctggagaccaagaccactgaggggcaccatgggttctggggtcaggaaccaggccagtcctggtatgccacctttgatgatgatgtgagttcttatgtcca

SEQ ID NO: 42676 - DNA, 120 bp, synthetic construct
  source 1..120: mol_type = other DNA
taaattccagttcagccacttgctagcaggctgtgggaccttgagcaagccacagaatgttcctgggtctctttcttcttctgaaaatggaaactttgcaaactataaagactcaagcaa

SEQ ID NO: 42677 - DNA, 120 bp, synthetic construct
  source 1..120: mol_type = other DNA
agaggtcataccacatgataaaacaggaaaacaatcaataaacatattgtcaaagaacagggaagatgatcttttctggtaatgctatggtagacctagaaaacacaagagattctaatt

SEQ ID NO: 42678 - DNA, 120 bp, synthetic construct
  source 1..120: mol_type = other DNA
agtttgaggctgcagtgagccatggtcgctccactgcactccacactgggcaacagagtaagaccctatctttaaaaaaaaaaaaaaaaagtaaaagaaaacacagaaggaacactttcc

SEQ ID NO: 42679 - DNA, 120 bp, synthetic construct
  source 1..120: mol_type = other DNA
atctacgagaacacaaggcatttattgcggggaccaaaaaaggagaattgggcagctcactcttaagaccggaactccctgatggcttgcaggtaagggtttttaaaggcagagtgaatt

SEQ ID NO: 42680 - DNA, 120 bp, synthetic construct
  source 1..120: mol_type = other DNA
gagcatagtttgtgatggggaaaaaaattgaaaacagtctgaaggcagaagaggattgagtgagtgagcccttccatgtcctcaccataaaatgttgaggcgtctttgaaaggaatgctt

SEQ ID NO: 42681 - DNA, 120 bp, synthetic construct
  source 1..120: mol_type = other DNA
ggtacatgtgcaggtttgttacatggttatattgcataatgctggggttaggcttctattgaacccatcactcaaatactgagcatagtacccaatacccagtttttcaaccctttcctc

SEQ ID NO: 42682 - DNA, 120 bp, synthetic construct
  source 1..120: mol_type = other DNA
ttcttctagaatgtttaaagtttgaagtcttacatttaagtctgtaatccatctagaggtaatttttgtatatggtgagaggtaggggcccagcgtcattcttctgcatataggtagcca

SEQ ID NO: 42683 - DNA, 120 bp, synthetic construct
  source 1..120: mol_type = other DNA
acaccactgcactccagcctgggtgatagtgagactccgtctcaaataaaaagaaatgctactgatttttgtacactgattttgtatcttgagtgtagaaagtcaaaagttttttttttg

SEQ ID NO: 42684 - DNA, 120 bp, synthetic construct
  source 1..120: mol_type = other DNA
tatttctttctcttgcctaattgctctgactaggacttccagtactctattgaataggaggggtgagagtggacatccttgtcttgttccagtttttagggggattgcttccaatttttg

SEQ ID NO: 42685 - DNA, 120 bp, synthetic construct
  source 1..120: mol_type = other DNA
atttttattaatatggcttcctgaatatatacaattccatgtgtggggtagcattatatgtctattggacagcactgttttcgagggagagacgcccaaggaccccaccttccacaatac

SEQ ID NO: 42686 - DNA, 120 bp, synthetic construct
  source 1..120: mol_type = other DNA
agagtcatgcaggttgtaagtaatatggctgggacaggaaataccaccgcagggccctttaccccctccaggctcttctgattccaaagtcactgttaaagaaattcagatacttctgga

SEQ ID NO: 42687 - DNA, 120 bp, synthetic construct
  source 1..120: mol_type = other DNA
taagacagtgaactcagggagcaaagaggtaagcattgtacaagtgctggccaggaccctctgaatcattatcatgcttagtaagcatcagaggggtgcaggcctccagcacttattcag

SEQ ID NO: 42688 - DNA, 120 bp, synthetic construct
  source 1..120: mol_type = other DNA
ccattagtgaccaggccagatgaccactgaagttgagacactgtttgggctgcaaatgacaaaacccaactcaaaccagctgcagctggacaagacatgccttatctcaaatacctggac

SEQ ID NO: 42689 - DNA, 120 bp, synthetic construct
  source 1..120: mol_type = other DNA
tcattctctgcgttaaacatccctcccccatctcacaggacaagggcttgcacctctgcctgcctggcctcctcgcctcccctggcacatttcctcagggatgggtctggacagctgtgg

SEQ ID NO: 42690 - DNA, 120 bp, synthetic construct
  source 1..120: mol_type = other DNA
ctcccttctcaaggccgctgcctcctcccccgccccggttctgcacgcgtactgcaccctcggacagcctcggggcctggcacgggacttgcaggatggattctgcccgctcagccaagg

SEQ ID NO: 42691 - DNA, 120 bp, synthetic construct
  source 1..120: mol_type = other DNA
caatgtgttggtccctcactggacatccttgtttttgtggctttgcacatgtgttcagtatgaccgcacacattcctagcagacaaattccttggtcaaagaatattgatactgaattgc

SEQ ID NO: 42692 - DNA, 120 bp, synthetic construct
  source 1..120: mol_type = other DNA
cagctcagcatttccacaccaagcagcaacagcaaatcacgaccactgatagatgtctattcttgttggagacatgggatgattattttctgttctatttgtgcttagtccaattccttg

SEQ ID NO: 42693 - DNA, 120 bp, synthetic construct
  source 1..120: mol_type = other DNA
atacaaaaattagccagatgtggtggcagacgcctgtaatcccagctactcgggagactgaggcagcagaatctcttgaacccaggaggtggaggttgcagtaagccgagattgtgcctc

SEQ ID NO: 42694 - DNA, 120 bp, synthetic construct; identical to SEQ ID NO: 17409
  source 1..120: mol_type = other DNA

SEQ ID NO: 42695 - DNA, 120 bp, synthetic construct; identical to SEQ ID NO: 22083
  source 1..120: mol_type = other DNA

SEQ ID NO: 42696 - DNA, 120 bp, synthetic construct; identical to SEQ ID NO: 22084
  source 1..120: mol_type = other DNA

SEQ ID NO: 42697 - DNA, 120 bp, synthetic construct
  source 1..120: mol_type = other DNA
cattcagtatgatattggctgtgggtttgtcatagatagctcttattattttgcaatacatcccatcaatacctaatttattgagagtttttagcatgaagggctgttgacttttgtcaa

SEQ ID NO: 42698 - DNA, 120 bp, synthetic construct
  source 1..120: mol_type = other DNA
ttgccttctgctagcttttgaatgtgtttgcccttgcttctctagttcttttaattgtgatgttaggatgtcaatttaagatctttcctgcttcctcttgtgggcatttagtgctataaa

SEQ ID NO: 42699 - DNA, 120 bp, synthetic construct; identical to SEQ ID NO: 25750
  source 1..120: mol_type = other DNA

SEQ ID NO: 42700 - DNA, 120 bp, synthetic construct; identical to SEQ ID NO: 25751
  source 1..120: mol_type = other DNA

SEQ ID NO: 42701 - DNA, 120 bp, synthetic construct; identical to SEQ ID NO: 19078
  source 1..120: mol_type = other DNA

SEQ ID NO: 42702 - DNA, 120 bp, synthetic construct
  source 1..120: mol_type = other DNA
gcatttccctgatggccagtgatgatgaacattttttcatgtgtcttttggctgcataaatgtcttcttttgagaagtgtctgttcatatccttcacccacttgttgatggggttgtttg

SEQ ID NO: 42703 - DNA, 120 bp, synthetic construct
  source 1..120: mol_type = other DNA
cctctttgattacattgagcagtggtttgtagttctccttgaagaggtccttcacatcccttgtaagttggattcctaggtattttattctctttgaagcaattgtgaatgggagttcac

SEQ ID NO: 42704 - DNA, 120 bp, synthetic construct; identical to SEQ ID NO: 19079
  source 1..120: mol_type = other DNA

SEQ ID NO: 42705 - DNA, 120 bp, synthetic construct; identical to SEQ ID NO: 19080
  source 1..120: mol_type = other DNA

SEQ ID NO: 42706 - DNA, 120 bp, synthetic construct; identical to SEQ ID NO: 19081
  source 1..120: mol_type = other DNA

SEQ ID NO: 42707 - DNA, 120 bp, synthetic construct; identical to SEQ ID NO: 19082
  source 1..120: mol_type = other DNA

SEQ ID NO: 42708 - DNA, 120 bp, synthetic construct; identical to SEQ ID NO: 2752
  source 1..120: mol_type = other DNA

SEQ ID NO: 42709 - DNA, 120 bp, synthetic construct; identical to SEQ ID NO: 7273
  source 1..120: mol_type = other DNA

SEQ ID NO: 42710 - DNA, 120 bp, synthetic construct
  source 1..120: mol_type = other DNA
gagaagaatttttaaaaagaaaagaaacttttaaaaaattaaaatacaaaaatttttcttagagacagggtctcgctgtgttgcccaggctggtctccaactccaggcctgaagcgaact

SEQ ID NO: 42711 - DNA, 120 bp, synthetic construct; identical to SEQ ID NO: 22083
  source 1..120: mol_type = other DNA

SEQ ID NO: 42712 - DNA, 120 bp, synthetic construct; identical to SEQ ID NO: 22084
  source 1..120: mol_type = other DNA

SEQ ID NO: 42713 - DNA, 120 bp, synthetic construct
  source 1..120: mol_type = other DNA
ggcagaggttgtggtgagctgagattgcaccattgcattccagcctgggcgacaagagcaaaactcagtttcaaaaaaaataaaataaaaaaaagcaaagacttggaaccaacctacatg

SEQ ID NO: 42714 - DNA, 120 bp, synthetic construct; identical to SEQ ID NO: 24272
  source 1..120: mol_type = other DNA

SEQ ID NO: 42715 - DNA, 120 bp, synthetic construct
  source 1..120: mol_type = other DNA
ctggtcggcaggcatgggataaaggacgttgaaaactctctaggtagaggaaaagagggaaaaaaagagaatgggaggagaaacaatttgttaccaagaataacaaaatccagggagaaa

SEQ ID NO: 42716 - DNA, 120 bp, synthetic construct; identical to SEQ ID NO: 11872
  source 1..120: mol_type = other DNA

SEQ ID NO: 42717 - DNA, 120 bp, synthetic construct
  source 1..120: mol_type = other DNA
catgtccttcgcccactttttgatggggttgtttgtttttttcttgtaaatttgtttgagttcattgtagattctggatattagccctttgtcagatgagtaggttgcgaaagtttgcag

SEQ ID NO: 42718 - DNA, 120 bp, synthetic construct
  source 1..120: mol_type = other DNA
tatggtatcctcactgcctactgaaggaatacacatgcaacaaacatttatcaaatgaatgactgtcgccaagtcaatcctaagccaaaagaacaaagctggaggcatcacgctacctga

SEQ ID NO: 42719 - DNA, 120 bp, synthetic construct
  source 1..120: mol_type = other DNA
ctcagggatctagaactagaaataccatttcacccagccatcctattactgggtatatacccaaaggactataaatcatgctgctataaagacacatgcacatgtatgtttattgcggca

SEQ ID NO: 42720 - DNA, 120 bp, synthetic construct
  source 1..120: mol_type = other DNA
agtggtgatgactcttaacgagcatgctgccttcaagcatctgtttaacaaagcacatcttgcaccgcccttaatccatttaaccctgagtggacacagcacatgtttcagagagcacag

SEQ ID NO: 42721 - DNA, 120 bp, synthetic construct
  source 1..120: mol_type = other DNA
gattacaggcattagccactgcacccagccgaaaataataatgatttttaaaactggacgcactggctcacacctgtaattccagcacttagggagatcgaggtgggcagatcacttgaa

SEQ ID NO: 42722 - DNA, 120 bp, synthetic construct
  source 1..120: mol_type = other DNA
gtgtgtgtgtgtgtgtagattgcagttaatcttgaagaggctcccaggtgtggaaaagaagcacaaactgtcatccagttgacaattgtcccatccaaaggctaaaacctagatgaaaat

SEQ ID NO: 42723 - DNA, 120 bp, synthetic construct
  source 1..120: mol_type = other DNA
tcgtctgggatgtgaggagcccctctgcctggctgcccagtctggaaagtgaggagcgtctctgcccggccgccatcccatctaggaagtgaggagcgcctcttcccagccgccatcaca

SEQ ID NO: 42724 - DNA, 120 bp, synthetic construct
  source 1..120: mol_type = other DNA
aaagaaaaaaaaaaaaaaaaaagagactgcacagaggggtgcctgaaccaatgggaggatcgggagaggtgtcagatttatctactataaaacaagaccaatttttaggttttagaaact

SEQ ID NO: 42725 - DNA, 120 bp, synthetic construct
  source 1..120: mol_type = other DNA
aggagctctgagctccatgcgacacttccttttctgtggctgcaggtggatttggtgttgacttctctcaagccacggaggacgtgggttcgggggttgccctcgtggcccggaggatcc

SEQ ID NO: 42726 - DNA, 120 bp, synthetic construct; identical to SEQ ID NO: 34033
  source 1..120: mol_type = other DNA

SEQ ID NO: 42727 - DNA, 120 bp, synthetic construct; identical to SEQ ID NO: 34034
  source 1..120: mol_type = other DNA

SEQ ID NO: 42728 - DNA, 120 bp, synthetic construct; identical to SEQ ID NO: 13578
  source 1..120: mol_type = other DNA

SEQ ID NO: 42729 - DNA, 120 bp, synthetic construct; identical to SEQ ID NO: 13579
  source 1..120: mol_type = other DNA

SEQ ID NO: 42730 - DNA, 120 bp, synthetic construct; identical to SEQ ID NO: 13580
  source 1..120: mol_type = other DNA

SEQ ID NO: 42731 - DNA, 120 bp, synthetic construct
  source 1..120: mol_type = other DNA
agagacacaaaaaacccttcaaaaaaatcagtgaagccaggagctggttttttcaaaagatcaacaaaattgatagactgctggccgggcgcagtggctcacgcctgtaatcccagcact

SEQ ID NO: 42732 - DNA, 120 bp, synthetic construct
  source 1..120: mol_type = other DNA
ccctgatgaacatcgatgcaaaaatcctcaataaaatactggcaaaccaaatgcagcagcacatcaaaaaccttatccgccatgatcaagctggcttcattcctgggatgcaatgctggt

SEQ ID NO: 42733 - DNA, 120 bp, synthetic construct
  source 1..120: mol_type = other DNA
tggaaaccatcattctcagcaaactatcacaaggacaaaaagacacacaccacatgttctcactcataggtgggaagtgaacaatgagaacagctggacacaggaaggggaacatcacac

SEQ ID NO: 42734 - DNA, 120 bp, synthetic construct
  source 1..120: mol_type = other DNA
ggtagtctgaccatcaattctatttcacacagcattaagtcactatcactgattacttagaagggtgatgctgtaactccaagtatagttcaggtactgctatcctagacacgaggacct

SEQ ID NO: 42735 - DNA, 120 bp, synthetic construct
  source 1..120: mol_type = other DNA
cagtaagcaactgcactccagcccgggcaacagagtgacaccttgtctcaaaaaaaaaaaaaaaaaaaagatatttttcattaagaaaaaaagtcctcttaatctagtagaataaaacta

SEQ ID NO: 42736 - DNA, 120 bp, synthetic construct; identical to SEQ ID NO: 35134
  source 1..120: mol_type = other DNA

SEQ ID NO: 42737 - DNA, 120 bp, synthetic construct; identical to SEQ ID NO: 35135
  source 1..120: mol_type = other DNA

SEQ ID NO: 42738 - DNA, 120 bp, synthetic construct; identical to SEQ ID NO: 35136
  source 1..120: mol_type = other DNA

SEQ ID NO: 42739 - DNA, 120 bp, synthetic construct
  source 1..120: mol_type = other DNA
ccagaaggcagaggttgcagtgagccgagatcacgccattgcactccagtctaggcgacagagcaagacttggtctccaaaaaaataaataaacaaatcaaaaaacaaaaaaaaaagaga

SEQ ID NO: 42740 - DNA, 120 bp, synthetic construct; identical to SEQ ID NO: 21431
  source 1..120: mol_type = other DNA

SEQ ID NO: 42741 - DNA, 120 bp, synthetic construct; identical to SEQ ID NO: 21432
  source 1..120: mol_type = other DNA

SEQ ID NO: 42742 - DNA, 120 bp, synthetic construct; identical to SEQ ID NO: 21433
  source 1..120: mol_type = other DNA

SEQ ID NO: 42743 - DNA, 120 bp, synthetic construct; identical to SEQ ID NO: 12273
  source 1..120: mol_type = other DNA

SEQ ID NO: 42744 - DNA, 120 bp, synthetic construct; identical to SEQ ID NO: 12274
  source 1..120: mol_type = other DNA

SEQ ID NO: 42745 - DNA, 120 bp, synthetic construct; identical to SEQ ID NO: 12275
  source 1..120: mol_type = other DNA

SEQ ID NO: 42746 - DNA, 120 bp, synthetic construct; identical to SEQ ID NO: 12276
  source 1..120: mol_type = other DNA

SEQ ID NO: 42747 - DNA, 120 bp, synthetic construct; identical to SEQ ID NO: 12277
  source 1..120: mol_type = other DNA

SEQ ID NO: 42748 - DNA, 120 bp, synthetic construct; identical to SEQ ID NO: 12278
  source 1..120: mol_type = other DNA

SEQ ID NO: 42749 - DNA, 120 bp, synthetic construct; identical to SEQ ID NO: 12279
  source 1..120: mol_type = other DNA

SEQ ID NO: 42750 - DNA, 120 bp, synthetic construct
  source 1..120: mol_type = other DNA
tctgtccccagcttgcagatggccaatcgtgggactttgccttgtaattgcataagccaattttccctaatagactcctctctctctctctctctctctctctctatatatatatatata

SEQ ID NO: 42751 - DNA, 120 bp, synthetic construct; identical to SEQ ID NO: 29076
  source 1..120: mol_type = other DNA

SEQ ID NO: 42752 - DNA, 120 bp, synthetic construct
  source 1..120: mol_type = other DNA
tgagatgatgagtatcttaagtaaggacaaaaacaagtgatgctaaagatatatgtaaagattttggataaaagtattccatgaaggccgggcgcggtggctcacgcctgtaatcccagc

SEQ ID NO: 42753 - DNA, 120 bp, synthetic construct
  source 1..120: mol_type = other DNA
gaattcccatcgattaaaaaaaaataactgtaagtcagccttgggcaggtccttcaggaggtgtaccttccaaaagaaggcattgttgtcctaggagatgacagctgcatgtatgttagt

SEQ ID NO: 42754 - DNA, 120 bp, synthetic construct; identical to SEQ ID NO: 29078
  source 1..120: mol_type = other DNA

SEQ ID NO: 42755 - DNA, 120 bp, synthetic construct
  source 1..120: mol_type = other DNA
caaatgctggcctattatttgagccaattcgtagaggcagtccaaacctagggatgaaattttgaagaagtacacaggttacttcaggagctttttcagttcatgttggataagcctcca

SEQ ID NO: 42756 - DNA, 120 bp, synthetic construct; identical to SEQ ID NO: 7887
  source 1..120: mol_type = other DNA

SEQ ID NO: 42757 - DNA, 120 bp, synthetic construct; identical to SEQ ID NO: 7886
  source 1..120: mol_type = other DNA

SEQ ID NO: 42758 - DNA, 120 bp, synthetic construct
  source 1..120: mol_type = other DNA
actttatttacattggtacccttttgagccccttttttcaacctttcaattaatgcctctcggtaccctcttagcctttccatatctggtccttcatttggatcctattgagggtccgtt

SEQ ID NO: 42759 - DNA, 120 bp, synthetic construct
  source 1..120: mol_type = other DNA
gtggctgaacaccaggaaggaactggcacttggagtccagacatctgaaacttagtaagacaagtcttttcaacttgccccactccacctgagcggaagcttggcctgatcgctcatggt

SEQ ID NO: 42760 - DNA, 120 bp, synthetic construct
  source 1..120: mol_type = other DNA
agatcgagaattgcatactaaaaaactttacataaattaaaaggatgaatacatttaccggtataaatgcgaaccgcttccaactcaaggcaagtaacagcccacggtgctctggtagat

SEQ ID NO: 42761 - DNA, 120 bp, synthetic construct; identical to SEQ ID NO: 7883
  source 1..120: mol_type = other DNA

SEQ ID NO: 42762 - DNA, 120 bp, synthetic construct
  source 1..120: mol_type = other DNA
tttacaacgaagttcaattagctacatgtctacaacaaaaggcatatatcactccttattcagatcactctcgtaaaaaaattacctgagtagcatcattatagttctcgatatctccac

SEQ ID NO: 42763 - DNA, 120 bp, synthetic construct
  source 1..120: mol_type = other DNA
aagaaacataatgtcaaagttacctgttgtcctgtgagaatacttacctaatttttagtcttgtacatcaatgataataataacagctcacaggaatacgatatttactatctgactgac

SEQ ID NO: 42764 - DNA, 120 bp, synthetic construct
  source 1..120: mol_type = other DNA
gattacacacgtgtgtttgtttatgaggtgtgtgtgtatatatatgtgagtgtgtgtttgtgtgtgtgtgtgtatatatatatatcttacagagtaaccatctaattagagaaagaattt

SEQ ID NO: 42765 - DNA, 120 bp, synthetic construct
  source 1..120: mol_type = other DNA
agggattaaaatatatacttcgtaccttcctcaggtttaattggaagaatatagatgccaacccttgtagagaacttaaaacatcatctgcccgtagtgagaacaatataaatgtctttt

SEQ ID NO: 42766 - DNA, 120 bp, synthetic construct
  source 1..120: mol_type = other DNA
ataatcccagcactgtgtgcggccagctgagaaggtcagctgacctgaggagttcaagacctatctgggcaagctagcaagaccttgcctctactgaaaattaaaaaaaaaaaaaaatta

SEQ ID NO: 42767 - DNA, 120 bp, synthetic construct
  source 1..120: mol_type = other DNA
tttttttttctgttcattgacatttatcatatctgaaaaatcatgtagtcagtggagcgagaagacaatagagatcaaaattgggtagaagcaaaaggatgatggctgttactccttcgt

SEQ ID NO: 42768 - DNA, 120 bp, synthetic construct; identical to SEQ ID NO: 7881
  source 1..120: mol_type = other DNA

SEQ ID NO: 42769 - DNA, 120 bp, synthetic construct
  source 1..120: mol_type = other DNA
gatgcagataaagtctgactttttccattctagttagggcatggttaatttcatatgtccccaggccttaccaagttgtaaagtaggcagcctacaaccttgaaatatttagcaagcctt

SEQ ID NO: 42770 - DNA, 120 bp, synthetic construct
  source 1..120: mol_type = other DNA
aaagtcagttgagagaaaggaagatttcagaaaggcagttagagtttttcatggcggagcacgagatgattaaacgtcacacagttgttaactggaaagtattcatcacccaggctggga

SEQ ID NO: 42771 - DNA, 120 bp, synthetic construct
  source 1..120: mol_type = other DNA
aacttcaggctctgaagtctaaagaataactcaaggggaatgcaggcttgaagatggggtgttacccatgcataaaaagaggggagtagaaggtgtcccttagtctcctttcaacttttg

SEQ ID NO: 42772 - DNA, 120 bp, synthetic construct
  source 1..120: mol_type = other DNA
gtagtcaaacttgttaacttctgtccctaagagatctaaattcctattttaaatgaaattcaattagctacatgtctacaagaaaaggcatatattactcttttattcagatcactctcg

SEQ ID NO: 42773 - DNA, 120 bp, synthetic construct
  source 1..120: mol_type = other DNA
atatctgaggaaagtcattacaatacatgtaatatatttccaatttactgatttaaaggcgtatggatttaatttttaaatacactttcaaagctgttatgcacagttccatagtccagg

SEQ ID NO: 42774 - DNA, 120 bp, synthetic construct; identical to SEQ ID NO: 7878
  source 1..120: mol_type = other DNA

SEQ ID NO: 42775 - DNA, 120 bp, synthetic construct; identical to SEQ ID NO: 7879
  source 1..120: mol_type = other DNA

SEQ ID NO: 42776 - DNA, 120 bp, synthetic construct
  source 1..120: mol_type = other DNA
gttacccatgcataaaaagaggggagtagaaggtgtcccttagtctcctttcaacttttgaagtgacccaggttgaagagaaagattacaggggtgtccctcttctctttcctcccatct

SEQ ID NO: 42777 - DNA, 120 bp, synthetic construct; identical to SEQ ID NO: 7880
  source 1..120: mol_type = other DNA

SEQ ID NO: 42778 - DNA, 120 bp, synthetic construct; identical to SEQ ID NO: 42769
  source 1..120: mol_type = other DNA

SEQ ID NO: 42779 - DNA, 120 bp, synthetic construct; identical to SEQ ID NO: 7881
  source 1..120: mol_type = other DNA

SEQ ID NO: 42780 - DNA, 120 bp, synthetic construct; identical to SEQ ID NO: 42767
  source 1..120: mol_type = other DNA

SEQ ID NO: 42781 - DNA, 120 bp, synthetic construct; identical to SEQ ID NO: 42766
  source 1..120: mol_type = other DNA

SEQ ID NO: 42782 - DNA, 120 bp, synthetic construct; identical to SEQ ID NO: 7882
  source 1..120: mol_type = other DNA

SEQ ID NO: 42783 - DNA, 120 bp, synthetic construct
  source 1..120: mol_type = other DNA
gtgtgtatatatatgtgagtgtgtgtttgtgtgtgtgtgtgtatatatatatatcttacagagtaaccatctaattagagaaagaatttaatcttcagatgccatgccttacagaaagag

SEQ ID NO: 42784 - DNA, 120 bp, synthetic construct
  source 1..120: mol_type = other DNA
aggcaggagaattccttgaggcctggagtttgggaccatcctggacgatatagcaagaccctgtctctaaagaacaaagcacaacaagtctaaaataactcagaaatagctgaaagctaa

SEQ ID NO: 42785 - DNA, 120 bp, synthetic construct
  source 1..120: mol_type = other DNA
gtgatctgaataaggagtgatatatgccttttgttgtagacatgtagctaattgaacttcgttgtaaatatgaatttagatctcttagggacagaggttaacaagtttgactactttaag

SEQ ID NO: 42786 - DNA, 120 bp, synthetic construct; identical to SEQ ID NO: 7883
  source 1..120: mol_type = other DNA

SEQ ID NO: 42787 - DNA, 120 bp, synthetic construct; identical to SEQ ID NO: 7884
  source 1..120: mol_type = other DNA

SEQ ID NO: 42788 - DNA, 120 bp, synthetic construct
  source 1..120: mol_type = other DNA
tctttggatcccatccctcaggctggccagagtccctggcagcctgagggatgccccggccttactccacaaggcatgcctaatctgcctaaggagctgcctcggccgtccatcagttat

SEQ ID NO: 42789 - DNA, 120 bp, synthetic construct; identical to SEQ ID NO: 7885
  source 1..120: mol_type = other DNA

SEQ ID NO: 42790 - DNA, 120 bp, synthetic construct; identical to SEQ ID NO: 7886
  source 1..120: mol_type = other DNA

SEQ ID NO: 42791 - DNA, 120 bp, synthetic construct; identical to SEQ ID NO: 7887
  source 1..120: mol_type = other DNA

SEQ ID NO: 42792 - DNA, 120 bp, synthetic construct; identical to SEQ ID NO: 42755
  source 1..120: mol_type = other DNA

SEQ ID NO: 42793 - DNA, 120 bp, synthetic construct; identical to SEQ ID NO: 42755
  source 1..120: mol_type = other DNA

SEQ ID NO: 42794 - DNA, 120 bp, synthetic construct; identical to SEQ ID NO: 7887
  source 1..120: mol_type = other DNA

SEQ ID NO: 42795 - DNA, 120 bp, synthetic construct; identical to SEQ ID NO: 7886
  source 1..120: mol_type = other DNA

SEQ ID NO: 42796 - DNA, 120 bp, synthetic construct; identical to SEQ ID NO: 42758
  source 1..120: mol_type = other DNA

SEQ ID NO: 42797 - DNA, 120 bp, synthetic construct; identical to SEQ ID NO: 42759
  source 1..120: mol_type = other DNA

SEQ ID NO: 42798 - DNA, 120 bp, synthetic construct; identical to SEQ ID NO: 42760
  source 1..120: mol_type = other DNA

SEQ ID NO: 42799 - DNA, 120 bp, synthetic construct; identical to SEQ ID NO: 7883
  source 1..120: mol_type = other DNA

SEQ ID NO: 42800 - DNA, 120 bp, synthetic construct; identical to SEQ ID NO: 42762
  source 1..120: mol_type = other DNA

SEQ ID NO: 42801 - DNA, 120 bp, synthetic construct; identical to SEQ ID NO: 42763
  source 1..120: mol_type = other DNA

SEQ ID NO: 42802 - DNA, 120 bp, synthetic construct; identical to SEQ ID NO: 42764
  source 1..120: mol_type = other DNA

SEQ ID NO: 42803 - DNA, 120 bp, synthetic construct; identical to SEQ ID NO: 42765
  source 1..120: mol_type = other DNA

SEQ ID NO: 42804 - DNA, 120 bp, synthetic construct; identical to SEQ ID NO: 42766
  source 1..120: mol_type = other DNA

SEQ ID NO: 42805 - DNA, 120 bp, synthetic construct; identical to SEQ ID NO: 42767
  source 1..120: mol_type = other DNA

SEQ ID NO: 42806 - DNA, 120 bp, synthetic construct; identical to SEQ ID NO: 7881
  source 1..120: mol_type = other DNA

SEQ ID NO: 42807 - DNA, 120 bp, synthetic construct; identical to SEQ ID NO: 42769
  source 1..120: mol_type = other DNA

SEQ ID NO: 42808 - DNA, 120 bp, synthetic construct; identical to SEQ ID NO: 42770
  source 1..120: mol_type = other DNA

SEQ ID NO: 42809 - DNA, 120 bp, synthetic construct
  source 1..120: mol_type = other DNA
ctaccttgtttgtcttcaaaagcttcatagagagtacaggctttctcctggtgacccactgaaatttccaaaacaataacctttccactctcatctgagttttgtcttcccaaagtgggc

SEQ ID NO: 42810 - DNA, 120 bp, synthetic construct
  source 1..120: mol_type = other DNA
aacatttttacctcaacaggtcagagattgtcgtctgactggtcttcttgatcttgcactggagaaggattacgtgcgttctaagattgccgaatatatgaaccatctcattgacattgg

SEQ ID NO: 42811 - DNA, 120 bp, synthetic construct
  source 1..120: mol_type = other DNA
aacttattggttaaaatgctttaaagtccttacacaaaatgttattgtttcctaaatttctactaggtaattgatctgggtggtgagccaattaaaagcagtgactactttggtaatggc

SEQ ID NO: 42812 - DNA, 120 bp, synthetic construct
  source 1..120: mol_type = other DNA
aggaaaagcatttaattagagaaagaatttaatcttcagatgccatgccttacagagagagatgcacagttaagttactctcaaactgttgtgaaatgatacatcaacgtatatcttatt

SEQ ID NO: 42813 - DNA, 120 bp, synthetic construct
  source 1..120: mol_type = other DNA
caattgagctgagttaaatagggaaagtatcatataagaggaaggaaatgatatgtactaaagaatagaaatttagagagtattccaagaaaggtaagaatgagaaaaatatttgggagt

SEQ ID NO: 42814 - DNA, 120 bp, synthetic construct
  source 1..120: mol_type = other DNA
agttcaagacctatctgggcaagctagcaagacctcgtctttactgaaaattttttaaaaattagctggttgcggtggtgcacaccaacagtcttagctacttaggaggctgagatagga

SEQ ID NO: 42815 - DNA, 120 bp, synthetic construct
  source 1..120: mol_type = other DNA
aatagagatcaaaattgggcagaagcaaaaggatgatggctgttactccttcgttctttttttttcataagtgctttctgttgtaagcagaatcctttctgtgcacccttgcagtatcat

SEQ ID NO: 42816 - DNA, 120 bp, synthetic construct
  source 1..120: mol_type = other DNA
tcaactttgatgttttggtaatattttcactactaaccaggaaattgctaggttttctgtaaggttacttttggtcctagaaagctatttccacctactagagaggcatatgggttttct

SEQ ID NO: 42817 - DNA, 120 bp, synthetic construct
  source 1..120: mol_type = other DNA
tgcagataaagtctgactttttccatcctagttaggggcatggttaatttcatatgtccccaggccttatcaagttgtaaagtaggcagtatacaaccttgaaacatttagcaaacctgg

SEQ ID NO: 42818 - DNA, 120 bp, synthetic construct
  source 1..120: mol_type = other DNA
atggaggaggaagagatgattaaaggtcatacagctattaaattgaaagtattcatcacccaagctaggattgaacctgggccaccattgtaaaatggcaatggctaaaaaagtcctgcc

SEQ ID NO: 42819 - DNA, 120 bp, synthetic construct
  source 1..120: mol_type = other DNA
tgttcaaattcattcagcagtgctgagcttttacatgaaggaaaagcaactgaaatggagagggatgagggtattcacttggggtgaaatatcttctcatagagtgccatgaatgactgc

SEQ ID NO: 42820 - DNA, 120 bp, synthetic construct
  source 1..120: mol_type = other DNA
gatggttactagaggctgagaagggtggatgggaagcaagtgtgaatgttcaatgagtacaaaaaacagaagaatgaataagacctaatatttgacagcacaacagggtgactatcgtca

SEQ ID NO: 42821 - DNA, 120 bp, synthetic construct
  source 1..120: mol_type = other DNA
aacccaatgtacaaaaactctcagtgaggatttctgtcttaagtttcaacggattgaggtgagatcagtgcctgttccacctttttcctccctgtcctaggtgacttgataacatttata

SEQ ID NO: 42822 - DNA, 120 bp, synthetic construct
  source 1..120: mol_type = other DNA
ccttctctcacacatacatgtccctcgtgtccctttgtgtctccagggtcttctatttccacgtaatcttaatttttcatcacatcctggactcatgagtaattaatctgttattctccc

SEQ ID NO: 42823 - DNA, 120 bp, synthetic construct
  source 1..120: mol_type = other DNA
cctctcatggtttcccaatctcttgagaaaaagaaagttcttgcctcttgcagtctttctcattagttgaattataccagcagttcagcttctgatcctgtcgagaaatccaccatgaag

SEQ ID NO: 42824 - DNA, 120 bp, synthetic construct
  source 1..120: mol_type = other DNA
actaatcttaccatatctaaactcaaagttttcacgataacactgccttattagggactgaattttttaaagtatgaagatcttacatcaagtccaaattgattcatctgatagtctcgc

SEQ ID NO: 42825 - DNA, 120 bp, synthetic construct
  source 1..120: mol_type = other DNA
cactgcactccagcctgagtaacagagagagatactgtatcaaaaaaaaagaagagaaaagaaattgccaaggatggagaggacatgaacaacattatcaaccaaatggaatgaactgac

SEQ ID NO: 42826 - DNA, 120 bp, synthetic construct; identical to SEQ ID NO: 21292
  source 1..120: mol_type = other DNA

SEQ ID NO: 42827 - DNA, 120 bp, synthetic construct
  source 1..120: mol_type = other DNA
tgcatgcacaagttggctcttgtgcacaggtggtctggctctcaacctatctcagctttcaacacgccttcctcactaagcttaatcatttctagtttttgatgtaaagtgagaaacctg

SEQ ID NO: 42828 - DNA, 120 bp, synthetic construct; identical to SEQ ID NO: 21293
  source 1..120: mol_type = other DNA

SEQ ID NO: 42829 - DNA, 120 bp, synthetic construct; identical to SEQ ID NO: 21294
  source 1..120: mol_type = other DNA

SEQ ID NO: 42830 - DNA, 120 bp, synthetic construct; identical to SEQ ID NO: 21295
  source 1..120: mol_type = other DNA

SEQ ID NO: 42831 - DNA, 120 bp, synthetic construct; identical to SEQ ID NO: 21296
  source 1..120: mol_type = other DNA

SEQ ID NO: 42832 - DNA, 120 bp, synthetic construct; identical to SEQ ID NO: 21297
  source 1..120: mol_type = other DNA

SEQ ID NO: 42833 - DNA, 120 bp, synthetic construct; identical to SEQ ID NO: 21298
  source 1..120: mol_type = other DNA

SEQ ID NO: 42834 - DNA, 120 bp, synthetic construct; identical to SEQ ID NO: 21299
  source 1..120: mol_type = other DNA

SEQ ID NO: 42835 - DNA, 120 bp, synthetic construct
  source 1..120: mol_type = other DNA
tatatatatactttttttttttttttttttgagatggagtctcattctgtgacccaggctggagtgcagtggcatgatcttggctcacggcaacctacacctcccaggttcaagtgattc

SEQ ID NO: 42836 - DNA, 120 bp, synthetic construct
  source 1..120: mol_type = other DNA
attcagacagtgccgaacagtacactgttgtttctgctttactagttacacatgcaaaataaggtttttcccagtgagttcagcttttaatctaaagtaccatggactggtctccatatc

SEQ ID NO: 42837 - DNA, 120 bp, synthetic construct; identical to SEQ ID NO: 21302
  source 1..120: mol_type = other DNA

SEQ ID NO: 42838 - DNA, 120 bp, synthetic construct; identical to SEQ ID NO: 21303
  source 1..120: mol_type = other DNA

SEQ ID NO: 42839 - DNA, 120 bp, synthetic construct; identical to SEQ ID NO: 21304
  source 1..120: mol_type = other DNA

SEQ ID NO: 42840 - DNA, 120 bp, synthetic construct; identical to SEQ ID NO: 21305
  source 1..120: mol_type = other DNA

SEQ ID NO: 42841 - DNA, 120 bp, synthetic construct; identical to SEQ ID NO: 21306
  source 1..120: mol_type = other DNA

SEQ ID NO: 42842 - DNA, 120 bp, synthetic construct; identical to SEQ ID NO: 21307
  source 1..120: mol_type = other DNA

SEQ ID NO: 42843 - DNA, 120 bp, synthetic construct
  source 1..120: mol_type = other DNA
attcctctacttaagaactattactcgccgggtgtggtggctcacgcctgtaatcccagcactttgggaagccgtggcaggtggatcacctgaggtctggagtttgagactagcctgacc

SEQ ID NO: 42844 - DNA, 120 bp, synthetic construct
  source 1..120: mol_type = other DNA
tcttactgtctcctgtctctgaagagaaggaggaagtaaaagctgaaaaagattaaccccgcactctaaccacatgtgctatctatagatcttaatctatcatgaccctttcacgtggac

SEQ ID NO: 42845 - DNA, 120 bp, synthetic construct; identical to SEQ ID NO: 21227
  source 1..120: mol_type = other DNA

SEQ ID NO: 42846 - DNA, 120 bp, synthetic construct
  source 1..120: mol_type = other DNA
tcggctcactgcaatctctgcctccctggttcaagtgattctcctgccttagcctcccgagtagctgggattacaggcatgtgccaccacacctggctaatttatatatatatatacaca

SEQ ID NO: 42847 - DNA, 120 bp, synthetic construct; identical to SEQ ID NO: 21228
  source 1..120: mol_type = other DNA

SEQ ID NO: 42848 - DNA, 120 bp, synthetic construct; identical to SEQ ID NO: 21229
  source 1..120: mol_type = other DNA

SEQ ID NO: 42849 - DNA, 120 bp, synthetic construct; identical to SEQ ID NO: 21230
  source 1..120: mol_type = other DNA

SEQ ID NO: 42850 - DNA, 120 bp, synthetic construct; identical to SEQ ID NO: 21231
  source 1..120: mol_type = other DNA

SEQ ID NO: 42851 - DNA, 120 bp, synthetic construct
  source 1..120: mol_type = other DNA
gcctcggcctcccaaagtgctgggattacaggcgtgagccactgcgcccagcctcggctgagcattcttaatccaaaaatcccaaatccaaaatgctgtaatgaacatttcctctgagca

SEQ ID NO: 42852 - DNA, 120 bp, synthetic construct; identical to SEQ ID NO: 21232
  source 1..120: mol_type = other DNA

SEQ ID NO: 42853 - DNA, 120 bp, synthetic construct; identical to SEQ ID NO: 21233
  source 1..120: mol_type = other DNA

SEQ ID NO: 42854 - DNA, 120 bp, synthetic construct; identical to SEQ ID NO: 21234
  source 1..120: mol_type = other DNA

SEQ ID NO: 42855 - DNA, 120 bp, synthetic construct; identical to SEQ ID NO: 21235
  source 1..120: mol_type = other DNA

SEQ ID NO: 42856 - DNA, 120 bp, synthetic construct; identical to SEQ ID NO: 21236
  source 1..120: mol_type = other DNA

SEQ ID NO: 42857 - DNA, 120 bp, synthetic construct
  source 1..120: mol_type = other DNA
tcgcgccactgcactccaccctggcgacagagcgagactctgtctcaaagaaagaaaaaacaaaaccgacatttatataatataaattggctgcattttcagattagtgtagtgatttaa

SEQ ID NO: 42858 - DNA, 120 bp, synthetic construct; identical to SEQ ID NO: 21237
  source 1..120: mol_type = other DNA

SEQ ID NO: 42859 - DNA, 120 bp, synthetic construct; identical to SEQ ID NO: 21238
  source 1..120: mol_type = other DNA

SEQ ID NO: 42860 - DNA, 120 bp, synthetic construct; identical to SEQ ID NO: 21239
  source 1..120: mol_type = other DNA

SEQ ID NO: 42861 - DNA, 120 bp, synthetic construct; identical to SEQ ID NO: 21240
  source 1..120: mol_type = other DNA

SEQ ID NO: 42862 - DNA, 120 bp, synthetic construct; identical to SEQ ID NO: 21241
  source 1..120: mol_type = other DNA

SEQ ID NO: 42863 - DNA, 120 bp, synthetic construct; identical to SEQ ID NO: 21242
  source 1..120: mol_type = other DNA

SEQ ID NO: 42864 - DNA, 120 bp, synthetic construct; identical to SEQ ID NO: 21243
  source 1..120: mol_type = other DNA

SEQ ID NO: 42865 - DNA, 120 bp, synthetic construct; identical to SEQ ID NO: 21244
  source 1..120: mol_type = other DNA

SEQ ID NO: 42866 - DNA, 120 bp, synthetic construct; identical to SEQ ID NO: 21245
  source 1..120: mol_type = other DNA

SEQ ID NO: 42867 - DNA, 120 bp, synthetic construct; identical to SEQ ID NO: 21246
  source 1..120: mol_type = other DNA

SEQ ID NO: 42868 - DNA, 120 bp, synthetic construct; identical to SEQ ID NO: 21247
  source 1..120: mol_type = other DNA

SEQ ID NO: 42869 - DNA, 120 bp, synthetic construct
  source 1..120: mol_type = other DNA
attaaaaataaaatcaataaagatcagaaaaaatgacactaacaaattacataaagattcttgtcaccggccaggcgcagtggctcacgcctgtaatcccagcactttgggaggctgagg

SEQ ID NO: 42870 - DNA, 120 bp, synthetic construct; identical to SEQ ID NO: 21248
  source 1..120: mol_type = other DNA

SEQ ID NO: 42871 - DNA, 120 bp, synthetic construct
  source 1..120: mol_type = other DNA
tctactaaaaatacaaaaaattagccgggcgccgtggcgggcgcctatagtcccagctacttggaaggctgaggcaggagaatggcgtgaacccgggaggcggagcttgcagtgagccga

SEQ ID NO: 42872 - DNA, 120 bp, synthetic construct; identical to SEQ ID NO: 21249
  source 1..120: mol_type = other DNA

SEQ ID NO: 42873 - DNA, 120 bp, synthetic construct; identical to SEQ ID NO: 21250
  source 1..120: mol_type = other DNA

SEQ ID NO: 42874 - DNA, 120 bp, synthetic construct; identical to SEQ ID NO: 21251
  source 1..120: mol_type = other DNA

SEQ ID NO: 42875 - DNA, 120 bp, synthetic construct
  source 1..120: mol_type = other DNA
ctcgcagtgagccgagatcgcgccactgcactccagcctgggagacagagcgagacgctgtctcagagaaaaaaaaaatctgtaaatacaaatattttccctgattatgaaatataagtt

SEQ ID NO: 42876 - DNA, 120 bp, synthetic construct; identical to SEQ ID NO: 21252
  source 1..120: mol_type = other DNA

SEQ ID NO: 42877 - DNA, 120 bp, synthetic construct; identical to SEQ ID NO: 21253
  source 1..120: mol_type = other DNA

SEQ ID NO: 42878 - DNA, 120 bp, synthetic construct
  source 1..120: mol_type = other DNA
ctgagaagatttcttagaagatttcttaacatttcaggatgttttcttcaataaaacaataaatattggccgaacacagtggcttacacgcctgtaatcccagcactttgggaggccaag

SEQ ID NO: 42879 - DNA, 120 bp, synthetic construct; identical to SEQ ID NO: 21254
  source 1..120: mol_type = other DNA

SEQ ID NO: 42880 - DNA, 120 bp, synthetic construct; identical to SEQ ID NO: 21255
  source 1..120: mol_type = other DNA

SEQ ID NO: 42881 - DNA, 120 bp, synthetic construct; identical to SEQ ID NO: 21256
  source 1..120: mol_type = other DNA

SEQ ID NO: 42882 - DNA, 120 bp, synthetic construct; identical to SEQ ID NO: 21257
  source 1..120: mol_type = other DNA

SEQ ID NO: 42883 - DNA, 120 bp, synthetic construct; identical to SEQ ID NO: 21258
  source 1..120: mol_type = other DNA

SEQ ID NO: 42884 - DNA, 120 bp, synthetic construct; identical to SEQ ID NO: 21259
  source 1..120: mol_type = other DNA

SEQ ID NO: 42885 - DNA, 120 bp, synthetic construct; identical to SEQ ID NO: 21260
  source 1..120: mol_type = other DNA

SEQ ID NO: 42886 - DNA, 120 bp, synthetic construct; identical to SEQ ID NO: 21261
  source 1..120: mol_type = other DNA

SEQ ID NO: 42887 - DNA, 120 bp, synthetic construct
  source 1..120: mol_type = other DNA
tagttaaatgacttgaatcactagttaggaccagaattcaagttgcaattccctgtgtgattcttttctttttttttttttttttttgagacggagtctcgccttcttgcccaggctgga

SEQ ID NO: 42888 - DNA, 120 bp, synthetic construct; identical to SEQ ID NO: 21262
  source 1..120: mol_type = other DNA

SEQ ID NO: 42889 - DNA, 120 bp, synthetic construct
  source 1..120: mol_type = other DNA
gtattcaaaaaaaaagttttatttttttgttaaaacatctgggccgggtgtgctggctcatgcctgtaatcccagcattttgggaggccgaggcaggtggatcacttgacgtcaggagtt

SEQ ID NO: 42890 - DNA, 120 bp, synthetic construct; identical to SEQ ID NO: 21263
  source 1..120: mol_type = other DNA

SEQ ID NO: 42891 - DNA, 120 bp, synthetic construct; identical to SEQ ID NO: 21264
  source 1..120: mol_type = other DNA

SEQ ID NO: 42892 - DNA, 120 bp, synthetic construct; identical to SEQ ID NO: 21265
  source 1..120: mol_type = other DNA

SEQ ID NO: 42893 - DNA, 120 bp, synthetic construct; identical to SEQ ID NO: 21266
  source 1..120: mol_type = other DNA

SEQ ID NO: 42894 - DNA, 120 bp, synthetic construct; identical to SEQ ID NO: 21267
  source 1..120: mol_type = other DNA

SEQ ID NO: 42895 - DNA, 120 bp, synthetic construct; identical to SEQ ID NO: 21268
  source 1..120: mol_type = other DNA

SEQ ID NO: 42896 - DNA, 120 bp, synthetic construct; identical to SEQ ID NO: 21269
  source 1..120: mol_type = other DNA

SEQ ID NO: 42897 - DNA, 120 bp, synthetic construct; identical to SEQ ID NO: 21270
  source 1..120: mol_type = other DNA

SEQ ID NO: 42898 - DNA, 120 bp, synthetic construct; identical to SEQ ID NO: 21271
  source 1..120: mol_type = other DNA

SEQ ID NO: 42899 - DNA, 120 bp, synthetic construct
  source 1..120: mol_type = other DNA
catgagaatcacttgaacctgggaggcagaggttgcagtgagccaagatcatgccattgcactcccacctgggcagcagacagagactgcatctcaaaaaagaaaaaaaaaaaaggaaac

SEQ ID NO: 42900 - DNA, 120 bp, synthetic construct; identical to SEQ ID NO: 21272
  source 1..120: mol_type = other DNA

SEQ ID NO: 42901 - DNA, 120 bp, synthetic construct; identical to SEQ ID NO: 21273
  source 1..120: mol_type = other DNA

SEQ ID NO: 42902 - DNA, 120 bp, synthetic construct; identical to SEQ ID NO: 21274
  source 1..120: mol_type = other DNA

SEQ ID NO: 42903 - DNA, 120 bp, synthetic construct; identical to SEQ ID NO: 21275
  source 1..120: mol_type = other DNA

SEQ ID NO: 42904 - DNA, 120 bp, synthetic construct; identical to SEQ ID NO: 21276
  source 1..120: mol_type = other DNA

SEQ ID NO: 42905 - DNA, 120 bp, synthetic construct; identical to SEQ ID NO: 21277
  source 1..120: mol_type = other DNA

SEQ ID NO: 42906 - DNA, 120 bp, synthetic construct
  source 1..120: mol_type = other DNA
agctgggactacaggcgcccgccaccatgcccggctaattttttttgtaattttttttttagtagagacagggtttcaccgtattagccaggatggtctcgatctcctgacctcgtgatc

SEQ ID NO: 42907 - DNA, 120 bp, synthetic construct; identical to SEQ ID NO: 21278
  source 1..120: mol_type = other DNA

SEQ ID NO: 42908 - DNA, 120 bp, synthetic construct; identical to SEQ ID NO: 21279
  source 1..120: mol_type = other DNA

SEQ ID NO: 42909 - DNA, 120 bp, synthetic construct; identical to SEQ ID NO: 21280
  source 1..120: mol_type = other DNA

SEQ ID NO: 42910 - DNA, 120 bp, synthetic construct
  source 1..120: mol_type = other DNA
gaggatgcagtgagccaagatcgtaccactgcactcccgtctgggcgacagagtgagaccctgtctcaagaaaaaaaaaaaaaaaaaaagaagaatctaatcaaaaatcttgccctaaac

SEQ ID NO: 42911 - DNA, 120 bp, synthetic construct; identical to SEQ ID NO: 21281
  source 1..120: mol_type = other DNA

SEQ ID NO: 42912 - DNA, 120 bp, synthetic construct; identical to SEQ ID NO: 21282
  source 1..120: mol_type = other DNA

SEQ ID NO: 42913 - DNA, 120 bp, synthetic construct
  source 1..120: mol_type = other DNA
gcctaggagttcaagattacagtcaactacgatagcatcactgcagtccagcgtaggcaacagagtgacaccctgtctcttaaaaaaaaaaagaaaagaaatgaaaatgtatgtccacgg

SEQ ID NO: 42914 - DNA, 120 bp, synthetic construct; identical to SEQ ID NO: 21283
  source 1..120: mol_type = other DNA

SEQ ID NO: 42915 - DNA, 120 bp, synthetic construct; identical to SEQ ID NO: 21284
  source 1..120: mol_type = other DNA

SEQ ID NO: 42916 - DNA, 120 bp, synthetic construct; identical to SEQ ID NO: 21285
  source 1..120: mol_type = other DNA

SEQ ID NO: 42917 - DNA, 120 bp, synthetic construct; identical to SEQ ID NO: 21286
  source 1..120: mol_type = other DNA

SEQ ID NO: 42918 - DNA, 120 bp, synthetic construct
  source 1..120: mol_type = other DNA
gtggcacggtcttggcacactgcaacttctgcctcctgagttcaagcgattctcctacctcagccaccaagtagctgggattacaggcgtctgccactgccccaggctaatttttgtatt

SEQ ID NO: 42919 - DNA, 120 bp, synthetic construct
  source 1..120: mol_type = other DNA
gccactgcactccagaacctgggcgacagagcgagactccgtctcaaaaaaaaaaaaaaaaaaaataccttttagaaggcaaggaatctctatatcaacttggaataccatttaccagca

SEQ ID NO: 42920 - DNA, 120 bp, synthetic construct; identical to SEQ ID NO: 21287
  source 1..120: mol_type = other DNA

SEQ ID NO: 42921 - DNA, 120 bp, synthetic construct; identical to SEQ ID NO: 21288
  source 1..120: mol_type = other DNA

SEQ ID NO: 42922 - DNA, 120 bp, synthetic construct; identical to SEQ ID NO: 21289
  source 1..120: mol_type = other DNA

SEQ ID NO: 42923 - DNA, 120 bp, synthetic construct; identical to SEQ ID NO: 21290
  source 1..120: mol_type = other DNA

SEQ ID NO: 42924 - DNA, 120 bp, synthetic construct; identical to SEQ ID NO: 21291
  source 1..120: mol_type = other DNA

SEQ ID NO: 42925 - DNA, 120 bp, synthetic construct
  source 1..120: mol_type = other DNA
atgtaaaagaacagaaatcacaacaaactgtctctcagaccacaatgcaatcaaatcacaacaaactgtctctcagaccacaatgcaatcaaattacaactcaggattaagaaactcact

SEQ ID NO: 42926 - DNA, 120 bp, synthetic construct
  source 1..120: mol_type = other DNA
caggaccagatggattcacagacaaattctaccagaggtacaaagaggagctggtaccattccttctgaaactattccaatcaatagaaaaagagggaatcctccctacctcatttgatg

SEQ ID NO: 42927 - DNA, 120 bp, synthetic construct
  source 1..120: mol_type = other DNA
ggaggatcatttgaggtcaggagttcgagaccagcctaacatgatgcaaccctgtctctattaaaaatagtaaaaattagctgggtgtggtggtgaatgcctgtaatctcagctactcaa

SEQ ID NO: 42928 - DNA, 120 bp, synthetic construct; identical to SEQ ID NO: 13219
  source 1..120: mol_type = other DNA

SEQ ID NO: 42929 - DNA, 120 bp, synthetic construct; identical to SEQ ID NO: 13220
  source 1..120: mol_type = other DNA

SEQ ID NO: 42930 - DNA, 120 bp, synthetic construct; identical to SEQ ID NO: 6261
  source 1..120: mol_type = other DNA

SEQ ID NO: 42931 - DNA, 120 bp, synthetic construct; identical to SEQ ID NO: 31718
  source 1..120: mol_type = other DNA

SEQ ID NO: 42932 - DNA, 120 bp, synthetic construct; identical to SEQ ID NO: 31719
  source 1..120: mol_type = other DNA

SEQ ID NO: 42933 - DNA, 120 bp, synthetic construct; identical to SEQ ID NO: 31720
  source 1..120: mol_type = other DNA

SEQ ID NO: 42934 - DNA, 120 bp, synthetic construct; identical to SEQ ID NO: 25755
  source 1..120: mol_type = other DNA

SEQ ID NO: 42935 - DNA, 120 bp, synthetic construct; identical to SEQ ID NO: 25756
  source 1..120: mol_type = other DNA

SEQ ID NO: 42936 - DNA, 120 bp, synthetic construct; identical to SEQ ID NO: 25757
  source 1..120: mol_type = other DNA

SEQ ID NO: 42937 - DNA, 120 bp, synthetic construct; identical to SEQ ID NO: 25758
  source 1..120: mol_type = other DNA

SEQ ID NO: 42938 - DNA, 120 bp, synthetic construct; identical to SEQ ID NO: 25759
  source 1..120: mol_type = other DNA

SEQ ID NO: 42939 - DNA, 120 bp, synthetic construct; identical to SEQ ID NO: 25760
  source 1..120: mol_type = other DNA

SEQ ID NO: 42940 - DNA, 120 bp, synthetic construct; identical to SEQ ID NO: 25761
  source 1..120: mol_type = other DNA

SEQ ID NO: 42941 - DNA, 120 bp, synthetic construct; identical to SEQ ID NO: 10780
  source 1..120: mol_type = other DNA

SEQ ID NO: 42942 - DNA, 120 bp, synthetic construct
  source 1..120: mol_type = other DNA
cattaggagaaatacctaatgtagatggtggattgatgggtgcatcaaactccatggtacgtgtatacctaagtaacaaacctgcacattctgcacatgtaccccagaacttaaagtata

SEQ ID NO: 42943 - DNA, 120 bp, synthetic construct; identical to SEQ ID NO: 10781
  source 1..120: mol_type = other DNA

SEQ ID NO: 42944 - DNA, 120 bp, synthetic construct
  source 1..120: mol_type = other DNA
agaaaattaacaaggatattcaggacctgaactcagctctggaccaaacagacctaatagacatccacagaactctccacccaaatcaacagaatatacattcttctcagcaccacatca

SEQ ID NO: 42945 - DNA, 120 bp, synthetic construct
  source 1..120: mol_type = other DNA
acaaagagagtaaaatacctaggaatccaacttacaggggatgtgaaggacctcttcaaggagaactacaaaccactgctcaatgaaataaaagaggacacaaacaaatggaagaacatt

SEQ ID NO: 42946 - DNA, 120 bp, synthetic construct; identical to SEQ ID NO: 15392
  source 1..120: mol_type = other DNA

SEQ ID NO: 42947 - DNA, 120 bp, synthetic construct; identical to SEQ ID NO: 15393
  source 1..120: mol_type = other DNA

SEQ ID NO: 42948 - DNA, 120 bp, synthetic construct; identical to SEQ ID NO: 15394
  source 1..120: mol_type = other DNA

SEQ ID NO: 42949 - DNA, 120 bp, synthetic construct; identical to SEQ ID NO: 15395
  source 1..120: mol_type = other DNA

SEQ ID NO: 42950 - DNA, 120 bp, synthetic construct; identical to SEQ ID NO: 26820
  source 1..120: mol_type = other DNA

SEQ ID NO: 42951 - DNA, 120 bp, synthetic construct
  source 1..120: mol_type = other DNA
aaacgcagagcgcctctcctcctccaaaggaatgcagttcctcaccagcaacggaacaaagctggatggagaatgattttgacgagctgagagaagaaggcttcagacgatcaaattact

SEQ ID NO: 42952 - DNA, 120 bp, synthetic construct
  source 1..120: mol_type = other DNA
cctgaaggaagcgctaaacatggaaaggaacaactggtaccagccgctgcaaaatcatgccaaaatgtaaagaccatcgagactaggaagaaactgcatcaactaacgagcaaaatcacc

SEQ ID NO: 42953 - DNA, 120 bp, synthetic construct
  source 1..120: mol_type = other DNA
ataatgaaatgaaggcagaaataaagatgttctttgaaaccaacaagaacaaagacaccacataccagaatctctgggacgcattcaaagcagtgtgtagagggaaatttatagcactaa

SEQ ID NO: 42954 - DNA, 120 bp, synthetic construct
  source 1..120: mol_type = other DNA
gataccaaagccgggcagagacacaaccaaaaaagagaattttagaccaatatccttgatgaacattgatgcaaaaatcctcaataaaatactggcaaaccgaatccagcagcacatcaa

SEQ ID NO: 42955 - DNA, 120 bp, synthetic construct
  source 1..120: mol_type = other DNA
cttcacagaattggaaaaaactactttaaagttcatatggaaccaaaaaacagtccgcatcgccaagtcaatcctaagccaaaagaacaaagctggaggcatcacactacctgacttcaa

SEQ ID NO: 42956 - DNA, 120 bp, synthetic construct
  source 1..120: mol_type = other DNA
atctagaactagaaataccatttgacccagccatcccaatactgggtatatacccaaatgactataaatcatgctggtataaagacacatgcacacgtatgtttattgcggcattattca

SEQ ID NO: 42957 - DNA, 120 bp, synthetic construct; identical to SEQ ID NO: 26821
  source 1..120: mol_type = other DNA

SEQ ID NO: 42958 - DNA, 120 bp, synthetic construct; identical to SEQ ID NO: 18302
  source 1..120: mol_type = other DNA

SEQ ID NO: 42959 - DNA, 120 bp, synthetic construct
  source 1..120: mol_type = other DNA
ggtgtggtgtggtgctgaaaaaaatgtatattctgttgatttggggtggagagttctgtagatgtctattaggtccgcttggtgcagagctgagttcaattcctgggtatctttgttgac

SEQ ID NO: 42960 - DNA, 120 bp, synthetic construct
  source 1..120: mol_type = other DNA
aacccgacctttctctctggctgcccttaacattttttccttcatttcaactttggtgaatctgacaattatgtgtcttggagttgctcttctcgaggagcatctttgtggcgttctctg

SEQ ID NO: 42961 - DNA, 120 bp, synthetic construct
  source 1..120: mol_type = other DNA
aaaaacacatgaaaaaatgctcatcatcactggccatcagagaaatgcaaatcaaaaccactatgagatatcatctcacaccagttagaatggcagtcattaaaaagtcaggaaacaaca

SEQ ID NO: 42962 - DNA, 120 bp, synthetic construct
  source 1..120: mol_type = other DNA
aacaaaacacatttaaatattgtactagtccagtctcccattattataaagaaatagcttctggatgcggtggctcacgcctgtaattttagcactttgggaggccaacttggcaggtgg

SEQ ID NO: 42963 - DNA, 120 bp, synthetic construct
  source 1..120: mol_type = other DNA
agccaaatcatgagtgaactcccactcgcaattgcttcaaagagaataaaatacctaggaatacaacttacaagggacgtgaaggacctcttcaaggagaactacaaaccactgctcagt

SEQ ID NO: 42964 - DNA, 120 bp, synthetic construct
  source 1..120: mol_type = other DNA
accacaatgagataccatctcacaccagttagaatggcgatcattaaaaagtcagtaaacaacaggtgctggagaggatgtggagaaataggaacacttttacactgttggtgggactgt

SEQ ID NO: 42965 - DNA, 120 bp, synthetic construct
  source 1..120: mol_type = other DNA
gcctcaggagccgatgcaatcaactggaagaaagggtatcagtgatagaagatgaaatgaatgaaatgaagcgagaagggaagtttagagaaaaaagaataaaaagaaacgaacaaagcc

SEQ ID NO: 42966 - DNA, 120 bp, synthetic construct
  source 1..120: mol_type = other DNA
caaagcagtgtgtagagggaaatttatagcactaaatgcccccaagagaaagcaggaaagatccaaaattgacacgctaatatcacaattaaaagaactagaaaagcaagagcaaacaca

SEQ ID NO: 42967 - DNA, 120 bp, synthetic construct
  source 1..120: mol_type = other DNA
taatccagcatgtaaacagaaccaaagacgaaaaccacgtgattatctcaatagatgcagaacaggcctttgataaaattcaacaacccttcatgctaaaaactctcaataaattaggta

SEQ ID NO: 42968 - DNA, 120 bp, synthetic construct
  source 1..120: mol_type = other DNA
tatagatcaatggaacagaacagagccctcagaaataatgccacatatctacaactatctgatctttgacaaacctgagaaaaacaagcaatggggaaaggattccctatttaataaaca

SEQ ID NO: 42969 - DNA, 120 bp, synthetic construct
  source 1..120: mol_type = other DNA
acaccatatgttctcactcataggtgggaattgaacaatgagaacacatggacgcaggaaggggaacatcacactctggggactgttgtggggtggggggagcggggagggatagcatca

SEQ ID NO: 42970 - DNA, 120 bp, synthetic construct; identical to SEQ ID NO: 18304
  source 1..120: mol_type = other DNA

SEQ ID NO: 42971 - DNA, 120 bp, synthetic construct; identical to SEQ ID NO: 18305
  source 1..120: mol_type = other DNA

SEQ ID NO: 42972 - DNA, 120 bp, synthetic construct; identical to SEQ ID NO: 17370
  source 1..120: mol_type = other DNA

SEQ ID NO: 42973 - DNA, 120 bp, synthetic construct; identical to SEQ ID NO: 17371
  source 1..120: mol_type = other DNA

SEQ ID NO: 42974 - DNA, 120 bp, synthetic construct; identical to SEQ ID NO: 17372
  source 1..120: mol_type = other DNA

SEQ ID NO: 42975 - DNA, 120 bp, synthetic construct
  source 1..120: mol_type = other DNA
cttctccatcaattctaaaaggaaactctcccccataatcttctattcttctcaaacacactcagagcagcaacaggaaagaactgatgaaagcggcatttaacccctttcactgctttc

SEQ ID NO: 42976 - DNA, 120 bp, synthetic construct
  source 1..120: mol_type = other DNA
cttgagcccaggagttcaagaccagcctggccaacatggtgaaaccctgccacgccatcagagaaatgcaaatcaaaaccactatgagatatcatctcacaccagttagaatggcaatca

SEQ ID NO: 42977 - DNA, 120 bp, synthetic construct
  source 1..120: mol_type = other DNA
gatcgtgccactgcactccaacgtgggagacatagtgagactctgtctcaatcagtcaatcaataagtgtcataacagaaagctctgagttttttccaccacagctttctatttcttctt

SEQ ID NO: 42978 - DNA, 120 bp, synthetic construct
  source 1..120: mol_type = other DNA
actagtcatgctctttgtcttctgacaaaatcacagcccagaagtacaaagaggaactggtaccattccttctgaaactattccaatcaatagaaaaagatggaatcctccctaactcat

SEQ ID NO: 42979 - DNA, 120 bp, synthetic construct
  source 1..120: mol_type = other DNA
cattgccaagacaatcctaagccaaaagaacaaagctggaggcatcatgctacctgacttcgaactatactacaaggctacagtaaccaaaacagcatgatactggtaccaaaacagaga

SEQ ID NO: 42980 - DNA, 120 bp, synthetic construct
  source 1..120: mol_type = other DNA
cccagtaatgggatggctgggtcaaatggtatttctagttctagatccctgaggaatcgccacactgtcttccacaatggttgagctagtttacagtcccaccaacactgtaaaagtgtt

SEQ ID NO: 42981 - DNA, 120 bp, synthetic construct
  source 1..120: mol_type = other DNA
aagcctcaaacttctgggttcaagtgatcctccaacctcagcttctggaatagttgggactatcagcatgtaccactgtgcctggctgatttttaatttttttgtagatatggagtatca

SEQ ID NO: 42982 - DNA, 120 bp, synthetic construct
  source 1..120: mol_type = other DNA
cgcccagctgggagctttatttttgaaggttggtgaggagaggtagaatgagataaaggtttagtctttccttgaacttttttatttatttatttatttatttatttatttttttattga

SEQ ID NO: 42983 - DNA, 120 bp, synthetic construct
  source 1..120: mol_type = other DNA
gtctcctcacttctcagacggggcggccaggcagagacactcctcacatcccggacagggcggcagggcagaggcactccccacatcccggacgatgggcagccgggcagagacgctcct

SEQ ID NO: 42984 - DNA, 120 bp, synthetic construct
  source 1..120: mol_type = other DNA
agcggatctcttggcagaaactctacaagccagaagagaatggggcccaatattcaacattcttaaagaaaagaattttcaacccagaatttcatatccagccaaactaagcttcataag

SEQ ID NO: 42985 - DNA, 120 bp, synthetic construct
  source 1..120: mol_type = other DNA
tttttgaaaagatcaacaaagttggtagacttctagcaagactaataaagaagaagagagaagaatcaaatagacgcaataaaaaatgataaaggggatatcaccaccgatcccacagaa

SEQ ID NO: 42986 - DNA, 120 bp, synthetic construct
  source 1..120: mol_type = other DNA
aggaaaagaggaagtcaaattgtccctgtttgcagatcacatgattgtatatttagaaaaccccatcgtctcagccaaaaatctccttaaactgaaaagcaacttcagcaaagtctcagg

SEQ ID NO: 42987 - DNA, 120 bp, synthetic construct
  source 1..120: mol_type = other DNA
aactggatcccttccttacactttatagaaaattcaagatggattaaagacttaaatgttagacctaaaaccataaaaaccctagaagaaaacctaggcaataccattcaggacataggc

SEQ ID NO: 42988 - DNA, 120 bp, synthetic construct
  source 1..120: mol_type = other DNA
gcacatatacaccatggaatactatgcagccataaaaaaggatgagttcatgtcctttgtagggacatggatgaagctggaaaccatcattctcagcaaactatcacaagaacaaaaaac

SEQ ID NO: 42989 - DNA, 120 bp, synthetic construct; identical to SEQ ID NO: 27062
  source 1..120: mol_type = other DNA

SEQ ID NO: 42990 - DNA, 120 bp, synthetic construct
  source 1..120: mol_type = other DNA
caggccaacattccgattcaggaaatacagagaacgccacaaagatactcctcgagaagagcgactccaagacacataattgtcagattcaccaaagtcgaaggaaaaaatgttaagggc

SEQ ID NO: 42991 - DNA, 120 bp, synthetic construct
  source 1..120: mol_type = other DNA
ccaagcggacctaatagacatctacagaaccctccaccccaaatcaacagaatatacatttttttcagcaccacaccacacctattccaaaattgaccacatacttggaagtaaagctct

SEQ ID NO: 42992 - DNA, 120 bp, synthetic construct
  source 1..120: mol_type = other DNA
aaaaagagtccaagaccagatggattcacagccgaattctaccagaggtacaaggaggagctggtaccattccttctgaaactattccaatcaatagaaaaagagggaatcctccctaac

SEQ ID NO: 42993 - DNA, 120 bp, synthetic construct
  source 1..120: mol_type = other DNA
tcatgagtaggaagaatcagtatcgtgaaaatggccatactgcccaaggtaatttaccgattcaatgccatccccatcaagctaccaatgactttcttcacagaattggaataactactt

SEQ ID NO: 42994 - DNA, 120 bp, synthetic construct
  source 1..120: mol_type = other DNA
ccagccatcctattactgggtatatacccaaaggactataaatcatgctactataaagacacatgcacacgtatgtttattgcggcattattcacaatagcaaagacttggaaccaaccc

SEQ ID NO: 42995 - DNA, 120 bp, synthetic construct
  source 1..120: mol_type = other DNA
aaaaaaagataacttatccataataaaaaatgatcatgtgaataggcaattcacagaaaaagaaatacaggctgggcatgtgtggtggctcatgcctgtaatcccagcactttgggaggc

SEQ ID NO: 42996 - DNA, 120 bp, synthetic construct
  source 1..120: mol_type = other DNA
tttcttcctagaaggatttagaagagatcattcacaccactggcaggcacatccctagcaaataacagccaacactaggatcacccacggtccaaccagaggaagacccagaaagagcat

SEQ ID NO: 42997 - DNA, 120 bp, synthetic construct
  source 1..120: mol_type = other DNA
gttggtctgcgggagaaggctctaacaagtctctttctactgcattgattcttgaagtcaggatctgatctttagtttttgtactttcatctggtgtcttggaaacgctacgtcctatat

SEQ ID NO: 42998 - DNA, 120 bp, synthetic construct; identical to SEQ ID NO: 13495
  source 1..120: mol_type = other DNA

SEQ ID NO: 42999 - DNA, 120 bp, synthetic construct; identical to SEQ ID NO: 13496
  source 1..120: mol_type = other DNA

SEQ ID NO: 43000 - DNA, 120 bp, synthetic construct; identical to SEQ ID NO: 13497
  source 1..120: mol_type = other DNA

SEQ ID NO: 43001 - DNA, 120 bp, synthetic construct; identical to SEQ ID NO: 13498
  source 1..120: mol_type = other DNA

SEQ ID NO: 43002 - DNA, 120 bp, synthetic construct
  source 1..120: mol_type = other DNA
taaacccgcggacgtcgcattgaaattggaagtatcagtatgatcacaaggtctttgacagatcgatgggtaaagatgtgagaaacagctaggtctgaacactgggttataatgttccat

SEQ ID NO: 43003 - DNA, 120 bp, synthetic construct
  source 1..120: mol_type = other DNA
tggcagagaggatcgctgcggagtggcaccccggggtatcagtgtgcaagtttaaccatttgagttatttcagtttctggtaattacaaataaagttgctatgaacattaaatatgggtt

SEQ ID NO: 43004 - DNA, 120 bp, synthetic construct
  source 1..120: mol_type = other DNA
aaaaaaaaaaagtggtagggccgagacacaaactcacacaattggacaggaatccccactcaatcatcagaaagcacctctccgcagtgactaacagtctgacaatttagagtaaaaaca

SEQ ID NO: 43005 - DNA, 120 bp, synthetic construct; identical to SEQ ID NO: 22210
  source 1..120: mol_type = other DNA

SEQ ID NO: 43006 - DNA, 120 bp, synthetic construct; identical to SEQ ID NO: 22211
  source 1..120: mol_type = other DNA

SEQ ID NO: 43007 - DNA, 120 bp, synthetic construct
  source 1..120: mol_type = other DNA
ggttgcagtgagccaagatcacgccacggcactccagcctcggtgacagagtgagactctgtgcctgcccccaccccccccccaaaaaaattaaacacttctccttaggtagtggctgac

SEQ ID NO: 43008 - DNA, 120 bp, synthetic construct; identical to SEQ ID NO: 22212
  source 1..120: mol_type = other DNA

SEQ ID NO: 43009 - DNA, 120 bp, synthetic construct
  source 1..120: mol_type = other DNA
cagctgagggtcctgtctgttagaaggaaaactaacaaatagaaaggacatccacaccaaaaacccatctgtacatcaccatcatcaaagaccgaaagtagataaaaccacaaagatggg

SEQ ID NO: 43010 - DNA, 120 bp, synthetic construct
  source 1..120: mol_type = other DNA
ccaggcctgccctaaaagagctcctgaaggaagcgctaaacatggaaaggaacaactgataccagccgctgcaaaatcatgccaaaatgtaaagaccattgagactaggaagaaactgca

SEQ ID NO: 43011 - DNA, 120 bp, synthetic construct
  source 1..120: mol_type = other DNA
gaatctctgggacgcattcaaagcagcgtgtagagggaaatttatagcactaaatgcccacaagagaaagcaggaaagatccaaaattgacaccctaacatcacaattaaaagaactaga

SEQ ID NO: 43012 - DNA, 120 bp, synthetic construct
  source 1..120: mol_type = other DNA
gccagtatcatactgaatgggcaaaaactggaagcattccctttgaaaacgggcacaagacagggatgccctctctcaccactcctattcaacatagtgttggaagttctggccagggca

SEQ ID NO: 43013 - DNA, 120 bp, synthetic construct
  source 1..120: mol_type = other DNA
ccatatgtagaaagctgaaactggatcccttccttacaccttatacaaaaatcaattcaagatggattaaagacttaaacgttagacctaaaaccataaaaaccctagaagaaacctagg

SEQ ID NO: 43014 - DNA, 120 bp, synthetic construct
  source 1..120: mol_type = other DNA
tggattaagaaaatgtggcatatatacaccatggaatactatgcagccataaaaaatgagttcacatcctttgtagggacatggatgaaattggaaatcatcattctcggtaaactatcg

SEQ ID NO: 43015 - DNA, 120 bp, synthetic construct; identical to SEQ ID NO: 11019
  source 1..120: mol_type = other DNA

SEQ ID NO: 43016 - DNA, 120 bp, synthetic construct; identical to SEQ ID NO: 13948
  source 1..120: mol_type = other DNA

SEQ ID NO: 43017 - DNA, 120 bp, synthetic construct
  source 1..120: mol_type = other DNA
ctcaagcaatcttcccaccttggcttcctacagtgctgggattacaggcgtgagccaccacacccgacctacaactttgctgtaaacctaaaatttttcaaaaataaaaagtatattgaa

SEQ ID NO: 43018 - DNA, 120 bp, synthetic construct
  source 1..120: mol_type = other DNA
gagtgtggcgtggagcacagacagagaagatcactggggcgaacaccgagtgtggcggggagcactgagagagagaagatcactggatcaaaccccgagtgtggcgtgggtgaggtgcag

SEQ ID NO: 43019 - DNA, 120 bp, synthetic construct; identical to SEQ ID NO: 17142
  source 1..120: mol_type = other DNA

SEQ ID NO: 43020 - DNA, 120 bp, synthetic construct; identical to SEQ ID NO: 17145
  source 1..120: mol_type = other DNA

SEQ ID NO: 43021 - DNA, 120 bp, synthetic construct; identical to SEQ ID NO: 17146
  source 1..120: mol_type = other DNA

SEQ ID NO: 43022 - DNA, 120 bp, synthetic construct; identical to SEQ ID NO: 17147
  source 1..120: mol_type = other DNA

SEQ ID NO: 43023 - DNA, 120 bp, synthetic construct; identical to SEQ ID NO: 17148
  source 1..120: mol_type = other DNA

SEQ ID NO: 43024 - DNA, 120 bp, synthetic construct
  source 1..120: mol_type = other DNA
gaatcacttgaacccaggaggcggagcttgcagtaagccaagatcgtgccaatgcattatagcctgggcaacagagcaagactccacctcaaaaaataaaaataaaaaaataagaataca

SEQ ID NO: 43025 - DNA, 120 bp, synthetic construct; identical to SEQ ID NO: 17149
  source 1..120: mol_type = other DNA

SEQ ID NO: 43026 - DNA, 120 bp, synthetic construct; identical to SEQ ID NO: 17150
  source 1..120: mol_type = other DNA

SEQ ID NO: 43027 - DNA, 120 bp, synthetic construct; identical to SEQ ID NO: 17151
  source 1..120: mol_type = other DNA

SEQ ID NO: 43028 - DNA, 120 bp, synthetic construct; identical to SEQ ID NO: 17152
  source 1..120: mol_type = other DNA

SEQ ID NO: 43029 - DNA, 120 bp, synthetic construct; identical to SEQ ID NO: 17153
  source 1..120: mol_type = other DNA

SEQ ID NO: 43030 - DNA, 120 bp, synthetic construct; identical to SEQ ID NO: 17154
  source 1..120: mol_type = other DNA

SEQ ID NO: 43031 - DNA, 120 bp, synthetic construct
  source 1..120: mol_type = other DNA
tgcctgattctcctgactcagcctgccgagtgcctgcgattgcaggctcacgccgccacgcctgactggttttggtggagacggggtttcgctgtgttggccaggccggtctccagcccc

SEQ ID NO: 43032 - DNA, 120 bp, synthetic construct
  source 1..120: mol_type = other DNA
aacagctcattgagaacgggccatgatgacagtggcggttttgtggaatagaaagcggggaaaggtggggaaaagattgagaaatcggatggttgccgtgtctgtgtagaaagaagtaga

SEQ ID NO: 43033 - DNA, 120 bp, synthetic construct; identical to SEQ ID NO: 17143
  source 1..120: mol_type = other DNA

SEQ ID NO: 43034 - DNA, 120 bp, synthetic construct; identical to SEQ ID NO: 17144
  source 1..120: mol_type = other DNA

SEQ ID NO: 43035 - DNA, 120 bp, synthetic construct; identical to SEQ ID NO: 17126
  source 1..120: mol_type = other DNA

SEQ ID NO: 43036 - DNA, 120 bp, synthetic construct; identical to SEQ ID NO: 17127
  source 1..120: mol_type = other DNA

SEQ ID NO: 43037 - DNA, 120 bp, synthetic construct; identical to SEQ ID NO: 17128
  source 1..120: mol_type = other DNA

SEQ ID NO: 43038 - DNA, 120 bp, synthetic construct; identical to SEQ ID NO: 17129
  source 1..120: mol_type = other DNA

SEQ ID NO: 43039 - DNA, 120 bp, synthetic construct; identical to SEQ ID NO: 17130
  source 1..120: mol_type = other DNA

SEQ ID NO: 43040 - DNA, 120 bp, synthetic construct
  source 1..120: mol_type = other DNA
tgtgaaccgcctgggggtgctctgcagggagtgtcttctctatctggctgcctttttttttttttttttttttgagacaaggtcttgctctgtagccaaggatggagcacagtggcgcaa

SEQ ID NO: 43041 - DNA, 120 bp, synthetic construct; identical to SEQ ID NO: 17132
  source 1..120: mol_type = other DNA

SEQ ID NO: 43042 - DNA, 120 bp, synthetic construct; identical to SEQ ID NO: 17133
  source 1..120: mol_type = other DNA

SEQ ID NO: 43043 - DNA, 120 bp, synthetic construct; identical to SEQ ID NO: 17134
  source 1..120: mol_type = other DNA

SEQ ID NO: 43044 - DNA, 120 bp, synthetic construct; identical to SEQ ID NO: 17135
  source 1..120: mol_type = other DNA

SEQ ID NO: 43045 - DNA, 120 bp, synthetic construct; identical to SEQ ID NO: 17136
  source 1..120: mol_type = other DNA

SEQ ID NO: 43046 - DNA, 120 bp, synthetic construct; identical to SEQ ID NO: 17137
  source 1..120: mol_type = other DNA

SEQ ID NO: 43047 - DNA, 120 bp, synthetic construct; identical to SEQ ID NO: 17138
  source 1..120: mol_type = other DNA

SEQ ID NO: 43048 - DNA, 120 bp, synthetic construct; identical to SEQ ID NO: 17139
  source 1..120: mol_type = other DNA

SEQ ID NO: 43049 - DNA, 120 bp, synthetic construct; identical to SEQ ID NO: 18787
  source 1..120: mol_type = other DNA

SEQ ID NO: 43050 - DNA, 120 bp, synthetic construct
  source 1..120: mol_type = other DNA
attctagatccctgaggaatcgccacactgacttccacaatggttgaactagtttacagtcccaccaacagtgtaaaagtgttcctgtttctccacattctctccagcacctgttgtttc

SEQ ID NO: 43051 - DNA, 120 bp, synthetic construct
  source 1..120: mol_type = other DNA
tgatggggatggcattgaatctataaattaccttgggcagtatggccgttgtcatgatattgattcttcctacccatgagcatggaatgttcttccatttgtttgtatcctcttttattt

SEQ ID NO: 43052 - DNA, 120 bp, synthetic construct
  source 1..120: mol_type = other DNA
aggatagttatctcttcttgttgaattgatcgctttaccattctgtaatggccttctttgtctcttttgatctttgttggtttcaagtctgttttatccgagactaggattgcaacccct

SEQ ID NO: 43053 - DNA, 120 bp, synthetic construct
  source 1..120: mol_type = other DNA
ttcttttttctctaaacttcttgcttcatttcattcatttgatcttccgtcacttataccctttcttccagttgatcgcatcggctgctgagacttctgcattcgtcatgtagctctggt

SEQ ID NO: 43054 - DNA, 120 bp, synthetic construct
  source 1..120: mol_type = other DNA
actccaagacacataattgtcagattcaccaaagttgaaatgaaggaaaaaatgttaagggcagccagagagaaaggttgggttacccacaaagggaagcccatcagattaacagctgat

SEQ ID NO: 43055 - DNA, 120 bp, synthetic construct
  source 1..120: mol_type = other DNA
agcactcctcaggaaatgtgaaagaacagaaattataacaaactgtctctcagaccacagtgcaattaaactagaactcaggattaagaaactcactcaaaaccactcagctacatggaa

SEQ ID NO: 43056 - DNA, 120 bp, synthetic construct
  source 1..120: mol_type = other DNA
gaaaataattgtcaacgatttttttttttaatttaggagacagctttctctgttgctcagggtggaatgcagtggcatgtgatcatagctcacggtagccacaaactcttgggctcaagc

SEQ ID NO: 43057 - DNA, 120 bp, synthetic construct
  source 1..120: mol_type = other DNA
agtgcataatgatcaagctaactagcatatttactacttcttactacttcaatcatttttcatttctttgaattgtgaacattcaaaatcttctagctttttaaaaatattcaataaatc

SEQ ID NO: 43058 - DNA, 120 bp, synthetic construct; identical to SEQ ID NO: 32214
  source 1..120: mol_type = other DNA

SEQ ID NO: 43059 - DNA, 120 bp, synthetic construct; identical to SEQ ID NO: 32215
  source 1..120: mol_type = other DNA

SEQ ID NO: 43060 - DNA, 120 bp, synthetic construct
  source 1..120: mol_type = other DNA
tttttcttatttattttttttgagatggagtcacactctgtcatccaggctagagtgcagtggtgccatgtcggctcactgcaacttccacctcctgggttcaagtgattctcctgcctc

SEQ ID NO: 43061 - DNA, 120 bp, synthetic construct; identical to SEQ ID NO: 32180
  source 1..120: mol_type = other DNA

SEQ ID NO: 43062 - DNA, 120 bp, synthetic construct; identical to SEQ ID NO: 32216
  source 1..120: mol_type = other DNA

SEQ ID NO: 43063 - DNA, 120 bp, synthetic construct; identical to SEQ ID NO: 32217
  source 1..120: mol_type = other DNA

SEQ ID NO: 43064 - DNA, 120 bp, synthetic construct; identical to SEQ ID NO: 32218
  source 1..120: mol_type = other DNA

SEQ ID NO: 43065 - DNA, 120 bp, synthetic construct
  source 1..120: mol_type = other DNA
caggagaattacttcagcctagaactttgagcctgcagttaactatgatagcaacattatactgtagcctgggtggcagagtgagaccccatctctcagaaaattcaagtcaaataagat

SEQ ID NO: 43066 - DNA, 120 bp, synthetic construct; identical to SEQ ID NO: 1776
  source 1..120: mol_type = other DNA

SEQ ID NO: 43067 - DNA, 120 bp, synthetic construct
  source 1..120: mol_type = other DNA
acaacaaagtctttcccaagcttgccttcactgacacgtactaagtataataaataataactataagctattttcacctcattaccaagcactccatatattttttttttgcactagtaa

SEQ ID NO: 43068 - DNA, 120 bp, synthetic construct; identical to SEQ ID NO: 32176
  source 1..120: mol_type = other DNA

SEQ ID NO: 43069 - DNA, 120 bp, synthetic construct; identical to SEQ ID NO: 32221
  source 1..120: mol_type = other DNA

SEQ ID NO: 43070 - DNA, 120 bp, synthetic construct; identical to SEQ ID NO: 32222
  source 1..120: mol_type = other DNA

SEQ ID NO: 43071 - DNA, 120 bp, synthetic construct; identical to SEQ ID NO: 32222
  source 1..120: mol_type = other DNA

SEQ ID NO: 43072 - DNA, 120 bp, synthetic construct
  source 1..120: mol_type = other DNA
ccttattattaaatactccatgggatttctcctaatgcaagaggatagatttttatcttaactattagaaagctcagtatgttctgtgtaagagagaccagttaaaactttttgaaaata

SEQ ID NO: 43073 - DNA, 120 bp, synthetic construct; identical to SEQ ID NO: 32176
  source 1..120: mol_type = other DNA

SEQ ID NO: 43074 - DNA, 120 bp, synthetic construct; identical to SEQ ID NO: 32177
  source 1..120: mol_type = other DNA

SEQ ID NO: 43075 - DNA, 120 bp, synthetic construct
  source 1..120: mol_type = other DNA
atctcagattactgcagccttcacctcccaggttcaagcaattctcctgcctcagcctcccgaggagctgggacaacaggcacatgcgaccatgcccaggtaatttttgtatttttagta

SEQ ID NO: 43076 - DNA, 120 bp, synthetic construct; identical to SEQ ID NO: 32219
  source 1..120: mol_type = other DNA

SEQ ID NO: 43077 - DNA, 120 bp, synthetic construct; identical to SEQ ID NO: 32178
  source 1..120: mol_type = other DNA

SEQ ID NO: 43078 - DNA, 120 bp, synthetic construct; identical to SEQ ID NO: 32217
  source 1..120: mol_type = other DNA

SEQ ID NO: 43079 - DNA, 120 bp, synthetic construct; identical to SEQ ID NO: 32179
  source 1..120: mol_type = other DNA

SEQ ID NO: 43080 - DNA, 120 bp, synthetic construct; identical to SEQ ID NO: 32180
  source 1..120: mol_type = other DNA

SEQ ID NO: 43081 - DNA, 120 bp, synthetic construct
  source 1..120: mol_type = other DNA
tttcattataaaagaaaaaagggctgggtgccgtggctcacatctgtaatcccaacactttgggaggctgaggtgggtggattacctgaggtcagaagtacaagaagagcctggccaacg

SEQ ID NO: 43082 - DNA, 120 bp, synthetic construct; identical to SEQ ID NO: 32181
  source 1..120: mol_type = other DNA

SEQ ID NO: 43083 - DNA, 120 bp, synthetic construct
  source 1..120: mol_type = other DNA
aatgacttttactcttcacagaagtaaaataaacacagcatactttgagtgttaagacatcaaatgcattttctcctttaccttacttcacgtttgtttgcatggagaagttaagaccat

SEQ ID NO: 43084 - DNA, 120 bp, synthetic construct; identical to SEQ ID NO: 32182
  source 1..120: mol_type = other DNA

SEQ ID NO: 43085 - DNA, 120 bp, synthetic construct; identical to SEQ ID NO: 32511
  source 1..120: mol_type = other DNA

SEQ ID NO: 43086 - DNA, 120 bp, synthetic construct; identical to SEQ ID NO: 32512
  source 1..120: mol_type = other DNA

SEQ ID NO: 43087 - DNA, 120 bp, synthetic construct
  source 1..120: mol_type = other DNA
cctgtaattccagcacttcgagaggccgaggcgggtagatcatctgaggtgaggagttcgagaccagcctggccaatatgtgaaaccctgtctctactaaaaatacaaaaattagccagg

SEQ ID NO: 43088 - DNA, 120 bp, synthetic construct; identical to SEQ ID NO: 32513
  source 1..120: mol_type = other DNA

SEQ ID NO: 43089 - DNA, 120 bp, synthetic construct; identical to SEQ ID NO: 32514
  source 1..120: mol_type = other DNA

SEQ ID NO: 43090 - DNA, 120 bp, synthetic construct; identical to SEQ ID NO: 32515
  source 1..120: mol_type = other DNA

SEQ ID NO: 43091 - DNA, 120 bp, synthetic construct
  source 1..120: mol_type = other DNA
atattatatatatatatttttttttcagatgaaaagtatgttttcattttatagggaattcattatattcttttttttttttttttgagtcagagtctcgcttctttgcccaggctggtg

SEQ ID NO: 43092 - DNA, 120 bp, synthetic construct
  source 1..120: mol_type = other DNA
aagagaacccatagaatggatcctataaataaatttcagttgcatccataggatggaataatatgtgaccactgaaggtggcagtagatacagaagtacgttgatgtgcaaagatgtatt

SEQ ID NO: 43093 - DNA, 120 bp, synthetic construct; identical to SEQ ID NO: 32516
  source 1..120: mol_type = other DNA

SEQ ID NO: 43094 - DNA, 120 bp, synthetic construct; identical to SEQ ID NO: 32517
  source 1..120: mol_type = other DNA

SEQ ID NO: 43095 - DNA, 120 bp, synthetic construct; identical to SEQ ID NO: 32518
  source 1..120: mol_type = other DNA

SEQ ID NO: 43096 - DNA, 120 bp, synthetic construct; identical to SEQ ID NO: 32519
  source 1..120: mol_type = other DNA

SEQ ID NO: 43097 - DNA, 120 bp, synthetic construct; identical to SEQ ID NO: 32520
  source 1..120: mol_type = other DNA

SEQ ID NO: 43098 - DNA, 120 bp, synthetic construct; identical to SEQ ID NO: 32521
  source 1..120: mol_type = other DNA

SEQ ID NO: 43099 - DNA, 120 bp, synthetic construct; identical to SEQ ID NO: 32522
  source 1..120: mol_type = other DNA

SEQ ID NO: 43100 - DNA, 120 bp, synthetic construct; identical to SEQ ID NO: 32523
  source 1..120: mol_type = other DNA

SEQ ID NO: 43101 - DNA, 120 bp, synthetic construct; identical to SEQ ID NO: 32524
  source 1..120: mol_type = other DNA

SEQ ID NO: 43102 - DNA, 120 bp, synthetic construct; identical to SEQ ID NO: 32525
  source 1..120: mol_type = other DNA

SEQ ID NO: 43103 - DNA, 120 bp, synthetic construct; identical to SEQ ID NO: 32526
  source 1..120: mol_type = other DNA

SEQ ID NO: 43104 - DNA, 120 bp, synthetic construct; identical to SEQ ID NO: 32527
  source 1..120: mol_type = other DNA

SEQ ID NO: 43105 - DNA, 120 bp, synthetic construct
  source 1..120: mol_type = other DNA
tgaggtctcactatattgccgaggccggtctggaacttccgggctcaagtgatcctcctgcctcaacctcccaaaatgctcggatttacaagtgtgagccactgcacctggccttcaaaa

SEQ ID NO: 43106 - DNA, 120 bp, synthetic construct; identical to SEQ ID NO: 32528
  source 1..120: mol_type = other DNA

SEQ ID NO: 43107 - DNA, 120 bp, synthetic construct
  source 1..120: mol_type = other DNA
ccaggctgcattgcagtggtgcgatctcagttaactgcaacctccaccttctaggctcaagcgattctcctgcctcagcctcctgagtagctgaaattacaggtgccagccaccatgccc

SEQ ID NO: 43108 - DNA, 120 bp, synthetic construct; identical to SEQ ID NO: 32529
  source 1..120: mol_type = other DNA

SEQ ID NO: 43109 - DNA, 120 bp, synthetic construct; identical to SEQ ID NO: 32530
  source 1..120: mol_type = other DNA

SEQ ID NO: 43110 - DNA, 120 bp, synthetic construct; identical to SEQ ID NO: 32531
  source 1..120: mol_type = other DNA

SEQ ID NO: 43111 - DNA, 120 bp, synthetic construct; identical to SEQ ID NO: 32532
  source 1..120: mol_type = other DNA

SEQ ID NO: 43112 - DNA, 120 bp, synthetic construct; identical to SEQ ID NO: 32533
  source 1..120: mol_type = other DNA

SEQ ID NO: 43113 - DNA, 120 bp, synthetic construct
  source 1..120: mol_type = other DNA
ggttctgtagtgagacaaaaaaattaataattgtagaaaaataactgagtgtggtggtgtacacctgtagtccctgctacttgggaatttgaggcaggaagattgcttgaacccaggagt

SEQ ID NO: 43114 - DNA, 120 bp, synthetic construct
  source 1..120: mol_type = other DNA
acacctcagccatccaagtagtttaaacaatagagctatgtcaccatagacctgtgtcaccatgctcagctgagttttgtagagacagggttttgccttgttgcccaggctggtctttaa

SEQ ID NO: 43115 - DNA, 120 bp, synthetic construct
  source 1..120: mol_type = other DNA
ctgtcattgatggacatttgggttggttccaagtctttgctattgtaaatagtgccgcagtaaacatacgtgtgcatgtgtctttatagcagcatgatttataatcctttgggtatatac

SEQ ID NO: 43116 - DNA, 120 bp, synthetic construct
  source 1..120: mol_type = other DNA
ttgcccatgctgcagtgtagtggcatgatcttggctcactgcagtatccacctctcaggctcaagtgatcctcccacatcagcttcccaagcagctgggactacaggcgcacaccatcat

SEQ ID NO: 43117 - DNA, 120 bp, synthetic construct
  source 1..120: mol_type = other DNA
aacccgggaggcggggcttgcagtgagcggagataccaccactgcattccaccctgggcgacagagcgagactccgtctcagaaaaaacaaaacaaaaaaagtcatttgatggaatgttt

SEQ ID NO: 43118 - DNA, 120 bp, synthetic construct; identical to SEQ ID NO: 32534
  source 1..120: mol_type = other DNA

SEQ ID NO: 43119 - DNA, 120 bp, synthetic construct; identical to SEQ ID NO: 32535
  source 1..120: mol_type = other DNA

SEQ ID NO: 43120 - DNA, 120 bp, synthetic construct
  source 1..120: mol_type = other DNA
gatgtttctcttttaatgttttgaatagcatgaagttttcagtataaaatttttatacctgtcagggattcaaagcagtgaattttgagactctaagatatttccaatgagttaagtgct

SEQ ID NO: 43121 - DNA, 120 bp, synthetic construct
  source 1..120: mol_type = other DNA
ttgttgtgctgttctcagaaaagaaaactgaaaatagcaaatgatattgtcttatttgacctcttggacatctttgaatgaaactgcaactccagggatactcagatcaaaattcagaac

SEQ ID NO: 43122 - DNA, 120 bp, synthetic construct
  source 1..120: mol_type = other DNA
ggagtagtgtgtttgtggggtagaggacatcatggtcctgcttcagtgaagaaagaacttttacaccttattacaatttgtattactatttacattctaataaaaactttattttcagat

SEQ ID NO: 43123 - DNA, 120 bp, synthetic construct; identical to SEQ ID NO: 32536
  source 1..120: mol_type = other DNA

SEQ ID NO: 43124 - DNA, 120 bp, synthetic construct
  source 1..120: mol_type = other DNA
ttctgggttgggcatggtggctcgtgtctataatcccagcaatttgggacgctgaggcaggtggatcatttgaggtcaggagttcaagaccagcctggccaacaaggtgaaaccccatct

SEQ ID NO: 43125 - DNA, 120 bp, synthetic construct
  source 1..120: mol_type = other DNA
tgagtagctgggactacaagcacatatcaacatacctgtccaattttttgtagagtcaaggttatctatggttcccaggctggtcttaaactcctggccttgagcagttcccccattttg

SEQ ID NO: 43126 - DNA, 120 bp, synthetic construct
  source 1..120: mol_type = other DNA
gtttaatattgggttttgtttttttgcttcagtaacaaagcatagtccaaatgacatgaccttttagactatacctttagaatccgatagatcataattttatatttaatttttaaaaca

SEQ ID NO: 43127 - DNA, 120 bp, synthetic construct
  source 1..120: mol_type = other DNA
tttctagtattgttgtttatacttgattaaagctaattttaaaacatgcactctgacagaaaaggcatctgagaaacaaaacaagcaaatttgttttccattttgcacctgccaaaaaaa

SEQ ID NO: 43128 - DNA, 120 bp, synthetic construct
  source 1..120: mol_type = other DNA
aacatggcacatgaatagatatgtaacaaacctgcatgttgtgcacatgtaccagaacttaaagtataataataattaaaaaaagaatgaggtaggcatgttacaagttgagttcctggc

SEQ ID NO: 43129 - DNA, 120 bp, synthetic construct
  source 1..120: mol_type = other DNA
atgttatatggtgccatgaaatgctagtgaatgccacctcaagagctctggatgaaacatttaatatgtcttggttggtttgactcccattatcagtagataatggggttaaagtaggta

SEQ ID NO: 43130 - DNA, 120 bp, synthetic construct
  source 1..120: mol_type = other DNA
tttttttttttgtttgtttggttttgggttttttttgtttgtttttgtttttttgagatggagtttctctcttgttgcccaagctggagttcaatggtgtgatctcagctcactgcaacc

SEQ ID NO: 43131 - DNA, 120 bp, synthetic construct; identical to SEQ ID NO: 32537
  source 1..120: mol_type = other DNA

SEQ ID NO: 43132 - DNA, 120 bp, synthetic construct
  source 1..120: mol_type = other DNA
cataatttatacttagtgataacctattgataaaaattttgttccaggtaaaatttttccttgtactttcccctatttcatattgattactgcacctaatattataaagaggaaacagaa

SEQ ID NO: 43133 - DNA, 120 bp, synthetic construct
  source 1..120: mol_type = other DNA
gcagatattgctatactcagacaggaaatatgtacaatgaaaaatgacaacttggaaaaagaaaataaatatcttaaggacattaaaattgttaaagaaacaaatgctgcccttgaaaag

SEQ ID NO: 43134 - DNA, 120 bp, synthetic construct
  source 1..120: mol_type = other DNA
tctagaaagacaatttaaacatttggttctggatacatgttgaacttagttgaatataaaaatctagattaaaagtgtgtttaccatactgtataattccatttacatgaagcatccaga

SEQ ID NO: 43135 - DNA, 120 bp, synthetic construct
  source 1..120: mol_type = other DNA
caaagatacttgtagctgtctgtgatttacgagttaggcactacatctccattttcagactgaggggtggcaggcttcacatacagtgggaatggagtaattacaggagggagttgtagg

SEQ ID NO: 43136 - DNA, 120 bp, synthetic construct
  source 1..120: mol_type = other DNA
acaatatgtacccttggaaaagttgagaattatacatcattcctcatagaaaattgacttttttcctgttaaacagtatttttaagtaatttgtgtattgctctgatgaggcaagccaga

SEQ ID NO: 43137 - DNA, 120 bp, synthetic construct
  source 1..120: mol_type = other DNA
gcagacaatttttttgttttcatgaagctttctctgactgttctgtcattgaccttatgtgttagcaatcgttgtctagtctgtgctgaaaaacttagtccttaattttacatggctttt

SEQ ID NO: 43138 - DNA, 120 bp, synthetic construct
  source 1..120: mol_type = other DNA
ttttggaaggctgaggcaggaggattgcttgagcccaggagtttgagaccagccagagcaatatagtgagactctgtctctaaaaaaaaaaaaaaatttttttaaacacttagctgaggc

SEQ ID NO: 43139 - DNA, 120 bp, synthetic construct
  source 1..120: mol_type = other DNA
ggccaacatggtgaaaccctgtctctactgaaaatacaaaaattagccaggcgtggtggtgtgcacctgtagtcccagctacttgccaggcagaggcaggagaatcacttgaacccagga

SEQ ID NO: 43140 - DNA, 120 bp, synthetic construct; identical to SEQ ID NO: 32538
  source 1..120: mol_type = other DNA

SEQ ID NO: 43141 - DNA, 120 bp, synthetic construct
  source 1..120: mol_type = other DNA
agaccagcctgtcaacatggtgataccccgtctctactaaaaatacaaaaattagccaggcatggtggcgggtgcgtgtaatcccagatactcgggagactgaggcatgagaatcacttg

SEQ ID NO: 43142 - DNA, 120 bp, synthetic construct; identical to SEQ ID NO: 10169
  source 1..120: mol_type = other DNA

SEQ ID NO: 43143 - DNA, 120 bp, synthetic construct; identical to SEQ ID NO: 19673
  source 1..120: mol_type = other DNA

SEQ ID NO: 43144 - DNA, 120 bp, synthetic construct; identical to SEQ ID NO: 24121
  source 1..120: mol_type = other DNA

SEQ ID NO: 43145 - DNA, 120 bp, synthetic construct; identical to SEQ ID NO: 24122
  source 1..120: mol_type = other DNA

SEQ ID NO: 43146 - DNA, 120 bp, synthetic construct; identical to SEQ ID NO: 24123
  source 1..120: mol_type = other DNA

SEQ ID NO: 43147 - DNA, 120 bp, synthetic construct
  source 1..120: mol_type = other DNA
gaagtgaggagcatctctgcccagcagccaccccatccgggagggaggtgggggtcagccccctgccaggccagccgccccgtccgggagggaggtggggggatcagccccctgcccatg

SEQ ID NO: 43148 - DNA, 120 bp, synthetic construct
  source 1..120: mol_type = other DNA
cacacacacacacacacacacacacacacacacacacgcacaccaaaaacaaaacccaactcctaatactcggatatccatttattcagaaaaatatgcagtacttacacagagctgaac

SEQ ID NO: 43149 - DNA, 120 bp, synthetic construct; identical to SEQ ID NO: 18910
  source 1..120: mol_type = other DNA

SEQ ID NO: 43150 - DNA, 120 bp, synthetic construct; identical to SEQ ID NO: 10215
  source 1..120: mol_type = other DNA

SEQ ID NO: 43151 - DNA, 120 bp, synthetic construct; identical to SEQ ID NO: 10216
  source 1..120: mol_type = other DNA

SEQ ID NO: 43152 - DNA, 120 bp, synthetic construct; identical to SEQ ID NO: 10217
  source 1..120: mol_type = other DNA

SEQ ID NO: 43153 - DNA, 120 bp, synthetic construct; identical to SEQ ID NO: 10218
  source 1..120: mol_type = other DNA

SEQ ID NO: 43154 - DNA, 120 bp, synthetic construct
  source 1..120: mol_type = other DNA
tgcaggtgaatgatatgtaaaaagtctctagaagtttgcttcttgtttgtaatacatccatataagatgttttctcgctctgtcatccaggctggagtgcagtggcatgatcttggctca

SEQ ID NO: 43155 - DNA, 120 bp, synthetic construct
  source 1..120: mol_type = other DNA
tgtcacgttggcatgataacaaatacaataacccaaaagaccccaaaacatagtgtaatccgttttgcaatccaagcatgaggattcatcttcatgttcacactgtgtgaatgttcggta

SEQ ID NO: 43156 - DNA, 120 bp, synthetic construct; identical to SEQ ID NO: 10220
  source 1..120: mol_type = other DNA

SEQ ID NO: 43157 - DNA, 120 bp, synthetic construct; identical to SEQ ID NO: 10221
  source 1..120: mol_type = other DNA

SEQ ID NO: 43158 - DNA, 120 bp, synthetic construct; identical to SEQ ID NO: 10222
  source 1..120: mol_type = other DNA

SEQ ID NO: 43159 - DNA, 120 bp, synthetic construct; identical to SEQ ID NO: 10223
  source 1..120: mol_type = other DNA

SEQ ID NO: 43160 - DNA, 120 bp, synthetic construct; identical to SEQ ID NO: 10224
  source 1..120: mol_type = other DNA

SEQ ID NO: 43161 - DNA, 120 bp, synthetic construct
  source 1..120: mol_type = other DNA
cctgatgagatttgtacatcttcctgcatgagtggattaagagatattgagatgactaagctagaaattacaaaaatgttggcatactattcctacattatgggaatgaatacccatatt

SEQ ID NO: 43162 - DNA, 120 bp, synthetic construct
  source 1..120: mol_type = other DNA
tacaggcatgtgccaccatacctggctgatttttgtaattttagtggggacagtgtttctaaaatagtgattttggccaggctggtttggaactcctggcctccagagatccgccctcct

SEQ ID NO: 43163 - DNA, 120 bp, synthetic construct
  source 1..120: mol_type = other DNA
gagtctcctaataaagatggtcttctgaaggtaataacttttatatttttgtcttgagtatcaactacatattttatgaagtatacattgtatattaattgttttgtttccaaacccatt

SEQ ID NO: 43164 - DNA, 120 bp, synthetic construct; identical to SEQ ID NO: 10225
  source 1..120: mol_type = other DNA

SEQ ID NO: 43165 - DNA, 120 bp, synthetic construct; identical to SEQ ID NO: 10226
  source 1..120: mol_type = other DNA

SEQ ID NO: 43166 - DNA, 120 bp, synthetic construct
  source 1..120: mol_type = other DNA
tttttttaatttctttttttttttttttttttttagtagaagcattcaagtcaggtaacgggacaaacaagaaagaatgtaggcaggtaattctggagactctgagaagaacagttgagt

SEQ ID NO: 43167 - DNA, 120 bp, synthetic construct; identical to SEQ ID NO: 10227
  source 1..120: mol_type = other DNA

SEQ ID NO: 43168 - DNA, 120 bp, synthetic construct; identical to SEQ ID NO: 10228
  source 1..120: mol_type = other DNA

SEQ ID NO: 43169 - DNA, 120 bp, synthetic construct; identical to SEQ ID NO: 10229
  source 1..120: mol_type = other DNA

SEQ ID NO: 43170 - DNA, 120 bp, synthetic construct; identical to SEQ ID NO: 10230
  source 1..120: mol_type = other DNA

SEQ ID NO: 43171 - DNA, 120 bp, synthetic construct; identical to SEQ ID NO: 10231
  source 1..120: mol_type = other DNA

SEQ ID NO: 43172 - DNA, 120 bp, synthetic construct; identical to SEQ ID NO: 10232
  source 1..120: mol_type = other DNA

SEQ ID NO: 43173 - DNA, 120 bp, synthetic construct; identical to SEQ ID NO: 10233
  source 1..120: mol_type = other DNA

SEQ ID NO: 43174 - DNA, 120 bp, synthetic construct; identical to SEQ ID NO: 43162
  source 1..120: mol_type = other DNA

SEQ ID NO: 43175 - DNA, 120 bp, synthetic construct; identical to SEQ ID NO: 10234
  source 1..120: mol_type = other DNA

SEQ ID NO: 43176 - DNA, 120 bp, synthetic construct; identical to SEQ ID NO: 10235
  source 1..120: mol_type = other DNA

SEQ ID NO: 43177 - DNA, 120 bp, synthetic construct
  source 1..120: mol_type = other DNA
ttctctttttcttttttaaaaagatataaatcaaacaaaatcaaacttttgtttataatgaaaagagttggttacagattcattctgtgtctcatggcactgtgctctctttttccctag

SEQ ID NO: 43178 - DNA, 120 bp, synthetic construct; identical to SEQ ID NO: 10236
  source 1..120: mol_type = other DNA

SEQ ID NO: 43179 - DNA, 120 bp, synthetic construct; identical to SEQ ID NO: 10237
  source 1..120: mol_type = other DNA

SEQ ID NO: 43180 - DNA, 120 bp, synthetic construct; identical to SEQ ID NO: 10221
  source 1..120: mol_type = other DNA

SEQ ID NO: 43181 - DNA, 120 bp, synthetic construct; identical to SEQ ID NO: 10238
  source 1..120: mol_type = other DNA

SEQ ID NO: 43182 - DNA, 120 bp, synthetic construct; identical to SEQ ID NO: 10239
  source 1..120: mol_type = other DNA

SEQ ID NO: 43183 - DNA, 120 bp, synthetic construct
  source 1..120: mol_type = other DNA
ctgcgcatcaaaaagaaatagataaaataaatggaaaattagaaggtaagaaccgttttttatttaaaaatcatttgaccaaatatttctctaaattgatgaggaaggatatcctctagt

SEQ ID NO: 43184 - DNA, 120 bp, synthetic construct
  source 1..120: mol_type = other DNA
atatatatatagatgtgtgcatgtatgtatgtttttgacgttcacaatttgaataagatatacttgaatgtaagaaccttggctttatttttaaggaagcaaattgtgttggtaaaattg

SEQ ID NO: 43185 - DNA, 120 bp, synthetic construct; identical to SEQ ID NO: 10219
  source 1..120: mol_type = other DNA

SEQ ID NO: 43186 - DNA, 120 bp, synthetic construct
  source 1..120: mol_type = other DNA
ttctactttaatgtcctgatcggataaagtttccaatttgcaatttctgtacgcgcttggttttaaggtaggtgaattttgagactgtgaaatatttgcagtggttcgaaggctgattgg

SEQ ID NO: 43187 - DNA, 120 bp, synthetic construct; identical to SEQ ID NO: 18880
  source 1..120: mol_type = other DNA

SEQ ID NO: 43188 - DNA, 120 bp, synthetic construct; identical to SEQ ID NO: 18881
  source 1..120: mol_type = other DNA

SEQ ID NO: 43189 - DNA, 120 bp, synthetic construct; identical to SEQ ID NO: 18882
  source 1..120: mol_type = other DNA

SEQ ID NO: 43190 - DNA, 120 bp, synthetic construct
  source 1..120: mol_type = other DNA
tgtgctgaagctctttagtttaattaggtcccatttgtcaattttagcttctgttgccatggcttttgatgttttagttctgaagtatttgcccatgcctatgtcctgaatggtattgcc

SEQ ID NO: 43191 - DNA, 120 bp, synthetic construct; identical to SEQ ID NO: 18883
  source 1..120: mol_type = other DNA

SEQ ID NO: 43192 - DNA, 120 bp, synthetic construct; identical to SEQ ID NO: 18884
  source 1..120: mol_type = other DNA

SEQ ID NO: 43193 - DNA, 120 bp, synthetic construct; identical to SEQ ID NO: 18885
  source 1..120: mol_type = other DNA

SEQ ID NO: 43194 - DNA, 120 bp, synthetic construct; identical to SEQ ID NO: 18886
  source 1..120: mol_type = other DNA

SEQ ID NO: 43195 - DNA, 120 bp, synthetic construct; identical to SEQ ID NO: 18887
  source 1..120: mol_type = other DNA

SEQ ID NO: 43196 - DNA, 120 bp, synthetic construct; identical to SEQ ID NO: 18888
  source 1..120: mol_type = other DNA

SEQ ID NO: 43197 - DNA, 120 bp, synthetic construct; identical to SEQ ID NO: 18889
  source 1..120: mol_type = other DNA

SEQ ID NO: 43198 - DNA, 120 bp, synthetic construct
  source 1..120: mol_type = other DNA
gataaaataatggcaacattagtattcatgtttgagaaaatgccatttacaagcataagaaatagggatttagaaaaaaattctgctttacttcatgtggttcttctttaatatcccgat

SEQ ID NO: 43199 - DNA, 120 bp, synthetic construct
  source 1..120: mol_type = other DNA
agcaaacaaccataaattcacaacatatgtgtgtggttctgactatgtgtagaatttgttttgacgtcttaaattttcttttttttttaaattttgatatggcgtctcgctgtctcgccc

SEQ ID NO: 43200 - DNA, 120 bp, synthetic construct
  source 1..120: mol_type = other DNA
gagctatgctactgcaacacattagatctctgaaacgatccagggtacacttctaaacatgagtgaaaatggtggcataccaaagtatgattttagtttcttggtccctctgcatgaaat

SEQ ID NO: 43201 - DNA, 120 bp, synthetic construct
  source 1..120: mol_type = other DNA
cagaggaaaaaccgcagattcgtgaatgaaagtagatttatatatgtttttaaagtttatagtagagaaatgttctcatgaatgtatctgtgattaaccttttatagctcagatgttccc

SEQ ID NO: 43202 - DNA, 120 bp, synthetic construct
  source 1..120: mol_type = other DNA
aagcccctgtttaccaaaataaagcaactttttaaacattccgtgcatgcattatatgacagactctaaaagttctcttcacggcatgcatcatttttaacactaaacaatctatgatca

SEQ ID NO: 43203 - DNA, 120 bp, synthetic construct
  source 1..120: mol_type = other DNA
agaggcaggtttatataatggaggatggtaaaatgaaatgattctttaggaaaagatcgggtatggttagaaatttgggaagaatataaagtgactttccagtgccaaaacataccagag

SEQ ID NO: 43204 - DNA, 120 bp, synthetic construct
  source 1..120: mol_type = other DNA
caatttgaataagacatactagaatgtaagaaccttggctttatttttaaggaagcaaattgtgttggtaaaattgccattttataaaacctcattagcgaataacatgatataccaaac

SEQ ID NO: 43205 - DNA, 120 bp, synthetic construct
  source 1..120: mol_type = other DNA
agtcagcccagatctcaacactgccctccagcctgggtgacagggcgagacaccgccaaaaaaaaaaaagaaaaaaaaaatcatagtgtgcatttttactttccaccacatttaattaga

SEQ ID NO: 43206 - DNA, 120 bp, synthetic construct
  source 1..120: mol_type = other DNA
tgtctgtttttttcttgaagctaagctttctataaaagctttttcataacagtggtttaacaactcgcatggtataacaaatagaattagttttagcaaagcaaagcaattgtagaattc

SEQ ID NO: 43207 - DNA, 120 bp, synthetic construct; identical to SEQ ID NO: 18868
  source 1..120: mol_type = other DNA

SEQ ID NO: 43208 - DNA, 120 bp, synthetic construct; identical to SEQ ID NO: 18865
  source 1..120: mol_type = other DNA

SEQ ID NO: 43209 - DNA, 120 bp, synthetic construct; identical to SEQ ID NO: 18866
  source 1..120: mol_type = other DNA

SEQ ID NO: 43210 - DNA, 120 bp, synthetic construct; identical to SEQ ID NO: 18867
  source 1..120: mol_type = other DNA

SEQ ID NO: 43211 - DNA, 120 bp, synthetic construct; identical to SEQ ID NO: 18869
  source 1..120: mol_type = other DNA

SEQ ID NO: 43212 - DNA, 120 bp, synthetic construct; identical to SEQ ID NO: 18870
  source 1..120: mol_type = other DNA

SEQ ID NO: 43213 - DNA, 120 bp, synthetic construct
  source 1..120: mol_type = other DNA
tggttttttgtccttgcgatagtttgctgagaatgatagtttccagcttcatccatgttcctacaaaggacatgaactcatcattttttatggctgcatagtattccatggtgtatatgt

SEQ ID NO: 43214 - DNA, 120 bp, synthetic construct; identical to SEQ ID NO: 18858
  source 1..120: mol_type = other DNA

SEQ ID NO: 43215 - DNA, 120 bp, synthetic construct; identical to SEQ ID NO: 18859
  source 1..120: mol_type = other DNA

SEQ ID NO: 43216 - DNA, 120 bp, synthetic construct; identical to SEQ ID NO: 18860
  source 1..120: mol_type = other DNA

SEQ ID NO: 43217 - DNA, 120 bp, synthetic construct; identical to SEQ ID NO: 18861
  source 1..120: mol_type = other DNA

SEQ ID NO: 43218 - DNA, 120 bp, synthetic construct; identical to SEQ ID NO: 18862
  source 1..120: mol_type = other DNA

SEQ ID NO: 43219 - DNA, 120 bp, synthetic construct; identical to SEQ ID NO: 18863
  source 1..120: mol_type = other DNA

SEQ ID NO: 43220 - DNA, 120 bp, synthetic construct; identical to SEQ ID NO: 18864
  source 1..120: mol_type = other DNA

SEQ ID NO: 43221 - DNA, 120 bp, synthetic construct; identical to SEQ ID NO: 18871
  source 1..120: mol_type = other DNA

SEQ ID NO: 43222 - DNA, 120 bp, synthetic construct
  source 1..120: mol_type = other DNA
tggttccaagtctttgctattgtgaataatgctgcaataaacatacgtgtgcatgtgtcgttatagcagcatgatttatagtcctttgggtatatacccagtaatgggatggctgggtca

SEQ ID NO: 43223 - DNA, 120 bp, synthetic construct
  source 1..120: mol_type = other DNA
cagtaccatgctgttttggttactgtagccttgtagtatagtttgaagtcaggtactgtgatgcctccagctttgttcttttggcttaggattgacttggcgacacgggctcatttttgg

SEQ ID NO: 43224 - DNA, 120 bp, synthetic construct
  source 1..120: mol_type = other DNA
ggataagctttttgatgtgctgctggattcattttgccagtattttattgaggatttttgcatcaatgttcatcaaggatattggtctaaaattctctttttctgttgtgtctctgcccg

SEQ ID NO: 43225 - DNA, 120 bp, synthetic construct; identical to SEQ ID NO: 18872
  source 1..120: mol_type = other DNA

SEQ ID NO: 43226 - DNA, 120 bp, synthetic construct; identical to SEQ ID NO: 18873
  source 1..120: mol_type = other DNA

SEQ ID NO: 43227 - DNA, 120 bp, synthetic construct
  source 1..120: mol_type = other DNA
acatgcctgtaatcctagcattttgggagaccaaggtgggcagataactgaaggttaggagttccagaccagcctggtcaacatagtgaaaccctatctctactaaaaataacaaacaat

SEQ ID NO: 43228 - DNA, 120 bp, synthetic construct; identical to SEQ ID NO: 18874
  source 1..120: mol_type = other DNA

SEQ ID NO: 43229 - DNA, 120 bp, synthetic construct; identical to SEQ ID NO: 18875
  source 1..120: mol_type = other DNA

SEQ ID NO: 43230 - DNA, 120 bp, synthetic construct; identical to SEQ ID NO: 18876
  source 1..120: mol_type = other DNA

SEQ ID NO: 43231 - DNA, 120 bp, synthetic construct; identical to SEQ ID NO: 18877
  source 1..120: mol_type = other DNA

SEQ ID NO: 43232 - DNA, 120 bp, synthetic construct; identical to SEQ ID NO: 18878
  source 1..120: mol_type = other DNA

SEQ ID NO: 43233 - DNA, 120 bp, synthetic construct; identical to SEQ ID NO: 18879
  source 1..120: mol_type = other DNA

SEQ ID NO: 43234 - DNA, 120 bp, synthetic construct; identical to SEQ ID NO: 21556
  source 1..120: mol_type = other DNA

SEQ ID NO: 43235 - DNA, 120 bp, synthetic construct; identical to SEQ ID NO: 21557
  source 1..120: mol_type = other DNA

SEQ ID NO: 43236 - DNA, 120 bp, synthetic construct; identical to SEQ ID NO: 21558
  source 1..120: mol_type = other DNA

SEQ ID NO: 43237 - DNA, 120 bp, synthetic construct; identical to SEQ ID NO: 21559
  source 1..120: mol_type = other DNA

SEQ ID NO: 43238 - DNA, 120 bp, synthetic construct; identical to SEQ ID NO: 21560
  source 1..120: mol_type = other DNA

SEQ ID NO: 43239 - DNA, 120 bp, synthetic construct; identical to SEQ ID NO: 21561
  source 1..120: mol_type = other DNA

SEQ ID NO: 43240 - DNA, 120 bp, synthetic construct
  source 1..120: mol_type = other DNA
ggtgacagagcgaggctccgtctcaaaaaaaaaaaaaaagaagaaaaaaagaaaagaaattcagtataaaagtttattctctattataatgatactcctaggatcctaatgcatatctac

SEQ ID NO: 43241 - DNA, 120 bp, synthetic construct
  source 1..120: mol_type = other DNA
gttaatgttaaaacaaatggatttcaaatattttgaaaataacattggttaatgtctaccttgttcttcacttcgatgtctgcaccacaggacagcaattttgccaccactgacaaattc

SEQ ID NO: 43242 - DNA, 120 bp, synthetic construct; identical to SEQ ID NO: 21564
  source 1..120: mol_type = other DNA

SEQ ID NO: 43243 - DNA, 120 bp, synthetic construct; identical to SEQ ID NO: 21565
  source 1..120: mol_type = other DNA

SEQ ID NO: 43244 - DNA, 120 bp, synthetic construct
  source 1..120: mol_type = other DNA
aatttttgtatttttgtagatttgaggtttcactatattggccaggctagtcttgaaatcctgacctcaggtgatccacccgccttggccgcccgaagtgctgggactacaggcatgagc

SEQ ID NO: 43245 - DNA, 120 bp, synthetic construct; identical to SEQ ID NO: 21566
  source 1..120: mol_type = other DNA

SEQ ID NO: 43246 - DNA, 120 bp, synthetic construct
  source 1..120: mol_type = other DNA
atgggcaaaaactggaagcattccctttgaaaactggcacaagacagggatgccctctctcaccactcctattcaacatacttttggaagttctggccagggcaatcaggtaggagaaag

SEQ ID NO: 43247 - DNA, 120 bp, synthetic construct; identical to SEQ ID NO: 26814
  source 1..120: mol_type = other DNA

SEQ ID NO: 43248 - DNA, 120 bp, synthetic construct
  source 1..120: mol_type = other DNA
ggattaaagacttaaatgttagacctaaaaccataaaaaccctagaagaaaacctaggcattaccattcaggacataggcatgggcaagcacttcatgtctaaaacaccaaaagcaatgg

SEQ ID NO: 43249 - DNA, 120 bp, synthetic construct
  source 1..120: mol_type = other DNA
gatacacctaatgctagatgacaagttagtgggtgcagcgcaccagcatagcacatgtatacatatgtaactaacctgcacattgtgcacatgtaccctaaaacttaaagtataataata

SEQ ID NO: 43250 - DNA, 120 bp, synthetic construct; identical to SEQ ID NO: 26815
  source 1..120: mol_type = other DNA

SEQ ID NO: 43251 - DNA, 120 bp, synthetic construct
  source 1..120: mol_type = other DNA
ctcccaaagtactgggattacaggcatgagccaacatgcctggccaagtggtttcactttaagtggtcttttccctctataaaaaaccagcaggttcatcactttaataattctgtttcc

SEQ ID NO: 43252 - DNA, 120 bp, synthetic construct
  source 1..120: mol_type = other DNA
acatctgatcggtgtacctgaaagtgacgggagaatggaaccaagttggaaaacactctgcaggatattatccaggagaacttccccaatctagcaaggcaggccaacattcaaattcag

SEQ ID NO: 43253 - DNA, 120 bp, synthetic construct; identical to SEQ ID NO: 43246
  source 1..120: mol_type = other DNA

SEQ ID NO: 43254 - DNA, 120 bp, synthetic construct
  source 1..120: mol_type = other DNA
catctaaaattgacaccctaacttcacaattcaaagaactagagaagcaagagcaaacacattcaaaagctagcagaaggcaagaaataactaagatcagagcagaactgaaggaaatag

SEQ ID NO: 43255 - DNA, 120 bp, synthetic construct
  source 1..120: mol_type = other DNA
gattatctcaatagatgcagaaaaggcctttgacaaaattcaacaacccttcatgttaaaaactctcaataaattaggtattgatgggacatatctcaaaattataagagctatctatga

SEQ ID NO: 43256 - DNA, 120 bp, synthetic construct
  source 1..120: mol_type = other DNA
ccatcagagaaatacaaatcaaaaccacagtgagatgccatctcaccccagttagaatggtgatcattaaaaagtcaggaaacaacaggtgctggagaggatgtggagaaataggaacac

SEQ ID NO: 43257 - DNA, 120 bp, synthetic construct; identical to SEQ ID NO: 26816
  source 1..120: mol_type = other DNA

SEQ ID NO: 43258 - DNA, 120 bp, synthetic construct; identical to SEQ ID NO: 26817
  source 1..120: mol_type = other DNA

SEQ ID NO: 43259 - DNA, 120 bp, synthetic construct; identical to SEQ ID NO: 26293
  source 1..120: mol_type = other DNA

SEQ ID NO: 43260 - DNA, 120 bp, synthetic construct; identical to SEQ ID NO: 26294
  source 1..120: mol_type = other DNA

SEQ ID NO: 43261 - DNA, 120 bp, synthetic construct; identical to SEQ ID NO: 26295
  source 1..120: mol_type = other DNA

SEQ ID NO: 43262 - DNA, 120 bp, synthetic construct; identical to SEQ ID NO: 8430
  source 1..120: mol_type = other DNA

SEQ ID NO: 43263 - DNA, 120 bp, synthetic construct; identical to SEQ ID NO: 8431
  source 1..120: mol_type = other DNA

SEQ ID NO: 43264 - DNA, 120 bp, synthetic construct; identical to SEQ ID NO: 20889
  source 1..120: mol_type = other DNA

SEQ ID NO: 43265 - DNA, 120 bp, synthetic construct
  source 1..120: mol_type = other DNA
cagcaagttaaaataatgataattgccaccattactacatgatctaacacaaaaaggatggactttgaagtcactcatatgtagattcaaacctcaagtctgccatttacttatctacat

SEQ ID NO: 43266 - DNA, 120 bp, synthetic construct; identical to SEQ ID NO: 20890
  source 1..120: mol_type = other DNA

SEQ ID NO: 43267 - DNA, 120 bp, synthetic construct
  source 1..120: mol_type = other DNA
aaaatataaaaaaaattagccgggcgtgatggcgggcgcctatagtcccagctactcgcgaggctgaggcaggagaatggcgtgaacccgggaggtggagcttgcagtgagccgagatcg

SEQ ID NO: 43268 - DNA, 120 bp, synthetic construct; identical to SEQ ID NO: 20891
  source 1..120: mol_type = other DNA

SEQ ID NO: 43269 - DNA, 120 bp, synthetic construct; identical to SEQ ID NO: 20892
  source 1..120: mol_type = other DNA

SEQ ID NO: 43270 - DNA, 120 bp, synthetic construct
  source 1..120: mol_type = other DNA
caataatttaatcttctctttgagtgggaatatactgagtctacataaagtgagttccctcaagtttcctcatcagaaacctccaaattacctagccagctgctttcttaatttacacca

SEQ ID NO: 43271 - DNA, 120 bp, synthetic construct
  source 1..120: mol_type = other DNA
atctaaagtaatgattgagagcatttcctgccagcagaagcgaatgatacattttcttttctttttttttgagacggagtctcactctgtcacccaggcttgagtgcagtggcgggatct

SEQ ID NO: 43272 - DNA, 120 bp, synthetic construct; identical to SEQ ID NO: 20893
  source 1..120: mol_type = other DNA

SEQ ID NO: 43273 - DNA, 120 bp, synthetic construct
  source 1..120: mol_type = other DNA
tactatgggtatctgaaatacttctatttaatttctttatagtacaaatcaataaaggcaaccacataagcaaatctatgttggtatgtcatcatatttatgttcattttgtatcagcat

SEQ ID NO: 43274 - DNA, 120 bp, synthetic construct; identical to SEQ ID NO: 20894
  source 1..120: mol_type = other DNA

SEQ ID NO: 43275 - DNA, 120 bp, synthetic construct; identical to SEQ ID NO: 20811
  source 1..120: mol_type = other DNA

SEQ ID NO: 43276 - DNA, 120 bp, synthetic construct
  source 1..120: mol_type = other DNA
caacaacctgaattaatgttggtttgtttgctttgtattataccttaagttctgggatacatgtgaagaacatgcaggttttttacataggcatacatgtgccatggtggtttactgtgc

SEQ ID NO: 43277 - DNA, 120 bp, synthetic construct
  source 1..120: mol_type = other DNA
tcatagtattggaagttctggccagggcaatcagacaagaggaaaaaataaagggtattcaaataggaagaaaggaagtcaaattgtctctgcagataacatgattgtatatttaggaaa

SEQ ID NO: 43278 - DNA, 120 bp, synthetic construct
  source 1..120: mol_type = other DNA
atctacaactatctgatctttgacaaacctgacaaaaacaagaaatggggaaaggattccctatttaataaatggtgctgggaaaactttctacatagccatatgtagaaagctgaaact

SEQ ID NO: 43279 - DNA, 120 bp, synthetic construct
  source 1..120: mol_type = other DNA
ctttgaagggacatggatgaaattggaaatcatcattctcagtaaactatcgcaagaacaaaaaaccaaacaccgcatattctcactcataggtgggaattgaacaatgagatcacatgg

SEQ ID NO: 43280 - DNA, 120 bp, synthetic construct; identical to SEQ ID NO: 20895
  source 1..120: mol_type = other DNA

SEQ ID NO: 43281 - DNA, 120 bp, synthetic construct
  source 1..120: mol_type = other DNA
tctatcatctctcattttgtctctatgctttcacctcatattatgagttattatcataggctcagcagcctatcctacctgttttcctctccagcagacagtactgagcaataaactaga

SEQ ID NO: 43282 - DNA, 120 bp, synthetic construct
  source 1..120: mol_type = other DNA
gccaatgtatgcatattcatgtttatctcatttgaataaccaatgtcaacaaaacatatacctctggtgcccaatggtaacaaagaggagcaatgagtcactgtggtttatcccaattct

SEQ ID NO: 43283 - DNA, 120 bp, synthetic construct
  source 1..120: mol_type = other DNA
caatttcagatcctgttattggtctattcagagattcaacttcttcctggtttagtcttgggagagtgtatgtgtctaggaatttatccatttcttctagattttctagtttatttgcgt

SEQ ID NO: 43284 - DNA, 120 bp, synthetic construct
  source 1..120: mol_type = other DNA
ttgttgatctgtccaatgttgacagtggggtgttaaagtctcccattattaatgtgtgggagtctaagtctctttgtaggtcactcaggacttgctttatgaatctgggtgctcctgtat

SEQ ID NO: 43285 - DNA, 120 bp, synthetic construct
  source 1..120: mol_type = other DNA
caatgcctttcttcacagaattggaaaaaactactttaaagttcatatagaaccaaaaaagagcccacatcgccaagtcaatcctaagccaaaagaacaaagctggaggcatcacactac

SEQ ID NO: 43286 - DNA, 120 bp, synthetic construct
  source 1..120: mol_type = other DNA
ttgacccagccatcccattaatgggtatatacccaaaggactataaatcacgctgctataaagacacatgcacacgcatgcttattacggcattattcacaatagcaaagacttggaacc

SEQ ID NO: 43287 - DNA, 120 bp, synthetic construct
  source 1..120: mol_type = other DNA
ttcatgcaagatatcagtatgatttggaacattttactgcaaacattcatcatgctctttaacttgattgatcagtgagaaggtacacaattataatgacactttagttgaaatctcttc

SEQ ID NO: 43288 - DNA, 120 bp, synthetic construct
  source 1..120: mol_type = other DNA
ccctcttggtggaaacatgctgtaaaattaaagcaaaattatgctgctccctgagcctggtatgtgttgaacttctctccaatggttcttcttcccaatttcaatgtagggaagtctaca

SEQ ID NO: 43289 - DNA, 120 bp, synthetic construct
  source 1..120: mol_type = other DNA
ttttaggaaacatatccaaggtgatcaatttaggacacttccactgaagagatgtgaagagaacatttaactgaattgtcatcgtaattgtgtacctcctagttattgggcaagttaaag

SEQ ID NO: 43290 - DNA, 120 bp, synthetic construct; identical to SEQ ID NO: 20942
  source 1..120: mol_type = other DNA

SEQ ID NO: 43291 - DNA, 120 bp, synthetic construct; identical to SEQ ID NO: 20896
  source 1..120: mol_type = other DNA

SEQ ID NO: 43292 - DNA, 120 bp, synthetic construct; identical to SEQ ID NO: 20897
  source 1..120: mol_type = other DNA

SEQ ID NO: 43293 - DNA, 120 bp, synthetic construct
  source 1..120: mol_type = other DNA
gaatgagaactaacgagaccactgatgtagcaattattttcctcaaggaagagggttgtgaggcaggaaggagggaaaagatgaagttatttatgcaattttggggtttctgctgaggaa

SEQ ID NO: 43294 - DNA, 120 bp, synthetic construct; identical to SEQ ID NO: 20898
  source 1..120: mol_type = other DNA

SEQ ID NO: 43295 - DNA, 120 bp, synthetic construct
  source 1..120: mol_type = other DNA
ttctacagacgtcacatagtactgctaagaaaagacagagaactgatagtaataacccatagacactgtagaacgagaactaaggagacccctgatgtagcaattattttcccaaggaag

SEQ ID NO: 43296 - DNA, 120 bp, synthetic construct; identical to SEQ ID NO: 20899
  source 1..120: mol_type = other DNA

SEQ ID NO: 43297 - DNA, 120 bp, synthetic construct
  source 1..120: mol_type = other DNA
tcccaaggaagatggattgtcagacaggaaggagggaaaagaagttatttatataatttaggggtttctgctgaggaaatctgagtgaactcacttcacacgcatttggaatatgtgcct

SEQ ID NO: 43298 - DNA, 120 bp, synthetic construct; identical to SEQ ID NO: 20899
  source 1..120: mol_type = other DNA

SEQ ID NO: 43299 - DNA, 120 bp, synthetic construct; identical to SEQ ID NO: 20900
  source 1..120: mol_type = other DNA

SEQ ID NO: 43300 - DNA, 120 bp, synthetic construct; identical to SEQ ID NO: 20901
  source 1..120: mol_type = other DNA

SEQ ID NO: 43301 - DNA, 120 bp, synthetic construct
  source 1..120: mol_type = other DNA
agaagccatcaaagcgtacactaatacaggcaggaggacagaggttgatgctaacactgtatgaatgtatggataattttgtcgtttttacatatgagtgattatgaatcccttttactt

SEQ ID NO: 43302 - DNA, 120 bp, synthetic construct; identical to SEQ ID NO: 20901
  source 1..120: mol_type = other DNA

SEQ ID NO: 43303 - DNA, 120 bp, synthetic construct; identical to SEQ ID NO: 43301
  source 1..120: mol_type = other DNA

SEQ ID NO: 43304 - DNA, 120 bp, synthetic construct
  source 1..120: mol_type = other DNA
ttattgaggctgatatattatgctttggtgccacgactggatgaagaaattttcggaaggctaaactagtggatacaagatacttaggcaaattattacaccacatgggggtgagagata

SEQ ID NO: 43305 - DNA, 120 bp, synthetic construct
  source 1..120: mol_type = other DNA
ttaggagttaattagaattcaacataatttttgtttctaaaaagtcttttttggagtatcatgctattctctaaagaagtttcattcaatagctattttatccaagacttagctccttga

SEQ ID NO: 43306 - DNA, 120 bp, synthetic construct
  source 1..120: mol_type = other DNA
ttatgtattgattattttgtttcaaattccattcaggctacaagtgacaagaaagattctgtttcgaatatacccacagaaataaaggatggacaacaatctggaacaggtaattttgca

SEQ ID NO: 43307 - DNA, 120 bp, synthetic construct
  source 1..120: mol_type = other DNA
cataattctactaaataaaactgctacaagtattggatattaataagcttttacacttggaaatcactccaatattcattgaaaattaccattttaggagtcagttgttgaattcaacat

SEQ ID NO: 43308 - DNA, 120 bp, synthetic construct; identical to SEQ ID NO: 20902
  source 1..120: mol_type = other DNA

SEQ ID NO: 43309 - DNA, 120 bp, synthetic construct
  source 1..120: mol_type = other DNA
cacttcacgtctcttcagtggaagagtcctaaattgatcaccttggatatctgtttgctgaaactgagtagataatatttattattcctcacacccacgtggtgtaataatttgcctaag

SEQ ID NO: 43310 - DNA, 120 bp, synthetic construct
  source 1..120: mol_type = other DNA
gtctataagcttgttactaagatcatggccaaggaccagcagcatcaacaacacctgacaactcagtagaaatgcacaatctcaggcctgctgaatcagaaagtgcattttcaatgagcc

SEQ ID NO: 43311 - DNA, 120 bp, synthetic construct; identical to SEQ ID NO: 20903
  source 1..120: mol_type = other DNA

SEQ ID NO: 43312 - DNA, 120 bp, synthetic construct
  source 1..120: mol_type = other DNA
ttgttttttgttttgttttgttttttgtttttggagacagagctttgctcttgttgcccagggtggagtgcaatggctcaattgtaactcacgacaacctccaccttcctggttcaagca

SEQ ID NO: 43313 - DNA, 120 bp, synthetic construct; identical to SEQ ID NO: 20904
  source 1..120: mol_type = other DNA

SEQ ID NO: 43314 - DNA, 120 bp, synthetic construct
  source 1..120: mol_type = other DNA
ttgtttgggttcattgtagattctggatattagccctttgtcagatgagtaggttgtgaaaattttctcccatgttgtaggttgcctgttcactcggatggtagtttcttttgctgtgca

SEQ ID NO: 43315 - DNA, 120 bp, synthetic construct
  source 1..120: mol_type = other DNA
gaggtgagacgatacctcattgtagctttgatttgcatttctgtgatgatcagtgatgtcgagcacctttccatatacctgtttgccttctgatagcagtttgaaacataacagtgtcat

SEQ ID NO: 43316 - DNA, 120 bp, synthetic construct
  source 1..120: mol_type = other DNA
taatgcaatacttcagattcaattacaccattatactacaagcatttatcatgtccaactgtttttcctattatttaggaagtacaaaattgtgaggacacttccaataaatatacaatt

SEQ ID NO: 43317 - DNA, 120 bp, synthetic construct; identical to SEQ ID NO: 20905
  source 1..120: mol_type = other DNA

SEQ ID NO: 43318 - DNA, 120 bp, synthetic construct
  source 1..120: mol_type = other DNA
aactatcgcaaggacaaaaaaccaaacactgcatgttctcactcataggtgggaattgaacaatgagaacaggtggacacaggaaggggaacatcacactctggggactgttgtggggtg

SEQ ID NO: 43319 - DNA, 120 bp, synthetic construct
  source 1..120: mol_type = other DNA
aacgctgcaactggatcccttccttacaccttatacaaaaattaattcaagatggattaaaggcttaaacgttagacctaaaaccataaaaaccctagaagaaaacctaggcattaccat

SEQ ID NO: 43320 - DNA, 120 bp, synthetic construct
  source 1..120: mol_type = other DNA
agatatacaatcatgtcgtctgcaaacagggacaatttgacttcctcttttcctaattgaataccctttatttccttctcctgcctaatggccctaaccagaacttccaacactatgttg

SEQ ID NO: 43321 - DNA, 120 bp, synthetic construct
  source 1..120: mol_type = other DNA
agctggttttttgaaaggatcaacaaaattgatagacagctagcaagactaaaaaagaagaaaagagagaagaatcaaatagatgcaatacaaaatgataaaggggatatcaccaccgat

SEQ ID NO: 43322 - DNA, 120 bp, synthetic construct
  source 1..120: mol_type = other DNA
aacccctgccttttttttgttttccatttgcttggtagatcttcctccatccttttattttgagtctatgtgtgtctctgcacgtgagatgggtttcctgaatacagcacactgatggat

SEQ ID NO: 43323 - DNA, 120 bp, synthetic construct
  source 1..120: mol_type = other DNA
acgtagttctcgagcctcggctttcagcttcatcagctcctttaagcacttctctgtattggttattctaggtatacattcgtctaaattttttttcaaagtttttaacttctttgcctt

SEQ ID NO: 43324 - DNA, 120 bp, synthetic construct
  source 1..120: mol_type = other DNA
ggtgcagtgcaccgtgcgtgacccaaaggagggtgaggcattgcctcactcaggaagtggaaggggtcagggagttccctttcctagtcaaagaaaggggtgacagacagcacctggaaa

SEQ ID NO: 43325 - DNA, 120 bp, synthetic construct
  source 1..120: mol_type = other DNA
ttattatgtagttgctcttcctcaatacaagcagttttgtaattttcacaaatttcaccaaaactctgctttaacttatttgtgatgaattttaaaggttttttttaccctagtttgtct

SEQ ID NO: 43326 - DNA, 120 bp, synthetic construct
  source 1..120: mol_type = other DNA
ctgacagagagacttgggttaattaaggaacaaagattaagagaatgtcttcctgagcttgagttattttaattgcaaaaacaatctatttatacatacaattaggtatttagattaccc

SEQ ID NO: 43327 - DNA, 120 bp, synthetic construct; identical to SEQ ID NO: 20906
  source 1..120: mol_type = other DNA

SEQ ID NO: 43328 - DNA, 120 bp, synthetic construct; identical to SEQ ID NO: 20907
  source 1..120: mol_type = other DNA

SEQ ID NO: 43329 - DNA, 120 bp, synthetic construct; identical to SEQ ID NO: 20908
  source 1..120: mol_type = other DNA

SEQ ID NO: 43330 - DNA, 120 bp, synthetic construct; identical to SEQ ID NO: 20909
  source 1..120: mol_type = other DNA

SEQ ID NO: 43331 - DNA, 120 bp, synthetic construct; identical to SEQ ID NO: 20910
  source 1..120: mol_type = other DNA

SEQ ID NO: 43332 - DNA, 120 bp, synthetic construct
  source 1..120: mol_type = other DNA
gctaacagttggcaaaggcagctgagcaggtgtggctgtattaataccaaagtagatttcatagcaaaaaaaaaaacattccagcaataaataacaaaggtcatgtcacaattgtaaaag

SEQ ID NO: 43333 - DNA, 120 bp, synthetic construct; identical to SEQ ID NO: 20911
  source 1..120: mol_type = other DNA

SEQ ID NO: 43334 - DNA, 120 bp, synthetic construct; identical to SEQ ID NO: 20912
  source 1..120: mol_type = other DNA

SEQ ID NO: 43335 - DNA, 120 bp, synthetic construct
  source 1..120: mol_type = other DNA
caccagtgcactccagcccagtgatagtaggagactccctctcaaaaaaaaaaaaaaaaatgtatccagttttattcttaatatgcagggaatgaaaagtaaaatgtaaagtgattactg

SEQ ID NO: 43336 - DNA, 120 bp, synthetic construct; identical to SEQ ID NO: 20913
  source 1..120: mol_type = other DNA

SEQ ID NO: 43337 - DNA, 120 bp, synthetic construct; identical to SEQ ID NO: 20914
  source 1..120: mol_type = other DNA

SEQ ID NO: 43338 - DNA, 120 bp, synthetic construct
  source 1..120: mol_type = other DNA
ggttttttattgtgtctttttccagcctgagcctggcaatttcatcttgcatcaagcggttttcatgcagcaggtcttctttttcatcagtttcagaaacctaagtaaaacaaagcaaac

SEQ ID NO: 43339 - DNA, 120 bp, synthetic construct
  source 1..120: mol_type = other DNA
ttacttcagcagtataagactacattattaatgttagtctatgttaacattttataacttaaaattttataagcgacacattgactttaatcagaggaaagcatctctcagttctaactt

SEQ ID NO: 43340 - DNA, 120 bp, synthetic construct
  source 1..120: mol_type = other DNA
cctcccttgatgaatctgcaatgcttaaaaaccttctgaagtctcaaaaagaaatgagtatgtgggtgagactgacggtagtaaattatacattgtggaatgatttccctctttttttaa

SEQ ID NO: 43341 - DNA, 120 bp, synthetic construct
  source 1..120: mol_type = other DNA
gaactgtccatattcatatagagacagagtgtgctctctgagcccaatacaaaaggagtaacgattttcatcgaaataaaaatttattcagtaaaatggcctttctgaacaaattaacct

SEQ ID NO: 43342 - DNA, 120 bp, synthetic construct; identical to SEQ ID NO: 20915
  source 1..120: mol_type = other DNA

SEQ ID NO: 43343 - DNA, 120 bp, synthetic construct; identical to SEQ ID NO: 1076
  source 1..120: mol_type = other DNA

SEQ ID NO: 43344 - DNA, 120 bp, synthetic construct; identical to SEQ ID NO: 20916
  source 1..120: mol_type = other DNA

SEQ ID NO: 43345 - DNA, 120 bp, synthetic construct
  source 1..120: mol_type = other DNA
agttaaagaggccaagaaacatcatttaaaacacgatataaattttcatcagacataaaagataaaaaatattttcatttaataaatacttttgcatgtcacacatttaacgggaaacaa

SEQ ID NO: 43346 - DNA, 120 bp, synthetic construct
  source 1..120: mol_type = other DNA
aaaatataagaaaaagtttaaaaggaaaaacagaatgagaagggcaggggcttgattagagttttgtcaactgggacaaactttgcagttttagtcaaatattgccatctttctagtgga

SEQ ID NO: 43347 - DNA, 120 bp, synthetic construct
  source 1..120: mol_type = other DNA
gcattctcgggatctacattttgatggaaatgtaatgctctggaaccctaggcatatatgaaccagaaacatgtatgcagactctacttaccgacagcaacatagttggaaatacagtaa

SEQ ID NO: 43348 - DNA, 120 bp, synthetic construct
  source 1..120: mol_type = other DNA
gatgcatgaattcgataaggtttcaggatacaaaataatctaacaaagatcagaagtgtttctgtatacaaataacaaactacctgaagaaattttttaaaaatcccaagtatgatagca

SEQ ID NO: 43349 - DNA, 120 bp, synthetic construct
  source 1..120: mol_type = other DNA
ctgtaatcctagcactttgggaggctgaggtgggtggattgcttgaggtctggagttcgagaccagcctagccaaagtagtgaaaccctgtctctactaaaaatacaaaaaatcagatgg

SEQ ID NO: 43350 - DNA, 120 bp, synthetic construct; identical to SEQ ID NO: 20917
  source 1..120: mol_type = other DNA

SEQ ID NO: 43351 - DNA, 120 bp, synthetic construct; identical to SEQ ID NO: 20918
  source 1..120: mol_type = other DNA

SEQ ID NO: 43352 - DNA, 120 bp, synthetic construct; identical to SEQ ID NO: 20919
  source 1..120: mol_type = other DNA

SEQ ID NO: 43353 - DNA, 120 bp, synthetic construct; identical to SEQ ID NO: 20920
  source 1..120: mol_type = other DNA

SEQ ID NO: 43354 - DNA, 120 bp, synthetic construct; identical to SEQ ID NO: 20921
  source 1..120: mol_type = other DNA

SEQ ID NO: 43355 - DNA, 120 bp, synthetic construct
  source 1..120: mol_type = other DNA
acttgttcttgcaaagctatcttgacctcagtgattattgttatgaccattatttggaaatctctgtcagataaattacatatctgcacttcactcaggtgctggagatttatcttgttt

SEQ ID NO: 43356 - DNA, 120 bp, synthetic construct
  source 1..120: mol_type = other DNA
acaggtataagactaggtataaggaacagaggtttgtttggctcacagttttgcaggctgtagaagaagaatggcagtggcatctgcacagcttctggtcagggacccagaaggctttta

SEQ ID NO: 43357 - DNA, 120 bp, synthetic construct; identical to SEQ ID NO: 20924
  source 1..120: mol_type = other DNA

SEQ ID NO: 43358 - DNA, 120 bp, synthetic construct
  source 1..120: mol_type = other DNA
gtgatgggtgctgtaagccgagatcatgccactgcactccagcctgggtgacagagcaagactccttctcaaaaaaaaaaaaaaaaaaaaaaaaaaaaaaaaggatctgggcacatgttg

SEQ ID NO: 43359 - DNA, 120 bp, synthetic construct; identical to SEQ ID NO: 20922
  source 1..120: mol_type = other DNA

SEQ ID NO: 43360 - DNA, 120 bp, synthetic construct
  source 1..120: mol_type = other DNA
ggagaactcaaatctctgtcagcctgagaacaccggagggggtggctggggaccccaggtaaaaggaccctcattgggcaggaccttgagaactacgtgccagggagaattcagatctct

SEQ ID NO: 43361 - DNA, 120 bp, synthetic construct; identical to SEQ ID NO: 20923
  source 1..120: mol_type = other DNA

SEQ ID NO: 43362 - DNA, 120 bp, synthetic construct; identical to SEQ ID NO: 20873
  source 1..120: mol_type = other DNA

SEQ ID NO: 43363 - DNA, 120 bp, synthetic construct
  source 1..120: mol_type = other DNA
attgcttttgcaccaacctaatatattcttacacatattggtgtgttcctggattttctaacctgttccattcactgatttgttgtttcagctgttagtaaataacttgtggaaattaac

SEQ ID NO: 43364 - DNA, 120 bp, synthetic construct; identical to SEQ ID NO: 20874
  source 1..120: mol_type = other DNA

SEQ ID NO: 43365 - DNA, 120 bp, synthetic construct
  source 1..120: mol_type = other DNA
tatgtaagagaatagtagctagcccacagaacactgctgtgatgcttacataagaatctatgcacagcatttagaacactttctaacacaaataacagctcaataatttttagatatcac

SEQ ID NO: 43366 - DNA, 120 bp, synthetic construct; identical to SEQ ID NO: 20875
  source 1..120: mol_type = other DNA

SEQ ID NO: 43367 - DNA, 120 bp, synthetic construct; identical to SEQ ID NO: 20835
  source 1..120: mol_type = other DNA

SEQ ID NO: 43368 - DNA, 120 bp, synthetic construct; identical to SEQ ID NO: 1078
  source 1..120: mol_type = other DNA

SEQ ID NO: 43369 - DNA, 120 bp, synthetic construct; identical to SEQ ID NO: 1077
  source 1..120: mol_type = other DNA

SEQ ID NO: 43370 - DNA, 120 bp, synthetic construct; identical to SEQ ID NO: 20876
  source 1..120: mol_type = other DNA

SEQ ID NO: 43371 - DNA, 120 bp, synthetic construct
  source 1..120: mol_type = other DNA
gttagttacattatattcttacatacatatgtgtgtatatatattatatgcacatacttatatgctcagccattgtttccaaaacatcagcaccttgctctgttagctggacattctaac

SEQ ID NO: 43372 - DNA, 120 bp, synthetic construct; identical to SEQ ID NO: 20877
  source 1..120: mol_type = other DNA

SEQ ID NO: 43373 - DNA, 120 bp, synthetic construct
  source 1..120: mol_type = other DNA
gcttcctgtgaaatagaatccgaaaatattttataaacttgagatactgatgcaagcagcttgagagatcttcattattatagataacagatcacttgaggggccaaccacaagttgatg

SEQ ID NO: 43374 - DNA, 120 bp, synthetic construct
  source 1..120: mol_type = other DNA
caacaggtatttgctcttaaacaagttgcttctcttaggcacaatgtcttcttctagattttactatctcctttcactaggttgttaaataggtttaatgaagtagcatttttaacattc

SEQ ID NO: 43375 - DNA, 120 bp, synthetic construct; identical to SEQ ID NO: 20878
  source 1..120: mol_type = other DNA

SEQ ID NO: 43376 - DNA, 120 bp, synthetic construct; identical to SEQ ID NO: 20879
  source 1..120: mol_type = other DNA

SEQ ID NO: 43377 - DNA, 120 bp, synthetic construct
  source 1..120: mol_type = other DNA
tcaagcgcttctcctgcttcagcctcccaagtagctgggactacaggcctgcaccaccacgcccagctaatttttatatttttagtagagtcggggtttcaccgtgttagccaggatggt

SEQ ID NO: 43378 - DNA, 120 bp, synthetic construct
  source 1..120: mol_type = other DNA
actctgaacagctgcttttcttctggaagtgtggaatttttgtatatgtgtgagacagaatgcctatgtaactagtttccataagaacctgggatactgtgtaagtctctagtcagactc

SEQ ID NO: 43379 - DNA, 120 bp, synthetic construct; identical to SEQ ID NO: 20881
  source 1..120: mol_type = other DNA

SEQ ID NO: 43380 - DNA, 120 bp, synthetic construct
  source 1..120: mol_type = other DNA
cacatcccaggaggtgaggggtggggctggaagtcccaaccctctaatcacaccctgatcactatgatgatgagccccaccctgaagccatctggaggctgcctgtcataagtcaatcat

SEQ ID NO: 43381 - DNA, 120 bp, synthetic construct
  source 1..120: mol_type = other DNA
acatgagaatcgcttgaacccaggaggcagaggttgcagtgagccaagattgtgccattccactccagccagggtgacaaagtgagacttcatctcaaaagaaaaaaaaatcatgaactt

SEQ ID NO: 43382 - DNA, 120 bp, synthetic construct
  source 1..120: mol_type = other DNA
aaaggaagtcaaattgtctctgtttgcagatgacatgattgtatatttagaaaaacaaattgtctcagccccaaatctccttcagctgataagcaacttcctcatggtctcaggatacaa

SEQ ID NO: 43383 - DNA, 120 bp, synthetic construct
  source 1..120: mol_type = other DNA
caaatacttcatgactaaaacaccaaaagcaatgtcaacaaaagccaaaattgacaaatgggatctaactaaactaaagaacttgtgtgcagttttatttgggagtgtgtgtggggtacc

SEQ ID NO: 43384 - DNA, 120 bp, synthetic construct; identical to SEQ ID NO: 20826
  source 1..120: mol_type = other DNA

SEQ ID NO: 43385 - DNA, 120 bp, synthetic construct
  source 1..120: mol_type = other DNA
atgatatgttcttcgttcacatcagttagcatattgggatgcagcttaatctagaaaaagtgttttttttttctttaggaaagctgtgttggctgaggtagttatttcataaaaggacct

SEQ ID NO: 43386 - DNA, 120 bp, synthetic construct
  source 1..120: mol_type = other DNA
actgagaaggtacacaattatgatgacacttcagctgaatgtacacttcacatctcctcagtggaagtgtcctaaattgatcagcttggatatatgtttggtgaatcctagtggacagta

SEQ ID NO: 43387 - DNA, 120 bp, synthetic construct
  source 1..120: mol_type = other DNA
agttcttccatgtggttttaacaatctgatctgacacctataatttttattacttaatctctttctccttccctttatgatggaaacatgctgtagaattaaagtaagaatatgctgtcc

SEQ ID NO: 43388 - DNA, 120 bp, synthetic construct
  source 1..120: mol_type = other DNA
gattcccaagtgtatgagtcactgctctgattttagatcacatttgtcctcatcactcggcatatccacattgatatagacactgttttattgtagtaatagacatgtgaagaataatat

SEQ ID NO: 43389 - DNA, 120 bp, synthetic construct
  source 1..120: mol_type = other DNA
tggcttattacgatcacttcttccctctggttttagcaatgtgatcaggcgcctataatttctagtacttcatcttattctccttcccctcttgatggagacatgctgtagaattaaagc

SEQ ID NO: 43390 - DNA, 120 bp, synthetic construct; identical to SEQ ID NO: 20884
  source 1..120: mol_type = other DNA

SEQ ID NO: 43391 - DNA, 120 bp, synthetic construct
  source 1..120: mol_type = other DNA
ttgaatttcaggttctccacctgaacaaccacttgatcaggatgttaagcaaggattcaagtatagaagatattttgtttagtctctaggatttcttaacattccaaaattctatgcacc

SEQ ID NO: 43392 - DNA, 120 bp, synthetic construct; identical to SEQ ID NO: 20885
  source 1..120: mol_type = other DNA

SEQ ID NO: 43393 - DNA, 120 bp, synthetic construct; identical to SEQ ID NO: 20886
  source 1..120: mol_type = other DNA

SEQ ID NO: 43394 - DNA, 120 bp, synthetic construct; identical to SEQ ID NO: 20887
  source 1..120: mol_type = other DNA

SEQ ID NO: 43395 - DNA, 120 bp, synthetic construct; identical to SEQ ID NO: 20888
  source 1..120: mol_type = other DNA

SEQ ID NO: 43396 - DNA, 120 bp, synthetic construct
  source 1..120: mol_type = other DNA
tggacaaacttttggagtagccaggcttctaaataacactctaaagacagttaatatataacaaaatgtgactttctgaattgatctgatgtaaataagtaccgtggccccattgctgca

SEQ ID NO: 43397 - DNA, 120 bp, synthetic construct
  source 1..120: mol_type = other DNA
gtggaaaagtctccctcctgagtacttagagcttcatttcattcatcactatctaaatatcttccttcctatgggctcccccttctggatccctcttcagcagggatccatggcaatccc

SEQ ID NO: 43398 - DNA, 120 bp, synthetic construct
  source 1..120: mol_type = other DNA
tctgtcactatgtattttccagcaatttttttttcagatcacacctctcaaagtatttatcaactatttcttatttgcaaagtaaaaaaaaattaaaattaaccccccctatttctttaa

SEQ ID NO: 43399 - DNA, 120 bp, synthetic construct
  source 1..120: mol_type = other DNA
tcctttccatcttttccaattttcattttcttctataacatattttctcaggataactcacctcaacttatagattctcaacattagaacaaaagataaattcagaacattcaagacatt

SEQ ID NO: 43400 - DNA, 120 bp, synthetic construct; identical to SEQ ID NO: 20944
  source 1..120: mol_type = other DNA

SEQ ID NO: 43401 - DNA, 120 bp, synthetic construct
  source 1..120: mol_type = other DNA
aggatagcatgactacttactttcttcatttttaaaactcagaggtaccccacacacactcccaaataaaactgcacacaagttctttagtttaattagatcccatttgtcaattttggc

SEQ ID NO: 43402 - DNA, 120 bp, synthetic construct
  source 1..120: mol_type = other DNA
tgtattccttgttattttattctctttgtagcaattgtgtatcggatttcactcatgatttagcactctattactggtgtataggaatgcttgtgaattttgcacattgactttgtatcc

SEQ ID NO: 43403 - DNA, 120 bp, synthetic construct
  source 1..120: mol_type = other DNA
aggttgcagtgagccaagattgtgccattccactccagccagggtgacaaagtgagacttcatctcaaaagaaaaaaaaatcatgaacttttgtacatgccttagaccttgtaggaaaaa

SEQ ID NO: 43404 - DNA, 120 bp, synthetic construct; identical to SEQ ID NO: 20827
  source 1..120: mol_type = other DNA

SEQ ID NO: 43405 - DNA, 120 bp, synthetic construct; identical to SEQ ID NO: 20945
  source 1..120: mol_type = other DNA

SEQ ID NO: 43406 - DNA, 120 bp, synthetic construct; identical to SEQ ID NO: 20946
  source 1..120: mol_type = other DNA

SEQ ID NO: 43407 - DNA, 120 bp, synthetic construct
  source 1..120: mol_type = other DNA
gtgagacagcatgcctatgtaactagcttccataagaaccttggatactgtgtaagtctctagtcagactcatactggtagacaatattgcccatgtgctgtcaaaatttgaagctacag

SEQ ID NO: 43408 - DNA, 120 bp, synthetic construct
  source 1..120: mol_type = other DNA
gtgatgttccccttcctgtgtccatgtgttctcattgttcaattcccagctatgagtgacaacatgcggtgtttcgttttttgtccttgccataatttgctgagaatgatggtttccagc

SEQ ID NO: 43409 - DNA, 120 bp, synthetic construct
  source 1..120: mol_type = other DNA
ttttgcaacttactcatctgacaaagggctaatatccagaatctacaaagagctcaaacaaatttacaagaaaaaaacaaacaaccccatcaaaaagtgggcaaaggatatgaacagaca

SEQ ID NO: 43410 - DNA, 120 bp, synthetic construct
  source 1..120: mol_type = other DNA
tttttatttttgcaacatcacttcctctgactcctctcctacttttctctagccactgctcattctccttcaccaactctttttttcctgggggtgtggagggaaagttcacattcccag

SEQ ID NO: 43411 - DNA, 120 bp, synthetic construct
  source 1..120: mol_type = other DNA
gctcttactggaaggtcctggctctatagccaacaggtatttgctcttaaacaagttgcttctcttaggcacaatgtcttcttctagattttactatctcctttcactaggttgttaaat

SEQ ID NO: 43412 - DNA, 120 bp, synthetic construct; identical to SEQ ID NO: 43373
  source 1..120: mol_type = other DNA

SEQ ID NO: 43413 - DNA, 120 bp, synthetic construct
  source 1..120: mol_type = other DNA
agcctttttacgtaaagacttacactctattctcagcctcactggcataatcttctgcaagctttccatacacatctcgagaaaacacatcaatattgtgctgcagaagaagaatgacta

SEQ ID NO: 43414 - DNA, 120 bp, synthetic construct
  source 1..120: mol_type = other DNA
tgtaatatgatgtggtgttatttacaatgtaataatgtgatgcttttgattgtatgatcttacattagctaaaggggtttcatgttagtttttcatttctactgtgttttgatgttgttt

SEQ ID NO: 43415 - DNA, 120 bp, synthetic construct
  source 1..120: mol_type = other DNA
atttacaaatagggattaggtgaagttcaaaagatttctcaaatactagacacataatgcagttttgtaacatttttcaaacatgggtgatcatggagtctctcttttggggtataatgt

SEQ ID NO: 43416 - DNA, 120 bp, synthetic construct
  source 1..120: mol_type = other DNA
ctgcctcccaaagtgctaggattacaggcgtgagccactgcgctcggccaattacttgcatttttaggaggcaatgctgaagagaaaaatataatgttgtctgcaatatgcataacctat

SEQ ID NO: 43417 - DNA, 120 bp, synthetic construct
  source 1..120: mol_type = other DNA
gcagttttaaacactgaaaaccatgaagttagtaagaatacaaagaatacatataggtcattattagagctttaattgataagccattgtatttttatttctgatttatattttccctaa

SEQ ID NO: 43418 - DNA, 120 bp, synthetic construct
  source 1..120: mol_type = other DNA
gtgagttgtgaaattgcccagggatcaattttggtaagactctgaggaaaccaggttggcagtgaatagtggtgatgaagcggcacacagttcagcagagagaagaacacataattaatg

SEQ ID NO: 43419 - DNA, 120 bp, synthetic construct
  source 1..120: mol_type = other DNA
agctgactctttgagcatgagatggatttggttgaagtacataggataaaatgaatttatctcattggaataccaccatataactagtaggaaatcctacggagtgtttattttgatttt

SEQ ID NO: 43420 - DNA, 120 bp, synthetic construct; identical to SEQ ID NO: 20952
  source 1..120: mol_type = other DNA

SEQ ID NO: 43421 - DNA, 120 bp, synthetic construct
  source 1..120: mol_type = other DNA
ggttcaagtgattctcccacctcagcctcctgagtagctgggattacaggtgtgcgcctccatgcccagctaatttttgtatattttagtaaagacggggttcaccatgttggccaggct

SEQ ID NO: 43422 - DNA, 120 bp, synthetic construct; identical to SEQ ID NO: 20953
  source 1..120: mol_type = other DNA

SEQ ID NO: 43423 - DNA, 120 bp, synthetic construct
  source 1..120: mol_type = other DNA
cacgtattatgacgccaataagagagacaggaaggaaaggtaatgggggccgggagccggggctgcgggaggaggcctgtggatgtggagaagtacccctttccaggctgagggctgcgg

SEQ ID NO: 43424 - DNA, 120 bp, synthetic construct; identical to SEQ ID NO: 20954
  source 1..120: mol_type = other DNA

SEQ ID NO: 43425 - DNA, 120 bp, synthetic construct
  source 1..120: mol_type = other DNA
cttgggctgacagagatttgaattctccctggtatggatgtctcagggtctggcccagtgaaggacctcggcatccagccacccctgccagtgttttggggctgacagagatttgaattc

SEQ ID NO: 43426 - DNA, 120 bp, synthetic construct
  source 1..120: mol_type = other DNA
tgacagagatttgaattctccctggcatggagttctggaggtcctgcccagtgaggcacctcccaaccggggcctccagccacccccgccagcgttctggggctgacagagatttgaatt

SEQ ID NO: 43427 - DNA, 120 bp, synthetic construct
  source 1..120: mol_type = other DNA
agggagaactcaaatctctgtcagccccagaacactggtgggggtggctggaggccccagttgggaggtcccccactgggccagaccccgagacctccatgccagagagaattcaaatct

SEQ ID NO: 43428 - DNA, 120 bp, synthetic construct; identical to SEQ ID NO: 43358
  source 1..120: mol_type = other DNA

SEQ ID NO: 43429 - DNA, 120 bp, synthetic construct; identical to SEQ ID NO: 20924
  source 1..120: mol_type = other DNA

SEQ ID NO: 43430 - DNA, 120 bp, synthetic construct
  source 1..120: mol_type = other DNA
cccgtctcttctacctctctagccatgtgtgtcatacccgttgtctcttcacctttagccacaagtaaaagccttctgggtccctgaccagaagctgtgcagatgccactgccattcttc

SEQ ID NO: 43431 - DNA, 120 bp, synthetic construct; identical to SEQ ID NO: 20925
  source 1..120: mol_type = other DNA

SEQ ID NO: 43432 - DNA, 120 bp, synthetic construct
  source 1..120: mol_type = other DNA
gtgcaaggtaaagcagccagtgctgatagagaagctgcagcaagttatccagaagatctagctaagatcattgatgagggcagttatgctaaataacagattttcaatgtagacaaaaca

SEQ ID NO: 43433 - DNA, 120 bp, synthetic construct
  source 1..120: mol_type = other DNA
agtacattcaagtttgatcatgaaactgcagaaattcagtcacaggctcaggctccagttttactcttagttctctccctagttccatcacactcacagttacttcctccactgaagtct

SEQ ID NO: 43434 - DNA, 120 bp, synthetic construct; identical to SEQ ID NO: 20926
  source 1..120: mol_type = other DNA

SEQ ID NO: 43435 - DNA, 120 bp, synthetic construct
  source 1..120: mol_type = other DNA
gatagcaacttctctttaattgcatccaaaagtctacattttcattctctctcccttacaattgtacaattttatgtcaaaacttacccttttagttcatacttatataccttagcaatt

SEQ ID NO: 43436 - DNA, 120 bp, synthetic construct
  source 1..120: mol_type = other DNA
aaattttttctgtaactcatgggccatttatgaatatgttaaattttgctattttatgtatttttcaagatttcttctgttacggatttctagctttatgccattgggatgcaaaaattt

SEQ ID NO: 43437 - DNA, 120 bp, synthetic construct
  source 1..120: mol_type = other DNA
tttttgaatcagggttcgttactgacattggcctagtattttcgtctcttgtagtgtccttgtctgtctttggtatcggaatgatggtaccctaataaaatgagtttggaagtatttcct

SEQ ID NO: 43438 - DNA, 120 bp, synthetic construct
  source 1..120: mol_type = other DNA
ttttgttcattttcacaatattaattcatcccatccacaagcatgaatttttttttcatttacttgtgtttttaaatttttgttcattggtgttttatagtttttcatatacaggacctt

SEQ ID NO: 43439 - DNA, 120 bp, synthetic construct
  source 1..120: mol_type = other DNA
cctccctgcactgggtgggtaactgactgttcttcagatgaacttttttttgttcaggttctaaagtcaaggctagggggcaatattagaagtcttttttggtcaacattaagccatagt

SEQ ID NO: 43440 - DNA, 120 bp, synthetic construct
  source 1..120: mol_type = other DNA
gaatttagtaaaccttcaatagatggcctaagatactaacaggggccatctcattaagctacacagttatttataaatgaaagtataatctagaacttacatgtcaaagtcttccactag

SEQ ID NO: 43441 - DNA, 120 bp, synthetic construct
  source 1..120: mol_type = other DNA
ctgtggaaaaattatctttcacaaaactgctgcctggtgccaaaaaggctggggactgctgctctatagcttctgcactagaatctactaatgagtaaaatttaaatcaataactagttt

SEQ ID NO: 43442 - DNA, 120 bp, synthetic construct; identical to SEQ ID NO: 20927
  source 1..120: mol_type = other DNA

SEQ ID NO: 43443 - DNA, 120 bp, synthetic construct
  source 1..120: mol_type = other DNA
atatgaaacataaatgaatttcatgtttagactcaggtaccatccgcaagatatttcattaggtatatgcaaatattccaaaatctgaaaaaaatctacttttggccccaagcattttgg

SEQ ID NO: 43444 - DNA, 120 bp, synthetic construct
  source 1..120: mol_type = other DNA
atttaattgataaaatgtaattcaaaagcaagaagaatgttgtgttttagtcctagagcaggggtctgtgaacttttctgtaaagggccagatagtgttatgtaaggctttgtgagccat

SEQ ID NO: 43445 - DNA, 120 bp, synthetic construct
  source 1..120: mol_type = other DNA
aactctctcaatttctgtgagaaatgatgcataattctcaactttcctaaggttaaatatttaagaaaaaaatatatgtataaaaaatggcagaatgaaagccagagattaagatatagg

SEQ ID NO: 43446 - DNA, 120 bp, synthetic construct; identical to SEQ ID NO: 20928
  source 1..120: mol_type = other DNA

SEQ ID NO: 43447 - DNA, 120 bp, synthetic construct
  source 1..120: mol_type = other DNA
gatgtgatgctagagtacaaaaccttcaagctgagtgcagaaagcaccgtcttttactagaagaagacaataaaatgttggtcaatgaactgaatcattcgaaagaaaaagaatgccaat

SEQ ID NO: 43448 - DNA, 120 bp, synthetic construct
  source 1..120: mol_type = other DNA
gcttcttttttgctttcatggattcactgtcttcaaataaacttttgaactttggggaatttatgctgtatgaggtttgaggttttgacttaacttcttttttcccagttagatatccag

SEQ ID NO: 43449 - DNA, 120 bp, synthetic construct
  source 1..120: mol_type = other DNA
cagaagagcaatataggatagaagctgatgtgacaaaaccaattaaaccggctctcaaatcagcagaggtggaattgaagacaggaggaaataattcaaatcaggtaaattaatgtttgg

SEQ ID NO: 43450 - DNA, 120 bp, synthetic construct; identical to SEQ ID NO: 1070
  source 1..120: mol_type = other DNA

SEQ ID NO: 43451 - DNA, 120 bp, synthetic construct; identical to SEQ ID NO: 20929
  source 1..120: mol_type = other DNA

SEQ ID NO: 43452 - DNA, 120 bp, synthetic construct
  source 1..120: mol_type = other DNA
ttttattcattcagataagatgaaaaatcagtatctgttactccatcagagctagtaacagattgcagcagagcttcagcacagcacatgctgcaaactagccagagtgctttgctttct

SEQ ID NO: 43453 - DNA, 120 bp, synthetic construct; identical to SEQ ID NO: 20930
  source 1..120: mol_type = other DNA

SEQ ID NO: 43454 - DNA, 120 bp, synthetic construct
  source 1..120: mol_type = other DNA
aagtacagctgtagctgcattccacaaattctggttgatgaatttttattcagttcagaatattttctattttctatttctattttcattacctgtttgacccagggttatttagatgtg

SEQ ID NO: 43455 - DNA, 120 bp, synthetic construct
  source 1..120: mol_type = other DNA
gatattccactgtatggctgtgtaaccacagtttattcactccactatgggaggatgtcttcgttgcatcacaaattggttgaatttttacattcgtgctcatgagggaattttcttgtt

SEQ ID NO: 43456 - DNA, 120 bp, synthetic construct
  source 1..120: mol_type = other DNA
aggaagaacatgggaatgtctgctttcactacttgtttgtagcattgttctgaagattctagttaatgcagtcaggcaagaaaaagaaataagaggcatccaagtttaaaaaaagaaata

SEQ ID NO: 43457 - DNA, 120 bp, synthetic construct
  source 1..120: mol_type = other DNA
ccaaaatctgaaaaacttctagtctgaagcattttgaataagggatattcagcctgtacctgtggcacactgtttttgttactattgatttatagtaattcttgaaatgaatcctccaat

SEQ ID NO: 43458 - DNA, 120 bp, synthetic construct; identical to SEQ ID NO: 20931
  source 1..120: mol_type = other DNA

SEQ ID NO: 43459 - DNA, 120 bp, synthetic construct
  source 1..120: mol_type = other DNA
gacataattcagtcatctcaaacagtctcagaggacggtgactcgctttgctgtaattgtaagaatgtcatattactcattgatcaacatgaaatgaagtgtaaaggtaggaccaatgca

SEQ ID NO: 43460 - DNA, 120 bp, synthetic construct; identical to SEQ ID NO: 20932
  source 1..120: mol_type = other DNA

SEQ ID NO: 43461 - DNA, 120 bp, synthetic construct
  source 1..120: mol_type = other DNA
gacttgtggtactataaaggcagtcactttaaaagattttatcactatatgaacagtgtacacttgagtgctttttcctaatattactaactaatgattaggcaaactttaaattattag

SEQ ID NO: 43462 - DNA, 120 bp, synthetic construct
  source 1..120: mol_type = other DNA
aaatgatgagagattttgtcaccatgaggcctgccctaaaagagctcctgaagaaagcactaaacatggaaaggaacaaccggtaccagccactgcaaaatcatgacaaaatataaagac

SEQ ID NO: 43463 - DNA, 120 bp, synthetic construct
  source 1..120: mol_type = other DNA
acagtgggaaatttatagcactaaatgcccacaagagaaagcaggaaagatccaaaattgacaccctaacatcacaattaaaagaactagaaaagcaagagcaaacacattcaaaagcta

SEQ ID NO: 43464 - DNA, 120 bp, synthetic construct
  source 1..120: mol_type = other DNA
aaaaggcctttgataaaattcaacaacccttcatgctaaaaactctcaataaattaggtattgatgggacgtatctcaaaataataagagctatctatgacaaacccacagccaatatca

SEQ ID NO: 43465 - DNA, 120 bp, synthetic construct; identical to SEQ ID NO: 43319
  source 1..120: mol_type = other DNA

SEQ ID NO: 43466 - DNA, 120 bp, synthetic construct
  source 1..120: mol_type = other DNA
acactctggggactgttgtggggtggggggaggggggagggatagcattaggaggtatacctaatgctaaatgacgagttaatgggtgcagcgtaccagcatggcacatatatacatatg

SEQ ID NO: 43467 - DNA, 120 bp, synthetic construct; identical to SEQ ID NO: 20905
  source 1..120: mol_type = other DNA

SEQ ID NO: 43468 - DNA, 120 bp, synthetic construct; identical to SEQ ID NO: 20935
  source 1..120: mol_type = other DNA

SEQ ID NO: 43469 - DNA, 120 bp, synthetic construct; identical to SEQ ID NO: 20936
  source 1..120: mol_type = other DNA

SEQ ID NO: 43470 - DNA, 120 bp, synthetic construct
  source 1..120: mol_type = other DNA
gaagtacaaatgaaaagatagcacaaagaaatggttaatgcttgaggtgatggataacccattaaccatgatgtcattattacacattgtatgcctgtatcaaactatctcatctactcc

SEQ ID NO: 43471 - DNA, 120 bp, synthetic construct
  source 1..120: mol_type = other DNA
ctcttacatttatatttttaattattaactgcataacctataccaatatacatcatgtgctaatcactttgttttaaaacccattcaggctacaattgaaaataaaaattctgttctgaa

SEQ ID NO: 43472 - DNA, 120 bp, synthetic construct; identical to SEQ ID NO: 20937
  source 1..120: mol_type = other DNA

SEQ ID NO: 43473 - DNA, 120 bp, synthetic construct; identical to SEQ ID NO: 20938
  source 1..120: mol_type = other DNA

SEQ ID NO: 43474 - DNA, 120 bp, synthetic construct; identical to SEQ ID NO: 20939
  source 1..120: mol_type = other DNA

SEQ ID NO: 43475 - DNA, 120 bp, synthetic construct
  source 1..120: mol_type = other DNA
taccttctcagttattgggcaagttaaagagcatgttgaatgtttgcagtataatggtttaatcattcggatatcttgcatgaaagtcatgcgggtgcatgtaccacctgctttgacatt

SEQ ID NO: 43476 - DNA, 120 bp, synthetic construct; identical to SEQ ID NO: 20940
  source 1..120: mol_type = other DNA

SEQ ID NO: 43477 - DNA, 120 bp, synthetic construct
  source 1..120: mol_type = other DNA
gtacttctacaaagtaaaactgctacaagcattagatattaataagtttaacattcagaaatcaatcaaatattcattgaaaggaccactttaggagttaattagaattcaacataattt

SEQ ID NO: 43478 - DNA, 120 bp, synthetic construct
  source 1..120: mol_type = other DNA
gccaaaaactaaaataaaaccgtgtcaatatcaacgtggatatgctgagtgatgaggacaaagtgatctaaaatcagaggagaaactcatacacctgagaatcaacgtgaaagcaggtgc

SEQ ID NO: 43479 - DNA, 120 bp, synthetic construct; identical to SEQ ID NO: 4605
  source 1..120: mol_type = other DNA

SEQ ID NO: 43480 - DNA, 120 bp, synthetic construct
  source 1..120: mol_type = other DNA
cagtggaagagtcctgaattgatcaccttggacacctgtttgctgataccaagtagataatattcattatctctcacacccatatggtgtaataatctgcctaagtttcttgtatccact

SEQ ID NO: 43481 - DNA, 120 bp, synthetic construct
  source 1..120: mol_type = other DNA
gaatcagaatgtgcagtttcgaccagccccccactgatttattcggggaagagaacttcttatctggactgaacatgacattaaatgtgttttgcaaagttacctgtcctagatgtttct

SEQ ID NO: 43482 - DNA, 120 bp, synthetic construct
  source 1..120: mol_type = other DNA
aagctttggaaaaaagctaatatagtcatattaaattttaactcatttgaataactaataaaaaatatatgtctgatgtctgatactaataaacaggaatgaggcactgtggtttatccc

SEQ ID NO: 43483 - DNA, 120 bp, synthetic construct; identical to SEQ ID NO: 1068
  source 1..120: mol_type = other DNA

SEQ ID NO: 43484 - DNA, 120 bp, synthetic construct
  source 1..120: mol_type = other DNA
tgggataaaccacagtgactcattactcctctttgttactgttgggcatcagagatatacgttttgttgatattagttattcaaatgagataaacatgaatatgcatatattggctttgc

SEQ ID NO: 43485 - DNA, 120 bp, synthetic construct
  source 1..120: mol_type = other DNA
ctatacggttaatagttcaacatataaatgagactttaattaccttctcagctggttgtttctgagaagacactgaaaagcaaaagggaaacataatcactcacatgtacatatgataaa

SEQ ID NO: 43486 - DNA, 120 bp, synthetic construct
  source 1..120: mol_type = other DNA
tttatctcatttttataagtaaagtcaacaaaacatgtatctctgatgcctaatagtaacaaagaggagtaatgagtcattgtgtttttatgccaattcaagaaatgtttcctgcttcca

SEQ ID NO: 43487 - DNA, 120 bp, synthetic construct
  source 1..120: mol_type = other DNA
ttaccttctcagctcgttgtttctgaggagacactgaaaagcaaaagggatacataatcaatcatatgtaaatatgataatgttatccatacattaatgcatggatagcatgttagcatc

SEQ ID NO: 43488 - DNA, 120 bp, synthetic construct; identical to SEQ ID NO: 1067
  source 1..120: mol_type = other DNA

SEQ ID NO: 43489 - DNA, 120 bp, synthetic construct
  source 1..120: mol_type = other DNA
gtttcttggatccactagtttatccctccaaaactttcttcgtcaagtcgtggcaccaaagggtaatatattagcctcaataaaaatatcatcaattatcaattttgacatacttctaca

SEQ ID NO: 43490 - DNA, 120 bp, synthetic construct
  source 1..120: mol_type = other DNA
gtcttttcttagcagtacgatgtgacgtctgtaaaatctgtacttcctctctttctccttccacccttagtgaaaccatgctgtagaattaatgcaaaactatgctgttccccagaaccc

SEQ ID NO: 43491 - DNA, 120 bp, synthetic construct
  source 1..120: mol_type = other DNA
cacagttaccatgacacttcagttgaacatacacttcacatcccttcagtggaagtgtcctaaattgatcaccttggatatctgtttgctgatacctagtagataatattcattatctct

SEQ ID NO: 43492 - DNA, 120 bp, synthetic construct; identical to SEQ ID NO: 20808
  source 1..120: mol_type = other DNA

SEQ ID NO: 43493 - DNA, 120 bp, synthetic construct; identical to SEQ ID NO: 20809
  source 1..120: mol_type = other DNA

SEQ ID NO: 43494 - DNA, 120 bp, synthetic construct; identical to SEQ ID NO: 1067
  source 1..120: mol_type = other DNA

SEQ ID NO: 43495 - DNA, 120 bp, synthetic construct; identical to SEQ ID NO: 20810
  source 1..120: mol_type = other DNA

SEQ ID NO: 43496 - DNA, 120 bp, synthetic construct
  source 1..120: mol_type = other DNA
tgcacctgtttcccccttaaagcatgtctttttgacatgtcctgactctgagaaaatccagtgtgtgcttttcagagactaacagtaaggagtggaaatggccaatggtcaaagtgttac

SEQ ID NO: 43497 - DNA, 120 bp, synthetic construct
  source 1..120: mol_type = other DNA
gtatgatctttgacaaacctgacaaaaagcaatcagtggggaaaagattacctatttaataaatgatgttgggaaaactggctagccttatgcaggaaactgaaactggaccccttcctt

SEQ ID NO: 43498 - DNA, 120 bp, synthetic construct
  source 1..120: mol_type = other DNA
ctactataaagacacatgcacatctatgtctattgcagcactactcacaatagcaaagacttggaaccagcccgaatgcccatcagtgatagactggataaagaaaatgtggcatataca

SEQ ID NO: 43499 - DNA, 120 bp, synthetic construct
  source 1..120: mol_type = other DNA
cacatttttaaaatttcttttccttgttcttctaaatatcattttataagcatagacactaacagcatcagcatcatttagatcaaatccttctatcttactggggtaaaagaagtaaga

SEQ ID NO: 43500 - DNA, 120 bp, synthetic construct
  source 1..120: mol_type = other DNA
catgtaccctaaaacttaaagtataataataataaaataaataaataaataaataatactcaagaaatatatttcttgattgttttgcttccacagtcagtttgacatgcagtgcatcac

SEQ ID NO: 43501 - DNA, 120 bp, synthetic construct
  source 1..120: mol_type = other DNA
aattcgtgtatttaaagttttcagaaaagcacaaaatacaggaaaacacagcggtgaggcattatagagcatttcttcatctggagactatcatttgacatctggaaaccctttataggg

SEQ ID NO: 43502 - DNA, 120 bp, synthetic construct
  source 1..120: mol_type = other DNA
taatgtcagcaggtatagcttttctctagatgaagaagagagtattgcaatcaattttgaagcactgaaaatatttagtgtcaaaatacacctactcaaatccctaacatgcaaaggaat

SEQ ID NO: 43503 - DNA, 120 bp, synthetic construct
  source 1..120: mol_type = other DNA
gacgtcaaatgagagaaccaaagcggaccccagaagaataaatgttagaaactatgaagttgcaatgagagtgcatgaaaatgtatcattcgcggccgggcgcggtggctcacgcctata

SEQ ID NO: 43504 - DNA, 120 bp, synthetic construct
  source 1..120: mol_type = other DNA
ttctttaaaaacagtgctgtttttgatgaaatagccattgtataaatgtacctcagaggctgctatgctatagcatatcaaactgactttagaaaaaaacaaacgagaaatttctttctt

SEQ ID NO: 43505 - DNA, 120 bp, synthetic construct
  source 1..120: mol_type = other DNA
ttaaaatacctttaaaatacctttaaccatttctcatatcttattactgtaatacactgtctgccctatacttttggaatgttcgtttttgtttctctcttctccccatgtttatctgta

SEQ ID NO: 43506 - DNA, 120 bp, synthetic construct; identical to SEQ ID NO: 1065
  source 1..120: mol_type = other DNA

SEQ ID NO: 43507 - DNA, 120 bp, synthetic construct; identical to SEQ ID NO: 1063
  source 1..120: mol_type = other DNA

SEQ ID NO: 43508 - DNA, 120 bp, synthetic construct
  source 1..120: mol_type = other DNA
gcagatcatatgaggtcaggtgttcaagaccagcctggccaacatggtgaaactccatctctaccaaaaatacaaaaatagccaggtgtggtggtgcacacctgtaatcccagctactcg

SEQ ID NO: 43509 - DNA, 120 bp, synthetic construct
  source 1..120: mol_type = other DNA
cagtgtaagttgcttctattctgtgtgtcaaaagctaaaaacaaattattgtataacctccgctccttccaaaaaagacagaacaaagcaaccatccaccttatggagcaatgattcatg

SEQ ID NO: 43510 - DNA, 120 bp, synthetic construct
  source 1..120: mol_type = other DNA
cacaatagcaaagacttggaaccaacccaaatgtccaacaatgatagactggattaagaaaatgtggcacatatacaccatggaatactatgcagccacaaaaaatgatgagttcatgtc

SEQ ID NO: 43511 - DNA, 120 bp, synthetic construct
  source 1..120: mol_type = other DNA
tgtttaaaataacaacctgtttgataagcagagactcttcatatttctatgatcagactttaatttctcatggtttctgcgttgtaattaaaaaaaatccactcagggtctttgtatctc

SEQ ID NO: 43512 - DNA, 120 bp, synthetic construct
  source 1..120: mol_type = other DNA
ttttggaggggacctgcatgtatagactgacggtttttgttttcttttaagaaatgaacgtgctcatttttgtaatatctttttgctctgtaggtgtctctacctactggaccgttttgc

SEQ ID NO: 43513 - DNA, 120 bp, synthetic construct; identical to SEQ ID NO: 20818
  source 1..120: mol_type = other DNA

SEQ ID NO: 43514 - DNA, 120 bp, synthetic construct
  source 1..120: mol_type = other DNA
cctaagcatagatggatagaggcctatgcagcaatggggccatggtacttatttacatcagatcaattcagaaagtcacattttgttatatattaactgtctttagagtgttatttagaa

SEQ ID NO: 43515 - DNA, 120 bp, synthetic construct
  source 1..120: mol_type = other DNA
gtagtaatggtgggtattatcctattttaacttgctccatgttattcttaaacctattgtgtttttcttctagattatttcaaaactatacatcccaaagagaaagattatttctccacg

SEQ ID NO: 43516 - DNA, 120 bp, synthetic construct; identical to SEQ ID NO: 20819
  source 1..120: mol_type = other DNA

SEQ ID NO: 43517 - DNA, 120 bp, synthetic construct
  source 1..120: mol_type = other DNA
taatattagaaattgtggaaatttaactagacatggtatcatgtgcctgtagtcccacctattcaagagatcaagtcaggagaatttcttgagcccaggattttaagaccaagcttgaca

SEQ ID NO: 43518 - DNA, 120 bp, synthetic construct; identical to SEQ ID NO: 20820
  source 1..120: mol_type = other DNA

SEQ ID NO: 43519 - DNA, 120 bp, synthetic construct
  source 1..120: mol_type = other DNA
accagggagctggagattgcttaagtacatagatctgtgatccagggtggatgtctctttttttctgactcttttctcaattctctcatgtacatgtagggtgggacaaatgtaggattg

SEQ ID NO: 43520 - DNA, 120 bp, synthetic construct
  source 1..120: mol_type = other DNA
accatcaaaattttaaaggcagatatcagttacctgtggccacaagaccgtaagttttttgtaagcaagactaggccagtcctagaaaaatattattttactgtgcatggagaataccta

SEQ ID NO: 43521 - DNA, 120 bp, synthetic construct
  source 1..120: mol_type = other DNA
cctgtaatcccagcactttgtgaggctgaggtgagtggataacttgaggtcaggagttcgaaaccaacctggccaacatggcgaaagccggtctctagtaaaaatacaaaaattaccagg

SEQ ID NO: 43522 - DNA, 120 bp, synthetic construct
  source 1..120: mol_type = other DNA
tcctgcttccagtagttccaggagcagccaaaatcaaattttcctttatgcaaacattctaaatgcatctgaagtgagttccctcaggtttcctcagcagaaacactaaaattaaataaa

SEQ ID NO: 43523 - DNA, 120 bp, synthetic construct
  source 1..120: mol_type = other DNA
atttcatagactatacagttaattattcaaaatatgaatgagagtataataccttcaaggccggttgtttctgagaagacactgaaaaccagaagggatacataatcactcatatgtaaa

SEQ ID NO: 43524 - DNA, 120 bp, synthetic construct; identical to SEQ ID NO: 43522
  source 1..120: mol_type = other DNA

SEQ ID NO: 43525 - DNA, 120 bp, synthetic construct
  source 1..120: mol_type = other DNA
cctaaagtatatttcatagactatacagttaattattcaaaatatgaatgagagtataataccttcaaggccggttgtttctgagaagacactgaaaaccagaagggatacataatcact

SEQ ID NO: 43526 - DNA, 120 bp, synthetic construct
  source 1..120: mol_type = other DNA
acaaagccaatatatgcatattcatgattagcctatttgaatagctaataccaacaaaacatatatctctgatgcccaatagttacaaagaggggtaatgtgtcactgtgggttatcaca

SEQ ID NO: 43527 - DNA, 120 bp, synthetic construct
  source 1..120: mol_type = other DNA
ggtgcatgagttgcttctctgtttttagaccacatttgtttttatccctccatatatccacaatgatactgacactgtttcattttagttttagacatatgaaaaatcatatcacatttg

SEQ ID NO: 43528 - DNA, 120 bp, synthetic construct
  source 1..120: mol_type = other DNA
tatgtctctgattcccaatagtaacaaagagaagtaacgagtcactgtggtttatctgaattctagtactctttccttctgccagtagtttctggagcagccaaaatcaaatcatctttt

SEQ ID NO: 43529 - DNA, 120 bp, synthetic construct; identical to SEQ ID NO: 20882
  source 1..120: mol_type = other DNA

SEQ ID NO: 43530 - DNA, 120 bp, synthetic construct
  source 1..120: mol_type = other DNA
tcccatacttctgtttcatttctaatatagtacaaatcaataaaagcaaccacataagcatatccatgctggtatgtcaccatatttatgtccatatggtatcaacatgaagagagcata

SEQ ID NO: 43531 - DNA, 120 bp, synthetic construct
  source 1..120: mol_type = other DNA
tcttcacagaattagaaaaaactactttaaatttcatatggaaccaaaaaaagagcccatatagccaagacaatcctaagcaaaaagaacaaattttgaggcatcatgctacctgacttc

SEQ ID NO: 43532 - DNA, 120 bp, synthetic construct; identical to SEQ ID NO: 43403
  source 1..120: mol_type = other DNA

SEQ ID NO: 43533 - DNA, 120 bp, synthetic construct; identical to SEQ ID NO: 20827
  source 1..120: mol_type = other DNA

SEQ ID NO: 43534 - DNA, 120 bp, synthetic construct; identical to SEQ ID NO: 20945
  source 1..120: mol_type = other DNA

SEQ ID NO: 43535 - DNA, 120 bp, synthetic construct; identical to SEQ ID NO: 20946
  source 1..120: mol_type = other DNA

SEQ ID NO: 43536 - DNA, 120 bp, synthetic construct; identical to SEQ ID NO: 20880
  source 1..120: mol_type = other DNA

SEQ ID NO: 43537 - DNA, 120 bp, synthetic construct; identical to SEQ ID NO: 20828
  source 1..120: mol_type = other DNA

SEQ ID NO: 43538 - DNA, 120 bp, synthetic construct; identical to SEQ ID NO: 20829
  source 1..120: mol_type = other DNA

SEQ ID NO: 43539 - DNA, 120 bp, synthetic construct
  source 1..120: mol_type = other DNA
agatatagaccaatggaacagaacagagccatcagaaataatgctgcatgtctacaactatcgatctttgacaaacctgagaaaaacaagcaatggggaaaggattccctatttaataaa

SEQ ID NO: 43540 - DNA, 120 bp, synthetic construct; identical to SEQ ID NO: 20830
  source 1..120: mol_type = other DNA

SEQ ID NO: 43541 - DNA, 120 bp, synthetic construct; identical to SEQ ID NO: 20831
  source 1..120: mol_type = other DNA

SEQ ID NO: 43542 - DNA, 120 bp, synthetic construct; identical to SEQ ID NO: 20832
  source 1..120: mol_type = other DNA

SEQ ID NO: 43543 - DNA, 120 bp, synthetic construct; identical to SEQ ID NO: 20833
  source 1..120: mol_type = other DNA

SEQ ID NO: 43544 - DNA, 120 bp, synthetic construct
  source 1..120: mol_type = other DNA
cttaggaccctgatgcaaatatttatgtaattataatcttaggaccctggtacataactcctttaaaaatctatttgtattctagtttccaattcattcttacctaacttattttatttt

SEQ ID NO: 43545 - DNA, 120 bp, synthetic construct; identical to SEQ ID NO: 20834
  source 1..120: mol_type = other DNA

SEQ ID NO: 43546 - DNA, 120 bp, synthetic construct; identical to SEQ ID NO: 20835
  source 1..120: mol_type = other DNA

SEQ ID NO: 43547 - DNA, 120 bp, synthetic construct; identical to SEQ ID NO: 20836
  source 1..120: mol_type = other DNA

SEQ ID NO: 43548 - DNA, 120 bp, synthetic construct; identical to SEQ ID NO: 43365
  source 1..120: mol_type = other DNA

SEQ ID NO: 43549 - DNA, 120 bp, synthetic construct
  source 1..120: mol_type = other DNA
gccaacatggtgaaaccccgtctttactaaaatatacaaaaattagctggccatggtggcacacatctgtaatcccagctactcaggaggctgaggtgggagaatcacttgaacctgaga

SEQ ID NO: 43550 - DNA, 120 bp, synthetic construct
  source 1..120: mol_type = other DNA
ttgtgatatttgtaggaatataaacatgaatcaatataagtaggcatttgtggttttttctgttatctcttattttgtgcatttaaagtttttaatctacattccataacgaacttattt

SEQ ID NO: 43551 - DNA, 120 bp, synthetic construct
  source 1..120: mol_type = other DNA
gggggcgagcacccaggtcattttcacaagcagcaaaacaaaaacaaaacttcagctggtttccaatcactcaccatgctgcttctttataaatcattttaaagtgatttcactaataaa

SEQ ID NO: 43552 - DNA, 120 bp, synthetic construct
  source 1..120: mol_type = other DNA
ctcccgacgctcggagccccccgcgctgggccctctgcagcccagggatggggttgagtggtgcttctccgcctagtgccaccgctgggcccacagcccgacatcgccactgcgtcgccc

SEQ ID NO: 43553 - DNA, 120 bp, synthetic construct
  source 1..120: mol_type = other DNA
tcactcgcttgcctgccactcacctcctgctgtgcagcctggttcctaacaggtcatggacctgtctgtgacctgggggttggggacccctgctatagaggattcagatttaaattcaga

SEQ ID NO: 43554 - DNA, 120 bp, synthetic construct
  source 1..120: mol_type = other DNA
cttaactaattattatcacgagtgtggggtctgttagccttaaatcactaccttaaccttgagaagttgacgatgcctttgttttgtgagaacagtttcagtttgcaggctgatagttct

SEQ ID NO: 43555 - DNA, 120 bp, synthetic construct
  source 1..120: mol_type = other DNA
cgtaattttttttaaatcatgtaaattctaaacaaacttctgaaggtataattacacaaattcttagcaatcacaaaagtagacgattgggctactgtgtcattttctacctgtgttttg

SEQ ID NO: 43556 - DNA, 120 bp, synthetic construct
  source 1..120: mol_type = other DNA
attccattagacattatcctctgaattaatctggcttgcctcaccatgccaatagagaaatcattaaaaatagacgtttaacaggaaaaaaactctctcaatttctgtgagaaatgatgc

SEQ ID NO: 43557 - DNA, 120 bp, synthetic construct; identical to SEQ ID NO: 20928
  source 1..120: mol_type = other DNA

SEQ ID NO: 43558 - DNA, 120 bp, synthetic construct
  source 1..120: mol_type = other DNA
ttttttctttcgaatgattcaattcattcaccaacattttattgtcttcttctagtaagagacggtgctttctgcactcagcttgaaggttttctactctagcatcacatctggcttgaa

SEQ ID NO: 43559 - DNA, 120 bp, synthetic construct; identical to SEQ ID NO: 43448
  source 1..120: mol_type = other DNA

SEQ ID NO: 43560 - DNA, 120 bp, synthetic construct; identical to SEQ ID NO: 43449
  source 1..120: mol_type = other DNA

SEQ ID NO: 43561 - DNA, 120 bp, synthetic construct
  source 1..120: mol_type = other DNA
atgtttggctcagaataaatctcttcaaatatcttacagagtttgactctctttgttgatattagaaaataaaacattcgtatgttggtttattatcctaataaaatttctatgttctta

SEQ ID NO: 43562 - DNA, 120 bp, synthetic construct; identical to SEQ ID NO: 20790
  source 1..120: mol_type = other DNA

SEQ ID NO: 43563 - DNA, 120 bp, synthetic construct; identical to SEQ ID NO: 20791
  source 1..120: mol_type = other DNA

SEQ ID NO: 43564 - DNA, 120 bp, synthetic construct; identical to SEQ ID NO: 20792
  source 1..120: mol_type = other DNA

SEQ ID NO: 43565 - DNA, 120 bp, synthetic construct; identical to SEQ ID NO: 20793
  source 1..120: mol_type = other DNA

SEQ ID NO: 43566 - DNA, 120 bp, synthetic construct; identical to SEQ ID NO: 20794
  source 1..120: mol_type = other DNA

SEQ ID NO: 43567 - DNA, 120 bp, synthetic construct; identical to SEQ ID NO: 20795
  source 1..120: mol_type = other DNA

SEQ ID NO: 43568 - DNA, 120 bp, synthetic construct; identical to SEQ ID NO: 20906
  source 1..120: mol_type = other DNA

SEQ ID NO: 43569 - DNA, 120 bp, synthetic construct; identical to SEQ ID NO: 20796
  source 1..120: mol_type = other DNA

SEQ ID NO: 43570 - DNA, 120 bp, synthetic construct
  source 1..120: mol_type = other DNA
cctttctttctcattcatactctgggtccccagaatatgcttgccagtcaccttcagagctttatttaaatacaaataaagtagactgtgaaaacgacaacaaaccagatactgaacatg

SEQ ID NO: 43571 - DNA, 120 bp, synthetic construct
  source 1..120: mol_type = other DNA
ctgaataggaacagctccagtctacagctcccagcgtgagcgacgcagaagatgggtggtttctgcatttccatctgaggtaccaggttcatctcactaaagagtgccagacagtgggtg

SEQ ID NO: 43572 - DNA, 120 bp, synthetic construct
  source 1..120: mol_type = other DNA
ctctggtagaaggaaaactaacaaacagaaaggacatccacatcaaaaacccatctgtacatcaccatcatcaaagaccaaaagtagataaaacctcaaagatggggaaaaaacagagca

SEQ ID NO: 43573 - DNA, 120 bp, synthetic construct
  source 1..120: mol_type = other DNA
ttgcttgtctgtgaagtattttatttctccttcacttatgaagcttagtttggcaggatatgaaattctgggttgaaaattcttttctttaagaatgttgaatattggcccccactctct

SEQ ID NO: 43574 - DNA, 120 bp, synthetic construct
  source 1..120: mol_type = other DNA
aattgaccacatacttggaagtaaagctctcctcagcaaatgtaaaagaacgaaagtataacaaactgtctgtcagaccacagtgcaatcaaactagaactcaggattaagaaactcact

SEQ ID NO: 43575 - DNA, 120 bp, synthetic construct
  source 1..120: mol_type = other DNA
taccaaagccgggcagagacacaaccaaaaaagagaattttagaccagtatccttaatgaacattgatgcaaaaatcctcgataaaatatgggcaaaccaaatccagcagcacatcaaaa

SEQ ID NO: 43576 - DNA, 120 bp, synthetic construct
  source 1..120: mol_type = other DNA
tttccaattcagtgaagaaagtctttgggagcttgatggtgatggcattgaatctataaattaccttgggcagtatggccattttaaccatactgattcttcctacccatgagcatggaa

SEQ ID NO: 43577 - DNA, 120 bp, synthetic construct
  source 1..120: mol_type = other DNA
ccagaactagaaataccatttgaccctgccatcccattactgggtatatacccaaaggactataaatcatgctgctataaagacacatgcacacgtatgtttattgcggcactattcaca

SEQ ID NO: 43578 - DNA, 120 bp, synthetic construct
  source 1..120: mol_type = other DNA
ttcattttaaaaacatttaactagttataaaacttaaaatagtgttggaatctatagcaacttgtatcttatctttactcttggaactgagttaaaaagttcctgatattgtttgcactt

SEQ ID NO: 43579 - DNA, 120 bp, synthetic construct; identical to SEQ ID NO: 20797
  source 1..120: mol_type = other DNA

SEQ ID NO: 43580 - DNA, 120 bp, synthetic construct; identical to SEQ ID NO: 20798
  source 1..120: mol_type = other DNA

SEQ ID NO: 43581 - DNA, 120 bp, synthetic construct; identical to SEQ ID NO: 20799
  source 1..120: mol_type = other DNA

SEQ ID NO: 43582 - DNA, 120 bp, synthetic construct
  source 1..120: mol_type = other DNA
tcattttggtggctgtattcagaacagaatctttattttcaattgtagcctgaatgggttttaaaacaaagtgattagcacatgatgtatattggtataggttatgcagttaataattaa

SEQ ID NO: 43583 - DNA, 120 bp, synthetic construct; identical to SEQ ID NO: 20800
  source 1..120: mol_type = other DNA

SEQ ID NO: 43584 - DNA, 120 bp, synthetic construct; identical to SEQ ID NO: 20938
  source 1..120: mol_type = other DNA

SEQ ID NO: 43585 - DNA, 120 bp, synthetic construct
  source 1..120: mol_type = other DNA
gatggtacttgatcccacaggtctttcatgcaagaaatcaaaaggatttacaccattatactacagacattcatcatgctctttaacttgcccgataacagagaaggtacacaattacaa

SEQ ID NO: 43586 - DNA, 120 bp, synthetic construct
  source 1..120: mol_type = other DNA
ctcaggtgaccctgatggtgctggtccttgaccatgatctgagtagtaagattgtagacttccctacattgaaattgggaagaagagccataggagagcggttcagcacataacagcctc

SEQ ID NO: 43587 - DNA, 120 bp, synthetic construct; identical to SEQ ID NO: 20801
  source 1..120: mol_type = other DNA

SEQ ID NO: 43588 - DNA, 120 bp, synthetic construct
  source 1..120: mol_type = other DNA
aattgggaagaagaaatatggagagcagttcaagacataaggggctcaggggaacagcataattttgctttaattctacagcatgttttcaataagggtagaaggagaaagacatgaagt

SEQ ID NO: 43589 - DNA, 120 bp, synthetic construct
  source 1..120: mol_type = other DNA
actttagccttccgaaagtttcttcatccagtcgtggcaccaaaggacaatatattagcctcaataaaaatatcatcaattatcaattttgacatacctatacaaagtaaagctgctaca

SEQ ID NO: 43590 - DNA, 120 bp, synthetic construct
  source 1..120: mol_type = other DNA
gcatcagcatcacccaacaacttactacaaatgaagaatctccggcctgctgaatcagaaagtgcagcttcgacgagccacccgctgctttatttggagaagagaacttcttatctatct

SEQ ID NO: 43591 - DNA, 120 bp, synthetic construct; identical to SEQ ID NO: 20802
  source 1..120: mol_type = other DNA

SEQ ID NO: 43592 - DNA, 120 bp, synthetic construct; identical to SEQ ID NO: 20803
  source 1..120: mol_type = other DNA

SEQ ID NO: 43593 - DNA, 120 bp, synthetic construct
  source 1..120: mol_type = other DNA
aataaaaatatcatcaattgtcaactttgacatacttctacaaagtcaaatggctacaagcattagatattaatcagtttttcattcagaaatcactgcaatattcattgaaaatgacca

SEQ ID NO: 43594 - DNA, 120 bp, synthetic construct
  source 1..120: mol_type = other DNA
ttctgagaaaccatcaggcttgaaggtaatgaaactgtcatttatattgtgaactagtaaatgtatagtctatgaaacatactttattaatttattatttcatttgaaattccattcagg

SEQ ID NO: 43595 - DNA, 120 bp, synthetic construct
  source 1..120: mol_type = other DNA
agctgctacaagcattagatattgaccagttattcattcagaaatcactgcaatattcactataaatgaccattttaggagttaattagaatccagcataatttttgtttctaaaatagc

SEQ ID NO: 43596 - DNA, 120 bp, synthetic construct; identical to SEQ ID NO: 20804
  source 1..120: mol_type = other DNA

SEQ ID NO: 43597 - DNA, 120 bp, synthetic construct; identical to SEQ ID NO: 20805
  source 1..120: mol_type = other DNA

SEQ ID NO: 43598 - DNA, 120 bp, synthetic construct; identical to SEQ ID NO: 20803
  source 1..120: mol_type = other DNA

SEQ ID NO: 43599 - DNA, 120 bp, synthetic construct; identical to SEQ ID NO: 43593
  source 1..120: mol_type = other DNA

SEQ ID NO: 43600 - DNA, 120 bp, synthetic construct; identical to SEQ ID NO: 20806
  source 1..120: mol_type = other DNA

SEQ ID NO: 43601 - DNA, 120 bp, synthetic construct
  source 1..120: mol_type = other DNA
cttgttgggagtatcacgttgttctctaaagaagtttcatgaaatagctattgtatccaagaggtagctccttgaacaaggaagccaatgtattcagattcaactttgtctcatttctat

SEQ ID NO: 43602 - DNA, 120 bp, synthetic construct; identical to SEQ ID NO: 20804
  source 1..120: mol_type = other DNA

SEQ ID NO: 43603 - DNA, 120 bp, synthetic construct; identical to SEQ ID NO: 20805
  source 1..120: mol_type = other DNA

SEQ ID NO: 43604 - DNA, 120 bp, synthetic construct; identical to SEQ ID NO: 20803
  source 1..120: mol_type = other DNA

SEQ ID NO: 43605 - DNA, 120 bp, synthetic construct
  source 1..120: mol_type = other DNA
gtcaaatggctacaagcattagatattaatcagtttttcattcagaaatcactgcaatattcattgaaaatgaccattttaggagttagttagaattcaacatcattcttgtgtctaaaa

SEQ ID NO: 43606 - DNA, 120 bp, synthetic construct
  source 1..120: mol_type = other DNA
ctctcctagttttttctccatacttttttcctctggctatattcaaaagagaatctttctcgtctcttgtagcctgaatggaatttgaaatgcaataataaattaataaagtatgcttca

SEQ ID NO: 43607 - DNA, 120 bp, synthetic construct; identical to SEQ ID NO: 43601
  source 1..120: mol_type = other DNA

SEQ ID NO: 43608 - DNA, 120 bp, synthetic construct; identical to SEQ ID NO: 20807
  source 1..120: mol_type = other DNA

SEQ ID NO: 43609 - DNA, 120 bp, synthetic construct
  source 1..120: mol_type = other DNA
acattcatcatgctctttaacttgaccaataaccgagaaggcacacaattacgatgacacttcagttgaatgtacacttcacatctcttcagtggaagtgtcctgaattgatcaccttgg

SEQ ID NO: 43610 - DNA, 120 bp, synthetic construct
  source 1..120: mol_type = other DNA
aattatgttgttccccagagccccttatgccttgaactgctctccatatttcttcttcccaatttcaatatggggaagtgtataatcttacggcgaagatcacgttccagaccagcagca

SEQ ID NO: 43611 - DNA, 120 bp, synthetic construct; identical to SEQ ID NO: 12151
  source 1..120: mol_type = other DNA

SEQ ID NO: 43612 - DNA, 120 bp, synthetic construct
  source 1..120: mol_type = other DNA
ttatagattcaatgccatccccatcaagctaccaatgactttcttcacagaattggtaaaaactactttaaagttcacatggaaccaaaaaagagcccgcgttgccaagacaatcctaag

SEQ ID NO: 43613 - DNA, 120 bp, synthetic construct
  source 1..120: mol_type = other DNA
tgacccagccatcccattactgggtatatacccaaaggactataaatcatgctgctataaagacacatgcacacgtatgtttattgtggcactattcacaacagcaaagacttggaacca

SEQ ID NO: 43614 - DNA, 120 bp, synthetic construct
  source 1..120: mol_type = other DNA
taagaagcacattttgaaaatttttgggaataattttgcaggactaccacttgttgggttgcataaattctatggccagatgtggtggctcatgcctgtaatcccagcacttcaagaggc

SEQ ID NO: 43615 - DNA, 120 bp, synthetic construct
  source 1..120: mol_type = other DNA
tgcctcccaggctcaagtgattctcctgcctcagcctcctgagtagctgggattacaggcacccaccaccacattcagctaatttttgtaattttagtagagatgggtttcatcatgttg

SEQ ID NO: 43616 - DNA, 120 bp, synthetic construct
  source 1..120: mol_type = other DNA
atctcctaatgctatcctccccactccccccactccacaacagtccccggtgtgtgatgttccccttcctgtgtccatgtgttctcattgttcaattcccacctatgagtgagaacatgt

SEQ ID NO: 43617 - DNA, 120 bp, synthetic construct
  source 1..120: mol_type = other DNA
aattagattccatttgtcaactttggcttttgttgccattgcttttggtgttttagacatgaagtccttgcccatgcctatgtcctgaatggtattgcctaggttttcttctagggtttt

SEQ ID NO: 43618 - DNA, 120 bp, synthetic construct
  source 1..120: mol_type = other DNA
cacccagcctgcaaatgtttattttttcaattacccaagcatggtgggaggatcacttgagtgcaggagttacaggttacagtgagctatgatcatgataactccactgcattccagcct

SEQ ID NO: 43619 - DNA, 120 bp, synthetic construct
  source 1..120: mol_type = other DNA
cctccgcccagcagccgccccgtctgagaagtgaggagcccctccgcctggcagctgccccgtctgggaagtgaggagcatctccgcccggcagccgccccctctgggagggaggtgggg

SEQ ID NO: 43620 - DNA, 120 bp, synthetic construct
  source 1..120: mol_type = other DNA
tggtaggaatgtaaattaatttaaccattgtggaagacagtatggcaattcctcaaagatctagagacagaaataccatttgacccagcaatcccgttactgggtatatacccaagggaa

SEQ ID NO: 43621 - DNA, 120 bp, synthetic construct
  source 1..120: mol_type = other DNA
acttcaaggtgaaaaatgagaagctttccaactaagatcaggaagaaggtaaaaatgtctcacaactttccttccttccttccttccttccttccttccttccttccttccttccttctt

SEQ ID NO: 43622 - DNA, 120 bp, synthetic construct; identical to SEQ ID NO: 26576
  source 1..120: mol_type = other DNA

SEQ ID NO: 43623 - DNA, 120 bp, synthetic construct; identical to SEQ ID NO: 26577
  source 1..120: mol_type = other DNA

SEQ ID NO: 43624 - DNA, 120 bp, synthetic construct
  source 1..120: mol_type = other DNA
ttgtggtaagccaagattacgcctttacgctccagcctgggcaacaagagtgaaactctgtctcaaaaaaaaaaatagtacttatttcaaggggaagctgagccttgacatgttaacttg

SEQ ID NO: 43625 - DNA, 120 bp, synthetic construct; identical to SEQ ID NO: 26579
  source 1..120: mol_type = other DNA

SEQ ID NO: 43626 - DNA, 120 bp, synthetic construct; identical to SEQ ID NO: 26580
  source 1..120: mol_type = other DNA

SEQ ID NO: 43627 - DNA, 120 bp, synthetic construct
  source 1..120: mol_type = other DNA
atgttggcggagggacctcgtgggaggtgattagatcataggggtggttcccccatgctgctgttctcataatagtgagttctcatgagatctgatggtttttttaaaatttaatttaat

SEQ ID NO: 43628 - DNA, 120 bp, synthetic construct
  source 1..120: mol_type = other DNA
actaaacacaacatccattcttcagcccatggatcaaagagttaatttctattttcaagtcttatttaagaaatatggccgggtgcggtggctcacgcctgtaatcctagcactttggga

SEQ ID NO: 43629 - DNA, 120 bp, synthetic construct; identical to SEQ ID NO: 28131
  source 1..120: mol_type = other DNA

SEQ ID NO: 43630 - DNA, 120 bp, synthetic construct; identical to SEQ ID NO: 28132
  source 1..120: mol_type = other DNA

SEQ ID NO: 43631 - DNA, 120 bp, synthetic construct; identical to SEQ ID NO: 28133
  source 1..120: mol_type = other DNA

SEQ ID NO: 43632 - DNA, 120 bp, synthetic construct
  source 1..120: mol_type = other DNA
aaggatctgggcatgatccacaaagctgccatcgcaggtgatgtgaacaaggtgatggagagcatcttgctcaggctgaatgacttgaacgacagggacaagaagaacaggtaaggggaa

SEQ ID NO: 43633 - DNA, 120 bp, synthetic construct
  source 1..120: mol_type = other DNA
agctgacctggtggccagaaaatgccagcttaacctcactgacagtgaaaacaggacagctctgatcaaggtatatggtagccaactctttcagcatgggatggatttaatttaaattca

SEQ ID NO: 43634 - DNA, 120 bp, synthetic construct; identical to SEQ ID NO: 5742
  source 1..120: mol_type = other DNA

SEQ ID NO: 43635 - DNA, 120 bp, synthetic construct; identical to SEQ ID NO: 27706
  source 1..120: mol_type = other DNA

SEQ ID NO: 43636 - DNA, 120 bp, synthetic construct; identical to SEQ ID NO: 27707
  source 1..120: mol_type = other DNA

SEQ ID NO: 43637 - DNA, 120 bp, synthetic construct; identical to SEQ ID NO: 13149
  source 1..120: mol_type = other DNA

SEQ ID NO: 43638 - DNA, 120 bp, synthetic construct
  source 1..120: mol_type = other DNA
ccaaccaaaatgtccaacaatgatagattggattaagaaaatgtggcacttatacaccatggaatactatgcagccatgagttcatgtcctttgtagggacatagatgaagctggaaacc

SEQ ID NO: 43639 - DNA, 120 bp, synthetic construct; identical to SEQ ID NO: 13150
  source 1..120: mol_type = other DNA

SEQ ID NO: 43640 - DNA, 120 bp, synthetic construct
  source 1..120: mol_type = other DNA
caacctcccaaagtgttgggattacaggcacaagccactgcccctgccctatatgctgcctctttattaaccctaaactaagtaattctttattgtatgagtttgatttttggggcataa

SEQ ID NO: 43641 - DNA, 120 bp, synthetic construct
  source 1..120: mol_type = other DNA
ccacttcctccagagatttcaccatcactccagctcatagatatctcttccatctccatcatattcagcttgctttcttctttctttgtctctccctttctccctttctctctttctttt

SEQ ID NO: 43642 - DNA, 120 bp, synthetic construct
  source 1..120: mol_type = other DNA
ggagaaataacataccttacagacaagcaaatgctgagagattttgtcaccaccaggcctgccctaaaagagctcctgaaggaagcactaaacatggaaaggaacaaccagtaccagcca

SEQ ID NO: 43643 - DNA, 120 bp, synthetic construct
  source 1..120: mol_type = other DNA
ggaaactgaacaaactgctcctgaatgactactgggtacataacgaaatgaagacagaaataaagaaggtctttgaaaccaacgaaaacaaagacacaacataccagaatctctgggaca

SEQ ID NO: 43644 - DNA, 120 bp, synthetic construct
  source 1..120: mol_type = other DNA
ctcaataaattaggtattgatgggttgtatcgcaaaataataagagctaactatgacaaacccacagccaataccatactgaatgggcaaaaactggaagcattcccttgaaaactggca

SEQ ID NO: 43645 - DNA, 120 bp, synthetic construct
  source 1..120: mol_type = other DNA
ctcttccttacaccttatacaaaaattaattcaagatggattaaagacttaaacattaaacctaaaaccataaaaaccctagaagaaaatctaggcattaccattcaggacataggcatg

SEQ ID NO: 43646 - DNA, 120 bp, synthetic construct
  source 1..120: mol_type = other DNA
catggacacaggaaggggaacatcacactctggggactgttgtggggtggggggaggggggagggatagcattgggagatatacctaatgccaaatgacgagttggtgggtgcagcacac

SEQ ID NO: 43647 - DNA, 120 bp, synthetic construct; identical to SEQ ID NO: 13152
  source 1..120: mol_type = other DNA

SEQ ID NO: 43648 - DNA, 120 bp, synthetic construct; identical to SEQ ID NO: 13153
  source 1..120: mol_type = other DNA

SEQ ID NO: 43649 - DNA, 120 bp, synthetic construct
  source 1..120: mol_type = other DNA
tgatggggatggcattgaatctataaattacctggggccgtatggccattttcacaatattgattcttcctacccatgagcatggaatgttcttccatttgtttgtatcctcttttattt

SEQ ID NO: 43650 - DNA, 120 bp, synthetic construct; identical to SEQ ID NO: 13154
  source 1..120: mol_type = other DNA

SEQ ID NO: 43651 - DNA, 120 bp, synthetic construct; identical to SEQ ID NO: 13155
  source 1..120: mol_type = other DNA

SEQ ID NO: 43652 - DNA, 120 bp, synthetic construct
  source 1..120: mol_type = other DNA
tgtcttgttccattggtctatatatctgtttttgtaccagtaccatgctgttttggttactttagccttatagtatagtttgaagtcaggtagcatgatgcctccagctttgttcttttg

SEQ ID NO: 43653 - DNA, 120 bp, synthetic construct; identical to SEQ ID NO: 12043
  source 1..120: mol_type = other DNA

SEQ ID NO: 43654 - DNA, 120 bp, synthetic construct; identical to SEQ ID NO: 12044
  source 1..120: mol_type = other DNA

SEQ ID NO: 43655 - DNA, 120 bp, synthetic construct
  source 1..120: mol_type = other DNA
ataaacatgggccataactgcatgtggaagggaggaggtggttacaggagaatcagcaaggtcagaaccgattagatctgagggatgatggggagggagccattgagaacagcctagtgg

SEQ ID NO: 43656 - DNA, 120 bp, synthetic construct; identical to SEQ ID NO: 12045
  source 1..120: mol_type = other DNA

SEQ ID NO: 43657 - DNA, 120 bp, synthetic construct; identical to SEQ ID NO: 12046
  source 1..120: mol_type = other DNA

SEQ ID NO: 43658 - DNA, 120 bp, synthetic construct
  source 1..120: mol_type = other DNA
ctgtctgtctctgtctctccatctgcctctgtctctgtctctctctccatctcccccgcctctctctgtctctctgtctctgtctctccatctgcctctgtctctctctctctccgtctc

SEQ ID NO: 43659 - DNA, 120 bp, synthetic construct; identical to SEQ ID NO: 12047
  source 1..120: mol_type = other DNA

SEQ ID NO: 43660 - DNA, 120 bp, synthetic construct; identical to SEQ ID NO: 12048
  source 1..120: mol_type = other DNA

SEQ ID NO: 43661 - DNA, 120 bp, synthetic construct; identical to SEQ ID NO: 12049
  source 1..120: mol_type = other DNA

SEQ ID NO: 43662 - DNA, 120 bp, synthetic construct; identical to SEQ ID NO: 24250
  source 1..120: mol_type = other DNA

SEQ ID NO: 43663 - DNA, 120 bp, synthetic construct
  source 1..120: mol_type = other DNA
gggttttctagatatacaatcatgtcgtctgcaaacagggacaatgtgacttcctcttttactaattgaataccctttatttccttctcctgcctaatggccctggccagaacttccaac

SEQ ID NO: 43664 - DNA, 120 bp, synthetic construct
  source 1..120: mol_type = other DNA
caaaaaaccagctcctggattcattaatttttcgaagggttttttgtgtctcttgtgtctctatttccttcagttcaaaagttcatatggaaccaaaaaagagcccgcatcgccaagtca

SEQ ID NO: 43665 - DNA, 120 bp, synthetic construct
  source 1..120: mol_type = other DNA
ctgtaaactagttcaaccattgtggaagttggtgtggcgattcctcagggatctagaactggaaataccatttgacccagccatcccattactgggtatatacccaaaggactataaatc

SEQ ID NO: 43666 - DNA, 120 bp, synthetic construct; identical to SEQ ID NO: 24251
  source 1..120: mol_type = other DNA

SEQ ID NO: 43667 - DNA, 120 bp, synthetic construct; identical to SEQ ID NO: 24252
  source 1..120: mol_type = other DNA

SEQ ID NO: 43668 - DNA, 120 bp, synthetic construct
  source 1..120: mol_type = other DNA
tcagcaacggaacaaagctggatggagaataactttgacgagctgagagaagaaggcttcagacgatcaaattactctgagctacgggaggacattcaaaccaaaggcaaagaagttgaa

SEQ ID NO: 43669 - DNA, 120 bp, synthetic construct
  source 1..120: mol_type = other DNA
ctaaatgctccaattaaaagacacagacgggcaaactggataaagactcaagacccatcagtgtgctgtattcaggaaacccatctcacgtgcagagacacccacaggctcaaaataaaa

SEQ ID NO: 43670 - DNA, 120 bp, synthetic construct
  source 1..120: mol_type = other DNA
gaaggagatagagacacaaaaaacccttcaaaaaatgaatgaatccaggagctggttttttgaaaggatcaacaaaattgatagaccgctagcaagactaataaagaaaaaaagagagaa

SEQ ID NO: 43671 - DNA, 120 bp, synthetic construct
  source 1..120: mol_type = other DNA
ggatgtatttcaaaataataagagctatctatgacaaacccacagccaatatcatactgaatgggcaaaaactggaagcattccctttgaaaactggcacaagacagggatgccctctct

SEQ ID NO: 43672 - DNA, 120 bp, synthetic construct
  source 1..120: mol_type = other DNA
tgtcttttgttgccattgcttttggtgttttagacatgaagtccttgcccatgcctatgtcctgaatggtaatgcctaggttttcttctagggtttttatggttttaggtctaacgttta

SEQ ID NO: 43673 - DNA, 120 bp, synthetic construct; identical to SEQ ID NO: 24253
  source 1..120: mol_type = other DNA

SEQ ID NO: 43674 - DNA, 120 bp, synthetic construct
  source 1..120: mol_type = other DNA
atattaatacacttaaatttggatgtgagatttaagaatggcattcaaaatagctaggctggacaagatggttcatgcctttaatcccagcactttgggtggctgaggcaggaggatggc

SEQ ID NO: 43675 - DNA, 120 bp, synthetic construct
  source 1..120: mol_type = other DNA
ggccagaaaaagacaaaagagtttgagggatctttggacctgatattaagaaactctaagaacagctaatcctgagcttctgatatatgccaggcactgcactgggctctttaacataca

SEQ ID NO: 43676 - DNA, 120 bp, synthetic construct; identical to SEQ ID NO: 12626
  source 1..120: mol_type = other DNA

SEQ ID NO: 43677 - DNA, 120 bp, synthetic construct; identical to SEQ ID NO: 12627
  source 1..120: mol_type = other DNA

SEQ ID NO: 43678 - DNA, 120 bp, synthetic construct
  source 1..120: mol_type = other DNA
ttccttactagtctatcttctttccttactcgtctgccttctttccttattagtcactttcttaccagtcttccttccttacgagtctaccttccttccttactcgtctaccttctttcc

SEQ ID NO: 43679 - DNA, 120 bp, synthetic construct
  source 1..120: mol_type = other DNA
ccttccatcaagccctgggtaatcacaaggaaggaaggcctataaggaaagaaggcagacgagtgaggaaagaagacagactagtaaggaaggaagactggtaagaaagtgactaataag

SEQ ID NO: 43680 - DNA, 120 bp, synthetic construct; identical to SEQ ID NO: 12628
  source 1..120: mol_type = other DNA

SEQ ID NO: 43681 - DNA, 120 bp, synthetic construct
  source 1..120: mol_type = other DNA
ccagtcttccttccttactagtctaccttctttcctcactcgtctaccttctttccttattagtcactttcttaccagtcttccttccttttctatcttctttccttactcgtctgcctt

SEQ ID NO: 43682 - DNA, 120 bp, synthetic construct; identical to SEQ ID NO: 12629
  source 1..120: mol_type = other DNA

SEQ ID NO: 43683 - DNA, 120 bp, synthetic construct; identical to SEQ ID NO: 12618
  source 1..120: mol_type = other DNA

SEQ ID NO: 43684 - DNA, 120 bp, synthetic construct; identical to SEQ ID NO: 12619
  source 1..120: mol_type = other DNA

SEQ ID NO: 43685 - DNA, 120 bp, synthetic construct; identical to SEQ ID NO: 12620
  source 1..120: mol_type = other DNA

SEQ ID NO: 43686 - DNA, 120 bp, synthetic construct; identical to SEQ ID NO: 12621
  source 1..120: mol_type = other DNA

SEQ ID NO: 43687 - DNA, 120 bp, synthetic construct; identical to SEQ ID NO: 12622
  source 1..120: mol_type = other DNA

SEQ ID NO: 43688 - DNA, 120 bp, synthetic construct; identical to SEQ ID NO: 3434
  source 1..120: mol_type = other DNA

SEQ ID NO: 43689 - DNA, 120 bp, synthetic construct
  source 1..120: mol_type = other DNA
caggtttgttacataggtaaacgtgtgccatggtattttgctgcacctatcaacccatcacctaggtattaagcccagcatccattagatattttgcctaatgctctccctacccccttc

SEQ ID NO: 43690 - DNA, 120 bp, synthetic construct
  source 1..120: mol_type = other DNA
ccattttcacaatattgattcttcctatccatgagaatggaatgtttttccatttgtttgtgtcctctcttattcccttgagcaatggtttgtggttctccttgaagaggtccttcactt

SEQ ID NO: 43691 - DNA, 120 bp, synthetic construct
  source 1..120: mol_type = other DNA
aaggaggaaggagagagaaagaaaaagaaagaaagaaagaagggaaggaaggaaggagggagggagggcaggcaggcaagcaaaagaaagagagaaaggaagaaaggaagaaaggaagga

SEQ ID NO: 43692 - DNA, 120 bp, synthetic construct; identical to SEQ ID NO: 12624
  source 1..120: mol_type = other DNA

SEQ ID NO: 43693 - DNA, 120 bp, synthetic construct
  source 1..120: mol_type = other DNA
aaaggaagagcaaacacattcagaagctagcagaaggcaagaaataactaaaatcagagcagaactgaaggaaatagagacacaaaaaacccttcaaaaaattaatgaatccaggagctg

SEQ ID NO: 43694 - DNA, 120 bp, synthetic construct; identical to SEQ ID NO: 12625
  source 1..120: mol_type = other DNA

SEQ ID NO: 43695 - DNA, 120 bp, synthetic construct; identical to SEQ ID NO: 11786
  source 1..120: mol_type = other DNA

SEQ ID NO: 43696 - DNA, 120 bp, synthetic construct; identical to SEQ ID NO: 11787
  source 1..120: mol_type = other DNA

SEQ ID NO: 43697 - DNA, 120 bp, synthetic construct
  source 1..120: mol_type = other DNA
ctagaaatgccatttgacccagccatcccattactgggtatatgcccaaaggattataaatcatgctgctataaagacacatgcacacgtatgtttattgtggcactattcacaatagca

SEQ ID NO: 43698 - DNA, 120 bp, synthetic construct
  source 1..120: mol_type = other DNA
gcttaaaggagctgatggagctgaaagccaaggctcgagaactacgtgaagaatgcagaagcctcaggagccgatgcgatcaactggaagaaagggtatcagtgatagaagatgaaacga

SEQ ID NO: 43699 - DNA, 120 bp, synthetic construct
  source 1..120: mol_type = other DNA
cacgtgcagagacacacataggctcaaaataaaaggatggaggaagatctaccaagccaatggaaaacgaaaaaaggcaggggttgcaatcctagtctctgataaaacaggctttaaacc

SEQ ID NO: 43700 - DNA, 120 bp, synthetic construct
  source 1..120: mol_type = other DNA
ctaaaatcagagcagaactgaaggaaatagagacacaaaaagaccttcaaaaaattaatgaatccaggagctggttttttgaaaggatcaacaaaattgatagaccactagcaagactaa

SEQ ID NO: 43701 - DNA, 120 bp, synthetic construct
  source 1..120: mol_type = other DNA
tgatgggacatatctcaaaataataagagctatttatgacagacccacagccaatatcatactgaatgggcaaaaactggaagcattccctttgaaaactggcacaagacagggatgccc

SEQ ID NO: 43702 - DNA, 120 bp, synthetic construct
  source 1..120: mol_type = other DNA
caattcaagatggattaaagacctaaacattagacctaaaaccataaaaaccctagaagaaaacctaggcattaccattcaggacataggcatgggcaaggacttcatgtctaaaacacc

SEQ ID NO: 43703 - DNA, 120 bp, synthetic construct
  source 1..120: mol_type = other DNA
atcattctcagtaaactatcgcaacaacaaaaatccaaacaccacatattctcactcataggtgggaattgaactatgagaacacatggacacaggaaggggaacatcacactctgggga

SEQ ID NO: 43704 - DNA, 120 bp, synthetic construct
  source 1..120: mol_type = other DNA
aatgtttagcccaatttcagtgaccagcaaattcagcactagaacactcatgttccaactcctaccccattgctttttatcaactatgctaaatttaaaaagcttgagtaatttctgtgc

SEQ ID NO: 43705 - DNA, 120 bp, synthetic construct; identical to SEQ ID NO: 11789
  source 1..120: mol_type = other DNA

SEQ ID NO: 43706 - DNA, 120 bp, synthetic construct; identical to SEQ ID NO: 11790
  source 1..120: mol_type = other DNA

SEQ ID NO: 43707 - DNA, 120 bp, synthetic construct; identical to SEQ ID NO: 13158
  source 1..120: mol_type = other DNA

SEQ ID NO: 43708 - DNA, 120 bp, synthetic construct
  source 1..120: mol_type = other DNA
tggggaaaggatctcctattcaataaatggtgctgggaaaacgggctagccatatgcagaaaattgaaactggaccgcttgcttacgtcttatacaaaaattaactcaaagcaatggcaa

SEQ ID NO: 43709 - DNA, 120 bp, synthetic construct
  source 1..120: mol_type = other DNA
atttttttatacttcaagttctgggatacatgtgtggaacgtgcaggtttcttacataggtatacatgtgccatcgtggtttgctgcacccttcaaatcgtcatctacattaggtatttc

SEQ ID NO: 43710 - DNA, 120 bp, synthetic construct; identical to SEQ ID NO: 11767
  source 1..120: mol_type = other DNA

SEQ ID NO: 43711 - DNA, 120 bp, synthetic construct; identical to SEQ ID NO: 11768
  source 1..120: mol_type = other DNA

SEQ ID NO: 43712 - DNA, 120 bp, synthetic construct; identical to SEQ ID NO: 11769
  source 1..120: mol_type = other DNA

SEQ ID NO: 43713 - DNA, 120 bp, synthetic construct; identical to SEQ ID NO: 11770
  source 1..120: mol_type = other DNA

SEQ ID NO: 43714 - DNA, 120 bp, synthetic construct; identical to SEQ ID NO: 11771
  source 1..120: mol_type = other DNA

SEQ ID NO: 43715 - DNA, 120 bp, synthetic construct; identical to SEQ ID NO: 12905
  source 1..120: mol_type = other DNA

SEQ ID NO: 43716 - DNA, 120 bp, synthetic construct; identical to SEQ ID NO: 12906
  source 1..120: mol_type = other DNA

SEQ ID NO: 43717 - DNA, 120 bp, synthetic construct
  source 1..120: mol_type = other DNA
ttgcagatctctttaagaaaagacagctggattctttttatatgtatatatatatatatatatttattatactttaagttccagggtacatgtgcacaacctgcaggtttgttacatatg

SEQ ID NO: 43718 - DNA, 120 bp, synthetic construct
  source 1..120: mol_type = other DNA
tgaatagtgctgcaataaacatacgtgtgcatgtgtctttgtagcagcatgatttatattcctttgggtatatacccagtaatgggatggctgggtcaaatggtatttctagttctagat

SEQ ID NO: 43719 - DNA, 120 bp, synthetic construct
  source 1..120: mol_type = other DNA
tccctctatgcactgctttaaatgtgtcccagagattctggtatgttgtgtcttttttctcgttggtttcaaagaacatctttatttctgccttcatttcgttatgtacccagtagtcat

SEQ ID NO: 43720 - DNA, 120 bp, synthetic construct
  source 1..120: mol_type = other DNA
tgctagcacagcagtctgagatcaaactgcaaggcggcagcgaggctaggggaggggcgcccgccattgcccaggcttgcttaggtaaacaaagcagccaggaagctcgaacttggtgga

SEQ ID NO: 43721 - DNA, 120 bp, synthetic construct
  source 1..120: mol_type = other DNA
gccacaaagatactcctcgagaagagcaactccaagacacataattgtcagattcaccaaagttgaaatgaaggaaaaaatgtgaagggcagccagagagaaaggtcgggttaccctcaa

SEQ ID NO: 43722 - DNA, 120 bp, synthetic construct
  source 1..120: mol_type = other DNA
agtcaacaaggatacccaggaattgaactcagctctgcaccaagcagacctaatagacatctacagaattctccaccccaaatcaacaggatatacatttttttcagcaccacaccacac

SEQ ID NO: 43723 - DNA, 120 bp, synthetic construct
  source 1..120: mol_type = other DNA
atgaggccagcatcattctgataccaaagctgggcagagacacaaccaaaaaagagaattttagaccaatatccttgatgaacattgatgcaaaaatcctcaataaaatactggcaaacc

SEQ ID NO: 43724 - DNA, 120 bp, synthetic construct
  source 1..120: mol_type = other DNA
gaaaatggccatacttcccaaggtaatttgcagattcaatgccatccccatcaagctaccaatgcctttcttcacagaattggaaaaaactactttaaagttcatatggaaccaaaaaag

SEQ ID NO: 43725 - DNA, 120 bp, synthetic construct
  source 1..120: mol_type = other DNA
cagggatctagaactagaaataccatttgacccagccatcccattactgggtatatacccaaaggattataaatcatgctgctataaagacacatgcacacgtatgtttattgcggcatt

SEQ ID NO: 43726 - DNA, 120 bp, synthetic construct; identical to SEQ ID NO: 12908
  source 1..120: mol_type = other DNA

SEQ ID NO: 43727 - DNA, 120 bp, synthetic construct; identical to SEQ ID NO: 22254
  source 1..120: mol_type = other DNA

SEQ ID NO: 43728 - DNA, 120 bp, synthetic construct; identical to SEQ ID NO: 22255
  source 1..120: mol_type = other DNA

SEQ ID NO: 43729 - DNA, 120 bp, synthetic construct; identical to SEQ ID NO: 22256
  source 1..120: mol_type = other DNA

SEQ ID NO: 43730 - DNA, 120 bp, synthetic construct
  source 1..120: mol_type = other DNA
agtgctgcagttcggcttcgtcaccatcttcgtggccgcctgtccgctcgcgccgctcttcgccctgctcaacaactgggtggagatccgcttggacgcgcgcaagttcgtctgcgagta

SEQ ID NO: 43731 - DNA, 120 bp, synthetic construct; identical to SEQ ID NO: 11520
  source 1..120: mol_type = other DNA

SEQ ID NO: 43732 - DNA, 120 bp, synthetic construct; identical to SEQ ID NO: 11521
  source 1..120: mol_type = other DNA

SEQ ID NO: 43733 - DNA, 120 bp, synthetic construct; identical to SEQ ID NO: 11522
  source 1..120: mol_type = other DNA

SEQ ID NO: 43734 - DNA, 120 bp, synthetic construct; identical to SEQ ID NO: 11523
  source 1..120: mol_type = other DNA

SEQ ID NO: 43735 - DNA, 120 bp, synthetic construct
  source 1..120: mol_type = other DNA
cagcgagaatccgctcagaaagactaagaggcccgtcagggcggccggcaccagcatgtaggtgtaccagcccagccagacgaagtacagggccaccttttccccaaagtagttcctgca

SEQ ID NO: 43736 - DNA, 120 bp, synthetic construct
  source 1..120: mol_type = other DNA
tgggtggtgtgtgtggatgtctggggggtgtgggggcgtccgcgggtatctgggggcttccgcgggggtgtgggggctcacgcgggtatctgggggcgtctgcgggggtgtgggggctcc

SEQ ID NO: 43737 - DNA, 120 bp, synthetic construct
  source 1..120: mol_type = other DNA
cctattctctctaccgtctcaaccacagaagccaggaaatgcatccaaccaaccacagaacagaaggctctcaggcagggggttggtccacggctagtaccagtccttggccagttagga

SEQ ID NO: 43738 - DNA, 120 bp, synthetic construct
  source 1..120: mol_type = other DNA
cctatcctagaccagtagttcttcctgcctcaatcaacccttcctctgactccctccttggccttcccgacagcccacggacagatacctgcactcaggcgtggcctgccacactgaaac

SEQ ID NO: 43739 - DNA, 120 bp, synthetic construct; identical to SEQ ID NO: 11524
  source 1..120: mol_type = other DNA

SEQ ID NO: 43740 - DNA, 120 bp, synthetic construct; identical to SEQ ID NO: 33418
  source 1..120: mol_type = other DNA

SEQ ID NO: 43741 - DNA, 120 bp, synthetic construct; identical to SEQ ID NO: 33419
  source 1..120: mol_type = other DNA

SEQ ID NO: 43742 - DNA, 120 bp, synthetic construct
  source 1..120: mol_type = other DNA
aaatccgaagcttttttttttttttttttttttttttttaaaaggtgagatcttgctatgttgcccatgttggtctggaactccagggctcaagtgattctctcatctcagcctctcaaa

SEQ ID NO: 43743 - DNA, 120 bp, synthetic construct
  source 1..120: mol_type = other DNA
gaaccccaaaatatttggaataacattttgggcaatattgacagagttgctatcctcagagagtttaatgttctcttaaagttgaaagtcaaaatattggtgcatgctatacaggacagg

SEQ ID NO: 43744 - DNA, 120 bp, synthetic construct
  source 1..120: mol_type = other DNA
tagtaaattcatagcaaaatgattccaaagatgtcttgagaataacctagccatggtttttacagtaagcaaagccctacaatgaaaggcaacacctagcaacagctctcgtaattcctg

SEQ ID NO: 43745 - DNA, 120 bp, synthetic construct
  source 1..120: mol_type = other DNA
cgctgaagtcaatcactgagtgtgttcatgttcttccattcaacagcaatgaaataatcacacaggagtggctgctgccctcctgaattttacatagtaatggggccaataataacagag

SEQ ID NO: 43746 - DNA, 120 bp, synthetic construct
  source 1..120: mol_type = other DNA
ttggggtggctacattacagcaatacaaggaggcttggctgccctggggatcctccatatcctaaaaatcctttacatattttacaatgcaattatattttcataggaggcagcatcaag

SEQ ID NO: 43747 - DNA, 120 bp, synthetic construct
  source 1..120: mol_type = other DNA
ttgtattcgtttccacccaaataattaagggtaatatccccatctcaaggttggctttgagtcattgaatggcttttctctgccctctgaataaagacactaatactcagcctggcttcc

SEQ ID NO: 43748 - DNA, 120 bp, synthetic construct
  source 1..120: mol_type = other DNA
ttgcggtgagctgagatcatgccattgcactccagcctgggcaacaacagtaaaactctgtcttaaaaaaataataataaaataaaataaatagccaaacacttcctgaaaggctgtatc

SEQ ID NO: 43749 - DNA, 120 bp, synthetic construct
  source 1..120: mol_type = other DNA
tactaaaaatacaaaattagccaagcgtggtggtgcctgcctgtaatcccagctacctgggaggctgagacaggagaatcactcaaacccggaaggcagaggttgtggtgagccgagatt

SEQ ID NO: 43750 - DNA, 120 bp, synthetic construct; identical to SEQ ID NO: 33427
  source 1..120: mol_type = other DNA

SEQ ID NO: 43751 - DNA, 120 bp, synthetic construct; identical to SEQ ID NO: 33428
  source 1..120: mol_type = other DNA

SEQ ID NO: 43752 - DNA, 120 bp, synthetic construct
  source 1..120: mol_type = other DNA
gggaggcggaggttgcagtgagccaagatcgtgccattgcactccagcctgggcaagagaatgagactctgtctcaataaaaaaaaaaaaaatacacatctatgtatatattagtagggt

SEQ ID NO: 43753 - DNA, 120 bp, synthetic construct
  source 1..120: mol_type = other DNA
tccttccttccttccttccttccttccttccttccttccttctttcttttctcttttttcagggtctcactctgtcacccaggctggagtacagtggtgcaatcttggctcactgcaacc

SEQ ID NO: 43754 - DNA, 120 bp, synthetic construct; identical to SEQ ID NO: 33429
  source 1..120: mol_type = other DNA

SEQ ID NO: 43755 - DNA, 120 bp, synthetic construct
  source 1..120: mol_type = other DNA
ggatatgcttcattaattgctgtcccaaacctctcttccccccaaaatggtatgagagtcaggtttctggacagcaataccaagtaatccattggaacttctccatttctgacttaatac

SEQ ID NO: 43756 - DNA, 120 bp, synthetic construct
  source 1..120: mol_type = other DNA
cctcaaatgatctgcccgccttggcctcccaaagtgcagggattagaggcatgagccactgcgcccggcccatcttccttctaattattaaaaaaaaaaaaaaaaaaaaaaaaaaaggaa

SEQ ID NO: 43757 - DNA, 120 bp, synthetic construct
  source 1..120: mol_type = other DNA
tacatttataaaatgtaaaaccccctttttttgttgttaaatccaggaggcagcccctctcctcctcctccctcgttaatcttccccccagacggagtcacgggagcagcgatctccgag

SEQ ID NO: 43758 - DNA, 120 bp, synthetic construct; identical to SEQ ID NO: 32854
  source 1..120: mol_type = other DNA

SEQ ID NO: 43759 - DNA, 120 bp, synthetic construct; identical to SEQ ID NO: 32855
  source 1..120: mol_type = other DNA

SEQ ID NO: 43760 - DNA, 120 bp, synthetic construct; identical to SEQ ID NO: 8808
  source 1..120: mol_type = other DNA

SEQ ID NO: 43761 - DNA, 120 bp, synthetic construct; identical to SEQ ID NO: 20579
  source 1..120: mol_type = other DNA

SEQ ID NO: 43762 - DNA, 120 bp, synthetic construct; identical to SEQ ID NO: 20580
  source 1..120: mol_type = other DNA

SEQ ID NO: 43763 - DNA, 120 bp, synthetic construct; identical to SEQ ID NO: 25550
  source 1..120: mol_type = other DNA

SEQ ID NO: 43764 - DNA, 120 bp, synthetic construct
  source 1..120: mol_type = other DNA
agctggagatctgagaacgggcagacagactgcctcctcaagtgggtccctgactcctgacccccgagcagcctaactgggaggcaccccccagcaggggcacactgacacctcacacgg

SEQ ID NO: 43765 - DNA, 120 bp, synthetic construct
  source 1..120: mol_type = other DNA
ctaacagcggatctcttggcagaaaccctacaagccagaagagagtgggggccaatatacaacattcttaaagaaaagaattttcaacccagaatttcatatccagccaaactaagcttc

SEQ ID NO: 43766 - DNA, 120 bp, synthetic construct
  source 1..120: mol_type = other DNA
gcagacctaatagacatctacagaactctccaccccaaatcaacagaatatacatttttttcagcaccacaccacacctattccaaaattgaccacatagttggaagtaaagctctcctc

SEQ ID NO: 43767 - DNA, 120 bp, synthetic construct
  source 1..120: mol_type = other DNA
agaggtacatggaggaactggtaccattccttctgaaactattccaatcaatagaaaaagagggaatcctccctaactcattttatgaggccagcatcattctgataccaaagccgggca

SEQ ID NO: 43768 - DNA, 120 bp, synthetic construct
  source 1..120: mol_type = other DNA
tacagattcaatgccatccccatcaagctaccaatgactttcttcacagaattggaaaaaactactttaaagttcatatggaaccaaaaaagagcccgcattgccaagtcaatcctaagc

SEQ ID NO: 43769 - DNA, 120 bp, synthetic construct
  source 1..120: mol_type = other DNA
ccatttgacccagccatcccattactgggtatatacccaaatgagtataaatcatgctgctataaagacacatgcacacgtatgtttattgcggcactattcacaatagcaaagacttgg

SEQ ID NO: 43770 - DNA, 120 bp, synthetic construct; identical to SEQ ID NO: 25551
  source 1..120: mol_type = other DNA

SEQ ID NO: 43771 - DNA, 120 bp, synthetic construct
  source 1..120: mol_type = other DNA
ccttgccttttagttcatggagacaatgcatatctttttcatagtctacaccctagaacaaccatacccaatatttttggcaccacggaccagtttcgtggaagccaatttttccacaga

SEQ ID NO: 43772 - DNA, 120 bp, synthetic construct; identical to SEQ ID NO: 25552
  source 1..120: mol_type = other DNA

SEQ ID NO: 43773 - DNA, 120 bp, synthetic construct
  source 1..120: mol_type = other DNA
ggcgcaccacgagactatatcccacacctggctcggagggtcctatgcccacggaatctcgctgattgctagcacagcagtctgagatcaaactgcaaggcggcaacgaggctgggggag

SEQ ID NO: 43774 - DNA, 120 bp, synthetic construct
  source 1..120: mol_type = other DNA
tggagaatggaaccaagttggaaaacactctgcaggatattatccaggagaacttccccaatctagcaaggcaggccaacgttcagattcaggaaatacagagaacgccacaaagatact

SEQ ID NO: 43775 - DNA, 120 bp, synthetic construct
  source 1..120: mol_type = other DNA
ataaagcaagtcctcagtgacctacaaagagacttagactcccacacattaataatgggagactttaacaccccactgtcaacattagacagatcaacgagacagaaagtcaacaaggat

SEQ ID NO: 43776 - DNA, 120 bp, synthetic construct
  source 1..120: mol_type = other DNA
ttgaatctctgaatagaccaataacaggctctgaaattgtggcaataatcaatagtttaccaaccaaaaagagtccaggaccagatggattcacagccgaattctaccagaggtacatgg

SEQ ID NO: 43777 - DNA, 120 bp, synthetic construct
  source 1..120: mol_type = other DNA
aataaaatacctaggaatccaacttacaagggatgtgaaggacctcttcaaggagaactacaaaccactgctcaaggaaataaaagaggagacaaacaaatggaagaacattccatgctc

SEQ ID NO: 43778 - DNA, 120 bp, synthetic construct
  source 1..120: mol_type = other DNA
aaaaaaacaaacaaccccatcaaaaagtgggcgaaggacatgaacagacacttctcaaaagaagacatttatgcagtcaaaaaacacatgaagaaatgctcatcatcactggccatcaga

SEQ ID NO: 43779 - DNA, 120 bp, synthetic construct; identical to SEQ ID NO: 25553
  source 1..120: mol_type = other DNA

SEQ ID NO: 43780 - DNA, 120 bp, synthetic construct
  source 1..120: mol_type = other DNA
cagagtgtgatattccccttcctgtgtccatgtgatctcattgttcaattcccacattctgagtaaactatcacaagaacaaaaaaccaaacaccgcaaatattttaaagaatatttcat

SEQ ID NO: 43781 - DNA, 120 bp, synthetic construct
  source 1..120: mol_type = other DNA
caagatgaaataaagacttaaacgttagacctaaaaccataaaaaccctagaagaaaacctaggcattaccattcaggacataggcatgggcaaggacttcatgtctaaaacaccaaaag

SEQ ID NO: 43782 - DNA, 120 bp, synthetic construct
  source 1..120: mol_type = other DNA
atggacacaggaaggggaacatcacactctggggactgttgtggggtggggggaggggggaaggatagctttaggagatatacctaatgctaaatgacaagttaatgggtgcagcacacc

SEQ ID NO: 43783 - DNA, 120 bp, synthetic construct; identical to SEQ ID NO: 10315
  source 1..120: mol_type = other DNA

SEQ ID NO: 43784 - DNA, 120 bp, synthetic construct; identical to SEQ ID NO: 10316
  source 1..120: mol_type = other DNA

SEQ ID NO: 43785 - DNA, 120 bp, synthetic construct
  source 1..120: mol_type = other DNA
tcattttatgaataatatctctaatttatacattcgtacaattctgtaagtttcaaagccttgcccttatattgcctctcttgttggcccttagtaatatatatattatattatatgtat

SEQ ID NO: 43786 - DNA, 120 bp, synthetic construct
  source 1..120: mol_type = other DNA
gctgagcccatgccaggatcatgcttcctgttcctgtggaactgtgggtcaattagacctcttttctttataaattacccagcctcagatatttctttatagcaatgtgagaatgaacta

SEQ ID NO: 43787 - DNA, 120 bp, synthetic construct
  source 1..120: mol_type = other DNA
aacacaatatttaaaactgtgtaatttataaagagcaggaatttatgttctcacggttctggaggctggaaagtccaagatcaaggtgctctcacttggtctggtgagagcccagtctct

SEQ ID NO: 43788 - DNA, 120 bp, synthetic construct
  source 1..120: mol_type = other DNA
cctggtcccaagcattttggataagggatattagggcacagtgtacactgcctgggtgataagtacaccaaaatctcaaaaatcaccacgaaagaacttattcatgtaaccgaacactac

SEQ ID NO: 43789 - DNA, 120 bp, synthetic construct; identical to SEQ ID NO: 15350
  source 1..120: mol_type = other DNA

SEQ ID NO: 43790 - DNA, 120 bp, synthetic construct; identical to SEQ ID NO: 15351
  source 1..120: mol_type = other DNA

SEQ ID NO: 43791 - DNA, 120 bp, synthetic construct; identical to SEQ ID NO: 15352
  source 1..120: mol_type = other DNA

SEQ ID NO: 43792 - DNA, 120 bp, synthetic construct
  source 1..120: mol_type = other DNA
ggagcccctctgcctggctgcccagtctggaaagtgaggagcgcctcttccccgccgccatcccatctaggaagtgaggagcatctctgcgcggccgcccatcgtctgagatgtggggag

SEQ ID NO: 43793 - DNA, 120 bp, synthetic construct; identical to SEQ ID NO: 15353
  source 1..120: mol_type = other DNA

SEQ ID NO: 43794 - DNA, 120 bp, synthetic construct; identical to SEQ ID NO: 20583
  source 1..120: mol_type = other DNA

SEQ ID NO: 43795 - DNA, 120 bp, synthetic construct
  source 1..120: mol_type = other DNA
tgagaaattttataaaactaagaaagaacaaaaataagaaaatagaagttgcaggctaggcatagtggctcatgcctgtaatcccagcattttgggacgctgaggcaggtggatcgcttg

SEQ ID NO: 43796 - DNA, 120 bp, synthetic construct; identical to SEQ ID NO: 25773
  source 1..120: mol_type = other DNA

SEQ ID NO: 43797 - DNA, 120 bp, synthetic construct; identical to SEQ ID NO: 27129
  source 1..120: mol_type = other DNA

SEQ ID NO: 43798 - DNA, 120 bp, synthetic construct
  source 1..120: mol_type = other DNA
tgactatctcaatagatgcagaaaaggcctttgacaaaatttaacagcacttcatgctgaaaaccctcaataaattaggtattgatgggacgtatctcaaaataataagagctatttatg

SEQ ID NO: 43799 - DNA, 120 bp, synthetic construct
  source 1..120: mol_type = other DNA
tggtaccaaaacagagatatagaccaatggaacagaacagagccctcagaagtaataccacacatctacaaccatctgatctttgacaaacctgacaaaaacaagaaatggggaaaggat

SEQ ID NO: 43800 - DNA, 120 bp, synthetic construct
  source 1..120: mol_type = other DNA
tagaaacaccatttgacccagccatcccattactaggtatatacccaaaggattataaatcatgctgctataaagacacatgcacacgtatgtttattgcagcactattcacaatagcaa

SEQ ID NO: 43801 - DNA, 120 bp, synthetic construct; identical to SEQ ID NO: 10317
  source 1..120: mol_type = other DNA

SEQ ID NO: 43802 - DNA, 120 bp, synthetic construct
  source 1..120: mol_type = other DNA
tgagccgagatcgcgccactgcactccagcctgggcgacagtgtgatactctgtctcaaaaaaaaaaaaaaaaaaaaaaaaaaatttaacatgtaaaattctatgttaaatgttaaattg

SEQ ID NO: 43803 - DNA, 120 bp, synthetic construct; identical to SEQ ID NO: 10318
  source 1..120: mol_type = other DNA

SEQ ID NO: 43804 - DNA, 120 bp, synthetic construct
  source 1..120: mol_type = other DNA
agcgcaggccaccatgtccggctaatttttattattattattttttattgtttttatttttagtagagatggggtttcaccatgttagccaggctggtctcaaactcctgacctcaggtg

SEQ ID NO: 43805 - DNA, 120 bp, synthetic construct
  source 1..120: mol_type = other DNA
gccaccactcctggctaattttttgtatttttagtagagatggggtttcaccatgttagccaagatggtctcgatctcctgacctcatgatccacctgccttggcctcccaaagtgctgg

SEQ ID NO: 43806 - DNA, 120 bp, synthetic construct; identical to SEQ ID NO: 10319
  source 1..120: mol_type = other DNA

SEQ ID NO: 43807 - DNA, 120 bp, synthetic construct; identical to SEQ ID NO: 10320
  source 1..120: mol_type = other DNA

SEQ ID NO: 43808 - DNA, 120 bp, synthetic construct; identical to SEQ ID NO: 10321
  source 1..120: mol_type = other DNA

SEQ ID NO: 43809 - DNA, 120 bp, synthetic construct; identical to SEQ ID NO: 10322
  source 1..120: mol_type = other DNA

SEQ ID NO: 43810 - DNA, 120 bp, synthetic construct; identical to SEQ ID NO: 10323
  source 1..120: mol_type = other DNA

SEQ ID NO: 43811 - DNA, 120 bp, synthetic construct; identical to SEQ ID NO: 10324
  source 1..120: mol_type = other DNA

SEQ ID NO: 43812 - DNA, 120 bp, synthetic construct; identical to SEQ ID NO: 10325
  source 1..120: mol_type = other DNA

SEQ ID NO: 43813 - DNA, 120 bp, synthetic construct; identical to SEQ ID NO: 10326
  source 1..120: mol_type = other DNA

SEQ ID NO: 43814 - DNA, 120 bp, synthetic construct; identical to SEQ ID NO: 10327
  source 1..120: mol_type = other DNA

SEQ ID NO: 43815 - DNA, 120 bp, synthetic construct; identical to SEQ ID NO: 10328
  source 1..120: mol_type = other DNA

SEQ ID NO: 43816 - DNA, 120 bp, synthetic construct; identical to SEQ ID NO: 10329
  source 1..120: mol_type = other DNA

SEQ ID NO: 43817 - DNA, 120 bp, synthetic construct; identical to SEQ ID NO: 10330
  source 1..120: mol_type = other DNA

SEQ ID NO: 43818 - DNA, 120 bp, synthetic construct; identical to SEQ ID NO: 10331
  source 1..120: mol_type = other DNA

SEQ ID NO: 43819 - DNA, 120 bp, synthetic construct; identical to SEQ ID NO: 10332
  source 1..120: mol_type = other DNA

SEQ ID NO: 43820 - DNA, 120 bp, synthetic construct; identical to SEQ ID NO: 10333
  source 1..120: mol_type = other DNA

SEQ ID NO: 43821 - DNA, 120 bp, synthetic construct; identical to SEQ ID NO: 10334
  source 1..120: mol_type = other DNA

SEQ ID NO: 43822 - DNA, 120 bp, synthetic construct; identical to SEQ ID NO: 10335
  source 1..120: mol_type = other DNA

SEQ ID NO: 43823 - DNA, 120 bp, synthetic construct; identical to SEQ ID NO: 10336
  source 1..120: mol_type = other DNA

SEQ ID NO: 43824 - DNA, 120 bp, synthetic construct
  source 1..120: mol_type = other DNA
aggtggcttaaataacagacacttattttgcacagttctggaggctgggaagtctaagatcaattcagttcctggggagggcctcttcctggcttgcggacggctgcctttttgacacgt

SEQ ID NO: 43825 - DNA, 120 bp, synthetic construct; identical to SEQ ID NO: 10337
  source 1..120: mol_type = other DNA

SEQ ID NO: 43826 - DNA, 120 bp, synthetic construct; identical to SEQ ID NO: 10338
  source 1..120: mol_type = other DNA

SEQ ID NO: 43827 - DNA, 120 bp, synthetic construct
  source 1..120: mol_type = other DNA
ttgtagtgtatttggattacaagacccacactcttgagtgtagataaaagatttatcttagaagtagtagtcaggggccaagcatggtggctcacacctgtaatcctagcactttgggaa

SEQ ID NO: 43828 - DNA, 120 bp, synthetic construct; identical to SEQ ID NO: 29061
  source 1..120: mol_type = other DNA

SEQ ID NO: 43829 - DNA, 120 bp, synthetic construct; identical to SEQ ID NO: 29062
  source 1..120: mol_type = other DNA

SEQ ID NO: 43830 - DNA, 120 bp, synthetic construct; identical to SEQ ID NO: 29063
  source 1..120: mol_type = other DNA

SEQ ID NO: 43831 - DNA, 120 bp, synthetic construct
  source 1..120: mol_type = other DNA
ctcccctccatgcctccccacctctagtagtcttgtgcctattcttgccatctttatgtccatgagtatccattgtttagctcctacttgtaagtgagaacatatggtatttggttttct

SEQ ID NO: 43832 - DNA, 120 bp, synthetic construct
  source 1..120: mol_type = other DNA
gaagacatttatgcagccaaaagacagatgaaaaaatgctcatcactgaccatcagagaaatgcaaatcaaaaccacaatgagataccatctcacaccagttagaatggcgatcattaaa

SEQ ID NO: 43833 - DNA, 120 bp, synthetic construct
  source 1..120: mol_type = other DNA
tggcattgaatctacaaattgccttgggcagtatggccattttcacaatattgattcttcctacccatgagcatggaatgttcttccatttgtttgtatcctcttttatttcattgagca

SEQ ID NO: 43834 - DNA, 120 bp, synthetic construct
  source 1..120: mol_type = other DNA
attcaacttcttcctggtttagtcttgggagagcgtatgtgtcaaggaatttatccatttcttctagattttctagtttatttgcgtagaggtgtttgtagtaatctctgatggtagttt

SEQ ID NO: 43835 - DNA, 120 bp, synthetic construct
  source 1..120: mol_type = other DNA
tcctgggtatccttgttaactttctgtctcattgatctgtctaatgttgacagtggggtgttaaagtctcccattattattgtgtgggagtctaagtctctttgtaggtcactcaggact

SEQ ID NO: 43836 - DNA, 120 bp, synthetic construct
  source 1..120: mol_type = other DNA
atgtgcttctctttgtgggtaacccgacctttctctctggctgcccttaacattttttccttcatttcaactttggtgaatctgacaattatgtgtcttggagttgctcttctcgaggag

SEQ ID NO: 43837 - DNA, 120 bp, synthetic construct
  source 1..120: mol_type = other DNA
cctgggtatcagcagcagtgtctgcagaacagtggattttcgtgaatggtggatgctgctgtctgatcgttcctctggaagttttgtctcagaggagtacccggccgtgtgaggtgtcag

SEQ ID NO: 43838 - DNA, 120 bp, synthetic construct
  source 1..120: mol_type = other DNA
tcagtgtgctgtattcaggaaacccatctcacatgcagaaacacataggctcaaaataaagggatggaggaagatctaccaagcaaatggaaaacaaaaaaaggcaggggttgcaatcct

SEQ ID NO: 43839 - DNA, 120 bp, synthetic construct
  source 1..120: mol_type = other DNA
ttctagtttatttgcgtagaggtgtttgtagtattctctgagggtagtttgtatttctgtgggatcggtggtgatatcccctttatcattttttattgcatctattagattcttctctct

SEQ ID NO: 43840 - DNA, 120 bp, synthetic construct
  source 1..120: mol_type = other DNA
atcatgagtgaactcccattcacaattgcttcaaagagcataaaatacctaggaatacaacttacaagggacatgaaggacctcttcagggagaactacaaaccactgctcaatgaaata

SEQ ID NO: 43841 - DNA, 120 bp, synthetic construct
  source 1..120: mol_type = other DNA
gggagaaaatttttgcaacctactcatctgacaaagggctaatatccagaatctacaatgcactcaaaacaaatttacaagaaaaaacaaacaaccccatcaaaaagtgggcaaaggata

SEQ ID NO: 43842 - DNA, 120 bp, synthetic construct
  source 1..120: mol_type = other DNA
cattaggagatatacctaatgttaaatgatgagttaatgggtgcggcacaccaacatggcacatgtatacatatgtaacaaacctgcacgttgtgcacatgtaccctaaaacttaaagta

SEQ ID NO: 43843 - DNA, 120 bp, synthetic construct
  source 1..120: mol_type = other DNA
gcatcactgcactccagcctgggtgacagagcaaaactccatcaaaaaaaaagaaaaagaaaagaaaagaaggaaggaaagagagagaaagaggacccatgcagctcacacctgtgttgt

SEQ ID NO: 43844 - DNA, 120 bp, synthetic construct; identical to SEQ ID NO: 32835
  source 1..120: mol_type = other DNA

SEQ ID NO: 43845 - DNA, 120 bp, synthetic construct; identical to SEQ ID NO: 32836
  source 1..120: mol_type = other DNA

SEQ ID NO: 43846 - DNA, 120 bp, synthetic construct; identical to SEQ ID NO: 32837
  source 1..120: mol_type = other DNA

SEQ ID NO: 43847 - DNA, 120 bp, synthetic construct; identical to SEQ ID NO: 23714
  source 1..120: mol_type = other DNA

SEQ ID NO: 43848 - DNA, 120 bp, synthetic construct
  source 1..120: mol_type = other DNA
gcccaggctggagtgcagtggcgtgatcttggctcactgcagcctctgcctcccaggttccagcaattctctgcctcagcctcccaagtagctgggattacaggtgcccaccaccacgct

SEQ ID NO: 43849 - DNA, 120 bp, synthetic construct; identical to SEQ ID NO: 23715
  source 1..120: mol_type = other DNA

SEQ ID NO: 43850 - DNA, 120 bp, synthetic construct; identical to SEQ ID NO: 23716
  source 1..120: mol_type = other DNA

SEQ ID NO: 43851 - DNA, 120 bp, synthetic construct; identical to SEQ ID NO: 23717
  source 1..120: mol_type = other DNA

SEQ ID NO: 43852 - DNA, 120 bp, synthetic construct
  source 1..120: mol_type = other DNA
cgcaaagctcacagcgtgaagtactattgtagacaataggggctgggcaccacagctcatgcctgtaatcccagcactttgggaggctgaggcgggtggatcacctgaggtcaggagttt

SEQ ID NO: 43853 - DNA, 120 bp, synthetic construct
  source 1..120: mol_type = other DNA
ctgatgaagcttaggttggccagatgtgaaattctggattggaatttctttaaaaatgtttaatatattggccaggagtggtggcttacacctgtaatcccagcactttgggaggctaag

SEQ ID NO: 43854 - DNA, 120 bp, synthetic construct; identical to SEQ ID NO: 33500
  source 1..120: mol_type = other DNA

SEQ ID NO: 43855 - DNA, 120 bp, synthetic construct; identical to SEQ ID NO: 33501
  source 1..120: mol_type = other DNA

SEQ ID NO: 43856 - DNA, 120 bp, synthetic construct; identical to SEQ ID NO: 33502
  source 1..120: mol_type = other DNA

SEQ ID NO: 43857 - DNA, 120 bp, synthetic construct; identical to SEQ ID NO: 33503
  source 1..120: mol_type = other DNA

SEQ ID NO: 43858 - DNA, 120 bp, synthetic construct; identical to SEQ ID NO: 3201
  source 1..120: mol_type = other DNA

SEQ ID NO: 43859 - DNA, 120 bp, synthetic construct; identical to SEQ ID NO: 11549
  source 1..120: mol_type = other DNA

SEQ ID NO: 43860 - DNA, 120 bp, synthetic construct; identical to SEQ ID NO: 11550
  source 1..120: mol_type = other DNA

SEQ ID NO: 43861 - DNA, 120 bp, synthetic construct; identical to SEQ ID NO: 11551
  source 1..120: mol_type = other DNA

SEQ ID NO: 43862 - DNA, 120 bp, synthetic construct; identical to SEQ ID NO: 11552
  source 1..120: mol_type = other DNA

SEQ ID NO: 43863 - DNA, 120 bp, synthetic construct; identical to SEQ ID NO: 11553
  source 1..120: mol_type = other DNA

SEQ ID NO: 43864 - DNA, 120 bp, synthetic construct; identical to SEQ ID NO: 11554
  source 1..120: mol_type = other DNA

SEQ ID NO: 43865 - DNA, 120 bp, synthetic construct
  source 1..120: mol_type = other DNA
ggcctcccaaagtgctgggattacagcataagccaccgtgcccacgcaagtagacacttcctgagctcactgtttacatcttcagagtgaataggtatcatttattttatattttttaaa

SEQ ID NO: 43866 - DNA, 120 bp, synthetic construct; identical to SEQ ID NO: 11555
  source 1..120: mol_type = other DNA

SEQ ID NO: 43867 - DNA, 120 bp, synthetic construct
  source 1..120: mol_type = other DNA
tgtgttctttccaaggcgaccgtgctggaggagatgcccccattcccggagcgggagtcctccatcttggcaaagctcaagaagaagaagggccccagcacggtgacagacctggaggac

SEQ ID NO: 43868 - DNA, 120 bp, synthetic construct
  source 1..120: mol_type = other DNA
cgggggccactgtgcctgctgggcaaggcacttccttcagaccgtcgtcttgtccagctcagctcacacatcctctgtggtgccttgttttaggggaagtggccgtcccctctcctacag

SEQ ID NO: 43869 - DNA, 120 bp, synthetic construct
  source 1..120: mol_type = other DNA
tcatcctggagtgaatgaaatgaatgaaagatgtgactctttctcccaaggtgggcgtcttcccttcacgcctgagcaccttcatgcttatgtttctcatgtgctctgtagagctggtga

SEQ ID NO: 43870 - DNA, 120 bp, synthetic construct
  source 1..120: mol_type = other DNA
gattgcagacagtgtctggttcacttagtgctcaatggtgcccaggctggagtgcagtggcatgatcttggctcgctacaacctccacctcccagccacctgccttggcctcccaaagcg

SEQ ID NO: 43871 - DNA, 120 bp, synthetic construct
  source 1..120: mol_type = other DNA
cccgtctgggaggtgtgcccaacagctcattgagaacgggccatgatgacaatggtggttttgtggaatagaaagcggggaaaggtggggaaaagattgagaaatcggatggttgcggtg

SEQ ID NO: 43872 - DNA, 120 bp, synthetic construct; identical to SEQ ID NO: 26840
  source 1..120: mol_type = other DNA

SEQ ID NO: 43873 - DNA, 120 bp, synthetic construct
  source 1..120: mol_type = other DNA
cctcctaaaattctgatttaattagtctggtgcacatttgacctagttttgttttatttaaaaaatctccaggagggtggagccaagatggccgaataggaacagctccggtctacagct

SEQ ID NO: 43874 - DNA, 120 bp, synthetic construct
  source 1..120: mol_type = other DNA
gtactcccctgagacaaaacttccagaggaacgatcaggcagcagcatttgcagttcaccaatatccgctgttctatagccactgctgttctgcacccaccgctgctgatacccaggcaa

SEQ ID NO: 43875 - DNA, 120 bp, synthetic construct
  source 1..120: mol_type = other DNA
agacaagcaaatgctgagagagttttgtcaccacccggcctgccctaaaagagctcctaaaggaagcactaaatatggaaaagaacaaccagtaccagccactgcaaaaaacatgccaaa

SEQ ID NO: 43876 - DNA, 120 bp, synthetic construct
  source 1..120: mol_type = other DNA
aatagacatctacagaactctccaccccatatcaacagaatatacatttttatcagcaccacaccacacctattccaaaattgaccacatagttggaagtaaagcactcctcagcaaatg

SEQ ID NO: 43877 - DNA, 120 bp, synthetic construct
  source 1..120: mol_type = other DNA
ttgtgacaataatcagtagcttaccaaccaaaaaaagtccaggaccagatggattcacagccgaattctaccagaggtacaaggaggagctggtaccattccttctgaaactattccaat

SEQ ID NO: 43878 - DNA, 120 bp, synthetic construct
  source 1..120: mol_type = other DNA
atggccatactgcccaaggtaatttatagattcaatgccatccccatcaagctaccaatgactttcttcacagaattggaaaaaactactttaaagttcatatggaaccaagaaagagtc

SEQ ID NO: 43879 - DNA, 120 bp, synthetic construct
  source 1..120: mol_type = other DNA
aacaaatttacaagaaaaaaacaaacaaccccatcaaaaagtgggcgaaggatgtgaacagacacttctcaaaagaagacatttatgcagccaaaaaacacatgaaaaaatgctcgtcat

SEQ ID NO: 43880 - DNA, 120 bp, synthetic construct
  source 1..120: mol_type = other DNA
ctttccaatgtggatgcctttataactttctcttgtctgaacgcttgaggtaggacttccagtactgtgttgaataacagtggacatccttgttatgtttcagagcttggatgaaaggct

SEQ ID NO: 43881 - DNA, 120 bp, synthetic construct
  source 1..120: mol_type = other DNA
ttggaagtattccttcttctgttttttggaatagtttcagtagacttggtattagttcttctttaaatgtttggtagaattcagcagtgaagccatcggatcctgggcttttcttcactg

SEQ ID NO: 43882 - DNA, 120 bp, synthetic construct
  source 1..120: mol_type = other DNA
gagcttcagcagtgaagtccgtgtgcgcgtatgctacactgctcacatggtgaaatgtactaatgacacccttctgtgaatgtgtccttgttgccgacacatgactgcatctgaaagtca

SEQ ID NO: 43883 - DNA, 120 bp, synthetic construct
  source 1..120: mol_type = other DNA
tgcaccccgtggagccggcccgcccccgccgctccgacactgcaccccgtggagccggcccgcccccaccgcgcatggcctgcactcacctgtggatgagattggtgaggggctcgatca

SEQ ID NO: 43884 - DNA, 120 bp, synthetic construct; identical to SEQ ID NO: 19379
  source 1..120: mol_type = other DNA

SEQ ID NO: 43885 - DNA, 120 bp, synthetic construct; identical to SEQ ID NO: 19380
  source 1..120: mol_type = other DNA

SEQ ID NO: 43886 - DNA, 120 bp, synthetic construct; identical to SEQ ID NO: 26964
  source 1..120: mol_type = other DNA

SEQ ID NO: 43887 - DNA, 120 bp, synthetic construct; identical to SEQ ID NO: 26965
  source 1..120: mol_type = other DNA

SEQ ID NO: 43888 - DNA, 120 bp, synthetic construct; identical to SEQ ID NO: 26966
  source 1..120: mol_type = other DNA

SEQ ID NO: 43889 - DNA, 120 bp, synthetic construct; identical to SEQ ID NO: 26967
  source 1..120: mol_type = other DNA

SEQ ID NO: 43890 - DNA, 120 bp, synthetic construct; identical to SEQ ID NO: 26968
  source 1..120: mol_type = other DNA

SEQ ID NO: 43891 - DNA, 120 bp, synthetic construct
  source 1..120: mol_type = other DNA
aactatcataaggttttgaggaaggtggtggaggggagtgaggcatgtccttctccttaagaatcactgcagctgggggtatacatcagcaagggagttagtaaaaaatacatttttaaa

SEQ ID NO: 43892 - DNA, 120 bp, synthetic construct
  source 1..120: mol_type = other DNA
cccgtctgagaagtgaggagcctctccgcccggcagccaccccatctgggaagtgaggagcgtctccgcccggcagccaccccgtccgggagggacgtggggggggggtcagccccccgc

SEQ ID NO: 43893 - DNA, 120 bp, synthetic construct
  source 1..120: mol_type = other DNA
gtcccatgaccctgccaaatccccctctgtgagaaacacccaagaattatcaataaaagaataaattaaaaaaaaaaaaaaagaatggactttcccaggccagctgtggtggctcacgac

SEQ ID NO: 43894 - DNA, 120 bp, synthetic construct; identical to SEQ ID NO: 15645
  source 1..120: mol_type = other DNA

SEQ ID NO: 43895 - DNA, 120 bp, synthetic construct
  source 1..120: mol_type = other DNA
tggcaaccaccccgtatgagaagtgaggagcccctccgcccggcagctgccccgtctgagaagtgaggagcctctccgcccggcagccaccccatctgggaagtgaggagcggctccgcc

SEQ ID NO: 43896 - DNA, 120 bp, synthetic construct
  source 1..120: mol_type = other DNA
gctctctgaaacatgtgctgtgtccactcagggttaaatggattaagggcggtgcaagatgtgctttgttaaacagatgcttgaaggcagcatgcgcgttaagagtcatcaccaatccct

SEQ ID NO: 43897 - DNA, 120 bp, synthetic construct; identical to SEQ ID NO: 15302
  source 1..120: mol_type = other DNA

SEQ ID NO: 43898 - DNA, 120 bp, synthetic construct
  source 1..120: mol_type = other DNA
ttctaactggtgtgagatggtatctcattgtggttttgatttgcattcctctgatagccagtgatgacgagcattttttcatgtgtgttttggctgcataaatgtcttcttttgagaagt

SEQ ID NO: 43899 - DNA, 120 bp, synthetic construct
  source 1..120: mol_type = other DNA
ctttgagcagtggtttgtagttctgcttgaagaggtccttcacattgcttgtaagttggattcctaggtattttattctctttgaagcaattgtgaatgggagttcactcatgatttggc

SEQ ID NO: 43900 - DNA, 120 bp, synthetic construct
  source 1..120: mol_type = other DNA
cggtggtgatatcccctttatcattttttattgcatctatttgattcttctctttttttattagtcttgctagcggtctatcaattttgttgatcttttcaaaaaaccagctcctggatt

SEQ ID NO: 43901 - DNA, 120 bp, synthetic construct; identical to SEQ ID NO: 15303
  source 1..120: mol_type = other DNA

SEQ ID NO: 43902 - DNA, 120 bp, synthetic construct
  source 1..120: mol_type = other DNA
gattgtttgaacatgggaggtgaaggttgcagtgagccaagattgctccattgctctccagcctgagcgacaagagcaaaactctgtctcaaaaaaaaaaaaaaggaggttaaataggaa

SEQ ID NO: 43903 - DNA, 120 bp, synthetic construct; identical to SEQ ID NO: 14357
  source 1..120: mol_type = other DNA

SEQ ID NO: 43904 - DNA, 120 bp, synthetic construct; identical to SEQ ID NO: 14358
  source 1..120: mol_type = other DNA

SEQ ID NO: 43905 - DNA, 120 bp, synthetic construct
  source 1..120: mol_type = other DNA
gttaggaggtcttcaatcagcagcttctagtgaaggtttaaacttactcagttgggggcggggggtgggggaaaaaccacttcagtttacattgattttcatgatcttcctgttaccaag

SEQ ID NO: 43906 - DNA, 120 bp, synthetic construct; identical to SEQ ID NO: 13148
  source 1..120: mol_type = other DNA

SEQ ID NO: 43907 - DNA, 120 bp, synthetic construct
  source 1..120: mol_type = other DNA
cgttctcaatgagctgttgggcacacctcccagacggggtggtggccgggcagaggggctcctcacttcccagtaggggcggccgggcagaggcgcccctcacctcccggacggggcggc

SEQ ID NO: 43908 - DNA, 120 bp, synthetic construct
  source 1..120: mol_type = other DNA
aaatagggaatcctttcccccattgcttgtttttctcaggtttgtcaaagatcagacagttgtagatatgtggcattatttctgagggctctgttctgttccattggtctatatctctgt

SEQ ID NO: 43909 - DNA, 120 bp, synthetic construct
  source 1..120: mol_type = other DNA
attttgtcaaaggccttttctgcatctattgagataatcatatggtttttgtctttggttctgtttatatgatggattatgttaattgatttttgtatgttgaaccagccttgcatccca

SEQ ID NO: 43910 - DNA, 120 bp, synthetic construct
  source 1..120: mol_type = other DNA
ctagttctttcaattgtgatgttagggtgtcaattttagatctttcctgctttctcttgtgggcatttagtgctataaatttccctctacacactgctttgaatgtgtcccagagattct

SEQ ID NO: 43911 - DNA, 120 bp, synthetic construct
  source 1..120: mol_type = other DNA
gtttttgcagtggctgttactggttattcctttccatgtttagtgcttccttcaggagctgttttacagcaggtctggtggtgacaaaaatctctcagcatttgcttgtctgtaatgtac

SEQ ID NO: 43912 - DNA, 120 bp, synthetic construct; identical to SEQ ID NO: 32604
  source 1..120: mol_type = other DNA

SEQ ID NO: 43913 - DNA, 120 bp, synthetic construct
  source 1..120: mol_type = other DNA
ggacatccacaccaaaaacccatctgtacattaccatcatcaaagaccaaaagtagataaaaccacaaagatggggaaaaaacagaacagaaaaactggaaactctaaaacgcagagcgc

SEQ ID NO: 43914 - DNA, 120 bp, synthetic construct
  source 1..120: mol_type = other DNA
acaaccggtaccagccgctgcaaaatcatgccaaaatgtaaagaccatcgaggctaggaagaaactgcatcaactaacgagcaaaatcaccagctaacatcataatgacaggatcaaatt

SEQ ID NO: 43915 - DNA, 120 bp, synthetic construct
  source 1..120: mol_type = other DNA
ggaaagatccaaaattgactccctaacatcacaattaaaagaactagaaaagcaagagcaaacacattcaaaagctagcagaaggcaagaaataactaaaatcagagcagaactgaagga

SEQ ID NO: 43916 - DNA, 120 bp, synthetic construct
  source 1..120: mol_type = other DNA
gggatgtatttcaaaataataagagctatctatgacaaacccacagccaatatcataccgaatgggcaaaaactggaagcattccctttgaaaactggcacaagacagggatgccctctc

SEQ ID NO: 43917 - DNA, 120 bp, synthetic construct
  source 1..120: mol_type = other DNA
ggcaaggacttcatgtccaaaacaccaaaagcaatggcaacaaaagccaaaatggacaaatgggatctaattaaactaaagagcttctgcacagcaaaagaaactaccatcagagtgaac

SEQ ID NO: 43918 - DNA, 120 bp, synthetic construct; identical to SEQ ID NO: 32605
  source 1..120: mol_type = other DNA

SEQ ID NO: 43919 - DNA, 120 bp, synthetic construct
  source 1..120: mol_type = other DNA
ctgcactccagcctgggcaacagagcaagactccatctaaaaaaaaagaaaaagaagaaaaaaaaaagaaaaggaggaggagccaagatggccgaataggaacagctccggtctacagct

SEQ ID NO: 43920 - DNA, 120 bp, synthetic construct; identical to SEQ ID NO: 43913
  source 1..120: mol_type = other DNA

SEQ ID NO: 43921 - DNA, 120 bp, synthetic construct; identical to SEQ ID NO: 43914
  source 1..120: mol_type = other DNA

SEQ ID NO: 43922 - DNA, 120 bp, synthetic construct
  source 1..120: mol_type = other DNA
taatgaatccaggagctggttttttgaaaggatcaacaaaactgatagaccactagcaagactaataaagaaaaaaagagagaggaatcaaatagacacaataaaaaatgataaagggga

SEQ ID NO: 43923 - DNA, 120 bp, synthetic construct
  source 1..120: mol_type = other DNA
ccccactgtctcagcccaaaatctccttaagctgataagcaacttcagcaaagtctcaggatacaaaatcaatgtataaaaatcacaagcattcttatacaccaataacagacaaacaga

SEQ ID NO: 43924 - DNA, 120 bp, synthetic construct
  source 1..120: mol_type = other DNA
gaaactaccatcagagtgaacaggcaacctacaaaatgggagcaaattttcgcaacctactcatctgacaaagggctaatatccagaatctacaatgaactcaaacaaatttacaagaaa

SEQ ID NO: 43925 - DNA, 120 bp, synthetic construct; identical to SEQ ID NO: 32606
  source 1..120: mol_type = other DNA

SEQ ID NO: 43926 - DNA, 120 bp, synthetic construct
  source 1..120: mol_type = other DNA
tcaagatggattaaagacttaaatgttagacctaaaaccataaaaaccctagaagaaggcaacctacaaaaatgggagaaaattttcccaacctactcatctgacaaagggctaatattc

SEQ ID NO: 43927 - DNA, 120 bp, synthetic construct; identical to SEQ ID NO: 32607
  source 1..120: mol_type = other DNA

SEQ ID NO: 43928 - DNA, 120 bp, synthetic construct
  source 1..120: mol_type = other DNA
accattctcagtaagctatcacaagaacaaaaaccaaacactgcaaattctcactcataggtgggaattgaacaatgagatcacatggacacaggaaggggaatatcacactctggggac

SEQ ID NO: 43929 - DNA, 120 bp, synthetic construct; identical to SEQ ID NO: 32608
  source 1..120: mol_type = other DNA

SEQ ID NO: 43930 - DNA, 120 bp, synthetic construct; identical to SEQ ID NO: 32609
  source 1..120: mol_type = other DNA

SEQ ID NO: 43931 - DNA, 120 bp, synthetic construct; identical to SEQ ID NO: 14894
  source 1..120: mol_type = other DNA

SEQ ID NO: 43932 - DNA, 120 bp, synthetic construct; identical to SEQ ID NO: 14895
  source 1..120: mol_type = other DNA

SEQ ID NO: 43933 - DNA, 120 bp, synthetic construct; identical to SEQ ID NO: 14896
  source 1..120: mol_type = other DNA

SEQ ID NO: 43934 - DNA, 120 bp, synthetic construct
  source 1..120: mol_type = other DNA
agagggaatatttatttagagccaaaaaggaaatcacaatgaatgaccaatttttaaaaattgacatatattcacgcctgtaatcccagcactttgggaggccgaggcgggcggatcacg

SEQ ID NO: 43935 - DNA, 120 bp, synthetic construct
  source 1..120: mol_type = other DNA
gataagattttctttctttttttttttttcttttgagatagtctcactctaatccacaggctggggtacagtggcatgatctggactaactgcaacctccacctcccaggctcaagccat

SEQ ID NO: 43936 - DNA, 120 bp, synthetic construct
  source 1..120: mol_type = other DNA
cttttgtgggggacacctttgttgaaaatcagttggctctaaatgcattgatttatttctggactctctatcttgttccattggtctatgtgtctgtttttatgccaataccacactgct

SEQ ID NO: 43937 - DNA, 120 bp, synthetic construct; identical to SEQ ID NO: 3061
  source 1..120: mol_type = other DNA

SEQ ID NO: 43938 - DNA, 120 bp, synthetic construct; identical to SEQ ID NO: 25394
  source 1..120: mol_type = other DNA

SEQ ID NO: 43939 - DNA, 120 bp, synthetic construct; identical to SEQ ID NO: 25395
  source 1..120: mol_type = other DNA

SEQ ID NO: 43940 - DNA, 120 bp, synthetic construct
  source 1..120: mol_type = other DNA
aggtcacaccattgcactccagcctgggcaacaagagtgaaactctgtctcaaaaaaaaggaaagaaagaaaagaaagaaaagaaaggaaagaaagaaagaaagaaagaaagaaagaaag

SEQ ID NO: 43941 - DNA, 120 bp, synthetic construct
  source 1..120: mol_type = other DNA
cacaccagcctgggcaacagagaccctgtctcaaaaaaaaaaaagaatatcagagttccaaaagtcctttcacttatccaaatgcagcaagtacaaaagtagcaaaccattccccctcaa

SEQ ID NO: 43942 - DNA, 120 bp, synthetic construct; identical to SEQ ID NO: 25396
  source 1..120: mol_type = other DNA

SEQ ID NO: 43943 - DNA, 120 bp, synthetic construct; identical to SEQ ID NO: 25397
  source 1..120: mol_type = other DNA

SEQ ID NO: 43944 - DNA, 120 bp, synthetic construct; identical to SEQ ID NO: 25398
  source 1..120: mol_type = other DNA

SEQ ID NO: 43945 - DNA, 120 bp, synthetic construct; identical to SEQ ID NO: 25399
  source 1..120: mol_type = other DNA

SEQ ID NO: 43946 - DNA, 120 bp, synthetic construct
  source 1..120: mol_type = other DNA
gtccgggagggaggtggggggcgcctctgcccaaccgccccttctggtaagtgaggagcccctctgcccggccaccaccccgtctgggaggtgtacccaacagctcattgagaacgggcc

SEQ ID NO: 43947 - DNA, 120 bp, synthetic construct
  source 1..120: mol_type = other DNA
tgcggaccgaggttggctcgatgctgttcccaggtactgttgttggctgttggtgaggaaggtgaagcactcagttgccttctcgggcctcggcgccccctatgtacgcctccctgggct

SEQ ID NO: 43948 - DNA, 120 bp, synthetic construct
  source 1..120: mol_type = other DNA
gttgttactgttcaaccctccttaggagtacttgatattttctatatgatttagtcttgtgccagtctcagtactccctcctttattagtggagcaagggtagtcagaattactggtgta

SEQ ID NO: 43949 - DNA, 120 bp, synthetic construct
  source 1..120: mol_type = other DNA
tgcactccagtctgggtgacagtaagaccctgtctcctaacaaacaaacaaaccctctcactcttccactcttatggaatttggtattttttcctttctctctctctttctctttgtgaa

SEQ ID NO: 43950 - DNA, 120 bp, synthetic construct
  source 1..120: mol_type = other DNA
tttgcactcgtactgcctttaccatttcaccactgaaactactgttttaaaagttatctgtgacctccgaatcaccaaatccaatgacgtttcctctgtcatccttggtttccttagacc

SEQ ID NO: 43951 - DNA, 120 bp, synthetic construct
  source 1..120: mol_type = other DNA
caagtacatagatagaagtggcttgaagagtgctttgtcatgtcatcagggctaagctcccatttatctgctgttctctcaacattgtccttgtgtttgggctttagacttcccttctaa

SEQ ID NO: 43952 - DNA, 120 bp, synthetic construct
  source 1..120: mol_type = other DNA
gtcaatcacgtgtcagatcttgaatatatcttgtttagttaggcccccaagttgtataatacccagttaacattgatttaaacagtatctcgggctaggcgctgtggctcacgcctgtaa

SEQ ID NO: 43953 - DNA, 120 bp, synthetic construct
  source 1..120: mol_type = other DNA
acactgtttacaccaagagttaatataagctgtacataggatttcagtgtttattttctgagagagagtctcgttcagtcactcaggctggagtgcagtggcttgatctcagctcagtgc

SEQ ID NO: 43954 - DNA, 120 bp, synthetic construct
  source 1..120: mol_type = other DNA
attctgctccattattccccatgatttggttttattcttgggctagcttatcttaatggtggtaaattactgtagtactttcagacttcatatcctcatttcacgtatagtaaaatgaaa

SEQ ID NO: 43955 - DNA, 120 bp, synthetic construct
  source 1..120: mol_type = other DNA
agatcttgaaatagaataaaataggttcaggggacaggggatactactttagtttggtaagagaagggctttttgagaagccgtttgtgctaagagacctgagtgttcatgagtgaggtg

SEQ ID NO: 43956 - DNA, 120 bp, synthetic construct
  source 1..120: mol_type = other DNA
atccaagaacatactctgtttcaaaggcctgttatttcagacttaaaatttgagatctgtatatggcccagtatattgtcttttttttcctctccatttattgagtgcaggtctctgtat

SEQ ID NO: 43957 - DNA, 120 bp, synthetic construct
  source 1..120: mol_type = other DNA
tttgctaggtacagaattctaggttagcagtggttactttatttcagcacatttcattgttattgagacctcaactctttgtgtctcaacttttaagataatgtgattttgtttggctgc

SEQ ID NO: 43958 - DNA, 120 bp, synthetic construct
  source 1..120: mol_type = other DNA
ttggcaaactcacaaaaggcaaaagctggggtcacctttctgggttcctgacttctagtggatttgagcttcttattcattcctcgttattttgctggttatttggtgctgttaagatca

SEQ ID NO: 43959 - DNA, 120 bp, synthetic construct
  source 1..120: mol_type = other DNA
tttcaataataattctttttttttttttttggagacagagtcttactgtgtcgcccaggctggagtggcgtgatctccactcactgcaacctccgcctcccaggttcaggcaattctcct

SEQ ID NO: 43960 - DNA, 120 bp, synthetic construct
  source 1..120: mol_type = other DNA
aaacagaggcccaaggaagatgggtgacttgacttgcctaaaaatatgagggaatttctctccaatagcttttatattctccatgaagtaggtcgtcagcaaagagtggcataggtagaa

SEQ ID NO: 43961 - DNA, 120 bp, synthetic construct
  source 1..120: mol_type = other DNA
tttgagatttttggttaagaatttggagatgacgcagttattgatgatgacaaggtcctgcgtggatcatggaagttggtatttggaggtgaagaagttaaggagctaagaagccagagt

SEQ ID NO: 43962 - DNA, 120 bp, synthetic construct
  source 1..120: mol_type = other DNA
ctgattggcttcaagttgggtttcccactaccccctctttggagtcgattaatttgctggagcacctcacagaactcagggaaacacttgcttatatttactggtttactataaagcata

SEQ ID NO: 43963 - DNA, 120 bp, synthetic construct
  source 1..120: mol_type = other DNA
tttgtgggaggggaaaacatgaagagaatagtagttcaaaaatttaaacatctgtcatggtcccataggaataatgtgttgaccggaatgatgatgtcccagccctgcccacaaaaaacc

SEQ ID NO: 43964 - DNA, 120 bp, synthetic construct
  source 1..120: mol_type = other DNA
ttaggataggtatagacagcttcacagaattgggccttgaagtatgagaggtagttcattcatattctgcagctatttgggtacctactttggaccaggcgcaatactagaatacatttg

SEQ ID NO: 43965 - DNA, 120 bp, synthetic construct
  source 1..120: mol_type = other DNA
cctgccttggtccccaaaagtgctaggattacaggcgtgagccactgcacccaaccagattatttcctgtaagtataacttacagcaatttttttaaaggtattccaggcagttgttaaa

SEQ ID NO: 43966 - DNA, 120 bp, synthetic construct
  source 1..120: mol_type = other DNA
acttaagtgttaaccagctaagtaccctcctggtacccaggtccttgtctggcatccaggaagattcaggttgtacacggacttgaaggatgaatgcatgggttttatcgagttgtggag

SEQ ID NO: 43967 - DNA, 120 bp, synthetic construct
  source 1..120: mol_type = other DNA
ttgcggtttttgccattgaaagtaatggtaaaaacgcaattacttttgcaccaacctactcttaggggtagtcaggtgatcaagaggtttccaatttgattgacatagtccagtaatgct

SEQ ID NO: 43968 - DNA, 120 bp, synthetic construct
  source 1..120: mol_type = other DNA
ttttttttaagctcatcagctgtcgatagtgttactgtgttttttgttgttgttgttttgagacagagtctctctctgttgctcaggctggagtgcagtgttgtgatctcagctcactgc

SEQ ID NO: 43969 - DNA, 120 bp, synthetic construct
  source 1..120: mol_type = other DNA
ccctgaaaaattcctaaacatccttgaagtctagttctgttactactttctctctgaaatcttttttgattacctagctggaaacgatctaatctcccattctttaacagtacattccct

SEQ ID NO: 43970 - DNA, 120 bp, synthetic construct
  source 1..120: mol_type = other DNA
agggtagctgagttgttgagtcatcacagtttttctgatttattttgcctttactaatatgcccactccttggcattacctcttatttgctaatgcccatacgataaccccaaactctgt

SEQ ID NO: 43971 - DNA, 120 bp, synthetic construct
  source 1..120: mol_type = other DNA
ggctgctggtcaccacaaaatctgaatctgcctttggccacaggttaagtgagaaatgttaatttctctctcctctaatgttgtgacttcagttagtgtcgaacctagaagtacttaact

SEQ ID NO: 43972 - DNA, 120 bp, synthetic construct
  source 1..120: mol_type = other DNA
ttgatatactaaaacattcttctgggtttttttggttttgttttgttttgttttagacagagtcttgctctgttgcccaggctgcagtgcagtggcgtgatctctgttcactgcagcctc

SEQ ID NO: 43973 - DNA, 120 bp, synthetic construct
  source 1..120: mol_type = other DNA
aatcaggtgagggctcttcccttgggattttaatagtcaggaatgggataagaggtgtatacacacaggtacaaaatgtgtttgtgccataaaagatgtaggaacaatgaagggaaaagg

SEQ ID NO: 43974 - DNA, 120 bp, synthetic construct
  source 1..120: mol_type = other DNA
ccccttagagcctctagaaagaagtgcagccctgcagacaccttggttttagcctagtgagacccattttagacttctgacctacaaaactgtaagttatcaaatgtgtgttttaagaca

SEQ ID NO: 43975 - DNA, 120 bp, synthetic construct
  source 1..120: mol_type = other DNA
aaaaagcttgttgatatctgtaggcataactctattctatgtctaaggtcttcggtaaagagagacgattaagtttatcagtaaagcaccagagtcaattaaggcgactgaaaggagcac

SEQ ID NO: 43976 - DNA, 120 bp, synthetic construct
  source 1..120: mol_type = other DNA
ccaactcctgagctcaagtgaactggccacctcggcctcccaaattcctgggattataggcatgagccactgcaccctgcccagaaaatatttttaatgcatacatatatatatatatat

SEQ ID NO: 43977 - DNA, 120 bp, synthetic construct
  source 1..120: mol_type = other DNA
caggcattgtaacacagggactaatgaaagagaaaaaaaacaaagcacgaaaggacagcagaaatagctccataatctcactttccaggaataacctctatggacattttgttgtgtgtc

SEQ ID NO: 43978 - DNA, 120 bp, synthetic construct
  source 1..120: mol_type = other DNA
agtaactaaagttacagagctagagtgacaggagtaaagcttcaactcaggcaacccagacttccagagttctgatctccactactaagctgctagcatagcttttctggtaactatttt

SEQ ID NO: 43979 - DNA, 120 bp, synthetic construct
  source 1..120: mol_type = other DNA
atttgacagagtggaataacagtatctaaggaaacgggtagaggacaacaaagaatggagcatattcatggcgaggagcaaaagctctaccccattgaaaggcttcttttcctccctggc

SEQ ID NO: 43980 - DNA, 120 bp, synthetic construct
  source 1..120: mol_type = other DNA
tttcattgagcttttttttcctttacctaaatgtaaaagcctatctttatgcatacttatagtagccagcctgccacacctccccactccctgaacaaggatggcagtggctttgtaaag

SEQ ID NO: 43981 - DNA, 120 bp, synthetic construct
  source 1..120: mol_type = other DNA
tgaaaaggcaatcctacttggttgtggatttttatctacaatataagaatgctttaaaaaatacctggtgactaagcaaatggagaagcagcagttttcataatgacattcataaacgac

SEQ ID NO: 43982 - DNA, 120 bp, synthetic construct
  source 1..120: mol_type = other DNA
tcttcaattttgatctcccttctcccccttttcttgtattagaatctgaaacctacctatgcagcacataaaatgggatagagtattatggttcagaaaagatgggtaatagtttaggaa

SEQ ID NO: 43983 - DNA, 120 bp, synthetic construct
  source 1..120: mol_type = other DNA
ttgcatgtatatgccacattttgttcattcatctgtcagtggacacttcaggttgtttccaccttttgtctatcatgaataatgctactatgaacgtgggtgtgcaagtgtctgcttggg

SEQ ID NO: 43984 - DNA, 120 bp, synthetic construct
  source 1..120: mol_type = other DNA
aacttagtggtttaagagaacacaaatgtattatcttgcagtcctggagatcagacacggttttcactggaccaaaatcaagatatcagtggctctgcgtctcctctagagattctattg

SEQ ID NO: 43985 - DNA, 120 bp, synthetic construct
  source 1..120: mol_type = other DNA
tcccaactgagcctcccaagtagctaggattacaaacatgtgccaccacagctgactaatttttaatttttttttcataaggagagagtctcactatattgcacaggctggtctcgaact

SEQ ID NO: 43986 - DNA, 120 bp, synthetic construct
  source 1..120: mol_type = other DNA
caagtacagatttgaattctggcataggctcttgatatgtgttcttagggaagttatctactgttttggagttccatttttcttaactcaaaaatgagtaacacctacctcataggtggt

SEQ ID NO: 43987 - DNA, 120 bp, synthetic construct
  source 1..120: mol_type = other DNA
caaactcctgaccttgacctgcctcgcaaagtatggggattacacgcgtgagccaccacgccagcctttcactttaaataactattaaaaataacaaagtaaaccaaaggaaaataagag

SEQ ID NO: 43988 - DNA, 120 bp, synthetic construct
  source 1..120: mol_type = other DNA
caaatgcaggaaagaagagtcacaagtatcatcacttacagattatatgattgcatacccagaaaatccactggaaaccctattggaattcatagaatcatttgataaggtggccacaca

SEQ ID NO: 43989 - DNA, 120 bp, synthetic construct
  source 1..120: mol_type = other DNA
aaattgacattgtaacaagtttctggaagatgaagaaatcgtgggaattaaaatggatcactgaaaagaaatcaaggattctaagacttcctagttctctgttctttccaacatggcagg

SEQ ID NO: 43990 - DNA, 120 bp, synthetic construct
  source 1..120: mol_type = other DNA
gagaattgcttgaacctgggaggttacagtgagcccagatcatgccactgcactccagcctgggcaacagagcaagactccatctatttaaaaaacaaaaaaaagaatgaggtttacaaa

SEQ ID NO: 43991 - DNA, 120 bp, synthetic construct
  source 1..120: mol_type = other DNA
cagatacggtattttgaaggatttggaggaggaggggaaagatattaatacttactgctccaatttttttttttttttttttttttgatatggagtcttgctctgtcacccaggctggag

SEQ ID NO: 43992 - DNA, 120 bp, synthetic construct
  source 1..120: mol_type = other DNA
gccaccgccacctggccaatgctttgcttttcaaactcttcaaagggtatgtaataaaaaggaaggcttaccaccagacaccataccttgattctataagcagtgactgtatttttgtat

SEQ ID NO: 43993 - DNA, 120 bp, synthetic construct
  source 1..120: mol_type = other DNA
aataactttggacttacagaagagttggaaaaatagtacagagagtttctatataccttttacagattccccagatgattaacatcttatatatctgtactacaattatcaaaacaaaaa

SEQ ID NO: 43994 - DNA, 120 bp, synthetic construct
  source 1..120: mol_type = other DNA
ttttgggatcagttctgatagattatatcttctagtaaattattttgggttttcaaatttgtttgcatagagttgagcagagtcatcttttatgattcttttgctttcctgccttcttat

SEQ ID NO: 43995 - DNA, 120 bp, synthetic construct
  source 1..120: mol_type = other DNA
ataaagggtacttttagcagtctctgctcatcttgcccatccggctctttttgtggttgtgtaaggttataacttctgtgtctcagtaaacttgtgcatgcccatttttttctctgttac

SEQ ID NO: 43996 - DNA, 120 bp, synthetic construct
  source 1..120: mol_type = other DNA
cttcatttctctttgacagtctctactcctaaggtcatccattctctttaggtatcttttggcctcagtttgagcacagcagatcccaagaccacatatgccatagcataggctattata

SEQ ID NO: 43997 - DNA, 120 bp, synthetic construct
  source 1..120: mol_type = other DNA
tcattcagtgaatcatataaagaaaataagtgtaaaactccaatggctagttagttcttagttctttttaagattaaagagaagagaccaaatatagcatcactgtactgaggcaaggtt

SEQ ID NO: 43998 - DNA, 120 bp, synthetic construct
  source 1..120: mol_type = other DNA
aggcaggaggatagcttgagccaaggagctcgagacctgcctgggcaatatagcaagaccccattctcaaaaaaaaaaaaaaattacttcctttataaaaaaaaaaatcttcctgctttg

SEQ ID NO: 43999 - DNA, 120 bp, synthetic construct
  source 1..120: mol_type = other DNA
catatttgagagacaatgtaacttacccttagatccatctccacactgaagtggaatgtctctcagagtgacaatagaagtcacaccctcaaatttctacagtggaatatctagttgatc

SEQ ID NO: 44000 - DNA, 120 bp, synthetic construct
  source 1..120: mol_type = other DNA
gggaagattgtactccagcctgggcaaaagagccagacctggtctgtctgaaaaacaaaaacaaaaacaaaacaaaaaacagcaaaaagtaggtctcctccaaccggattacttaaagtc

SEQ ID NO: 44001 - DNA, 120 bp, synthetic construct
  source 1..120: mol_type = other DNA
ctgcctcagcttcccaagtagctgggactacgggtgtgcaccaccacgcccggctaatttttatatttttagtacagacggggtttcactatgttggctaggctggtctcgaactcctga

SEQ ID NO: 44002 - DNA, 120 bp, synthetic construct
  source 1..120: mol_type = other DNA
tttctttctttctttctttcttttttttttttttttttttgagaccgagtcttgctctgtcaccaggctggagtgcagtgacatgatcttggctgtctgcaacctccgcctcccgggttc

SEQ ID NO: 44003 - DNA, 120 bp, synthetic construct
  source 1..120: mol_type = other DNA
ttagcaggcgaagtcctgctagagggagagacatgttactttcataccacaggtctcctcaagtcatttgccagattttaaattttgtagagcaggagattaaagacctgagtttacaac

SEQ ID NO: 44004 - DNA, 120 bp, synthetic construct
  source 1..120: mol_type = other DNA
gatcagaccccaacaatggaaaaggcagactctctagaggaaaatactatcaatcatcttaagtctcttttgttcttgtatacacagttggcatacagtcaaacgttatatgaaatgcag

SEQ ID NO: 44005 - DNA, 120 bp, synthetic construct
  source 1..120: mol_type = other DNA
ttcagcatcatttggcatcagggaaatgcaaagactatttcactcctactcaaatgactgatgtttaaaagactgatcacaccaaatgtggagcattggaatgctcaggcattgctgaga

SEQ ID NO: 44006 - DNA, 120 bp, synthetic construct
  source 1..120: mol_type = other DNA
gttagtagctttccaaggtgactactttgggaatctttttaaaaattgtttgaccttaaatcttatttacctttatgcttatagctatcaatagatttctaacaatgtgtacagaaattt

SEQ ID NO: 44007 - DNA, 120 bp, synthetic construct
  source 1..120: mol_type = other DNA
cagagcgagactccgtctcaaaaaaaaaaaaaaaaaagagacctgatcacagctgtgccttaaaaaggctgctctgacagctctgtgcaaggttgagccacttgggaaattattttcata

SEQ ID NO: 44008 - DNA, 120 bp, synthetic construct
  source 1..120: mol_type = other DNA
gtctattattttgaaggtcagatactaaggctatttattaaaaggaattctggggtttgggggcgatttctttgtttctgtttttttagctgaggtctcactctgtcccccaggctggag

SEQ ID NO: 44009 - DNA, 120 bp, synthetic construct
  source 1..120: mol_type = other DNA
catgttggtgcacgcttaagagacatggattctaaacacataagtagcttttgtaacttgagcaagtctctgggtctcacttgttttatctgaaaaatgagaataatttgcattgttggt

SEQ ID NO: 44010 - DNA, 120 bp, synthetic construct
  source 1..120: mol_type = other DNA
ttctgttgcttgaaaattccagtgtcagaacagagaaagtgcttgataataattgaagccagacagagaaattacttttggattctaaaatattatttagaggaagtctaaggaagtaca

SEQ ID NO: 44011 - DNA, 120 bp, synthetic construct
  source 1..120: mol_type = other DNA
agtagctgaaactatagacgcctaccaccacgcctggctaatttttgtatttttggtagagacggggtttcttcatgttggccaagctggttatcacttaaatactttgactactctgta

SEQ ID NO: 44012 - DNA, 120 bp, synthetic construct
  source 1..120: mol_type = other DNA
atgtaatattgttaactgtgctcatcctatggtagcgtagaacacagccctgtacagtagcgtagaacacagtcctgtacagtagcgtagaacacagtcctgtacagtagcgtagaacac

SEQ ID NO: 44013 - DNA, 120 bp, synthetic construct
  source 1..120: mol_type = other DNA
gttctactttgtggcattgttgtgaaaattgaatattagtatataggaaatgcccagcatatctccctgagaggcagaagaccttttataactttctctccagtttcatatatgcccatt

SEQ ID NO: 44014 - DNA, 120 bp, synthetic construct
  source 1..120: mol_type = other DNA
ggagagaaagaggtatcaacatggtgttgttagaaggttctcaactctcactgatcattagtatcactagtttagctttataaagcatcataaatgaaaagtatcagtattcctttgcta

SEQ ID NO: 44015 - DNA, 120 bp, synthetic construct
  source 1..120: mol_type = other DNA
tcaggtaggtttaggttcaaactcatttttcttcattatcaaggtaccaatgagaaatttgataccagtctgaatcttattcctttgtagatggccatttttcctctttggaagcttttg

SEQ ID NO: 44016 - DNA, 120 bp, synthetic construct
  source 1..120: mol_type = other DNA
ccctgattcaagagattctcatgcctcagcctcccaagcagctaggactatgagtatctgccacagcgcccagctaatttctgtatttttagtagagacggggtttcaccatgttggcca

SEQ ID NO: 44017 - DNA, 120 bp, synthetic construct
  source 1..120: mol_type = other DNA
aagggaattcttgtataagtggacccatgcagttcacacccatattcaagggtcaactgagtaaaaaatgttaaaaagacaagtgtcaagttcagaaaattatatgcagcccaacaactg

SEQ ID NO: 44018 - DNA, 120 bp, synthetic construct
  source 1..120: mol_type = other DNA
tcggcttccctaagtattggcattacaggcatgtgccaccacacctggcccccaggatcaatttttaagtgaaaaaaagttgcaggacaacatacactataataatatgctacaatttat

SEQ ID NO: 44019 - DNA, 120 bp, synthetic construct
  source 1..120: mol_type = other DNA
aggtcattgcttcttgctgatcttgacaaagaagaaaaggaaaaagactggtattacgctcaacttcagaatctcactaaaagaatagatagtcttcctttaactgaaaatgtaagtaac

SEQ ID NO: 44020 - DNA, 120 bp, synthetic construct
  source 1..120: mol_type = other DNA
cttgaacctgggaggcagaggttgcaatgatccaagttcatgccactgcactccatccagcctgggtgacagagcaagactccatctcaaaacaaaaagaaaaaataaaaaaaaaaataa

SEQ ID NO: 44021 - DNA, 120 bp, synthetic construct
  source 1..120: mol_type = other DNA
tttcatgagaaacagcagttctccactgctgtctgtggcaccaattactccttcaggatcaagacatctggcaaagccttttagtttgtcagcagcatcccttctcttctttgatttact

SEQ ID NO: 44022 - DNA, 120 bp, synthetic construct
  source 1..120: mol_type = other DNA
tatcctgacctcgtgatccacccaccttggtctcccaaagtgttgggattacaggtgtgagccactgcgcccagccacatgtaattttttaaaagaaaatagactaattaaaatataacg

SEQ ID NO: 44023 - DNA, 120 bp, synthetic construct
  source 1..120: mol_type = other DNA
tttgcagagagggtttgggaagtggaggactaataagtggagttacaactggctcagtaggaataagaaataacatgcagactatttcatctctattgcaacccataatttgggtatgcc

SEQ ID NO: 44024 - DNA, 120 bp, synthetic construct
  source 1..120: mol_type = other DNA
agtgaaataggccaatctaattaaagccacttgtgactttggcaaataagtgtttgaattccacgtcacatcagggatccagattgagtctgacacctataatcaaatttaaacactcct

SEQ ID NO: 44025 - DNA, 120 bp, synthetic construct
  source 1..120: mol_type = other DNA
ctaatgttttaaagccctgaagaggccttgccaattgccttatctgtttcaaaactagcgtgggttgttgttttcttttttaacttttgggacaaattgggaggaaaacatttaaagatt

SEQ ID NO: 44026 - DNA, 120 bp, synthetic construct
  source 1..120: mol_type = other DNA
tgaggttgggggcttaactagtgtttgtgtgcatgtgcatgtatgtgtacatgttagttataatacgtgtatatatcattttttcttaccttccctcttgcccctatcccagtcagaaag

SEQ ID NO: 44027 - DNA, 120 bp, synthetic construct
  source 1..120: mol_type = other DNA
taatatccctactctacaaggatcacctacaaatcaattgaaaatggtcaaccatgccaggcatggtgattcacacctgtaattctagcactttgagaggctgaggcagaaggatcactt

SEQ ID NO: 44028 - DNA, 120 bp, synthetic construct
  source 1..120: mol_type = other DNA
aatagtatgcaagctattataaaataccatactgagaatagtgggaatatggtagccaaagcactcctttccctcctaactccctgcttgggtgattcagcaagtgaaacaagaacggcc

SEQ ID NO: 44029 - DNA, 120 bp, synthetic construct
  source 1..120: mol_type = other DNA
cgcataattgaagatttaccttaccatttgttaaaatctattgtgaagatgttgtaataatcacagtatgataatagcacaggaataaatttaggcaaatgatagagactagaaagaggt

SEQ ID NO: 44030 - DNA, 120 bp, synthetic construct
  source 1..120: mol_type = other DNA
acttgttcagtgtgtatttggtcacctagtatggtggtacttacccttccataggcatgtaagcaaaggttggaaaagtgcacatcagtttgttaatagagcttactactgggatgtggg

SEQ ID NO: 44031 - DNA, 120 bp, synthetic construct
  source 1..120: mol_type = other DNA
aaacagatggcttagtaggccctagtttgctgactgttgccctagcatatatatctaaaagcataattactggtcataaggtatgagtgttttgaatgagtgtttgccaaattgctctta

SEQ ID NO: 44032 - DNA, 120 bp, synthetic construct
  source 1..120: mol_type = other DNA
gagaagtcagaccttcataatatttagtcttggttgaaaggatggactctggaaccagaccttctatattcaaatcccagacctgccacttagcaacaccatgatcctaggtaaattctc

SEQ ID NO: 44033 - DNA, 120 bp, synthetic construct
  source 1..120: mol_type = other DNA
aagtgctgcagtgagcatttcctttgagcaccatgtgggtgctccaaaagtttcctgttttggagcattttgggttttggatttttgtattaggtatagggattaggaatactcaaggtg

SEQ ID NO: 44034 - DNA, 120 bp, synthetic construct
  source 1..120: mol_type = other DNA
gggagaaaattaagatagattaatttgggactgtgagcacagcttcttgttttatttgggttttttttggggggtgggggttgtttttgtttttgttttgagacggagtctcactctcgc

SEQ ID NO: 44035 - DNA, 120 bp, synthetic construct
  source 1..120: mol_type = other DNA
tggagaaaaaataatgtttagccacagttaggtacttggaaaggctgaaaaatactactaacttatgacagaagtaactttggggaagagttgggcctactgtttaaaccaggggtcccc

SEQ ID NO: 44036 - DNA, 120 bp, synthetic construct
  source 1..120: mol_type = other DNA
gaagaatagccagaattcagcaaatcgaaaaggacatacttcgtatacgacagcttttacagtcccaagcaacagaagcagaggttagtaaattgcctttcttgtttgtgggtataaaaa

SEQ ID NO: 44037 - DNA, 120 bp, synthetic construct
  source 1..120: mol_type = other DNA
acccccactggcatccaggcttataatctccaggcaagtttctggaaggaacttctataaggaatgtgactaaccctgattctgctgagagaacattaaaaagggagaaaaaaaatcaga

SEQ ID NO: 44038 - DNA, 120 bp, synthetic construct
  source 1..120: mol_type = other DNA
actgcgcctgacccctgttaaaccttttaaaagaaaatatgtgcagctatgttttgaccccagttctttgacaccactgtatatcctccagttgggttcaattttgatcctaactaccca

SEQ ID NO: 44039 - DNA, 120 bp, synthetic construct
  source 1..120: mol_type = other DNA
aattttattctgtaggcatgattaattaaataattggccacatgaggattaaactcgatttccagcctccttctcttcctggaggtccgtctggcccaaagttctaactctcttatcaca

SEQ ID NO: 44040 - DNA, 120 bp, synthetic construct
  source 1..120: mol_type = other DNA
gtgttcatttttgcaatggactctttttttacctggcccttggaaagggccaggaaaaaaagcagtatttttttgctccttttcagttctgttggtattgatgtatgtagcattctactt

SEQ ID NO: 44041 - DNA, 120 bp, synthetic construct
  source 1..120: mol_type = other DNA
taaaggtatgtgaggcaaccagtgctgtgactttcttgtgtgttcttccagacatagtttatttattaacaagcaagtacattgggtggaatgggagctgtgaggacaatgcagtgtgtc

SEQ ID NO: 44042 - DNA, 120 bp, synthetic construct
  source 1..120: mol_type = other DNA
agtacattagtggttgtctgactgtaagtggaaatgaggattaactgtaaatggacagcaggaattttattggaatgatgaaaatgttctaaaactggattacagctgtgcttgataaat

SEQ ID NO: 44043 - DNA, 120 bp, synthetic construct
  source 1..120: mol_type = other DNA
aacccgatcagatttacctctatgtctccacttcttttatctctgtcactgcttccctagtgcatagtgccactgtctcacacttatattaatacattagcctcctaactggtctttcct

SEQ ID NO: 44044 - DNA, 120 bp, synthetic construct
  source 1..120: mol_type = other DNA
gtattccccagcatctattgcaagtaactaacatagtagatggtcagtaattttctttaaatatgttgacatcttcacttacgttagtgtcaaatctttgtggtcttagattcattttgt

SEQ ID NO: 44045 - DNA, 120 bp, synthetic construct
  source 1..120: mol_type = other DNA
cactttccccttaccgagatagtcgaccgccaatcgtactggaggttatgaagtgtaatacacagttccatgcctttatcagtctgtataattgatgcattcagagctttaaagcaaaaa

SEQ ID NO: 44046 - DNA, 120 bp, synthetic construct
  source 1..120: mol_type = other DNA
atacagaactgttatttgttatgctaccatccgttatcttattagatttttattgaaatacagtgcaataggacagaatttttctttagggtgttctgtattctccaaattttcttcaat

SEQ ID NO: 44047 - DNA, 120 bp, synthetic construct
  source 1..120: mol_type = other DNA
atttcgtgggggggccatttagttggcaaaaatcaataacactcagtaatggtgagcaaacaggcattctcatatgttgcttttaattgtatgacatgaaacaggctttctggagagcaa

SEQ ID NO: 44048 - DNA, 120 bp, synthetic construct
  source 1..120: mol_type = other DNA
gttccttgagtatgtccaggccttccacaggacattcctttggtctaaaactgtcttctgcttcagttcatattatatgttttactcatccttccccaccgtttaaatgtcacttcttcc

SEQ ID NO: 44049 - DNA, 120 bp, synthetic construct
  source 1..120: mol_type = other DNA
gcaagtaagtatgatctcattatacatatgtataatgtgtgtatatgcatagagaaatgtgtgggagaatgttctttaaactgttatcaatagttatctctgagtgttgggatttttgtg

SEQ ID NO: 44050 - DNA, 120 bp, synthetic construct
  source 1..120: mol_type = other DNA
agcaccagtttctcagagaggctcgaacagatcaaatctcactaccataggctgtcacagcatgttcctctcgtttgaagactactacatttgcagttttacattaatttgtgtgatgac

SEQ ID NO: 44051 - DNA, 120 bp, synthetic construct
  source 1..120: mol_type = other DNA
aaaaaacgtaaaaccaaagtgctggaactacaggcgtgcaccaccatgcccagcctgtggaaagtgttgaccaaatatcttctgtatatcagagtgtttctatggcaattacagtttgac

SEQ ID NO: 44052 - DNA, 120 bp, synthetic construct
  source 1..120: mol_type = other DNA
agaggttgcagggagccgagatcgcaccactgcactccaccctgggcaagagagcgagactctgcctcaaaaaaataaaaaaattaaaaaataaataactgcagtggcattattacatct

SEQ ID NO: 44053 - DNA, 120 bp, synthetic construct
  source 1..120: mol_type = other DNA
aaaggcaggtggatcacttgaacccaagagtttgagaccagtctcagcaacataaggagaccctgtctctacaaaaaatacaaaaaaaaaaaaaaattaggcgtggtggcatgtgcctga

SEQ ID NO: 44054 - DNA, 120 bp, synthetic construct
  source 1..120: mol_type = other DNA
tagaaaagatgaggatgtttgaatgctgatgggaaggagccagtagagaagagagttgaagatccctaagatcaaagagaaatggagagagaaaggatccagagcacatctaaagggatg

SEQ ID NO: 44055 - DNA, 120 bp, synthetic construct
  source 1..120: mol_type = other DNA
aaagcattgaatgtggatggtacaggaaagttggataggaaaaaggacagtgggaaatagtgtctcacacatttggacactgagtgtcaggaatgatacagcgagtgcttctatctttgg

SEQ ID NO: 44056 - DNA, 120 bp, synthetic construct
  source 1..120: mol_type = other DNA
gaggtgcccaagatggaagacacgtctttgtaaccttatcttgagagtgcttctcatcacctctatagcattttattcactagaagcaagtcactaaatctagccaagactaaaggggaa

SEQ ID NO: 44057 - DNA, 120 bp, synthetic construct
  source 1..120: mol_type = other DNA
aaggggagccactctggactctgaactagtattctcagtccaaccccagacttccctatgcgagtatgaataagtggattatcttgcctttatatggggacacattttttaaaacctctc

SEQ ID NO: 44058 - DNA, 120 bp, synthetic construct
  source 1..120: mol_type = other DNA
agcttaagaccacccttggtactaagaatgcagcagcgaacagaataaagtttctgtcctcaaataacttacattttagctttccattctgcaaggttgagaactgcaaaagaatgcctg

SEQ ID NO: 44059 - DNA, 120 bp, synthetic construct
  source 1..120: mol_type = other DNA
tctactgcggtgtttatattatactgcactgcagtcatttattttttcatgtctttgtccagtaaaagttttaaacagccctttctaaactgtgagatcttagagaacttggactgtagc

SEQ ID NO: 44060 - DNA, 120 bp, synthetic construct
  source 1..120: mol_type = other DNA
aatttttaattctttttcagtctttacatccacttttctgcaagaatactgagttccagccaaactggctcacttcctgcttcctgaacattccctgtgactttccccctcccttccttg

SEQ ID NO: 44061 - DNA, 120 bp, synthetic construct
  source 1..120: mol_type = other DNA
atttttattttatttatttatttattttttgagatggagtcttgctctgttgcccaggctgtagtgcagtggcacgatcttggctcactgcaacccccacctccagggtttaagtgattc

SEQ ID NO: 44062 - DNA, 120 bp, synthetic construct
  source 1..120: mol_type = other DNA
tagtatcacagcttgctcctaagaggtggagccaaaatttgaacctagctccgatgaaaacccatttatccgcagtcctatactgccttcctaaaactttcatatctaaaggtgtatgtg

SEQ ID NO: 44063 - DNA, 120 bp, synthetic construct
  source 1..120: mol_type = other DNA
cactcatactatttactcacataaacaaattggtgatgatacatagattttgaaataacactgattacttcatcctggaaaggttttccggttttttgttttttttttggcggggggggt

SEQ ID NO: 44064 - DNA, 120 bp, synthetic construct
  source 1..120: mol_type = other DNA
ttgctcctcacatcaacctactgaagtaggaagggaaggtattatcatctccattttacagatgaaaaaactgaggctcagaagagctaaaggacttaaccatggcctcacacctagtaa

SEQ ID NO: 44065 - DNA, 120 bp, synthetic construct
  source 1..120: mol_type = other DNA
taactttttgtattagagatcacatttgtacatagccacatgctttttttctctgtttgtattgagacagggtctcacacaagcgcccagactgtaatgcagtggtgcgatcacagttca

SEQ ID NO: 44066 - DNA, 120 bp, synthetic construct
  source 1..120: mol_type = other DNA
atttttcagtgccagctcctgttgaacatcagatctgtcctgctgtgtgtgttctaatgaaactttcatttgatgaagagcatagacatgcaatgaatgaactaggtaagacaaaaatgt

SEQ ID NO: 44067 - DNA, 120 bp, synthetic construct
  source 1..120: mol_type = other DNA
catcgtttcattcgtcatttatcttaaaagtgatgaagtcatgagactcttacacagagaacctgaacagccaaaagtattgtctccttcagagtcatcactttgggaggctctgcacct

SEQ ID NO: 44068 - DNA, 120 bp, synthetic construct
  source 1..120: mol_type = other DNA
ttatttgcattagtgtttcacaaaatacctaaatcataatgatcacccagaggcactcgtcaaactggattttctggcactgtagcaaacagaatctccaggggaagggcctaggaatca

SEQ ID NO: 44069 - DNA, 120 bp, synthetic construct
  source 1..120: mol_type = other DNA
ccaggccaagtcttaaggtcttccctgtcaatttcatgggtcaaaattctcagttcttttacaggctccttttcttttacccaagtgtaaaatggtggaattccttgaagctctgcccta

SEQ ID NO: 44070 - DNA, 120 bp, synthetic construct
  source 1..120: mol_type = other DNA
cgaggcaggagaatcacttgaacctaggagttcgcaaccagctcgggcaacatagtggcaccctgtctctaccaaaataaaaataaaaagaaagatacacattcatcctttacgtttcaa

SEQ ID NO: 44071 - DNA, 120 bp, synthetic construct
  source 1..120: mol_type = other DNA
tttcttcatgcacagtttcatttaaaggcatccgtattcctaagggtaattatttgccaaaaaaaaaaaattaaagtagttaggccacagtgtatgacaataaagagtgtttataaagcc

SEQ ID NO: 44072 - DNA, 120 bp, synthetic construct
  source 1..120: mol_type = other DNA
gaccaaggcaagtgttacacacacattgattccatccaaataagaggctttactctaaaacctgttgcttatcatttctcaccacttattcactttatttctctagtttgacaaaggaag

SEQ ID NO: 44073 - DNA, 120 bp, synthetic construct
  source 1..120: mol_type = other DNA
ggaaatctttttggcactgtagtagcatttaggaggaatttaaaaaaaaaaaaaaaaacaggatctccctctcttgcccaggctggagtgcagtggtgcgattatggctcacagtaacct

SEQ ID NO: 44074 - DNA, 120 bp, synthetic construct
  source 1..120: mol_type = other DNA
caagccatcacgcccagcctagattccctaatttcttacctgtttatctcaccagtccatagttttagagtaccgcaaactcctaaagtactaaggtagaaaagattatataaggggatt

SEQ ID NO: 44075 - DNA, 120 bp, synthetic construct
  source 1..120: mol_type = other DNA
tttggacaacatttggcagtgtttttaagttaaacatacacctgccatatgacccaaccattccacttctaagtatttacccaagaggagcaaaagtgctgacacgaagacttacacaca

SEQ ID NO: 44076 - DNA, 120 bp, synthetic construct
  source 1..120: mol_type = other DNA
tgttccacatcactttaactcactcagagctcttactctagagctttcctttaccagcactctgtactccgttcacttaaagctgttggtcccttactcttgtcttctacatattctcta

SEQ ID NO: 44077 - DNA, 120 bp, synthetic construct
  source 1..120: mol_type = other DNA
ctacttcccctgccagcagcaactggattctcttctctgggaatgtacaggtctaatcctcctaaagagctgttctcctccatgaaatatttgattgatttgattaaattcagggtgtaa

SEQ ID NO: 44078 - DNA, 120 bp, synthetic construct
  source 1..120: mol_type = other DNA
agccaccacacccagcacatggcaagttttgaccaaatacctttaattgtgtatcagagtgtttctgtggccattacaatttgacagttgactttgataattgtatgttagggagttcca

SEQ ID NO: 44079 - DNA, 120 bp, synthetic construct
  source 1..120: mol_type = other DNA
tttttcaagcaaccccagcctgagaataacccacattctattctgaaaatgttttcttttcataatgcacatcagttgtgcctcatattctaagatgtgtgtactatctaaacacttaga

SEQ ID NO: 44080 - DNA, 120 bp, synthetic construct
  source 1..120: mol_type = other DNA
tgatgtcttagtatccataataataattttttttttttttttttgagacagggtctcactctgtctcccagactggagggcagtgttgtgatcttggctcactgcaacctccacctcctg

SEQ ID NO: 44081 - DNA, 120 bp, synthetic construct
  source 1..120: mol_type = other DNA
gtctccctttctgctatacagagaagatttcttaagtccagtaactactggactgctaagagaagacgaccatgttaaagctcattatgtacccttgccattcagttttaaagcccacta

SEQ ID NO: 44082 - DNA, 120 bp, synthetic construct
  source 1..120: mol_type = other DNA
agaacaactgtctacaaactttattacaacacttaaaatctcatagtttgacaatagtcagtaatgcatgtggaactttgtggaatctctcagcaagaaatcctaaagaccaggaagcat

SEQ ID NO: 44083 - DNA, 120 bp, synthetic construct
  source 1..120: mol_type = other DNA
tggttatggtaaaagaggtcaaatgaaaccctcgattgaatcctattctgaagatgatgaaagtaagttttgcagttatggtcaatacccagccgacctagcccataaaatacatagtgc

SEQ ID NO: 44084 - DNA, 120 bp, synthetic construct
  source 1..120: mol_type = other DNA
gatgaaataggatgtaatcagacgacacaggaagcagattctgctaataccctgcaaatagcagaaataaaagaaaagattggaactaggtcagctgaagatcctgtgagcgaagttcca

SEQ ID NO: 44085 - DNA, 120 bp, synthetic construct
  source 1..120: mol_type = other DNA
agcatgttagttttacaccgggggatgatatgccacgggtgtattgtgttgaagggacacctataaacttttccacagctacatctctaagtgatctaacaatcgaatcccctccaaatg

SEQ ID NO: 44086 - DNA, 120 bp, synthetic construct
  source 1..120: mol_type = other DNA
taaagaaaatgaacctatcaaagagactgagccccctgactcacagggagaaccaagtaaacctcaagcatcaggctatgctcctaaatcatttcatgttgaagataccccagtttgttt

SEQ ID NO: 44087 - DNA, 120 bp, synthetic construct
  source 1..120: mol_type = other DNA
atcaggatctagagattcgaccccttcaagacctgcccagcaaccattaagtagacctatacagtctcctggccgaaactcaatttcccctggtagaaatggaataagtcctcctaacaa

SEQ ID NO: 44088 - DNA, 120 bp, synthetic construct
  source 1..120: mol_type = other DNA
agaccgtttcctcaggtgctacaaatggtgctgaatcaaagactctaatttatcaaatggcacctgctgtttctaaaacagaggatgtttgggtgagaattgaggactgtcccattaaca

SEQ ID NO: 44089 - DNA, 120 bp, synthetic construct
  source 1..120: mol_type = other DNA
tgtccttgtgagtccatctaacatcataattaatcatgtggctgtgaaattcacagtaatatggttcccgatgaacaagtttacccagcctgctttgctttactgcatgaatgaaactga

SEQ ID NO: 44090 - DNA, 120 bp, synthetic construct
  source 1..120: mol_type = other DNA
tccctgcctgttaaggaaactttatttgtggtaggtacagttctggggtacatgttaagtgtccccttatacagtggagggaagtcttccttcctgaaggaaaataaactgacacttatt

SEQ ID NO: 44091 - DNA, 120 bp, synthetic construct
  source 1..120: mol_type = other DNA
tatattttacaaaagttccttttcagatgcagatgtactgctaaattacttgcttccttccttccttcctgtcttctttccttccttccttcctttcccccttgctccctctctcctttc

SEQ ID NO: 44092 - DNA, 120 bp, synthetic construct; identical to SEQ ID NO: 22593
  source 1..120: mol_type = other DNA

SEQ ID NO: 44093 - DNA, 120 bp, synthetic construct; identical to SEQ ID NO: 20575
  source 1..120: mol_type = other DNA

SEQ ID NO: 44094 - DNA, 120 bp, synthetic construct; identical to SEQ ID NO: 20576
  source 1..120: mol_type = other DNA

SEQ ID NO: 44095 - DNA, 120 bp, synthetic construct; identical to SEQ ID NO: 20577
  source 1..120: mol_type = other DNA

SEQ ID NO: 44096 - DNA, 120 bp, synthetic construct; identical to SEQ ID NO: 20578
  source 1..120: mol_type = other DNA

SEQ ID NO: 44097 - DNA, 120 bp, synthetic construct
  source 1..120: mol_type = other DNA
acctcctcccacttacatcagcagtgaccatatttccaaataaggtcacattcagaggtatttggggctaggatttcagtaaatgaaatttgaggccctattcaacctataagacccagt

SEQ ID NO: 44098 - DNA, 120 bp, synthetic construct
  source 1..120: mol_type = other DNA
cagatggggcggcggggcagaggcgctccccacatctcagacgatgggcggcggggcagagacgctcctcacttcctagatgtgatggcggctgggaagaggcgctcctcacttcctaga

SEQ ID NO: 44099 - DNA, 120 bp, synthetic construct
  source 1..120: mol_type = other DNA
caagtaaaagcaacctcatttgcagagcaaactcagatctgagagatagaaagcaccagggcctctgaagacatgctgaggccccaggggacatagatgaaactaaatgtgagcatttag

SEQ ID NO: 44100 - DNA, 120 bp, synthetic construct; identical to SEQ ID NO: 22430
  source 1..120: mol_type = other DNA

SEQ ID NO: 44101 - DNA, 120 bp, synthetic construct; identical to SEQ ID NO: 22431
  source 1..120: mol_type = other DNA

SEQ ID NO: 44102 - DNA, 120 bp, synthetic construct
  source 1..120: mol_type = other DNA
ttctcctggagcaagcttcatgtaggggttcatgactgtggttgattgcagctttttcagtaactccgtgatgtatatcagaaatgtgtggtagttttgaatggacaggtcaatcaatct

SEQ ID NO: 44103 - DNA, 120 bp, synthetic construct
  source 1..120: mol_type = other DNA
taatcactaggtcttggaaataggaaaacagtatttctgaaccattatggactttcgaatatacctgggacagtaccgtccctacctcccttatgaacatagtgcaaagttcctccctag

SEQ ID NO: 44104 - DNA, 120 bp, synthetic construct
  source 1..120: mol_type = other DNA
agcccatgacaaacttttagtaacagtcatagaaccatgtttggtcttctcctctggtaatgtcacccttgatttggccctggcagagcttgtaaatgacatgagaggaatttgatgtat

SEQ ID NO: 44105 - DNA, 120 bp, synthetic construct
  source 1..120: mol_type = other DNA
gccatcttcttcatattctgcactgaagtcacggtgtgcaaatgttcctttagtcttagaggctaacgtaccatcttcgattttgtgtgttcccaaaactgtataggagagattttgtat

SEQ ID NO: 44106 - DNA, 120 bp, synthetic construct
  source 1..120: mol_type = other DNA
aacacatcaacttcagggaattttacctcggggagtgttggtaggttgagggcaaatgatgaagttctcagcttcttatagatttgtatttctctgaagtcaagtttgcacgatggaacc

SEQ ID NO: 44107 - DNA, 120 bp, synthetic construct
  source 1..120: mol_type = other DNA
gacatctcctttggtagatgactcaatggaaaagtaagaggtgaggctttccaagctaagcttgtggtcaactgctcctttagcggtagagtacagcattgaagaattgaaatcatactt

SEQ ID NO: 44108 - DNA, 120 bp, synthetic construct
  source 1..120: mol_type = other DNA
agtggaggagttgtgattattgtgtaaggtagacgcatttcaggaattgttaaaggaatgtttaagaaatccagatttgcttctccatttattcctacatgggcctccataatgttctcg

SEQ ID NO: 44109 - DNA, 120 bp, synthetic construct
  source 1..120: mol_type = other DNA
gaacttcactgactccttcagagccagcggattaatcttagggtttgagagttgtgcatttgcttgaaaatcaaaattgagaacttctaatttggactctcctttggcagtgatggaagc

SEQ ID NO: 44110 - DNA, 120 bp, synthetic construct
  source 1..120: mol_type = other DNA
tgagccaaagatgctgaacttaaagcctcctgtaaccaattgatgattaaggttattttggtgtcctgtaggctttccagatacactgcaactgtggccttggtttcctctaaaaacagt

SEQ ID NO: 44111 - DNA, 120 bp, synthetic construct
  source 1..120: mol_type = other DNA
tatgtctgcagttgagatagtttttcattaaagttgattttggcatcatctaatgcaatttgtatatcattttctgtaattctatacttttttgtgagagcagtcagtttctccttggca

SEQ ID NO: 44112 - DNA, 120 bp, synthetic construct
  source 1..120: mol_type = other DNA
tgtgttgagccgatggctaaactccacaccctgaaccttagcaacagtgtctgctttatagcttgctgataaggcagcagaagagatggcatagatgtgttttatttcattattttggta

SEQ ID NO: 44113 - DNA, 120 bp, synthetic construct
  source 1..120: mol_type = other DNA
aagagactctgaactgcccatcaatcttgacttctttgacaaacaaatgctgtttctttttggagtccaaatgaactgaagcagacatctgtggtccccaggaactagatgcatcgaata

SEQ ID NO: 44114 - DNA, 120 bp, synthetic construct
  source 1..120: mol_type = other DNA
gatggaatcccacagacttgaagtggagggctggtgtcctaacagtctctaacatctttagatctctggaggatttgccaccaaaaggcaaaggaatctcaattttcaaactgttcttgt

SEQ ID NO: 44115 - DNA, 120 bp, synthetic construct
  source 1..120: mol_type = other DNA
tttcatttactttgcatggttcaagaagccttgctgctttcttcttttacctttttaagaagaggttttctgggatgtggaagtctggcaatcccatgttctggaggttgaactccttca

SEQ ID NO: 44116 - DNA, 120 bp, synthetic construct
  source 1..120: mol_type = other DNA
gtgggcgaggatctcacttctggcttctgcttgcaaacggggtatggaaataacacccttgatttttctttcttcctttgtgtcacaactatggtaaagaaaatcagttggcaccaatga

SEQ ID NO: 44117 - DNA, 120 bp, synthetic construct
  source 1..120: mol_type = other DNA
cgacctcagtaattttcttgttctgaatgtccagggtgagtctgtaagacgttttgccctcagtagattcatcattaactctgaggattgttccgaggtcaacatcaaaatccggaattt

SEQ ID NO: 44118 - DNA, 120 bp, synthetic construct
  source 1..120: mol_type = other DNA
gaatccttgctttcatggggcttaccttctagtgggggaggtgtacaggcaataaacaagtaacttgctcatgtcagatggtaatgaatgttatgaagaagagtaaaactggatacaagg

SEQ ID NO: 44119 - DNA, 120 bp, synthetic construct
  source 1..120: mol_type = other DNA
gaggactccccaatggctttcgtttaattcatagaaaaagccaaagttcttaccatggcctatgagattatccttccttcacctctccatatctctctgtcctcatcttctacctctttt

SEQ ID NO: 44120 - DNA, 120 bp, synthetic construct
  source 1..120: mol_type = other DNA
agctcatagcgatgggtctggaggctcagaaacatggacactgaattaggagcaaattgggatctgtgctgtgatcccatcccatgcacaaggaagcaaaaggtgacacccaatgtgttg

SEQ ID NO: 44121 - DNA, 120 bp, synthetic construct
  source 1..120: mol_type = other DNA
tcttttcttgctttctcatcttcctcaccatcaagagttgtctgcctttgcagtctctacttcctcccaatgtgctctgactgctcactccatctcctgaaaatgctttcatcaatgtct

SEQ ID NO: 44122 - DNA, 120 bp, synthetic construct
  source 1..120: mol_type = other DNA
acttatgattctgcctcttagaaagttgtagaatctgctcactcctttctatacctggcttttctccactgcaggccattatcagctcttagccacataggatcgtaagagatgtccaat

SEQ ID NO: 44123 - DNA, 120 bp, synthetic construct
  source 1..120: mol_type = other DNA
gctcaagcgatccatccacctggggctcccaaagtgctaggattacaggcatgaaccaccgtggctggccaattaaatattatttttgaatgaacacatgaatgtgtctaaaatatgaaa

SEQ ID NO: 44124 - DNA, 120 bp, synthetic construct
  source 1..120: mol_type = other DNA
gaggcaaaaccagattaaaaagatgataggaatactcatttgttgagagaactgagttcttgtcttatggccataccactactggagctagtgaggtagtgcattctggtggaagcttga

SEQ ID NO: 44125 - DNA, 120 bp, synthetic construct
  source 1..120: mol_type = other DNA
atatgccatggcttaattctggtgttctggagtctgactgtaagtgaaggtgtacttgaaatgtattatattatgataaaatcaattttttgaaaccaaaggcctattgagatgatgtac

SEQ ID NO: 44126 - DNA, 120 bp, synthetic construct
  source 1..120: mol_type = other DNA
gcttctcaacactgagcattattccatttaccatatcctgagagtttagtaataaaatggccagtgagatgtcagcaatgtcaaacacctttcagttcccaatgtgggacctgtctgatg

SEQ ID NO: 44127 - DNA, 120 bp, synthetic construct
  source 1..120: mol_type = other DNA
tggactgttattagtagtctgggatacagacagaaacagatacacataatatcaaccaacttccccaagtgcgcacagcttcaagacagggaagttagaattaaatctatgcccagagtt

SEQ ID NO: 44128 - DNA, 120 bp, synthetic construct
  source 1..120: mol_type = other DNA
gttgtatgccagcctagtagtccccactcttgatgtccatttatctaaacaagtatttgaataccacaggccaggagctgaccttagcatttcacaggagctgctttattaaaatctcac

SEQ ID NO: 44129 - DNA, 120 bp, synthetic construct
  source 1..120: mol_type = other DNA
caatcactaccaaaatgtcttgatttcattgaccctaagtctttgggtctagatctgctacacatttgcacaagtgtttgtttcagaagcaagggcagacagtggctatgccaaaaccta

SEQ ID NO: 44130 - DNA, 120 bp, synthetic construct
  source 1..120: mol_type = other DNA
acgttctgcatgttgacatagcagcaaagtcaagtatttctctcacgtcacatactgctaggcagtcaagtcaataggcttgttgaaatttgcaattagaaaacagtagaggccaggtgc

SEQ ID NO: 44131 - DNA, 120 bp, synthetic construct
  source 1..120: mol_type = other DNA
gcagctcctgggtccctgtagggtttgtcttatgatagctacagaataagagaagagagtcaggacttggtaaccccagttaggtttgtcttaaaacccaaacttgtgaattagaaaaaa

SEQ ID NO: 44132 - DNA, 120 bp, synthetic construct
  source 1..120: mol_type = other DNA
tcttacaagagtcaggagggccattattcaaaagacaaaaaataacagttgttggtgaggatacagagaaaaggaaacagttaatcactgttgatgggattgtaaataagtacaaccact

SEQ ID NO: 44133 - DNA, 120 bp, synthetic construct
  source 1..120: mol_type = other DNA
tcagcccaggaatttgaggcttcagtgagccgtgactgcatcactgcactccagcctgggtgacacagtgagaccatctcaaaaaaacaacaacaacaaaaaaaaacaaaacaaacaaac

SEQ ID NO: 44134 - DNA, 120 bp, synthetic construct
  source 1..120: mol_type = other DNA
tattcaaatctaacttcaaaacccaacttggagctcagaaccatgatgctttccttaggaatattacccacagaagaagcccaatcgagaaaagttccaagaggggactgtggatctgta

SEQ ID NO: 44135 - DNA, 120 bp, synthetic construct
  source 1..120: mol_type = other DNA
aaagggaaagaaactatcctgtattcaatgcctgctagatctggctctgccataggtgattgacttgttttcactgactcatcatcctatccctgtggggtggcattattgttcaattta

SEQ ID NO: 44136 - DNA, 120 bp, synthetic construct
  source 1..120: mol_type = other DNA
ttttcctttatgccattgcaacttgacatcatgaaatgagtttgctttctcactagaggtagccagaacaccagtgtctgtatcacttgttagtcagcagacatttaacagggctcagca

SEQ ID NO: 44137 - DNA, 120 bp, synthetic construct
  source 1..120: mol_type = other DNA
aaggggcgggtctatgaaagagattggagacgagcattttgatcagtccctgtatcttctgttaaaagcatttaccttcaaggtagaagggagcaggagtcctgtaccactagataaact

SEQ ID NO: 44138 - DNA, 120 bp, synthetic construct
  source 1..120: mol_type = other DNA
tcactccacttcatgggatgagggagagggggagaacacaggtcttgggacttcttcaaaggccagaggcttggagctggcacaaggagtccttgtgcagaaaagaacagaaggtggttt

SEQ ID NO: 44139 - DNA, 120 bp, synthetic construct
  source 1..120: mol_type = other DNA
tgtttaaaatacacacaggatttactgtgtacaccataacccagcaaacacaggtgaagcatcaaacaaaagcaggggtggggtggccaggactcctcaatgactgttttaaaattagac

SEQ ID NO: 44140 - DNA, 120 bp, synthetic construct
  source 1..120: mol_type = other DNA
atatcagtctctttgcccatcctccccatacggacacccgagtggttgttccatttgtttctgcacactcatacaatcctctgtaaacatgggtgagtgcaaacagagtcatacaaagat

SEQ ID NO: 44141 - DNA, 120 bp, synthetic construct
  source 1..120: mol_type = other DNA
acagttaaagtcatgaagatgcaaacatggaaagccctccttttcaagaacaggagtctcttctgtatttggagaagaccaaggaccaaaaaataaaccactctttcctcctgccaccat

SEQ ID NO: 44142 - DNA, 120 bp, synthetic construct
  source 1..120: mol_type = other DNA
ttctctctttttgatgattgtgaaaactcagtaattccctgatccacgatggatacggaatacaaatacttacagtcacatccgtgcctggtgcaaacacacaagttcatacctcagcgg

SEQ ID NO: 44143 - DNA, 120 bp, synthetic construct
  source 1..120: mol_type = other DNA
aaaaggtgactgctcagcttgacttctcttccccacccaaaccccaatagcagcctgtagatctgctccacatgtatgtaacatgagtacaaccagtctcaataataagcaaagttttat

SEQ ID NO: 44144 - DNA, 120 bp, synthetic construct
  source 1..120: mol_type = other DNA
acttaacaaactcctagaaaagaatttctggaggtttccactgtagttgagaggaattttctgaacaattgaagaaaaagaacatctgggtcctgagtccagctgcagtgatgacagacg

SEQ ID NO: 44145 - DNA, 120 bp, synthetic construct
  source 1..120: mol_type = other DNA
agattctaaatggcattcactctttagtgggtcatcattgcttgttcttgaatcagtacacacacggaatcatcctattcatctccaagccacagaaggatgtatcagccctgtagctaa

SEQ ID NO: 44146 - DNA, 120 bp, synthetic construct
  source 1..120: mol_type = other DNA
tttgtttactttgtttgatacataattttcttttttatagagagggggtctcattatgttggccaggctggtctcagactcctggtctcaagcaatcctcccatcttggccttccaaagt

SEQ ID NO: 44147 - DNA, 120 bp, synthetic construct
  source 1..120: mol_type = other DNA
aaaaaaaaaaagagttgttgtttgtttttgtttttgttttttgatacagggtttcgctctgtcacctaggccagtgtgcagtggtccaatcatagctcactgcagccttgaacttctggg

SEQ ID NO: 44148 - DNA, 120 bp, synthetic construct
  source 1..120: mol_type = other DNA
gtgaaaatctctttctgacgtaaatttttttataaaattaacttccacgtgattggtggtgtttttgcctgagcttcgccagatcttccggctcatgccccacttgatttcgtagagcag

SEQ ID NO: 44149 - DNA, 120 bp, synthetic construct
  source 1..120: mol_type = other DNA
gccccaccatgcctagctatattctaacttttctattttacacctagaggtgctatgttccaatccttatcttttctattcctcaatggactctaaccagattttctcaagtgttgacgc

SEQ ID NO: 44150 - DNA, 120 bp, synthetic construct
  source 1..120: mol_type = other DNA
gggcactgtgatagtgttattcttacctcagagtggggtcaccggttgaaggacctgttgaccaagatatgattatgtcaaacaacactcaaatatcaaatgagttgctaagaaaaagtg

SEQ ID NO: 44151 - DNA, 120 bp, synthetic construct
  source 1..120: mol_type = other DNA
aggtggcattggtggggctttgattttatatatatagagagagagtgcagtggcttatacctataatcccagctttttgagatgccaaggcagaaggatctcttgaagccagaaatttga

SEQ ID NO: 44152 - DNA, 120 bp, synthetic construct
  source 1..120: mol_type = other DNA
agtgttgcaatcaagagccaaggctctagggtcagagaaaaatgggttataatcccagtttagccaattacttgctctaacacatttggcaagtttcctaacctctctagacctcagttt

SEQ ID NO: 44153 - DNA, 120 bp, synthetic construct
  source 1..120: mol_type = other DNA
tatactgtgaagtatgctttctacggtaggcccaggccattcccatgaaaagaaagtgagcaagggctgtggaaaactgaagataagcctgcatctagagctactaaattccttaaaata

SEQ ID NO: 44154 - DNA, 120 bp, synthetic construct
  source 1..120: mol_type = other DNA
tacattatttttcagactcaggctgcgttttgagaaaggcgatacaggaattggagactaaagattttgatttatggcttgattacccaacagaggtgtcacagtgccagatggtctcag

SEQ ID NO: 44155 - DNA, 120 bp, synthetic construct
  source 1..120: mol_type = other DNA
ggaactaccggcaacctggagtacttgtgaccaactcaccatttaatttgcaccagggagatacaaattaaaaccacaatgagatattcctacacacctatcagaatggctatatgtgtg

SEQ ID NO: 44156 - DNA, 120 bp, synthetic construct
  source 1..120: mol_type = other DNA
aaggaaggaaagaaagaaagaaagaaagaaagaaagaaagaaagagagggtatttgggccagggacagtggctcacacctgtaatcccagcactttgggaggcctaggtgggtggatcac

SEQ ID NO: 44157 - DNA, 120 bp, synthetic construct
  source 1..120: mol_type = other DNA
aaaaacttcccattgggtactatgttcactatctcggtagcagagtcaatacaagcccaaacctcagcatcacacaatatatacccttgtaacaaatctgcacgtgtaccccatgaatct

SEQ ID NO: 44158 - DNA, 120 bp, synthetic construct
  source 1..120: mol_type = other DNA
gagccatgatcgccattgcactccagcctgggcgacagagcaagacgttgtctttaaaaaataaaaaaaatttaaaaatttaaaaaaagacggccgggtacggtggatcatgcctgtaat

SEQ ID NO: 44159 - DNA, 120 bp, synthetic construct
  source 1..120: mol_type = other DNA
gtgctatttttgaacagagaagagtcacaggctctggaagacacttcctttaaaacagagcatgctttaccctaggctgtgtgtgtacctgtttgtgtgtgttactttttatgcatttgc

SEQ ID NO: 44160 - DNA, 120 bp, synthetic construct
  source 1..120: mol_type = other DNA
ctgccccatcacactcacactattgcaatagtcttctaactggtctccttgcttccagtccaaaacccatcacatgtcaagtaaatgtgtctaaagcactattttagtcatatctctgtg

SEQ ID NO: 44161 - DNA, 120 bp, synthetic construct
  source 1..120: mol_type = other DNA
gtctgttgttaccttaaactgttatttaaacagttgtacttttacttaactttttttttatttttgtgagacagagtcttgctctgttgcccaggctggagtgcagtggcgtgatctcag

SEQ ID NO: 44162 - DNA, 120 bp, synthetic construct
  source 1..120: mol_type = other DNA
tatttatttttcattatctcctactctgcatcaaggatgcatcattctttttttttttctttgagacggagttttgctcttgtcgcccaggctggagtgcaatggcacaatcttggctca

SEQ ID NO: 44163 - DNA, 120 bp, synthetic construct
  source 1..120: mol_type = other DNA
gtctcaaatctagaactcctgaactttgaatctcaaggccccatgaacctgaaacccgaatcctacatacaagactttacttagttatgaaagtcaacctggagcctccatgagataaag

SEQ ID NO: 44164 - DNA, 120 bp, synthetic construct
  source 1..120: mol_type = other DNA
tcccaggaagtaaacatgcagcagccaagagggtgcaaaacttgggtttgttttctactagaatgcctattgagcgcttcgtccatgttctgttttgtttaagaaaacttggaactatga

SEQ ID NO: 44165 - DNA, 120 bp, synthetic construct
  source 1..120: mol_type = other DNA
gagacagggtctcactatacaactttttgtatttttagtagagacggggtttcaccatgttggccaggctgttcttcagcttttctgtaaaatcggtctacatgattaggtgtattggtg

SEQ ID NO: 44166 - DNA, 120 bp, synthetic construct
  source 1..120: mol_type = other DNA
ctcccaaagtgctgggattaccaggtgtgagccaccacacctggccttgtccattttttaattgggttctttgtctcattactgagttgtaagagttttttacgtattgtggatacaagc

SEQ ID NO: 44167 - DNA, 120 bp, synthetic construct
  source 1..120: mol_type = other DNA
ggggcttctctgggctctatgagctcaatgtgggcctcgctggatccacacacactgcttggaacatcctttcaagggtgccagtctccatcaccgcctaagcagtgggactcccccagg

SEQ ID NO: 44168 - DNA, 120 bp, synthetic construct; identical to SEQ ID NO: 23808
  source 1..120: mol_type = other DNA

SEQ ID NO: 44169 - DNA, 120 bp, synthetic construct; identical to SEQ ID NO: 23809
  source 1..120: mol_type = other DNA

SEQ ID NO: 44170 - DNA, 120 bp, synthetic construct
  source 1..120: mol_type = other DNA
ggccacttcccacagttctgtttttttgttttgttttgttttggtttttttttaagactgagtttcactctttgttgcctgggctggagtgcaatgactcactctcaacttccacctgcc

SEQ ID NO: 44171 - DNA, 120 bp, synthetic construct; identical to SEQ ID NO: 23811
  source 1..120: mol_type = other DNA

SEQ ID NO: 44172 - DNA, 120 bp, synthetic construct; identical to SEQ ID NO: 23812
  source 1..120: mol_type = other DNA

SEQ ID NO: 44173 - DNA, 120 bp, synthetic construct; identical to SEQ ID NO: 23813
  source 1..120: mol_type = other DNA

SEQ ID NO: 44174 - DNA, 120 bp, synthetic construct
  source 1..120: mol_type = other DNA
tccccactcccctgggccttgccttcccctctgctcagagcctcctctgggttccctgctccccacagggcgcccagctccgtccctccctttccttctcacagcctccttctctttccc

SEQ ID NO: 44175 - DNA, 120 bp, synthetic construct; identical to SEQ ID NO: 23814
  source 1..120: mol_type = other DNA

SEQ ID NO: 44176 - DNA, 120 bp, synthetic construct; identical to SEQ ID NO: 23815
  source 1..120: mol_type = other DNA

SEQ ID NO: 44177 - DNA, 120 bp, synthetic construct
  source 1..120: mol_type = other DNA
agctaggaatgcagaaaacacaataagtgacgtgcctggcgtgggctttcctgtgtgtactttcctcttacatttcttttttttttttttttttgagacagagtctcactcagtcaccca

SEQ ID NO: 44178 - DNA, 120 bp, synthetic construct; identical to SEQ ID NO: 23816
  source 1..120: mol_type = other DNA

SEQ ID NO: 44179 - DNA, 120 bp, synthetic construct
  source 1..120: mol_type = other DNA
tctctgtttgggaccctccccagaaaaagtgccatgcagaaatttgctttattaacgagatcaagtccatgggactggacgaaacgcagtgctaccaagtcacctgttacctcacgtgga

SEQ ID NO: 44180 - DNA, 120 bp, synthetic construct
  source 1..120: mol_type = other DNA
tcttgagacaggaatcttgcccattccccgaacgaataaaccccttccttaactcagcgtctgaggaattttgtctgcggctcctcctgctacattctgagtggggaaagggactaaggt

SEQ ID NO: 44181 - DNA, 120 bp, synthetic construct
  source 1..120: mol_type = other DNA
gcgcccgccaccgcgcccggctaattttttgtattttcagtagagacagggtttcaccgtggtctcgatctcctgactttgtgatccgcctgcctcgacctcccaaagtgctgggattac

SEQ ID NO: 44182 - DNA, 120 bp, synthetic construct
  source 1..120: mol_type = other DNA
cagatggtccaagatgaacagattgaaaaaaaaacaagtcctggagaggctgacaacatccctctggtcacacagctagatctcaaggtgctcagacttcaaggacagtttccctgactc

SEQ ID NO: 44183 - DNA, 120 bp, synthetic construct
  source 1..120: mol_type = other DNA
tgctaagtgctggaaactgtttcaatgtggggaataaaacagtgaagaacgtgccgagcacggtggctcacacctgtaaccccaccactttggaaggccgaggtgggtggatcacttgag

SEQ ID NO: 44184 - DNA, 120 bp, synthetic construct
  source 1..120: mol_type = other DNA
agccaggccagggtgaagtgtttcttttttttttttttttttttttctttttaaatttttttttttgagacggagtctcgctctgtcacccaggctggattgcagtggcctgatctcggc

SEQ ID NO: 44185 - DNA, 120 bp, synthetic construct
  source 1..120: mol_type = other DNA
gagtggttttcagagacatttcagaaagtgaaggagaaactcaagattgactcatgaggacctgaagggtgacatcccaggaggggcctctgaaatttcccacaccccagcgcctgtgct

SEQ ID NO: 44186 - DNA, 120 bp, synthetic construct
  source 1..120: mol_type = other DNA
agtttgaggatgcagtgagctgtgatcttgccaccgtgttccagcctgggtgacagagaaaccccatttctaaaaaagagaaagaaaaagggataggtacaatggctcatgcctgtaatc

SEQ ID NO: 44187 - DNA, 120 bp, synthetic construct
  source 1..120: mol_type = other DNA
aggatcgcttgagcccaggagttccagaccagcctgggcaacaaaacaagtctcccatctctacaaaagaataaaaattagcagctgggcatggtggctcatgcctgtaattccagcact

SEQ ID NO: 44188 - DNA, 120 bp, synthetic construct
  source 1..120: mol_type = other DNA
gtcagcctgccacatgacaccccctcaatgttccaggtctctggacactatgggcacacgactcctcccagctctgtttcttgtcctcctggtattgggatttggtgagtgtgggcttcc

SEQ ID NO: 44189 - DNA, 120 bp, synthetic construct
  source 1..120: mol_type = other DNA
tagcctgaattcttttcaataaaaaatacaattcaagttgcttctcatggatggcactgcttttctgaggactcaagggccaagatggaggggctgactcagtccagccaacatttaatg

SEQ ID NO: 44190 - DNA, 120 bp, synthetic construct
  source 1..120: mol_type = other DNA
tctctgtggggtatgtgtgtgcaaaatatttgagtgtgtggacatgtgtgagggggtgagtgtgtgctggtgtgtacgtctgtgttttgcatatgcatttttttttttttttttgagacg

SEQ ID NO: 44191 - DNA, 120 bp, synthetic construct
  source 1..120: mol_type = other DNA
cacgtatgtagacaatgtgcaaggcaccattccatgtgcatcgtatgtagtaactcttaattctcacgataaccctgaggtagatattattaccccgttctacaaaaggagaaacagtcc

SEQ ID NO: 44192 - DNA, 120 bp, synthetic construct
  source 1..120: mol_type = other DNA
cccaccaaagctaaagatgagtcgctggagcctggtgaggggcaggatgaaggagctgctggagacagtggtgaacaggaccagagacgggtggcaatggttctggtgagggtgtgctgg

SEQ ID NO: 44193 - DNA, 120 bp, synthetic construct; identical to SEQ ID NO: 18465
  source 1..120: mol_type = other DNA

SEQ ID NO: 44194 - DNA, 120 bp, synthetic construct
  source 1..120: mol_type = other DNA
aggaaggattcaaaaggatttaacctgggaggtcgaggctgcagtgagccatgattgtgccactgcactctagactgagcaacagaggaagatcctgtaaaaaaaaaaaaaaaaaaaaag

SEQ ID NO: 44195 - DNA, 120 bp, synthetic construct; identical to SEQ ID NO: 23774
  source 1..120: mol_type = other DNA

SEQ ID NO: 44196 - DNA, 120 bp, synthetic construct; identical to SEQ ID NO: 23775
  source 1..120: mol_type = other DNA

SEQ ID NO: 44197 - DNA, 120 bp, synthetic construct
  source 1..120: mol_type = other DNA
gttgcctgttcgctctgatggtagtttcttttgctgtgcagaaactctttagtttaatgagatccctttgtcaattttggcttttgttgccgttgcttttggtgttttagacatgaagtc

SEQ ID NO: 44198 - DNA, 120 bp, synthetic construct
  source 1..120: mol_type = other DNA
aatggggttttctagatatacaatcatgtcatctgcaaacagggacaatttgacttcctcttttcctaattgaatgccctttatttctttctcctgcctgattgccctggcaagaacttc

SEQ ID NO: 44199 - DNA, 120 bp, synthetic construct; identical to SEQ ID NO: 33599
  source 1..120: mol_type = other DNA

SEQ ID NO: 44200 - DNA, 120 bp, synthetic construct
  source 1..120: mol_type = other DNA
aaagtgctgggaccacaggcgtgagccaccacgcccagccccagcctaatttcttttttttttttttttccccaaatcaataggtcttttattgcatcatttaaatatcacaagtaggtc

SEQ ID NO: 44201 - DNA, 120 bp, synthetic construct
  source 1..120: mol_type = other DNA
attttaaatataaataaatatatatatttgtttttgagacagggtatcactctgttgcccaggttggagtgcagtggagtgatcatggctcactgcaacctctttctcccaggctcagga

SEQ ID NO: 44202 - DNA, 120 bp, synthetic construct
  source 1..120: mol_type = other DNA
tttatttacaatacctaaaagagtatagcttttttagttatttaaaatgtacaataagctaggcgcggtggctcacacctgtaatcccagcactttggggggctgaggtgggtggatcgc

SEQ ID NO: 44203 - DNA, 120 bp, synthetic construct; identical to SEQ ID NO: 33600
  source 1..120: mol_type = other DNA

SEQ ID NO: 44204 - DNA, 120 bp, synthetic construct; identical to SEQ ID NO: 34269
  source 1..120: mol_type = other DNA

SEQ ID NO: 44205 - DNA, 120 bp, synthetic construct
  source 1..120: mol_type = other DNA
gcatttctctgatgatcagtgatgttgagctttttttcatgtttattggccacatgtatgtcttcttttttttaattttattattattatactttaagttttaggatacatgtgcacaac

SEQ ID NO: 44206 - DNA, 120 bp, synthetic construct
  source 1..120: mol_type = other DNA
ttcattgtagagtctggatattagccctttgtcagatgagtaggttacaaaattttctcccattctgtaggttgcctgttcactttgatggtagtttcttttgctgtgcagaagctcttt

SEQ ID NO: 44207 - DNA, 120 bp, synthetic construct
  source 1..120: mol_type = other DNA
cctttatttccttctcctgcctgattgccctggccggaacttccaacactgtgttgaacaggagtggtgagagggggcttccctgtcttgtgccagttttcaaagggaatgcttccagtt

SEQ ID NO: 44208 - DNA, 120 bp, synthetic construct; identical to SEQ ID NO: 34270
  source 1..120: mol_type = other DNA

SEQ ID NO: 44209 - DNA, 120 bp, synthetic construct; identical to SEQ ID NO: 34271
  source 1..120: mol_type = other DNA

SEQ ID NO: 44210 - DNA, 120 bp, synthetic construct
  source 1..120: mol_type = other DNA
ctcccaaagtgctgggattacaggcatgagccaccatgcctggcctagtttttcttttttaaagaccagttagttttggtgacactattaaccttaagttaacatgatgacgtaggtgta

SEQ ID NO: 44211 - DNA, 120 bp, synthetic construct
  source 1..120: mol_type = other DNA
cacgcttttacactgttggtgagagtgttagttcaaccgttgtggaagacagtgaggagattctgcaaggatatagaactagaaataccatttgacccagcaatcccattactgggaata

SEQ ID NO: 44212 - DNA, 120 bp, synthetic construct
  source 1..120: mol_type = other DNA
agactgcctcctcaagtggtccctgacccctgacccccgagcagcctaactgggaggcacccccagcaggggcacactgacacctcacactgcagggtattccaacagacctgcagctga

SEQ ID NO: 44213 - DNA, 120 bp, synthetic construct
  source 1..120: mol_type = other DNA
cataagtgaaggagaaataaaatactttacagacaagcaaatgctgagagattttgtcaccaccaggcctgccctaaaagagctcctgaaggaagcactaaacatgcaaaggaacaaccg

SEQ ID NO: 44214 - DNA, 120 bp, synthetic construct
  source 1..120: mol_type = other DNA
gattaataatctcactcaaagccgctcaactacatggaaactgaacaacctgctcctgaatgactactgggtacataacgaaatgaaggcagaaataaagatgttctttgaaaccaacga

SEQ ID NO: 44215 - DNA, 120 bp, synthetic construct
  source 1..120: mol_type = other DNA
gatgcaaggcttggttcaatatacgcaaatcaataaaggtaatccagcatataaacagagccaaagacaaaaaccacatgattatctcaatagatgcagaaaaagcctttgacaaaattc

SEQ ID NO: 44216 - DNA, 120 bp, synthetic construct
  source 1..120: mol_type = other DNA
cagtaaccgaaacagcatggtactggtaccaaaacagagatatagatcaatggaacagaacagagccctcagaaataacgccgcatacctacaactatctgatctttgacaaacctgaga

SEQ ID NO: 44217 - DNA, 120 bp, synthetic construct
  source 1..120: mol_type = other DNA
acaccgcatattctcactcataggtgggaattgaacaatggagatcacatggacacaggaaggggaatatcacactctggggactgtggtggggtggggggaggggggagggatagcatt

SEQ ID NO: 44218 - DNA, 120 bp, synthetic construct
  source 1..120: mol_type = other DNA
atcacacggaggtgtgtcataacctgcatcaaaggatgacaactccaggtcaacaatgtctgggggtaggaatggttctttttctttctttttttcttttttttttgagacggagtctcg

SEQ ID NO: 44219 - DNA, 120 bp, synthetic construct; identical to SEQ ID NO: 23036
  source 1..120: mol_type = other DNA

SEQ ID NO: 44220 - DNA, 120 bp, synthetic construct; identical to SEQ ID NO: 23037
  source 1..120: mol_type = other DNA

SEQ ID NO: 44221 - DNA, 120 bp, synthetic construct; identical to SEQ ID NO: 23038
  source 1..120: mol_type = other DNA

SEQ ID NO: 44222 - DNA, 120 bp, synthetic construct; identical to SEQ ID NO: 23039
  source 1..120: mol_type = other DNA

SEQ ID NO: 44223 - DNA, 120 bp, synthetic construct; identical to SEQ ID NO: 23040
  source 1..120: mol_type = other DNA

SEQ ID NO: 44224 - DNA, 120 bp, synthetic construct
  source 1..120: mol_type = other DNA
caaattctgatttcatcacttaaccagttatgtgacccaggacaatttattttattctttttttgagacgaagtttcgctctgttgcccaggctggagtgcagtggcacaatctcagctc

SEQ ID NO: 44225 - DNA, 120 bp, synthetic construct; identical to SEQ ID NO: 23041
  source 1..120: mol_type = other DNA

SEQ ID NO: 44226 - DNA, 120 bp, synthetic construct; identical to SEQ ID NO: 23042
  source 1..120: mol_type = other DNA

SEQ ID NO: 44227 - DNA, 120 bp, synthetic construct
  source 1..120: mol_type = other DNA
ccaggcatggtggtgtgcacctgtagttccagctactcagaaggctggggcgggaggattgcttgagcccaggagttcgaggctgctgtgagctatgactgcatcactgcattccagcta

SEQ ID NO: 44228 - DNA, 120 bp, synthetic construct; identical to SEQ ID NO: 23043
  source 1..120: mol_type = other DNA

SEQ ID NO: 44229 - DNA, 120 bp, synthetic construct; identical to SEQ ID NO: 23044
  source 1..120: mol_type = other DNA

SEQ ID NO: 44230 - DNA, 120 bp, synthetic construct; identical to SEQ ID NO: 22222
  source 1..120: mol_type = other DNA

SEQ ID NO: 44231 - DNA, 120 bp, synthetic construct; identical to SEQ ID NO: 22223
  source 1..120: mol_type = other DNA

SEQ ID NO: 44232 - DNA, 120 bp, synthetic construct
  source 1..120: mol_type = other DNA
atcccaggaaatcaccgcctcttcttgtgggtttgttggccacccgggccagcagccccctatcctgggtgcaaacgggcctgagtgtgcatggaggccacacaggtgagaggtcctcag

SEQ ID NO: 44233 - DNA, 120 bp, synthetic construct; identical to SEQ ID NO: 22224
  source 1..120: mol_type = other DNA

SEQ ID NO: 44234 - DNA, 120 bp, synthetic construct
  source 1..120: mol_type = other DNA
cctgcccttacctgtcagagggcccagccagtacacctgcacgtactccagtaaggtgtgtcccgagcaggcaaaggtcacagaggcggccagggcagggttgaagaaggcagacgtgaa

SEQ ID NO: 44235 - DNA, 120 bp, synthetic construct; identical to SEQ ID NO: 22225
  source 1..120: mol_type = other DNA

SEQ ID NO: 44236 - DNA, 120 bp, synthetic construct; identical to SEQ ID NO: 22226
  source 1..120: mol_type = other DNA

SEQ ID NO: 44237 - DNA, 120 bp, synthetic construct; identical to SEQ ID NO: 22227
  source 1..120: mol_type = other DNA

SEQ ID NO: 44238 - DNA, 120 bp, synthetic construct
  source 1..120: mol_type = other DNA
tgcagcatcatcttggcagacttgggacctggcggactccctgggctcttccctgtcatcctgccctttcctctcctgcttcttctgtaacaagaggcaggaaggagcccgcgggagatg

SEQ ID NO: 44239 - DNA, 120 bp, synthetic construct
  source 1..120: mol_type = other DNA
gggagaagcccacgcaccatgagacgggaatcatacagggtggtcagaggggagtggaagttccaggcagccccttctcatctctagcaaaaggaaaccctgcagcagcgagtggctgac

SEQ ID NO: 44240 - DNA, 120 bp, synthetic construct; identical to SEQ ID NO: 22228
  source 1..120: mol_type = other DNA

SEQ ID NO: 44241 - DNA, 120 bp, synthetic construct; identical to SEQ ID NO: 22215
  source 1..120: mol_type = other DNA

SEQ ID NO: 44242 - DNA, 120 bp, synthetic construct; identical to SEQ ID NO: 22216
  source 1..120: mol_type = other DNA

SEQ ID NO: 44243 - DNA, 120 bp, synthetic construct; identical to SEQ ID NO: 22217
  source 1..120: mol_type = other DNA

SEQ ID NO: 44244 - DNA, 120 bp, synthetic construct; identical to SEQ ID NO: 22218
  source 1..120: mol_type = other DNA

SEQ ID NO: 44245 - DNA, 120 bp, synthetic construct; identical to SEQ ID NO: 22219
  source 1..120: mol_type = other DNA

SEQ ID NO: 44246 - DNA, 120 bp, synthetic construct
  source 1..120: mol_type = other DNA
tctgccttcttcaaccctgccctggccgcctctgtgacctttgcctgctcgggacacaccttactggagtacgtgcaggtgtactggctgggccctctgacaggtaagggcaggggcagg

SEQ ID NO: 44247 - DNA, 120 bp, synthetic construct
  source 1..120: mol_type = other DNA
tggggaaactgaggcacgggtgagcgggagctctgcagggacacggctctgtggcagattgcccgggcctctgtcctgggtggcaccggagagctcccgtcaagggtcctgcctccacga

SEQ ID NO: 44248 - DNA, 120 bp, synthetic construct; identical to SEQ ID NO: 22220
  source 1..120: mol_type = other DNA

SEQ ID NO: 44249 - DNA, 120 bp, synthetic construct; identical to SEQ ID NO: 22221
  source 1..120: mol_type = other DNA

SEQ ID NO: 44250 - DNA, 120 bp, synthetic construct
  source 1..120: mol_type = other DNA
tatgtgccctcaggcaggtccattccctcctggtctcagtctccccagctgtgccagggggacgccaggtgggacccaactgggtttccaaaaacaaaaggaaatttaagtctcagagaa

SEQ ID NO: 44251 - DNA, 120 bp, synthetic construct
  source 1..120: mol_type = other DNA
tggggaaggtggcggggtgggcctggaggataaagaggaagaagaggggctgggcccggtggctcacgcctataatcccagcactttggtaggccaaggtgggcagatcacctgaggtcg

SEQ ID NO: 44252 - DNA, 120 bp, synthetic construct
  source 1..120: mol_type = other DNA
tgagctcagaaggcagaggttgcagtgagctgagatcacaccactgcactccagcatgggtgacagagtgacaccctgtctcaaaaaaaaaaaaaaaaaaagcttgattaataattaatt

SEQ ID NO: 44253 - DNA, 120 bp, synthetic construct; identical to SEQ ID NO: 32174
  source 1..120: mol_type = other DNA

SEQ ID NO: 44254 - DNA, 120 bp, synthetic construct
  source 1..120: mol_type = other DNA
aggaactaaatagctaacagctcactaaaagcctgtttcttttctttttctttttcctttttttttttttttgagacagggtctcactctgtcgcccaggctgaagtgcggtggtggcac

SEQ ID NO: 44255 - DNA, 120 bp, synthetic construct
  source 1..120: mol_type = other DNA
tcacatccagtcaccaatctcctaaaatatctagaatgtgcacagcttccaccattctttctaccaccaccctactcccccatggccatgtcaggccaccacccgcccattcttcaaaac

SEQ ID NO: 44256 - DNA, 120 bp, synthetic construct; identical to SEQ ID NO: 32175
  source 1..120: mol_type = other DNA

SEQ ID NO: 44257 - DNA, 120 bp, synthetic construct; identical to SEQ ID NO: 20766
  source 1..120: mol_type = other DNA

SEQ ID NO: 44258 - DNA, 120 bp, synthetic construct
  source 1..120: mol_type = other DNA
actcctgacctcaggtgatccacccgcctcggcctcccaaaaggttgggattacaggtgtgagccactgcacctggcctcacactgactttctttgctttcttcaaacaagctgagagtc

SEQ ID NO: 44259 - DNA, 120 bp, synthetic construct
  source 1..120: mol_type = other DNA
ttcttgggctcaagtgattctcacgtctcagcccccaccccagctgggattacaggcacctaccaccacgcccagctaattttttttttttatttttagtggaaatggggttctgccatg

SEQ ID NO: 44260 - DNA, 120 bp, synthetic construct
  source 1..120: mol_type = other DNA
gggaagagagcggggcagctcagcgatgccctcaggtcctggctagggcaggtcctgactagtgtggggcgcagcagagaagctgtgggagaatggacaaggaggccctttctgggcatg

SEQ ID NO: 44261 - DNA, 120 bp, synthetic construct; identical to SEQ ID NO: 20767
  source 1..120: mol_type = other DNA

SEQ ID NO: 44262 - DNA, 120 bp, synthetic construct; identical to SEQ ID NO: 32173
  source 1..120: mol_type = other DNA

SEQ ID NO: 44263 - DNA, 120 bp, synthetic construct; identical to SEQ ID NO: 20768
  source 1..120: mol_type = other DNA

SEQ ID NO: 44264 - DNA, 120 bp, synthetic construct; identical to SEQ ID NO: 15139
  source 1..120: mol_type = other DNA

SEQ ID NO: 44265 - DNA, 120 bp, synthetic construct
  source 1..120: mol_type = other DNA
attgctggaacctgggaggcagatgttgcagtgagctgagatcacgccatttgcactccagcctggataacaagagctaaattcagtctcaaaacaaaaaaccaaaagaacattgaaatt

SEQ ID NO: 44266 - DNA, 120 bp, synthetic construct
  source 1..120: mol_type = other DNA
atctcatttgaacattatatacttgtgcttttttttcttcttcttagagacaggcctcgctctgttacccaggctggagtgttgtggtgcaatcatagttcattgcagcctcgaactcct

SEQ ID NO: 44267 - DNA, 120 bp, synthetic construct
  source 1..120: mol_type = other DNA
ctgaccataccaagtattggtgaagtggaaatgtaaaatgatacaatcacttaggaagatgatttggaagtttcttacaaaagtaggtgtatacctaccctgtgactcacccattccatg

SEQ ID NO: 44268 - DNA, 120 bp, synthetic construct
  source 1..120: mol_type = other DNA
aaatgggcagatgtgtgagatacttaggaaataaaacccgatggtcaccattttccaaaggtcagctcatcctggctttccagagcaaagagctagggaagactttattaataaatccct

SEQ ID NO: 44269 - DNA, 120 bp, synthetic construct
  source 1..120: mol_type = other DNA
caaggaaggctgtagccattaaaatctcaggaaataatttttcacctcctcaggtgaaagggtcttcaggcctttgtgttctggaaggttcatttatagccatttcccaaatgacaatgc

SEQ ID NO: 44270 - DNA, 120 bp, synthetic construct
  source 1..120: mol_type = other DNA
gtgtacatggcaagtgtttttagtgtttgtgtgtttacctgcttgtctgggtgattttgcctttgagagtctggatgagaaatgcatggttaaaggcaattccagacaggaagaaaggca

SEQ ID NO: 44271 - DNA, 120 bp, synthetic construct; identical to SEQ ID NO: 34051
  source 1..120: mol_type = other DNA

SEQ ID NO: 44272 - DNA, 120 bp, synthetic construct; identical to SEQ ID NO: 34052
  source 1..120: mol_type = other DNA

SEQ ID NO: 44273 - DNA, 120 bp, synthetic construct
  source 1..120: mol_type = other DNA
caagagcactgaagatactgctgagtattcccctttcaagggaggttacaccaaagggctagaaggcgagagcctaggctgctctggcagcgctgcagcagggagctccgggacacttga

SEQ ID NO: 44274 - DNA, 120 bp, synthetic construct
  source 1..120: mol_type = other DNA
ctgtcctcaaagtctgagaacctcaacaggaatttgggcaatttctcctcttcaggtctgttaggatttcactttcagcctgcgcagattagagtcaaaaagaccggcccaatagcttct

SEQ ID NO: 44275 - DNA, 120 bp, synthetic construct
  source 1..120: mol_type = other DNA
taagatattagtttatctgctgagggaggacagactgaattggggaattaactcctcaggtaggccaggtgctgatgtccctgtggacttttgtcttattctttgtttctatggctgttt

SEQ ID NO: 44276 - DNA, 120 bp, synthetic construct
  source 1..120: mol_type = other DNA
tctggtttgtgattgctgcactgaatatgaggagtctagttaaagggacaactggtgttcctgtcttgtgagttgacgaagactttccatttctaggatatagaaaatccttaagccggt

SEQ ID NO: 44277 - DNA, 120 bp, synthetic construct; identical to SEQ ID NO: 34053
  source 1..120: mol_type = other DNA

SEQ ID NO: 44278 - DNA, 120 bp, synthetic construct; identical to SEQ ID NO: 34054
  source 1..120: mol_type = other DNA

SEQ ID NO: 44279 - DNA, 120 bp, synthetic construct; identical to SEQ ID NO: 34055
  source 1..120: mol_type = other DNA

SEQ ID NO: 44280 - DNA, 120 bp, synthetic construct
  source 1..120: mol_type = other DNA
tcaatggatttcacataaaccctgtctttccaaaaatatacaaaaaaaaaaaaaatagccaggcgtgatggtgcgtgcctatagtcccagctactcagaaggccgagttgggaggattgc

SEQ ID NO: 44281 - DNA, 120 bp, synthetic construct
  source 1..120: mol_type = other DNA
tagttccaaccatgttggtgcaaatgacaggctctctcttttttttttttttttttttttttgagatggagtctggctgtctcccaggctggactgcagtggtgcaatctcagctcactg

SEQ ID NO: 44282 - DNA, 120 bp, synthetic construct
  source 1..120: mol_type = other DNA
gatatctcattgtggttttgatttgcatttctctgatggccagtgatggtgagcattttttcatgtgttttttgggtgcataaatgtcttctttttagaagtgtctgttcatatccttcg

SEQ ID NO: 44283 - DNA, 120 bp, synthetic construct
  source 1..120: mol_type = other DNA
ctcatgatttggctctctgtttgtctgttattggtgtataagaatgctgtgatttttgtacattgattttgtatcctgagactttgctgaagttgcttatcagcttaaggagattttggg

SEQ ID NO: 44284 - DNA, 120 bp, synthetic construct
  source 1..120: mol_type = other DNA
tggactctttttggttggtaagctattgattattgccacaatttcagatcctgttattggtctattcagagattcaacttcttcctggtttagtcttgggagggtgtatgtgtcaaggaa

SEQ ID NO: 44285 - DNA, 120 bp, synthetic construct
  source 1..120: mol_type = other DNA
taatgtgtgagagtctaagtctctttgtaggtcactaaggacttgctttatgaatctgggtgctcctgtattgggtgcatatatatttaggatacttagctcttcttgttgaattgatcc

SEQ ID NO: 44286 - DNA, 120 bp, synthetic construct; identical to SEQ ID NO: 34056
  source 1..120: mol_type = other DNA

SEQ ID NO: 44287 - DNA, 120 bp, synthetic construct
  source 1..120: mol_type = other DNA
ggatctttctcttctttcaactctgataatatttgctttagatacctgggtgctccagtgttgggtgcatatatacttaaaattgttgtatcctcctgatgaattgacccctttatcatt

SEQ ID NO: 44288 - DNA, 120 bp, synthetic construct
  source 1..120: mol_type = other DNA
ggatacatgtgcagaacgtgcaggtttcttacataggtatactcgtgccatggtggtttgctgcacccatcaacctgccatatacattaagtatttctcctaatgctatctttcccctag

SEQ ID NO: 44289 - DNA, 120 bp, synthetic construct; identical to SEQ ID NO: 33804
  source 1..120: mol_type = other DNA

SEQ ID NO: 44290 - DNA, 120 bp, synthetic construct
  source 1..120: mol_type = other DNA
aacatggtgaaatctcatctctactaaaaatacaaaaattagctgggtgtggtggtggatgcctataatcccagatattcaggaggctgaagcaggataattacttgaacccaggaggca

SEQ ID NO: 44291 - DNA, 120 bp, synthetic construct; identical to SEQ ID NO: 27087
  source 1..120: mol_type = other DNA

SEQ ID NO: 44292 - DNA, 120 bp, synthetic construct
  source 1..120: mol_type = other DNA
ttgatgaactgcagaaaacaggtgtttatttcctaactttgaataggtttaaggtgggcactggtcaatactaggagtcatgggcttcagaatttagaaactttggccgtgtggagttgg

SEQ ID NO: 44293 - DNA, 120 bp, synthetic construct
  source 1..120: mol_type = other DNA
aaaccctgtctctactaaaacaaacaaacaaacaaacaaacaacaaaaaaaattagctaggtgtggtggcacacccctgtaatcccagctactcaaaaggctgaggcaggggaatcactt

SEQ ID NO: 44294 - DNA, 120 bp, synthetic construct
  source 1..120: mol_type = other DNA
acctacacctcccagccgcctgccttggcctcccaaagtgccgagattggagcctctgcccggccaccaccccatctgggaagtgaggagtgtctctgcctggccgcccatcgtctggga

SEQ ID NO: 44295 - DNA, 120 bp, synthetic construct
  source 1..120: mol_type = other DNA
gagcccttctgcccggccaccaccctgtctgggaggtgtgcccaacagctcattgagaacgggccaggatgacaatggcggctttgtggaatagaaaggcgggaaaggtggggaaaagat

SEQ ID NO: 44296 - DNA, 120 bp, synthetic construct
  source 1..120: mol_type = other DNA
cttcaagcccaatcccacaacaatcctaaattctttgaaactaaaaatagctcagctgttgtctcatctgccagcagatggccagactatttttaagtcaggattctcgagagcaggaat

SEQ ID NO: 44297 - DNA, 120 bp, synthetic construct
  source 1..120: mol_type = other DNA
attgccattctaactggcgtgagatggtatctcgttgtggttttgatttgcatttctctctttttttctttttttattgatcattcttgggtgtttctcgcagggggggatttggcaggg

SEQ ID NO: 44298 - DNA, 120 bp, synthetic construct
  source 1..120: mol_type = other DNA
tcctcacttctctcttttttttttgagacggagtttccctcttgttgcccaggctggagtgcattggcatgatctcagctcactgcgccctttgcctccagggttcaagcagttctcctg

SEQ ID NO: 44299 - DNA, 120 bp, synthetic construct; identical to SEQ ID NO: 22550
  source 1..120: mol_type = other DNA

SEQ ID NO: 44300 - DNA, 120 bp, synthetic construct
  source 1..120: mol_type = other DNA
gcagaagacagccctaatgatataaatggaggttaatgcatcagtctgcagttgttggaagtgaagggtcagagtaaattaagaggggtgctgctcttaactgctcatgataatatggag

SEQ ID NO: 44301 - DNA, 120 bp, synthetic construct; identical to SEQ ID NO: 25879
  source 1..120: mol_type = other DNA

SEQ ID NO: 44302 - DNA, 120 bp, synthetic construct
  source 1..120: mol_type = other DNA
cttctcagaaggggcggctgccgggcggagggtctcctcacttctcagacggggctgctgggcagagacgctcctcacctcccagatggggtcgcggccaggcagaggcgctcttcacat

SEQ ID NO: 44303 - DNA, 120 bp, synthetic construct; identical to SEQ ID NO: 25852
  source 1..120: mol_type = other DNA

SEQ ID NO: 44304 - DNA, 120 bp, synthetic construct
  source 1..120: mol_type = other DNA
actctgaagttagaggtcatcttatagacaattttgaatcttctgtgttaaaaaatataattttggccaggtgtggtggctcatgcctataatccctgcactttgggcagcctaggtggg

SEQ ID NO: 44305 - DNA, 120 bp, synthetic construct
  source 1..120: mol_type = other DNA
atagcaacatgatttatagtcctttgggtatatacccagtaatgggattgctgggtcaaatagtatttctagttctagatccctgaggaatcgccacactgacttccacaatggttgaac

SEQ ID NO: 44306 - DNA, 120 bp, synthetic construct
  source 1..120: mol_type = other DNA
ttgttcttttggcttaggattgacttggcgatgtgggctcttttttggttccatatgagctttaaagtagttttttccagttctgtgaagaaagtcattggtagcttgatggggatggca

SEQ ID NO: 44307 - DNA, 120 bp, synthetic construct; identical to SEQ ID NO: 5412
  source 1..120: mol_type = other DNA

SEQ ID NO: 44308 - DNA, 120 bp, synthetic construct
  source 1..120: mol_type = other DNA
taccaaaagacgttctacttaaataatgtaagatacccaccttccattgttttggatgctccttatcggggacctgccccgataatcacgtaggttcttctctattttcctaagtgtcga

SEQ ID NO: 44309 - DNA, 120 bp, synthetic construct
  source 1..120: mol_type = other DNA
gtgctgagaagaatttatattctgtcgatttgggttggagagttctgtggatgtctattaggtccacttggtgcggagctgagtttaattcctggatatccttaactttctgtctcgttg

SEQ ID NO: 44310 - DNA, 120 bp, synthetic construct; identical to SEQ ID NO: 25856
  source 1..120: mol_type = other DNA

SEQ ID NO: 44311 - DNA, 120 bp, synthetic construct; identical to SEQ ID NO: 14965
  source 1..120: mol_type = other DNA

SEQ ID NO: 44312 - DNA, 120 bp, synthetic construct
  source 1..120: mol_type = other DNA
ttgcttttacattttattttattttatttattattattttgtttagatggagtctcactgtgtcacccaggctgaagtgcagtggccggatcttggctcactgcaacctccgcctcccag

SEQ ID NO: 44313 - DNA, 120 bp, synthetic construct; identical to SEQ ID NO: 14966
  source 1..120: mol_type = other DNA

SEQ ID NO: 44314 - DNA, 120 bp, synthetic construct; identical to SEQ ID NO: 14967
  source 1..120: mol_type = other DNA

SEQ ID NO: 44315 - DNA, 120 bp, synthetic construct; identical to SEQ ID NO: 14968
  source 1..120: mol_type = other DNA

SEQ ID NO: 44316 - DNA, 120 bp, synthetic construct; identical to SEQ ID NO: 14969
  source 1..120: mol_type = other DNA

SEQ ID NO: 44317 - DNA, 120 bp, synthetic construct; identical to SEQ ID NO: 14970
  source 1..120: mol_type = other DNA

SEQ ID NO: 44318 - DNA, 120 bp, synthetic construct; identical to SEQ ID NO: 14971
  source 1..120: mol_type = other DNA

SEQ ID NO: 44319 - DNA, 120 bp, synthetic construct; identical to SEQ ID NO: 15071
  source 1..120: mol_type = other DNA

SEQ ID NO: 44320 - DNA, 120 bp, synthetic construct
  source 1..120: mol_type = other DNA
agtcccagctactcaggggcctggggtgggaggattgcttgagcccaggaggtggaggctgcagtgagccttctagccagggaaatgaagaagaagagagtaagcatttcaaactggttt

SEQ ID NO: 44321 - DNA, 120 bp, synthetic construct
  source 1..120: mol_type = other DNA
ttttattctttttttttttttttttttttttgagacaagagtttcactcttgtcgcccaggctggagtgcaatggcgtgagctcggctcaccgcaaccttcacctcctgggttcaagtga

SEQ ID NO: 44322 - DNA, 120 bp, synthetic construct
  source 1..120: mol_type = other DNA
accattttgctctttaaatgacctatgaaaggcttgattttcttataatgaacacctataatgattttcaacaggccgggcacaggagctcatgcctgttatgccagcacttagggaggc

SEQ ID NO: 44323 - DNA, 120 bp, synthetic construct
  source 1..120: mol_type = other DNA
aaactaaaagagtagtgaaaaagtatttttgagatgaacagggaagggatcaggtgtgtcaaatggtgatagatcgagcaatacgaggacaacacactgaccatggatttggcaaggcag

SEQ ID NO: 44324 - DNA, 120 bp, synthetic construct
  source 1..120: mol_type = other DNA
ggcaggaagattgcttgagcctgggagtttgaagccagcccaggccacatagtctgtgccacatttctataaaaataaaaataaattcaaaaatcattaaaaataaagtagtgacatata

SEQ ID NO: 44325 - DNA, 120 bp, synthetic construct
  source 1..120: mol_type = other DNA
cagtgagcctgcttattctagacatacttgctgccttctgatacttccaactttttatgtgtaggtctgaaaatcagataaagatgttcaatttgtgtggaaaagcaaagtatgaactct

SEQ ID NO: 44326 - DNA, 120 bp, synthetic construct
  source 1..120: mol_type = other DNA
ccctggattgtaattatcagggacttgtcaaagaggagccaaactgaaccttcttgaataatggatagaatttagtgggattgggtggaggatcagaatacttgtatcctattctagatg

SEQ ID NO: 44327 - DNA, 120 bp, synthetic construct; identical to SEQ ID NO: 613
  source 1..120: mol_type = other DNA

SEQ ID NO: 44328 - DNA, 120 bp, synthetic construct
  source 1..120: mol_type = other DNA
gggccactgcactccagcctgggcaacatagcgagactccgtctcaaaaataaaaattaaaaaaagaatcttcttggtctttatgcctcctccttgaatctaccctacatattgctatta

SEQ ID NO: 44329 - DNA, 120 bp, synthetic construct
  source 1..120: mol_type = other DNA
gggatatggaagtataagtggggaatggaataaaaatatatcctttagtatttttcctattttgaaataattcctcttaaataacttaaaatttataagccgatgtaaagttacatgttg

SEQ ID NO: 44330 - DNA, 120 bp, synthetic construct
  source 1..120: mol_type = other DNA
ctaagcgtacattgccagtagattcttctcatggtttctcaagtaagaaaaggaagtccatcaagcacaattttaactttgagctgttgccaagtaatctcttcaatagcagttctacac

SEQ ID NO: 44331 - DNA, 120 bp, synthetic construct
  source 1..120: mol_type = other DNA
gattcattatctgagttatatgagttccttcccaaagcctgtctcttttttctgttgtccaaaagggttcttatttgttttattgagaagttgaacagaatagcaacttgaggttttcca

SEQ ID NO: 44332 - DNA, 120 bp, synthetic construct
  source 1..120: mol_type = other DNA
gatgtgataaatttgcattgttccatatattctgactgtgcctcctgcgaccattgacacattttttatttttattttttgagacggagtctcgctctgtctcccaggctggagtacagt

SEQ ID NO: 44333 - DNA, 120 bp, synthetic construct
  source 1..120: mol_type = other DNA
cagtaatattcatcatagaagtccgttttcagagcctaaagccatttagtaagtgatggagcaaactcaagcctgtctccaaatcttgttctttttccagtctgcaatggtgcctatccc

SEQ ID NO: 44334 - DNA, 120 bp, synthetic construct; identical to SEQ ID NO: 14965
  source 1..120: mol_type = other DNA

SEQ ID NO: 44335 - DNA, 120 bp, synthetic construct; identical to SEQ ID NO: 44312
  source 1..120: mol_type = other DNA

SEQ ID NO: 44336 - DNA, 120 bp, synthetic construct; identical to SEQ ID NO: 14966
  source 1..120: mol_type = other DNA

SEQ ID NO: 44337 - DNA, 120 bp, synthetic construct; identical to SEQ ID NO: 14967
  source 1..120: mol_type = other DNA

SEQ ID NO: 44338 - DNA, 120 bp, synthetic construct; identical to SEQ ID NO: 14968
  source 1..120: mol_type = other DNA

SEQ ID NO: 44339 - DNA, 120 bp, synthetic construct; identical to SEQ ID NO: 14969
  source 1..120: mol_type = other DNA

SEQ ID NO: 44340 - DNA, 120 bp, synthetic construct; identical to SEQ ID NO: 14970
  source 1..120: mol_type = other DNA

SEQ ID NO: 44341 - DNA, 120 bp, synthetic construct; identical to SEQ ID NO: 14971
  source 1..120: mol_type = other DNA

SEQ ID NO: 44342 - DNA, 120 bp, synthetic construct; identical to SEQ ID NO: 14972
  source 1..120: mol_type = other DNA

SEQ ID NO: 44343 - DNA, 120 bp, synthetic construct
  source 1..120: mol_type = other DNA
atcgcttgagctcaggattttgagaccagtctgggcaacaaagcaagactccatgtataaaaaaaattttaaagaaaaatcagctgggcaaggtggtgtacacccctgtagtcccagcta

SEQ ID NO: 44344 - DNA, 120 bp, synthetic construct; identical to SEQ ID NO: 14973
  source 1..120: mol_type = other DNA

SEQ ID NO: 44345 - DNA, 120 bp, synthetic construct; identical to SEQ ID NO: 14974
  source 1..120: mol_type = other DNA

SEQ ID NO: 44346 - DNA, 120 bp, synthetic construct; identical to SEQ ID NO: 14975
  source 1..120: mol_type = other DNA

SEQ ID NO: 44347 - DNA, 120 bp, synthetic construct; identical to SEQ ID NO: 14976
  source 1..120: mol_type = other DNA

SEQ ID NO: 44348 - DNA, 120 bp, synthetic construct; identical to SEQ ID NO: 15072
  source 1..120: mol_type = other DNA

SEQ ID NO: 44349 - DNA, 120 bp, synthetic construct
  source 1..120: mol_type = other DNA
ctatctccatagtgtttattgcattgttactgtaagaatcttcttggccgggtgcgatggcttacgcctgtaattccagcactctgggagaccaaggtgggcggatcatgaggtcaggag

SEQ ID NO: 44350 - DNA, 120 bp, synthetic construct; identical to SEQ ID NO: 14977
  source 1..120: mol_type = other DNA

SEQ ID NO: 44351 - DNA, 120 bp, synthetic construct; identical to SEQ ID NO: 14978
  source 1..120: mol_type = other DNA

SEQ ID NO: 44352 - DNA, 120 bp, synthetic construct; identical to SEQ ID NO: 14979
  source 1..120: mol_type = other DNA

SEQ ID NO: 44353 - DNA, 120 bp, synthetic construct
  source 1..120: mol_type = other DNA
ctctcaggttcaagcgattttcctgcctcagcctcccaggtagctgggattataggtggccaccaccacacctggctaattttcttttgcatttttagtagagacggggtttcaccacgt

SEQ ID NO: 44354 - DNA, 120 bp, synthetic construct; identical to SEQ ID NO: 10193
  source 1..120: mol_type = other DNA

SEQ ID NO: 44355 - DNA, 120 bp, synthetic construct; identical to SEQ ID NO: 10194
  source 1..120: mol_type = other DNA

SEQ ID NO: 44356 - DNA, 120 bp, synthetic construct
  source 1..120: mol_type = other DNA
aagagactgagactcccacacaataataatgggagactttaacatcccactgtcaacgttagacagatccatgagacagaaacttaacaagcatatccaggaattgaactcagctctgca

SEQ ID NO: 44357 - DNA, 120 bp, synthetic construct
  source 1..120: mol_type = other DNA
caacaaaaaaaagagaattgtagaccaatatccctgacgaacatcaatggaaaaatcctcaataaaatactggcaaaccgaatccagcagcacatcaaaaagcttatccactacgatcaa

SEQ ID NO: 44358 - DNA, 120 bp, synthetic construct
  source 1..120: mol_type = other DNA
tgaaataaaagaggatacaaacaaatggaagaacattccatgctcatggataggaagaatcaatatcgtgaaaatggccatactgcccaaggtagattatagattcattgccatccccaa

SEQ ID NO: 44359 - DNA, 120 bp, synthetic construct; identical to SEQ ID NO: 4665
  source 1..120: mol_type = other DNA

SEQ ID NO: 44360 - DNA, 120 bp, synthetic construct; identical to SEQ ID NO: 21640
  source 1..120: mol_type = other DNA

SEQ ID NO: 44361 - DNA, 120 bp, synthetic construct
  source 1..120: mol_type = other DNA
gtgttgtaccaccaaacatgaaacgtctcctctgtcctcatctctacccagttcttggtaggtagagagacagatggactcaatgaaagataattaaaactatggggaacttgctaatat

SEQ ID NO: 44362 - DNA, 120 bp, synthetic construct; identical to SEQ ID NO: 21641
  source 1..120: mol_type = other DNA

SEQ ID NO: 44363 - DNA, 120 bp, synthetic construct
  source 1..120: mol_type = other DNA
tatctcattgtggttttgatttgcatttctctgatggctggccagtgatgatgagcattttttcatgtgttttttggctgcataaatgtcttcttttgagaagtgtctgttcatatcctt

SEQ ID NO: 44364 - DNA, 120 bp, synthetic construct
  source 1..120: mol_type = other DNA
aattctgtgaagaaagtcattggtagcttgatggggatggcattgaatctataaattaccttgggcagtatggccattttcacgatattgattcttcctacccatgagcatagaatattc

SEQ ID NO: 44365 - DNA, 120 bp, synthetic construct
  source 1..120: mol_type = other DNA
atttcttgccttctgctagcttttggatgtgtttgctcttgcttctctagttcttttaattgtgatgttagggtgtcaattttagatctttcctgctttctcttgtgggcatttagtgct

SEQ ID NO: 44366 - DNA, 120 bp, synthetic construct
  source 1..120: mol_type = other DNA
ccctgcctttttttgttttccatttgcttggtagatcttcctccgtccctttattttgagcctatatgtgtgtctgcacgtgatgggtttcctgaatacagcactatgatgggtcttgac

SEQ ID NO: 44367 - DNA, 120 bp, synthetic construct
  source 1..120: mol_type = other DNA
accatcactggccatcagagaaatgcaaatctaaaccgcaatgagataccatctcacaccagttagaatggcaatcattaaaaagtcaggaaacaacaggtgctggagaggatgtggaga

SEQ ID NO: 44368 - DNA, 120 bp, synthetic construct; identical to SEQ ID NO: 21642
  source 1..120: mol_type = other DNA

SEQ ID NO: 44369 - DNA, 120 bp, synthetic construct
  source 1..120: mol_type = other DNA
caggcttgcttaggtaaacatagcagccgggaagctccaactgggtggagcccaccacagctcaagaaggcctgcctgcctctgtaggctccacctctgggggcagggcacagacaaaca

SEQ ID NO: 44370 - DNA, 120 bp, synthetic construct
  source 1..120: mol_type = other DNA
ggaagtttagagaaaaaagaataaaaagaaatgagcaaagcctccaagaaatatgggactatgtgaaaagaccaactctacgtctgattggcgtacctgaaagtgatggggagaatggaa

SEQ ID NO: 44371 - DNA, 120 bp, synthetic construct
  source 1..120: mol_type = other DNA
caggggttgcaatcctagtctctgataaaacagactttaaaccaacaaagatcaaaagggacaaagaaggccattacataatggtaaagggatcaattcaacaagaagaactaacctaaa

SEQ ID NO: 44372 - DNA, 120 bp, synthetic construct
  source 1..120: mol_type = other DNA
gaccactagcaagactaataaagaaaaaaagagagaagaatcaaatagacacaataaaaatgataaaggggatatcaccaccgatcccacagaaatacaaactaccatcagagaatacta

SEQ ID NO: 44373 - DNA, 120 bp, synthetic construct
  source 1..120: mol_type = other DNA
caggcattcttatacaccaataacagacaaacagaaagccaaatcatgagtgaactcccattcacaattgcttcaaagagaataaaatacctaggaatccaacttacaagggatgtgaag

SEQ ID NO: 44374 - DNA, 120 bp, synthetic construct; identical to SEQ ID NO: 44367
  source 1..120: mol_type = other DNA

SEQ ID NO: 44375 - DNA, 120 bp, synthetic construct
  source 1..120: mol_type = other DNA
cacctgaacccaggaagttgaggctgcagcgagctatgtttgcaccactgcactccagcctgggtgacagagcaagaccctgtctcaaaaaatacatatataaaaatatattttttaaaa

SEQ ID NO: 44376 - DNA, 120 bp, synthetic construct
  source 1..120: mol_type = other DNA
aaagaagttatactcagaataagtgataagaaaagccacagaatttctccagtcagaatgaagagtgatcctgtcatgatgacgacccctaaagctgtggagggttcgggagtcaacttc

SEQ ID NO: 44377 - DNA, 120 bp, synthetic construct
  source 1..120: mol_type = other DNA
ggttgctactgcaggttgagtacacctcatccaaactgcttgagaccagaagtgctctggatttcagattttgaaatatttgtatatacacaatgagacatcttgggatgggtcccaagt

SEQ ID NO: 44378 - DNA, 120 bp, synthetic construct
  source 1..120: mol_type = other DNA
aacacagattttcaaaaatatacaagaaggccaggcacagtggctcatgcctgtaatcctagtgttttggaaggctgaggtgggtggatcacctgaggagaggagttcaagacaagcctg

SEQ ID NO: 44379 - DNA, 120 bp, synthetic construct
  source 1..120: mol_type = other DNA
aaacaagaatatatctattctatttcatttaaaaaaaagaaagaaggccaagagcggtggctcatgcctgtaatcccaacactttgggaggccaaggcaggagaaatgcttgagcccagg

SEQ ID NO: 44380 - DNA, 120 bp, synthetic construct
  source 1..120: mol_type = other DNA
gggaaaaggggaagaaaaggaaagaaacaacaaaaaccaccatccccaaagatgctatgagctgaaaaaatatccagaaagggcaccaggcttagacaaataggcttacatgaaagtctg

SEQ ID NO: 44381 - DNA, 120 bp, synthetic construct
  source 1..120: mol_type = other DNA
tacatagatggccagaaccaggaaaattagtagctagatatgtaggcatacagaaataacaagggctctgggcaactatcccaaagaatgatagaggcaagacccctcaaaaaagaacaa

SEQ ID NO: 44382 - DNA, 120 bp, synthetic construct
  source 1..120: mol_type = other DNA
gcggggaaaagattgagaaatcggatggttgccgtgtctgtgtagaaagaagtagacatgggagacttttcattttgttctgcactaagaaaaattcctctgtcttgggatcctgttgat

SEQ ID NO: 44383 - DNA, 120 bp, synthetic construct
  source 1..120: mol_type = other DNA
aagcagtttcttcctgctctgacattctcaaactccattatttaaaaaaacaaaacaaaaacggaaaaggaccaaccaaaaaaagttcaggaccagatggattcacagccgaattctacc

SEQ ID NO: 44384 - DNA, 120 bp, synthetic construct
  source 1..120: mol_type = other DNA
gagtgaactcccattcacaattgcttcaaagagaataaaatacctaggaatccaacttacaagggatgtgaaggacctcttccaggagaactacaaaccactgcccaatgaaataaaaga

SEQ ID NO: 44385 - DNA, 120 bp, synthetic construct
  source 1..120: mol_type = other DNA
aggatgtggagaaacaggaacacttttacactgttggtgggactgtaaactagttcaaccattgtggaagtcagtatggcgattcctcagggatctagaactagaaataccatttgactc

SEQ ID NO: 44386 - DNA, 120 bp, synthetic construct; identical to SEQ ID NO: 12348
  source 1..120: mol_type = other DNA

SEQ ID NO: 44387 - DNA, 120 bp, synthetic construct; identical to SEQ ID NO: 12349
  source 1..120: mol_type = other DNA

SEQ ID NO: 44388 - DNA, 120 bp, synthetic construct; identical to SEQ ID NO: 12350
  source 1..120: mol_type = other DNA

SEQ ID NO: 44389 - DNA, 120 bp, synthetic construct
  source 1..120: mol_type = other DNA
atgagttcatgtcctttgtagggacatggatgaaattggaaatcatcattctcagtaaactatcgcaagaacaaaaaaccaaacaccgcatattctcactcatcggtgggaactgaacaa

SEQ ID NO: 44390 - DNA, 120 bp, synthetic construct; identical to SEQ ID NO: 12351
  source 1..120: mol_type = other DNA

SEQ ID NO: 44391 - DNA, 120 bp, synthetic construct
  source 1..120: mol_type = other DNA
ataaatgtcttcttttgagaagtgtctgttcatgtcctttgcccactttctgatggggttgtttttttcttgtaaatttgtttgagttcattgtagattctggatattagccctttgtca

SEQ ID NO: 44392 - DNA, 120 bp, synthetic construct
  source 1..120: mol_type = other DNA
atgggatgtatctcaaaataataagagctatctatgacaaacccacagccaatatcatactgaatgggcaaaaattggaagcattcactttgaaaactggcacaagacagggatgccctc

SEQ ID NO: 44393 - DNA, 120 bp, synthetic construct
  source 1..120: mol_type = other DNA
aagaaactaccatcagagtgaacagacaatctacagaatgggaggaaatttttacaatctacccatctgacaaagggctaacatccagaatctacaaagaacttaaacaaatttacaaga

SEQ ID NO: 44394 - DNA, 120 bp, synthetic construct
  source 1..120: mol_type = other DNA
ccggccagccgccccgtccgggaggtgaggggcgcctctgcccggccgcccctactgggaagtgaggagcccctctgcccggccaccaccccgtctgggaggtgtgcccaacagctcatt

SEQ ID NO: 44395 - DNA, 120 bp, synthetic construct; identical to SEQ ID NO: 10154
  source 1..120: mol_type = other DNA

SEQ ID NO: 44396 - DNA, 120 bp, synthetic construct; identical to SEQ ID NO: 10155
  source 1..120: mol_type = other DNA

SEQ ID NO: 44397 - DNA, 120 bp, synthetic construct
  source 1..120: mol_type = other DNA
cctcggactcccaaagtgccaggattacaggtgtgaaccaccgagcccgggtagaactaatattttaaagctatctcctttattcaaatttggggaggaatattatttttgaaaccaatg

SEQ ID NO: 44398 - DNA, 120 bp, synthetic construct; identical to SEQ ID NO: 10156
  source 1..120: mol_type = other DNA

SEQ ID NO: 44399 - DNA, 120 bp, synthetic construct; identical to SEQ ID NO: 10554
  source 1..120: mol_type = other DNA

SEQ ID NO: 44400 - DNA, 120 bp, synthetic construct; identical to SEQ ID NO: 10555
  source 1..120: mol_type = other DNA

SEQ ID NO: 44401 - DNA, 120 bp, synthetic construct
  source 1..120: mol_type = other DNA
aaagaaatcacaaaacctcccatttactttgtaattcgcttaaggataggaagccaccagtaacagcccccactcagccagacacagtaattacaccgtgagcaactgaggctcggaaat

SEQ ID NO: 44402 - DNA, 120 bp, synthetic construct
  source 1..120: mol_type = other DNA
aacaatttttaattttatttttatttaattttatttattttcttgagactgagtctcaccctgtcatccaggctggagtgcagtgttacgatctcggctcactgcaacctccgcctcccg

SEQ ID NO: 44403 - DNA, 120 bp, synthetic construct; identical to SEQ ID NO: 17991
  source 1..120: mol_type = other DNA

SEQ ID NO: 44404 - DNA, 120 bp, synthetic construct
  source 1..120: mol_type = other DNA
aggtaggatgctgtggttccggataggtgagttttaagagcctacagacacccaggtagaaatggattctcaatgggaagaagagtcccggagctcaagtgagtgtggtgttggacaggg

SEQ ID NO: 44405 - DNA, 120 bp, synthetic construct; identical to SEQ ID NO: 25575
  source 1..120: mol_type = other DNA

SEQ ID NO: 44406 - DNA, 120 bp, synthetic construct
  source 1..120: mol_type = other DNA
tggggttttttttttttttagacggagtgttcctctgtcgtccaggctgcagtgctggagtgcggtgatctcggctcactgcaacctcccactcctgggttcaggcgattctcctgcctt

SEQ ID NO: 44407 - DNA, 120 bp, synthetic construct
  source 1..120: mol_type = other DNA
attacaaggtgaggaagttcatgcctaagaaacatgtagcaggagatattgtatttaaaaaaataataattgtatttgtgaataatagaaaaagccttaacttaaatggaatatatattt

SEQ ID NO: 44408 - DNA, 120 bp, synthetic construct; identical to SEQ ID NO: 25578
  source 1..120: mol_type = other DNA

SEQ ID NO: 44409 - DNA, 120 bp, synthetic construct; identical to SEQ ID NO: 25576
  source 1..120: mol_type = other DNA

SEQ ID NO: 44410 - DNA, 120 bp, synthetic construct
  source 1..120: mol_type = other DNA
actctttttggttggtaaactattgattattgccacaatttcagagcctgttattggtctattcagagattcaacttcttcctggtttagtcttgggagagtgtatgtgtcgaggaatgt

SEQ ID NO: 44411 - DNA, 120 bp, synthetic construct
  source 1..120: mol_type = other DNA
taccattatgtaatggccttctttgtctcttttgatctttgttggcttaaagtctgttttatcagagactaggattgcaacccctgccttttttgttttccattggcttggtagatcttc

SEQ ID NO: 44412 - DNA, 120 bp, synthetic construct; identical to SEQ ID NO: 25577
  source 1..120: mol_type = other DNA

SEQ ID NO: 44413 - DNA, 120 bp, synthetic construct
  source 1..120: mol_type = other DNA
gcctatttcctccgaaacccgcgctgcggagcagcccagtgcatagagttcaacacttccccttgttgtggaaagtaaaggagcctcactaccacctttttttctttgcgttttcttact

SEQ ID NO: 44414 - DNA, 120 bp, synthetic construct; identical to SEQ ID NO: 25569
  source 1..120: mol_type = other DNA

SEQ ID NO: 44415 - DNA, 120 bp, synthetic construct; identical to SEQ ID NO: 25570
  source 1..120: mol_type = other DNA

SEQ ID NO: 44416 - DNA, 120 bp, synthetic construct
  source 1..120: mol_type = other DNA
attcattagatgttttttaatagatcaagagacagaacttcagaagggttaaaaaatctgtatcctttaaagacttaaacgttagacctaaaaccataaaaaccctagaagaaaacctag

SEQ ID NO: 44417 - DNA, 120 bp, synthetic construct
  source 1..120: mol_type = other DNA
gatgcaaattgaacaatgagaacacatggacacaggaaggggaacatcccactctgaggactgttgtggggttgggggaggggggagggatagcattaggagatatacctaatgctaaat

SEQ ID NO: 44418 - DNA, 120 bp, synthetic construct; identical to SEQ ID NO: 25571
  source 1..120: mol_type = other DNA

SEQ ID NO: 44419 - DNA, 120 bp, synthetic construct
  source 1..120: mol_type = other DNA
gggttaaatggtatttctagttctagatccctgaggaatcgccacactgtcttccacaatggttgaactagtttacagtcccaacaacagtgtaaaagtgttcctatttctccacatcct

SEQ ID NO: 44420 - DNA, 120 bp, synthetic construct
  source 1..120: mol_type = other DNA
ctcttcttattaattgatccctttaccattatgtaatggccttctttgtctctttttatctttgttggtttaaagtctgttttatcagagactaggattgcaacccctgcctttttttgt

SEQ ID NO: 44421 - DNA, 120 bp, synthetic construct; identical to SEQ ID NO: 25572
  source 1..120: mol_type = other DNA

SEQ ID NO: 44422 - DNA, 120 bp, synthetic construct; identical to SEQ ID NO: 25573
  source 1..120: mol_type = other DNA

SEQ ID NO: 44423 - DNA, 120 bp, synthetic construct
  source 1..120: mol_type = other DNA
tagtgcagcagtaaacatacgtgtgcatgtgtctttatagcagcatgatttgtagtcctttgggtatatacccagtaatgggttggttggtcaagtggtatttctacttctagatccctg

SEQ ID NO: 44424 - DNA, 120 bp, synthetic construct
  source 1..120: mol_type = other DNA
gtgatgcctccagctttgttcttttggcttaggattgacttggtgatgcgggctcttttttggttccatatgaactttaaagtagttttttccaattctctaaagaaagtcattggtagc

SEQ ID NO: 44425 - DNA, 120 bp, synthetic construct
  source 1..120: mol_type = other DNA
gctttttgatgtgctgctggattcagtttgccagtattttattgaggatttttgtatcaatgttcatcaaggatattggtctaaaattctcttttttgattttgtctctgcccaggtttg

SEQ ID NO: 44426 - DNA, 120 bp, synthetic construct
  source 1..120: mol_type = other DNA
acccagtagtcattcaggagcaggttgttcagtttccacgtagctgagcagttttgagtgagtttcttaatcctgagttctagtttgattgcactgtggtctgagagacagtttgttata

SEQ ID NO: 44427 - DNA, 120 bp, synthetic construct
  source 1..120: mol_type = other DNA
taccggtttttcctttccatgtttagtgcttccttcaggagctcttttagggcaggcctggtggtgacaaaaatctctcagcatttgcttgtctgtaaaggattttatttctccttcact

SEQ ID NO: 44428 - DNA, 120 bp, synthetic construct; identical to SEQ ID NO: 25574
  source 1..120: mol_type = other DNA

SEQ ID NO: 44429 - DNA, 120 bp, synthetic construct
  source 1..120: mol_type = other DNA
cagtgagccaagactgcagcacttcactccagcctgggtgaaagagtgagactccgtctcaaaaaaaaaaaattgaagaaagcacagaaatgtcctgctgaagttttatagttgaatttc

SEQ ID NO: 44430 - DNA, 120 bp, synthetic construct; identical to SEQ ID NO: 27090
  source 1..120: mol_type = other DNA

SEQ ID NO: 44431 - DNA, 120 bp, synthetic construct
  source 1..120: mol_type = other DNA
ttttggcaatgcggctcttttttggttccatatgaactttagggtagttttttccaattctgtgaagaaagtcattggtggggatggcattgaatctgtaaattaccttgggcggtatgg

SEQ ID NO: 44432 - DNA, 120 bp, synthetic construct; identical to SEQ ID NO: 27091
  source 1..120: mol_type = other DNA

SEQ ID NO: 44433 - DNA, 120 bp, synthetic construct
  source 1..120: mol_type = other DNA
cgtgcctcagcctcccaagtagctggtattacaggcacctgccaccatgcctagctaatttttttttctttttttttttttttagtagagacaggatttcatcatgttggccaggttggt

SEQ ID NO: 44434 - DNA, 120 bp, synthetic construct
  source 1..120: mol_type = other DNA
aaagtctcccgtgtctacctctttctacacagacacggcaaccatccgatttctcagtctcttccccacctttccccgctttctattccacaaaaccgccattgtcatcatggcctgttc

SEQ ID NO: 44435 - DNA, 120 bp, synthetic construct
  source 1..120: mol_type = other DNA
ccagcctgggcaccattgagcactgagttaacgagactccgtctgcaatcccggcaccttgggaggccgaggctggcagatcactcgcggttaggagctggagaccagcccggccaacac

SEQ ID NO: 44436 - DNA, 120 bp, synthetic construct; identical to SEQ ID NO: 18773
  source 1..120: mol_type = other DNA

SEQ ID NO: 44437 - DNA, 120 bp, synthetic construct
  source 1..120: mol_type = other DNA
gagtcggttcacaagttaatgtattccaggcctgtgcgctcattgcacttttttttcttttttttttttaaagaacataaacgattcttaaggtgcacagcgctgctgtcccgacgcgca

SEQ ID NO: 44438 - DNA, 120 bp, synthetic construct; identical to SEQ ID NO: 24570
  source 1..120: mol_type = other DNA

SEQ ID NO: 44439 - DNA, 120 bp, synthetic construct; identical to SEQ ID NO: 24571
  source 1..120: mol_type = other DNA

SEQ ID NO: 44440 - DNA, 120 bp, synthetic construct; identical to SEQ ID NO: 12457
  source 1..120: mol_type = other DNA

SEQ ID NO: 44441 - DNA, 120 bp, synthetic construct
  source 1..120: mol_type = other DNA
cggagggtcctacgcccacggagtctcgctgattgctagcacagcagtctgagatcaaactgctaggcggcagcaaggctcggggaggggcgcccaccattgcccaggcttgcttaggta

SEQ ID NO: 44442 - DNA, 120 bp, synthetic construct
  source 1..120: mol_type = other DNA
agatgaaatgaatgaaatgaagcaagaagggaagtttagagaaaaaagaataaaaagaaatgagcaaagcctccaagaaatatgggactatgtgaaaagaccaaatctatgtctgattgg

SEQ ID NO: 44443 - DNA, 120 bp, synthetic construct
  source 1..120: mol_type = other DNA
ttggataaagagtcaagacccatcagtgtgctgtattcaggaaacccatctcacgtgcagagacacacatcaaaataaaaggatggaggaagatctaccaagcaaatggaaaacaaaaaa

SEQ ID NO: 44444 - DNA, 120 bp, synthetic construct
  source 1..120: mol_type = other DNA
taaaatcagagcagaactgaaggaaatagagacacaaaaaacccttcaaaaaattaatgaatccaggagctggttttttgaaaggatcaacaaaatggatagaccgctagcaagactaat

SEQ ID NO: 44445 - DNA, 120 bp, synthetic construct
  source 1..120: mol_type = other DNA
cccttcgaaaactggcacaagacagggatgccctctctcaccactcactcctattcaacatagtgttggaagttctggccagggcaattaggcaggagaaggaaataaagggtattcaat

SEQ ID NO: 44446 - DNA, 120 bp, synthetic construct
  source 1..120: mol_type = other DNA
cttcatgtctaaaacaccaaaagcaatgccaacaagagccaaaattgacaaatgggatctaattaaactaaagagcttctgcacagcaaaagaaactaccatcagagtgaacaggcaacc

SEQ ID NO: 44447 - DNA, 120 bp, synthetic construct; identical to SEQ ID NO: 19709
  source 1..120: mol_type = other DNA

SEQ ID NO: 44448 - DNA, 120 bp, synthetic construct; identical to SEQ ID NO: 19839
  source 1..120: mol_type = other DNA

SEQ ID NO: 44449 - DNA, 120 bp, synthetic construct; identical to SEQ ID NO: 19840
  source 1..120: mol_type = other DNA

SEQ ID NO: 44450 - DNA, 120 bp, synthetic construct
  source 1..120: mol_type = other DNA
tttccttttgacctggggtgttgcccccatgttccccattcccaagcaaagggagtaagtgagttggatccaaggaaaatccaggcggaacccaggaaaacaagaaggtctagggaatca

SEQ ID NO: 44451 - DNA, 120 bp, synthetic construct; identical to SEQ ID NO: 31966
  source 1..120: mol_type = other DNA

SEQ ID NO: 44452 - DNA, 120 bp, synthetic construct
  source 1..120: mol_type = other DNA
aaaggaatacctgaatctaggtaatttattttttaaaaaaaaggtttatttggctcacagttctgcaggctgtacaggaagcacagcaccagcgtctgcttctggtgaggcctcaggaac

SEQ ID NO: 44453 - DNA, 120 bp, synthetic construct; identical to SEQ ID NO: 31967
  source 1..120: mol_type = other DNA

SEQ ID NO: 44454 - DNA, 120 bp, synthetic construct; identical to SEQ ID NO: 31961
  source 1..120: mol_type = other DNA

SEQ ID NO: 44455 - DNA, 120 bp, synthetic construct
  source 1..120: mol_type = other DNA
cccactgcacactgcggcatcccctgtcccggcggcccggttcacggagcacccactgcacactgcggcatcccctgtcccggcggcccggttcacggagcactcactgcacactgcggc

SEQ ID NO: 44456 - DNA, 120 bp, synthetic construct; identical to SEQ ID NO: 31962
  source 1..120: mol_type = other DNA

SEQ ID NO: 44457 - DNA, 120 bp, synthetic construct
  source 1..120: mol_type = other DNA
gaactcgatcctggaggcatgtgggtcacgccagcagagttgtgcaaaacaggatttttctcaggagtcgtctgtgtagccaccgtgagggggtgtctgcagagcaggcacagctgaagg

SEQ ID NO: 44458 - DNA, 120 bp, synthetic construct
  source 1..120: mol_type = other DNA
gcattgcacaggtaggcctcggggtgcccagcagacacctggggaaactgtccaatgggcagaagggaggatgtgctagaagtgactgggaagccatcacatcactgggcaggatcaggg

SEQ ID NO: 44459 - DNA, 120 bp, synthetic construct; identical to SEQ ID NO: 31948
  source 1..120: mol_type = other DNA

SEQ ID NO: 44460 - DNA, 120 bp, synthetic construct; identical to SEQ ID NO: 31949
  source 1..120: mol_type = other DNA

SEQ ID NO: 44461 - DNA, 120 bp, synthetic construct; identical to SEQ ID NO: 31950
  source 1..120: mol_type = other DNA

SEQ ID NO: 44462 - DNA, 120 bp, synthetic construct; identical to SEQ ID NO: 31951
  source 1..120: mol_type = other DNA

SEQ ID NO: 44463 - DNA, 120 bp, synthetic construct; identical to SEQ ID NO: 31952
  source 1..120: mol_type = other DNA

SEQ ID NO: 44464 - DNA, 120 bp, synthetic construct; identical to SEQ ID NO: 31953
  source 1..120: mol_type = other DNA

SEQ ID NO: 44465 - DNA, 120 bp, synthetic construct; identical to SEQ ID NO: 31954
  source 1..120: mol_type = other DNA

SEQ ID NO: 44466 - DNA, 120 bp, synthetic construct; identical to SEQ ID NO: 31955
  source 1..120: mol_type = other DNA

SEQ ID NO: 44467 - DNA, 120 bp, synthetic construct; identical to SEQ ID NO: 31956
  source 1..120: mol_type = other DNA

SEQ ID NO: 44468 - DNA, 120 bp, synthetic construct; identical to SEQ ID NO: 31957
  source 1..120: mol_type = other DNA

SEQ ID NO: 44469 - DNA, 120 bp, synthetic construct
  source 1..120: mol_type = other DNA
agattgcaccattgtactccaacctgggtgacaagagcaaaactccatgtaaaaaaaaaaaaaaaaaaggaggatgaggccagaggattccttgaacccaagaggtcaaagttgcagtga

SEQ ID NO: 44470 - DNA, 120 bp, synthetic construct; identical to SEQ ID NO: 31958
  source 1..120: mol_type = other DNA

SEQ ID NO: 44471 - DNA, 120 bp, synthetic construct; identical to SEQ ID NO: 31959
  source 1..120: mol_type = other DNA

SEQ ID NO: 44472 - DNA, 120 bp, synthetic construct; identical to SEQ ID NO: 31960
  source 1..120: mol_type = other DNA

SEQ ID NO: 44473 - DNA, 120 bp, synthetic construct; identical to SEQ ID NO: 31963
  source 1..120: mol_type = other DNA

SEQ ID NO: 44474 - DNA, 120 bp, synthetic construct; identical to SEQ ID NO: 31964
  source 1..120: mol_type = other DNA

SEQ ID NO: 44475 - DNA, 120 bp, synthetic construct; identical to SEQ ID NO: 31965
  source 1..120: mol_type = other DNA

SEQ ID NO: 44476 - DNA, 120 bp, synthetic construct; identical to SEQ ID NO: 35585
  source 1..120: mol_type = other DNA

SEQ ID NO: 44477 - DNA, 120 bp, synthetic construct; identical to SEQ ID NO: 12306
  source 1..120: mol_type = other DNA

SEQ ID NO: 44478 - DNA, 120 bp, synthetic construct
  source 1..120: mol_type = other DNA
tggaaccaacccaaatgtccatcaatgatagactggattaagaaaatgtggcacatgtaagccatggaatactatgcagccataagaaaaggatgagttcatgtcctttgtagggacatg

SEQ ID NO: 44479 - DNA, 120 bp, synthetic construct; identical to SEQ ID NO: 17431
  source 1..120: mol_type = other DNA

SEQ ID NO: 44480 - DNA, 120 bp, synthetic construct; identical to SEQ ID NO: 19346
  source 1..120: mol_type = other DNA

SEQ ID NO: 44481 - DNA, 120 bp, synthetic construct
  source 1..120: mol_type = other DNA
gttgggggtaaggttatagattaacagcatcccaaggcagaagaatttttcttagtacagaacaaaatggagtctcctatgtctacttctttctacgcagacacagtaacaatctgatct

SEQ ID NO: 44482 - DNA, 120 bp, synthetic construct
  source 1..120: mol_type = other DNA
aggagaatcgcttgaacatgggaggttgcattgagctgagatcgtgccaccgcactctagcctgggcaacagggtgagactctctctctctcaaaaaaaaaaaaaaaaaaaaaaaaaaaa

SEQ ID NO: 44483 - DNA, 120 bp, synthetic construct; identical to SEQ ID NO: 33455
  source 1..120: mol_type = other DNA

SEQ ID NO: 44484 - DNA, 120 bp, synthetic construct; identical to SEQ ID NO: 33456
  source 1..120: mol_type = other DNA

SEQ ID NO: 44485 - DNA, 120 bp, synthetic construct
  source 1..120: mol_type = other DNA
ggttggtaggctattaattactgcctcaaattcagaacttgttattggtctattcagggattagacttcttcctagtttagtcttgggagggtgtatgtgtccaggaatttatccatttc

SEQ ID NO: 44486 - DNA, 120 bp, synthetic construct
  source 1..120: mol_type = other DNA
cataaatgtcttcttttgagaagtgtctgttcatgtccttcgcccactttttgatggggttgtttgtttttttcttgtaaatttgtttgagttcattgtagattccggatattagccctt

SEQ ID NO: 44487 - DNA, 120 bp, synthetic construct
  source 1..120: mol_type = other DNA
gccgctgcaaaatcatgccaaaatgtaaagaccatcgagactaggaagaaactgcatcgactaacaagcaaaataaccagctaacatcataatgacaggatcaaattcacacataacaat

SEQ ID NO: 44488 - DNA, 120 bp, synthetic construct; identical to SEQ ID NO: 33457
  source 1..120: mol_type = other DNA

SEQ ID NO: 44489 - DNA, 120 bp, synthetic construct; identical to SEQ ID NO: 33458
  source 1..120: mol_type = other DNA

SEQ ID NO: 44490 - DNA, 120 bp, synthetic construct
  source 1..120: mol_type = other DNA
cagaggtacaaggaggaaccagtaccattccttctgaaactattccaatcaatacaaaaagagggaatcctccctaactcattttatgaggccagcatcatcctgataccaaagccgggc

SEQ ID NO: 44491 - DNA, 120 bp, synthetic construct
  source 1..120: mol_type = other DNA
agctggaggcatcatgctacctgacttcaaactatactacaaggctacagtaaccaaaacagcatggtactggtaccaaaacagagatatagatcaatggaatagaacagagccctcaga

SEQ ID NO: 44492 - DNA, 120 bp, synthetic construct
  source 1..120: mol_type = other DNA
acgcggtgtttggttttttgttcttgcgatagtttactgagaatgatgatttccaatttcatccatgtccctacaaaggacatgaactcatcattttttatggctgcatagtattccatg

SEQ ID NO: 44493 - DNA, 120 bp, synthetic construct
  source 1..120: mol_type = other DNA
tgagaatgatgatttccaatttcatccatgtccctacaaaggacatgaactcaacattttttgtggctgcatagtattccatggtgtagatgtgccacattttcttaatccagtctatca

SEQ ID NO: 44494 - DNA, 120 bp, synthetic construct; identical to SEQ ID NO: 33459
  source 1..120: mol_type = other DNA

SEQ ID NO: 44495 - DNA, 120 bp, synthetic construct
  source 1..120: mol_type = other DNA
tggtctcaaactcctggcttcaagcgattttcctgccttggcctcccaaagtactggaattacaggcatgagccactgtgcctggcccaattttcttttttttttctttttttttttttt

SEQ ID NO: 44496 - DNA, 120 bp, synthetic construct
  source 1..120: mol_type = other DNA
ccttcgcccactttttgatggggttgtttttttcttgtaaatttgattgagttcattgtagattctggccaagtcaatcctaagccaaaagaacaaagctggaggcatcacactacctaa

SEQ ID NO: 44497 - DNA, 120 bp, synthetic construct
  source 1..120: mol_type = other DNA
tgatggagttgtttgtttttttcttgtaaatttgtttgagttcatgtagattctggatattagccctttgtcagatgagtagattgcaaaaattttctcccattctgtaggttgcctgtt

SEQ ID NO: 44498 - DNA, 120 bp, synthetic construct; identical to SEQ ID NO: 33460
  source 1..120: mol_type = other DNA

SEQ ID NO: 44499 - DNA, 120 bp, synthetic construct; identical to SEQ ID NO: 33461
  source 1..120: mol_type = other DNA

SEQ ID NO: 44500 - DNA, 120 bp, synthetic construct
  source 1..120: mol_type = other DNA
aactggtgtgagatggtatctcattgtggttttgatttgcatttctctgatggccagtgatgatacgcattttttcatgtgtctgttggctgcataaatgtcttcttttgagaagtgtct

SEQ ID NO: 44501 - DNA, 120 bp, synthetic construct
  source 1..120: mol_type = other DNA
tcctgataccaaagccaggcagagacacaaccaaaaaagagaattttagacaaatatccttgatgaacattgatgcaaaaatcctcaataaaatactggcaaaccaaatccagcagcaca

SEQ ID NO: 44502 - DNA, 120 bp, synthetic construct; identical to SEQ ID NO: 33462
  source 1..120: mol_type = other DNA

SEQ ID NO: 44503 - DNA, 120 bp, synthetic construct; identical to SEQ ID NO: 23907
  source 1..120: mol_type = other DNA

SEQ ID NO: 44504 - DNA, 120 bp, synthetic construct; identical to SEQ ID NO: 23908
  source 1..120: mol_type = other DNA

SEQ ID NO: 44505 - DNA, 120 bp, synthetic construct; identical to SEQ ID NO: 23909
  source 1..120: mol_type = other DNA

SEQ ID NO: 44506 - DNA, 120 bp, synthetic construct; identical to SEQ ID NO: 23910
  source 1..120: mol_type = other DNA

SEQ ID NO: 44507 - DNA, 120 bp, synthetic construct
  source 1..120: mol_type = other DNA
cttctgagttcaagcaattctccagcttcagcctcccatgtagctctgggattacaggtgtgtgccaccatacccggcttttttttttttttttttaagtaacagggtttcaccatgttg

SEQ ID NO: 44508 - DNA, 120 bp, synthetic construct; identical to SEQ ID NO: 12712
  source 1..120: mol_type = other DNA

SEQ ID NO: 44509 - DNA, 120 bp, synthetic construct; identical to SEQ ID NO: 12713
  source 1..120: mol_type = other DNA

SEQ ID NO: 44510 - DNA, 120 bp, synthetic construct; identical to SEQ ID NO: 12714
  source 1..120: mol_type = other DNA

SEQ ID NO: 44511 - DNA, 120 bp, synthetic construct; identical to SEQ ID NO: 19786
  source 1..120: mol_type = other DNA

SEQ ID NO: 44512 - DNA, 120 bp, synthetic construct
  source 1..120: mol_type = other DNA
gagagagagtgtgtgtgtgagtgtgtgtgtgtgtgtgtgtgtgtgtgtgtgtctttgtgtgtgttgagccctcactgtcccttccctacagtgctgccgtggtcaacgccattggcctgt

SEQ ID NO: 44513 - DNA, 120 bp, synthetic construct
  source 1..120: mol_type = other DNA
ttcctctcccttcttctttccttttctcatctccctcctgcttcctcattgcccccctttccttttatccttcctttttcctctgctccttcctctccttccttttttcactaatccttc

SEQ ID NO: 44514 - DNA, 120 bp, synthetic construct; identical to SEQ ID NO: 30995
  source 1..120: mol_type = other DNA

SEQ ID NO: 44515 - DNA, 120 bp, synthetic construct; identical to SEQ ID NO: 30996
  source 1..120: mol_type = other DNA

SEQ ID NO: 44516 - DNA, 120 bp, synthetic construct; identical to SEQ ID NO: 30997
  source 1..120: mol_type = other DNA

SEQ ID NO: 44517 - DNA, 120 bp, synthetic construct; identical to SEQ ID NO: 30998
  source 1..120: mol_type = other DNA

SEQ ID NO: 44518 - DNA, 120 bp, synthetic construct; identical to SEQ ID NO: 30999
  source 1..120: mol_type = other DNA

SEQ ID NO: 44519 - DNA, 120 bp, synthetic construct; identical to SEQ ID NO: 31000
  source 1..120: mol_type = other DNA

SEQ ID NO: 44520 - DNA, 120 bp, synthetic construct; identical to SEQ ID NO: 31001
  source 1..120: mol_type = other DNA

SEQ ID NO: 44521 - DNA, 120 bp, synthetic construct; identical to SEQ ID NO: 31002
  source 1..120: mol_type = other DNA

SEQ ID NO: 44522 - DNA, 120 bp, synthetic construct
  source 1..120: mol_type = other DNA
ggtcgtgcagtaacttagattttccggtaaaggagaagaatgcggtccgcctcaggatgcagagaaggaccggtgtaaggaaagccggcgtctttcccccgcaccctacctgtcccccta

SEQ ID NO: 44523 - DNA, 120 bp, synthetic construct
  source 1..120: mol_type = other DNA
cacctctctccctgaaccccacctgtcccctgcacctcaactgtcctgcaccccacctgtccccctgatccccacctgtcctctgcacctcacctgtccccctacacctcacctgtttac

SEQ ID NO: 44524 - DNA, 120 bp, synthetic construct; identical to SEQ ID NO: 30981
  source 1..120: mol_type = other DNA

SEQ ID NO: 44525 - DNA, 120 bp, synthetic construct; identical to SEQ ID NO: 30982
  source 1..120: mol_type = other DNA

SEQ ID NO: 44526 - DNA, 120 bp, synthetic construct; identical to SEQ ID NO: 30983
  source 1..120: mol_type = other DNA

SEQ ID NO: 44527 - DNA, 120 bp, synthetic construct; identical to SEQ ID NO: 30984
  source 1..120: mol_type = other DNA

SEQ ID NO: 44528 - DNA, 120 bp, synthetic construct; identical to SEQ ID NO: 30985
  source 1..120: mol_type = other DNA

SEQ ID NO: 44529 - DNA, 120 bp, synthetic construct; identical to SEQ ID NO: 30986
  source 1..120: mol_type = other DNA

SEQ ID NO: 44530 - DNA, 120 bp, synthetic construct; identical to SEQ ID NO: 30987
  source 1..120: mol_type = other DNA

SEQ ID NO: 44531 - DNA, 120 bp, synthetic construct; identical to SEQ ID NO: 30988
  source 1..120: mol_type = other DNA

SEQ ID NO: 44532 - DNA, 120 bp, synthetic construct
  source 1..120: mol_type = other DNA
actttgggagactgaggtgagtgaatcacttgagcccaggagtttgagaccagcctgggcaacgtagtgagaccccatatctgcaaaaagaataataatgtaataataattagttgtaat

SEQ ID NO: 44533 - DNA, 120 bp, synthetic construct; identical to SEQ ID NO: 30989
  source 1..120: mol_type = other DNA

SEQ ID NO: 44534 - DNA, 120 bp, synthetic construct; identical to SEQ ID NO: 30990
  source 1..120: mol_type = other DNA

SEQ ID NO: 44535 - DNA, 120 bp, synthetic construct
  source 1..120: mol_type = other DNA
caatactgcactccagcgcgggcaacagagcatgactctgtctcaaaaaaaaaaaaaattaataaccaaatggaaatgaatctctgctgcagaccatatgaagacagacacaagcagagg

SEQ ID NO: 44536 - DNA, 120 bp, synthetic construct; identical to SEQ ID NO: 30991
  source 1..120: mol_type = other DNA

SEQ ID NO: 44537 - DNA, 120 bp, synthetic construct; identical to SEQ ID NO: 30992
  source 1..120: mol_type = other DNA

SEQ ID NO: 44538 - DNA, 120 bp, synthetic construct; identical to SEQ ID NO: 30993
  source 1..120: mol_type = other DNA

SEQ ID NO: 44539 - DNA, 120 bp, synthetic construct; identical to SEQ ID NO: 30994
  source 1..120: mol_type = other DNA

SEQ ID NO: 44540 - DNA, 120 bp, synthetic construct; identical to SEQ ID NO: 7236
  source 1..120: mol_type = other DNA

SEQ ID NO: 44541 - DNA, 120 bp, synthetic construct; identical to SEQ ID NO: 7237
  source 1..120: mol_type = other DNA

SEQ ID NO: 44542 - DNA, 120 bp, synthetic construct; identical to SEQ ID NO: 7238
  source 1..120: mol_type = other DNA

SEQ ID NO: 44543 - DNA, 120 bp, synthetic construct; identical to SEQ ID NO: 7239
  source 1..120: mol_type = other DNA

SEQ ID NO: 44544 - DNA, 120 bp, synthetic construct; identical to SEQ ID NO: 7240
  source 1..120: mol_type = other DNA

SEQ ID NO: 44545 - DNA, 120 bp, synthetic construct; identical to SEQ ID NO: 7241
  source 1..120: mol_type = other DNA

SEQ ID NO: 44546 - DNA, 120 bp, synthetic construct
  source 1..120: mol_type = other DNA
ctactgtatgtaatggagaaagagagttggcttgaggcctggcttggccaacacacagtatcagacaagtcccttaatctcccggagcccctcatccctctgtaagatgggatgtaggtc

SEQ ID NO: 44547 - DNA, 120 bp, synthetic construct
  source 1..120: mol_type = other DNA
ttaaggaaggaagggcattcgttgttatgatgatgatttgagggccaggtaaactggggctcaggaggtgaaatgactggtctgctatcgcagtgctgatatggacagagccaggagcag

SEQ ID NO: 44548 - DNA, 120 bp, synthetic construct; identical to SEQ ID NO: 8878
  source 1..120: mol_type = other DNA

SEQ ID NO: 44549 - DNA, 120 bp, synthetic construct; identical to SEQ ID NO: 8879
  source 1..120: mol_type = other DNA

SEQ ID NO: 44550 - DNA, 120 bp, synthetic construct; identical to SEQ ID NO: 2872
  source 1..120: mol_type = other DNA

SEQ ID NO: 44551 - DNA, 120 bp, synthetic construct; identical to SEQ ID NO: 6969
  source 1..120: mol_type = other DNA

SEQ ID NO: 44552 - DNA, 120 bp, synthetic construct; identical to SEQ ID NO: 6970
  source 1..120: mol_type = other DNA

SEQ ID NO: 44553 - DNA, 120 bp, synthetic construct; identical to SEQ ID NO: 6971
  source 1..120: mol_type = other DNA

SEQ ID NO: 44554 - DNA, 120 bp, synthetic construct; identical to SEQ ID NO: 6972
  source 1..120: mol_type = other DNA

SEQ ID NO: 44555 - DNA, 120 bp, synthetic construct; identical to SEQ ID NO: 6968
  source 1..120: mol_type = other DNA

SEQ ID NO: 44556 - DNA, 120 bp, synthetic construct; identical to SEQ ID NO: 19496
  source 1..120: mol_type = other DNA

SEQ ID NO: 44557 - DNA, 120 bp, synthetic construct; identical to SEQ ID NO: 19497
  source 1..120: mol_type = other DNA

SEQ ID NO: 44558 - DNA, 120 bp, synthetic construct; identical to SEQ ID NO: 19498
  source 1..120: mol_type = other DNA

SEQ ID NO: 44559 - DNA, 120 bp, synthetic construct
  source 1..120: mol_type = other DNA
atgtctgtaattccagcactttgggaggccgaggtgggatggtcactttagcccaggatttcaagaccagcctgggcaacataacaagactctgtctctacaaaaaataaaaaaatacta

SEQ ID NO: 44560 - DNA, 120 bp, synthetic construct; identical to SEQ ID NO: 19499
  source 1..120: mol_type = other DNA

SEQ ID NO: 44561 - DNA, 120 bp, synthetic construct
  source 1..120: mol_type = other DNA
gcttatttacatccatgaagactctattttcaaataaggtcgcatcctaaaggacagaagtgggggagtaggattgcaacacatgaatttgatgggtggggggaggggcatacaatttta

SEQ ID NO: 44562 - DNA, 120 bp, synthetic construct; identical to SEQ ID NO: 19500
  source 1..120: mol_type = other DNA

SEQ ID NO: 44563 - DNA, 120 bp, synthetic construct; identical to SEQ ID NO: 19501
  source 1..120: mol_type = other DNA

SEQ ID NO: 44564 - DNA, 120 bp, synthetic construct
  source 1..120: mol_type = other DNA
ttccacctctacctcccaaactgctaggattacaggcgtgagccaccatgtctggcccagatttcttttttttttttttatttttgagacagagtttcactcttgttgcccaggctggag

SEQ ID NO: 44565 - DNA, 120 bp, synthetic construct; identical to SEQ ID NO: 4424
  source 1..120: mol_type = other DNA

SEQ ID NO: 44566 - DNA, 120 bp, synthetic construct; identical to SEQ ID NO: 19503
  source 1..120: mol_type = other DNA

SEQ ID NO: 44567 - DNA, 120 bp, synthetic construct; identical to SEQ ID NO: 19504
  source 1..120: mol_type = other DNA

SEQ ID NO: 44568 - DNA, 120 bp, synthetic construct
  source 1..120: mol_type = other DNA
ctcttcctggcctctcttccctctggctgcttgcactttttcagacctctcacacctcacccattctattttttttttttttttttgatacagagttttcatcttgttgttcaggctgga

SEQ ID NO: 44569 - DNA, 120 bp, synthetic construct; identical to SEQ ID NO: 8872
  source 1..120: mol_type = other DNA

SEQ ID NO: 44570 - DNA, 120 bp, synthetic construct; identical to SEQ ID NO: 5208
  source 1..120: mol_type = other DNA

SEQ ID NO: 44571 - DNA, 120 bp, synthetic construct
  source 1..120: mol_type = other DNA
tcttcatttaatattaggtttatctcctaatgctatccctgccccctcccccgaccccaccacaggccccagtgtgtgatgttccccttcatgtgtccatgtgttctcattgttcaattc

SEQ ID NO: 44572 - DNA, 120 bp, synthetic construct
  source 1..120: mol_type = other DNA
ctcccattttgtaggttgcctgttcactctgatggtagtttcttttgctgtgcagaagctctttagtttaattagatcccatttgtcaattttggcttttgttgccatttgttttggtgt

SEQ ID NO: 44573 - DNA, 120 bp, synthetic construct
  source 1..120: mol_type = other DNA
ttggtgtataagaatgcttgtgatttttgcacattgattttgtatcctgagacttcgctgaagttgcctatcagcttaaggagattttgggttgagacgatggagttttctagatataca

SEQ ID NO: 44574 - DNA, 120 bp, synthetic construct; identical to SEQ ID NO: 24807
  source 1..120: mol_type = other DNA

SEQ ID NO: 44575 - DNA, 120 bp, synthetic construct; identical to SEQ ID NO: 24808
  source 1..120: mol_type = other DNA

SEQ ID NO: 44576 - DNA, 120 bp, synthetic construct
  source 1..120: mol_type = other DNA
gctttatttttttattggcacaattatatatagtatgcagttcaataaagtaaaaatttgggctgggcatggtggctcacgcctgtaatcctagcactctgagaggccaaggcaggcgga

SEQ ID NO: 44577 - DNA, 120 bp, synthetic construct; identical to SEQ ID NO: 26805
  source 1..120: mol_type = other DNA

SEQ ID NO: 44578 - DNA, 120 bp, synthetic construct
  source 1..120: mol_type = other DNA
taacacagattgggtaatttataaagaaaataaatgtatttggcttatggttctgtaggctgggaagtccaagattgggagaccacatctgctgagggcctttgtgccacactatcccat

SEQ ID NO: 44579 - DNA, 120 bp, synthetic construct; identical to SEQ ID NO: 26806
  source 1..120: mol_type = other DNA

SEQ ID NO: 44580 - DNA, 120 bp, synthetic construct; identical to SEQ ID NO: 26807
  source 1..120: mol_type = other DNA

SEQ ID NO: 44581 - DNA, 120 bp, synthetic construct; identical to SEQ ID NO: 26808
  source 1..120: mol_type = other DNA

SEQ ID NO: 44582 - DNA, 120 bp, synthetic construct; identical to SEQ ID NO: 26809
  source 1..120: mol_type = other DNA

SEQ ID NO: 44583 - DNA, 120 bp, synthetic construct; identical to SEQ ID NO: 26810
  source 1..120: mol_type = other DNA

SEQ ID NO: 44584 - DNA, 120 bp, synthetic construct
  source 1..120: mol_type = other DNA
gatggccagtgatgatgagcattttttcatgtgtcttttggctgcataaatatcttcttttgagaagtgtctgttcatatccttcacccactttttgatggggttgtttgtttttttctt

SEQ ID NO: 44585 - DNA, 120 bp, synthetic construct
  source 1..120: mol_type = other DNA
atgaactttcaagtagttttttccaattctgtgaagaaagtcattgctagcttgatggggatggcattgaatctataaattaccttgggcagtatggccattttcacgatattgattctt

SEQ ID NO: 44586 - DNA, 120 bp, synthetic construct
  source 1..120: mol_type = other DNA
gtgttcatcatggatattggtctaaaattctcttttttggttgtgtctctgccaggctttggtatcaggatgatgctggcctcataaaatgagttagggaggattccctctttttctatt

SEQ ID NO: 44587 - DNA, 120 bp, synthetic construct
  source 1..120: mol_type = other DNA
tgtggtgtgctgaaaaaaatatatattctgttgatttggggtggagagttctgtagatgtctattaggtccacttggtgcagagctgagttcaattcctgggtatccttgttaactttct

SEQ ID NO: 44588 - DNA, 120 bp, synthetic construct
  source 1..120: mol_type = other DNA
cttccctttgtgggtaacccgacctttctctctggctgcccttaacattttttccttcatttcaactttggtgaatctgacaattatgtgtcttggagttggtcttctcgaggagtacct

SEQ ID NO: 44589 - DNA, 120 bp, synthetic construct; identical to SEQ ID NO: 20480
  source 1..120: mol_type = other DNA

SEQ ID NO: 44590 - DNA, 120 bp, synthetic construct
  source 1..120: mol_type = other DNA
ggtgacaaaagcgaaactccgtctcaaaaaaaaaaaagtaacaaactttttttttttttttgagacagagtcccactctgtcacccaggctggagtgcaatggggcgatctcggctcact

SEQ ID NO: 44591 - DNA, 120 bp, synthetic construct
  source 1..120: mol_type = other DNA
gcttagggtcaaatttgtttttgttccctggcctttatattaactattttgtctgtctaaaagtttctttcccatagaggcagggtgtggtggctcatgcctgtaatcccagcactttgg

SEQ ID NO: 44592 - DNA, 120 bp, synthetic construct; identical to SEQ ID NO: 25725
  source 1..120: mol_type = other DNA

SEQ ID NO: 44593 - DNA, 120 bp, synthetic construct
  source 1..120: mol_type = other DNA
gcaatcattaaaaagtcaggaaacaacaggtgctggagaggatgtggagaaataggaacacttttacactgttggtgggactgtaaactagttcaaccattgtggaagtcagtgtggcga

SEQ ID NO: 44594 - DNA, 120 bp, synthetic construct; identical to SEQ ID NO: 21532
  source 1..120: mol_type = other DNA

SEQ ID NO: 44595 - DNA, 120 bp, synthetic construct
  source 1..120: mol_type = other DNA
tttatttatttatttatttgagatggagttttgctcttgttgcccaggctggagtgcgatggtgcaatcttgctcactgcaacctccgcctcccgggttcaagtgattctcctgcctcag

SEQ ID NO: 44596 - DNA, 120 bp, synthetic construct
  source 1..120: mol_type = other DNA
aatcacttgaacccaggaggtggaggatgcagtgagctgagatcacgccactgcactatagcctgggggatagagcaagactctgtctccaaataaataaacaaataaatataaaaagaa

SEQ ID NO: 44597 - DNA, 120 bp, synthetic construct; identical to SEQ ID NO: 2465
  source 1..120: mol_type = other DNA

SEQ ID NO: 44598 - DNA, 120 bp, synthetic construct; identical to SEQ ID NO: 1164
  source 1..120: mol_type = other DNA

SEQ ID NO: 44599 - DNA, 120 bp, synthetic construct; identical to SEQ ID NO: 1165
  source 1..120: mol_type = other DNA

SEQ ID NO: 44600 - DNA, 120 bp, synthetic construct
  source 1..120: mol_type = other DNA
tcaaattgtgtatctgataaagaatttgtatccagaatatacataaacagtccttacaggccgagtgtggtggctcatgcttgtaatcccagtacttagagaggccaaggcaggagggtt

SEQ ID NO: 44601 - DNA, 120 bp, synthetic construct
  source 1..120: mol_type = other DNA
attgagaggatgaacaaattctggcatatccatagggtggaatactgctcaacaacaagagtgagttaggcggggcacagtggctcacgcctgtaatcccagcactttgggaggccgagg

SEQ ID NO: 44602 - DNA, 120 bp, synthetic construct; identical to SEQ ID NO: 21533
  source 1..120: mol_type = other DNA

SEQ ID NO: 44603 - DNA, 120 bp, synthetic construct
  source 1..120: mol_type = other DNA
ggaaccaccaccttagaagcaggggtagtttcttttgctatcagtctgcccctactggggggtacctcaaaggatatgaacagacacttctcaaaagaagacatttatgcagccaaaaga

SEQ ID NO: 44604 - DNA, 120 bp, synthetic construct; identical to SEQ ID NO: 21534
  source 1..120: mol_type = other DNA

SEQ ID NO: 44605 - DNA, 120 bp, synthetic construct
  source 1..120: mol_type = other DNA
cccaaagtgctgggattacaggcgtgagccaccatgcctggccagtattttattctttttaatgctattgtaatgaaattttcaaaagtttccttttcagattactcattgcaaatatac

SEQ ID NO: 44606 - DNA, 120 bp, synthetic construct
  source 1..120: mol_type = other DNA
gatggccagtgatgatgagcattttttcatgtgtcttttggctgcataaatgtcttcgtttgagaagtgtctgttcatatcctctgcccactttttgatggggttgttttttttcttgta

SEQ ID NO: 44607 - DNA, 120 bp, synthetic construct; identical to SEQ ID NO: 30204
  source 1..120: mol_type = other DNA

SEQ ID NO: 44608 - DNA, 120 bp, synthetic construct; identical to SEQ ID NO: 30205
  source 1..120: mol_type = other DNA

SEQ ID NO: 44609 - DNA, 120 bp, synthetic construct; identical to SEQ ID NO: 30206
  source 1..120: mol_type = other DNA

SEQ ID NO: 44610 - DNA, 120 bp, synthetic construct; identical to SEQ ID NO: 30207
  source 1..120: mol_type = other DNA

SEQ ID NO: 44611 - DNA, 120 bp, synthetic construct
  source 1..120: mol_type = other DNA
gcctgtaatcccagcactttgggaggccgaggcgggtgcatcacctgaggtcaggagtttccagaccagcctggccaacatggcgaaacccggcctctactaaaaaatacaaaaattagc

SEQ ID NO: 44612 - DNA, 120 bp, synthetic construct; identical to SEQ ID NO: 30208
  source 1..120: mol_type = other DNA

SEQ ID NO: 44613 - DNA, 120 bp, synthetic construct; identical to SEQ ID NO: 30209
  source 1..120: mol_type = other DNA

SEQ ID NO: 44614 - DNA, 120 bp, synthetic construct; identical to SEQ ID NO: 30210
  source 1..120: mol_type = other DNA

SEQ ID NO: 44615 - DNA, 120 bp, synthetic construct; identical to SEQ ID NO: 30211
  source 1..120: mol_type = other DNA

SEQ ID NO: 44616 - DNA, 120 bp, synthetic construct; identical to SEQ ID NO: 30212
  source 1..120: mol_type = other DNA

SEQ ID NO: 44617 - DNA, 120 bp, synthetic construct; identical to SEQ ID NO: 30213
  source 1..120: mol_type = other DNA

SEQ ID NO: 44618 - DNA, 120 bp, synthetic construct; identical to SEQ ID NO: 30214
  source 1..120: mol_type = other DNA

SEQ ID NO: 44619 - DNA, 120 bp, synthetic construct; identical to SEQ ID NO: 30215
  source 1..120: mol_type = other DNA

SEQ ID NO: 44620 - DNA, 120 bp, synthetic construct; identical to SEQ ID NO: 30216
  source 1..120: mol_type = other DNA

SEQ ID NO: 44621 - DNA, 120 bp, synthetic construct; identical to SEQ ID NO: 30217
  source 1..120: mol_type = other DNA

SEQ ID NO: 44622 - DNA, 120 bp, synthetic construct; identical to SEQ ID NO: 30218
  source 1..120: mol_type = other DNA

SEQ ID NO: 44623 - DNA, 120 bp, synthetic construct; identical to SEQ ID NO: 30219
  source 1..120: mol_type = other DNA

SEQ ID NO: 44624 - DNA, 120 bp, synthetic construct; identical to SEQ ID NO: 30220
  source 1..120: mol_type = other DNA

SEQ ID NO: 44625 - DNA, 120 bp, synthetic construct; identical to SEQ ID NO: 30221
  source 1..120: mol_type = other DNA

SEQ ID NO: 44626 - DNA, 120 bp, synthetic construct; identical to SEQ ID NO: 30222
  source 1..120: mol_type = other DNA

SEQ ID NO: 44627 - DNA, 120 bp, synthetic construct; identical to SEQ ID NO: 30223
  source 1..120: mol_type = other DNA

SEQ ID NO: 44628 - DNA, 120 bp, synthetic construct; identical to SEQ ID NO: 30224
  source 1..120: mol_type = other DNA

SEQ ID NO: 44629 - DNA, 120 bp, synthetic construct; identical to SEQ ID NO: 30225
  source 1..120: mol_type = other DNA

SEQ ID NO: 44630 - DNA, 120 bp, synthetic construct; identical to SEQ ID NO: 30226
  source 1..120: mol_type = other DNA

SEQ ID NO: 44631 - DNA, 120 bp, synthetic construct; identical to SEQ ID NO: 30227
  source 1..120: mol_type = other DNA

SEQ ID NO: 44632 - DNA, 120 bp, synthetic construct; identical to SEQ ID NO: 30228
  source 1..120: mol_type = other DNA

SEQ ID NO: 44633 - DNA, 120 bp, synthetic construct; identical to SEQ ID NO: 30229
  source 1..120: mol_type = other DNA

SEQ ID NO: 44634 - DNA, 120 bp, synthetic construct; identical to SEQ ID NO: 30230
  source 1..120: mol_type = other DNA

SEQ ID NO: 44635 - DNA, 120 bp, synthetic construct; identical to SEQ ID NO: 35373
  source 1..120: mol_type = other DNA

SEQ ID NO: 44636 - DNA, 120 bp, synthetic construct; identical to SEQ ID NO: 35374
  source 1..120: mol_type = other DNA

SEQ ID NO: 44637 - DNA, 120 bp, synthetic construct; identical to SEQ ID NO: 35375
  source 1..120: mol_type = other DNA

SEQ ID NO: 44638 - DNA, 120 bp, synthetic construct; identical to SEQ ID NO: 13951
  source 1..120: mol_type = other DNA

SEQ ID NO: 44639 - DNA, 120 bp, synthetic construct; identical to SEQ ID NO: 13952
  source 1..120: mol_type = other DNA

SEQ ID NO: 44640 - DNA, 120 bp, synthetic construct
  source 1..120: mol_type = other DNA
ttacagtcccaccaacagtgtaaaagtgttcctatttctccacatcctctccagcacctgttgtttcctgactttttaatgattgccattctaattagtgtgagatagtatctcattgtg

SEQ ID NO: 44641 - DNA, 120 bp, synthetic construct
  source 1..120: mol_type = other DNA
ttgagcagtggtttgtagttctccttgaagaggtccttcacatcccttgtaagttggaaggtattttgttctctttgaagcaattgtgaatgggagttcactcattatttggctctctgt

SEQ ID NO: 44642 - DNA, 120 bp, synthetic construct
  source 1..120: mol_type = other DNA
ttctcagcaccacatcacacctattccaaaattgaccacatagttggaagtaaagcactcttcagcaaatgtaaaagaacagaaattataacaaactgtctctcagaccacagtgcaatc

SEQ ID NO: 44643 - DNA, 120 bp, synthetic construct
  source 1..120: mol_type = other DNA
gtagtgtcctccagaggagaactatttaggctagtgaaagggccagtgggtttgtccaggggcccttggtagaagttgttagttgagctcatttggggttccatttgtaagaccatctgt

SEQ ID NO: 44644 - DNA, 120 bp, synthetic construct
  source 1..120: mol_type = other DNA
ctcctagagtacttgccaaggtagctctggtgagtggctggaaaggggtgttgggagcaaactgagtggctccctgtgttctgttttcccattggagaaaaaactgttttgtatctacta

SEQ ID NO: 44645 - DNA, 120 bp, synthetic construct; identical to SEQ ID NO: 13949
  source 1..120: mol_type = other DNA

SEQ ID NO: 44646 - DNA, 120 bp, synthetic construct; identical to SEQ ID NO: 13950
  source 1..120: mol_type = other DNA

SEQ ID NO: 44647 - DNA, 120 bp, synthetic construct
  source 1..120: mol_type = other DNA
atcctcccacctcagcctcccaaaatgctaggattacaggaatgagccactgtacccagtgtaatagtcttctgaataaaccctggatcaaaaggaaaccataactgaagttataaaata

SEQ ID NO: 44648 - DNA, 120 bp, synthetic construct
  source 1..120: mol_type = other DNA
aaccctttgggtatatacccagtaatgggatggctgggtcaaatgggatttctagttctagatccctgaggaatcaccacactgacttccacaatggttgaactagtttacagtcccacc

SEQ ID NO: 44649 - DNA, 120 bp, synthetic construct; identical to SEQ ID NO: 34032
  source 1..120: mol_type = other DNA

SEQ ID NO: 44650 - DNA, 120 bp, synthetic construct
  source 1..120: mol_type = other DNA
gtttaataattactatggcagcgctgcccctgcgagcggcggccccggcggccgcgctgggccttgctttgatcaacatggcggacaacaaagccccgggatggggatgatgcactccgc

SEQ ID NO: 44651 - DNA, 120 bp, synthetic construct
  source 1..120: mol_type = other DNA
ccaggatgggacatttctttttactgcttcattatctggaagtcggcaagtatatttttgaattccaaaagctacctaccttccttccttccttccttccttccttctttccttccttcc

SEQ ID NO: 44652 - DNA, 120 bp, synthetic construct; identical to SEQ ID NO: 28448
  source 1..120: mol_type = other DNA

SEQ ID NO: 44653 - DNA, 120 bp, synthetic construct
  source 1..120: mol_type = other DNA
gtaaatggagtcctggggtatctatatttcatgtggttattggaagaaatgaatgaattcattggtgcaaagcacttaaccaagtgcccagcacacactgtggttcagcagctgttatga

SEQ ID NO: 44654 - DNA, 120 bp, synthetic construct
  source 1..120: mol_type = other DNA
cgtgcttgtgctgggacagttttccgagatgtggcagccagcacaaaccagctgctcgatctggtactcaagcaaaaaaagaaagaaagaaagaaaaatattattcccaacttagaggaa

SEQ ID NO: 44655 - DNA, 120 bp, synthetic construct; identical to SEQ ID NO: 3495
  source 1..120: mol_type = other DNA

SEQ ID NO: 44656 - DNA, 120 bp, synthetic construct
  source 1..120: mol_type = other DNA
gaacccgtaaggcggaggttgcggtgagccaagatcacaccactgcattccagcctggcgaaagagcaagactctgtctcaaaaaaaaaaaaaaaaaaaaaaaaaaagtaagtgctacaa

SEQ ID NO: 44657 - DNA, 120 bp, synthetic construct
  source 1..120: mol_type = other DNA
ggcctttcccctccctccagtggatgcctgctggattcccgccactgtgccccacagaccctgattctgtcttttttttttttttttttgagatggagtctcgctctgtcgcccaggctg

SEQ ID NO: 44658 - DNA, 120 bp, synthetic construct; identical to SEQ ID NO: 4404
  source 1..120: mol_type = other DNA

SEQ ID NO: 44659 - DNA, 120 bp, synthetic construct; identical to SEQ ID NO: 15482
  source 1..120: mol_type = other DNA

SEQ ID NO: 44660 - DNA, 120 bp, synthetic construct; identical to SEQ ID NO: 15483
  source 1..120: mol_type = other DNA

SEQ ID NO: 44661 - DNA, 120 bp, synthetic construct; identical to SEQ ID NO: 15484
  source 1..120: mol_type = other DNA

SEQ ID NO: 44662 - DNA, 120 bp, synthetic construct; identical to SEQ ID NO: 14365
  source 1..120: mol_type = other DNA

SEQ ID NO: 44663 - DNA, 120 bp, synthetic construct; identical to SEQ ID NO: 14366
  source 1..120: mol_type = other DNA

SEQ ID NO: 44664 - DNA, 120 bp, synthetic construct
  source 1..120: mol_type = other DNA
acacctgtaatcctagcactttgggaagtagaggtggaaggatcagctcagtcttgagctcaggagttcaagattagcctgggcaacataatgagacctcgtctctatttaaaaaaaaaa

SEQ ID NO: 44665 - DNA, 120 bp, synthetic construct
  source 1..120: mol_type = other DNA
tcctcccacctcagtctcccaagtagctgggactacaggcacaggccacccagacccagttaactgttttcttatgatgttactaaaacactttgaatttactcgatttataaaaataac

SEQ ID NO: 44666 - DNA, 120 bp, synthetic construct
  source 1..120: mol_type = other DNA
atatatatatatttttttttttttttttttttttttttgagataaaagtcttgctctgtcacccaggctggaatgcagtggtgtgatctcagatcactgcagcctccgcctcccaggttc

SEQ ID NO: 44667 - DNA, 120 bp, synthetic construct
  source 1..120: mol_type = other DNA
tcgttactgataggatatgggcagaataatgatatgcaaaccagcagcatttttttttttttttttttgagacagagtcttactctgtcacccaggctggagtgcagaggtgtgatctcg

SEQ ID NO: 44668 - DNA, 120 bp, synthetic construct
  source 1..120: mol_type = other DNA
gaccagaagcacatgctaccatgcacagctaatttttgtattgtatttttagtagagacagggtttcgctgtgttggccaggctggtcatgaactcctcctgacttcaagtgattcgccc

SEQ ID NO: 44669 - DNA, 120 bp, synthetic construct
  source 1..120: mol_type = other DNA
agaccctccacctggcaaccgccccatctgagaagtgaggagcccctccgcccggcagccgccccatctgagaagtgaggagcccctccgcccggcagccgccccatctgagaagtgagg

SEQ ID NO: 44670 - DNA, 120 bp, synthetic construct
  source 1..120: mol_type = other DNA
gccaaatccccctctgtgagaaacacccaagaatgatcaataaaaaaaaataaaaaaaaagaaacagggaaatttacataaaaatgtttcataccatgatacaagtaaattctaaattta

SEQ ID NO: 44671 - DNA, 120 bp, synthetic construct
  source 1..120: mol_type = other DNA
gcagaggttgcaggagctgagatcgtgccactgcacttcagcctgggctacagagtgagactccgtctcaaataaataaattaatttaattaaattaaaagtctacctgtgaaccatcta

SEQ ID NO: 44672 - DNA, 120 bp, synthetic construct; identical to SEQ ID NO: 10783
  source 1..120: mol_type = other DNA

SEQ ID NO: 44673 - DNA, 120 bp, synthetic construct
  source 1..120: mol_type = other DNA
tgtcgcttttccttctttcctgtagttccaagtttacccccatatcatttcccttccacccaaagaatttcttatagcttttcttttagagcaggtttcaatctctctctctccctctcc

SEQ ID NO: 44674 - DNA, 120 bp, synthetic construct
  source 1..120: mol_type = other DNA
ggtctcaaactcctggacccaagcaaccctttcaccttgaactcccaaaatgctggaattacagacatgagccactgtgcccagtcgatatttgaattttttatttgattgtaagcattt

SEQ ID NO: 44675 - DNA, 120 bp, synthetic construct; identical to SEQ ID NO: 15452
  source 1..120: mol_type = other DNA

SEQ ID NO: 44676 - DNA, 120 bp, synthetic construct; identical to SEQ ID NO: 15453
  source 1..120: mol_type = other DNA

SEQ ID NO: 44677 - DNA, 120 bp, synthetic construct
  source 1..120: mol_type = other DNA
ctcccggtttgacctcctaaagtgctgggattacaggcgtgagccactgtgcatgacctttaaaaaaattttttttgaaaaagtgcccggcccactttttcaagtagaattcggatattt

SEQ ID NO: 44678 - DNA, 120 bp, synthetic construct
  source 1..120: mol_type = other DNA
cgcctgtaatccagtgagccgagatcgcgccactgcactccagcaagactctcaaaaaaaaaaaaaaagaaagaaaagaaaagaaatattgtccccttggaacaagatcagcactttttc

SEQ ID NO: 44679 - DNA, 120 bp, synthetic construct
  source 1..120: mol_type = other DNA
aatttttctttttttttttcttttttgaagacagggtctcactctgtcgcctagactggagtgtagtggcgtgatcttggctcactgcagcctcaacctcctgtgctcaagaaatcctcc

SEQ ID NO: 44680 - DNA, 120 bp, synthetic construct; identical to SEQ ID NO: 27284
  source 1..120: mol_type = other DNA

SEQ ID NO: 44681 - DNA, 120 bp, synthetic construct; identical to SEQ ID NO: 34942
  source 1..120: mol_type = other DNA

SEQ ID NO: 44682 - DNA, 120 bp, synthetic construct
  source 1..120: mol_type = other DNA
agctttcattttctttttttttttttttttaatttatttttttattgataattcttgggtgtttctcacagagggggatttggcagggtcatgggacaatagtggagggaaggtcagcag

SEQ ID NO: 44683 - DNA, 120 bp, synthetic construct
  source 1..120: mol_type = other DNA
ctcctcacttcccagtaggggcggccgggcagaggcgcccctcacctcctggacggggcggctggccgggacggggtggctgccgggcggagacgctcctcacttcccagatggggtggc

SEQ ID NO: 44684 - DNA, 120 bp, synthetic construct; identical to SEQ ID NO: 34943
  source 1..120: mol_type = other DNA

SEQ ID NO: 44685 - DNA, 120 bp, synthetic construct
  source 1..120: mol_type = other DNA
tggtcctttgtaacttataaggatttcagcagaaaattccatttttattttcataaatttgggatacagcatagctctcaagaatccttggaatagccctccccctcctccccctccccc

SEQ ID NO: 44686 - DNA, 120 bp, synthetic construct
  source 1..120: mol_type = other DNA
cctctgcccggccgccaccccgtctgggatgtgaggagcgtctctgcccagccgccaccccatctaggaagtggggagtgcctctgcccggctgccctgaatgggaagtgaggagcgcct

SEQ ID NO: 44687 - DNA, 120 bp, synthetic construct; identical to SEQ ID NO: 5525
  source 1..120: mol_type = other DNA

SEQ ID NO: 44688 - DNA, 120 bp, synthetic construct
  source 1..120: mol_type = other DNA
aaaccaatacgcaaaaatcacaagcattcttatacaccaataacagacaaacagagagccaaatcatcagtgaactcccattcacaattgcttcaaagagaataaaatacctaggaatcc

SEQ ID NO: 44689 - DNA, 120 bp, synthetic construct; identical to SEQ ID NO: 26565
  source 1..120: mol_type = other DNA

SEQ ID NO: 44690 - DNA, 120 bp, synthetic construct
  source 1..120: mol_type = other DNA
ttttctcaggtttgtcaaagatcagatagttgtaggtatgcggcgttatttctgagggctttgttctgttccattgatctatatctctgttttggtaccagtaccatgctgttttggtta

SEQ ID NO: 44691 - DNA, 120 bp, synthetic construct
  source 1..120: mol_type = other DNA
gctggattcggtttgccagtattttattgaggatttttgcatcaatgttcatcaaggatattggtctaaaattctcgtttttgtggagaaataggaacactcttacactgttggtgggac

SEQ ID NO: 44692 - DNA, 120 bp, synthetic construct
  source 1..120: mol_type = other DNA
ccaggagttcaaggctgcagtgagctatgactgtgccactgcactccagcctaggcaacagtaacactgtctttaaaaaaaaaaaaaaaaaaaaaaaaaaaaaaagagagagagagagac

SEQ ID NO: 44693 - DNA, 120 bp, synthetic construct; identical to SEQ ID NO: 26566
  source 1..120: mol_type = other DNA

SEQ ID NO: 44694 - DNA, 120 bp, synthetic construct; identical to SEQ ID NO: 26567
  source 1..120: mol_type = other DNA

SEQ ID NO: 44695 - DNA, 120 bp, synthetic construct
  source 1..120: mol_type = other DNA
ctctctcaccgctcctattcaacatagtgttggaagttctggccggggcaatcaggcaggagaaggaaataaagggtattcaattaggaaaagaggaagtcaaattgtccctgtttgcag

SEQ ID NO: 44696 - DNA, 120 bp, synthetic construct
  source 1..120: mol_type = other DNA
agccagaattgacaaatgggatataattaaactaaagagcttctgcacagcaaaagaaactaccatcagagtgaacaggcaacccacaaaatgggagaaaattttcgcaacctactcatc

SEQ ID NO: 44697 - DNA, 120 bp, synthetic construct; identical to SEQ ID NO: 26568
  source 1..120: mol_type = other DNA

SEQ ID NO: 44698 - DNA, 120 bp, synthetic construct; identical to SEQ ID NO: 26569
  source 1..120: mol_type = other DNA

SEQ ID NO: 44699 - DNA, 120 bp, synthetic construct
  source 1..120: mol_type = other DNA
ctaaacttccttctcgcttcatttcattcatttcatcttccatcactgataccctttcttccagttgatcgcatcggctcctgaggcttctgcattcttcacgtagttctcgagccttgg

SEQ ID NO: 44700 - DNA, 120 bp, synthetic construct
  source 1..120: mol_type = other DNA
caagagcgaaactctgttaaaaaaaaaaaaaatgacaattgagtacatgagggaggcgagggttgaaccatatagcaattcgggggggggggaaactttaaagcaaagggaacagcaagt

SEQ ID NO: 44701 - DNA, 120 bp, synthetic construct; identical to SEQ ID NO: 11117
  source 1..120: mol_type = other DNA

SEQ ID NO: 44702 - DNA, 120 bp, synthetic construct
  source 1..120: mol_type = other DNA
taaaatactaaaacataaattatctttctgttttgcataaaaactgtaacagtaattccctctcccctctcccctcttcccggtctccctctgatgccgagcggaagctggactgtactg

SEQ ID NO: 44703 - DNA, 120 bp, synthetic construct
  source 1..120: mol_type = other DNA
tcattgagaacgggccatgatgacgatggcggttttgtcgaatagaaaagggggaatgtggggaaaagatagagaaatcagattgttgctgtgtctgtgtagaaagaagtagacatagga

SEQ ID NO: 44704 - DNA, 120 bp, synthetic construct
  source 1..120: mol_type = other DNA
cttcttagcaccctctagttcttacaatctgttgaatttcacattctagtactttattaacaactctattggacttttccattaaaaaacagtggttccgggccgggcgcggtggctcac

SEQ ID NO: 44705 - DNA, 120 bp, synthetic construct; identical to SEQ ID NO: 10143
  source 1..120: mol_type = other DNA

SEQ ID NO: 44706 - DNA, 120 bp, synthetic construct; identical to SEQ ID NO: 10144
  source 1..120: mol_type = other DNA

SEQ ID NO: 44707 - DNA, 120 bp, synthetic construct
  source 1..120: mol_type = other DNA
tttgactgttttgcactaccgaggcaagttgagtagttgtgacagaactgtatgtcccacaaagtctaaaatatttactgcttggcccttacagaaaaagtttgcccaccctgtgctaat

SEQ ID NO: 44708 - DNA, 120 bp, synthetic construct; identical to SEQ ID NO: 22066
  source 1..120: mol_type = other DNA

SEQ ID NO: 44709 - DNA, 120 bp, synthetic construct; identical to SEQ ID NO: 22067
  source 1..120: mol_type = other DNA

SEQ ID NO: 44710 - DNA, 120 bp, synthetic construct; identical to SEQ ID NO: 22068
  source 1..120: mol_type = other DNA

SEQ ID NO: 44711 - DNA, 120 bp, synthetic construct; identical to SEQ ID NO: 22069
  source 1..120: mol_type = other DNA

SEQ ID NO: 44712 - DNA, 120 bp, synthetic construct; identical to SEQ ID NO: 22070
  source 1..120: mol_type = other DNA

SEQ ID NO: 44713 - DNA, 120 bp, synthetic construct
  source 1..120: mol_type = other DNA
tttcggagcttgcaaaagaaattgttctgcaagtacaagacagggaagaaaatagctgagaaggggtgggcgtcaagagagtccaggggttgggaggacgttactccaaattactgtttg

SEQ ID NO: 44714 - DNA, 120 bp, synthetic construct
  source 1..120: mol_type = other DNA
aaaaagctgatattgtgtccaggcctgatgataaagatgaggccactactgcatccagatcaggggctggggaagaggccatgatttgttctaggattgaggctgagaacaaggctagta

SEQ ID NO: 44715 - DNA, 120 bp, synthetic construct; identical to SEQ ID NO: 34954
  source 1..120: mol_type = other DNA

SEQ ID NO: 44716 - DNA, 120 bp, synthetic construct; identical to SEQ ID NO: 34955
  source 1..120: mol_type = other DNA

SEQ ID NO: 44717 - DNA, 120 bp, synthetic construct; identical to SEQ ID NO: 34956
  source 1..120: mol_type = other DNA

SEQ ID NO: 44718 - DNA, 120 bp, synthetic construct; identical to SEQ ID NO: 34957
  source 1..120: mol_type = other DNA

SEQ ID NO: 44719 - DNA, 120 bp, synthetic construct; identical to SEQ ID NO: 34958
  source 1..120: mol_type = other DNA

SEQ ID NO: 44720 - DNA, 120 bp, synthetic construct; identical to SEQ ID NO: 34959
  source 1..120: mol_type = other DNA

SEQ ID NO: 44721 - DNA, 120 bp, synthetic construct; identical to SEQ ID NO: 11112
  source 1..120: mol_type = other DNA

SEQ ID NO: 44722 - DNA, 120 bp, synthetic construct
  source 1..120: mol_type = other DNA
ttgaggtcaggagttcaagaccagcctggatgatggagtgagaccccatctctatgttttatttatttttttgagacaagatctcactctgtcacccagggtggggtacagtggcataat

SEQ ID NO: 44723 - DNA, 120 bp, synthetic construct; identical to SEQ ID NO: 11113
  source 1..120: mol_type = other DNA

SEQ ID NO: 44724 - DNA, 120 bp, synthetic construct
  source 1..120: mol_type = other DNA
cctgccttggcctcccaaagtgccgagattgcagcctctgcccggccgccaccccgactgggaagtgaggagcgtctccgcatggccgcccatcctctgggatgtgaggagcccctctgc

SEQ ID NO: 44725 - DNA, 120 bp, synthetic construct
  source 1..120: mol_type = other DNA
gcctaggaaaaccagagacctttgttcacttgtttatctgctgaccttccctccactattgtcctctgaccctgccaaatccccctctgcgagaaacacccaagaatgatcaattaaaaa

SEQ ID NO: 44726 - DNA, 120 bp, synthetic construct; identical to SEQ ID NO: 14363
  source 1..120: mol_type = other DNA

SEQ ID NO: 44727 - DNA, 120 bp, synthetic construct; identical to SEQ ID NO: 14364
  source 1..120: mol_type = other DNA

SEQ ID NO: 44728 - DNA, 120 bp, synthetic construct
  source 1..120: mol_type = other DNA
gcagctggagatctgagaacgggcagactgcctcctcaagtgggtccctgacccctgacccccaagcagcctaactgggaggcacccccccagcaggggcacactgacacctcacacggc

SEQ ID NO: 44729 - DNA, 120 bp, synthetic construct
  source 1..120: mol_type = other DNA
caaaggaaagcccatcagactaatagcggatctctcggcagaaaccctacaagccagaagagagtgggggccaatattcaacattcttaaagaaaagaattttcaacccagaatttcata

SEQ ID NO: 44730 - DNA, 120 bp, synthetic construct
  source 1..120: mol_type = other DNA
agaaagtcaacaaggatacccaggaatttaactcagctctgcaccaagcggacctaatagacatctacagaactctccaccccaaatcaacagaatatacatttttttcagcaccacacc

SEQ ID NO: 44731 - DNA, 120 bp, synthetic construct
  source 1..120: mol_type = other DNA
cgggctctgaaattgtggcaataatcaatagtttaccaaccaaaaagagtccaggaccagatggattcatagccgaattctaccagaggtacaaggaggaactggtaccattccttctga

SEQ ID NO: 44732 - DNA, 120 bp, synthetic construct
  source 1..120: mol_type = other DNA
aagggatgtgaaggacctcttcaaggagaactacaacccactgctcaaggaaataaaagaggacacaaacaaatggaagaacgttccatgctcatgggtaggaagaatcaatatcgtgaa

SEQ ID NO: 44733 - DNA, 120 bp, synthetic construct
  source 1..120: mol_type = other DNA
agaactagaaataccatttgacccagccatcccattactgggtatatacccaaaggactataaatcatgctgctataaagacacatgcacacgtatgtttattgcggcattattcacaat

SEQ ID NO: 44734 - DNA, 120 bp, synthetic construct
  source 1..120: mol_type = other DNA
cagaataggactttagaaatcactttgtccattcaattaatggatgaggaaaaatccaaataactatgttattgaaggggtgggttgcccctccacacctgtgggtgtttctcgtaaggt

SEQ ID NO: 44735 - DNA, 120 bp, synthetic construct
  source 1..120: mol_type = other DNA
ttctacacagacacagtaacaatctgatctctcttgcttttccccacatgttatgttagacataggtctttaaacttgtaggttcagtaatctttctattacacaatagactgtaaaaga

SEQ ID NO: 44736 - DNA, 120 bp, synthetic construct
  source 1..120: mol_type = other DNA
aggagcatctctgcctggccgcccatcgtctgggatgtgaggagcccctctgcccggctgcccagtctgggaactgaggagcgcctcttcccggccgccatcccgtctaggaagtgagga

SEQ ID NO: 44737 - DNA, 120 bp, synthetic construct
  source 1..120: mol_type = other DNA
cccaagaatgatcaataaaaaagaaaattaataaaaaataaaaaaataaaaatacaaaaattagctgggcatggtggcacgcacctgtagtcccggctacttgggaggctgaggcaggag

SEQ ID NO: 44738 - DNA, 120 bp, synthetic construct; identical to SEQ ID NO: 8811
  source 1..120: mol_type = other DNA

SEQ ID NO: 44739 - DNA, 120 bp, synthetic construct
  source 1..120: mol_type = other DNA
ccttttctccctgaagaccaacgtccacaactttggtatatccacagtgttggggtgtgtgtgtgtgtgtgtgtgtgtgtgtgtgtgtatatatatgtgtgtgtgtatatatatatatat

SEQ ID NO: 44740 - DNA, 120 bp, synthetic construct; identical to SEQ ID NO: 12773
  source 1..120: mol_type = other DNA

SEQ ID NO: 44741 - DNA, 120 bp, synthetic construct
  source 1..120: mol_type = other DNA
ctgatggagctgaaaacaacggcatgagaactacatgacgaatgcaaagcctcagtagccaattcgatcaactggaagaaagggtatcagtgatgcaagatcaaatgaatgaaatgaagt

SEQ ID NO: 44742 - DNA, 120 bp, synthetic construct
  source 1..120: mol_type = other DNA
gctaactaccctaaatatatatgcacccaatactggagcacccagattcataaagcaagtccttagagacctacaaagagacttagaccctcacacaataataatgggagactttaacac

SEQ ID NO: 44743 - DNA, 120 bp, synthetic construct
  source 1..120: mol_type = other DNA
ataaacacctctacgcaaataaactagaaaatctagaagaaatggataaattcctgacacatacagcctcccaagactaaaccaggaagaagctgaatccctgaatagaccaataacagg

SEQ ID NO: 44744 - DNA, 120 bp, synthetic construct
  source 1..120: mol_type = other DNA
gacagggatgccgtctctcaccactcctatacaacatagtgttgaaagttctggccagggcaataaggaaggagaaggaaataaaaggtattcaattaggagaagaggaagtcaaattgt

SEQ ID NO: 44745 - DNA, 120 bp, synthetic construct
  source 1..120: mol_type = other DNA
aggcataccattcaggacataggcatgggcaaggacttcatgtctaaaacaccaaaagcaatggcaacaaaagccaaaattgacaaatgggatctaattaaactaaagagcttctgcaca

SEQ ID NO: 44746 - DNA, 120 bp, synthetic construct
  source 1..120: mol_type = other DNA
aagaagaagaagaagaagaagaagaagaagaggaagaggaagaggaagaggaaggaggaggaggaggaggaggagaaggagaagaagaaaagaagaagaagaagaagaagaagaagaaga

SEQ ID NO: 44747 - DNA, 120 bp, synthetic construct; identical to SEQ ID NO: 17383
  source 1..120: mol_type = other DNA

SEQ ID NO: 44748 - DNA, 120 bp, synthetic construct; identical to SEQ ID NO: 17384
  source 1..120: mol_type = other DNA

SEQ ID NO: 44749 - DNA, 120 bp, synthetic construct
  source 1..120: mol_type = other DNA
tttgagaagcgtctgttcatatcctttgcccacttgttgatggcgttgttttttctcgtaaatttgtttgagttcattgtagattctggatattagccctttgtcagatgagtagattgc

SEQ ID NO: 44750 - DNA, 120 bp, synthetic construct
  source 1..120: mol_type = other DNA
atgggagttcactcatgatttggctctctgtttgtctgttattggtgtataagaatgcttgtgatttttgtacattgattttgcatcctgagactttgctgaagttgcttatcagcttaa

SEQ ID NO: 44751 - DNA, 120 bp, synthetic construct
  source 1..120: mol_type = other DNA
tagaatttggttgtgaatccaactggtcttggactctttttggttggtaagctattgattattgtcacaatttcagagcctgttattggtctattcagagattcaacttcttcctggttt

SEQ ID NO: 44752 - DNA, 120 bp, synthetic construct
  source 1..120: mol_type = other DNA
cttttgatctttgttggtttaaagtctgttttatcagagactaggattgcaacccctgcctttttttgttttccatttgcttggtagatcttcctccatccttttattttgagcctttgt

SEQ ID NO: 44753 - DNA, 120 bp, synthetic construct
  source 1..120: mol_type = other DNA
ttcttccagttgattgcatcagctcctgaggcttctgcattcttcatgtagttctcgagccttggctttcagctccatcagctcctttaagcacttctctgtattggttattctagttat

SEQ ID NO: 44754 - DNA, 120 bp, synthetic construct
  source 1..120: mol_type = other DNA
ttgaacaatgaggacacttggacacggggcggggaacatcacacactggggcctgttgtggggtggggggtgggggtagggatggcattaagagaaatacctattgtaaatgatgtgtta

SEQ ID NO: 44755 - DNA, 120 bp, synthetic construct
  source 1..120: mol_type = other DNA
taaaaaacggcgtaccacgagactatatcccacacctggctcggagggtcctacacccacggaatctcgctgattgctagcacagcagtctgagatcaaactgcaaggcggcagcgaggc

SEQ ID NO: 44756 - DNA, 120 bp, synthetic construct
  source 1..120: mol_type = other DNA
atggagctgaaaaccaaggctcgagaactacgtgaagaatgcagaagcctcaggagccgatgcgatcaactggaagaaagggtatcagcaatggaagatgaaatgaatgaaatgaagcaa

SEQ ID NO: 44757 - DNA, 120 bp, synthetic construct
  source 1..120: mol_type = other DNA
tcaaaatgaaaggaaggaggaagatctaccaagcaaatggaaaacaaaaaaaggcaggggttgcaatcctagtctctgataaaacagactttaaaccaacaaagatcaaaagagacaaag

SEQ ID NO: 44758 - DNA, 120 bp, synthetic construct
  source 1..120: mol_type = other DNA
aagaagttgaatctctgaatagaccaataacaggagctgaaattgtggcaataatcaatattttaccaaccaaaaagagtccaggaccagaaggattcacagccgaattctaccagaggt

SEQ ID NO: 44759 - DNA, 120 bp, synthetic construct
  source 1..120: mol_type = other DNA
atatacaaaaatcacaagcattcctatacaccaacaacagacaaacagagagccaaatcatgagtgaactcccattcacaattgcttcaaagagaataaaatacctaggaatccaactta

SEQ ID NO: 44760 - DNA, 120 bp, synthetic construct
  source 1..120: mol_type = other DNA
gcaaatcaaaaccactatgagatatcatctcacaccagttagaacggtaatcattaaaaagtcaggaaacaacaggtgctggagaggatgtggagaaacaggaacacttttacactgttg

SEQ ID NO: 44761 - DNA, 120 bp, synthetic construct
  source 1..120: mol_type = other DNA
ttttttttttgagacggagtctcgctctgtcgcccaggctggagtgcagtggcgggatctcggctcactgcaagctccgcctcccgggttcacgccattctcctgcctcagcctcccaag

SEQ ID NO: 44762 - DNA, 120 bp, synthetic construct; identical to SEQ ID NO: 26847
  source 1..120: mol_type = other DNA

SEQ ID NO: 44763 - DNA, 120 bp, synthetic construct
  source 1..120: mol_type = other DNA
ctcatcattttttatggctgcaagtattccatggtgtgtatgtgccacattttcttaatccagtctatcattggtggacatttgggttggttccaagtctttgctattgtgaatagtgcc

SEQ ID NO: 44764 - DNA, 120 bp, synthetic construct
  source 1..120: mol_type = other DNA
tttgaagtcaggtagtgtgatgcctccagctttgttcttttggcttaggattgacttggcaatgcgggctcattttggttccatatgaactttaaagtagttttttccagttctgtgaag

SEQ ID NO: 44765 - DNA, 120 bp, synthetic construct
  source 1..120: mol_type = other DNA
tttgcatcaatgttcatcaaggatattggtctaaaattctcttttttggttgtgtctctgcctggctttggtatcaggatgatgctggactcataaaatgagttagggaggattctctct

SEQ ID NO: 44766 - DNA, 120 bp, synthetic construct
  source 1..120: mol_type = other DNA
tggtgcagagctgagttcaattcctggatatccttgttaactttctgtctcattgatctgtctaatgttaacagtggggtgttaatgtctcccattattattgtgtgggagtctaagtct

SEQ ID NO: 44767 - DNA, 120 bp, synthetic construct
  source 1..120: mol_type = other DNA
gaatgaatgagtcatagggctgtgggaaggcccctagcctgagtgtagagagacctgaatttctagttcttttttttttttttttttttttttttttttgagacggagtctcgctctgtc

SEQ ID NO: 44768 - DNA, 120 bp, synthetic construct
  source 1..120: mol_type = other DNA
agcctgggcgacagggtgagactccatctcaaaaaaaaaaaaaaaagaaaaaaaaaaccaaaagaaacaaaaaacaaaaacaaggtcaggccatgttggaaagtagtgggggcgggggga

SEQ ID NO: 44769 - DNA, 120 bp, synthetic construct
  source 1..120: mol_type = other DNA
agatcatgccactgcactccagcctgggcgacagagccagactccgtctcaaaaaacaaaaatgaaaataaaagtaaaaattaaaaaaagtgagagagaaagaaagaataaatccaccct

SEQ ID NO: 44770 - DNA, 120 bp, synthetic construct; identical to SEQ ID NO: 33381
  source 1..120: mol_type = other DNA

SEQ ID NO: 44771 - DNA, 120 bp, synthetic construct
  source 1..120: mol_type = other DNA
acaggaaggcagctaaggctcggtgagaaatcgagtgcagtgctggtgggctggccctgctgagggacctagtacaccctccgcagctgctggcccgggttctaagcccctcattgcccg

SEQ ID NO: 44772 - DNA, 120 bp, synthetic construct; identical to SEQ ID NO: 18480
  source 1..120: mol_type = other DNA

SEQ ID NO: 44773 - DNA, 120 bp, synthetic construct
  source 1..120: mol_type = other DNA
tctttactgatttgaatgcccttttactgatttgaatgccctttacttctttctcttgtcttgctctggctaggacttccagtagtatgttgaagaggagtggtgacagtgggcatcctt

SEQ ID NO: 44774 - DNA, 120 bp, synthetic construct
  source 1..120: mol_type = other DNA
tttctccacatcctctccagcacttgttgtttcctgactttttaatgattgccattctaactggtgtgagatggtatctcactgtggttttgatttgcatttctctgatggccagtgatg

SEQ ID NO: 44775 - DNA, 120 bp, synthetic construct
  source 1..120: mol_type = other DNA
ccttgtaagttggattcctaggtattttattctctttgaagcaattgtgaatgggagttcactcatgatttggctctctgtttgtctgttgttggtgtataagaatgcttgtaatttttg

SEQ ID NO: 44776 - DNA, 120 bp, synthetic construct
  source 1..120: mol_type = other DNA
taaactattgattattgccacaatttcagatcctgttattggtctattcagagattcagcttcttcctggtttagtcttgggagagtgtatgtgtcgaggaatttatccatttcttctag

SEQ ID NO: 44777 - DNA, 120 bp, synthetic construct
  source 1..120: mol_type = other DNA
atttctgttcttttacatttgctgaggagagctttacttccaagtatgtggtctattttggaataggtgtggtgtggtgctgaaaaaaatgtatattctgttgatttggggtggagagtt

SEQ ID NO: 44778 - DNA, 120 bp, synthetic construct
  source 1..120: mol_type = other DNA
ttttctttgagaatgttgaatattggcccccactctcttctggcttgtagagtttctgccgaaagatccactgttagtctgatgggcttccctttgagggtaacctgacctttctctctg

SEQ ID NO: 44779 - DNA, 120 bp, synthetic construct
  source 1..120: mol_type = other DNA
gttagttttccttgtaacagacaggaccctcagctgcaggtctgttggagtactgggccctgtgaggtgtcagtctgcccctgctggggggtgcctcccagttaggctgctcgggggtca

SEQ ID NO: 44780 - DNA, 120 bp, synthetic construct
  source 1..120: mol_type = other DNA
gtgatcctccctcctcagcctcctgagtagctgggactataggcatgagcccccacacctgcctaatttttgtggtttttcttttgttttgttttttttttgttttttgtttttgtagag

SEQ ID NO: 44781 - DNA, 120 bp, synthetic construct
  source 1..120: mol_type = other DNA
ggggcaaagtaggtgaacaaacattcctcaaaagaagacatttatgtggccaagaaccatacgagaaaagctcaacatcactgatcattagagaaatgcatatcaaaaccccacaatgag

SEQ ID NO: 44782 - DNA, 120 bp, synthetic construct
  source 1..120: mol_type = other DNA
tatcccttgcccactttttgatggggttgtttttttgtttgttttgttttgttttttgtaaatttgagttcattgtagattctagatattagccctttgtcagatgagtaggttgcgaaa

SEQ ID NO: 44783 - DNA, 120 bp, synthetic construct
  source 1..120: mol_type = other DNA
tgcagtgagctgagaccgtgccattgcactccagcctgggcaacagagtgagactcggtctcaaaaaaaaaacaaaaaaaacaaaaaaaaaaaaacaaaacaaaaagtgagaccctgcca

SEQ ID NO: 44784 - DNA, 120 bp, synthetic construct
  source 1..120: mol_type = other DNA
gcctgagcccaggtgtttaagaccagcttgagcaacatggtgagaccctgtctctatataagaaaggaaaaaaaataaagaagggaaggaaggaagaaagagagagagaaagaaagaaag

SEQ ID NO: 44785 - DNA, 120 bp, synthetic construct; identical to SEQ ID NO: 11640
  source 1..120: mol_type = other DNA

SEQ ID NO: 44786 - DNA, 120 bp, synthetic construct; identical to SEQ ID NO: 11641
  source 1..120: mol_type = other DNA

SEQ ID NO: 44787 - DNA, 120 bp, synthetic construct
  source 1..120: mol_type = other DNA
atggacagatggatgaatgaatgggtcggggggatgctgaaggatgaacttatagatgaatgaatggatgggtgggtggagggatggtgggagatagacatacagatgaatggatggatg

SEQ ID NO: 44788 - DNA, 120 bp, synthetic construct
  source 1..120: mol_type = other DNA
tttggtttgatataaaaaccttggttggtgtatgataaagaagagaacaagaacaagacgcccctttcctttaagtgcactgttagctatcttacaggctcgcatttgcttcccgggccc

SEQ ID NO: 44789 - DNA, 120 bp, synthetic construct
  source 1..120: mol_type = other DNA
tccacggcgggtgtgggctgtctcaggagcgcggccgcggtcgacgcgctggtcaggggggccattgtggaaaagagcctgcagggagagcaaacagcgcggtcatggcctcgggagctg

SEQ ID NO: 44790 - DNA, 120 bp, synthetic construct
  source 1..120: mol_type = other DNA
aggcgatgcccaagcctgggacccacgccagcgccaccgcctccaagcggcgaccgaattactccacgtgacgcttccaccccatgcacacagcaccgggacattagctgtggccggagc

SEQ ID NO: 44791 - DNA, 120 bp, synthetic construct
  source 1..120: mol_type = other DNA
ttgcaaaacttaaaaagtcgtccctgctctgtaccctacacctgtacatatttgctcgcttaccacctatggtgggacttgttgcagcctgcaaatggtacttttacagctttcattctc

SEQ ID NO: 44792 - DNA, 120 bp, synthetic construct
  source 1..120: mol_type = other DNA
tgtgtttagagttggggaaaccaaagtttaaacgtctgtgctgacgcttgctaggatctttaggcaggtcacttaaacctctctgaacctcagttttcgaatctgtaaaatggggataat

SEQ ID NO: 44793 - DNA, 120 bp, synthetic construct
  source 1..120: mol_type = other DNA
ccagaggaatatattttaaaatgtgaaacacatccatatttttcaaatctacacactggggcttgttgttaccagcactagcatctaagcttggtttgacttctagacagccccccaggg

SEQ ID NO: 44794 - DNA, 120 bp, synthetic construct
  source 1..120: mol_type = other DNA
ttaatagcattgcactcactccctattagatcaatgtgggttcattgctataaaaaatgggaaatcaaatagcattagccagctccttgtgcggggcggaggggaaatcaaacagcattt

SEQ ID NO: 44795 - DNA, 120 bp, synthetic construct
  source 1..120: mol_type = other DNA
tattatctattatatcatactacattcgtgtgtgacaaccaagggtggcttcaagtctacaaacctgggtacacaggttctctctcactgtcttaagccagagttagacaacacacacac

SEQ ID NO: 44796 - DNA, 120 bp, synthetic construct
  source 1..120: mol_type = other DNA
gataaacgcaaaacgctggtcggccaattcgctatttgacagcacacataggttttcaaacttatttccttttttaaagataaggaaaggactgggtgacacaggggaagaccaagtgta

SEQ ID NO: 44797 - DNA, 120 bp, synthetic construct
  source 1..120: mol_type = other DNA
gcgctttcgggcgctctttggagaggctgtttcttttcctctctctaactaaaacttgtaatttgaaaacattaaactgcaacgaccttgggaagaagataaaccattccagcctaaact

SEQ ID NO: 44798 - DNA, 120 bp, synthetic construct
  source 1..120: mol_type = other DNA
gccgcccagctcgtccagcgcgggcggcggcggcacgaagggcgccccgttctcgcggtacgacttgctgcggctgatgctcacctgcggcgcctggctgatcttgagcgtgtcccaggc

SEQ ID NO: 44799 - DNA, 120 bp, synthetic construct
  source 1..120: mol_type = other DNA
ttcttgcacaaaaaggcaaagaaaaatcatcctggcaaaaatgttctgggaaaggtctggggcagagagggagtgggagtgcagcaggcgcaggccgctccttccttttgaggaagcgcc

SEQ ID NO: 44800 - DNA, 120 bp, synthetic construct
  source 1..120: mol_type = other DNA
atgctgtcgatgcagtaggaggagagcaaagttggagatttacttttgcactcgggcctctcggagcagccctcctcctggtactgattgctcatggctggggctttttcccagggcgca

SEQ ID NO: 44801 - DNA, 120 bp, synthetic construct
  source 1..120: mol_type = other DNA
cgctgtctatcttcaccctgagcccgactgtgtctctcttgtttgtagcgtcccccaaccgctctcctctccgttttaaactctggaatgggaaaaagcctccttacagacaaagctctg

SEQ ID NO: 44802 - DNA, 120 bp, synthetic construct
  source 1..120: mol_type = other DNA
gacaaaactggggggaggggatgaagggttgggaacaggcacattaataatgcgaatactaatactgatactactactactattaaagacaggacaaaaagaattcctctgtccctctct

SEQ ID NO: 44803 - DNA, 120 bp, synthetic construct
  source 1..120: mol_type = other DNA
gttctgttattttatttatttttgttattttctaatcaatcttcccaagtgaggatgctattgggaaacacgtccattcacctcggggagaagggcctgacctagctcactctacaccca

SEQ ID NO: 44804 - DNA, 120 bp, synthetic construct; identical to SEQ ID NO: 11120
  source 1..120: mol_type = other DNA

SEQ ID NO: 44805 - DNA, 120 bp, synthetic construct
  source 1..120: mol_type = other DNA
gtagttctccttgaagaggtccttcacatcccttgtaagttggattcctaggtattttattctctttgaagcagttgtgaatgggagttcactcctgatttgtctctctgtttgtctgtt

SEQ ID NO: 44806 - DNA, 120 bp, synthetic construct
  source 1..120: mol_type = other DNA
actaaacctggaagaagttgaatccctgaatagaccaataacaggctctgaaattgaggcaaaaattaatagcttaccaaccaaaaaaagtccaggacaagatggattcacagcagagtt

SEQ ID NO: 44807 - DNA, 120 bp, synthetic construct; identical to SEQ ID NO: 2155
  source 1..120: mol_type = other DNA

SEQ ID NO: 44808 - DNA, 120 bp, synthetic construct
  source 1..120: mol_type = other DNA
tgtttgtgtactgggcaaatagactattccatgtagagggaatattgagtactttatcaagactatagttagagtataaggaaagagttgacagtgaggcagcaccaaactttaccttca

SEQ ID NO: 44809 - DNA, 120 bp, synthetic construct
  source 1..120: mol_type = other DNA
ccagcttcccttgcaggtaagagtagctgtgtggcacagttctgaacaaagaaatagaaggaaaattcaacttgtgttcttactattttccaccttctaaaaggggattataaagagaac

SEQ ID NO: 44810 - DNA, 120 bp, synthetic construct
  source 1..120: mol_type = other DNA
catgtaatctaccaccttttgttccacctctttttttaaaaaagtgttcgtttgtctacattacctttcattagacaatacttttatgagtgtaattcttaatttattattaaataatcc

SEQ ID NO: 44811 - DNA, 120 bp, synthetic construct
  source 1..120: mol_type = other DNA
attcataatggtagtattaacatctattatgtataacttaatctcaacataatttattgaattagaatgaacctggaacactttttgatgaattggtatcctagaggctgtttccttggg

SEQ ID NO: 44812 - DNA, 120 bp, synthetic construct
  source 1..120: mol_type = other DNA
cagcggctctgaactaggcatgttaactccagaatgactgcttagaaagactatgttattttgaatgaaggaaaactgacatgctgattttctgtttctctaattaggctcatacattca

SEQ ID NO: 44813 - DNA, 120 bp, synthetic construct
  source 1..120: mol_type = other DNA
ggctaaaagagtgctttgcaattctacagcaggagagacatcttgtggctatcaggtaaggtttcctggggtgagtataatttaggtaggtagaaaggtagaacaagtaaagctgtttct

SEQ ID NO: 44814 - DNA, 120 bp, synthetic construct
  source 1..120: mol_type = other DNA
acaaactaatatcacttagtttgaggcaatctgaattagacccaaattgccaaaaactgtacctacttccatgccactgtcatggaatgttaaatttatagacttgggaacagaagtatt

SEQ ID NO: 44815 - DNA, 120 bp, synthetic construct
  source 1..120: mol_type = other DNA
caattctttcactcagggaggtacgttaactaataattcattcacctggagatggaaagtagactaaactttaccattttcccttctaacttttgaggtgactagagaaagtcttgggat

SEQ ID NO: 44816 - DNA, 120 bp, synthetic construct
  source 1..120: mol_type = other DNA
agtgttatatcaaaactgcatgtttagctgtcacctgatatccctagggtagagaaattctatcatcattattgccatggagaagcaggagaacaaaacctttaaactactatagtggta

SEQ ID NO: 44817 - DNA, 120 bp, synthetic construct
  source 1..120: mol_type = other DNA
ggaccagagatagtagtgtagaggaggaggagagagccaaaaagagaagaagaagccaaagacacacatccttcagttggccctttgactatttcacaacatttggtagagttctatata

SEQ ID NO: 44818 - DNA, 120 bp, synthetic construct
  source 1..120: mol_type = other DNA
agggaggtgtgaggaattatcaaggcctgaagaagccattttaatatgctgtcactaatataaactacagctctagatcttcacttgtatctgagtctaccaaaagcaaactcattggcc

SEQ ID NO: 44819 - DNA, 120 bp, synthetic construct
  source 1..120: mol_type = other DNA
ctcttcagaaattaaaaggattacaggggattatcatgagcaacaacaacttttatattacaccaacaaattaaacaacttatatgaaatgagaaaattcctagaatgataccaattcct

SEQ ID NO: 44820 - DNA, 120 bp, synthetic construct
  source 1..120: mol_type = other DNA
gaaggtaccacacaacctgacttcaaaatatactacaaagctatagtaatcaacacagcatggtactggcctaaagtaatcaacacaccattggtacacatagaccaatggagcccagaa

SEQ ID NO: 44821 - DNA, 120 bp, synthetic construct
  source 1..120: mol_type = other DNA
cttaggttgtttcatatcttggctattgtgaacagtgctgcaataaacatgggagttcacatatctcttcaacaaactgatttcatttcctttctctatatacccagaaatggtattgtg

SEQ ID NO: 44822 - DNA, 120 bp, synthetic construct
  source 1..120: mol_type = other DNA
ggaactattcactggcactgagagttgtctcttaagtcaaggataggaaaaacatacagaaatgaagcagaatttgtaccattactattttatatcaatcttgtgtcctgaaagcttgct

SEQ ID NO: 44823 - DNA, 120 bp, synthetic construct
  source 1..120: mol_type = other DNA
ttgagccactctcacctggagtgagtaccaagttttttcctagattcttgtctgtgctaataaaagaatataataaatatatttttaatttaaaatttaagatcatcccacatcctgact

SEQ ID NO: 44824 - DNA, 120 bp, synthetic construct
  source 1..120: mol_type = other DNA
ggaacttcacttgtggaaatcttccctttggatgcagttgtttatgaagctgcaactgtgatgtcagaaggttagtcaacaaacaagataaagagcttaaaataataagcagccccttat

SEQ ID NO: 44825 - DNA, 120 bp, synthetic construct
  source 1..120: mol_type = other DNA
ctcacattattcaaaactggcacaatcttcaagattatgtatgacaaaagaggatgggcatttccatttactggccaaggtaagtgactcctatggactacctgttaaaagcagtgggtt

SEQ ID NO: 44826 - DNA, 120 bp, synthetic construct
  source 1..120: mol_type = other DNA
gcatgctatgctactgagccttcactcagtaaggaaggctttgggggaactgcagtaggattctaagcaagagaatgctttgataaaattttgtgatttagaaaggtcaatagatggcag

SEQ ID NO: 44827 - DNA, 120 bp, synthetic construct; identical to SEQ ID NO: 10711
  source 1..120: mol_type = other DNA

SEQ ID NO: 44828 - DNA, 120 bp, synthetic construct; identical to SEQ ID NO: 44825
  source 1..120: mol_type = other DNA

SEQ ID NO: 44829 - DNA, 120 bp, synthetic construct
  source 1..120: mol_type = other DNA
tataaggggctgcttattattttaagctctttatcttgtttgttgactaaccttctgacatcacagttgcagcttcataaacaactgcatccaaagggaagatttccacaagtgaagttc

SEQ ID NO: 44830 - DNA, 120 bp, synthetic construct; identical to SEQ ID NO: 44823
  source 1..120: mol_type = other DNA

SEQ ID NO: 44831 - DNA, 120 bp, synthetic construct; identical to SEQ ID NO: 10712
  source 1..120: mol_type = other DNA

SEQ ID NO: 44832 - DNA, 120 bp, synthetic construct; identical to SEQ ID NO: 10713
  source 1..120: mol_type = other DNA

SEQ ID NO: 44833 - DNA, 120 bp, synthetic construct; identical to SEQ ID NO: 10704
  source 1..120: mol_type = other DNA

SEQ ID NO: 44834 - DNA, 120 bp, synthetic construct; identical to SEQ ID NO: 10714
  source 1..120: mol_type = other DNA

SEQ ID NO: 44835 - DNA, 120 bp, synthetic construct
  source 1..120: mol_type = other DNA
ggatacatcctgagaagtgcattgttaggcaaattcatcattgtatgagcatcacagacttagacttacacaaacttagatggtgtaacctcctacctaggctatatggtatagcccgtg

SEQ ID NO: 44836 - DNA, 120 bp, synthetic construct; identical to SEQ ID NO: 10715
  source 1..120: mol_type = other DNA

SEQ ID NO: 44837 - DNA, 120 bp, synthetic construct; identical to SEQ ID NO: 10716
  source 1..120: mol_type = other DNA

SEQ ID NO: 44838 - DNA, 120 bp, synthetic construct
  source 1..120: mol_type = other DNA
aactggtttcgaagcttgaaagacaaaaatattcaataaatgtgctcaccgagtctcccaggaggcatcattacacactatctgccacgatgttgaagtagcctcatatttctccacagt

SEQ ID NO: 44839 - DNA, 120 bp, synthetic construct; identical to SEQ ID NO: 10717
  source 1..120: mol_type = other DNA

SEQ ID NO: 44840 - DNA, 120 bp, synthetic construct
  source 1..120: mol_type = other DNA
atcttattctgtagattccaggctgggcagtgtctggaatatgccattccactgttgcattactcagacccaggagtcccttgtgccaataaaaactgttgataaaaaacaaacaagcaa

SEQ ID NO: 44841 - DNA, 120 bp, synthetic construct; identical to SEQ ID NO: 10718
  source 1..120: mol_type = other DNA

SEQ ID NO: 44842 - DNA, 120 bp, synthetic construct
  source 1..120: mol_type = other DNA
tggccaccttggtacagttgccagtgagctatcaggaatcacaagtagatttgaggaaagcttcaatagaaggaatagaggtagtggaaactgattcatgaacccttctgagtaataaca

SEQ ID NO: 44843 - DNA, 120 bp, synthetic construct
  source 1..120: mol_type = other DNA
ggaatgtgcaaatttccctctccgataccctatcactctaaaattttggaagccaatataaaccagcaagtcaggttggatacccaggaagcaagagcatcatttggaagaactaaacac

SEQ ID NO: 44844 - DNA, 120 bp, synthetic construct; identical to SEQ ID NO: 10719
  source 1..120: mol_type = other DNA

SEQ ID NO: 44845 - DNA, 120 bp, synthetic construct
  source 1..120: mol_type = other DNA
tattctcctctagctagtattgaccccatacccctaggcttctaatttttcattatggtaaaaaaatccagaaataggactaaccgaagctgggtccctgataacttggcagtatgcagg

SEQ ID NO: 44846 - DNA, 120 bp, synthetic construct
  source 1..120: mol_type = other DNA
atagatcgctagcaagactaataaagaagaaaagagagaagaatcaactagatgcaataaaaaaatgataaaggggatatcaccaccaatcccaaagaagtacaaactaccatcagagaa

SEQ ID NO: 44847 - DNA, 120 bp, synthetic construct
  source 1..120: mol_type = other DNA
cagggatgccctctctcaccacacctgttcaacatagagttggaagttctggccagggcaatcaggcaggagaaggaaataaagggtattcaattaggaaaagaggaagtcaaattgtcc

SEQ ID NO: 44848 - DNA, 120 bp, synthetic construct; identical to SEQ ID NO: 31771
  source 1..120: mol_type = other DNA

SEQ ID NO: 44849 - DNA, 120 bp, synthetic construct; identical to SEQ ID NO: 31772
  source 1..120: mol_type = other DNA

SEQ ID NO: 44850 - DNA, 120 bp, synthetic construct; identical to SEQ ID NO: 31773
  source 1..120: mol_type = other DNA

SEQ ID NO: 44851 - DNA, 120 bp, synthetic construct; identical to SEQ ID NO: 31774
  source 1..120: mol_type = other DNA

SEQ ID NO: 44852 - DNA, 120 bp, synthetic construct
  source 1..120: mol_type = other DNA
gtggttgtactaatttacattcccaccaatagtgtacaggggttcccttttctccacatccccacaagcatttgttattgcctgccttttgcctataaaccattttaactggggtgagat

SEQ ID NO: 44853 - DNA, 120 bp, synthetic construct; identical to SEQ ID NO: 20339
  source 1..120: mol_type = other DNA

SEQ ID NO: 44854 - DNA, 120 bp, synthetic construct; identical to SEQ ID NO: 20340
  source 1..120: mol_type = other DNA

SEQ ID NO: 44855 - DNA, 120 bp, synthetic construct; identical to SEQ ID NO: 20341
  source 1..120: mol_type = other DNA

SEQ ID NO: 44856 - DNA, 120 bp, synthetic construct; identical to SEQ ID NO: 20342
  source 1..120: mol_type = other DNA

SEQ ID NO: 44857 - DNA, 120 bp, synthetic construct
  source 1..120: mol_type = other DNA
ttaggatcagaaacgttgaatttagcactttcctcagggcctctcattcttccttttcccataaaaaagagacagctaagtgacagtggaggaaaccacctcacacactctgagcttgaa

SEQ ID NO: 44858 - DNA, 120 bp, synthetic construct
  source 1..120: mol_type = other DNA
cctgctttcagacacaccctgtggcttgtacattgtttacatctcatggctgtgattgatgggatgtcttaagctgcttcatttttgccctacagtggatctctctgcaacggaagctct

SEQ ID NO: 44859 - DNA, 120 bp, synthetic construct
  source 1..120: mol_type = other DNA
tacttcaaaaatttacttcaaatcaatattaaatttttaataaagactttttgtaataccagcactttggaaggctgaggtgggtggatcacctgaggtcaggagtctgagaccagcctg

SEQ ID NO: 44860 - DNA, 120 bp, synthetic construct; identical to SEQ ID NO: 10033
  source 1..120: mol_type = other DNA

SEQ ID NO: 44861 - DNA, 120 bp, synthetic construct; identical to SEQ ID NO: 10034
  source 1..120: mol_type = other DNA

SEQ ID NO: 44862 - DNA, 120 bp, synthetic construct
  source 1..120: mol_type = other DNA
actaaaaatacaaaaattagctgggtgtggtggcatgcacctgtaatcccagtaataatcccagctactcaggaggctgagacaggagaatcgcttgaaccaagcagtggagactgcagt

SEQ ID NO: 44863 - DNA, 120 bp, synthetic construct
  source 1..120: mol_type = other DNA
gcctggaagccccgcccgaggagctaaccatttatgtcacactgtgacaattattctgcataaaattatcattaaaaaccctaatttttcagcctccaaccccgccagtggccttttagc

SEQ ID NO: 44864 - DNA, 120 bp, synthetic construct; identical to SEQ ID NO: 29739
  source 1..120: mol_type = other DNA

SEQ ID NO: 44865 - DNA, 120 bp, synthetic construct
  source 1..120: mol_type = other DNA
tctaccaataaaaatgcataagttcttttcaactctgttttccgatactatctttaaaactaatgatgtcttcatgaagcagtacagttaaagtgtccctttatggcccttctgctcctt

SEQ ID NO: 44866 - DNA, 120 bp, synthetic construct
  source 1..120: mol_type = other DNA
catcagggtagcttccactctcagctttacaaaatgaccttccagatcacaaaagaaagccccaatggctttagaaaagattcaaaaaccagtgatcccgtctaactccttcattttgca

SEQ ID NO: 44867 - DNA, 120 bp, synthetic construct
  source 1..120: mol_type = other DNA
tgcagtgagccgagatcccgccactgcactccagcctgggcgacacagtgagactctgtctcattaaaaaaaaaaaaaaaaaaaaaaaaaaaattgtttgaagattggctcagaaagctt

SEQ ID NO: 44868 - DNA, 120 bp, synthetic construct
  source 1..120: mol_type = other DNA
ctccatctcttcaaacttgttctcactagactccctaagacattcacattttgcactctagctgtaaaaacttgttgactttacaagcaccatgcctttgcgtataacacctgcccactc

SEQ ID NO: 44869 - DNA, 120 bp, synthetic construct
  source 1..120: mol_type = other DNA
ggaggctgaggcaggaaagtcgcttgaacacgggaaggtggagtttgcagtgagctgagattgctccactgcattccagcctgggtgacagagtgaaactccacttcaaaaaaaacaaaa

SEQ ID NO: 44870 - DNA, 120 bp, synthetic construct
  source 1..120: mol_type = other DNA
aacccttgctagtaggaatgtaaaatggtgtagtcactatgaaaaagtttggtaattccttaaaaagttgaacatagctgggtgcagtggctcacgcctgtaatcccaacactttgggag

SEQ ID NO: 44871 - DNA, 120 bp, synthetic construct
  source 1..120: mol_type = other DNA
ctaggcaatttactgaaactctgtctctacagtggttggaggtggagaagcttctgatgttccattgcctgagatttcaaaacagacaagaccagatccttgtctagaggattaaaagct

SEQ ID NO: 44872 - DNA, 120 bp, synthetic construct; identical to SEQ ID NO: 28149
  source 1..120: mol_type = other DNA

SEQ ID NO: 44873 - DNA, 120 bp, synthetic construct
  source 1..120: mol_type = other DNA
aatgtcttcttttgagaagtgtctgttcatgtccttcacccactttttgatggggttgtttgtttttttcttgtaaatttgtttaagttcattgtagattctggatattagccttttgtc

SEQ ID NO: 44874 - DNA, 120 bp, synthetic construct
  source 1..120: mol_type = other DNA
ctgaataccctttatttccttctcctgcctaaatgccctggccagaacttccaacactatgttgaataggagtggtgagagagggcatccctgtcttgtgccagttttcaaagggaatgc

SEQ ID NO: 44875 - DNA, 120 bp, synthetic construct
  source 1..120: mol_type = other DNA
tttgaaaggttttttgtgtctctatttccttgagttctactctgattttagttatttcttgccttctgcaagcttttgaatgtgattgctcttgcttttctagttcttttaattgtgatg

SEQ ID NO: 44876 - DNA, 120 bp, synthetic construct
  source 1..120: mol_type = other DNA
tttattttgagcctatgtgtgtctctgcacgtgagatgggtttcctgaacacagcacgctgatgggtcttgactctatccaatttgccagtctgtctctttaattggaacatttagtcca

SEQ ID NO: 44877 - DNA, 120 bp, synthetic construct
  source 1..120: mol_type = other DNA
cagagaggcacacagctataaacatattagcatctcaatgttactatgttctcaaaactctgaatattatttaaaaaatcaaactggtgtatttttgtttacttcttatcttcgatcaat

SEQ ID NO: 44878 - DNA, 120 bp, synthetic construct
  source 1..120: mol_type = other DNA
atggacctaaaattgtaaatcggtcccttatgttttgttgcttagaaaacttttcctaaatatatacatacatatttccccatttcttcaacttctgttatagttttattttttaaattt

SEQ ID NO: 44879 - DNA, 120 bp, synthetic construct; identical to SEQ ID NO: 28150
  source 1..120: mol_type = other DNA

SEQ ID NO: 44880 - DNA, 120 bp, synthetic construct; identical to SEQ ID NO: 28151
  source 1..120: mol_type = other DNA

SEQ ID NO: 44881 - DNA, 120 bp, synthetic construct; identical to SEQ ID NO: 28152
  source 1..120: mol_type = other DNA

SEQ ID NO: 44882 - DNA, 120 bp, synthetic construct
  source 1..120: mol_type = other DNA
aagaaaagaaaaaacacactggatggaaataatggaagatgagaaatgcgtaagaaaaatttagggccaggcactgtggatcacatctgtaatcccagcactttgggaggtcgacacggg

SEQ ID NO: 44883 - DNA, 120 bp, synthetic construct; identical to SEQ ID NO: 8852
  source 1..120: mol_type = other DNA

SEQ ID NO: 44884 - DNA, 120 bp, synthetic construct
  source 1..120: mol_type = other DNA
tacagtggcgcaatctctgctcactgtaacctctgcctcctgggttcaagcgattgtcctgcctcagcctcctgagtagctgggaatacaagtgcatgccaccacacctggctaattttt

SEQ ID NO: 44885 - DNA, 120 bp, synthetic construct; identical to SEQ ID NO: 8853
  source 1..120: mol_type = other DNA

SEQ ID NO: 44886 - DNA, 120 bp, synthetic construct; identical to SEQ ID NO: 8854
  source 1..120: mol_type = other DNA

SEQ ID NO: 44887 - DNA, 120 bp, synthetic construct; identical to SEQ ID NO: 8855
  source 1..120: mol_type = other DNA

SEQ ID NO: 44888 - DNA, 120 bp, synthetic construct
  source 1..120: mol_type = other DNA
ctaaagctgaggtgatgaaatccaggttgcttatttatttatatatttttgtgagatggagttttgctctatcacccaggctggagtgcagtgatggaatctcggctcactgcacaagtt

SEQ ID NO: 44889 - DNA, 120 bp, synthetic construct; identical to SEQ ID NO: 17902
  source 1..120: mol_type = other DNA

SEQ ID NO: 44890 - DNA, 120 bp, synthetic construct; identical to SEQ ID NO: 17903
  source 1..120: mol_type = other DNA

SEQ ID NO: 44891 - DNA, 120 bp, synthetic construct
  source 1..120: mol_type = other DNA
caccaacccacactactaggggtagagtggctctgccctcacctcacagtgatgcctgcctggccaggaaaagtggctcccaagccttcagccttccaactcttccttccttcttaccac

SEQ ID NO: 44892 - DNA, 120 bp, synthetic construct
  source 1..120: mol_type = other DNA
cctcataaaaggccgtaataacatatgtgaaatccctagcacagggctgagcaacagtaggtgctcaataaatggtggctaaccacaacaatactgatatttctactttgggaggccgag

SEQ ID NO: 44893 - DNA, 120 bp, synthetic construct
  source 1..120: mol_type = other DNA
cttcctgtaggttggcactaattggtttggctgcagctccacttattaagtagttatttttattactaacaacctaggcagggtggcccaggagcccgctgggggaggcggtgccaggct

SEQ ID NO: 44894 - DNA, 120 bp, synthetic construct
  source 1..120: mol_type = other DNA
ctgaggtttaataataggtgccaggccaggtggttaatagaagtctggggcattgtagggggacagaggaggatatatgtccccattggccattgtagactcccttccacaaaaaggacg

SEQ ID NO: 44895 - DNA, 120 bp, synthetic construct
  source 1..120: mol_type = other DNA
cacacccgtaatcccaggactttgggaggccgaggtgggcagatcacgaggtcagattaagaccatcctggctaacaaggtgaaaccacgtctctactgaaaaaaaaaaatacaaaaaat

SEQ ID NO: 44896 - DNA, 120 bp, synthetic construct
  source 1..120: mol_type = other DNA
gcctcagtttccccatcttcatagtggaattgtattggtgcctacccagagggttgtgtcaacaattaggatggcacctagcaccttggtcagtggtgggaaaggttccagaagttctgc

SEQ ID NO: 44897 - DNA, 120 bp, synthetic construct
  source 1..120: mol_type = other DNA
aaatccctgagcaaacagtgcagtgttgcccatctgtggtttcacattgaactaattatatactcaagtgctgtttaactgtgtgccttgatgactgcctctctccatcctttaatgacc

SEQ ID NO: 44898 - DNA, 120 bp, synthetic construct
  source 1..120: mol_type = other DNA
gggagctcattaggaccatggtggatcgggcagaggcgtgagtcctacagggacacccagggggcagacagaggtgtgatggaagcctgaacaggagacctagggggcaggggtgaacag

SEQ ID NO: 44899 - DNA, 120 bp, synthetic construct
  source 1..120: mol_type = other DNA
attttttgttgttgttgtttgttgttgtttttttttttttgagacagggttttgctctgtcacctagtctggagtgtagtggcgctatctgagctaactgcaaactctgcctcctgggtt

SEQ ID NO: 44900 - DNA, 120 bp, synthetic construct
  source 1..120: mol_type = other DNA
aaagtgctgggattaaagacttgagccaccgtgcctggccttgagtacagaatttcttcatggggtgatgaaaatgttctaaaattggttgtggtgatggttgtacagtaaagtgtaaac

SEQ ID NO: 44901 - DNA, 120 bp, synthetic construct
  source 1..120: mol_type = other DNA
atcgaggcagcagtgagctatgatcatgccactgcactccagtctgggcaacagaacgagaccttgtctctaaaaataaaaacaaaacaaaacaacaagaaaacaggaccatcactcaca

SEQ ID NO: 44902 - DNA, 120 bp, synthetic construct
  source 1..120: mol_type = other DNA
tgacatgtgggaacatgtgtcaggagacaagtgtcctgcacccagggtgacttagtgcttggggacaagtgttttgtggacacttggggacaagtattctgtacccaaggagactgggcc

SEQ ID NO: 44903 - DNA, 120 bp, synthetic construct
  source 1..120: mol_type = other DNA
atattgtacactgaagtataaaccttaaatgggtaaagtgggtggggcatggtggttcaccatgcccagcactggccaacatggtgaaaccccatctctactaagaatacaaaatttagc

SEQ ID NO: 44904 - DNA, 120 bp, synthetic construct
  source 1..120: mol_type = other DNA
cgagttcctgttctgggcttcgctgtgcatgacccatctcagcaggatggccgaggacctcatcctctactgcaccaaggaattcagcttcgtgcagctctcagatgcctacaggtaagc

SEQ ID NO: 44905 - DNA, 120 bp, synthetic construct
  source 1..120: mol_type = other DNA
aaaggacagaaactgctgccatgcagtggaagtagatgagactcagggggcctggggcctgtcaaatggcctgaccagaactctttaaaaaaagaaaatctaaacaaaaggccaggtgca

SEQ ID NO: 44906 - DNA, 120 bp, synthetic construct
  source 1..120: mol_type = other DNA
cttacccccttattttgaagcaaattcccatcatcacatcatttcattcctaaatagttcaggatatgtcttgaaatcagtgtttcttggctgggtgcagagcctcatgcctgtaatccc

SEQ ID NO: 44907 - DNA, 120 bp, synthetic construct
  source 1..120: mol_type = other DNA
ggccagtaaaacatacaggccagtaagtgttcatagcacatgtaaatattatcgataattatgagaagatggttcaagttgagagtgagacagagccgagtgggtaagagagtatctgcc

SEQ ID NO: 44908 - DNA, 120 bp, synthetic construct
  source 1..120: mol_type = other DNA
acctcttcctctctccccagccccctgttctcgggcgacgtgatctgcgtgtgggactacgggcacagtgtggagcagtatggtgccctgggcggcactgcgcgctccagcgtcgactgg

SEQ ID NO: 44909 - DNA, 120 bp, synthetic construct
  source 1..120: mol_type = other DNA
cctcaataagttattttagacattctgtggaatgtaacgtacgtttcctctcgtggctcatctgcctttgtacttgctgcacccaaactcccgatggggatttgtacaaaccgaacccga

SEQ ID NO: 44910 - DNA, 120 bp, synthetic construct
  source 1..120: mol_type = other DNA
ggtttcaccatgttagccaggatggtctccatctcctgacctcgtgatctgcctgcctacatggtggcaggcacctgtagtcccagctactcaggaggctaaggtgggagaactgcttga

SEQ ID NO: 44911 - DNA, 120 bp, synthetic construct
  source 1..120: mol_type = other DNA
agaggttgcagtgagccgagatcgtgccattgcactccagcctgggctacagagctgaaatgaaatgaaacgaaatgaaacgaaatgaaatgaaatgaaatgaaatgaaatgaaatgaaa

SEQ ID NO: 44912 - DNA, 120 bp, synthetic construct; identical to SEQ ID NO: 33343
  source 1..120: mol_type = other DNA

SEQ ID NO: 44913 - DNA, 120 bp, synthetic construct
  source 1..120: mol_type = other DNA
ctcctgatggttcatgaggatgtgggcacagcctctgtgtatgatggggacagtgtcccagtgtcctgtgagatccatccctcctgatgcttcacgaggacgtgggcacagcctctgtgt

SEQ ID NO: 44914 - DNA, 120 bp, synthetic construct
  source 1..120: mol_type = other DNA
gggcacagcctctgtgtgtgagatagggaccatgtcccagctctcctgtgaggtccacccatcctgatgcttcatgaggacgtgggcacagcctctgtgtatgatggggacagtgtccca

SEQ ID NO: 44915 - DNA, 120 bp, synthetic construct
  source 1..120: mol_type = other DNA
atgatggggacagtgtcccagtgtcctgtgagatccatccatcctgatggcacatgaggatgtgggcacagcctctgtgtgtgagatagggaccatgtcccagctctcctgtgaggtcca

SEQ ID NO: 44916 - DNA, 120 bp, synthetic construct
  source 1..120: mol_type = other DNA
aggtccacccatcctgatggcacatgaggatgtgggcacagcctctgtgtgtgagatagggaccatgtcccagctctcctgtgaggtccatccatcctgatgatccatgaggatgtggac

SEQ ID NO: 44917 - DNA, 120 bp, synthetic construct; identical to SEQ ID NO: 33344
  source 1..120: mol_type = other DNA

SEQ ID NO: 44918 - DNA, 120 bp, synthetic construct; identical to SEQ ID NO: 33324
  source 1..120: mol_type = other DNA

SEQ ID NO: 44919 - DNA, 120 bp, synthetic construct
  source 1..120: mol_type = other DNA
caaatgctggtactcccaaatactcgggaggctgaggcaggaggatcgcttgagcgcaggaggtcaaggctgcagtgaactatgatggcaacactgccctccagccaaatgctggtactc

SEQ ID NO: 44920 - DNA, 120 bp, synthetic construct
  source 1..120: mol_type = other DNA
tgagcccaggaggtcaaggctgcagtgaactatgatgacaacactgccctccagccaaatgctggtactcccaaatactcgggaggctgaggcaggaggatcgcttgagcccaggaggtc

SEQ ID NO: 44921 - DNA, 120 bp, synthetic construct
  source 1..120: mol_type = other DNA
tgggcatggtgatgcatgatgcatgcctgtacttccagctactcgggaggctgaggtgggaggacagcttgagcctaggaggtcaaggctgcagtgacctgtgactgctccactgcacac

SEQ ID NO: 44922 - DNA, 120 bp, synthetic construct
  source 1..120: mol_type = other DNA
gatggatagatggatgcatggatgagatggatggatggatgggtgaatagatggtagatcatgggtacatagatagatgaatggatggatagatgaatgcatggatgagatggatgggtg

SEQ ID NO: 44923 - DNA, 120 bp, synthetic construct; identical to SEQ ID NO: 1905
  source 1..120: mol_type = other DNA

SEQ ID NO: 44924 - DNA, 120 bp, synthetic construct
  source 1..120: mol_type = other DNA
gatgagatggatggatgggtgaatagatggtagctgatggataggtaggaagatgaatagttggatgcatggatgagatggatggttgggtgaatagatggtagctgatgggtacgtagg

SEQ ID NO: 44925 - DNA, 120 bp, synthetic construct
  source 1..120: mol_type = other DNA
tccatacatccacatccatttatccattcattcccccacccatccaatcactcatccatccatctgtccatccatccatccatccacccacccacctacccatccatccacccatccact

SEQ ID NO: 44926 - DNA, 120 bp, synthetic construct
  source 1..120: mol_type = other DNA
ctcatccatctatccacacatctatccactcacccatccatccacacatccatccatccatccatctgtccgtccatccatccatccagccacccatccactcacccacttatccatcca

SEQ ID NO: 44927 - DNA, 120 bp, synthetic construct; identical to SEQ ID NO: 33325
  source 1..120: mol_type = other DNA

SEQ ID NO: 44928 - DNA, 120 bp, synthetic construct; identical to SEQ ID NO: 33326
  source 1..120: mol_type = other DNA

SEQ ID NO: 44929 - DNA, 120 bp, synthetic construct; identical to SEQ ID NO: 33327
  source 1..120: mol_type = other DNA

SEQ ID NO: 44930 - DNA, 120 bp, synthetic construct; identical to SEQ ID NO: 33328
  source 1..120: mol_type = other DNA

SEQ ID NO: 44931 - DNA, 120 bp, synthetic construct; identical to SEQ ID NO: 33329
  source 1..120: mol_type = other DNA

SEQ ID NO: 44932 - DNA, 120 bp, synthetic construct; identical to SEQ ID NO: 33330
  source 1..120: mol_type = other DNA

SEQ ID NO: 44933 - DNA, 120 bp, synthetic construct; identical to SEQ ID NO: 33331
  source 1..120: mol_type = other DNA

SEQ ID NO: 44934 - DNA, 120 bp, synthetic construct; identical to SEQ ID NO: 17358
  source 1..120: mol_type = other DNA

SEQ ID NO: 44935 - DNA, 120 bp, synthetic construct; identical to SEQ ID NO: 14673
  source 1..120: mol_type = other DNA

SEQ ID NO: 44936 - DNA, 120 bp, synthetic construct; identical to SEQ ID NO: 31553
  source 1..120: mol_type = other DNA

SEQ ID NO: 44937 - DNA, 120 bp, synthetic construct
  source 1..120: mol_type = other DNA
ctgggcgacagagtgagactttgtctcaaaaaaaaaaaaaagagcagcaaacatttaccatctcatgtggcttctgagggtcaggaatctgggagcagcttagctcagtgtctgtcctga

SEQ ID NO: 44938 - DNA, 120 bp, synthetic construct
  source 1..120: mol_type = other DNA
gacatatacagcccatcatttgaaatttgtttctaggatgcatgacctccactgtgccactaatggtagtgctttggaacaatagagggaataaatgcagtgtcttctagatatgcccaa

SEQ ID NO: 44939 - DNA, 120 bp, synthetic construct
  source 1..120: mol_type = other DNA
gccaagatggtgaaacttcatctctactaaaaatacagaaaaattagctgggtgtggtggcacgcacctgtaatctcagctatttgagaggctgaagcagagaattccttaaacccagga

SEQ ID NO: 44940 - DNA, 120 bp, synthetic construct; identical to SEQ ID NO: 11973
  source 1..120: mol_type = other DNA

SEQ ID NO: 44941 - DNA, 120 bp, synthetic construct
  source 1..120: mol_type = other DNA
acaataataactaagttaagtcatcattggtagtttgtcagcttgcagtgagccaagatcacacccctgcactccagcctgggcaacagtgcaagactccgtctcaaaaacaaaaaaaag

SEQ ID NO: 44942 - DNA, 120 bp, synthetic construct
  source 1..120: mol_type = other DNA
gttctttatagatagatgggatttctctatgttgctcaggctggccttgagctcctgggctcaagtgatcctcctacctcttcctcttgagtagcaggaactacaggcacaagccactgt

SEQ ID NO: 44943 - DNA, 120 bp, synthetic construct
  source 1..120: mol_type = other DNA
tgtgcttataacctgggatgggcacccctgccagtcctgctctgccgcctgccaccgctgcccgagcccggtaaggagccctcggcccctctcgctgcccactccctagccgagagcacc

SEQ ID NO: 44944 - DNA, 120 bp, synthetic construct
  source 1..120: mol_type = other DNA
aagcacaaacccagtgatggggagagctggtgaggccttggctcagcctccagattcccaagcttccttttcattttcttttctttctaaaaatttatcagagatgtggactcgtcatgt

SEQ ID NO: 44945 - DNA, 120 bp, synthetic construct
  source 1..120: mol_type = other DNA
cacccataggcactttgatatgagtggaacgaatgaatgaatgtgcccttcgtccatcaccaaagacaaaccgagctcagctgagttagaatgtcagcgaggggttgcaggggaatcttc

SEQ ID NO: 44946 - DNA, 120 bp, synthetic construct
  source 1..120: mol_type = other DNA
aacccagagggctgtcaggttgtacagatgaggaaattgaggcttagcaagccaggaacttggctgaggtcagccatagcagcggtgcacagagcttagtgggcacatacatgcttggtg

SEQ ID NO: 44947 - DNA, 120 bp, synthetic construct
  source 1..120: mol_type = other DNA
gaaccactgtgctcggccatgagagcatgtgtaggactccacagcttcagggcaccccagccctctttttgcggtgaggagctgacctccagagagtggaactagtagcattgttctaag

SEQ ID NO: 44948 - DNA, 120 bp, synthetic construct
  source 1..120: mol_type = other DNA
acatgtctattcccttgattgtggtgttgatgtcacgggcgcatccgcacgccgaaacttgctaaattggacacaaaaaaatatgcgattatttttgtagttgatgaatgtgctgattgg

SEQ ID NO: 44949 - DNA, 120 bp, synthetic construct
  source 1..120: mol_type = other DNA
tcaggatagcgatgcctgcatcactgcaatggtgatggccgggtgacccttctgggctccacttccccagtagtgtctaataaagaccctgggtgactctgaccttgtgacgttggtcag

SEQ ID NO: 44950 - DNA, 120 bp, synthetic construct
  source 1..120: mol_type = other DNA
tggcaaggagcagttctgatgggggatgtgtcagctgccagaggctcagagccaaggcccctcccacatctcctgcctgcgtgcattcctcacatcctggccttgggccaaactgctcag

SEQ ID NO: 44951 - DNA, 120 bp, synthetic construct
  source 1..120: mol_type = other DNA
tgttcaggactcttaggtgcaaattttagaaactgaactcaaaccaacttacgcaaaaaggaaagggaaaagacaattcttggctcacacaactgagaactccaggggtaggatggcttc

SEQ ID NO: 44952 - DNA, 120 bp, synthetic construct
  source 1..120: mol_type = other DNA
tggaggctaggaaggccctgacaagctaatctttgcactggctgagaaagagttttctggaaaagacagatgagtttcaggagaaccctagaccttccagcaatgacagcagatggttgt

SEQ ID NO: 44953 - DNA, 120 bp, synthetic construct
  source 1..120: mol_type = other DNA
atcatccatccatccatcatccatccattcatccatcatccatccatccatccattcacccatcatccattcatccagccatcatccgtctatccatccatcatccatttattcatccat

SEQ ID NO: 44954 - DNA, 120 bp, synthetic construct
  source 1..120: mol_type = other DNA
agcgcaggagcaggctttgtgcacggcttcagcttttgtcctttattctagatgagcagttctcaaaacttgtggtcttgggaatcctctacactctaatttacgtggcgtttttaatgt

SEQ ID NO: 44955 - DNA, 120 bp, synthetic construct
  source 1..120: mol_type = other DNA
ggcttgacagaaaacagatggactcttgtagcggttttctgcattcacttgttttttcgtttgtttgtttgtttttcttttttagcctcccagggcttcctcgctatgtgatgccttgtt

SEQ ID NO: 44956 - DNA, 120 bp, synthetic construct
  source 1..120: mol_type = other DNA
gcaacagagcaagacttcgactcaaaaaaaaaaaaaaaaagagagctattgattagcaatgtctgccatgagtgcaggagggagagtaacagtgcagtgtgctgggattgatgaatgatg

SEQ ID NO: 44957 - DNA, 120 bp, synthetic construct
  source 1..120: mol_type = other DNA
tccgtcctccatcttcccaagctgtcttcttcctgtatctctgcattgtcttccctctgcttgtctgtttaccttccccttgctacaggaacccgtcttggattagggcccttcaatgac

SEQ ID NO: 44958 - DNA, 120 bp, synthetic construct
  source 1..120: mol_type = other DNA
catgtctttgaaagtccaagtgttcatttcttcaccggagcactggttcagcaagcttgcactgggtatctgctgggagttgggtgcttgctggcattggcacagtgctaacttcttggg

SEQ ID NO: 44959 - DNA, 120 bp, synthetic construct
  source 1..120: mol_type = other DNA
aggtctggtggagtgcatgggtgggtgggtgagtatgggtgggtcggctctggctcaggcagttcccgggtccatgcggagacccccaccccggaccagcccacatttagcctgcaacag

SEQ ID NO: 44960 - DNA, 120 bp, synthetic construct
  source 1..120: mol_type = other DNA
ctctctccccctagttttggaagaggggcctggaaatatgattctgagactctagccggggagcgagagttttgtaaatggcaccatctgtatgggtgccccagggcagatgggagaccc

SEQ ID NO: 44961 - DNA, 120 bp, synthetic construct
  source 1..120: mol_type = other DNA
tgtgccacctgacgagagtctggaaaatagcatgtaattcccaccgctgcctggctgcgcccatgcagttttcacagtaggcaaaaggtccctctgtcatttccacagcgcttaagtctc

SEQ ID NO: 44962 - DNA, 120 bp, synthetic construct
  source 1..120: mol_type = other DNA
tgttctgcattgcaggggaacgatcaggtccggtttgagctcagctgctactcactggccccccagataaaggtaggatgtggctcctccccttagcagggagcactagcatctgcagca

SEQ ID NO: 44963 - DNA, 120 bp, synthetic construct
  source 1..120: mol_type = other DNA
atatatatatattttttttttttctttttctggagactcgctctgtcacccaggctggagtgcagtggcacaatctcactgcaacctctgcctcccaagttcaagcaattctccctgact

SEQ ID NO: 44964 - DNA, 120 bp, synthetic construct
  source 1..120: mol_type = other DNA
cagtttcgaggtctttgtctgcagaggccaagcccaggcactgagatgggattggggcaggggccaagctgctccaggagctgggagtagggctgtggtcttcccatggctgctctgagg

SEQ ID NO: 44965 - DNA, 120 bp, synthetic construct
  source 1..120: mol_type = other DNA
ctgagccagtggcctaggccgggactgaccccatgtgatgggggattgaacttccaccccagctgcctacacacgtggcctctgtcccctgggctgaccccacagaggtgtggtcatctg

SEQ ID NO: 44966 - DNA, 120 bp, synthetic construct
  source 1..120: mol_type = other DNA
acaaattgtcaaatagcagagctattaagggagccgggttggtgaggtttctcccctggtctccttgatgatatagaatatgaagcgtgtttcatctttaagaataatgaattggagccc

SEQ ID NO: 44967 - DNA, 120 bp, synthetic construct
  source 1..120: mol_type = other DNA
cctccccaaagtattgggattgcaggtgtgagccaccacacccagctttggctaatttttaaatttttttttgtagagacagggtcttgctatactgcccagcctggctataattattat

SEQ ID NO: 44968 - DNA, 120 bp, synthetic construct
  source 1..120: mol_type = other DNA
aatttttgttatctttagtagagataaggttttaccatgttggccagactggtcttgaactcctgacctcaagtgagccactgcacctggccttgtaggctgttttaaaatgagtctcct

SEQ ID NO: 44969 - DNA, 120 bp, synthetic construct
  source 1..120: mol_type = other DNA
tcagtgcttcaggggtccttgagatgtagactcaaagtcttctggaaggaacctccaaggtcagcattgcagacacacggtcctgcagtttctctggggcatgtccagcaatagggtccc

SEQ ID NO: 44970 - DNA, 120 bp, synthetic construct
  source 1..120: mol_type = other DNA
gaatcctggagaaccccaaggtaatcccccaaaccccatctcctcccagctggccacctttggtggtagcagctccatgccgatgctgtctgatgtatttatagcctaatttgaaatttc

SEQ ID NO: 44971 - DNA, 120 bp, synthetic construct
  source 1..120: mol_type = other DNA
ggctgatggcccctgtgtgtggctgctgcctgctggtcacaggtttttctagttcatgctctgctgaccccacaacactcaggccagccaccctaattagccagtcagtcagctccaagg

SEQ ID NO: 44972 - DNA, 120 bp, synthetic construct; identical to SEQ ID NO: 33031
  source 1..120: mol_type = other DNA

SEQ ID NO: 44973 - DNA, 120 bp, synthetic construct; identical to SEQ ID NO: 33032
  source 1..120: mol_type = other DNA

SEQ ID NO: 44974 - DNA, 120 bp, synthetic construct
  source 1..120: mol_type = other DNA
tgttgatggggtaagagcgcttgaccttcttaccaaatggggctgctgagaactcagactgcagatgggaagcaatacgtgaatgtgtgcaaggtgttttttttttttttttttttggtg

SEQ ID NO: 44975 - DNA, 120 bp, synthetic construct
  source 1..120: mol_type = other DNA
atgtcatctgcccaccactttctgtcttttttcagaaccaagcgcctccaggtctctacacgaagacccaggacccagccaaagcccccaacacccctgacattctcgagatcgagttca

SEQ ID NO: 44976 - DNA, 120 bp, synthetic construct
  source 1..120: mol_type = other DNA
ccattcgtccacaaagtggctgcccacactggagctgggatgagagggagagaggctcgtggagaggcctggcccggctctggcgctcggctcttaccccggctaccacagaaaggagga

SEQ ID NO: 44977 - DNA, 120 bp, synthetic construct
  source 1..120: mol_type = other DNA
agttaatttatttgaagttttaatctaattattaactattttaaaggctaagaggctttctccagcagcagcaccaacaatgtcacctcttctcccgggcaggccccatctaaggcccca

SEQ ID NO: 44978 - DNA, 120 bp, synthetic construct
  source 1..120: mol_type = other DNA
aatggtggagcgtgaaattcaattagttcagggcctggttccaatttcacagcccctaaatgcaaaaggggcaaagagaatgggagggtgggggagagcgtttttattgcattttctctt

SEQ ID NO: 44979 - DNA, 120 bp, synthetic construct
  source 1..120: mol_type = other DNA
ctgagccttgcggtagcgcccgaacctaatggaccagttcttcccacaggggcaagcatggcgtgggccgtattgacatcgtggagaaccgcttcattggaatgaagtcccgaggtgagt

SEQ ID NO: 44980 - DNA, 120 bp, synthetic construct
  source 1..120: mol_type = other DNA
gtctctttgcttagggttgatttgaaaagataccacaaccaaatatcacctggccacggtatagtcacggccccatgtctctcaggctatttttactaagattctaaaatccaaagagag

SEQ ID NO: 44981 - DNA, 120 bp, synthetic construct
  source 1..120: mol_type = other DNA
accagtcaatgctggcattatcctgttgactccagaggtatctcagggctgcttgcaggcactaccaaatgatcaggattggcatacgtgatgaaagtgtattgccttccctattggaaa

SEQ ID NO: 44982 - DNA, 120 bp, synthetic construct
  source 1..120: mol_type = other DNA
ctggagtagctttctccgtattgtggctgttcacatgtcattatcacattatctttttaactctggaggggggctaattaagtgaagtaaatgaaatcagtggggaggagaaggggggca

SEQ ID NO: 44983 - DNA, 120 bp, synthetic construct
  source 1..120: mol_type = other DNA
cacctttcttggcagtaattatggtgtgattgaagctgctccacagagaactgctgacacctctgtctttttcctgtaaacacggggagatgaaaatagacacttggagctgctgtgtgt

SEQ ID NO: 44984 - DNA, 120 bp, synthetic construct
  source 1..120: mol_type = other DNA
cacctggaggacgctctgaacacttacctttgaggtaggtcccaaaggaagttggaatgtcagagcagcaggaacttgcagccttcttgttttccagatgggttgcctgggtctaagaga

SEQ ID NO: 44985 - DNA, 120 bp, synthetic construct
  source 1..120: mol_type = other DNA
taatttttttaattttttggtagagatggggtctcactatattgcccaggctggtcttggactcagctcaagcaatcctccctccttggcctcccaaagttctgggattacaggtgtgag

SEQ ID NO: 44986 - DNA, 120 bp, synthetic construct
  source 1..120: mol_type = other DNA
tttgaatattaggttggcagctaacagtcgggagaacacggtaccggattgatcctaatgcaagctctgacatttccgtgattctaagacttaaagatcaaagactggaggagttctcca

SEQ ID NO: 44987 - DNA, 120 bp, synthetic construct
  source 1..120: mol_type = other DNA
caaatcctttctgggtttttttcaagcagccactgtagaaagatgttagtaaattcccaggataactgagaacctgcccttttagtgatgtaacgtatggtggaagaaaggaagctctcg

SEQ ID NO: 44988 - DNA, 120 bp, synthetic construct
  source 1..120: mol_type = other DNA
gactgtcgtggccccagcatgaacataatgacagatgcattttgcagcaagctgggagtgaatgggtccggccggcttgtctcctgtcagacgactcattattattattatttttttttt

SEQ ID NO: 44989 - DNA, 120 bp, synthetic construct
  source 1..120: mol_type = other DNA
aaaatccaaccctcatgtggtgtaacagaggtccccaaactacagtccctgggtcaaatccagcccgtcacctgtttttgttcagctcatgagctaagaatagtttttacatttttattt

SEQ ID NO: 44990 - DNA, 120 bp, synthetic construct
  source 1..120: mol_type = other DNA
tttccttttaagcctcctaatcactgtaactcatctcaggatttcgagagggctcgatggttattggctggcgttatttctccctgccattgttccttgcagctttgaagccaagtttct

SEQ ID NO: 44991 - DNA, 120 bp, synthetic construct
  source 1..120: mol_type = other DNA
ataacagttctacctgtctggtgggtgaggactaaaagtatgagtatttgtaaagcacctggaacaatgtctggcagacgagtgcttattccagtgcgtgaaataactgcgagcgcccgg

SEQ ID NO: 44992 - DNA, 120 bp, synthetic construct
  source 1..120: mol_type = other DNA
tccaaagtcttgctgtgtggccttggacaggctctttccctctctgggcctctctccctgtgtacagtgagggctggcacagagcatcatgttcaaactgcaaatgcaaaacgctttgcg

SEQ ID NO: 44993 - DNA, 120 bp, synthetic construct
  source 1..120: mol_type = other DNA
cccagaaaggggagaggctaagagagtttctctcagagtgctgtctatgaggattcagggagctagcccagatcaaagcctgagcgcagtgctgcttatctatgcagaaatattctatct

SEQ ID NO: 44994 - DNA, 120 bp, synthetic construct
  source 1..120: mol_type = other DNA
cagagcacagagtgatggtcacagaggatatagacaccactatgctcccgtggaacttacaggctagctgggagaaaggcatggatcaaaccattaccagaatgtagaattagacaaggt

SEQ ID NO: 44995 - DNA, 120 bp, synthetic construct
  source 1..120: mol_type = other DNA
tatgggtttcttttgagatagctgggaaaaactaactggaaggccgccggacacttgggtctagagttgaggagaacccaggctgaagaccctggagcatcataggcattttgatgttct

SEQ ID NO: 44996 - DNA, 120 bp, synthetic construct
  source 1..120: mol_type = other DNA
aatacaactgagtcagtttagatcagttggggtaaatgtcaaattatcttctctctttctctctctggctctttcttccctccccctccaaatcaacagcctctaataatctgtccaacc

SEQ ID NO: 44997 - DNA, 120 bp, synthetic construct
  source 1..120: mol_type = other DNA
ttcaaggcctggtgaaggtcagggcccgggtcctgaacaaatcactggggccaggcagatgcagagacctcatttgttcttgtaaaaagtccactgtctacaaagaaccagtcagagggc

SEQ ID NO: 44998 - DNA, 120 bp, synthetic construct
  source 1..120: mol_type = other DNA
attttccatgacacactggcagtgggtgcccaggtttcaggatggattaggtaaggtctaactggttggacacatgaggggaaaggtgacttggtgggcccatctcgctgtgaatgctgg

SEQ ID NO: 44999 - DNA, 120 bp, synthetic construct
  source 1..120: mol_type = other DNA
actatgagctcctttgcagggcaggttaaacaaggaaatagcatagaggtggagagaagcctttgttttctgtcaccatacctgagctgtaggtctagctggaagccatcctagccacgt

SEQ ID NO: 45000 - DNA, 120 bp, synthetic construct
  source 1..120: mol_type = other DNA
agtggcctcttcatttctcctattgccagttaaacgctttgtcttcaacaatgacaaacaatgttttccccctaagataaattaattacattatcctgattggagggcaggaggggccag

SEQ ID NO: 45001 - DNA, 120 bp, synthetic construct
  source 1..120: mol_type = other DNA
ggggaggggagggagaggggggagaatggagagtgggggaaggatagacaagctaactatggctgtagaagaatagctgaatctttgtttactttataaatatagcataaaatgtcttta

SEQ ID NO: 45002 - DNA, 120 bp, synthetic construct
  source 1..120: mol_type = other DNA
tgtgactgctattatgaatggggagactgataggatgcttggtgagagggtacacaagtaagtagaagtttctttaactttttaagacaaaggagagctgagtatgcttataggcttaag

SEQ ID NO: 45003 - DNA, 120 bp, synthetic construct; identical to SEQ ID NO: 32964
  source 1..120: mol_type = other DNA

SEQ ID NO: 45004 - DNA, 120 bp, synthetic construct; identical to SEQ ID NO: 32965
  source 1..120: mol_type = other DNA

SEQ ID NO: 45005 - DNA, 120 bp, synthetic construct
  source 1..120: mol_type = other DNA
ctgggatcaagcaattctccttcctcagcctcctgagtagccgggaccacaggtgcccgccaccacacccagctgatttttttattttattttatttcattattattattattattatta

SEQ ID NO: 45006 - DNA, 120 bp, synthetic construct
  source 1..120: mol_type = other DNA
ccaggcagagggtctcctcacttctcagacggggcgtccgggcagagacgctcctcacatcccggacggggcggcagggcagaggtgctccccacatctcagacgatgggcggcagggca

SEQ ID NO: 45007 - DNA, 120 bp, synthetic construct; identical to SEQ ID NO: 32966
  source 1..120: mol_type = other DNA

SEQ ID NO: 45008 - DNA, 120 bp, synthetic construct; identical to SEQ ID NO: 32967
  source 1..120: mol_type = other DNA

SEQ ID NO: 45009 - DNA, 120 bp, synthetic construct; identical to SEQ ID NO: 32968
  source 1..120: mol_type = other DNA

SEQ ID NO: 45010 - DNA, 120 bp, synthetic construct
  source 1..120: mol_type = other DNA
gcagtgagccaagattgtgccactgcactccagactgggtgacagagcgagagtccgtcaaaaagaaagggaaaagaaaagaaaaaaaagaaagaaaaaataaagtagacacgatagaat

SEQ ID NO: 45011 - DNA, 120 bp, synthetic construct
  source 1..120: mol_type = other DNA
tgtgatagtttactgagaatgatgatttccaatttcatacatgtccctacaaaggacatgaactcaacatttcttatggctgcatagtattccatggtgtatatgtgccacattttctta

SEQ ID NO: 45012 - DNA, 120 bp, synthetic construct
  source 1..120: mol_type = other DNA
agtttcagctttctacatatggctagccagttttcccagcaccatttattaaatagggaatcctttccccatttcttgtttttctcaggtttgtcaaagatcagacagttgtaggtatgc

SEQ ID NO: 45013 - DNA, 120 bp, synthetic construct
  source 1..120: mol_type = other DNA
tttttcgcatgaagggttgttgaattttgtcaaaggctttttctgcatctattgagataatcatgtggtttttgtctttggctctgtttatatgctggattacatttattgatttgcata

SEQ ID NO: 45014 - DNA, 120 bp, synthetic construct
  source 1..120: mol_type = other DNA
gtctatcaattttgttgatcctttcaaaaaaccagctcctggattcattgattttttgaagggttttttgtgtctctatttccttgagttctgctctgattttagttatttcttgccttc

SEQ ID NO: 45015 - DNA, 120 bp, synthetic construct
  source 1..120: mol_type = other DNA
aattggagaatttagtccatttacacttaaagttaatattgttatgtgtgagtttgatcctgtcattatgatgttagctggtgattttgctcgttagttgatgcagtttcttcctagtct

SEQ ID NO: 45016 - DNA, 120 bp, synthetic construct
  source 1..120: mol_type = other DNA
ctttggaggaggagaggcgctctgatttttagagcttccagtttttctgttctgtttttttccccatctttgtggttttatctacttttggtgtttgatgatggtgatgtacagatgggt

SEQ ID NO: 45017 - DNA, 120 bp, synthetic construct
  source 1..120: mol_type = other DNA
ggcaatgcctagccctgcttcggctcgcgcaccgtgcgcgcacccactggcctgcgcccactgtctggcactccctagtgagatgaacccggtacctcagatggaaatgcagaaatcacc

SEQ ID NO: 45018 - DNA, 120 bp, synthetic construct; identical to SEQ ID NO: 32970
  source 1..120: mol_type = other DNA

SEQ ID NO: 45019 - DNA, 120 bp, synthetic construct
  source 1..120: mol_type = other DNA
ccagtactttgggagaccaaggcaggtggatggcttgagctcagaagttcaagaccagcctgggcaacacagtgagatccctaatcaaaaaagaaaaaaaaaaaaaatgaaagaaaagaa

SEQ ID NO: 45020 - DNA, 120 bp, synthetic construct
  source 1..120: mol_type = other DNA
gtctgtcttcttgcccccatcatcttttgaaatgcacagcctcaggctgggcgcagtggctcacacatgtaatcccagcactttgggaggccaagacaggtggatcacgaggtcaggagt

SEQ ID NO: 45021 - DNA, 120 bp, synthetic construct
  source 1..120: mol_type = other DNA
ttcatttcattcatttgatcttcaatcactgataccctttcttccagctgatcaaatcggctactgaagcttgtgcattcgtcacgtagttatcgtgccatggttttcagctccatcagg

SEQ ID NO: 45022 - DNA, 120 bp, synthetic construct
  source 1..120: mol_type = other DNA
ctcgctgctgccttgcagttcgatctcagactgctgtgcaagcagtaagcgaggctccatgggcatgggaccctctgatcctggtgcgggatataaactcctggtgtgccgtttgctaag

SEQ ID NO: 45023 - DNA, 120 bp, synthetic construct; identical to SEQ ID NO: 32961
  source 1..120: mol_type = other DNA

SEQ ID NO: 45024 - DNA, 120 bp, synthetic construct
  source 1..120: mol_type = other DNA
tcggcttgtagagtttctgctgagagatcagctgttaatctgatgggcttccctttgttggtaacccgacctttctctctggctgcccttaacattttttccttcatttcaactttggtg

SEQ ID NO: 45025 - DNA, 120 bp, synthetic construct
  source 1..120: mol_type = other DNA
gcagaacatcgaatattgctgaacagcaaatgttgcggcctgatcgttcctctggaattttcgtctcagagagttacccagctgtgtgaggtgtcagtctgcccctactagggggtgcct

SEQ ID NO: 45026 - DNA, 120 bp, synthetic construct
  source 1..120: mol_type = other DNA
ctggagaggatgtggagaaataggaagacttttacactgttggtgggaacgtaaactagttgaaccattgtggaagacagtgtggcgattcctcaaggatctagaactagaaataccatt

SEQ ID NO: 45027 - DNA, 120 bp, synthetic construct
  source 1..120: mol_type = other DNA
caacatggcacatgtatacatatgtaaaaaacctgcacgttgtacacatgtaccctagaacttaaagtataataaaaaaaataaaaaatgaagataccttcttcgatgtaatcaaacact

SEQ ID NO: 45028 - DNA, 120 bp, synthetic construct
  source 1..120: mol_type = other DNA
ttttggatgatggatatccgagttaccctgatttgataattatacattgcatgcatgtatcaaaatatcacatgtaggccgggcgtggtggctcacgcttgtaatcccaacactttggga

SEQ ID NO: 45029 - DNA, 120 bp, synthetic construct
  source 1..120: mol_type = other DNA
ccaatgagaacaaagacacaacataccagaatctctgggacacattcaaagcagtgtgtagagggaaatttatagcaataaatgcccataagagaaagcaggaaagatctaaaattgaca

SEQ ID NO: 45030 - DNA, 120 bp, synthetic construct
  source 1..120: mol_type = other DNA
tttcctaattgaataccctttatttccttctcctgcctaattgccctggccagaacttccaacactatgttgaataggagtggtgagagagggcatccctgtcttgtgccagttttcaaa

SEQ ID NO: 45031 - DNA, 120 bp, synthetic construct
  source 1..120: mol_type = other DNA
aattgacaaatgggatctaattaaactaaagagcttctgcacagcaaaagaaactaccatcagagtgaacaggcaacctacaaaatgggagaaaattttcgcaacctacttatctgacaa

SEQ ID NO: 45032 - DNA, 120 bp, synthetic construct
  source 1..120: mol_type = other DNA
aataataataaaataaaataaaaaataaaaaataaattaaaaaaaaaagtgtggctgccctaaaatgtttttgtcatccatatacaattgttgtctcgctttggtcctctttaacggatg

SEQ ID NO: 45033 - DNA, 120 bp, synthetic construct; identical to SEQ ID NO: 32962
  source 1..120: mol_type = other DNA

SEQ ID NO: 45034 - DNA, 120 bp, synthetic construct; identical to SEQ ID NO: 32963
  source 1..120: mol_type = other DNA

SEQ ID NO: 45035 - DNA, 120 bp, synthetic construct; identical to SEQ ID NO: 20394
  source 1..120: mol_type = other DNA

SEQ ID NO: 45036 - DNA, 120 bp, synthetic construct
  source 1..120: mol_type = other DNA
tttttacaattttcgaaaagtaaaaatttatattttaaaaaagcgtcttcaggccaggtactgtggctcacatctgtaatcccagcagtttgggaggccaaggtgggaggatcccttaag

SEQ ID NO: 45037 - DNA, 120 bp, synthetic construct; identical to SEQ ID NO: 20395
  source 1..120: mol_type = other DNA

SEQ ID NO: 45038 - DNA, 120 bp, synthetic construct
  source 1..120: mol_type = other DNA
tggtgaaacctcatctctactaaaactacaaaaattagccaggtgtgggggcgcatgcctgtaatcccagctactccgaaggctgaggcaggaggcaggagaatcacttgaacctgggag

SEQ ID NO: 45039 - DNA, 120 bp, synthetic construct; identical to SEQ ID NO: 20396
  source 1..120: mol_type = other DNA

SEQ ID NO: 45040 - DNA, 120 bp, synthetic construct
  source 1..120: mol_type = other DNA
gactcctacacaagttccaaaggccaccgtgtccgcggctttcggcctgagcgggacagcgggaagcgggtggaacggcctgcacggagtgggcagcgccccaggaatttgggggctgag

SEQ ID NO: 45041 - DNA, 120 bp, synthetic construct
  source 1..120: mol_type = other DNA
tgttatcattcctcacagtgaaaagagggccaaataagatattttcttgttagacacttttaagaagtgagtgaaccttccagaattttaagggggagcggggggggggggcatttttca

SEQ ID NO: 45042 - DNA, 120 bp, synthetic construct; identical to SEQ ID NO: 11012
  source 1..120: mol_type = other DNA

SEQ ID NO: 45043 - DNA, 120 bp, synthetic construct
  source 1..120: mol_type = other DNA
gaatttttttttttttttttttttttttttgagacagtgtctcactctctcacccaggctagagtgcagtggcacaatcaaaacacactgcagcctcgacctcctgggctcaagcaatcc

SEQ ID NO: 45044 - DNA, 120 bp, synthetic construct
  source 1..120: mol_type = other DNA
tatacacttaaaatgagcaaattttatgacatataaatatacctcaataaagctgttttggccagacacaggagggtgaggcgggcatatcacttgagcccaggagcttgagactagcct

SEQ ID NO: 45045 - DNA, 120 bp, synthetic construct; identical to SEQ ID NO: 20385
  source 1..120: mol_type = other DNA

SEQ ID NO: 45046 - DNA, 120 bp, synthetic construct
  source 1..120: mol_type = other DNA
caaatccaaataactataactgtcaaacacacataaacacacacacacacacattacacacacacacacacacacacacattacacacacacacacacacagagagagagaaggagggag

SEQ ID NO: 45047 - DNA, 120 bp, synthetic construct
  source 1..120: mol_type = other DNA
cggtaagaacccaactctagtttgaggcgcagtggatcacttaaggtcaggagttcgagccagcctgaccaacatggtgaaaccccatctctattaaaaaatatgtatatacaaaaatta

SEQ ID NO: 45048 - DNA, 120 bp, synthetic construct
  source 1..120: mol_type = other DNA
aagcaaaatgtataaattggagttcattaaaattacaaatgggccaggcatggtggctcaggtctgtaatcccagcactttaggaggccaacatgtgtggatcacctaaggacaagagtt

SEQ ID NO: 45049 - DNA, 120 bp, synthetic construct
  source 1..120: mol_type = other DNA
caccactgcactccagcctgggcaagagaggaagactccgtctcaaaaaaaaaagaaaggtcattttctgctacactatttataaagttaaaagtatggagaaaacctgcatgccaaccg

SEQ ID NO: 45050 - DNA, 120 bp, synthetic construct
  source 1..120: mol_type = other DNA
ggaaataaaagaggatacaaacaaatggaagaacattccatgctcatgggtaggaagaatcaatatcatgaaaatggccatactgctcaaggtaatttacagattcaatgccatccctat

SEQ ID NO: 45051 - DNA, 120 bp, synthetic construct
  source 1..120: mol_type = other DNA
ctacaatgaactcaaacaaatttacaagaaaaaaacaaccccatcaacaagtgggtgaaggatatgaacagacacttctcaaaagaagacatttatgcagccaaaaaacacgtgaaaaaa

SEQ ID NO: 45052 - DNA, 120 bp, synthetic construct; identical to SEQ ID NO: 6828
  source 1..120: mol_type = other DNA

SEQ ID NO: 45053 - DNA, 120 bp, synthetic construct; identical to SEQ ID NO: 6829
  source 1..120: mol_type = other DNA

SEQ ID NO: 45054 - DNA, 120 bp, synthetic construct; identical to SEQ ID NO: 6820
  source 1..120: mol_type = other DNA

SEQ ID NO: 45055 - DNA, 120 bp, synthetic construct
  source 1..120: mol_type = other DNA
agggtttcgccatgttggcccggatggagatttttcttttttaagtctctctctgtctagctggagtgcagcggtgcgatctgggttcactgcagcctctgtctccggggttcaagccat

SEQ ID NO: 45056 - DNA, 120 bp, synthetic construct
  source 1..120: mol_type = other DNA
ttgtatttttagtagagatggggtttcaccatgttgttcaggctggtctcgaactactaacctcagttgatccacccactttggcctcccaaagtgctgggattataagcgagagccgtc

SEQ ID NO: 45057 - DNA, 120 bp, synthetic construct; identical to SEQ ID NO: 6830
  source 1..120: mol_type = other DNA

SEQ ID NO: 45058 - DNA, 120 bp, synthetic construct; identical to SEQ ID NO: 6831
  source 1..120: mol_type = other DNA

SEQ ID NO: 45059 - DNA, 120 bp, synthetic construct; identical to SEQ ID NO: 6832
  source 1..120: mol_type = other DNA

SEQ ID NO: 45060 - DNA, 120 bp, synthetic construct; identical to SEQ ID NO: 6833
  source 1..120: mol_type = other DNA

SEQ ID NO: 45061 - DNA, 120 bp, synthetic construct; identical to SEQ ID NO: 6826
  source 1..120: mol_type = other DNA

SEQ ID NO: 45062 - DNA, 120 bp, synthetic construct
  source 1..120: mol_type = other DNA
ttcttttctttttcttttttttttttttaaggcagaattttactctgttgcccacgctggagtgcagcggtgcaatttcagctcactacaacctctgcctcccaggtttcagtgattctc

SEQ ID NO: 45063 - DNA, 120 bp, synthetic construct; identical to SEQ ID NO: 6814
  source 1..120: mol_type = other DNA

SEQ ID NO: 45064 - DNA, 120 bp, synthetic construct; identical to SEQ ID NO: 6836
  source 1..120: mol_type = other DNA

SEQ ID NO: 45065 - DNA, 120 bp, synthetic construct
  source 1..120: mol_type = other DNA
aggccgccctgtcagctggccggtccaagcctgtggctggagctggtgtgtgtttatctaataaagtcccacaggtgcctcaccgccgtgtctctctattgactgacactgctcggggtt

SEQ ID NO: 45066 - DNA, 120 bp, synthetic construct; identical to SEQ ID NO: 6817
  source 1..120: mol_type = other DNA

SEQ ID NO: 45067 - DNA, 120 bp, synthetic construct; identical to SEQ ID NO: 6818
  source 1..120: mol_type = other DNA

SEQ ID NO: 45068 - DNA, 120 bp, synthetic construct
  source 1..120: mol_type = other DNA
tagctgggatcacaggcgcccgccagcacacctggctaatttttgtgtttttttactagagacggggtttcaccatgttgtttaggctggtcttgaattctggcctcaggtgattcgccc

SEQ ID NO: 45069 - DNA, 120 bp, synthetic construct
  source 1..120: mol_type = other DNA
tgccccctttccccgggtgccccctgccctgcccctctgcctggtagcccctctgcaagcccggcccctcccgacgctcctggcttcctccgtgcccctttcctggcagcgggtcgccga

SEQ ID NO: 45070 - DNA, 120 bp, synthetic construct
  source 1..120: mol_type = other DNA
aacaacgcaccaacccaggagcatcgggggtccctgcctactttacacgtctttctgtgttagaataatttttttttttttgagacggactcttgctgtctcccccgctggagtgcattg

SEQ ID NO: 45071 - DNA, 120 bp, synthetic construct
  source 1..120: mol_type = other DNA
aatttttgtatttttagtagagaagggggttcagcatgttgtccaggttggtcttgaactcctgacctcaggtgatccagccactttggcctcacaaagtgctgggattataggcaagag

SEQ ID NO: 45072 - DNA, 120 bp, synthetic construct
  source 1..120: mol_type = other DNA
cagtatcaagacaagctggcccggcagcgctacgaggaccaactgaagcagcaggtgagctcagcctcccctgcgaggcgcctgcgtccctgagaacgtaggtggctttgtgggaccagt

SEQ ID NO: 45073 - DNA, 120 bp, synthetic construct; identical to SEQ ID NO: 6823
  source 1..120: mol_type = other DNA

SEQ ID NO: 45074 - DNA, 120 bp, synthetic construct
  source 1..120: mol_type = other DNA
taatttttttgtatcttcagtagagaaagggtttcactgtgttggccaggctggtcttgaacttcttgatctcattatccgcctgccttggccttccacagtgctgggattacaggcgtg

SEQ ID NO: 45075 - DNA, 120 bp, synthetic construct; identical to SEQ ID NO: 6824
  source 1..120: mol_type = other DNA

SEQ ID NO: 45076 - DNA, 120 bp, synthetic construct
  source 1..120: mol_type = other DNA
tacgccggccttggcctcccaaagtgctgggattacagacctggccagcctaaacgatttttaaaacaagttagagattttgggttagtcttgttttccaggaataaagtaccattttta

SEQ ID NO: 45077 - DNA, 120 bp, synthetic construct; identical to SEQ ID NO: 6825
  source 1..120: mol_type = other DNA

SEQ ID NO: 45078 - DNA, 120 bp, synthetic construct; identical to SEQ ID NO: 6812
  source 1..120: mol_type = other DNA

SEQ ID NO: 45079 - DNA, 120 bp, synthetic construct
  source 1..120: mol_type = other DNA
agcgagactctgtctcaaaaaaaaaaaaaaagaccctgctccttgcgtggactcttgagcactgcactgggtcgctgtgtgggtgaaacctgcagggcggaggctgttgccccatgtgtg

SEQ ID NO: 45080 - DNA, 120 bp, synthetic construct; identical to SEQ ID NO: 6827
  source 1..120: mol_type = other DNA

SEQ ID NO: 45081 - DNA, 120 bp, synthetic construct
  source 1..120: mol_type = other DNA
tctctccatttctctctttttccttttagagatgggttcttactctgagcccaggctggagtgcagtggtgtgattatagctcactgcagcctcgacctcccaggctcaagtgatcctcc

SEQ ID NO: 45082 - DNA, 120 bp, synthetic construct; identical to SEQ ID NO: 6811
  source 1..120: mol_type = other DNA

SEQ ID NO: 45083 - DNA, 120 bp, synthetic construct
  source 1..120: mol_type = other DNA
ggccggtcctggctgtgctttggggcagctccgtttctgtgtgttaccgagcatgtgtgtgcgttggtggctgttccgtggctgtggcaggtgacccaatggtgcttccccttcccctcc

SEQ ID NO: 45084 - DNA, 120 bp, synthetic construct; identical to SEQ ID NO: 6812
  source 1..120: mol_type = other DNA

SEQ ID NO: 45085 - DNA, 120 bp, synthetic construct; identical to SEQ ID NO: 6813
  source 1..120: mol_type = other DNA

SEQ ID NO: 45086 - DNA, 120 bp, synthetic construct; identical to SEQ ID NO: 6814
  source 1..120: mol_type = other DNA

SEQ ID NO: 45087 - DNA, 120 bp, synthetic construct; identical to SEQ ID NO: 6815
  source 1..120: mol_type = other DNA

SEQ ID NO: 45088 - DNA, 120 bp, synthetic construct; identical to SEQ ID NO: 6816
  source 1..120: mol_type = other DNA

SEQ ID NO: 45089 - DNA, 120 bp, synthetic construct
  source 1..120: mol_type = other DNA
aattgtattttaattttagattttctttttcttttttgagacacagtttctctcttgtcacccaggctggagtgcaatggcacgatcttcgctcactgcaacgtccctccacctcctggg

SEQ ID NO: 45090 - DNA, 120 bp, synthetic construct
  source 1..120: mol_type = other DNA
aggtggatgttgcagtgagctgagatggcaccattgcactacagcctgggcaacagagcaagactccgtctcaaaaaagaagaagaagaaggagaaggagagaggagaggagaaaggaga

SEQ ID NO: 45091 - DNA, 120 bp, synthetic construct; identical to SEQ ID NO: 11238
  source 1..120: mol_type = other DNA

SEQ ID NO: 45092 - DNA, 120 bp, synthetic construct; identical to SEQ ID NO: 12932
  source 1..120: mol_type = other DNA

SEQ ID NO: 45093 - DNA, 120 bp, synthetic construct; identical to SEQ ID NO: 21812
  source 1..120: mol_type = other DNA

SEQ ID NO: 45094 - DNA, 120 bp, synthetic construct
  source 1..120: mol_type = other DNA
cccagtaatgggatggctgggtcaaatcgtatttctagttcaagatctctgaggaatcgccacactgacttccacaatggttgaactagtttacagtcccaccaacagtgtaaaagtgtt

SEQ ID NO: 45095 - DNA, 120 bp, synthetic construct
  source 1..120: mol_type = other DNA
agatatagatcaatggaacagaatagagccctcagaaataacgccgcatatgtacaactatctgatcgttgacaaacctgagaaaaacaagcaatggggaaaggattccctatttaataa

SEQ ID NO: 45096 - DNA, 120 bp, synthetic construct
  source 1..120: mol_type = other DNA
aatgcaaatcatcattctccgtaaactatcgcaaggacaaaaaaaccaaacaccacatgttctcactcatagatgggaaccgaacaatgagaacacatggacacaggaaggggaacatca

SEQ ID NO: 45097 - DNA, 120 bp, synthetic construct; identical to SEQ ID NO: 21814
  source 1..120: mol_type = other DNA

SEQ ID NO: 45098 - DNA, 120 bp, synthetic construct
  source 1..120: mol_type = other DNA
accccgtctgggatgtgaggagccccgccgcccggcagccgccccatctgagaagtgaggagcccctccgcccagcagccgccccgtctgggaagccaggagcgtctccgtccggcagcc

SEQ ID NO: 45099 - DNA, 120 bp, synthetic construct; identical to SEQ ID NO: 8946
  source 1..120: mol_type = other DNA

SEQ ID NO: 45100 - DNA, 120 bp, synthetic construct
  source 1..120: mol_type = other DNA
ctgatatccagaatctacaaagaactcaaacaaatttacaagaaaaaaacaaccccatcaaaaagtgggtgaaggatatgaacagacacttctcaaaagaagacatttatgcagccaaaa

SEQ ID NO: 45101 - DNA, 120 bp, synthetic construct; identical to SEQ ID NO: 8947
  source 1..120: mol_type = other DNA

SEQ ID NO: 45102 - DNA, 120 bp, synthetic construct; identical to SEQ ID NO: 12709
  source 1..120: mol_type = other DNA

SEQ ID NO: 45103 - DNA, 120 bp, synthetic construct
  source 1..120: mol_type = other DNA
cccagaatctacaaggaacttaagcaaatttacaagaaaaagcaaccccattaaaaagtgggcaaaagattacatttattgatttgcgtatattgaaccagccttgcatcccagggatga

SEQ ID NO: 45104 - DNA, 120 bp, synthetic construct
  source 1..120: mol_type = other DNA
aaccaaaacagcatggtactggtaccaaaacagagatatagatcaatggaacagaacagagccctcagaaataacgccacatatctacaactatctgatctttgacaaacttgagaaaca

SEQ ID NO: 45105 - DNA, 120 bp, synthetic construct
  source 1..120: mol_type = other DNA
ccatggaatactatgcagccataaaaaatgatgagttcatgtccgttgtagggacatggatgaaattggaaatcatcatactcagtaaactatcgcaagaacaaaaaaccaaacaccaca

SEQ ID NO: 45106 - DNA, 120 bp, synthetic construct
  source 1..120: mol_type = other DNA
ggtgttatttctgaggcctctgttctgttccattggtctatatatctgttttgatacaagtaccatactgttgtagttaccgtagccttgtagtatagtttgaagtcaggtagtgtgatg

SEQ ID NO: 45107 - DNA, 120 bp, synthetic construct
  source 1..120: mol_type = other DNA
attgaggattttcgcattgatattcataagggatattggcctgaaatttcctttttctgttgtgtctccgccaggttttggtatcagggtgatgctggcctcataaaatgagttagggag

SEQ ID NO: 45108 - DNA, 120 bp, synthetic construct
  source 1..120: mol_type = other DNA
tgaacaaaggtctctggttttcctaggcagaggaccctgcggccttccgcagtgtttgtgtccctgattacttgagattagggagtggtgatgactcttaatgagcatgctgccctcaag

SEQ ID NO: 45109 - DNA, 120 bp, synthetic construct
  source 1..120: mol_type = other DNA
tctcctcacttctcagatggggcggccaggcagagacgctcctcacctcccagacggggtcgtggccaggcagagacgctcctcacatcccagacggggcagcggggcagaggcgctccc

SEQ ID NO: 45110 - DNA, 120 bp, synthetic construct
  source 1..120: mol_type = other DNA
gtaaaagtgttcccttttcaccacatccacaccaacatctatttttttttgattttttgattatggccattttgcaggagtgaggtggtattgcattgtggttttgatttacatttccct

SEQ ID NO: 45111 - DNA, 120 bp, synthetic construct
  source 1..120: mol_type = other DNA
atgaatctgggtgctcctgtattgggtgcctatatatttaggatagatagctcttcttgttgaattgatccctttaccattatgtaatgtccttctttgtctcttttgatctttgttggt

SEQ ID NO: 45112 - DNA, 120 bp, synthetic construct
  source 1..120: mol_type = other DNA
cgttaaagtctttaatccaccttgaattgatttttgtgtaaggtgtaaggaagagatccagtttcagctttctacatatggctagccagttttcccagcaccgtttattaaatagggaat

SEQ ID NO: 45113 - DNA, 120 bp, synthetic construct
  source 1..120: mol_type = other DNA
agccaaaagcacatgaaacaatgctcaccatcactggccatcagagaaatgcaaatcaaaaccacagtgagataccatctcacaccagttagaatggcaatcattaaaaagtcaggagac

SEQ ID NO: 45114 - DNA, 120 bp, synthetic construct; identical to SEQ ID NO: 26876
  source 1..120: mol_type = other DNA

SEQ ID NO: 45115 - DNA, 120 bp, synthetic construct
  source 1..120: mol_type = other DNA
agacagaaagtcaacaaggatatccttgttgaacaatatccttgatgaacatggaggcctgtcatgggatcgggggaggggggagggatagcattaggagatatacctaatgtaaatgac

SEQ ID NO: 45116 - DNA, 120 bp, synthetic construct; identical to SEQ ID NO: 26877
  source 1..120: mol_type = other DNA

SEQ ID NO: 45117 - DNA, 120 bp, synthetic construct; identical to SEQ ID NO: 26878
  source 1..120: mol_type = other DNA

SEQ ID NO: 45118 - DNA, 120 bp, synthetic construct; identical to SEQ ID NO: 45106
  source 1..120: mol_type = other DNA

SEQ ID NO: 45119 - DNA, 120 bp, synthetic construct; identical to SEQ ID NO: 45107
  source 1..120: mol_type = other DNA

SEQ ID NO: 45120 - DNA, 120 bp, synthetic construct
  source 1..120: mol_type = other DNA
caataacattattactatttaaattttggaatttgttttggtaagaacaaaatttgaagctatctaatgaagattgaaagtcgagctctccctccccctccccctccccctccccctccc

SEQ ID NO: 45121 - DNA, 120 bp, synthetic construct
  source 1..120: mol_type = other DNA
ccccatctgggaagtgaggagcgtctccgcccagcagccaccccatctgggaagtgaggagcgtctccgcccggcagccaccccgtccgggagggaggtgggggggggtcagccccctgc

SEQ ID NO: 45122 - DNA, 120 bp, synthetic construct
  source 1..120: mol_type = other DNA
atgaccctgccaaatacccctctgtgagaaacacccaagaattatcaataaaaaaataaattaaaaaaaaaaaaagaaagtcgagtaggatatagtaattaataacttgttacttgaatt

SEQ ID NO: 45123 - DNA, 120 bp, synthetic construct; identical to SEQ ID NO: 11874
  source 1..120: mol_type = other DNA

SEQ ID NO: 45124 - DNA, 120 bp, synthetic construct; identical to SEQ ID NO: 14636
  source 1..120: mol_type = other DNA

SEQ ID NO: 45125 - DNA, 120 bp, synthetic construct
  source 1..120: mol_type = other DNA
aataccatatgttctcacttataagtgggagctaagctatgagaatgcaaaacatacagaggtatataatggactgtagggactcaggaggaggggaggttaggaaggaggtgaaggata

SEQ ID NO: 45126 - DNA, 120 bp, synthetic construct; identical to SEQ ID NO: 24532
  source 1..120: mol_type = other DNA

SEQ ID NO: 45127 - DNA, 120 bp, synthetic construct
  source 1..120: mol_type = other DNA
actaccatgtgtcttcaccaaaaacaaaagacaattttagagaaaagattagttatgcaaaccatttttttttttcagacggagtctcgttctgtcgcccaggctggactacaggcgccc

SEQ ID NO: 45128 - DNA, 120 bp, synthetic construct
  source 1..120: mol_type = other DNA
actttgtccactgaacttaggagcaaccaactagcttcattatgttccttggttttccacgtatggtcaattgtattatgtatagtcactgaactccttgcctctcacgagcgatgattc

SEQ ID NO: 45129 - DNA, 120 bp, synthetic construct
  source 1..120: mol_type = other DNA
agctgaatatacctcctccagtgaagtctgagccctagcctttgcaggtgggaccccttacaagtttggtcttcctctctcagccctaaggtaaaatatatagttttcttatattttata

SEQ ID NO: 45130 - DNA, 120 bp, synthetic construct
  source 1..120: mol_type = other DNA
ttttatttcatgagcagtggtttgtatttctccttgaagaggtccttcacttcccttgtaagttggattcctaggtattttattctctttgaagcaattgtgaatgggagttcactcatg

SEQ ID NO: 45131 - DNA, 120 bp, synthetic construct
  source 1..120: mol_type = other DNA
atgagctgttgggcatacctcccagacggggtggtggccgggcagaggggctcctcacttcccagtaggggcggccgggcagaggcgcccctcacctcccggacggggcggctggccggg

SEQ ID NO: 45132 - DNA, 120 bp, synthetic construct
  source 1..120: mol_type = other DNA
ctgctccttgccctcgggccccgcggggtccgtccgctcctccagccgctgcctcccgggcggcactcgccggcgcggcggcaaagactgagacagctccgctgcccgctgaactccatc

SEQ ID NO: 45133 - DNA, 120 bp, synthetic construct
  source 1..120: mol_type = other DNA
ctttttgcgtagaggtgtttgtagtattctctgatggtattttgtatttctgtgggattggtggtgatatcccctttatcattttttattgcgtctatttgattcttctctcttttcttc

SEQ ID NO: 45134 - DNA, 120 bp, synthetic construct
  source 1..120: mol_type = other DNA
ttgcttggtagatcttcctccatgcttttattttgagcctatgtgtgtctctgcacgtgacatgggtttcctgaatacagcacactgatgagtcttgactctttatccagtttgccagtc

SEQ ID NO: 45135 - DNA, 120 bp, synthetic construct
  source 1..120: mol_type = other DNA
gataccctttcttccacttgattgcattggctcctgaggcttctgcattcttcacgtagttctcaagccttggctttcagctccatcagctcctttaagcacttctctgtattggttatt

SEQ ID NO: 45136 - DNA, 120 bp, synthetic construct
  source 1..120: mol_type = other DNA
ggttcccctactttcctagctgtatagccttgtgtgaatttatttttttctttctttctttcttttttttttttttttggagacagagtctcgctctgttgcccaggctggagtgcagtg

SEQ ID NO: 45137 - DNA, 120 bp, synthetic construct; identical to SEQ ID NO: 24096
  source 1..120: mol_type = other DNA

SEQ ID NO: 45138 - DNA, 120 bp, synthetic construct; identical to SEQ ID NO: 24097
  source 1..120: mol_type = other DNA

SEQ ID NO: 45139 - DNA, 120 bp, synthetic construct
  source 1..120: mol_type = other DNA
gcctcccaaagtgctgggattacaggcgtgagccccaacaccctgccctcatacagtagaatattaaagcaacaaaaataacgcaaaaacatgagtacatctcaaagttataatgttaac

SEQ ID NO: 45140 - DNA, 120 bp, synthetic construct; identical to SEQ ID NO: 20475
  source 1..120: mol_type = other DNA

SEQ ID NO: 45141 - DNA, 120 bp, synthetic construct
  source 1..120: mol_type = other DNA
acatgtaccctaaaacttaaagtataataataaaaaataaataaaataggaaaaaaaaaaccccactgggcagaaaacctttgttaactcgaaaattcacctatattagttggccagtca

SEQ ID NO: 45142 - DNA, 120 bp, synthetic construct
  source 1..120: mol_type = other DNA
ttctgagtcaaagaaaggggggacggacggcacctggaaaatcgggtcactccccgaatactgctcttttgcgacgggcttaaaaaacggcgcaccacgagattatatcccgcacctggc

SEQ ID NO: 45143 - DNA, 120 bp, synthetic construct
  source 1..120: mol_type = other DNA
tttagagaaaaaagaataaaaagaaatgagcaaagcctccaagaaatatgggactatgggaaaagaccaaatctacgtctgattggtgcacctgaaagtaacggggagaatggaaccaag

SEQ ID NO: 45144 - DNA, 120 bp, synthetic construct
  source 1..120: mol_type = other DNA
acataacaatgttaactttaaatgtaaatggactaaatgctccaattaaaagacacagactggcaaattggataaagagtcaagacccatcagtgtgctgtattcaggaaacccatctca

SEQ ID NO: 45145 - DNA, 120 bp, synthetic construct
  source 1..120: mol_type = other DNA
agctagcagaaggcaagaaataactaagagcagaactgaaggaaatagagacacaaaaaacccttcaaaaaattaatgaatccaggagctggttttttgaaaggatcaacaaaattgata

SEQ ID NO: 45146 - DNA, 120 bp, synthetic construct
  source 1..120: mol_type = other DNA
gagaaggaaataaagggtattcaattaggaaaagaggaagtcaaattgtccctgtttgcagacgacatgattgtatatctagaaaaccccactgtctcagcccaaaatctccttaagctg

SEQ ID NO: 45147 - DNA, 120 bp, synthetic construct
  source 1..120: mol_type = other DNA
accaaaagcaatggcaacaaaagacagaattgacaaatgggatctaattaaactaaagagcttctgcacagcaaaagaaactaccatcagagtgaacaggcaacctacaaaatgggagaa

SEQ ID NO: 45148 - DNA, 120 bp, synthetic construct; identical to SEQ ID NO: 12340
  source 1..120: mol_type = other DNA

SEQ ID NO: 45149 - DNA, 120 bp, synthetic construct; identical to SEQ ID NO: 12341
  source 1..120: mol_type = other DNA

SEQ ID NO: 45150 - DNA, 120 bp, synthetic construct
  source 1..120: mol_type = other DNA
actgggaggcaccccccagcaggggcacactgacacctcacacggcagggtactccaacagacctgcagctgagggtcttgtctgttagaaggaaaactaacaaacagaaaggatatcca

SEQ ID NO: 45151 - DNA, 120 bp, synthetic construct
  source 1..120: mol_type = other DNA
ttacagacaagcaaatgctgagagattttgtcaccaccaggcctaccctaaaagagctcctgaaggaagcactaaacatggaaaggaacaaccggtaccagccactgcaaaatcatgcca

SEQ ID NO: 45152 - DNA, 120 bp, synthetic construct
  source 1..120: mol_type = other DNA
agagattataacaaactatctctcagaccacagtgacatcaaactagaactcaggattaagaatctcactcaaaaccgctcaactacatggaaaccaaacaacctgctcctgaatgacta

SEQ ID NO: 45153 - DNA, 120 bp, synthetic construct
  source 1..120: mol_type = other DNA
atccagcagcacatccaaaagcttatccaccatgatccagtgggcttcatccctgggattcaaggctggttcaatatatgcaaatcaataaatgtaatccagcatataaacagaaccaaa

SEQ ID NO: 45154 - DNA, 120 bp, synthetic construct
  source 1..120: mol_type = other DNA
ccttagaaataacgccgcatgtctacaactatctgatctttgacaaacctgagaaaaacaagcaatggggaaaggattccctatttaataaatggtgctgggaaaactggctagccatat

SEQ ID NO: 45155 - DNA, 120 bp, synthetic construct
  source 1..120: mol_type = other DNA
ggaaggggaatatcacactctggggactgtggtggggtggggggcggggggagggatagcattgggagatatacctaatgctagatgacgagttagtgggtgcagcgcaccagcatggca

SEQ ID NO: 45156 - DNA, 120 bp, synthetic construct
  source 1..120: mol_type = other DNA
tgtgattctaagtaaattgtgaagtttcctggaaaggttagactcaccccttactgcctgcatcagtatggttccgtggaggtgagtgagaattactgtgtttcttgggaaaaaatacac

SEQ ID NO: 45157 - DNA, 120 bp, synthetic construct
  source 1..120: mol_type = other DNA
aggttgggctagtcacaatcacaatctttgagcctcagttccctcacctatataatgagggtaataatgcttaccattcagggttggttgtaaatattaaatgaaatcatgtatgtgaag

SEQ ID NO: 45158 - DNA, 120 bp, synthetic construct
  source 1..120: mol_type = other DNA
agggtctagagaagaagaacaaataatgtgcaccataaagttaggtgcaatgtaaagaacagtgttacctacctccttcctcctcctgtagatgtcaatgaggagtggacggaagaaaga

SEQ ID NO: 45159 - DNA, 120 bp, synthetic construct
  source 1..120: mol_type = other DNA
tttttgtatttttggtagagacagtgtttcaccatgttggccaggctggtttggaactcctggcatcaagtgatccgcccgcttcagcttcccaaagtgctgggattacaggtgtaagcc

SEQ ID NO: 45160 - DNA, 120 bp, synthetic construct
  source 1..120: mol_type = other DNA
atttcagtatcaagctctggggctagtggtgctcccccaacaaagccgcctaccactccagtgggtggtgggaacctaccttctgctccaccaccagccaacttcccccatgtgacaccg

SEQ ID NO: 45161 - DNA, 120 bp, synthetic construct
  source 1..120: mol_type = other DNA
agcacacctgcccccacctcacagccaggtgtcctacagccaagcaggccccaatggccctccagtctcttcctcttccaactcttcctcttccacttctcaagggtcctacccatgttc

SEQ ID NO: 45162 - DNA, 120 bp, synthetic construct
  source 1..120: mol_type = other DNA
aacgcgagaaagagcgcgagcgcgagaaggagcgcgagcttgaacgcagcgtggtgagtgcgtcactgcctgcgccaccgccttctttccctctttccttccttccctctgcgctgcgct

SEQ ID NO: 45163 - DNA, 120 bp, synthetic construct
  source 1..120: mol_type = other DNA
acgggaagcccgtgaacgagacctccgtgaccgcctcaagcctggctttgaggtgaagcctagtgagctggaacccctacatggggtccctgggccgggcttggatccctttccccgaca

SEQ ID NO: 45164 - DNA, 120 bp, synthetic construct
  source 1..120: mol_type = other DNA
tgcccaacccacaaacctatcttctgatttctctggattcaactcattttttgccattttctcctcttctccctctgcgaggtctttcatgtttttccccatctctagatctgtaacttt

SEQ ID NO: 45165 - DNA, 120 bp, synthetic construct
  source 1..120: mol_type = other DNA
ttgttccactttggacctccttgtgtttgtctgactcagttcccaggcttggatcccttcacccaaatgcatggtttgccccaaacctgccttctggtgacaccttcctcttctctgccc

SEQ ID NO: 45166 - DNA, 120 bp, synthetic construct
  source 1..120: mol_type = other DNA
gagcctgggaggagctgtgggcatggtacggctgggcaccgtgctcctgggggagggaacccctcctctcccaaccccttcggtaagagggggcaaggtcagagttggtctcaagtctct

SEQ ID NO: 45167 - DNA, 120 bp, synthetic construct
  source 1..120: mol_type = other DNA
ccaacaaatattctttcctcatgtctaggattatttctgtgaaaagacttgcaaaggtctaccagtagattgcacgtggttatgagtttttgggaagaggtgactgagagcatgcactgc

SEQ ID NO: 45168 - DNA, 120 bp, synthetic construct; identical to SEQ ID NO: 14794
  source 1..120: mol_type = other DNA

SEQ ID NO: 45169 - DNA, 120 bp, synthetic construct
  source 1..120: mol_type = other DNA
taactcattccgaccacctgctccaccctaactcattccgaccacctgatccaccctaactcattccaatcacctgctccaccctaactcattccgaccacctgctccaccctaactcat

SEQ ID NO: 45170 - DNA, 120 bp, synthetic construct; identical to SEQ ID NO: 14795
  source 1..120: mol_type = other DNA

SEQ ID NO: 45171 - DNA, 120 bp, synthetic construct; identical to SEQ ID NO: 14796
  source 1..120: mol_type = other DNA

SEQ ID NO: 45172 - DNA, 120 bp, synthetic construct; identical to SEQ ID NO: 14797
  source 1..120: mol_type = other DNA

SEQ ID NO: 45173 - DNA, 120 bp, synthetic construct
  source 1..120: mol_type = other DNA
tttcatatccagccaaactaagcttcataagtgaaggagaaataaaatccgttacagacagacaaatgctgagagattttgtcaccaccaggcctgccctaaaagagctcctgaaggaag

SEQ ID NO: 45174 - DNA, 120 bp, synthetic construct
  source 1..120: mol_type = other DNA
cataacgaaatgaaggcagaaataaagatgttctttgaaaccaatgagaacaaagacacaacataccagaatctctgggacacatttaaagcagtgtgtagagggaaatttatagcacta

SEQ ID NO: 45175 - DNA, 120 bp, synthetic construct
  source 1..120: mol_type = other DNA
taaacagaaccaaagacaaaaaccacgtgattatcccaatagatgcagaaaaggcctttgacgaaattcaacaatgcttcatgctaaaaactctcaataaattaggtattgatgggacgt

SEQ ID NO: 45176 - DNA, 120 bp, synthetic construct; identical to SEQ ID NO: 27150
  source 1..120: mol_type = other DNA

SEQ ID NO: 45177 - DNA, 120 bp, synthetic construct
  source 1..120: mol_type = other DNA
acatacataggtagtatatatacatacgtacatacatacataggtagtatatatacatatgtacatacatacataggtagtatatatacatatgtacatacatacataggtagtatatat

SEQ ID NO: 45178 - DNA, 120 bp, synthetic construct
  source 1..120: mol_type = other DNA
aaaatcacaagcattcttatacaccaataacagacaaacagtcaaatcatgagtgaacttccattcacaattgcttcaaaaaggaataaaatagctaggaatccaacttacaagggatgt

SEQ ID NO: 45179 - DNA, 120 bp, synthetic construct
  source 1..120: mol_type = other DNA
gcaatctacccatctgacaaagggctagtatccagaatctacaatgaactcaaacaaatttacaagaaacaaccccatcaacaagtgagcgaaggatatgaacagacacttctcaaaaga

SEQ ID NO: 45180 - DNA, 120 bp, synthetic construct; identical to SEQ ID NO: 27151
  source 1..120: mol_type = other DNA

SEQ ID NO: 45181 - DNA, 120 bp, synthetic construct; identical to SEQ ID NO: 27152
  source 1..120: mol_type = other DNA

SEQ ID NO: 45182 - DNA, 120 bp, synthetic construct
  source 1..120: mol_type = other DNA
tcgccacactgacttccacaatggttgaactagtttacagtcccaccaacagtgtaaaagtgttcctatttctccacatcctctccagcacctgttgtttcctgactttttaataattgc

SEQ ID NO: 45183 - DNA, 120 bp, synthetic construct
  source 1..120: mol_type = other DNA
ggcttaggattgacttggcaatgtgggctcttttttggttccatatgaactttaaagtagttttttccaattctgtgaagaaagtcattggtagcttgatggggatggcattgaatctgt

SEQ ID NO: 45184 - DNA, 120 bp, synthetic construct
  source 1..120: mol_type = other DNA
ttggttgtgtctctgcccggctttggtatcaggatgatgctggcctcataaaatgagttagggaggattccctctttttctatttattggaatagtttcagaaggaatggtaccagttcc

SEQ ID NO: 45185 - DNA, 120 bp, synthetic construct
  source 1..120: mol_type = other DNA
tggaataggtgtggtgtggtgctgaaaaaaatgtatattctgttgatttggggtggagagttctggagatgtctattaggtctgcttggtgcagagctgagttcaattcctgggtatcct

SEQ ID NO: 45186 - DNA, 120 bp, synthetic construct
  source 1..120: mol_type = other DNA
gttgaatattggcccccactctcttctggcttgtagggtttctgccgagagatccgctgttagtttgatgggctttcctttgagggtaacccgacctttctctctggctgcccttaacat

SEQ ID NO: 45187 - DNA, 120 bp, synthetic construct
  source 1..120: mol_type = other DNA
acttgaggaggcagtctgcccgttctcagatctccagctgcgtgctgggagaaccactgctctcttcaaatctgtcagacagggacacttaagtctgcagaggttactgctgtctttttg

SEQ ID NO: 45188 - DNA, 120 bp, synthetic construct
  source 1..120: mol_type = other DNA
aaagtgctgggattacaggcatgagccaccatacccggccagaatttagttttattaagccgtgttgaaagtgcacatgttcttagacccagcattttcacatctatatacataccttga

SEQ ID NO: 45189 - DNA, 120 bp, synthetic construct; identical to SEQ ID NO: 27153
  source 1..120: mol_type = other DNA

SEQ ID NO: 45190 - DNA, 120 bp, synthetic construct
  source 1..120: mol_type = other DNA
gcccctccaattcggcatgagatttgggcaggacacaaatccaaacaatatcagtgtcattagacaatttcgttgtcgtgtgaacatctcagagtgcattcacacaaatctagatagtat

SEQ ID NO: 45191 - DNA, 120 bp, synthetic construct
  source 1..120: mol_type = other DNA
tcagcaatcccactactgtgtatgtgcccagaggaaaagaaaagtcatattatgaaaaagacacttgcacatccatgtttatagcagcacaatttgcaattgcaaaaatacggaaccagc

SEQ ID NO: 45192 - DNA, 120 bp, synthetic construct
  source 1..120: mol_type = other DNA
gaaggacatgaacagacacctctcaaaagaagacattgatgcagccaaaagacacataaaaaaatgctcatcatcactagccatcagagaaatgcaaatcaaaaccacaatgagatacca

SEQ ID NO: 45193 - DNA, 120 bp, synthetic construct; identical to SEQ ID NO: 27155
  source 1..120: mol_type = other DNA

SEQ ID NO: 45194 - DNA, 120 bp, synthetic construct; identical to SEQ ID NO: 25424
  source 1..120: mol_type = other DNA

SEQ ID NO: 45195 - DNA, 120 bp, synthetic construct; identical to SEQ ID NO: 13986
  source 1..120: mol_type = other DNA

SEQ ID NO: 45196 - DNA, 120 bp, synthetic construct; identical to SEQ ID NO: 13987
  source 1..120: mol_type = other DNA

SEQ ID NO: 45197 - DNA, 120 bp, synthetic construct; identical to SEQ ID NO: 13988
  source 1..120: mol_type = other DNA

SEQ ID NO: 45198 - DNA, 120 bp, synthetic construct; identical to SEQ ID NO: 13989
  source 1..120: mol_type = other DNA

SEQ ID NO: 45199 - DNA, 120 bp, synthetic construct; identical to SEQ ID NO: 13990
  source 1..120: mol_type = other DNA

SEQ ID NO: 45200 - DNA, 120 bp, synthetic construct; identical to SEQ ID NO: 13991
  source 1..120: mol_type = other DNA

SEQ ID NO: 45201 - DNA, 120 bp, synthetic construct; identical to SEQ ID NO: 13992
  source 1..120: mol_type = other DNA

SEQ ID NO: 45202 - DNA, 120 bp, synthetic construct; identical to SEQ ID NO: 13993
  source 1..120: mol_type = other DNA

SEQ ID NO: 45203 - DNA, 120 bp, synthetic construct; identical to SEQ ID NO: 13994
  source 1..120: mol_type = other DNA

SEQ ID NO: 45204 - DNA, 120 bp, synthetic construct; identical to SEQ ID NO: 13995
  source 1..120: mol_type = other DNA

SEQ ID NO: 45205 - DNA, 120 bp, synthetic construct
  source 1..120: mol_type = other DNA
accctagcctgggcaacataaggcgttctctcgttctcttgctcgctctctttctctctctctatatatatatatatgcacacacacatatgtacatacacacacacacacatatatata

SEQ ID NO: 45206 - DNA, 120 bp, synthetic construct; identical to SEQ ID NO: 13996
  source 1..120: mol_type = other DNA

SEQ ID NO: 45207 - DNA, 120 bp, synthetic construct; identical to SEQ ID NO: 13997
  source 1..120: mol_type = other DNA

SEQ ID NO: 45208 - DNA, 120 bp, synthetic construct
  source 1..120: mol_type = other DNA
gcggggtccatcaccacctgcacagtaattcagtgcggcccatacagcttcccagcggggtccatcaccacatgggcagtaattcagtgcggcccatgcagcttcccagcggggtccatc

SEQ ID NO: 45209 - DNA, 120 bp, synthetic construct; identical to SEQ ID NO: 13998
  source 1..120: mol_type = other DNA

SEQ ID NO: 45210 - DNA, 120 bp, synthetic construct; identical to SEQ ID NO: 13999
  source 1..120: mol_type = other DNA

SEQ ID NO: 45211 - DNA, 120 bp, synthetic construct; identical to SEQ ID NO: 14000
  source 1..120: mol_type = other DNA

SEQ ID NO: 45212 - DNA, 120 bp, synthetic construct; identical to SEQ ID NO: 14001
  source 1..120: mol_type = other DNA

SEQ ID NO: 45213 - DNA, 120 bp, synthetic construct; identical to SEQ ID NO: 13972
  source 1..120: mol_type = other DNA

SEQ ID NO: 45214 - DNA, 120 bp, synthetic construct; identical to SEQ ID NO: 13973
  source 1..120: mol_type = other DNA

SEQ ID NO: 45215 - DNA, 120 bp, synthetic construct
  source 1..120: mol_type = other DNA
aatttgcagttgattaaaggagtaaggttctatctaaaacttggagtcaacagaaaggaatgtttaagataaggaggccctgtcagagtcagccacagggtcaaagagccctgtttagca

SEQ ID NO: 45216 - DNA, 120 bp, synthetic construct
  source 1..120: mol_type = other DNA
atgtgcggggacataccacttaatgtacatacaagcctgtcgtgtggcgcagttgatctcaacttttaaataaagaagatgagcatcgccccctccatcatccctgcccacacctctcac

SEQ ID NO: 45217 - DNA, 120 bp, synthetic construct; identical to SEQ ID NO: 13974
  source 1..120: mol_type = other DNA

SEQ ID NO: 45218 - DNA, 120 bp, synthetic construct; identical to SEQ ID NO: 13975
  source 1..120: mol_type = other DNA

SEQ ID NO: 45219 - DNA, 120 bp, synthetic construct; identical to SEQ ID NO: 13976
  source 1..120: mol_type = other DNA

SEQ ID NO: 45220 - DNA, 120 bp, synthetic construct
  source 1..120: mol_type = other DNA
gtttttcatttctgtctctagtaataagcagaagagggatgagtaaggggctttactggcccaaccagaaacaaaaagtaagaacccaaaactgtattctctcctttggacacctgtgct

SEQ ID NO: 45221 - DNA, 120 bp, synthetic construct
  source 1..120: mol_type = other DNA
gggagcccccgtggaaaggtggggaggatgtaggggtatcgggggcccctgtgggaaggtagggaggatgtgggggtgctgttgggagcctggctatttgcctaaccacagaatatctgt

SEQ ID NO: 45222 - DNA, 120 bp, synthetic construct; identical to SEQ ID NO: 13979
  source 1..120: mol_type = other DNA

SEQ ID NO: 45223 - DNA, 120 bp, synthetic construct; identical to SEQ ID NO: 13980
  source 1..120: mol_type = other DNA

SEQ ID NO: 45224 - DNA, 120 bp, synthetic construct; identical to SEQ ID NO: 13981
  source 1..120: mol_type = other DNA

SEQ ID NO: 45225 - DNA, 120 bp, synthetic construct; identical to SEQ ID NO: 13982
  source 1..120: mol_type = other DNA

SEQ ID NO: 45226 - DNA, 120 bp, synthetic construct
  source 1..120: mol_type = other DNA
ctacttaattcacaccggtgtcctgacgtgtaaacccctgtggagacctacttaattcacaccggtgtcctaattcacaccggtgtcctgatgtatagacccttgtggagacctacttaa

SEQ ID NO: 45227 - DNA, 120 bp, synthetic construct; identical to SEQ ID NO: 13983
  source 1..120: mol_type = other DNA

SEQ ID NO: 45228 - DNA, 120 bp, synthetic construct
  source 1..120: mol_type = other DNA
gactcctatgtatacctatttaattcacaccgggtgtcctggcgtgtaaacccctgtgtagatctacttaattcacacccagcatcctgacctgtagacccctgtggcgacctacttaat

SEQ ID NO: 45229 - DNA, 120 bp, synthetic construct; identical to SEQ ID NO: 24915
  source 1..120: mol_type = other DNA

SEQ ID NO: 45230 - DNA, 120 bp, synthetic construct; identical to SEQ ID NO: 35381
  source 1..120: mol_type = other DNA

SEQ ID NO: 45231 - DNA, 120 bp, synthetic construct
  source 1..120: mol_type = other DNA
aaaagacctgagtgaaaactgattcattcttctaggttacatgaatttaccttaaaaatcattcctactggctgggtgtggtggctcacgcctgtaatcctagcactttgggaggctgag

SEQ ID NO: 45232 - DNA, 120 bp, synthetic construct; identical to SEQ ID NO: 35382
  source 1..120: mol_type = other DNA

SEQ ID NO: 45233 - DNA, 120 bp, synthetic construct
  source 1..120: mol_type = other DNA
aaaatgctatcacatgtctaaggtagatctactcaaatgtaaaagatgaatagaaaaaaatgtgactattggccaggcacggtggcttatgcctgtagtcccagcactttgggaggctga

SEQ ID NO: 45234 - DNA, 120 bp, synthetic construct; identical to SEQ ID NO: 35383
  source 1..120: mol_type = other DNA

SEQ ID NO: 45235 - DNA, 120 bp, synthetic construct
  source 1..120: mol_type = other DNA
ttgggtgcactcaccattgttccatctgtaagggtgcacccttctatacagaagtaccttgcaccgctgagaattaaaaagaaaattgtatattcgaatgctattcctttagcagcactg

SEQ ID NO: 45236 - DNA, 120 bp, synthetic construct; identical to SEQ ID NO: 13574
  source 1..120: mol_type = other DNA

SEQ ID NO: 45237 - DNA, 120 bp, synthetic construct; identical to SEQ ID NO: 13575
  source 1..120: mol_type = other DNA

SEQ ID NO: 45238 - DNA, 120 bp, synthetic construct
  source 1..120: mol_type = other DNA
ctatgggagctgggaatggcaaatccacccagcagtactttgtctcactttcctaactcaaaaaccaaactgcttgctcatggccattttcttaagtgtgtacatctacacatatacaca

SEQ ID NO: 45239 - DNA, 120 bp, synthetic construct
  source 1..120: mol_type = other DNA
acacctaggcctgtcgtggggtggggggaggggggagggatagcattaggagatatacctaatgtaaaggacgagttaatgggggcagctcaccaacatggcacatgtatacatatgtaa

SEQ ID NO: 45240 - DNA, 120 bp, synthetic construct
  source 1..120: mol_type = other DNA
atgggcacttgggttggttccaagtctttgctattgtgaatagtgccacaataaacatacgtgtgcatgtgtctttatagcagcatgatttataatcctttgggtatatacccagtaatg

SEQ ID NO: 45241 - DNA, 120 bp, synthetic construct
  source 1..120: mol_type = other DNA
ttcagctttctacatatggctagccagttttcccagcaccatttattaaatagggaatcttttccccatttcttgtttttgtcaggtttgtcagatggttgtagatgtgtggtattcttt

SEQ ID NO: 45242 - DNA, 120 bp, synthetic construct; identical to SEQ ID NO: 24975
  source 1..120: mol_type = other DNA

SEQ ID NO: 45243 - DNA, 120 bp, synthetic construct; identical to SEQ ID NO: 24976
  source 1..120: mol_type = other DNA

SEQ ID NO: 45244 - DNA, 120 bp, synthetic construct
  source 1..120: mol_type = other DNA
actctctctctctgggatctcctctctatctctgaatctctctttctctctcactatcactaagatctcctctctttctctttctctctctctctctccctctctctgtctctctcaaat

SEQ ID NO: 45245 - DNA, 120 bp, synthetic construct; identical to SEQ ID NO: 19790
  source 1..120: mol_type = other DNA

SEQ ID NO: 45246 - DNA, 120 bp, synthetic construct
  source 1..120: mol_type = other DNA
ggtagccataagggcaatcccaaaagagcccccagatttgtaactgcccaatgggttcaccttgtttcctaagtgaagttaaggagatttaacccaggatataccatatatataccctta

SEQ ID NO: 45247 - DNA, 120 bp, synthetic construct; identical to SEQ ID NO: 13116
  source 1..120: mol_type = other DNA

SEQ ID NO: 45248 - DNA, 120 bp, synthetic construct; identical to SEQ ID NO: 13117
  source 1..120: mol_type = other DNA

SEQ ID NO: 45249 - DNA, 120 bp, synthetic construct; identical to SEQ ID NO: 13118
  source 1..120: mol_type = other DNA

SEQ ID NO: 45250 - DNA, 120 bp, synthetic construct; identical to SEQ ID NO: 24087
  source 1..120: mol_type = other DNA

SEQ ID NO: 45251 - DNA, 120 bp, synthetic construct; identical to SEQ ID NO: 24088
  source 1..120: mol_type = other DNA

SEQ ID NO: 45252 - DNA, 120 bp, synthetic construct; identical to SEQ ID NO: 24089
  source 1..120: mol_type = other DNA

SEQ ID NO: 45253 - DNA, 120 bp, synthetic construct; identical to SEQ ID NO: 24090
  source 1..120: mol_type = other DNA

SEQ ID NO: 45254 - DNA, 120 bp, synthetic construct; identical to SEQ ID NO: 24091
  source 1..120: mol_type = other DNA

SEQ ID NO: 45255 - DNA, 120 bp, synthetic construct; identical to SEQ ID NO: 35580
  source 1..120: mol_type = other DNA

SEQ ID NO: 45256 - DNA, 120 bp, synthetic construct; identical to SEQ ID NO: 9182
  source 1..120: mol_type = other DNA

SEQ ID NO: 45257 - DNA, 120 bp, synthetic construct; identical to SEQ ID NO: 24695
  source 1..120: mol_type = other DNA

SEQ ID NO: 45258 - DNA, 120 bp, synthetic construct
  source 1..120: mol_type = other DNA
attccctctttttctattgattggaatagtttcagaaggaatggtagcagttcctccttgtacctctgatagaatttggctgtgaatccatctggtcctggactccttttggttggtaaa

SEQ ID NO: 45259 - DNA, 120 bp, synthetic construct
  source 1..120: mol_type = other DNA
taaacgttagacctaaaaccataaaaaccctagaagaaaacctaggcattaccattcaggacataggcatgggcaaggacttcatgtccaaaacaccaaaagcaatggcaacaaaagaca

SEQ ID NO: 45260 - DNA, 120 bp, synthetic construct
  source 1..120: mol_type = other DNA
gacgagttagtgggtgcagcacaccagcatggcacatgtatacatatgtaactaacctgcacaatgtgcacatgtaccctaaaacttaaagtataataaaaaataaataaatttaaaaaa

SEQ ID NO: 45261 - DNA, 120 bp, synthetic construct; identical to SEQ ID NO: 24696
  source 1..120: mol_type = other DNA

SEQ ID NO: 45262 - DNA, 120 bp, synthetic construct; identical to SEQ ID NO: 24697
  source 1..120: mol_type = other DNA

SEQ ID NO: 45263 - DNA, 120 bp, synthetic construct; identical to SEQ ID NO: 24698
  source 1..120: mol_type = other DNA

SEQ ID NO: 45264 - DNA, 120 bp, synthetic construct; identical to SEQ ID NO: 24699
  source 1..120: mol_type = other DNA

SEQ ID NO: 45265 - DNA, 120 bp, synthetic construct; identical to SEQ ID NO: 17034
  source 1..120: mol_type = other DNA

SEQ ID NO: 45266 - DNA, 120 bp, synthetic construct
  source 1..120: mol_type = other DNA
aggaaaagaggaagtcaaattgtccctgtttgcagacgacatgattgtttatctagaaaaccccatggtctcagcccaaaatctccttaagctgataagcaacttcagcaaagtctcagg

SEQ ID NO: 45267 - DNA, 120 bp, synthetic construct
  source 1..120: mol_type = other DNA
acaacatgggagaaaattttcacaacctactcatctgacaaagggctaatatccagaatctacaatgaactcaaacaaatttacaagaaaaaaacaaacaaccccatcaaaaagtgggcg

SEQ ID NO: 45268 - DNA, 120 bp, synthetic construct; identical to SEQ ID NO: 17035
  source 1..120: mol_type = other DNA

SEQ ID NO: 45269 - DNA, 120 bp, synthetic construct
  source 1..120: mol_type = other DNA
ggccgacagggtgccactgcactccagcctcagtgacagagtgagaatcagtctcaaaaaaaaaaacaaaaaaaaaacttacaaagagctcagccttgaattatctagcccagttgactg

SEQ ID NO: 45270 - DNA, 120 bp, synthetic construct; identical to SEQ ID NO: 11123
  source 1..120: mol_type = other DNA

SEQ ID NO: 45271 - DNA, 120 bp, synthetic construct
  source 1..120: mol_type = other DNA
acctgggaggtggaggttgcggtgagctgagatccttaccactgcactccaacctgggtgacagcaagaccctgtctcaaaaaataaaaataaaaaaaatttttaaaattttgtgggtta

SEQ ID NO: 45272 - DNA, 120 bp, synthetic construct
  source 1..120: mol_type = other DNA
acccaagatttcccaccataaaacgtctagaaatgctagataaaaataaagatcttttaaaaagtacatagtttgggctgggtgtggtggctcacgcctgtaatcccagcactttgggag

SEQ ID NO: 45273 - DNA, 120 bp, synthetic construct; identical to SEQ ID NO: 33753
  source 1..120: mol_type = other DNA

SEQ ID NO: 45274 - DNA, 120 bp, synthetic construct; identical to SEQ ID NO: 30101
  source 1..120: mol_type = other DNA

SEQ ID NO: 45275 - DNA, 120 bp, synthetic construct; identical to SEQ ID NO: 30102
  source 1..120: mol_type = other DNA

SEQ ID NO: 45276 - DNA, 120 bp, synthetic construct
  source 1..120: mol_type = other DNA
gtgctaggattacaggcgtgagccaccatgcctggccagcttgtttttttaatggaaaagaagattccctgatattgaacatttttcccaggtaatgggacagatatgtaaaatctgtct

SEQ ID NO: 45277 - DNA, 120 bp, synthetic construct
  source 1..120: mol_type = other DNA
atggtgaaaccctgtctctactaacaatacaaaaaaaaaaaaattagctgaatgtggtggtgcacatctgtaatcccagcttcttgtgaggctgaggcacaggaggtgtgaaggttgaac

SEQ ID NO: 45278 - DNA, 120 bp, synthetic construct
  source 1..120: mol_type = other DNA
ccacctcagcttcccaagtagctgagaatacaggcatgagccaccgtacctagacagcatcattttataagtgtaatagcatttttagtacaacactgttgatgctgtctcttttttgtt

SEQ ID NO: 45279 - DNA, 120 bp, synthetic construct
  source 1..120: mol_type = other DNA
tctagtttgacttcttttgaaggtgataattttcctgcatgattgcctgaattttgaaaaaaattggtaaagttggctgggcacagcagctcacgcctgtaatcccagcactttgggagg

SEQ ID NO: 45280 - DNA, 120 bp, synthetic construct; identical to SEQ ID NO: 20587
  source 1..120: mol_type = other DNA

SEQ ID NO: 45281 - DNA, 120 bp, synthetic construct
  source 1..120: mol_type = other DNA
agttattttttcctaattgtaaaattaatgtgcatttaatgcagagaacttggaaaataaaaacacaaagaagctcttcctctccccctccccctctccctctccccacggtctccctct

SEQ ID NO: 45282 - DNA, 120 bp, synthetic construct
  source 1..120: mol_type = other DNA
agccgagatcgcaccattgcactccagcctgggaaatgagagcgaaactccatctcaaaaaaaaaaaaaaaaaggaaactagatccctggaataaaagatagaagtgggtttttacggcc

SEQ ID NO: 45283 - DNA, 120 bp, synthetic construct
  source 1..120: mol_type = other DNA
ggctgacagagtgagactctgtctccaaaaataaaaataaaataaaataaagcaacagtaaaataagatgcttctacagttctttcatttaggttggaaaaatttcccctggtaagttcc

SEQ ID NO: 45284 - DNA, 120 bp, synthetic construct; identical to SEQ ID NO: 31530
  source 1..120: mol_type = other DNA

SEQ ID NO: 45285 - DNA, 120 bp, synthetic construct
  source 1..120: mol_type = other DNA
gttcttctgcctcagcctcctgagtagctgggactacaggcgcgtgccaccatgcccagttaatttttttcttttttttttttttttgtatttttagtagagaaggggtttcaccatctt

SEQ ID NO: 45286 - DNA, 120 bp, synthetic construct
  source 1..120: mol_type = other DNA
ccattctgtgggttgcctgttcactctggtggtggtttcttttgctgtgcagaagttctttagtttaattagacaccatttgtcaattttgtcttttgttgccattgcttttggtgtttt

SEQ ID NO: 45287 - DNA, 120 bp, synthetic construct
  source 1..120: mol_type = other DNA
cttccagtttttgcccattcagtatgatattggctgtgggtttctcatagatagctcttagtattttgagatacgtcccatcaatacctaatttattgagagtttttagcatgaagggtt

SEQ ID NO: 45288 - DNA, 120 bp, synthetic construct
  source 1..120: mol_type = other DNA
agggctttttgtgtctctatctccttcagttctgctctgatcttagttatttcttgccttctgctagcttttcaacgtgtttgctcttgcttctctagttcttttaattgtgttgttagg

SEQ ID NO: 45289 - DNA, 120 bp, synthetic construct
  source 1..120: mol_type = other DNA
gtttcctgaatacagcacactgatgggtcttgactctttatccaatttgccagtctgtgtcttttaattggagcatttagcccatttacattgaaggttaatattgttatgtgtgaattt

SEQ ID NO: 45290 - DNA, 120 bp, synthetic construct; identical to SEQ ID NO: 34251
  source 1..120: mol_type = other DNA

SEQ ID NO: 45291 - DNA, 120 bp, synthetic construct
  source 1..120: mol_type = other DNA
acggcaaccatccgatttctcaatcttttccccacctttcctccctttctattccacaaaaccgccattgtcatcccggcccgttctcaatgagctgttgggtacacctcccagaggggg

SEQ ID NO: 45292 - DNA, 120 bp, synthetic construct
  source 1..120: mol_type = other DNA
gtgaaccagactccgtctgcaaacccggcacctcgggaggccgaggctggcagatcactcgcggttaggagctggagaccagcccggccaacacagcgaaaccccgtctccacgaaaaaa

SEQ ID NO: 45293 - DNA, 120 bp, synthetic construct
  source 1..120: mol_type = other DNA
agcggaaatgtgctgcgggctggagtgggggggctgaaaacaaggaaaacacaatcaacagcgcgcttggattttataaaataaaaccctgcaaaaactatatgtaaaaagtgaaactaa

SEQ ID NO: 45294 - DNA, 120 bp, synthetic construct
  source 1..120: mol_type = other DNA
gtcagcaacaacactctattgagaagccaacactccatggagaagggggctttaagcaaaaaagaactctcctcaacttgaagaagagtgtggcaagctccctggctggggatgtgtgag

SEQ ID NO: 45295 - DNA, 120 bp, synthetic construct
  source 1..120: mol_type = other DNA
tgcctatgtgcacactgacctgggatgccgtcaggggcttcatgtggccatgcgcctgtgcctcatacctctccaggtcaggcttcttatagctggaaagcaggaacgcaacagcatctg

SEQ ID NO: 45296 - DNA, 120 bp, synthetic construct
  source 1..120: mol_type = other DNA
agtgaggcttcctagaaagctgggtgtgggatgctgttgagtgggcctggctctcttccactcgccctgatgttcccagaaccacccacaggtggcatcccatttcagggcgagctccag

SEQ ID NO: 45297 - DNA, 120 bp, synthetic construct
  source 1..120: mol_type = other DNA
attacaggcatgagccaccatgcctggtcaaagagccatttctttccatgatcatttgtgtaactcagagtgaaacttgggcaggattaatgttcaggataaggttctgaaacaccaata

SEQ ID NO: 45298 - DNA, 120 bp, synthetic construct
  source 1..120: mol_type = other DNA
acctaagacaaaaggaaggcaatgcctagtgttggcaaaaggtatcagatagcagcagaaacctcaagttacccttgccccctctgccctcggcctctgggtccagtcagtgatgttggt

SEQ ID NO: 45299 - DNA, 120 bp, synthetic construct
  source 1..120: mol_type = other DNA
atctgagcaccccagtgagaagagctgagctggcaaaatcttcccttaacataaaggttagaaaatgtctatctcagcccttaggtcacatacttttttttccattgcaaagactgggaa

SEQ ID NO: 45300 - DNA, 120 bp, synthetic construct
  source 1..120: mol_type = other DNA
cttcgtcttttcctgcagaaaacatttcggcagaatttctctttgagtgaatcttagctatagaagcaggagggcttttagggctgaggtgtgaatgagaacagagtaagggatgacata

SEQ ID NO: 45301 - DNA, 120 bp, synthetic construct
  source 1..120: mol_type = other DNA
ccggaaggtggagcttgtagtgagacaagtcacaccactccactgcactacagcctgggtgacaagagggaaactcagtctaaaaaagaaaaagaaagtaataataaataaataaagcag

SEQ ID NO: 45302 - DNA, 120 bp, synthetic construct
  source 1..120: mol_type = other DNA
tttgtcttagaagtatccactgattctttttctgcagggattagaagcactcaggtatttgcccagcacacaaagcaagtgttgactacattcattactgcttggtatcaacaaccccag

SEQ ID NO: 45303 - DNA, 120 bp, synthetic construct
  source 1..120: mol_type = other DNA
ctgactttgcacccaattccacagcctggcactgcctggaagtccgtgcagtatcccaaggtctctgttccaagttcctgggaaggtggaaagagaggaagaggaaactgtaagccaaga

SEQ ID NO: 45304 - DNA, 120 bp, synthetic construct
  source 1..120: mol_type = other DNA
caaggcaatgatgtcacctttctacatttactgctaacagtattgctcaggctgtttaaaagttgtcagggcaatattctgtgtgacgcgttctgctgcccctatattcagactgaaatt

SEQ ID NO: 45305 - DNA, 120 bp, synthetic construct
  source 1..120: mol_type = other DNA
caggaaacaagacacctgcacagcttcctaacgtgatcctctgtcgttcaatctcagggttcaacaactcccactgcaaagaaactgtttccctatgtgtccagtcaaaccagccacact

SEQ ID NO: 45306 - DNA, 120 bp, synthetic construct
  source 1..120: mol_type = other DNA
gctcattcaacagataacttctgaatgcacttgatgtctcaggttagatgctggggataccgcggggaggggaagttccacctccacaggtgctttccaccttctgtccccattttggaa

SEQ ID NO: 45307 - DNA, 120 bp, synthetic construct
  source 1..120: mol_type = other DNA
gacttcctattctatgtaattaacactgctgtcttgagtggctctcaggcttttctctcaatgtgaaatagtaaacagatactactttcatctctcaggatggggaaagccgtgctacag

SEQ ID NO: 45308 - DNA, 120 bp, synthetic construct
  source 1..120: mol_type = other DNA
ggaacatactgatatggaaaggtaccagcagcactgcaaaattaaaaagcaagtacaaaatcgcatgtgctgggatttattcgtgcaaaaatctccgcctgtatctgaatacagcatttc

SEQ ID NO: 45309 - DNA, 120 bp, synthetic construct
  source 1..120: mol_type = other DNA
aaaaaaattatccattctgtatttgtactttttgctacgttgcccaggttggagtgcagtggctattcacaggcacgatcatagcacactacagcctcaaactcctggactcaaatgatc

SEQ ID NO: 45310 - DNA, 120 bp, synthetic construct
  source 1..120: mol_type = other DNA
cgagatcaagccactgcactccagcccgggaaacagagggagactccatctcaaataaataaataaataaacaaacaaacataaaaagctatttacattacttgggaagctgggaggtca

SEQ ID NO: 45311 - DNA, 120 bp, synthetic construct
  source 1..120: mol_type = other DNA
ctttaatgagcacagagccatgtgcatttatagaccccgcaattacagtgcttccgggtttcttagtgactggcatggcttctcctagacgtaggaaagagacaactgtcacttgctcag

SEQ ID NO: 45312 - DNA, 120 bp, synthetic construct
  source 1..120: mol_type = other DNA
agtctcctggagcagagcatgggttttggatgtaaggcttttagcaggaaagtgacacaatctgattcacatttaagtgatctctttggctgctgcatgagaatgggctgtagggatgat

SEQ ID NO: 45313 - DNA, 120 bp, synthetic construct
  source 1..120: mol_type = other DNA
aatcaaagaaacagacaagggggaaatactggtgagagactgaaatgaggacttaacacaagcaatgttggattggggtatatggaaattacttgatggcactggccaaaccaagttcag

SEQ ID NO: 45314 - DNA, 120 bp, synthetic construct
  source 1..120: mol_type = other DNA
ctacgaggattcaaggcttgtgtggctacttcctgtgattacgtgagatgcttagtatggcacctgtacacagtaagtgcccaatgaatgctggtgatttttattatcacctaattgaca

SEQ ID NO: 45315 - DNA, 120 bp, synthetic construct
  source 1..120: mol_type = other DNA
accagaaaatttcaacatgggagactggggatggggctgtgcaagccttttaatatcaagcacacacatgcatgtgtgcagtatgtttctttaacatctgacagcagtttcattccacca

SEQ ID NO: 45316 - DNA, 120 bp, synthetic construct
  source 1..120: mol_type = other DNA
tgtgtaacacacaaagacagaggcagtaccaccagaaccccaaggaccatccacaaggaaaaaggagagaagaaagcccatggagactaagcagcagcagcagcaaggaaactacagtgt

SEQ ID NO: 45317 - DNA, 120 bp, synthetic construct
  source 1..120: mol_type = other DNA
ggactctggggatattactccacctcactgcacttggcttttcctgaggaaagctgggatgatgacagtgctgcctcacggaacagctacagagtggaactagacgatctgtggcaagtg

SEQ ID NO: 45318 - DNA, 120 bp, synthetic construct
  source 1..120: mol_type = other DNA
tattaaatatgcattaagagtcagtgtgtgtaaaggttaagaaaatagactctggatccaccagcctgggttacatcccaattccattactgaatacctgtgtgaccttgggccagttgc

SEQ ID NO: 45319 - DNA, 120 bp, synthetic construct
  source 1..120: mol_type = other DNA
acatgtcacttccacagtgatgcacagtgcctgtgccactaaagtccgggaattacatttcagactggaaacaaacatcagtcttcccactgaccattttcttttaggttcaatctaatt

SEQ ID NO: 45320 - DNA, 120 bp, synthetic construct
  source 1..120: mol_type = other DNA
cagaggactactgtccacaggaatggatgaccaagagcatgtgagacctttaaaacccagtgcttacaacacaaatgtcctctaataagagaatggtgaaaagttggggaaaaaaatcac

SEQ ID NO: 45321 - DNA, 120 bp, synthetic construct
  source 1..120: mol_type = other DNA
cgtttcatgcctttctcttttaaattataacttcctgaaagacaaggaccatatctccaccttttaagatagaacactcaagagtggcatgggctcaagggtgatccagttgttgcttcc

SEQ ID NO: 45322 - DNA, 120 bp, synthetic construct
  source 1..120: mol_type = other DNA
ggccccaaagctgagaatctagccccaaaggtgcctaccatcctcggcctatggttgcctatagctttcttttcaaaatgcaatcttatacagacccccaaagaaaaaaatagataaaag

SEQ ID NO: 45323 - DNA, 120 bp, synthetic construct
  source 1..120: mol_type = other DNA
cttaaaaattaaaaattcatttccacagtcacactagctgcatttgaagtgctcactagctacatgtgactagcggctatcacactgggcagtgcagatacagaacactgccatcattcc

SEQ ID NO: 45324 - DNA, 120 bp, synthetic construct
  source 1..120: mol_type = other DNA
ctttgctcacagtttaactcaagcgctttgttaccacgttcatctgaccactatatctctgatactctttatgaatacacacaggaaaaactgccacgaatgctcttgtctggtagcaca

SEQ ID NO: 45325 - DNA, 120 bp, synthetic construct
  source 1..120: mol_type = other DNA
gctcatgcctgtaatcccaccactttgggaggctgaggcaggtggatcacctgacgtcaggagttctagaccagcctggaaaacatgatgaaaccctgtctctaccaaaaatacaaaaat

SEQ ID NO: 45326 - DNA, 120 bp, synthetic construct
  source 1..120: mol_type = other DNA
caagctctccacaacaagagtggcctggcatagtggcaaaatgtggatcattttttccaaggccaacgttcctttgctctacagatacttcgtttgggcaaagatcacacttaaaaatta

SEQ ID NO: 45327 - DNA, 120 bp, synthetic construct
  source 1..120: mol_type = other DNA
tcctgaaatactctccgtaatcctgagtgttgctggcatgcggtctgcagctgctgctagcatcctccctattttagtgctctgctggctccaagggtaatgatgttaatacctcttatt

SEQ ID NO: 45328 - DNA, 120 bp, synthetic construct
  source 1..120: mol_type = other DNA
acatgggaaagggaagtcttaagtgtgacgtgctattcctgggatatgtattaggcaaatatgaagcaaacagacaattcactcttctgagtatcagtggtcagcacttcctagaagact

SEQ ID NO: 45329 - DNA, 120 bp, synthetic construct
  source 1..120: mol_type = other DNA
ttgtttaaaagaaatgtacaccttttccaataatcctcttgctttagattttccacatagaagtctgagcaggcagagatgtccacatgtagatccagaggtttgcagcagagaccctgc

SEQ ID NO: 45330 - DNA, 120 bp, synthetic construct
  source 1..120: mol_type = other DNA
tgaaacaaacaaaatacccaacaacaacaaaccagacacgtccaagatggggaaatttactaatcacaaagatggatgtgtccaaaatgcaaactgtcagaagcctgtaaccccgtaacg

SEQ ID NO: 45331 - DNA, 120 bp, synthetic construct
  source 1..120: mol_type = other DNA
cactattctagaagaacaatgcttctcaaactttaatggacatatgaatcacccgaggaccttgttaaaatagagcttctgactagtcggtctaggatgaggtttgagagtctgcaggtc

SEQ ID NO: 45332 - DNA, 120 bp, synthetic construct
  source 1..120: mol_type = other DNA
ggttgatgggatgggagggaacaaaatatggaataatactagtacaacctaactgagaagtctatccacaaaaggtactatgacctttaaactggattttcaatggctaacttactcaga

SEQ ID NO: 45333 - DNA, 120 bp, synthetic construct
  source 1..120: mol_type = other DNA
aaatcacgctggccgcaaggctgtcctcaaggagctcctaatcaatcaagaagggctcttcaaatacaaactggcacactaatggtttattccaaattaaagttgccaggtaaaatacag

SEQ ID NO: 45334 - DNA, 120 bp, synthetic construct
  source 1..120: mol_type = other DNA
tcacaacatgtgccccttccctccttatcttcagcatttctctcaaccatctccactcacctatcatcctctttatccctaatctaagctactagtggtctccacccttaccagcagcca

SEQ ID NO: 45335 - DNA, 120 bp, synthetic construct
  source 1..120: mol_type = other DNA
taccagcatggtctctaggtgatgagactaaggttctgttgtttagcagtaaaatcttttgagaaggtgataatagttctcttggtaagaaaagggcctggatggtcccacagtgctcta

SEQ ID NO: 45336 - DNA, 120 bp, synthetic construct
  source 1..120: mol_type = other DNA
tctgagttcttctgggctaattacagagggattataaagaactgttgcagtcccttcggccaaagacaccgatatttgctgcaccccttccagttgggagatcatgccttcaatggaatg

SEQ ID NO: 45337 - DNA, 120 bp, synthetic construct
  source 1..120: mol_type = other DNA
tggcacatatttcacagtggcactgccttgttccagggaaaccttcatgctgatgatgcctttcaaattggaaatcctgtcctcaatggacttcacacatgactggcaagtcatgcccaa

SEQ ID NO: 45338 - DNA, 120 bp, synthetic construct
  source 1..120: mol_type = other DNA
ggaatttcatagttctgcctgtgactcagtgtcaccgccctcctgggtgttcaggagagctgtagtcattacctgaaatttcaggtacatcacttaattaaagaacctgttttcttaaca

SEQ ID NO: 45339 - DNA, 120 bp, synthetic construct
  source 1..120: mol_type = other DNA
agcttgcaggactggaagttgctctgggtgagtcggtgaatgagtgttgagtagatgtgaagacttaggacactgcactactgtcgattttataaacactgtaaacttaggctacactaa

SEQ ID NO: 45340 - DNA, 120 bp, synthetic construct
  source 1..120: mol_type = other DNA
atatgtgcagtccatcattgactaaagcatcatgactgtatagtaaggatgacatggtataacaatattaacagacaaatgactagccacctcggacacctacctggaaacgtctacgtc

SEQ ID NO: 45341 - DNA, 120 bp, synthetic construct
  source 1..120: mol_type = other DNA
acatgacaaaccaactttagtacattactagcaacagctcacaatttttcaattcggacagggcttggcagggaaagcttgtctcttctccacatagcaccactgggggtggcctgaatg

SEQ ID NO: 45342 - DNA, 120 bp, synthetic construct
  source 1..120: mol_type = other DNA
aaccccaaaccataacagcagcccttaatttctagaatgttgattctatgtttctgccaaaagggtttgcagtagtactgaaagcaatttcttattatcaaacactactcagaggccccc

SEQ ID NO: 45343 - DNA, 120 bp, synthetic construct
  source 1..120: mol_type = other DNA
cactcttggattcccatcaaccttaaataggataccagtcagtcccctgctgcctatcctcaagaattctttcactttgaaggatgtataacacccataacaacttatgaggcaaacatg

SEQ ID NO: 45344 - DNA, 120 bp, synthetic construct
  source 1..120: mol_type = other DNA
gcatccaggccagtgggggttggtctctaaaacccccactgaggaagaatcaatgtcccatattaacctctatgaacattaagtatacagggggataaacgtaaatatcagtagagaaaa

SEQ ID NO: 45345 - DNA, 120 bp, synthetic construct
  source 1..120: mol_type = other DNA
tggaggaaaaaactctcctgatgagttttaaaaaacaaacacaggtttagatacaagaaagctccggctggcatctggcgggagtaataataatggccatcttacagttgtacaggaagg

SEQ ID NO: 45346 - DNA, 120 bp, synthetic construct
  source 1..120: mol_type = other DNA
tctctgaaaaaaaggcagcagccccagtcaggggcttatagatgaagccatctccctgggacagatcacctggggcaaatggtggctgtgggtgcagcttcagcagtctcaaaggtccct

SEQ ID NO: 45347 - DNA, 120 bp, synthetic construct
  source 1..120: mol_type = other DNA
aatcgatcaagcagaagaaagaatatcagcgactgaagatcaacttaatgaaataaagcgtgaagacaagatagagaaaaaagaatgaaaaggaacaaacaaagcctccaagaaatataa

SEQ ID NO: 45348 - DNA, 120 bp, synthetic construct
  source 1..120: mol_type = other DNA
ggataaagagtcaagactcattgatgtgctgtattcaggagacccacctcatgtgcaaacacacacataggctcgaaatacagggatggaggaagatttaccaagcaaatggaaagcaaa

SEQ ID NO: 45349 - DNA, 120 bp, synthetic construct
  source 1..120: mol_type = other DNA
aaaagatcaacaaaatagatagaccgctagccagactaataaagaagaaaagagagaggaatcaaatcgatgcaataaaaaatgataaaggagatatcaccaccgatcccacagaaatac

SEQ ID NO: 45350 - DNA, 120 bp, synthetic construct
  source 1..120: mol_type = other DNA
aacagctatttatgacaaacccagagccaatatcacagtgaatgggcaaaaactggaagcactccttttgaaaactggcacaagacaaggatgccctctctcaccactcctattcaacac

SEQ ID NO: 45351 - DNA, 120 bp, synthetic construct
  source 1..120: mol_type = other DNA
gaacagaacatgggcctcagaaataacaccacacatctacaaccatccgatctttgacaaacctgacaaaagcaatggggaaaggattccctatttaataaatggtcttgggaaaactgg

SEQ ID NO: 45352 - DNA, 120 bp, synthetic construct
  source 1..120: mol_type = other DNA
atggagccataaaaaaggatgagttcatgttctttgcagggacatggatgaagctggaaaccaccattctcagcaaactaacacaagaacagaaaaccaaacagtgcatgttctcactca

SEQ ID NO: 45353 - DNA, 120 bp, synthetic construct
  source 1..120: mol_type = other DNA
tcacaaactataagacagggtatcgtctccaaggagcacttcacaatattatcttagaaaacccattcacaatctcgtgctacacagctttataatcaaccgtttcagagaatgtgctgc

SEQ ID NO: 45354 - DNA, 120 bp, synthetic construct
  source 1..120: mol_type = other DNA
ttttcctttattttagaagggatatatctgtgccagccaagtcatcctgatttcaactaggcaaaaataaaaccgaacccaccctggcacaatggctcatacctgtaatcccagcacttc

SEQ ID NO: 45355 - DNA, 120 bp, synthetic construct
  source 1..120: mol_type = other DNA
agaagtcaacagagtcatgagtaaggaggcttaagcagttgtttctggaaacaaagggtaattctgtatacagctggaacaactttctagtaacctccaaccatttcccacctgccaaga

SEQ ID NO: 45356 - DNA, 120 bp, synthetic construct
  source 1..120: mol_type = other DNA
tcatcagacggacctgggattaaatttttcaggaaacctaagctctcactcagctttctcgtctgttaaaggtggactgatgatacctactaaagttgttaaaatgattaagtgacaaga

SEQ ID NO: 45357 - DNA, 120 bp, synthetic construct
  source 1..120: mol_type = other DNA
tgttttttatatagagtatatgttacttttataatcagagctttagaaaaaatagagctgccaggcacggtggctcacatctataatcccagcactttgggagggggaggcaggaggatc

SEQ ID NO: 45358 - DNA, 120 bp, synthetic construct
  source 1..120: mol_type = other DNA
aaattgtatctatcacctcacttccctcccctaaaaccactcgaacctctgtgtagaagctacccaaacgggcagccactgaataattctacatttcatatttttaaatttgcctaggaa

SEQ ID NO: 45359 - DNA, 120 bp, synthetic construct
  source 1..120: mol_type = other DNA
acacaagagacatggagagaaacctccatctttaaaatgggtccaggcccttccaggctttttagcccatctgcaattgcactgacctgactggaactcatttcccaggttccattcaaa

SEQ ID NO: 45360 - DNA, 120 bp, synthetic construct
  source 1..120: mol_type = other DNA
ttcctaggcaacatgacttgtattttcaagaaggtgtaagaaagttccatgtttcctgtagctttgttttcccttggaccaaaggcttgacttcagtaagaactgactgcacaaactggc

SEQ ID NO: 45361 - DNA, 120 bp, synthetic construct
  source 1..120: mol_type = other DNA
tatgggagcccatgtaaatacatcaggtgcatctgtgattgctttctagtgattcttcaggtcttgcttatctatgtctctcccttcctgaaaggatctatcaggagcctcacatgccct

SEQ ID NO: 45362 - DNA, 120 bp, synthetic construct
  source 1..120: mol_type = other DNA
gtaaacacagtggcttctcctttgctcccatagaatctaagagacgtgtggaacagccaaggcatgggccaccttcctaggctacagtattaagtccaaactcctctttctagcaccttc

SEQ ID NO: 45363 - DNA, 120 bp, synthetic construct
  source 1..120: mol_type = other DNA
gctctagcagcccagccttcagaacagaggggagtgttaaccaaagcagattattcacagcctgagagccgtatttaagtgtatgcacaacagaagaccaggagaggagcacaagacaca

SEQ ID NO: 45364 - DNA, 120 bp, synthetic construct
  source 1..120: mol_type = other DNA
ggacctcttccatctctactcattccttgtacactcatccaggccaggagaagtatacctttcttagctcactcaggctgctatcacaaaataccttagactgggtaatttataagcaac

SEQ ID NO: 45365 - DNA, 120 bp, synthetic construct
  source 1..120: mol_type = other DNA
atcttctttcaaacccacatgtaaatgtttagcaaatcctgttagttccaccaacaaaatgcatccagcatctaatgacttcaacacatccacaagaaccctggtccaagccaccagctc

SEQ ID NO: 45366 - DNA, 120 bp, synthetic construct
  source 1..120: mol_type = other DNA
ttttaacaactatctccccagttaggatataagtttcacaagtgcaggaatccttcacatttttttttttaaggacagggtttcactctgtcacccaagctggagtgcagtggcatgatc

SEQ ID NO: 45367 - DNA, 120 bp, synthetic construct; identical to SEQ ID NO: 13735
  source 1..120: mol_type = other DNA

SEQ ID NO: 45368 - DNA, 120 bp, synthetic construct; identical to SEQ ID NO: 13736
  source 1..120: mol_type = other DNA

SEQ ID NO: 45369 - DNA, 120 bp, synthetic construct
  source 1..120: mol_type = other DNA
ctttctactttaaccaatcaattattctctttgttttgcttccctgaacacttacaaagtctttccctcattccccctagatggagccctgaactatgtagtctggcactgcccaattca

SEQ ID NO: 45370 - DNA, 120 bp, synthetic construct
  source 1..120: mol_type = other DNA
atccttaatgcttagtttatcactatctaggctttttccagcatgtacctccaaactcttccagcctctaccctttacccagttccaaagccaactctgcattttcagggatctgttata

SEQ ID NO: 45371 - DNA, 120 bp, synthetic construct
  source 1..120: mol_type = other DNA
cctaaatgcctctttccatttccagtcctctggacctttatacatgctggtctctgccttcaatgcccttctctccatgctcctgtgtgcccaatcaatgcctgctcttcctgaaagacc

SEQ ID NO: 45372 - DNA, 120 bp, synthetic construct
  source 1..120: mol_type = other DNA
tatcaccagtttattatacaaaatacagctaagaaaccaccacatggaaaagatagggcaaaatatgggaatggaggtttccaggagcttccatatcctttccaggaaccaccttcccag

SEQ ID NO: 45373 - DNA, 120 bp, synthetic construct
  source 1..120: mol_type = other DNA
caggtctctactcaaatcctaccttccaagagaaatcattccctgaccacctacttaaaacagcatcttcctctccacccatgtcaatccctatcttattcccttattctgctttctttt

SEQ ID NO: 45374 - DNA, 120 bp, synthetic construct
  source 1..120: mol_type = other DNA
ttgtaagactctcacggcacgttagtaaatgtgtatgccttctctcctattaatctgccatttgtcagttgatttttcagtgacgcttcacggggcacaaaagttttcccttaactccta

SEQ ID NO: 45375 - DNA, 120 bp, synthetic construct
  source 1..120: mol_type = other DNA
caaacagaacgtccaccactaggaaaccatgaataaactatgatgcgtccaaactgtgcagaggttgcactgaattagacagttagtgaaacaatctctaagatatatcgttaaactgaa

SEQ ID NO: 45376 - DNA, 120 bp, synthetic construct
  source 1..120: mol_type = other DNA
ggctgtgatctgtctctcctgctcaggcatcgtcccgcacggacaccgaattcttctctgatctggctcagagcaaaaggtcacctggtcggtggaggagagcggggtgttaaagtcccg

SEQ ID NO: 45377 - DNA, 120 bp, synthetic construct; identical to SEQ ID NO: 25404
  source 1..120: mol_type = other DNA

SEQ ID NO: 45378 - DNA, 120 bp, synthetic construct; identical to SEQ ID NO: 25405
  source 1..120: mol_type = other DNA

SEQ ID NO: 45379 - DNA, 120 bp, synthetic construct; identical to SEQ ID NO: 13593
  source 1..120: mol_type = other DNA

SEQ ID NO: 45380 - DNA, 120 bp, synthetic construct; identical to SEQ ID NO: 13594
  source 1..120: mol_type = other DNA

SEQ ID NO: 45381 - DNA, 120 bp, synthetic construct; identical to SEQ ID NO: 3605
  source 1..120: mol_type = other DNA

SEQ ID NO: 45382 - DNA, 120 bp, synthetic construct; identical to SEQ ID NO: 13596
  source 1..120: mol_type = other DNA

SEQ ID NO: 45383 - DNA, 120 bp, synthetic construct
  source 1..120: mol_type = other DNA
ttgttcttttcttgtaaatttgtttgagttcattgtagattctggatgagtatgttgcaaaaagtttctcccattctgtaggatgcctgttcactctgatggtggtttcttttgctgtgc

SEQ ID NO: 45384 - DNA, 120 bp, synthetic construct
  source 1..120: mol_type = other DNA
cttgatcatggtggataagctttttgatgtgttgctggattcggtttgccagtattttattgaggatttttgcatcaatgttcatcaaggatattggtctaaaattctctttttttgttg

SEQ ID NO: 45385 - DNA, 120 bp, synthetic construct
  source 1..120: mol_type = other DNA
gacagtttgttataatttctgttcttttacatttgctgaggagtgctttacttccaactatgtggtcaattttggaataagtgtaatgtggtgctgagaataacgtatattctgttgatt

SEQ ID NO: 45386 - DNA, 120 bp, synthetic construct
  source 1..120: mol_type = other DNA
cccgacctttctctctggctgcccttaacattttttccttcatttcaacttttggtgaatgtgacaattatgtgtcttgaagttgctcttctcaaggagtatctttgtggcgttctctgt

SEQ ID NO: 45387 - DNA, 120 bp, synthetic construct; identical to SEQ ID NO: 13597
  source 1..120: mol_type = other DNA

SEQ ID NO: 45388 - DNA, 120 bp, synthetic construct; identical to SEQ ID NO: 13598
  source 1..120: mol_type = other DNA

SEQ ID NO: 45389 - DNA, 120 bp, synthetic construct; identical to SEQ ID NO: 13599
  source 1..120: mol_type = other DNA

SEQ ID NO: 45390 - DNA, 120 bp, synthetic construct; identical to SEQ ID NO: 13582
  source 1..120: mol_type = other DNA

SEQ ID NO: 45391 - DNA, 120 bp, synthetic construct; identical to SEQ ID NO: 13583
  source 1..120: mol_type = other DNA

SEQ ID NO: 45392 - DNA, 120 bp, synthetic construct; identical to SEQ ID NO: 13584
  source 1..120: mol_type = other DNA

SEQ ID NO: 45393 - DNA, 120 bp, synthetic construct; identical to SEQ ID NO: 13585
  source 1..120: mol_type = other DNA

SEQ ID NO: 45394 - DNA, 120 bp, synthetic construct; identical to SEQ ID NO: 13586
  source 1..120: mol_type = other DNA

SEQ ID NO: 45395 - DNA, 120 bp, synthetic construct; identical to SEQ ID NO: 13587
  source 1..120: mol_type = other DNA

SEQ ID NO: 45396 - DNA, 120 bp, synthetic construct
  source 1..120: mol_type = other DNA
tcctcggcctcccaaagtactgggattacaggcatgagccaccacacccagcccataaaattctttagcatgaacctttgatatgtatatttaaaacattggtatacatgtgctatcatt

SEQ ID NO: 45397 - DNA, 120 bp, synthetic construct
  source 1..120: mol_type = other DNA
aatgagctgttgggcacacctcccggacggggtggtggccaggcagaggggctcctcacttcccagtaggggcggctgggcagaggcgcccctcacctcccggacggggcggctggccgg

SEQ ID NO: 45398 - DNA, 120 bp, synthetic construct
  source 1..120: mol_type = other DNA
agaccagcccgggcaacacagcgaaaccccgtctccaccaaaaaaatatgaaaaccagtcaggcgtggcagcgcgcgcctgcaatcacaggcactaggcaggctgaggcaggagaatcag

SEQ ID NO: 45399 - DNA, 120 bp, synthetic construct; identical to SEQ ID NO: 13588
  source 1..120: mol_type = other DNA

SEQ ID NO: 45400 - DNA, 120 bp, synthetic construct; identical to SEQ ID NO: 13589
  source 1..120: mol_type = other DNA

SEQ ID NO: 45401 - DNA, 120 bp, synthetic construct; identical to SEQ ID NO: 13590
  source 1..120: mol_type = other DNA

SEQ ID NO: 45402 - DNA, 120 bp, synthetic construct
  source 1..120: mol_type = other DNA
gttgggtacacctcccagacggggtggtggccgggcagaggggctcctcacttcccagtgggggcggccaggcagaggcacccctcatctcccggacggggcggctggctgggcgggggg

SEQ ID NO: 45403 - DNA, 120 bp, synthetic construct
  source 1..120: mol_type = other DNA
gagagggggagggggagggggagggagagggagagggagagggagagggactcttaatagttggatattggtcttgtatttgtactattaagtctcttttattttgcatcttgttttttt

SEQ ID NO: 45404 - DNA, 120 bp, synthetic construct
  source 1..120: mol_type = other DNA
gggatgccctctctcaccactcctattcaacatagtgttggaagttctggccagggcagtcagtcaggagaaagaaataaaggatattcaattaggaaaagaggaagtcaaattgcccct

SEQ ID NO: 45405 - DNA, 120 bp, synthetic construct
  source 1..120: mol_type = other DNA
agcttctgccagcaaaagaaactaccatcagagtgaacaggcaacctacagaatgggagaaaatttttgcaatctactcatctgacaaagggctaatatccagaatctacaaagaactca

SEQ ID NO: 45406 - DNA, 120 bp, synthetic construct; identical to SEQ ID NO: 13591
  source 1..120: mol_type = other DNA

SEQ ID NO: 45407 - DNA, 120 bp, synthetic construct; identical to SEQ ID NO: 13592
  source 1..120: mol_type = other DNA

SEQ ID NO: 45408 - DNA, 120 bp, synthetic construct; identical to SEQ ID NO: 19062
  source 1..120: mol_type = other DNA

SEQ ID NO: 45409 - DNA, 120 bp, synthetic construct
  source 1..120: mol_type = other DNA
cgagatcgcgccactgctctccagcctgggcaacagagcaagactctgtctcaaaaaaaaaaaagaataaaaaagaaaagaaaaactaactattaagttctgtgttcactacctggatga

SEQ ID NO: 45410 - DNA, 120 bp, synthetic construct; identical to SEQ ID NO: 19063
  source 1..120: mol_type = other DNA

SEQ ID NO: 45411 - DNA, 120 bp, synthetic construct
  source 1..120: mol_type = other DNA
gggagtgccagacagtgggcgcaggccagtgggtgcgcgcactgtgcgcgagccgaagcaaggcgaggcattgcctcacctgggaagcgcaaggggtcagggagttccctttccgagtca

SEQ ID NO: 45412 - DNA, 120 bp, synthetic construct
  source 1..120: mol_type = other DNA
aaaacgcagagcgtctctcctcctccaaaggaacgcagttcctcaccagcaacagaacaaagctggatggagaatgactttgacgagctgagagaagaaggcttcagacgatcaaattac

SEQ ID NO: 45413 - DNA, 120 bp, synthetic construct
  source 1..120: mol_type = other DNA
agactaggaagaaactgcatcaactaacgagcaaaatcaccagctaacatcataatgacaggatcaaattcacacataacaatattcactttaaatgtaaatggactaaattctccaatt

SEQ ID NO: 45414 - DNA, 120 bp, synthetic construct
  source 1..120: mol_type = other DNA
gagggaaatttatagcactaaatgcccacaagagaaagcaggaaagatccaaaattgacaccctaacatcacaattaaaagaagtagaaaagcaagagcaaacacattcaaaagttagca

SEQ ID NO: 45415 - DNA, 120 bp, synthetic construct
  source 1..120: mol_type = other DNA
agatgcagaaaaagcctttgacaaaattcaacaacccttcatgctaaaaactctcagtaaattaggtattgatgggacgtatttcaaaataataagagctatctatgacaaacccacagc

SEQ ID NO: 45416 - DNA, 120 bp, synthetic construct
  source 1..120: mol_type = other DNA
aactgaaactggatcccttccctacaccttatacaaaaatcaattcaagatggattaaagatttaaacgttagacctaaaaccataaaaaccctagaagaaaacctaggcattaccattc

SEQ ID NO: 45417 - DNA, 120 bp, synthetic construct
  source 1..120: mol_type = other DNA
gaacaatgagatcacatggacacaggaaggggaatatcacactctggggactgtggtggggtggggggaggggggagggatagcattgggagatatacctaatgctagatgatgagttag

SEQ ID NO: 45418 - DNA, 120 bp, synthetic construct; identical to SEQ ID NO: 19064
  source 1..120: mol_type = other DNA

SEQ ID NO: 45419 - DNA, 120 bp, synthetic construct; identical to SEQ ID NO: 19065
  source 1..120: mol_type = other DNA

SEQ ID NO: 45420 - DNA, 120 bp, synthetic construct
  source 1..120: mol_type = other DNA
gacagagtgagactctgtctcaaaacaaaacaaaacgaaacaaatatcctggaaggtgttgggcacagagctagacagggaccgtcacctcccttcacctggactctaggcctccactaa

SEQ ID NO: 45421 - DNA, 120 bp, synthetic construct
  source 1..120: mol_type = other DNA
gtacttcttgaccagggccacgatcagggccttctgcttgggcgtcacgcggcagcagatgaccgcctggcacttggacgccaggtccacgaaggcgcgctcctgcagcacctcggagct

SEQ ID NO: 45422 - DNA, 120 bp, synthetic construct
  source 1..120: mol_type = other DNA
cttccctctcccctaccctctccctccactgcccacttcgccacccctgcccctccccctgccctcaccttccctccctcttccccctccctcctctgctcctccccctcctctgcctct

SEQ ID NO: 45423 - DNA, 120 bp, synthetic construct
  source 1..120: mol_type = other DNA
ggttgtttgtttttttcttgtaaatttgtttgagttcattgtagattctggatattagccctttgtcagatgagtaggttgtgaaaattgtctcccattttgtagttgcctgttcactct

SEQ ID NO: 45424 - DNA, 120 bp, synthetic construct; identical to SEQ ID NO: 15299
  source 1..120: mol_type = other DNA

SEQ ID NO: 45425 - DNA, 120 bp, synthetic construct
  source 1..120: mol_type = other DNA
tacaagcctaaagcccacacatgtaatcattctgtaaatacaatcattcaggacctgggaactttatcttttgtttttttttcctttcgagatggagtctccctctgtcacccaggctgg

SEQ ID NO: 45426 - DNA, 120 bp, synthetic construct
  source 1..120: mol_type = other DNA
acatcctacggcacctggcactagaagtgtatggattgtggaagagactggaggtttgaaatatagagctacaagtaagcctgtgcagaattctcccaatcatcaaacgtgtaaaattat

SEQ ID NO: 45427 - DNA, 120 bp, synthetic construct; identical to SEQ ID NO: 22564
  source 1..120: mol_type = other DNA

SEQ ID NO: 45428 - DNA, 120 bp, synthetic construct
  source 1..120: mol_type = other DNA
tcgtctctataaaaaataaaccaaattagccaggtgtggtggtgcatacccagtgcacacttgtagtccgagctacttgggaggctgagatgggaggattgcttgagcccagaagtttga

SEQ ID NO: 45429 - DNA, 120 bp, synthetic construct; identical to SEQ ID NO: 22565
  source 1..120: mol_type = other DNA

SEQ ID NO: 45430 - DNA, 120 bp, synthetic construct
  source 1..120: mol_type = other DNA
gttgtactttactttgctcaagccagtttactttgtttcactgttatttatttatttagagacagggtctcactctgttacccaggctgcagtgcagtggcgagatcatagctctctgga

SEQ ID NO: 45431 - DNA, 120 bp, synthetic construct; identical to SEQ ID NO: 22566
  source 1..120: mol_type = other DNA

SEQ ID NO: 45432 - DNA, 120 bp, synthetic construct
  source 1..120: mol_type = other DNA
catatgtatacatgtgccatgctgtgtgctgcacccattaactcattatttagctttagatatatctcctaatgctatccctcccccccaccccaccccacaacagtccccagagtgtga

SEQ ID NO: 45433 - DNA, 120 bp, synthetic construct
  source 1..120: mol_type = other DNA
ttggtgttttagacatgaagtccttgcccacgcctatgccctgaatggtaatgcctaggttctcttctagagtttttatggttttaggtctaacgtttaagtctttaatccatcttgaat

SEQ ID NO: 45434 - DNA, 120 bp, synthetic construct
  source 1..120: mol_type = other DNA
agagggcatccctgtcttgtgccagttttcaaagggaatgcttccagttttggcccattcagtatgatattggctgtgggtttgtcatagatagctcttattattttgagatacgtccca

SEQ ID NO: 45435 - DNA, 120 bp, synthetic construct
  source 1..120: mol_type = other DNA
gtagaggtgtttgtagtattctctgatggtagtttgtatttctgtgagatcggtggtgatatcctctatcattttttattgcgtctatttgattcttctctcttttcttctttattagtc

SEQ ID NO: 45436 - DNA, 120 bp, synthetic construct
  source 1..120: mol_type = other DNA
atatatatttaggatagttagctcttcttgttgacttgatccctttaccattatgtaatggccttgtctcttttgatcttcgttggtttaaagtctgttttatcagagactgggattgca

SEQ ID NO: 45437 - DNA, 120 bp, synthetic construct
  source 1..120: mol_type = other DNA
tttcacacagtctcatgtttcttggaggctttgttcatttctttttattcttttttctctaaacttcccttctcacttcatttcattcatttcatcttccatcactgataccctttcttc

SEQ ID NO: 45438 - DNA, 120 bp, synthetic construct; identical to SEQ ID NO: 19194
  source 1..120: mol_type = other DNA

SEQ ID NO: 45439 - DNA, 120 bp, synthetic construct; identical to SEQ ID NO: 19195
  source 1..120: mol_type = other DNA

SEQ ID NO: 45440 - DNA, 120 bp, synthetic construct; identical to SEQ ID NO: 19196
  source 1..120: mol_type = other DNA

SEQ ID NO: 45441 - DNA, 120 bp, synthetic construct; identical to SEQ ID NO: 19197
  source 1..120: mol_type = other DNA

SEQ ID NO: 45442 - DNA, 120 bp, synthetic construct; identical to SEQ ID NO: 19198
  source 1..120: mol_type = other DNA

SEQ ID NO: 45443 - DNA, 120 bp, synthetic construct; identical to SEQ ID NO: 19199
  source 1..120: mol_type = other DNA

SEQ ID NO: 45444 - DNA, 120 bp, synthetic construct; identical to SEQ ID NO: 19200
  source 1..120: mol_type = other DNA

SEQ ID NO: 45445 - DNA, 120 bp, synthetic construct; identical to SEQ ID NO: 19201
  source 1..120: mol_type = other DNA

SEQ ID NO: 45446 - DNA, 120 bp, synthetic construct; identical to SEQ ID NO: 19202
  source 1..120: mol_type = other DNA

SEQ ID NO: 45447 - DNA, 120 bp, synthetic construct; identical to SEQ ID NO: 19203
  source 1..120: mol_type = other DNA

SEQ ID NO: 45448 - DNA, 120 bp, synthetic construct; identical to SEQ ID NO: 19204
  source 1..120: mol_type = other DNA

SEQ ID NO: 45449 - DNA, 120 bp, synthetic construct; identical to SEQ ID NO: 19205
  source 1..120: mol_type = other DNA

SEQ ID NO: 45450 - DNA, 120 bp, synthetic construct; identical to SEQ ID NO: 19206
  source 1..120: mol_type = other DNA

SEQ ID NO: 45451 - DNA, 120 bp, synthetic construct; identical to SEQ ID NO: 19207
  source 1..120: mol_type = other DNA

SEQ ID NO: 45452 - DNA, 120 bp, synthetic construct
  source 1..120: mol_type = other DNA
tgggaggtggaggttacagtgagccgagatcgagccactgcactccatcctgggcaatggagtaagactctgtctcaaaaaaaaaaaaaaaagctagagaaaattagtgactttatagct

SEQ ID NO: 45453 - DNA, 120 bp, synthetic construct
  source 1..120: mol_type = other DNA
acaatggttgaactagtttacagtcccaccaacaaggctacagtaaccaaaacagcatggtacttgtaccaaaacagagatatagatcaatggaacagaacagagccctcagaaataacg

SEQ ID NO: 45454 - DNA, 120 bp, synthetic construct; identical to SEQ ID NO: 19180
  source 1..120: mol_type = other DNA

SEQ ID NO: 45455 - DNA, 120 bp, synthetic construct; identical to SEQ ID NO: 19181
  source 1..120: mol_type = other DNA

SEQ ID NO: 45456 - DNA, 120 bp, synthetic construct
  source 1..120: mol_type = other DNA
aaacagcatggtactggtaccaaaacagagatatagatcaatggaacagaagagagccctcagaaataatgccgcatatctacaactatctgatctttgacaaacctgagaaaaacaagc

SEQ ID NO: 45457 - DNA, 120 bp, synthetic construct
  source 1..120: mol_type = other DNA
tgcagccataaaaaatgatgagttcatgtcctttgtagggacatggatgaaattggaaaccatcattctcagtaaactatcgcaagaacaaaaaaccaaacaccgcatattctcactcat

SEQ ID NO: 45458 - DNA, 120 bp, synthetic construct; identical to SEQ ID NO: 19182
  source 1..120: mol_type = other DNA

SEQ ID NO: 45459 - DNA, 120 bp, synthetic construct; identical to SEQ ID NO: 19183
  source 1..120: mol_type = other DNA

SEQ ID NO: 45460 - DNA, 120 bp, synthetic construct; identical to SEQ ID NO: 19184
  source 1..120: mol_type = other DNA

SEQ ID NO: 45461 - DNA, 120 bp, synthetic construct; identical to SEQ ID NO: 19185
  source 1..120: mol_type = other DNA

SEQ ID NO: 45462 - DNA, 120 bp, synthetic construct; identical to SEQ ID NO: 19186
  source 1..120: mol_type = other DNA

SEQ ID NO: 45463 - DNA, 120 bp, synthetic construct; identical to SEQ ID NO: 19187
  source 1..120: mol_type = other DNA

SEQ ID NO: 45464 - DNA, 120 bp, synthetic construct; identical to SEQ ID NO: 19188
  source 1..120: mol_type = other DNA

SEQ ID NO: 45465 - DNA, 120 bp, synthetic construct; identical to SEQ ID NO: 19189
  source 1..120: mol_type = other DNA

SEQ ID NO: 45466 - DNA, 120 bp, synthetic construct; identical to SEQ ID NO: 19190
  source 1..120: mol_type = other DNA

SEQ ID NO: 45467 - DNA, 120 bp, synthetic construct; identical to SEQ ID NO: 19191
  source 1..120: mol_type = other DNA

SEQ ID NO: 45468 - DNA, 120 bp, synthetic construct; identical to SEQ ID NO: 19192
  source 1..120: mol_type = other DNA

SEQ ID NO: 45469 - DNA, 120 bp, synthetic construct; identical to SEQ ID NO: 19193
  source 1..120: mol_type = other DNA

SEQ ID NO: 45470 - DNA, 120 bp, synthetic construct
  source 1..120: mol_type = other DNA
gatgagcatttttttgtgtgtcttttggctgcataaatgtcttcttttgagaagtgcttgttcatatccttcacccacttgttgatggggttgtttttttcttgtaagtttgtttgagtt

SEQ ID NO: 45471 - DNA, 120 bp, synthetic construct; identical to SEQ ID NO: 7557
  source 1..120: mol_type = other DNA

SEQ ID NO: 45472 - DNA, 120 bp, synthetic construct
  source 1..120: mol_type = other DNA
ggaaatgaacagacacttctcaaaagaagacatttatgcagccaaaaaacacaagaaaaaatgctcaccatcactggccatcagagaaatgcaaatcaaaaccacaatgagataccatct

SEQ ID NO: 45473 - DNA, 120 bp, synthetic construct; identical to SEQ ID NO: 24775
  source 1..120: mol_type = other DNA

SEQ ID NO: 45474 - DNA, 120 bp, synthetic construct; identical to SEQ ID NO: 24776
  source 1..120: mol_type = other DNA

SEQ ID NO: 45475 - DNA, 120 bp, synthetic construct
  source 1..120: mol_type = other DNA
gcagaggttgcagtgagccgagattgtgccattgcactccagcctggacaacaaaagcaaaactctgtctcgaaagaaagaaagaaaattcttgaaaacaaaatgtgaagaagtgaaaag

SEQ ID NO: 45476 - DNA, 120 bp, synthetic construct; identical to SEQ ID NO: 22311
  source 1..120: mol_type = other DNA

SEQ ID NO: 45477 - DNA, 120 bp, synthetic construct
  source 1..120: mol_type = other DNA
aggtccgcttggtgcagagctgagttcaattcctgtgtatccttgttgactttctgtctcgttgatctaatgttggtctaatgttgacagtggggtgttaaagtctcccattattaatgt

SEQ ID NO: 45478 - DNA, 120 bp, synthetic construct
  source 1..120: mol_type = other DNA
ctttgtggcgttctctgtatttcctgaatctgaatgttggcctgccttgctagattggggaagttctcctggataatatcctgcagagtgttttccaatttggttccattctccccgtca

SEQ ID NO: 45479 - DNA, 120 bp, synthetic construct
  source 1..120: mol_type = other DNA
aatagatgcagaaaaggcctttgacaaaattcaacagctcttcatgctaaaaactctcagtaaattaggtattgatgggacgtatttcaaaataataagagctatctatgacaaacccac

SEQ ID NO: 45480 - DNA, 120 bp, synthetic construct
  source 1..120: mol_type = other DNA
aatcaattcaagatggattaaagacttaaacgttagacctaaaaccataaaaaccctagaagaaaacctaggcattaccattcaggacgtaggcatgggcaaggacttcatctctaaaac

SEQ ID NO: 45481 - DNA, 120 bp, synthetic construct
  source 1..120: mol_type = other DNA
tattctcactcataggtgggaattgaacagtgagaactcatgtacacaggaaggggaacatcacactctggggactgttgtggggtggggggaggggggagggatagcattgggagacat

SEQ ID NO: 45482 - DNA, 120 bp, synthetic construct; identical to SEQ ID NO: 22313
  source 1..120: mol_type = other DNA

SEQ ID NO: 45483 - DNA, 120 bp, synthetic construct
  source 1..120: mol_type = other DNA
ttggcagcttgatggggatggtattgaatctataaattacctttttcaccatattgattcttctatccatgagcatggaatgttcttccatttgtttgtgccctcttttatttcgttgag

SEQ ID NO: 45484 - DNA, 120 bp, synthetic construct; identical to SEQ ID NO: 22314
  source 1..120: mol_type = other DNA

SEQ ID NO: 45485 - DNA, 120 bp, synthetic construct
  source 1..120: mol_type = other DNA
cattgcaatgaccattgcttttacaatgagaaccagaaaagccttttaaaaattaaacaaaatttttgggaggccaaggagggtggatcacctgaggtcacaagttcgagaccagcctgg

SEQ ID NO: 45486 - DNA, 120 bp, synthetic construct; identical to SEQ ID NO: 22315
  source 1..120: mol_type = other DNA

SEQ ID NO: 45487 - DNA, 120 bp, synthetic construct
  source 1..120: mol_type = other DNA
tatgattttttgttatgagaacatttaaaatctgctcagcggtttacaagtatgcagtacattgtttttttttttttattatactttaagttttagggtacatgtgcacattgtgcaggt

SEQ ID NO: 45488 - DNA, 120 bp, synthetic construct
  source 1..120: mol_type = other DNA
aggttgcaaaaattttctcccattttgtaggttgcctgttcactctgatggtagtttcttttgctgtgcagaagctctttagtttaattagatcccatttgtcaattttgtcttttgttg

SEQ ID NO: 45489 - DNA, 120 bp, synthetic construct
  source 1..120: mol_type = other DNA
aattgccctggccagaacttccaacactatgttgaataggagtggtgagagagggcatccctgtcttgtgccagttttcaaagggaatgcttccagttattgcccattcagtatgatatt

SEQ ID NO: 45490 - DNA, 120 bp, synthetic construct
  source 1..120: mol_type = other DNA
ttgtgtctatttgattcttctctctttttttctttattagtcttgctagcggtctatgaattttgttgatcctttcaaaaaaccagctcctggattcattaattttttgaagggtttttt

SEQ ID NO: 45491 - DNA, 120 bp, synthetic construct
  source 1..120: mol_type = other DNA
ttggagcgtttagtccatttacatttaaacttaatattgttatgtgtgaatttgatcctgtcattatgatgttagctggtgattttgctcgttagttgatgcagtttcttcctagtctcg

SEQ ID NO: 45492 - DNA, 120 bp, synthetic construct
  source 1..120: mol_type = other DNA
gttccgttgctggtgaggaactgcgtccctttggaggaggagaggaactctgccttttagagtttccagtttttctgttctgttttttccccatctttgtggttttatctacttttggtc

SEQ ID NO: 45493 - DNA, 120 bp, synthetic construct; identical to SEQ ID NO: 11183
  source 1..120: mol_type = other DNA

SEQ ID NO: 45494 - DNA, 120 bp, synthetic construct
  source 1..120: mol_type = other DNA
gcagcatgatttataatcctttgggtatatacccagtaatgggatggctgggtcaaatggtatttctagttctagatccctgaggaatcgccacactgacttccacaatggttgttttct

SEQ ID NO: 45495 - DNA, 120 bp, synthetic construct
  source 1..120: mol_type = other DNA
aaaaaaaaaagccttggcatgttgcctaatcctactctgtaaataactcatttgtccgtgtgtgtgtgtgtgtgtgtgtgtgtgtgtgtgtgtgtgtgtgtgtacacttacctacatgga

SEQ ID NO: 45496 - DNA, 120 bp, synthetic construct
  source 1..120: mol_type = other DNA
gaacatgtggtgtttggttttttgtccttgcgatagtttactgagaatgatgatttccaatttcatccatgtccctacaaagggcatgaactcatcatttttatggctgcatagtattcc

SEQ ID NO: 45497 - DNA, 120 bp, synthetic construct
  source 1..120: mol_type = other DNA
agtttcagcattctacgtatggctagccagttttcccagcaccatttattaaatagggaatcctttccccattgcttgtttttctcaggtttgtcaaagatcagatagttgtagatatgc

SEQ ID NO: 45498 - DNA, 120 bp, synthetic construct
  source 1..120: mol_type = other DNA
tagcatgaagggttgttgaatcttttctgcatctattgatataatcatgtggtttttgtctttggttctgtttatatgctggattacatttattgatttgcgtatattgaaccagccttg

SEQ ID NO: 45499 - DNA, 120 bp, synthetic construct
  source 1..120: mol_type = other DNA
gtgtctttgttctcgttggtttcaaaaaacatctttatttctgccttcatttcgttatgtacccagtagtcattcaggagcaggttgttcagtttccatgtagttgagcggttttgagtg

SEQ ID NO: 45500 - DNA, 120 bp, synthetic construct
  source 1..120: mol_type = other DNA
ttatggtgttagctggttattttgctggttagttgatgcagtttcttcctagtctcgatggtctttacattttggcatgattttgtagcagctggtaccggttgttcctttccatgttta

SEQ ID NO: 45501 - DNA, 120 bp, synthetic construct
  source 1..120: mol_type = other DNA
gtgtggatgtcctttctgtttgttagttttccttctagcagataggaccgtcagctgcaggtctgttggagtttgctagaggtccactccagaccctgtttgcctgggtatcagcagcgg

SEQ ID NO: 45502 - DNA, 120 bp, synthetic construct; identical to SEQ ID NO: 11185
  source 1..120: mol_type = other DNA

SEQ ID NO: 45503 - DNA, 120 bp, synthetic construct; identical to SEQ ID NO: 11186
  source 1..120: mol_type = other DNA

SEQ ID NO: 45504 - DNA, 120 bp, synthetic construct
  source 1..120: mol_type = other DNA
ttgggtatatacccagtaatgggatgactgggtcaaatggtatttctagttctagatccctgaggaatcgccacactgacttccacaatggttgaactagtttacagtcccaccaacagt

SEQ ID NO: 45505 - DNA, 120 bp, synthetic construct
  source 1..120: mol_type = other DNA
ttggttactgtatcctggtagtatagtttgaagtcaggtagtgtgatgcctccagctttgttcttttggcttaggattgacttggcgatgcgggctcttttttggttccatatgaacttt

SEQ ID NO: 45506 - DNA, 120 bp, synthetic construct
  source 1..120: mol_type = other DNA
catcaatgttcatcaaggatattggtctaaaattctcttttttggttgtgtctctgcccggctttggtatcaggatgatgctggcctcataacgagttagggaggattccctctttttct

SEQ ID NO: 45507 - DNA, 120 bp, synthetic construct
  source 1..120: mol_type = other DNA
ctgtagatgtctattaggtctgcttggtgcagagctgagttcaattcctgggtatccttgttgactttctgtctcgttgatctttctaatattgacagtggggtgttaaagtctcccatt

SEQ ID NO: 45508 - DNA, 120 bp, synthetic construct
  source 1..120: mol_type = other DNA
gcttgtagagtttctgccgagagatccgctgttagtctgatgggcttccctttgagggcaacccgacctttctctctggctgcccttaacattttttccttcatttcaactttggtgaat

SEQ ID NO: 45509 - DNA, 120 bp, synthetic construct
  source 1..120: mol_type = other DNA
tgaggtgtcagtctgcccctactggggggtgcctcccagttaggctgctcgggggtcaggggtcagggattcacttgaggaggcagtctgcccgttctcagatctccagctgcgtactgg

SEQ ID NO: 45510 - DNA, 120 bp, synthetic construct
  source 1..120: mol_type = other DNA
cattttatggctgcttcattttctagactctacagctagcagaatgttaaagagacagtggagaaggcatctggttcttaaaaactatggccttgaactggtgcataaccacatctgctg

SEQ ID NO: 45511 - DNA, 120 bp, synthetic construct
  source 1..120: mol_type = other DNA
gcatgatttgtaatcctttgggtatatacccagtaatgggatggctggatcaaatggtatttctagttctagatccttgaggaattgccacactgtcttccacaatggttaaactagttt

SEQ ID NO: 45512 - DNA, 120 bp, synthetic construct; identical to SEQ ID NO: 11187
  source 1..120: mol_type = other DNA

SEQ ID NO: 45513 - DNA, 120 bp, synthetic construct; identical to SEQ ID NO: 11188
  source 1..120: mol_type = other DNA

SEQ ID NO: 45514 - DNA, 120 bp, synthetic construct; identical to SEQ ID NO: 11189
  source 1..120: mol_type = other DNA

SEQ ID NO: 45515 - DNA, 120 bp, synthetic construct
  source 1..120: mol_type = other DNA
tgccacactgtcttccacaatggttgaactagtttacagtcccaccaacagtgtaaaagtgttcctatttctccacattctctccagcacctgttgtttcctgagtttttaatgatcgcc

SEQ ID NO: 45516 - DNA, 120 bp, synthetic construct
  source 1..120: mol_type = other DNA
gatgttgattctccctgtccacgagcatggaatgttcttccatttgtttgtgtcctcttttatttcattgagcagtggtttgtagttctccttgaagaggtccttcacatcccttgtaag

SEQ ID NO: 45517 - DNA, 120 bp, synthetic construct
  source 1..120: mol_type = other DNA
taattattgcctcaatttcagagcctggtctattcagggattcaacttcttcctggtttagtcttgggagggtgtatgtgtccaggaatttatccatttcttctagattttctagtttat

SEQ ID NO: 45518 - DNA, 120 bp, synthetic construct; identical to SEQ ID NO: 11177
  source 1..120: mol_type = other DNA

SEQ ID NO: 45519 - DNA, 120 bp, synthetic construct
  source 1..120: mol_type = other DNA
tctgatggccagtgatggtgagcattttttcatgtgttttttggctgcataaatgtcttcttttgagaagtgtctgttcataccctttggccactttttgatggggttgtttgttttttt

SEQ ID NO: 45520 - DNA, 120 bp, synthetic construct
  source 1..120: mol_type = other DNA
ggtccttcacatcccttgtaagttggattcctaagtattttattctctttgaagcagttgtgaatgggagttcactcatgatttggctctctgtttgtctgttattggtgtataagaatg

SEQ ID NO: 45521 - DNA, 120 bp, synthetic construct; identical to SEQ ID NO: 11178
  source 1..120: mol_type = other DNA

SEQ ID NO: 45522 - DNA, 120 bp, synthetic construct
  source 1..120: mol_type = other DNA
ctcgtcatttacattaggtatttctcctaatgatatcccttctccagcccctcacctgccgacaggtcccagtgtgtgtgatgttccccaccctgtgtccatgtgttctcattgtttaac

SEQ ID NO: 45523 - DNA, 120 bp, synthetic construct; identical to SEQ ID NO: 11179
  source 1..120: mol_type = other DNA

SEQ ID NO: 45524 - DNA, 120 bp, synthetic construct; identical to SEQ ID NO: 11180
  source 1..120: mol_type = other DNA

SEQ ID NO: 45525 - DNA, 120 bp, synthetic construct
  source 1..120: mol_type = other DNA
catatgggttggttccaagcctttgctattgtgaatagtaccgcagtaaacatatgtgtgcatgtgtctttatagtagcatgatttataatcctttgggtatatacccagtaatgggatt

SEQ ID NO: 45526 - DNA, 120 bp, synthetic construct
  source 1..120: mol_type = other DNA
tagcttgatggggatggcattgaatctataaattacctttggcagtatggccattttcacgatgttgattctccctgtccacgagcatggaatgttcttccatttgtttgtgtcctcttt

SEQ ID NO: 45527 - DNA, 120 bp, synthetic construct
  source 1..120: mol_type = other DNA
tacctgagtgaattaattagtggtgtcacagagtaaattttctatgaaacagtaccttgccagggcaactaggcaggagaaggaaataaacggtgttcaattaggaaaagaggaagtcaa

SEQ ID NO: 45528 - DNA, 120 bp, synthetic construct
  source 1..120: mol_type = other DNA
gcaacaaaagccaaaattgacaaatgggatctaattaaactaaagagcttctgcacagcaaaagaaactaccatcagagtgaacaggcaacctacaaaatgggagaaagttttgaaatct

SEQ ID NO: 45529 - DNA, 120 bp, synthetic construct
  source 1..120: mol_type = other DNA
caccagcatggcacatgtatacatatgtaactaacctgcacattgtgcacatgtaccctaaaacttaaagtataataataataaaaaataatttaaaaaaaagaaacagtaccttaagct

SEQ ID NO: 45530 - DNA, 120 bp, synthetic construct; identical to SEQ ID NO: 11181
  source 1..120: mol_type = other DNA

SEQ ID NO: 45531 - DNA, 120 bp, synthetic construct; identical to SEQ ID NO: 11182
  source 1..120: mol_type = other DNA

SEQ ID NO: 45532 - DNA, 120 bp, synthetic construct
  source 1..120: mol_type = other DNA
ctgggaggcggaggttgcagtgagtcaagatcatgccactgccctctagcctgggtgacaaaacaagactccatttcaataaaaaaaaaaaaaaaacaatacaaatacaactgtggtaca

SEQ ID NO: 45533 - DNA, 120 bp, synthetic construct
  source 1..120: mol_type = other DNA
actgtcacatgatacaaaatgttttttaaaaaagggaaccaggtacaatggctcatgcttataatttcagctactcaggaggctgaggcaggagaatcatttgaggccaggaagtccaag

SEQ ID NO: 45534 - DNA, 120 bp, synthetic construct
  source 1..120: mol_type = other DNA
cagtgagcccacatcacaccactgcactccagcctgggtgatggaatgagactctgtctcaaaaaaaaataaaataaataaaaataaataaataaatggtgccgggaaaactggatatcc

SEQ ID NO: 45535 - DNA, 120 bp, synthetic construct
  source 1..120: mol_type = other DNA
tgcagtgagctgagaccgtgccattgcactccagtatgggcaacaagagccgaaactccacctcaaaaaaaaaaaaagaaaaagaaactagactcctatctcttgctctatacataaata

SEQ ID NO: 45536 - DNA, 120 bp, synthetic construct
  source 1..120: mol_type = other DNA
gattgcttgaccctaggaagtcaaggctacagtgagtcaggatcaagccactgcactccagcctaggcgatacagtgacaccctgtctccaaaaaaaaaaaaaacaataaataataataa

SEQ ID NO: 45537 - DNA, 120 bp, synthetic construct
  source 1..120: mol_type = other DNA
gagaacatcaaaaataagcccacagacacctatgacagtttacgtgaggttatttttactaaaagtaagaaaaaacgggccaggcaaggtggctcatacttgtaatcccagcactttggg

SEQ ID NO: 45538 - DNA, 120 bp, synthetic construct
  source 1..120: mol_type = other DNA
acaggcgtgagccaccgggcccaacccattatactattttcttttttcttttttttaaaaaaaaaaaaaaaaaaaatgagtcttgctctgtcacccaggctggagtgcagtggcacgatc

SEQ ID NO: 45539 - DNA, 120 bp, synthetic construct; identical to SEQ ID NO: 34249
  source 1..120: mol_type = other DNA

SEQ ID NO: 45540 - DNA, 120 bp, synthetic construct
  source 1..120: mol_type = other DNA
agaggggctcctcacttctcagacggggcggctgccaggcggaggggctcctcaattctcagacgaggcggttgccacgcagagggtctcctcacttctcagacggggcggccaggcaga

SEQ ID NO: 45541 - DNA, 120 bp, synthetic construct
  source 1..120: mol_type = other DNA
cgcctagaaataaacccaaggatatccttcaggatatggagtagaaaagatacctaaatacctggaactgcaccacaacccaatcaaaaaaaggcttgtctcctggggctgcagaaaaaa

SEQ ID NO: 45542 - DNA, 120 bp, synthetic construct
  source 1..120: mol_type = other DNA
ataaaatcaccttcatgagaaccaaaaatcaggtgagcaatcactgtaccagattttaacttcatatcactgaaagaggcactaaagggggtaggaaagacagtcttgaactgccaatgc

SEQ ID NO: 45543 - DNA, 120 bp, synthetic construct
  source 1..120: mol_type = other DNA
cataaaatccatccatatacatccctaggaaggggtctgaatacagggagccaagcagcatggctcggcaggccccatttccatcgcacctcacaggctaagacccactggcttggaatc

SEQ ID NO: 45544 - DNA, 120 bp, synthetic construct
  source 1..120: mol_type = other DNA
tgggtacaagcaattatcttggctcagcctcccaagtagctgggattacaggcgcctgccaccaccacatgcctggctaatttttttgtgtttttttttttttgtatttttgtagataca

SEQ ID NO: 45545 - DNA, 120 bp, synthetic construct
  source 1..120: mol_type = other DNA
cctatgtaacaaactgcatgttcagcacacgtataacagaacttaaagtaaaaaagaaaaaagaacaaaaaaaaggaccaggcgcggtggctcacacctgtaatcccagcactttgggag

SEQ ID NO: 45546 - DNA, 120 bp, synthetic construct; identical to SEQ ID NO: 34245
  source 1..120: mol_type = other DNA

SEQ ID NO: 45547 - DNA, 120 bp, synthetic construct; identical to SEQ ID NO: 34246
  source 1..120: mol_type = other DNA

SEQ ID NO: 45548 - DNA, 120 bp, synthetic construct
  source 1..120: mol_type = other DNA
acttaaaagaactatttgttggcatggcaatggaaggagagtggtagccctatggttagtacggatatctgaagaactagaagaattaagaataaaagtaagccaggcgcggtggctcac

SEQ ID NO: 45549 - DNA, 120 bp, synthetic construct
  source 1..120: mol_type = other DNA
aaatgaaaagtttttttttgtttttttgttttttatttttgagatggagtctcgctctgtcacccagatgggagtgcagtggcacaatcttggctcactggaacctccagctcccaggtt

SEQ ID NO: 45550 - DNA, 120 bp, synthetic construct
  source 1..120: mol_type = other DNA
ccatgaaaaaaaaatagaaactcgtgattttaaaatcataaaaacattacgcagttgggcacggtggctcactcctataatcctaacactttggtaggctgagggggatggatcgcctga

SEQ ID NO: 45551 - DNA, 120 bp, synthetic construct
  source 1..120: mol_type = other DNA
ggtcaggagtttgagaccaacctggtcaatatggtgaaatcccatctctactaaaaatacaataacaacaacaaaattagccaagcgcagtggcgcgcgcctatagtcccagctactcag

SEQ ID NO: 45552 - DNA, 120 bp, synthetic construct
  source 1..120: mol_type = other DNA
cgtctgcaccctggctgtcagtagagagatttagtgatctcactatgggaaaaaacatgagaacagggctctgacttcacagggaagccaatttctctttcatttaatcattaattttgc

SEQ ID NO: 45553 - DNA, 120 bp, synthetic construct
  source 1..120: mol_type = other DNA
aaataagatctttggggaaatctttcttgggcccttccaaagactgtaaacctacagtgacatctcataatacaaagaaaagtattcagggctaaaagctctcggcaatgcagggccccg

SEQ ID NO: 45554 - DNA, 120 bp, synthetic construct
  source 1..120: mol_type = other DNA
ctgatgctttgatattttagtgtcttgtggatcccagaggtatagtctctcctaggattagctaattcctagaggcctgacttttatatgcaaaccaaccagtccagagctaattcctag

SEQ ID NO: 45555 - DNA, 120 bp, synthetic construct
  source 1..120: mol_type = other DNA
aatgaccactagaaggacctgaagtccagcagcgtttcctaatcagggttcctcatcttaatcacagaattcaaaaaataactagagtggtgagtttctggattgtctcaaggactccat

SEQ ID NO: 45556 - DNA, 120 bp, synthetic construct
  source 1..120: mol_type = other DNA
gctctgaagcactgtgtgtggtctgaatgaccgtgtggggtgagagcgcgtaggaccggtggccaggcttccctaaatgcaggccacttttgtcgttgagggtagaaggggaggcttcac

SEQ ID NO: 45557 - DNA, 120 bp, synthetic construct
  source 1..120: mol_type = other DNA
cactgcactggtgacggggttggcggttggggggatcagctgtgatgggatgaagctggcataggttccactgtattgggaggacccaatgaactggaaggtgtgcggcaggtgagcgta

SEQ ID NO: 45558 - DNA, 120 bp, synthetic construct
  source 1..120: mol_type = other DNA
gcaacagagcgacactctgtctccaaaaacgaaacaaaacaacaacaacaaaaacaaaaacactagccgtggcagctgcacattataaaggaagattatgaagacactgggcaagtgaac

SEQ ID NO: 45559 - DNA, 120 bp, synthetic construct
  source 1..120: mol_type = other DNA
tccacacccttgggttttggtatctcacatccagaccctcttttcaatgatctgattttctttctttctttctttctttctttggagagatggggtcttgctatgttaaccaggctggtc

SEQ ID NO: 45560 - DNA, 120 bp, synthetic construct
  source 1..120: mol_type = other DNA
accctaaaacacttatgctgaagaaatgaagtgttgaaggagtaatgtcacttatttactctcgcaacccaggtgttttttttttgagatggagtctcactctgtcgcccaggctggagg

SEQ ID NO: 45561 - DNA, 120 bp, synthetic construct
  source 1..120: mol_type = other DNA
tcagtagtgctcaggtttaattatactgtttatttgagagacatcggcttagtcagccctgaagactcactggactggtcttctgcgaaatgattgctaagacatattggccttaacaca

SEQ ID NO: 45562 - DNA, 120 bp, synthetic construct; identical to SEQ ID NO: 27506
  source 1..120: mol_type = other DNA

SEQ ID NO: 45563 - DNA, 120 bp, synthetic construct
  source 1..120: mol_type = other DNA
tcagtggatctaaatttaaactgcacaggaaacaaggccctttgtcaaaaggtgctaaatctaacctacactataagaagcacgtttgcccatcctgtgttccatgttatgaagggcctc

SEQ ID NO: 45564 - DNA, 120 bp, synthetic construct
  source 1..120: mol_type = other DNA
gaagtatttgaggtttaatccagaggcatagtatttagcagaaacatcttctcaagcactattaaaaaattaaagtggggccaggcacagtggctcacgcctgtaatcccagcacttttg

SEQ ID NO: 45565 - DNA, 120 bp, synthetic construct; identical to SEQ ID NO: 27507
  source 1..120: mol_type = other DNA

SEQ ID NO: 45566 - DNA, 120 bp, synthetic construct
  source 1..120: mol_type = other DNA
ctgactttttaatgattgccattctaactggtgtgagatggtatctcattgtggttttgatttgcatttctctgatggccagtgatgatgagcattttttcacgtgtcttttggctgcat

SEQ ID NO: 45567 - DNA, 120 bp, synthetic construct; identical to SEQ ID NO: 27508
  source 1..120: mol_type = other DNA

SEQ ID NO: 45568 - DNA, 120 bp, synthetic construct; identical to SEQ ID NO: 27509
  source 1..120: mol_type = other DNA

SEQ ID NO: 45569 - DNA, 120 bp, synthetic construct
  source 1..120: mol_type = other DNA
cccaggggttcaaggttgcagtgagctatgactgcaccactgcactccagcctgggcaacagagcaagaccctgtcttgataaaataaaataatataaatagaaatgacaaattttctag

SEQ ID NO: 45570 - DNA, 120 bp, synthetic construct
  source 1..120: mol_type = other DNA
tgagcctgggaggcagaggttgcaatgagccaagatcgtgtgccactgcactccagcctgggcaacagagcaagaccctgtcttgataaaataaaatgaaataaaataaaataatataaa

SEQ ID NO: 45571 - DNA, 120 bp, synthetic construct
  source 1..120: mol_type = other DNA
gagaccagcctggtgaacatggtgaaactccgtctctactaaaaatacaaaaattagccaggcatggtgttgcatgcctgtaatcccagatatttgggagtctgtggccggagaatcact

SEQ ID NO: 45572 - DNA, 120 bp, synthetic construct
  source 1..120: mol_type = other DNA
gaagcaatatcgtcaaaatggccatactgcccaaggtaatttatagattcaatgccatccccatcaagctaccaatgactttcttcacagaattggaaaaaactactttaaagttcatat

SEQ ID NO: 45573 - DNA, 120 bp, synthetic construct
  source 1..120: mol_type = other DNA
aatttcttggatcttgctgtcagtaattccagtgagtcaagaccatgccttgcttctctcatgggttttgtaggacccaatcacagtttctgttcaaatagccactgaaacatctactct

SEQ ID NO: 45574 - DNA, 120 bp, synthetic construct
  source 1..120: mol_type = other DNA
aataggggctaagcatggtcgggtactttttctgtgatggttgatattattatgagtacattaatgaggttcattgtagattttctgatccacttgaatctattcttgcatttttgagaa

SEQ ID NO: 45575 - DNA, 120 bp, synthetic construct
  source 1..120: mol_type = other DNA
gagctctctagcttcagataacttagaagtttatcttttcccccttggtaaccactttttctccaccgttcttgtagttgttgtaatagagccctggtttcttttcccccaagaaatgtc

SEQ ID NO: 45576 - DNA, 120 bp, synthetic construct
  source 1..120: mol_type = other DNA
cagtaattgttctgtgcttttctgctgtccatcatccaaataccagctgacggaaacatctactgcatttcaataagggtaacaatggtagcagagtccacatcttgaggtcttattcca

SEQ ID NO: 45577 - DNA, 120 bp, synthetic construct
  source 1..120: mol_type = other DNA
tttggttttggctaatcttctctgtagtgttgttgttctaattcactgactttcttgcctgtcagtttataagaacaaagataaaaatgataacaggctttccttcagaaatgatgcaag

SEQ ID NO: 45578 - DNA, 120 bp, synthetic construct
  source 1..120: mol_type = other DNA
tgagattacaggttcaccaccacacccagctaatttttgtatttttagtagagacggtgtttcgggaagtcagggaccctgaacggagggactggctgaagccatggcagaagaacataa

SEQ ID NO: 45579 - DNA, 120 bp, synthetic construct
  source 1..120: mol_type = other DNA
tctctgcccttgtgatatttcattgcctttgaagcatgtgatctctgtgacccacaccctgtttgtacacccctccccttttgaaacccctaataaaaagttactgcttttgtggctcaa

SEQ ID NO: 45580 - DNA, 120 bp, synthetic construct
  source 1..120: mol_type = other DNA
tatgttctttccagtacacatagaacattcaccaagacagaccatatgctggggccataacagtgctcaataaatgtagaagaactgaaaacatagactatattctgtctctacagcaga

SEQ ID NO: 45581 - DNA, 120 bp, synthetic construct
  source 1..120: mol_type = other DNA
ggagggaacacttctcaacttattttatgaagccaccattactctgttcccaaatccggacaaaaaccttaaaagggaacaaacaaagtaactacagagcagtgtctctcatggtcagaa

SEQ ID NO: 45582 - DNA, 120 bp, synthetic construct
  source 1..120: mol_type = other DNA
ctccccaagttgacctctatagagtgaatgctataccagtcagaatgccaggagacatttgtgttttgttttttgtttttcttttgagacagagtttcactcttgttactcaggctggtg

SEQ ID NO: 45583 - DNA, 120 bp, synthetic construct
  source 1..120: mol_type = other DNA
agaacctagactcttaatttataccaaacaaaaattgatttaaaatagccacataaaagctgggaatacaaaacttgtagaagaaaacattatggatatattgaagtaggccaggacttt

SEQ ID NO: 45584 - DNA, 120 bp, synthetic construct; identical to SEQ ID NO: 13232
  source 1..120: mol_type = other DNA

SEQ ID NO: 45585 - DNA, 120 bp, synthetic construct
  source 1..120: mol_type = other DNA
agccagccgccccgtccgggaggtggggggcacctctgcccggccgccccttctgggaagtgaggagcccctctgcccggccaccaccccgtctgggaggtgtacccaacagcttattga

SEQ ID NO: 45586 - DNA, 120 bp, synthetic construct
  source 1..120: mol_type = other DNA
ctgcctcagcctcccaagtagctgggattacaggcgcctggctaaacagcacaatttttaagttgcaatgcctcaagagaaagaagcagtaaaaatactaagctgaaaatcactaaaaga

SEQ ID NO: 45587 - DNA, 120 bp, synthetic construct
  source 1..120: mol_type = other DNA
agctatttaaaaatgttcactgcaccactatctataacaaaaaagtggaaacccaattcccaacaatagaatggttaagtaaaaaccttacagccgggcgcagtggctcacgcctgcaat

SEQ ID NO: 45588 - DNA, 120 bp, synthetic construct
  source 1..120: mol_type = other DNA
aggccactgcactccagcctgggcgacagagtgagattccatccaaaacacacacacacacacacacacacacacacacacacacacaaaattagattacagtaaaattatgttctaata

SEQ ID NO: 45589 - DNA, 120 bp, synthetic construct
  source 1..120: mol_type = other DNA
cgtgtaaagtcaaataaccgactgtttccgccccctttgaaggcagcagaattccttaaaaaccagctgattcctcttgatggggaatttctgctgtaaataaaaattctttggaaatgg

SEQ ID NO: 45590 - DNA, 120 bp, synthetic construct
  source 1..120: mol_type = other DNA
ggcccacttgtctccaccccgtcctccgatctttcccaggactcggagggggcggggagagagccccgacagaccctgatgattccggaggagcccggtgcctacccctttaaccggcac

SEQ ID NO: 45591 - DNA, 120 bp, synthetic construct
  source 1..120: mol_type = other DNA
gtgtggaggacaggagagaagcatttcttctcctactgtattccttcagcatcttcacttctgcggggacctagtttgcccccacctgatgcaacccagaaaatggactgactgcgagtg

SEQ ID NO: 45592 - DNA, 120 bp, synthetic construct
  source 1..120: mol_type = other DNA
ctaaggtaaaaagtagatcaagggaccattgcaaaaccctttaaaaattaacctagcctagccaacatggtgaaaccccgtctctaccaaaaatataaaaattagccgggtgtggtggtg

SEQ ID NO: 45593 - DNA, 120 bp, synthetic construct
  source 1..120: mol_type = other DNA
tggatcacctgaggtcaggagttcgagaccagcctggccaatttttagtagagcccatctctactaaaaatacaaaaattagctgggtgtggtgatgcgcacctgtagtcccagctactt

SEQ ID NO: 45594 - DNA, 120 bp, synthetic construct
  source 1..120: mol_type = other DNA
ctttaggataccgagatgggaggatcacttgaataccccggagtttgaaaccagcctgggcaacatagagagaccctgtctctatgaaaaactttaaaaataaaaaattagctggttggc

SEQ ID NO: 45595 - DNA, 120 bp, synthetic construct
  source 1..120: mol_type = other DNA
tcacgaggtcaggagatcaaggccatcctggctaacacagtgaaaccccgtctctactaaaaatacaaaaaaataggtgggtgtggtggcgggcgcctgtagtcccagctacttgggagg

SEQ ID NO: 45596 - DNA, 120 bp, synthetic construct
  source 1..120: mol_type = other DNA
ctgggctcaagcaatctgcttgcctcagcctccctaagtgctagtattacagcacttacggagtgtaatactaaaaaaaaaataaataaatttctgtttctctgggataaatgcccagga

SEQ ID NO: 45597 - DNA, 120 bp, synthetic construct
  source 1..120: mol_type = other DNA
cgtgcccagcctagagtttttgtctttcagcactagaaaaaatgttgtatgtaccccttccttctggcctttatgatctctgatgggaaatctgctgtcattcaaattgcttaggtaagg

SEQ ID NO: 45598 - DNA, 120 bp, synthetic construct
  source 1..120: mol_type = other DNA
ttctctactcggcctcttctccaacatcacccatataggagccagagagatgcctatgtattactgggtggaagttcagcctccctgtgaccactgacaccatgtgaaaggagtgttatc

SEQ ID NO: 45599 - DNA, 120 bp, synthetic construct
  source 1..120: mol_type = other DNA
aatgatgaataaagatgctataatcttttttttttttgagaaggagttttggtcttgtcacccaggctggagttcaatggcacaatcttggctcactgcaatctccgcctcccgggttca

SEQ ID NO: 45600 - DNA, 120 bp, synthetic construct
  source 1..120: mol_type = other DNA
tctgcacttcccattgttatttagattatactcaagtatttttcattttccaggtggtaaaatgtgtttatttttcacctactaatattcatgatttctggccggacgtgatggctcacg

SEQ ID NO: 45601 - DNA, 120 bp, synthetic construct
  source 1..120: mol_type = other DNA
cataaaatttaaatttatcagacaaattaagaggtaggtattttcatcacaaaataacctatcatggccaggagtggtggctcacacctgtaatcccagcactttgggaggccgaggcgg

SEQ ID NO: 45602 - DNA, 120 bp, synthetic construct
  source 1..120: mol_type = other DNA
tcccaaatggttcagaaaggccaataattggggaatctgggtgaaggatataaggagctctgtgtactatttctgcttttatgtaaatctgaaattacaggtcaagcatcctaaatccga

SEQ ID NO: 45603 - DNA, 120 bp, synthetic construct
  source 1..120: mol_type = other DNA
atgtcttagattattttacaagtaggattctggttacaaattaagtgctcacatgagctttaaaaagcagaaacgggtcaggcacagtggcttgcgcctgtaatcccagcactttgggag

SEQ ID NO: 45604 - DNA, 120 bp, synthetic construct
  source 1..120: mol_type = other DNA
aaataaaataaaataggcagaaatgaggcctagccatctccctccactttggttgttctctggtggcaagcaaagccatttgggagatgccagtcccaaaattctgcttcactgctgttg

SEQ ID NO: 45605 - DNA, 120 bp, synthetic construct
  source 1..120: mol_type = other DNA
tttttttttttttttttttttttgagatggagtcttgctcttgtcgcctaggctgtagtgcaatggcacaacctcggctcactgcaacctctgcctcccaggttcaagtgattctcctgc

SEQ ID NO: 45606 - DNA, 120 bp, synthetic construct
  source 1..120: mol_type = other DNA
gccttggtcccccaaagtgctgggattacaggcatcagaccatcacgcctggcctccattccttttctataacttgaaactttctatttgtaaaaaattcctcagccgaaagactttaaa

SEQ ID NO: 45607 - DNA, 120 bp, synthetic construct
  source 1..120: mol_type = other DNA
gtgatacctttggccttggaacaaaacattttatgagtgcaaagaatcctttttgtaaagagagacttgttagccttggcatctactgagaacatccctaaatttgggtgacgagataag

SEQ ID NO: 45608 - DNA, 120 bp, synthetic construct
  source 1..120: mol_type = other DNA
aaaatgcattggctgcagcaaaagagaactggttgaagaaataccaggaaatgcccgtcaatctcttgtctgcacatcctcttcagtttgatagtaagtttcctaagggattgagctgaa

SEQ ID NO: 45609 - DNA, 120 bp, synthetic construct
  source 1..120: mol_type = other DNA
aaatgtgtgtgtgtgtgtgtatgtgtaagtatgtgtgtgtgtgtgcgcttttaaattttgaaccccaaaccctctctagcaatcccaccttatgtttgggttgcagtgacatttctttat

SEQ ID NO: 45610 - DNA, 120 bp, synthetic construct
  source 1..120: mol_type = other DNA
cacggtacttcgtcctgacacctgggcagacacctgggaggcacttccccgctagcccaaggttccctgcacgcccggagtccgctctgcggcggcttcccattcatgcttttgacaact

SEQ ID NO: 45611 - DNA, 120 bp, synthetic construct
  source 1..120: mol_type = other DNA
gggagcgcaggcctctgcccagtcctgaagtgatgctgggacagtcgtggaatctgtgggttgaggcttccaaacttcctgggaaggacggtgagtgtccacgccctcctccccccttca

SEQ ID NO: 45612 - DNA, 120 bp, synthetic construct
  source 1..120: mol_type = other DNA
caggccaggtatctggaaagtgtcagactttttcttgagattttctttttctttgaatagtaagcttttgttgtctaatacctgcactaggcctgggcataccgtggtcagaaaggactt

SEQ ID NO: 45613 - DNA, 120 bp, synthetic construct
  source 1..120: mol_type = other DNA
tcatgaagaactaagacgttaaactacctacttgaggcacaaaagggacatggatcttgttagtgttttgttttgttttttgagacggagtctcactctgtggccatgctggagtgcagt

SEQ ID NO: 45614 - DNA, 120 bp, synthetic construct
  source 1..120: mol_type = other DNA
tgggttcaagcgattctctggactcatcctcccttgtagctgggattacaggcacgcaccaccacacctggctaatttttgtattttttatagagatggagtttcattcaccatgttagt

SEQ ID NO: 45615 - DNA, 120 bp, synthetic construct
  source 1..120: mol_type = other DNA
attaattttggtgggaagaaattggtaatacattttgactttttgttgttgttgttgttattgttgttgagatggagtctcgctgtgtcgcccaggctggagtgcaatggtacaggcacg

SEQ ID NO: 45616 - DNA, 120 bp, synthetic construct; identical to SEQ ID NO: 24385
  source 1..120: mol_type = other DNA

SEQ ID NO: 45617 - DNA, 120 bp, synthetic construct; identical to SEQ ID NO: 24386
  source 1..120: mol_type = other DNA

SEQ ID NO: 45618 - DNA, 120 bp, synthetic construct; identical to SEQ ID NO: 24387
  source 1..120: mol_type = other DNA

SEQ ID NO: 45619 - DNA, 120 bp, synthetic construct; identical to SEQ ID NO: 24388
  source 1..120: mol_type = other DNA

SEQ ID NO: 45620 - DNA, 120 bp, synthetic construct; identical to SEQ ID NO: 29909
  source 1..120: mol_type = other DNA

SEQ ID NO: 45621 - DNA, 120 bp, synthetic construct
  source 1..120: mol_type = other DNA
tgatccgctcgcctcagcctcacaaagtgccaggattataggcgtgagccaccgtgcctggctgaaatctttagttttgatattgtagtattaacatcacaaacagaagcatatatatat

SEQ ID NO: 45622 - DNA, 120 bp, synthetic construct; identical to SEQ ID NO: 29911
  source 1..120: mol_type = other DNA

SEQ ID NO: 45623 - DNA, 120 bp, synthetic construct; identical to SEQ ID NO: 29912
  source 1..120: mol_type = other DNA

SEQ ID NO: 45624 - DNA, 120 bp, synthetic construct; identical to SEQ ID NO: 29913
  source 1..120: mol_type = other DNA

SEQ ID NO: 45625 - DNA, 120 bp, synthetic construct
  source 1..120: mol_type = other DNA
caaagccagccgacaggaagagaaatctaaacatgtctactcagtgcaacttcctatggcaattgccaaggaaaacatgatagaggcaagcactggattcaacaatgtgtttcctgaata

SEQ ID NO: 45626 - DNA, 120 bp, synthetic construct
  source 1..120: mol_type = other DNA
tcctttcccttaataacagcacttcttatctgcactactatgtacaaatttcatgataggaaatccaaggcagaattatcttggtgacactcatgggtgtaccactattaagattcttct

SEQ ID NO: 45627 - DNA, 120 bp, synthetic construct
  source 1..120: mol_type = other DNA
atcttacagtctttccagttcttacaattttaaaaatctcctcgtattcaggaaatcatcaagaccgctagcaggagaactcccttacagacctagacctcccacctctagactcataca

SEQ ID NO: 45628 - DNA, 120 bp, synthetic construct
  source 1..120: mol_type = other DNA
ttcatatgggtccttctagtttggcagagctaaatggacttcgttatttatatttcatctgacaaaatggaaaagtttaggtgaactgacatgaccagattttgtttgtagtacactatt

SEQ ID NO: 45629 - DNA, 120 bp, synthetic construct
  source 1..120: mol_type = other DNA
aatttaattcagttacttgtaccttcaagagatttttcaggctggatagctctgatcctgaagatgagaccagatttaaattaaaaaaaaaaaaagttaactttcattaccaagctgcga

SEQ ID NO: 45630 - DNA, 120 bp, synthetic construct
  source 1..120: mol_type = other DNA
catgttagaaaacctggctttactactactactactactactactactactactgctgctgctgctgctgctgctgctgctgctgctgctgctgctgcattttttaaaaatatattatct

SEQ ID NO: 45631 - DNA, 120 bp, synthetic construct
  source 1..120: mol_type = other DNA
acaatgtccactctacttcttcactaggtgagcctatctgtatcttaaatactttcattctgtatatgcactgagttattgtaactaataatgccaaaatttagggcatgtgttttaaac

SEQ ID NO: 45632 - DNA, 120 bp, synthetic construct
  source 1..120: mol_type = other DNA
tgtctgtagtttgaataacacctccttacatattgcacagtgttcaactcacccaactgcatgtggcaacccctacagattcttaccatatattttttgtttgagtggacatttggcata

SEQ ID NO: 45633 - DNA, 120 bp, synthetic construct
  source 1..120: mol_type = other DNA
tccctcaggaaggatgtaggtttactttaagtcctcattagagctatgttttagcaattgtgtagtatgatgtttgtattactttatatgtgttagcctgcaaggtgtgccctcaaactt

SEQ ID NO: 45634 - DNA, 120 bp, synthetic construct
  source 1..120: mol_type = other DNA
tttccctctccttttcctttcctctaaaatgcttgttgccctgaggtatcacccagaggaatttacctattgatgatgatgagagtcttctttcaaatttgaagcatcagtaataaatct

SEQ ID NO: 45635 - DNA, 120 bp, synthetic construct
  source 1..120: mol_type = other DNA
atgcactgtctcttattaagtacaattttctccatccgtttacatttcgcataaatacttcccatttcataggtcacctggaaattctccctctttgcgtgacctgtaatgtggctctaa

SEQ ID NO: 45636 - DNA, 120 bp, synthetic construct; identical to SEQ ID NO: 32743
  source 1..120: mol_type = other DNA

SEQ ID NO: 45637 - DNA, 120 bp, synthetic construct
  source 1..120: mol_type = other DNA
ccacaatggttgaactagtttacagtcccaccaacagtgtaaaagtgttcccatttctccacatcctctccagcacctgttgtttcctgactttttaatgatcgccattctaactggtgt

SEQ ID NO: 45638 - DNA, 120 bp, synthetic construct
  source 1..120: mol_type = other DNA
ctctctgtttgtctgttgttggtgtataggaatgcttgtgatttttgcacattgattttgtatcctgagactttgctgaagttgcttatcagcttaaggagattttgggctgagacaatg

SEQ ID NO: 45639 - DNA, 120 bp, synthetic construct
  source 1..120: mol_type = other DNA
tcttctctctttttttctttattagtcttgctagcggtctatcaattttgttgatcctttcaaaaaaccagctcctggattcattaattttttcaagggttttttgtgtctctatttcct

SEQ ID NO: 45640 - DNA, 120 bp, synthetic construct
  source 1..120: mol_type = other DNA
gagcctatgtgtgtctctgcacgtgagatgggcttcctgaatacagcacactgatgggtcttgactctttatccaatttgccagtctgtgtcttttaattggagcatttagtccatttac

SEQ ID NO: 45641 - DNA, 120 bp, synthetic construct
  source 1..120: mol_type = other DNA
tatacattcttctaaatttttttcaaagttttcaacttctttgcctttggtttgaatgtcctcccatagctcagagtaatctgatcgtctgaagccttcttctctcagctcgtcaaagtc

SEQ ID NO: 45642 - DNA, 120 bp, synthetic construct; identical to SEQ ID NO: 29254
  source 1..120: mol_type = other DNA

SEQ ID NO: 45643 - DNA, 120 bp, synthetic construct; identical to SEQ ID NO: 29255
  source 1..120: mol_type = other DNA

SEQ ID NO: 45644 - DNA, 120 bp, synthetic construct; identical to SEQ ID NO: 29248
  source 1..120: mol_type = other DNA

SEQ ID NO: 45645 - DNA, 120 bp, synthetic construct
  source 1..120: mol_type = other DNA
agaaaggacatctacaccgaaaacccatctgtacatcaccatcatcaaagaccaaaatagataaaaccacaaagatggggaaaaaacagaacagaaaaactggaaactctaaaacgcaga

SEQ ID NO: 45646 - DNA, 120 bp, synthetic construct
  source 1..120: mol_type = other DNA
aagcgctaaacatggaaaggaacaaccggtaccagccgctgcaaaatcatgccaaaatgtaaagaccatcgagactaggaagaaactgcatcaactaatgagcaaaatcaccagctaaca

SEQ ID NO: 45647 - DNA, 120 bp, synthetic construct
  source 1..120: mol_type = other DNA
gaactagaaaagcaagagcaaacacattcaaaagctagcagaaggcaagaaataactaaaatcagagcagaactgaaggaaatagagacacaaaaaacccttcaaaaactcaatgaatcc

SEQ ID NO: 45648 - DNA, 120 bp, synthetic construct
  source 1..120: mol_type = other DNA
taaacagagccaaagacaaaaaccacatgattatctcaatagatgcagaaaaagcctttgacaaaattcaacaacccttcatgctaaaaactctcaataaattaggtattgatgggatgt

SEQ ID NO: 45649 - DNA, 120 bp, synthetic construct
  source 1..120: mol_type = other DNA
cctgacttcaaactatactacaaggctacagtaaccaaaacagcatggtactggtaccaaaacagagacatagatcaatggaacagaacagagccctcagaaataatgccgcatatctac

SEQ ID NO: 45650 - DNA, 120 bp, synthetic construct
  source 1..120: mol_type = other DNA
gcagccataaaaaatgatgagttcatatcctttgtagggacatggatgaaattggaaaccatctctcagtaaactatcgcaagaacaaaaaaccaaacaccgcatattctcactcatagg

SEQ ID NO: 45651 - DNA, 120 bp, synthetic construct; identical to SEQ ID NO: 29249
  source 1..120: mol_type = other DNA

SEQ ID NO: 45652 - DNA, 120 bp, synthetic construct; identical to SEQ ID NO: 29242
  source 1..120: mol_type = other DNA

SEQ ID NO: 45653 - DNA, 120 bp, synthetic construct
  source 1..120: mol_type = other DNA
ggagttttattgtttctcgttagttagtgcttttaagaaggaaggaggcctcaccagacttgattattattttttttttttgagacggagtctcgctctgtggcccaggtgggagtgcag

SEQ ID NO: 45654 - DNA, 120 bp, synthetic construct; identical to SEQ ID NO: 29244
  source 1..120: mol_type = other DNA

SEQ ID NO: 45655 - DNA, 120 bp, synthetic construct; identical to SEQ ID NO: 29245
  source 1..120: mol_type = other DNA

SEQ ID NO: 45656 - DNA, 120 bp, synthetic construct; identical to SEQ ID NO: 29246
  source 1..120: mol_type = other DNA

SEQ ID NO: 45657 - DNA, 120 bp, synthetic construct; identical to SEQ ID NO: 29247
  source 1..120: mol_type = other DNA

SEQ ID NO: 45658 - DNA, 120 bp, synthetic construct
  source 1..120: mol_type = other DNA
agaccagcctgaccaacatggtgaaaccccgtctctactaaaaatacaggaattagctgggcatgatggcgcacacctgtaatcccagctactcggggggctgtggcaggagaattactt

SEQ ID NO: 45659 - DNA, 120 bp, synthetic construct; identical to SEQ ID NO: 29250
  source 1..120: mol_type = other DNA

SEQ ID NO: 45660 - DNA, 120 bp, synthetic construct; identical to SEQ ID NO: 29251
  source 1..120: mol_type = other DNA

SEQ ID NO: 45661 - DNA, 120 bp, synthetic construct; identical to SEQ ID NO: 29252
  source 1..120: mol_type = other DNA

SEQ ID NO: 45662 - DNA, 120 bp, synthetic construct; identical to SEQ ID NO: 29253
  source 1..120: mol_type = other DNA

SEQ ID NO: 45663 - DNA, 120 bp, synthetic construct; identical to SEQ ID NO: 15092
  source 1..120: mol_type = other DNA

SEQ ID NO: 45664 - DNA, 120 bp, synthetic construct
  source 1..120: mol_type = other DNA
ttttgcaatttacccatctggcaaagggctaatatccagaatctacaaagaacttaaactttcgagaacttaaattttcaagaaaaaatcaaacaaccccatcaaaaagtgggcaaagga

SEQ ID NO: 45665 - DNA, 120 bp, synthetic construct; identical to SEQ ID NO: 29002
  source 1..120: mol_type = other DNA

SEQ ID NO: 45666 - DNA, 120 bp, synthetic construct; identical to SEQ ID NO: 29003
  source 1..120: mol_type = other DNA

SEQ ID NO: 45667 - DNA, 120 bp, synthetic construct
  source 1..120: mol_type = other DNA
gggaggatcacttgagctcaggaggtcaagactgcagtgagccatggtcatgtcaatgcactccagcctgggcaaaagaccaagacctcatctcaacaaattattattattttaaaaaaa

SEQ ID NO: 45668 - DNA, 120 bp, synthetic construct
  source 1..120: mol_type = other DNA
acatggtgaaaccccatgtctactaaaaatacaaaaaaattagccagacatggtggtgcatgcctgtagtcccagctactcgggagggtgaggcaggagaatcacttgaaccttggaggt

SEQ ID NO: 45669 - DNA, 120 bp, synthetic construct; identical to SEQ ID NO: 29004
  source 1..120: mol_type = other DNA

SEQ ID NO: 45670 - DNA, 120 bp, synthetic construct
  source 1..120: mol_type = other DNA
cccttaaatacagccatgccaggaacacagagaatgatcaagtgatgtgtccgtatttcaatcctgtgattcaggaatccaagaagaagaagtgtcacatatacttactttgggccatga

SEQ ID NO: 45671 - DNA, 120 bp, synthetic construct; identical to SEQ ID NO: 29005
  source 1..120: mol_type = other DNA

SEQ ID NO: 45672 - DNA, 120 bp, synthetic construct
  source 1..120: mol_type = other DNA
accatgccgatttgtttactatggctttgtactaaattttgaagtcaggtagtgtgatgcctcctgctttgttctttttgcacaggattgctttggttatttggggccttttgtggttcc

SEQ ID NO: 45673 - DNA, 120 bp, synthetic construct
  source 1..120: mol_type = other DNA
cacggcaaccatccgatttctcaatcttttccccaccttttccccctttccattccacaaaaccgccattgtcatcatggcccattctcaatgagctgttgggtacacctcccagacggg

SEQ ID NO: 45674 - DNA, 120 bp, synthetic construct
  source 1..120: mol_type = other DNA
gagactctgtctgcaatcccggcacctcgggaggccaaggctggcggatcactcgcggttaggagctggagaccagcccggccaacacagcgaaaccccgtctccaccaaaaaaatacga

SEQ ID NO: 45675 - DNA, 120 bp, synthetic construct; identical to SEQ ID NO: 9072
  source 1..120: mol_type = other DNA

SEQ ID NO: 45676 - DNA, 120 bp, synthetic construct; identical to SEQ ID NO: 15712
  source 1..120: mol_type = other DNA

SEQ ID NO: 45677 - DNA, 120 bp, synthetic construct; identical to SEQ ID NO: 15713
  source 1..120: mol_type = other DNA

SEQ ID NO: 45678 - DNA, 120 bp, synthetic construct
  source 1..120: mol_type = other DNA
atattggggggctcagatggaggaggcccagagaagggaagggggtcagatggaggaggcccagagaaaggaagaggctcagatggaggaggtgcagtgaaggaaagggggtcagatggg

SEQ ID NO: 45679 - DNA, 120 bp, synthetic construct
  source 1..120: mol_type = other DNA
acctgatgctgcttcaggtgagaggatggtgccacctgtgatcccagcacctcgggaggccgacgttagccagggaaacaagtccaaacttggtctctacaaaaaaatacaaaaattagc

SEQ ID NO: 45680 - DNA, 120 bp, synthetic construct
  source 1..120: mol_type = other DNA
attgaataaagagtcaagacccatcagcatgctgtattcaggaaacgcatctcatgtgcagagacacacataggctcaaaataaaaggatggaggaagatctaccaagcaaatggaaaac

SEQ ID NO: 45681 - DNA, 120 bp, synthetic construct
  source 1..120: mol_type = other DNA
aactgaaggaaatagagacacaaaaaacccttcaaaaaattaatgaatccaggagctggttttttgaaaggatcaacaaaattgatagaccgctagcaagactaatgaagaaaaaaagag

SEQ ID NO: 45682 - DNA, 120 bp, synthetic construct
  source 1..120: mol_type = other DNA
ccagggcaattaggcaggagaaggaaataaagggtattcaattaggaaaagaggaagtcaaattgtccctgtttgcagatgacatgattgtatatctagaaaaccccattgtgtcagccc

SEQ ID NO: 45683 - DNA, 120 bp, synthetic construct
  source 1..120: mol_type = other DNA
ggacgaggtggctgctgggaggagacgctcctcacttcccagacggggcggctgccgggcggaggggcccctcacctctcagacggggcggctgcctggcggaggggctcctcacttctc

SEQ ID NO: 45684 - DNA, 120 bp, synthetic construct
  source 1..120: mol_type = other DNA
ttaaacaagcataatgcagaataataggaggacactcccatccccactcccccacccccgattgcattcacctctaaataatgagcaagatttggctaaagagcaccatgtttgtttatt

SEQ ID NO: 45685 - DNA, 120 bp, synthetic construct
  source 1..120: mol_type = other DNA
ttaggtatatctcccaatgctatccctccccactccccccaccccaccacattccccagagtgtgatgttccccttcctgtgtccatgtgatctcattgttcaattcccacctatgagtg

SEQ ID NO: 45686 - DNA, 120 bp, synthetic construct
  source 1..120: mol_type = other DNA
ttatggttttaggtctaagtttaagtctttaatccatcttgaattgatttttgtataaggtgtaaggaagggatccagtttcagctttctacatatggctagccagttttcccagcacca

SEQ ID NO: 45687 - DNA, 120 bp, synthetic construct; identical to SEQ ID NO: 21770
  source 1..120: mol_type = other DNA

SEQ ID NO: 45688 - DNA, 120 bp, synthetic construct
  source 1..120: mol_type = other DNA
ttgtggttttgatttgcatttctctgatggccagtgatggtgagcattttttcatgtgttttttggctgcataaatgtcttcttttgagaagtctctgttcatgtccttcgcccactttt

SEQ ID NO: 45689 - DNA, 120 bp, synthetic construct
  source 1..120: mol_type = other DNA
cgagcagtggtttgtagttctccttaaagagatccttcacatcccttgtaagttggattcctaggtattttattctctttgaagcaattgtgaatggaagttcactcatgatttggctct

SEQ ID NO: 45690 - DNA, 120 bp, synthetic construct
  source 1..120: mol_type = other DNA
ctccttgtacctctggtagaattcggctgtgagtccatctggtcctggactctttttggttggtaagctattgattattgccacaatttcagatcctgttattggtctattcagagattc

SEQ ID NO: 45691 - DNA, 120 bp, synthetic construct
  source 1..120: mol_type = other DNA
atatgcacccaatacaggagcacccagattcataaagcaagtcctgagtgacctacaaagagacttagactcccacacattaataatgggagactttaacatcccactgtcaacattaga

SEQ ID NO: 45692 - DNA, 120 bp, synthetic construct
  source 1..120: mol_type = other DNA
ctgcagagtgttttccaacttggttccattcttcccgtcactttgaggtacaccaatcagacgtagatttggtcttttcacatagtcccatatttcttggaggctttgttcatttctttt

SEQ ID NO: 45693 - DNA, 120 bp, synthetic construct
  source 1..120: mol_type = other DNA
ctcccccttctgcccaccccaaaacaggccccagtgtgtgatgttccccttcctgtgtccatgtgttctcattgttcaattcccacctatgagtgagaacatgcggtgtttggttttttg

SEQ ID NO: 45694 - DNA, 120 bp, synthetic construct
  source 1..120: mol_type = other DNA
cccctgcctatgtcctgaatggtattgcctatgttttcttgtagggtttttatggttttaggtctaacatttaagtctttaatccatcttgaattgatttttgtataaggtgtaaggaag

SEQ ID NO: 45695 - DNA, 120 bp, synthetic construct
  source 1..120: mol_type = other DNA
ctatcaattttgttgatcttttcaaaaaaccagctcctggattcatcgaatttttgaagggttttttgtgtctctatttccttcagttctgctctgatcttagttatttcttgccttctg

SEQ ID NO: 45696 - DNA, 120 bp, synthetic construct
  source 1..120: mol_type = other DNA
agttgatgcagtttcttcctagcctcaatggtctttacagtttggcatgtttttgcagtggctggtacttagttcttccttcaggagctcttttagggcaggcctggtggtgacaaaatc

SEQ ID NO: 45697 - DNA, 120 bp, synthetic construct
  source 1..120: mol_type = other DNA
cctccaaagtatcgcagttcctcaccttcaatggaacaaagctggacggagaacgactttgacaagttgagagaagaaggcttcagacgatcaaactacaagctacaggaggaaattcaa

SEQ ID NO: 45698 - DNA, 120 bp, synthetic construct
  source 1..120: mol_type = other DNA
atgtaaatagactaaatgctccaattaaaagacacagactggaaaattggataaagagtcaagacccatcagtgtgctgtattcaggaaacccatctcacgtgcagagacacacataggc

SEQ ID NO: 45699 - DNA, 120 bp, synthetic construct
  source 1..120: mol_type = other DNA
aagaaataactaaaatcagagcagaactgaaggaaatagagacacaaaaaacccttcaaaaaattaatgaatccaggagctggttttttgaaaagatcaacaaaattgatagaccactag

SEQ ID NO: 45700 - DNA, 120 bp, synthetic construct
  source 1..120: mol_type = other DNA
ctggccagggcaattagtcaggagaaggaaataaagggtattcaattaggaaaagaggaagtcaaattgtccctgtttgcagatgacatgattgtatatctagaaaaccccattgtctca

SEQ ID NO: 45701 - DNA, 120 bp, synthetic construct
  source 1..120: mol_type = other DNA
gcaacccacaaaatgggagaaaatttttgccacctactcatctgacaaagggctaatatccagaatctacaatgaactcaaacaaatttacaagaaaaaaacaaccccatcaaaaagtgg

SEQ ID NO: 45702 - DNA, 120 bp, synthetic construct; identical to SEQ ID NO: 21771
  source 1..120: mol_type = other DNA

SEQ ID NO: 45703 - DNA, 120 bp, synthetic construct; identical to SEQ ID NO: 23090
  source 1..120: mol_type = other DNA

SEQ ID NO: 45704 - DNA, 120 bp, synthetic construct
  source 1..120: mol_type = other DNA
cgacgcctacgaaaacctcacggccaaggtgctggccatgctggcctggctggacgagcacgtggccttcgagttcgtgctcaaggcggacgacgactccttcgcgcggctggacgcgct

SEQ ID NO: 45705 - DNA, 120 bp, synthetic construct
  source 1..120: mol_type = other DNA
ttcatgggattttggtctctgtccagtgacttcgtggtaaatgtaactcagtgtttgcttgcgacttatttataaatattgtaagtttgtgtcgatgagtgtaagttggcagtgcgcacg

SEQ ID NO: 45706 - DNA, 120 bp, synthetic construct
  source 1..120: mol_type = other DNA
ccaaaaggtaggggtgggactggaggcgtccctaggtcaggccgttgagttcgagctccgatgggccaccttgaatccaggactgaccgcccgtgtgtgcacagtttgttcttggacgag

SEQ ID NO: 45707 - DNA, 120 bp, synthetic construct; identical to SEQ ID NO: 12523
  source 1..120: mol_type = other DNA

SEQ ID NO: 45708 - DNA, 120 bp, synthetic construct; identical to SEQ ID NO: 12524
  source 1..120: mol_type = other DNA

SEQ ID NO: 45709 - DNA, 120 bp, synthetic construct
  source 1..120: mol_type = other DNA
aactgacgactgagagcccgggccgattgttagaagctgctgagaaccagctcttcccctaatcccggtcgacgagggcaggctgtgccgggttttgtttcgcagcccctcggcagcagc

SEQ ID NO: 45710 - DNA, 120 bp, synthetic construct
  source 1..120: mol_type = other DNA
gaggtggaggctgcagtaagctgtgatcgcaccactacactccagtctgggcaacagagagagaccctgtctcacttaaaaatatatatatgtgtatatatatatctccatccaaatgtc

SEQ ID NO: 45711 - DNA, 120 bp, synthetic construct
  source 1..120: mol_type = other DNA
actgtgaacattagacagatcaacgagacagaaagttaacaaggatacacaggaattgaactcagctctgcaccaagcggacctaatacacatctaaagaactctccaccccaaatcaac

SEQ ID NO: 45712 - DNA, 120 bp, synthetic construct
  source 1..120: mol_type = other DNA
tggtaccattccttctgaaactattccaatcaatagaaaaagagggaatcctccctaactcattttatgaggccagcatcatcctgataccaaagccgggcagagacacagccaaaaaag

SEQ ID NO: 45713 - DNA, 120 bp, synthetic construct
  source 1..120: mol_type = other DNA
tcaatattgtgaaaatggccatactgcccaaggtaatttatagattcaatgccatccccatcaagctaccaatgactttcttcacagaattggaaaaaactactttaaagtttatatgga

SEQ ID NO: 45714 - DNA, 120 bp, synthetic construct
  source 1..120: mol_type = other DNA
ggtgatcattaaaaagtcaggaaacaacaggtgctggagaggatgtggagaaataggaacacttttacactgttggtgggactgtaaactagtaaaaccattgtggaagtcagtgcggcg

SEQ ID NO: 45715 - DNA, 120 bp, synthetic construct
  source 1..120: mol_type = other DNA
tctgacaggcttaaaaaacggcgcaccaggagattatatcccacacatggcgcccacggagtctcgctgattgctagcacaggtctgagatcaaactgcaaggcgactgcaaggcggcag

SEQ ID NO: 45716 - DNA, 120 bp, synthetic construct
  source 1..120: mol_type = other DNA
agctacaggaggaaattcaagccaaaggcaaagaagttaaaaactttgaaaaaaatttagacgaatgtataactagaataaccaatacagagaagtgcttaaaggagctgatggagctga

SEQ ID NO: 45717 - DNA, 120 bp, synthetic construct
  source 1..120: mol_type = other DNA
aaacagactttaaaccaacaaagatcaaaagagacaaagaaggccgttacataacggtaaagggatcaattcaacaagaagagctaactatcctaaatataaatgcacccaatacaggag

SEQ ID NO: 45718 - DNA, 120 bp, synthetic construct
  source 1..120: mol_type = other DNA
ctctgaatagaccaataacaggctctgaaattgtgggaataatcaatagcttaccaaccaaaaagagtccaggaccagatggattcacagccgaattctaccagaggtacaaggaggaac

SEQ ID NO: 45719 - DNA, 120 bp, synthetic construct
  source 1..120: mol_type = other DNA
tggccatactgcccaaggtaatttatagattcaatgccatccccatcaagctaccaatgactttcttcacagaattggaaaaaactactttaaagttcatatggaaccaaaaaagaaccc

SEQ ID NO: 45720 - DNA, 120 bp, synthetic construct
  source 1..120: mol_type = other DNA
accattgtggaagtcagtgtggtgattcctcagggatctagaactagaaatatcatttgatccagccatcccattactgggtatatacccaaaggactataaatcatgctgctataaaga

SEQ ID NO: 45721 - DNA, 120 bp, synthetic construct
  source 1..120: mol_type = other DNA
agtacctgtgccaggagggatgcagtgagagccaggcccagctgcagccaggcctctgggtccccgagcctggaatggattctctaaccctatcgacatatacagtataggcttcaaagt

SEQ ID NO: 45722 - DNA, 120 bp, synthetic construct
  source 1..120: mol_type = other DNA
cagccccacaggccacactgagacaccacgggtccagcgcatctaacggaggtcgggagagaagaaacagaggggtggtccggggaagggagcagcagaaagagccacctggctcactct

SEQ ID NO: 45723 - DNA, 120 bp, synthetic construct
  source 1..120: mol_type = other DNA
tggagtgagctgagatcgcaccatttcactccagcctcagtgataacagcaaaactccatctcaaaaaaaaaaaaaaaaggccgggcatgttggctcacgcctataatcccagcacttta

SEQ ID NO: 45724 - DNA, 120 bp, synthetic construct
  source 1..120: mol_type = other DNA
agcgagactccatctcaaaaaaaaaaaaaatacaaaagtaaaatacaaaaaattactggccaggcatggtggctcacacctgtaatcccagcactttgagaggccgaagcaggtggaaca

SEQ ID NO: 45725 - DNA, 120 bp, synthetic construct
  source 1..120: mol_type = other DNA
gagattacaggcatgcaccatcacgcctagctaactttttttttttttttttttttttttcagagacaagagtttcaccatgttgcccaggctggtctcaaactcctgagctcaggcgat

SEQ ID NO: 45726 - DNA, 120 bp, synthetic construct
  source 1..120: mol_type = other DNA
ggaaagaaggtggggacagagaaccgcagaatgttcagcatcccaaagggccgtaatcgtctcattaattcctaaccaatgcaggtatcaccttatgacttccctagtagccttttctat

SEQ ID NO: 45727 - DNA, 120 bp, synthetic construct
  source 1..120: mol_type = other DNA
aagcagagggaacaagttaagtgcttgagagagtaatgagcgtggggttttcgagaaactgtcagcaagccagtctggctgcagcagagcgagggagaggggtggaaatggggttgggag

SEQ ID NO: 45728 - DNA, 120 bp, synthetic construct; identical to SEQ ID NO: 13631
  source 1..120: mol_type = other DNA

SEQ ID NO: 45729 - DNA, 120 bp, synthetic construct
  source 1..120: mol_type = other DNA
cctaactgggaggcaccccccagcaggggcacactgacacctcacatggcagggtattccaacagacctgcagctgagggtcctgtctgttagaaggaaaactaacaaccagaaaggaca

SEQ ID NO: 45730 - DNA, 120 bp, synthetic construct
  source 1..120: mol_type = other DNA
taagtgaaggagaaataaaatactttatagacaagcaaatgctgagagattttgtcgccaccaggcctgccctaaaagagctcctgaaggaagcgctaaacatggaaaggaacaaccggt

SEQ ID NO: 45731 - DNA, 120 bp, synthetic construct
  source 1..120: mol_type = other DNA
accacagtgcaatcaaactagaactcaggattaagaatctcactcaaagctgctcaactacatggaaactgaacaacctgctcctgaatgactactgggtacataacgaaatgaaggcag

SEQ ID NO: 45732 - DNA, 120 bp, synthetic construct
  source 1..120: mol_type = other DNA
ccgaatccagcagcacatcaaaaagcttatccaccatgatcaagtgggcttcatccctgggatgcaaggctggttcaatatacgcaaatcaataaatgtaatccagcatataaacagagc

SEQ ID NO: 45733 - DNA, 120 bp, synthetic construct
  source 1..120: mol_type = other DNA
atagatcaatggaacagaacagagccctcagaaataatgccgcatatctacaactatctgatctttgacaaacctgagaaaaacaagcaatggggaaaggattccctatttaacaaatgg

SEQ ID NO: 45734 - DNA, 120 bp, synthetic construct
  source 1..120: mol_type = other DNA
atgaagacacatgcacacgtatgtttattgcggcactattcacaatagcaaagacttggaaccaacccaaatgtccaacaatgatagactggattaagaaaatgtggcacatatacacca

SEQ ID NO: 45735 - DNA, 120 bp, synthetic construct; identical to SEQ ID NO: 13632
  source 1..120: mol_type = other DNA

SEQ ID NO: 45736 - DNA, 120 bp, synthetic construct
  source 1..120: mol_type = other DNA
ctttgttctactgggtaggcgctgcctggtatagagagcaggtggtccttttgtgatgtgactctagggtcccccatagtgaagactttcactcattcatttattaagtaaatatttatt

SEQ ID NO: 45737 - DNA, 120 bp, synthetic construct; identical to SEQ ID NO: 20558
  source 1..120: mol_type = other DNA

SEQ ID NO: 45738 - DNA, 120 bp, synthetic construct
  source 1..120: mol_type = other DNA
ggatcacttgagcccaagagtttgagctcaagcctggacaatatggcaagacactgtctctacaaaaaatagaaaaaattagccaagcactgtggcacatgcctgtggtcccagctattt

SEQ ID NO: 45739 - DNA, 120 bp, synthetic construct
  source 1..120: mol_type = other DNA
acacagcaagaccctgtctcaaataaataaatagccaacggtctgagatgcagaacctgatgtgactgaatttttagcagggcacagttaaatacgggaaaggttgttctgacctgggat

SEQ ID NO: 45740 - DNA, 120 bp, synthetic construct; identical to SEQ ID NO: 18712
  source 1..120: mol_type = other DNA

SEQ ID NO: 45741 - DNA, 120 bp, synthetic construct; identical to SEQ ID NO: 18713
  source 1..120: mol_type = other DNA

SEQ ID NO: 45742 - DNA, 120 bp, synthetic construct; identical to SEQ ID NO: 18714
  source 1..120: mol_type = other DNA

SEQ ID NO: 45743 - DNA, 120 bp, synthetic construct; identical to SEQ ID NO: 18715
  source 1..120: mol_type = other DNA

SEQ ID NO: 45744 - DNA, 120 bp, synthetic construct; identical to SEQ ID NO: 18716
  source 1..120: mol_type = other DNA

SEQ ID NO: 45745 - DNA, 120 bp, synthetic construct
  source 1..120: mol_type = other DNA
cagaccacctgagctcaggagttcaagaccagccttggcaacatggggaaaccccatctctactaaaatacaaaaaattagccaggtgtggtggtatgcacctgtagtcccagctactca

SEQ ID NO: 45746 - DNA, 120 bp, synthetic construct; identical to SEQ ID NO: 18717
  source 1..120: mol_type = other DNA

SEQ ID NO: 45747 - DNA, 120 bp, synthetic construct; identical to SEQ ID NO: 18718
  source 1..120: mol_type = other DNA

SEQ ID NO: 45748 - DNA, 120 bp, synthetic construct; identical to SEQ ID NO: 18719
  source 1..120: mol_type = other DNA

SEQ ID NO: 45749 - DNA, 120 bp, synthetic construct; identical to SEQ ID NO: 18720
  source 1..120: mol_type = other DNA

SEQ ID NO: 45750 - DNA, 120 bp, synthetic construct; identical to SEQ ID NO: 18721
  source 1..120: mol_type = other DNA

SEQ ID NO: 45751 - DNA, 120 bp, synthetic construct; identical to SEQ ID NO: 18722
  source 1..120: mol_type = other DNA

SEQ ID NO: 45752 - DNA, 120 bp, synthetic construct; identical to SEQ ID NO: 18701
  source 1..120: mol_type = other DNA

SEQ ID NO: 45753 - DNA, 120 bp, synthetic construct; identical to SEQ ID NO: 18702
  source 1..120: mol_type = other DNA

SEQ ID NO: 45754 - DNA, 120 bp, synthetic construct; identical to SEQ ID NO: 18703
  source 1..120: mol_type = other DNA

SEQ ID NO: 45755 - DNA, 120 bp, synthetic construct; identical to SEQ ID NO: 18704
  source 1..120: mol_type = other DNA

SEQ ID NO: 45756 - DNA, 120 bp, synthetic construct
  source 1..120: mol_type = other DNA
atcctcccaggggctggaggccacttatggggaacgagggccccgggacagagccgaactccatcctcccaggggccggaggccaccgtcagggagtcagggccccaggtggccccaggc

SEQ ID NO: 45757 - DNA, 120 bp, synthetic construct; identical to SEQ ID NO: 18705
  source 1..120: mol_type = other DNA

SEQ ID NO: 45758 - DNA, 120 bp, synthetic construct; identical to SEQ ID NO: 18699
  source 1..120: mol_type = other DNA

SEQ ID NO: 45759 - DNA, 120 bp, synthetic construct
  source 1..120: mol_type = other DNA
tgcttgaacctgggaggcagaggttgtagtgagtgagccactgcactccagcctcaggaacagagtgagaccctgtctcaaaaaaaaaaaaaaaaaaaaggaacaaaatatatgaaaaat

SEQ ID NO: 45760 - DNA, 120 bp, synthetic construct; identical to SEQ ID NO: 18700
  source 1..120: mol_type = other DNA

SEQ ID NO: 45761 - DNA, 120 bp, synthetic construct; identical to SEQ ID NO: 18706
  source 1..120: mol_type = other DNA

SEQ ID NO: 45762 - DNA, 120 bp, synthetic construct; identical to SEQ ID NO: 18707
  source 1..120: mol_type = other DNA

SEQ ID NO: 45763 - DNA, 120 bp, synthetic construct
  source 1..120: mol_type = other DNA
cgaaccgcattccggtttgcacgaggtgcacgttacttagaaaagtagccacagtctgcctgagttcccgttttaagtattttcacaacttcactgaaaagcacagcaactcactcacag

SEQ ID NO: 45764 - DNA, 120 bp, synthetic construct
  source 1..120: mol_type = other DNA
actctctgcagtccgcatgtgggattcctgagctcgccctcccaccctccgcactccgcgtgtgggattcctgagctcgccctcccaccctccgcagtccgcgtgtgggattcctgagcc

SEQ ID NO: 45765 - DNA, 120 bp, synthetic construct
  source 1..120: mol_type = other DNA
tccgcgtgtgggattcctgagcccgccctcccaccctccgcagtccgcgtgtgggattcctgagctcgccttcctgccctctgcggtctgcgtgtgggattactgagctcaccctcccgc

SEQ ID NO: 45766 - DNA, 120 bp, synthetic construct; identical to SEQ ID NO: 18708
  source 1..120: mol_type = other DNA

SEQ ID NO: 45767 - DNA, 120 bp, synthetic construct; identical to SEQ ID NO: 18709
  source 1..120: mol_type = other DNA

SEQ ID NO: 45768 - DNA, 120 bp, synthetic construct; identical to SEQ ID NO: 18710
  source 1..120: mol_type = other DNA

SEQ ID NO: 45769 - DNA, 120 bp, synthetic construct
  source 1..120: mol_type = other DNA
ccagcctgggcgacagagagagactccatctcaaaaaacaaaatgaaatagctagaagatctggaatgttcccaacacaaatgataaatgtttgatgtgatggatggtccagttaccctg

SEQ ID NO: 45770 - DNA, 120 bp, synthetic construct; identical to SEQ ID NO: 18274
  source 1..120: mol_type = other DNA

SEQ ID NO: 45771 - DNA, 120 bp, synthetic construct; identical to SEQ ID NO: 18275
  source 1..120: mol_type = other DNA

SEQ ID NO: 45772 - DNA, 120 bp, synthetic construct; identical to SEQ ID NO: 18276
  source 1..120: mol_type = other DNA

SEQ ID NO: 45773 - DNA, 120 bp, synthetic construct; identical to SEQ ID NO: 18277
  source 1..120: mol_type = other DNA

SEQ ID NO: 45774 - DNA, 120 bp, synthetic construct; identical to SEQ ID NO: 12543
  source 1..120: mol_type = other DNA

SEQ ID NO: 45775 - DNA, 120 bp, synthetic construct; identical to SEQ ID NO: 12544
  source 1..120: mol_type = other DNA

SEQ ID NO: 45776 - DNA, 120 bp, synthetic construct; identical to SEQ ID NO: 12545
  source 1..120: mol_type = other DNA

SEQ ID NO: 45777 - DNA, 120 bp, synthetic construct; identical to SEQ ID NO: 12546
  source 1..120: mol_type = other DNA

SEQ ID NO: 45778 - DNA, 120 bp, synthetic construct; identical to SEQ ID NO: 12547
  source 1..120: mol_type = other DNA

SEQ ID NO: 45779 - DNA, 120 bp, synthetic construct
  source 1..120: mol_type = other DNA
gagtcagtttacctctctgagcttcaatgtcctcacccttaaaatgagagggttccaacagatatcttctccagcacttctgactttggaagtttcaaaaccaccattggccatagacat

SEQ ID NO: 45780 - DNA, 120 bp, synthetic construct
  source 1..120: mol_type = other DNA
tctttccttccttgaagccttaacccgccacccacctacccagcctactttccctctcccatccgttccagtctcccacttctgtttctgtgagtaacggctgcttcccaaggcccacat

SEQ ID NO: 45781 - DNA, 120 bp, synthetic construct; identical to SEQ ID NO: 12548
  source 1..120: mol_type = other DNA

SEQ ID NO: 45782 - DNA, 120 bp, synthetic construct; identical to SEQ ID NO: 12549
  source 1..120: mol_type = other DNA

SEQ ID NO: 45783 - DNA, 120 bp, synthetic construct; identical to SEQ ID NO: 12550
  source 1..120: mol_type = other DNA

SEQ ID NO: 45784 - DNA, 120 bp, synthetic construct; identical to SEQ ID NO: 12551
  source 1..120: mol_type = other DNA

SEQ ID NO: 45785 - DNA, 120 bp, synthetic construct
  source 1..120: mol_type = other DNA
tggcaggggttggtgcagaccaggtgagaaagggcacgaagtgggacaaggtcccggtgagaggcacgacactgtcacctgcctcaggccgcgctcggtggggcgggggccaccagctga

SEQ ID NO: 45786 - DNA, 120 bp, synthetic construct
  source 1..120: mol_type = other DNA
ccagagagggtccctgactctgggatctggcttggatccggtagtgaggggctgacggtgggctcctggggaagtctctgcccctagaccctgctgaggcttccaagaggccttctcagg

SEQ ID NO: 45787 - DNA, 120 bp, synthetic construct
  source 1..120: mol_type = other DNA
gacagataggcctttgtcctgagaatgaggccattggatttgcattccaggaaaaaacccctggccacaaagcggagagagcctgggggaaggatttttactgtggcctttggtcctcaa

SEQ ID NO: 45788 - DNA, 120 bp, synthetic construct
  source 1..120: mol_type = other DNA
ggaggaagggagggaggaggaaaggtgaggaagggagcatggtggggtctggccctgctcccagggtccctcagctttctgggcttccttccccagcttccctgctgccccttcttggaa

SEQ ID NO: 45789 - DNA, 120 bp, synthetic construct; identical to SEQ ID NO: 11513
  source 1..120: mol_type = other DNA

SEQ ID NO: 45790 - DNA, 120 bp, synthetic construct; identical to SEQ ID NO: 11514
  source 1..120: mol_type = other DNA

SEQ ID NO: 45791 - DNA, 120 bp, synthetic construct; identical to SEQ ID NO: 32171
  source 1..120: mol_type = other DNA

SEQ ID NO: 45792 - DNA, 120 bp, synthetic construct; identical to SEQ ID NO: 32172
  source 1..120: mol_type = other DNA

SEQ ID NO: 45793 - DNA, 120 bp, synthetic construct; identical to SEQ ID NO: 22551
  source 1..120: mol_type = other DNA

SEQ ID NO: 45794 - DNA, 120 bp, synthetic construct
  source 1..120: mol_type = other DNA
cactgcactccagcatgggcgacaaagcgagactctgtctcaaaaaaaaaaaaaaaagaaaaagagaaccagattgtgaaccttgatggccttcttcaaggtaaccccatactcaaagtt

SEQ ID NO: 45795 - DNA, 120 bp, synthetic construct; identical to SEQ ID NO: 19784
  source 1..120: mol_type = other DNA

SEQ ID NO: 45796 - DNA, 120 bp, synthetic construct
  source 1..120: mol_type = other DNA
cccatctctactaaaaatacaaaaaaaaaaaaaatagccgggcatggtggcgagcgcctgtagtcccagctatgcaggaggctgaggcaggagaatggcatgaacctggaaggctgagct

SEQ ID NO: 45797 - DNA, 120 bp, synthetic construct; identical to SEQ ID NO: 20409
  source 1..120: mol_type = other DNA

SEQ ID NO: 45798 - DNA, 120 bp, synthetic construct
  source 1..120: mol_type = other DNA
catggatgaagctggaaaccatgattctcagcaaactaacacaggaacaggaaaccaaacatggcatattctcactcataagtgggagttgagcagtgagaacacatggacacaggaagg

SEQ ID NO: 45799 - DNA, 120 bp, synthetic construct
  source 1..120: mol_type = other DNA
attgtcagtcctctaagccagtgcttcttaaacttcagtgcacatacaaataacctaggaatttgttaaaatatcccccaggtgtagctgatgctgttgctttgggtagcaaggctctaa

SEQ ID NO: 45800 - DNA, 120 bp, synthetic construct; identical to SEQ ID NO: 20410
  source 1..120: mol_type = other DNA

SEQ ID NO: 45801 - DNA, 120 bp, synthetic construct
  source 1..120: mol_type = other DNA
aggttgcgaaaattttctctgattttgtaggttgcctgttcactctgatggtagtttcttttgctgtgcagaagctctttagtttaattagatcccatttgtcaattttggcttttgttg

SEQ ID NO: 45802 - DNA, 120 bp, synthetic construct
  source 1..120: mol_type = other DNA
actcctgacctcaggtgatctgcccgcttcggcctcccaaagtgctaggattacaggcatgagccacagtgcctggccccaaagagtgttttattattattattattattattattattt

SEQ ID NO: 45803 - DNA, 120 bp, synthetic construct
  source 1..120: mol_type = other DNA
cccccctccctctctccctctctctctctgtctctctctctccaggtattttttttaaatactttaagttctagggtacatgtgcacaaagtgtaggtttgttacatatgtatacatgtg

SEQ ID NO: 45804 - DNA, 120 bp, synthetic construct; identical to SEQ ID NO: 20412
  source 1..120: mol_type = other DNA

SEQ ID NO: 45805 - DNA, 120 bp, synthetic construct; identical to SEQ ID NO: 20413
  source 1..120: mol_type = other DNA

SEQ ID NO: 45806 - DNA, 120 bp, synthetic construct
  source 1..120: mol_type = other DNA
gctcactgcagacttgaattcctgggctcaagcaatcctcccacctcagcctcccaagtaaccaggattacaggtccatgcaacagcactgggctgattttttatttatttatttattta

SEQ ID NO: 45807 - DNA, 120 bp, synthetic construct; identical to SEQ ID NO: 20414
  source 1..120: mol_type = other DNA

SEQ ID NO: 45808 - DNA, 120 bp, synthetic construct; identical to SEQ ID NO: 23108
  source 1..120: mol_type = other DNA

SEQ ID NO: 45809 - DNA, 120 bp, synthetic construct; identical to SEQ ID NO: 23109
  source 1..120: mol_type = other DNA

SEQ ID NO: 45810 - DNA, 120 bp, synthetic construct; identical to SEQ ID NO: 23110
  source 1..120: mol_type = other DNA

SEQ ID NO: 45811 - DNA, 120 bp, synthetic construct; identical to SEQ ID NO: 28135
  source 1..120: mol_type = other DNA

SEQ ID NO: 45812 - DNA, 120 bp, synthetic construct
  source 1..120: mol_type = other DNA
tggaaggcctgggtttgagagaagatggtaggaggaaggtttctgattttcgaatgaaaatcagaccagcagggttttttgaaaagatcaacaacattgatagaccgctagcaagactaa

SEQ ID NO: 45813 - DNA, 120 bp, synthetic construct
  source 1..120: mol_type = other DNA
tattgatgggacatatctcaaaataataagagctatctatgacaaacccacagccaatatcatactgaatgggcaaaaactggaagcattccctttgaaaattggcacaagacagggatg

SEQ ID NO: 45814 - DNA, 120 bp, synthetic construct
  source 1..120: mol_type = other DNA
aactaccatcagagtgaacaggcaacctacagaattggaggaaatttttgtaatctactcatctgacaaaaggctaatatccagaatctataatgaactccaacaaatttacaagaaaaa

SEQ ID NO: 45815 - DNA, 120 bp, synthetic construct
  source 1..120: mol_type = other DNA
aagaaagaattttcaacccagaatctcatatccagccaaactaagcttcataagtgaaggagaaataaaatactttacagacaagcaaatgctgagagattttgtcaccaccaggcctgc

SEQ ID NO: 45816 - DNA, 120 bp, synthetic construct
  source 1..120: mol_type = other DNA
aaataaagatgttctttgaaatcaacgaggacaaagacacaacataccagaatcgctgggacacattcaaagcagtgtgtagagggaaatttatagcactaaatgcccacaagagaaagc

SEQ ID NO: 45817 - DNA, 120 bp, synthetic construct
  source 1..120: mol_type = other DNA
tggccagggcaattaggcaggagaaggaaataaagggtattcaattaggaaaagaggaagtcaaattgtccctctttgcagatgacatgactgtatatctagaaaaccccactgtctcag

SEQ ID NO: 45818 - DNA, 120 bp, synthetic construct
  source 1..120: mol_type = other DNA
agaatctacaatgaactccaacaaatttacaagaaaaaaacaaacaaccccatcaacaagtgggcaaaggatatgaacagacacttctcaaaagaagacatttatgcagccaaaagacac

SEQ ID NO: 45819 - DNA, 120 bp, synthetic construct; identical to SEQ ID NO: 28136
  source 1..120: mol_type = other DNA

SEQ ID NO: 45820 - DNA, 120 bp, synthetic construct
  source 1..120: mol_type = other DNA
aaaaaccttcaaaaaatcaatgaatccaggagctggttttttgaaaagatcaacaacattgatagactgctagcaagactaataaagaagaaaagagagaagaatcaaatagatgcaata

SEQ ID NO: 45821 - DNA, 120 bp, synthetic construct
  source 1..120: mol_type = other DNA
atcacaagcattcttatacaccaataacagacaaacagccaaatcatgagggaactcccatttacaattgcttcaaagagaataaaatactcaggaatccaacatacaagggatgtgaag

SEQ ID NO: 45822 - DNA, 120 bp, synthetic construct
  source 1..120: mol_type = other DNA
gggagaaagttttgaaatctactcgtctgacaaagggctaatatccagaatctacaaagaactccaaaaaatttacaagaaaaaaacaaccccatcaacaagtgggcaaaggatatgaac

SEQ ID NO: 45823 - DNA, 120 bp, synthetic construct; identical to SEQ ID NO: 11998
  source 1..120: mol_type = other DNA

SEQ ID NO: 45824 - DNA, 120 bp, synthetic construct; identical to SEQ ID NO: 11999
  source 1..120: mol_type = other DNA

SEQ ID NO: 45825 - DNA, 120 bp, synthetic construct; identical to SEQ ID NO: 11228
  source 1..120: mol_type = other DNA

SEQ ID NO: 45826 - DNA, 120 bp, synthetic construct
  source 1..120: mol_type = other DNA
tccttctacctcagcatcccaaagtgttgggattacaggcgtgagccattgcacttggtctagcttctatccaagatagactcctatagtggtatatagatatgactggtttccttttta

SEQ ID NO: 45827 - DNA, 120 bp, synthetic construct; identical to SEQ ID NO: 18629
  source 1..120: mol_type = other DNA

SEQ ID NO: 45828 - DNA, 120 bp, synthetic construct; identical to SEQ ID NO: 18630
  source 1..120: mol_type = other DNA

SEQ ID NO: 45829 - DNA, 120 bp, synthetic construct; identical to SEQ ID NO: 18631
  source 1..120: mol_type = other DNA

SEQ ID NO: 45830 - DNA, 120 bp, synthetic construct; identical to SEQ ID NO: 18632
  source 1..120: mol_type = other DNA

SEQ ID NO: 45831 - DNA, 120 bp, synthetic construct; identical to SEQ ID NO: 18633
  source 1..120: mol_type = other DNA

SEQ ID NO: 45832 - DNA, 120 bp, synthetic construct
  source 1..120: mol_type = other DNA
cggaagggagttccctggtagccagagctgatgtccagggtgccggcgaaggttttgggggtcgtgtggttgcttctagctccacgctccgagaactgtccattgccccctgtggcttga

SEQ ID NO: 45833 - DNA, 120 bp, synthetic construct; identical to SEQ ID NO: 18634
  source 1..120: mol_type = other DNA

SEQ ID NO: 45834 - DNA, 120 bp, synthetic construct; identical to SEQ ID NO: 18619
  source 1..120: mol_type = other DNA

SEQ ID NO: 45835 - DNA, 120 bp, synthetic construct; identical to SEQ ID NO: 18620
  source 1..120: mol_type = other DNA

SEQ ID NO: 45836 - DNA, 120 bp, synthetic construct; identical to SEQ ID NO: 18621
  source 1..120: mol_type = other DNA

SEQ ID NO: 45837 - DNA, 120 bp, synthetic construct; identical to SEQ ID NO: 18622
  source 1..120: mol_type = other DNA

SEQ ID NO: 45838 - DNA, 120 bp, synthetic construct; identical to SEQ ID NO: 18623
  source 1..120: mol_type = other DNA

SEQ ID NO: 45839 - DNA, 120 bp, synthetic construct
  source 1..120: mol_type = other DNA
ctaattaaaaaaaaaaaaaaaaaaaaaattgaaggggctgggtgcagtggcttacacctgtactcctagcattttgcgaggctgaggtaggaggatcacttgagcccaagagtttgagac

SEQ ID NO: 45840 - DNA, 120 bp, synthetic construct
  source 1..120: mol_type = other DNA
tttaaattctttacttttatttctcagataccagtaaggggaaatcatttctttttcttttgagacaggttcttgctgtgttgcccaggctggagtgcagtggcgcaatctctgctcact

SEQ ID NO: 45841 - DNA, 120 bp, synthetic construct
  source 1..120: mol_type = other DNA
tcatcgacttctctcctatattcaactttccaaaggttttttttttttttttttttttttggtgacagagtctcgctctgtcgccaggctggagtgcagtggtgccacttcagctcactg

SEQ ID NO: 45842 - DNA, 120 bp, synthetic construct
  source 1..120: mol_type = other DNA
ttaggtcaatttcattaaaacctcggttgttctttgacttcaagaacctcaccaaataacccatatataaaagccaagttcaactgaaaggtgggagaggaagggtctaaggaggagggc

SEQ ID NO: 45843 - DNA, 120 bp, synthetic construct
  source 1..120: mol_type = other DNA
gaaagtaccttcccgcgtaaagtccccttctgaaccccgaggtggaaagccctgacctccctgagccccgggccctgggcttacccggtaggtgctctccgtgagccggttcacctcctc

SEQ ID NO: 45844 - DNA, 120 bp, synthetic construct
  source 1..120: mol_type = other DNA
caaaggagttggagcgcgagctttgggcgctgccgctgtagagcgaggctgtgggcgggagagcgcggcggcacgtgggcaggaagttcttcctggcgtctgccctcgatccctcctgct

SEQ ID NO: 45845 - DNA, 120 bp, synthetic construct; identical to SEQ ID NO: 23799
  source 1..120: mol_type = other DNA

SEQ ID NO: 45846 - DNA, 120 bp, synthetic construct; identical to SEQ ID NO: 15806
  source 1..120: mol_type = other DNA

SEQ ID NO: 45847 - DNA, 120 bp, synthetic construct; identical to SEQ ID NO: 15807
  source 1..120: mol_type = other DNA

SEQ ID NO: 45848 - DNA, 120 bp, synthetic construct; identical to SEQ ID NO: 27697
  source 1..120: mol_type = other DNA

SEQ ID NO: 45849 - DNA, 120 bp, synthetic construct; identical to SEQ ID NO: 27698
  source 1..120: mol_type = other DNA

SEQ ID NO: 45850 - DNA, 120 bp, synthetic construct
  source 1..120: mol_type = other DNA
aaaagagaaaatcttgtcagaagccagagaaaacgaataccttacctgtagagaaatgagtataggaataccatttgacccagccatcccattactgggtatatacccaaaggactataa

SEQ ID NO: 45851 - DNA, 120 bp, synthetic construct; identical to SEQ ID NO: 25683
  source 1..120: mol_type = other DNA

SEQ ID NO: 45852 - DNA, 120 bp, synthetic construct; identical to SEQ ID NO: 25684
  source 1..120: mol_type = other DNA

SEQ ID NO: 45853 - DNA, 120 bp, synthetic construct
  source 1..120: mol_type = other DNA
ctcccattttgtaggttgcctgttcactctgatggtagtttcttttgctgtgcagaagctctttagtttaattagatcccatttgtcaattttggcttttgttgccattgctttggtgtt

SEQ ID NO: 45854 - DNA, 120 bp, synthetic construct
  source 1..120: mol_type = other DNA
ggccgtactgcccaaggtaatttatacattcaatgccatccccatcaagctaccaatgactttcttcacagaattggaaaaaactactttaaagttcatatggaaccaaaaaagagcccg

SEQ ID NO: 45855 - DNA, 120 bp, synthetic construct; identical to SEQ ID NO: 17053
  source 1..120: mol_type = other DNA

SEQ ID NO: 45856 - DNA, 120 bp, synthetic construct; identical to SEQ ID NO: 17054
  source 1..120: mol_type = other DNA

SEQ ID NO: 45857 - DNA, 120 bp, synthetic construct; identical to SEQ ID NO: 17055
  source 1..120: mol_type = other DNA

SEQ ID NO: 45858 - DNA, 120 bp, synthetic construct; identical to SEQ ID NO: 17056
  source 1..120: mol_type = other DNA

SEQ ID NO: 45859 - DNA, 120 bp, synthetic construct; identical to SEQ ID NO: 17057
  source 1..120: mol_type = other DNA

SEQ ID NO: 45860 - DNA, 120 bp, synthetic construct
  source 1..120: mol_type = other DNA
ggactcacctgtccttccagacacgtctccatgcccgcacgtgcgcggctgtacttacctgtccttccagacacccagacacatctccatgcatgcacgtgcgcggctggacttacctgt

SEQ ID NO: 45861 - DNA, 120 bp, synthetic construct
  source 1..120: mol_type = other DNA
ggagggtgcagtggcctccggcaatctgggctctggagagtcacctcaggggagcgtgaaatgtaaatctgatctcgaaacagggcgagcgaggcagagcattcagcgtccaggatctca

SEQ ID NO: 45862 - DNA, 120 bp, synthetic construct
  source 1..120: mol_type = other DNA
gggaggcggaagttgcagtgagccaaggtcataccactacactccagcctgggtgacagagcaagactctctctcaaaaaaaaaaaaaaagaaacccaacattttattgttactttaaaa

SEQ ID NO: 45863 - DNA, 120 bp, synthetic construct; identical to SEQ ID NO: 17058
  source 1..120: mol_type = other DNA

SEQ ID NO: 45864 - DNA, 120 bp, synthetic construct; identical to SEQ ID NO: 17059
  source 1..120: mol_type = other DNA

SEQ ID NO: 45865 - DNA, 120 bp, synthetic construct; identical to SEQ ID NO: 17060
  source 1..120: mol_type = other DNA

SEQ ID NO: 45866 - DNA, 120 bp, synthetic construct; identical to SEQ ID NO: 17061
  source 1..120: mol_type = other DNA

SEQ ID NO: 45867 - DNA, 120 bp, synthetic construct; identical to SEQ ID NO: 17062
  source 1..120: mol_type = other DNA

SEQ ID NO: 45868 - DNA, 120 bp, synthetic construct
  source 1..120: mol_type = other DNA
aaattgtaagatgatgtaaccacatctaacctaaacgctataaaccctcctcacatagacctaaaaccattaaaaaccctagaagaaaacgtaggcaataccattcaggacataggcatg

SEQ ID NO: 45869 - DNA, 120 bp, synthetic construct
  source 1..120: mol_type = other DNA
ttctcagcaaactattgcaaggataaaaaaccaaacaccgcatgttctcactcataggtgggaattgaacaatgagaacacatggacacaggaaggggaacatcacactctggggactgt

SEQ ID NO: 45870 - DNA, 120 bp, synthetic construct; identical to SEQ ID NO: 21989
  source 1..120: mol_type = other DNA

SEQ ID NO: 45871 - DNA, 120 bp, synthetic construct; identical to SEQ ID NO: 21990
  source 1..120: mol_type = other DNA

SEQ ID NO: 45872 - DNA, 120 bp, synthetic construct
  source 1..120: mol_type = other DNA
cagtacaaagtaaatcaaacttcatttgaaagaataaattaataaatatggctaattctccaccccacccccctcccaccactactgtcactactttgatttgactctcatcactccttt

SEQ ID NO: 45873 - DNA, 120 bp, synthetic construct; identical to SEQ ID NO: 5495
  source 1..120: mol_type = other DNA

SEQ ID NO: 45874 - DNA, 120 bp, synthetic construct
  source 1..120: mol_type = other DNA
ctggatgcatatagcgttcccctagcctctttccccggggagaatgtaggatacaggcccagcctcctggcctttctccatcagggactcagttgtctgggcccccccgtcactttatct

SEQ ID NO: 45875 - DNA, 120 bp, synthetic construct
  source 1..120: mol_type = other DNA
tccttcttttattcattcaacaagcatttactggacctgctatgtgccaggcctatacctggcacctgggacacagcactgtacaaagcaggctacatccctgctctcagggagttcacg

SEQ ID NO: 45876 - DNA, 120 bp, synthetic construct
  source 1..120: mol_type = other DNA
ggattacaggcgtgaaccactgcacccagcctggaaagactttaactttactctgagtgtgatgggagtgattggctggttttaaatacggaagcgacaagacctgatttataactttaa

SEQ ID NO: 45877 - DNA, 120 bp, synthetic construct
  source 1..120: mol_type = other DNA
tcctgggttcaagcaattctacctcagcctcctgagaagctgggattacaggctctccccaccacaccagcaaatgggagggatatttctttctttctttcttttttttttttcctgaga

SEQ ID NO: 45878 - DNA, 120 bp, synthetic construct
  source 1..120: mol_type = other DNA
aaaaaaaaaaaaaaaaaagaaaagtcctctctggggaagtgacatttgccctgagagctgaagggtaagaatttgcttcgtcgaggcctgtttaggcggaaacaggagtacatgaagaag

SEQ ID NO: 45879 - DNA, 120 bp, synthetic construct
  source 1..120: mol_type = other DNA
ttttattttttttatttatttattttttgagacggattcttgctctattgtccaggctggcgtgaaatggcgtgatctgggctcactgcaacctctgcctcctgggttcaagcgattcac

SEQ ID NO: 45880 - DNA, 120 bp, synthetic construct
  source 1..120: mol_type = other DNA
cctcactgtgaccttgacttgattagtgccttctgccctccctggagcctccactgcctctggaattgctcaagttcattgatgaccctctgaccctagctctttccttttttttttttt

SEQ ID NO: 45881 - DNA, 120 bp, synthetic construct
  source 1..120: mol_type = other DNA
tgatagactgaattaagaaaatgtggtgcatatacaccatggaatactatgcagccacaaaaaaggatgagttcatgtcctttgcagggacatgaatgaagctggaaaccatcattctca

SEQ ID NO: 45882 - DNA, 120 bp, synthetic construct
  source 1..120: mol_type = other DNA
agcctcccaaagtgttggattacaggcgtgagccactgcgcccagctggaaatagctttttatgaggatagtctggaatgtatataccttccgctaaaaagctatttttagtagccattt

SEQ ID NO: 45883 - DNA, 120 bp, synthetic construct; identical to SEQ ID NO: 14293
  source 1..120: mol_type = other DNA

SEQ ID NO: 45884 - DNA, 120 bp, synthetic construct
  source 1..120: mol_type = other DNA
cacacacacacacacacacacacacacacacacacacctgcctcaaaggcagggcctatatcttgctgttaattaaaatatctttggctcactaaaaatatgcctagcatatatcaggta

SEQ ID NO: 45885 - DNA, 120 bp, synthetic construct; identical to SEQ ID NO: 4685
  source 1..120: mol_type = other DNA

SEQ ID NO: 45886 - DNA, 120 bp, synthetic construct
  source 1..120: mol_type = other DNA
gttctcactcataggtgcgaattgaacaatgagaacacttggacacagagtcaggaacatcacacactagggcctgtcgggtggggggaggggggagggatagcattaggagatatacct

SEQ ID NO: 45887 - DNA, 120 bp, synthetic construct; identical to SEQ ID NO: 21725
  source 1..120: mol_type = other DNA

SEQ ID NO: 45888 - DNA, 120 bp, synthetic construct
  source 1..120: mol_type = other DNA
aaaaattacatcatctatttaaatggtagattggaaaaggacagttgaagtatatggtaatcggctgggtgtggtggctcatgcctgtaattccagcactttgggaggctgaggcaagag

SEQ ID NO: 45889 - DNA, 120 bp, synthetic construct; identical to SEQ ID NO: 11792
  source 1..120: mol_type = other DNA

SEQ ID NO: 45890 - DNA, 120 bp, synthetic construct; identical to SEQ ID NO: 11793
  source 1..120: mol_type = other DNA

SEQ ID NO: 45891 - DNA, 120 bp, synthetic construct; identical to SEQ ID NO: 15462
  source 1..120: mol_type = other DNA

SEQ ID NO: 45892 - DNA, 120 bp, synthetic construct; identical to SEQ ID NO: 15463
  source 1..120: mol_type = other DNA

SEQ ID NO: 45893 - DNA, 120 bp, synthetic construct
  source 1..120: mol_type = other DNA
aggagcttctctgcctggccgcccatcgtctgagatgtggggagcacctctgcccggccgcgaccccatttgggaggtgaggagcaactctgcccagccgccccgtctgagaagtgagga

SEQ ID NO: 45894 - DNA, 120 bp, synthetic construct; identical to SEQ ID NO: 29031
  source 1..120: mol_type = other DNA

SEQ ID NO: 45895 - DNA, 120 bp, synthetic construct; identical to SEQ ID NO: 29032
  source 1..120: mol_type = other DNA

SEQ ID NO: 45896 - DNA, 120 bp, synthetic construct
  source 1..120: mol_type = other DNA
gatggctgggtcaaatggtatttctagttctagatccctgaggaatcgccatactgacttccacaatggttgaactagtttacagtcccaccaacagtgtaaaagtgttcctatttctcc

SEQ ID NO: 45897 - DNA, 120 bp, synthetic construct
  source 1..120: mol_type = other DNA
agagccaaagacaaaaaccacatgattatctcaatagatgcagaaaaggcctttgacaaaattcaacaacccttcatgctaaaaactctcaataaattaggtattgatgggatgtatttc

SEQ ID NO: 45898 - DNA, 120 bp, synthetic construct
  source 1..120: mol_type = other DNA
caagccagaagaacaaagctggaggcatcacactacctgacttcaaactatactacaaggctacagtaaccaaaacagcatggtactggtaccaaaacagagatatagatcaatggaaca

SEQ ID NO: 45899 - DNA, 120 bp, synthetic construct
  source 1..120: mol_type = other DNA
cattgcactccagcctgggcgacagagcgagactccgtctcgaaaaaagaaaaaagacagtttatgttctcaagtagctcacaatctaggagtaataaagatgaagggttaactataaaa

SEQ ID NO: 45900 - DNA, 120 bp, synthetic construct; identical to SEQ ID NO: 29033
  source 1..120: mol_type = other DNA

SEQ ID NO: 45901 - DNA, 120 bp, synthetic construct
  source 1..120: mol_type = other DNA
ggtgaggagtgtctgcccagccgccaccccgcctaggaattgaggagtgcctctgcccggccgcaaccccatctgggaaatgaggagcgcctctgcctggccaccaccccgtctgggatc

SEQ ID NO: 45902 - DNA, 120 bp, synthetic construct
  source 1..120: mol_type = other DNA
tctaataatctgactttgagttcacagattctttcttctgcttaatcagttctatttttgatgttcttccttatattttcccccttccccctcctctcccctccccttccccctcctctc

SEQ ID NO: 45903 - DNA, 120 bp, synthetic construct; identical to SEQ ID NO: 29035
  source 1..120: mol_type = other DNA

SEQ ID NO: 45904 - DNA, 120 bp, synthetic construct
  source 1..120: mol_type = other DNA
tgtgggctcctttttggttccatatgaactttgaagtagttttttccaattctgtgaagaaagtcattggtagcttgatggggatggcattgaatctataaattaccttgggcagtatgg

SEQ ID NO: 45905 - DNA, 120 bp, synthetic construct
  source 1..120: mol_type = other DNA
ctgtattcggtttgccagtattttattgaggtttttgcatcaatgttcatcaaggatattggtctaaaattctcttttttggttgtgtctctgcccggctttggtatcaggatgatgctg

SEQ ID NO: 45906 - DNA, 120 bp, synthetic construct
  source 1..120: mol_type = other DNA
agagacagtttgttataatttctgttcttttacatttgctggggagagctttacttccaagtatgtggtcaattttggaacaggtgtggtgtggtgctgaagaaaatatatattctgttg

SEQ ID NO: 45907 - DNA, 120 bp, synthetic construct
  source 1..120: mol_type = other DNA
cttttttctctaaacttcccttctcgcttcatttcgttcatttcatcttccatcactgataccctttcttcctgttgattgcattggctcctgaggcttctgcattcttcacttagttct

SEQ ID NO: 45908 - DNA, 120 bp, synthetic construct
  source 1..120: mol_type = other DNA
caatggcgggcgcccctcccccagcctcgctgccaccttgcagtttgatctcagactgctgtgctagcaatcagggagactccgtgggcgtacgaccctccgagccaggtgtgggttata

SEQ ID NO: 45909 - DNA, 120 bp, synthetic construct; identical to SEQ ID NO: 29036
  source 1..120: mol_type = other DNA

SEQ ID NO: 45910 - DNA, 120 bp, synthetic construct
  source 1..120: mol_type = other DNA
tcggattgttgggtcaaatggtatttctagttctagatccctgaggaatcgccacactgacttccacaatggttgaactagtttacagtcccaccaacagtgtaaaagtgttcctatttc

SEQ ID NO: 45911 - DNA, 120 bp, synthetic construct
  source 1..120: mol_type = other DNA
gttcttttggcttaggattgccttggtgatgcgggctcttttttggttgcatatgaactttaaagtagttttttccaattctgtgaagaaagtcattggtagcttgatggggatggcatt

SEQ ID NO: 45912 - DNA, 120 bp, synthetic construct
  source 1..120: mol_type = other DNA
ttggtatcagaatgatgctggcctcataaaatgagttagggaggattccctctttttctgttgattggaatagtttcagaaggaatggtaccagttcctccttgtacctctgatagtatt

SEQ ID NO: 45913 - DNA, 120 bp, synthetic construct
  source 1..120: mol_type = other DNA
cctgagttctagtttgattgcactgtggtctgagagatagtttgttataaattctgttcttttacatttgctgaggagagcttagttccaagtatgtggtcaattttggaataggtgtgg

SEQ ID NO: 45914 - DNA, 120 bp, synthetic construct
  source 1..120: mol_type = other DNA
aagcttagtgtggctggatatgaaattctgggttgaaaattcttttctttaagaatgttgaatattggcctccactctcttctggcttgtagggtttctgctgagagatccgctgttagt

SEQ ID NO: 45915 - DNA, 120 bp, synthetic construct
  source 1..120: mol_type = other DNA
tgggtttttggtgtggatgtcctttctgtttgttagttttccttctaacagacaggaccctcagctgcaggtctgttgcaataccctgccgtgtgaggtgtcagtgtgcccctgttgggg

SEQ ID NO: 45916 - DNA, 120 bp, synthetic construct; identical to SEQ ID NO: 29037
  source 1..120: mol_type = other DNA

SEQ ID NO: 45917 - DNA, 120 bp, synthetic construct
  source 1..120: mol_type = other DNA
ttattgctgtcttacaaatagaaaatggaggcaggaaaattgaaatctcttgccttggggtttcatggttactggaagggttagatctagaatccaaatctcccagcccactgtgcttcc

SEQ ID NO: 45918 - DNA, 120 bp, synthetic construct; identical to SEQ ID NO: 29038
  source 1..120: mol_type = other DNA

SEQ ID NO: 45919 - DNA, 120 bp, synthetic construct
  source 1..120: mol_type = other DNA
atgcaaccaaaaaagagcctgcatcaccaaggcaatcctaagccaaaagaacaaagctggaggcatcacactacctgacttcaaactatactacaaggctacagtaaccaaaacagcatg

SEQ ID NO: 45920 - DNA, 120 bp, synthetic construct; identical to SEQ ID NO: 29039
  source 1..120: mol_type = other DNA

SEQ ID NO: 45921 - DNA, 120 bp, synthetic construct; identical to SEQ ID NO: 24515
  source 1..120: mol_type = other DNA

SEQ ID NO: 45922 - DNA, 120 bp, synthetic construct; identical to SEQ ID NO: 24516
  source 1..120: mol_type = other DNA

SEQ ID NO: 45923 - DNA, 120 bp, synthetic construct
  source 1..120: mol_type = other DNA
actcattaaccaacttcaggcttaagaaatgtttattccactgtgtttatggctttcttcattatagcctggtttctgatgagcctgagcagattaatgattctgcaaaatagtcctcag

SEQ ID NO: 45924 - DNA, 120 bp, synthetic construct
  source 1..120: mol_type = other DNA
cacctatgagtgagaacatgcggtgtttggtttttgtccttgcaatagtttgctaagaatgatggttttcagtttcatccatgtccctacaaaggacatgaactcatcattttttatggc

SEQ ID NO: 45925 - DNA, 120 bp, synthetic construct
  source 1..120: mol_type = other DNA
agtccatcttgaattgacttttgtataaggtgtaaggaagggatccagtttcagctttctacatatggctagccagttttcccagcaccatttattaaatagggaatcctttccccattg

SEQ ID NO: 45926 - DNA, 120 bp, synthetic construct
  source 1..120: mol_type = other DNA
tacgtcccatcaatacctaatttattgagagtttttagcatgaagggttgttgaattttgtcaaaggccttttctgcatcttttgagataatcatgtggtttttgtctttggttctgttt

SEQ ID NO: 45927 - DNA, 120 bp, synthetic construct
  source 1..120: mol_type = other DNA
ttctgccttcatttcgttatgtacccagtagtcattcaggagcaggttgttcagtttccatgtagttgagcggttttgagtgagattcttaatcctgaattctagtttgattgcactgtg

SEQ ID NO: 45928 - DNA, 120 bp, synthetic construct
  source 1..120: mol_type = other DNA
aaaattcttttctttaagaatgttgaatactggcccccactctcttctggcttctagagtttctgccaagagatccgctgttagtctgataggcttccctttgagggtaatccgaacttt

SEQ ID NO: 45929 - DNA, 120 bp, synthetic construct
  source 1..120: mol_type = other DNA
ttgctggtgaggaactgtgttcctttcgaggaggagaggcgctctgctgtttagagtttccagtttttctgctctgttttttccccatctttgtggttttatctacttttggtctttgat

SEQ ID NO: 45930 - DNA, 120 bp, synthetic construct
  source 1..120: mol_type = other DNA
ctcattgttcaattctcacctatgagtgagaacatgaggtatttgtttttttgtccttgtgatagtttgctgagaatgatggtttccagcttcatccatgtccctacaaaggacatgaac

SEQ ID NO: 45931 - DNA, 120 bp, synthetic construct
  source 1..120: mol_type = other DNA
gttctaacatgtaagtctttaatccatcttgaattgatttttgtataaggtgtaaggaagggatccagtttcagctttctacatatggctagccagttttcccagcaccatttgttaaat

SEQ ID NO: 45932 - DNA, 120 bp, synthetic construct
  source 1..120: mol_type = other DNA
gtcttgctgcagagtctgacactggattcccccccctcaccccgcccctggtcccactcctgcccccgccctacctccgccccaccccatcatctgtggacactggagtctggaataaat

SEQ ID NO: 45933 - DNA, 120 bp, synthetic construct
  source 1..120: mol_type = other DNA
caacaaaaaaaaaaaaaaaaaaaaaaaaaattttaaatagctgggcatggtgctgcacacctgtagtcccagctactcgggaggctgagacaggaagatcgcttgagcccaagaggtcaa

SEQ ID NO: 45934 - DNA, 120 bp, synthetic construct; identical to SEQ ID NO: 22583
  source 1..120: mol_type = other DNA

SEQ ID NO: 45935 - DNA, 120 bp, synthetic construct; identical to SEQ ID NO: 7958
  source 1..120: mol_type = other DNA

SEQ ID NO: 45936 - DNA, 120 bp, synthetic construct; identical to SEQ ID NO: 7959
  source 1..120: mol_type = other DNA

SEQ ID NO: 45937 - DNA, 120 bp, synthetic construct
  source 1..120: mol_type = other DNA
ggcctcccaaagtgctgggattacaggcgtgagccaccgcacctggcctggtcttttcactttctttatggtgtcttttaaagcatgttaaatttgcatttgttttgatgaagtccaatt

SEQ ID NO: 45938 - DNA, 120 bp, synthetic construct
  source 1..120: mol_type = other DNA
tttctctgatggccaatgatgatgagcatttttccatgtgttttttggctgcataaatgtcttcttttgagaagtgtctgttcatgtcctttgcccactttttgatggggttgtttgttt

SEQ ID NO: 45939 - DNA, 120 bp, synthetic construct
  source 1..120: mol_type = other DNA
ctctgtttgtctgttgttggtgtataagaatgcttgtgattttggtacattgattttgtatcctgagactttgctgaagttgcttatcagcttaaggagattttgggctgagacaatggg

SEQ ID NO: 45940 - DNA, 120 bp, synthetic construct
  source 1..120: mol_type = other DNA
tgaagggttttttgtgtctctatttccttcagttctgctctgattttagttatttcttgccttctgctagcttttgaatgtgtttgctcttgcttttctagttcttttcattgtgatgtt

SEQ ID NO: 45941 - DNA, 120 bp, synthetic construct
  source 1..120: mol_type = other DNA
aaactgcatcaactaacgagcaaaatcaccagctaacgtcataatgacaggatcaaattcacacataacaatattaactttaaatgtaaatggactaaattctccaattaaaagacacag

SEQ ID NO: 45942 - DNA, 120 bp, synthetic construct
  source 1..120: mol_type = other DNA
cgtctctcctcctccaaaggaacgcagttcctcaccagcaacggaacaaaggtggatggagaatgactttgacaagctgagagaagaaggcttcagacgatcgaattactctgagctacg

SEQ ID NO: 45943 - DNA, 120 bp, synthetic construct; identical to SEQ ID NO: 18367
  source 1..120: mol_type = other DNA

SEQ ID NO: 45944 - DNA, 120 bp, synthetic construct
  source 1..120: mol_type = other DNA
tgcaggttatttacatatgtatacatgtgccatgttggtgtgctgcacccagtaactcgtcatttaacattaagtatatctccaaatgctatccctccccccttccccccaccccacaac

SEQ ID NO: 45945 - DNA, 120 bp, synthetic construct
  source 1..120: mol_type = other DNA
caatggggaaacaattccctatttaataaatggtgctgggaaaactggctagccatatgtagaaagctgaaactggatcccttccttacaccttatacaaaaattaattcaagatggatt

SEQ ID NO: 45946 - DNA, 120 bp, synthetic construct
  source 1..120: mol_type = other DNA
ccaggcttatctctctggcttcaggtgaaccttccacttcagcctcccaaagtactgaggttacaggcatgagccattgcatttggcggaagcactttctttttattattattattatta

SEQ ID NO: 45947 - DNA, 120 bp, synthetic construct
  source 1..120: mol_type = other DNA
tgagatgagtaggttgcgaaaattttctcccattttgtaggttgcctgttcactctaatggtagtttcttttgctgtgcagaagctctttagtttaattagatcccatttgtcaattttg

SEQ ID NO: 45948 - DNA, 120 bp, synthetic construct
  source 1..120: mol_type = other DNA
aaggagattttgggctgagacaatggggttttctagatatacaatcatgtcgtctgcaaacagggacaatttgacttcctcttgaatacacctttatttccttctcttgcctaattgccc

SEQ ID NO: 45949 - DNA, 120 bp, synthetic construct
  source 1..120: mol_type = other DNA
agtgagctgagactgcactactgcactcctgcctgggcaacagagtgagtgagacttcatctctctttctctctctctctctctctctctctctatatatatatatataaatatatataa

SEQ ID NO: 45950 - DNA, 120 bp, synthetic construct
  source 1..120: mol_type = other DNA
cttctacatgtggcttgccaattatcctagcaccatttgttgaagagtttttatgtatagttttaaaaattatggggggaggagccaagatggccgaataggaacagctccagtatacag

SEQ ID NO: 45951 - DNA, 120 bp, synthetic construct
  source 1..120: mol_type = other DNA
aagccttcttctctcagcttgtcaaagtcattctccatccacctttgttccgttgctggtgaggaactgcgttcctttggaggaggagagaccctctgcgttttagagtttccagttttt

SEQ ID NO: 45952 - DNA, 120 bp, synthetic construct
  source 1..120: mol_type = other DNA
ttaaagttaatattgttatgtgtgaatttgatcctgtcattatgacgttagctggtgattttgctcgttagttgatgcagtttcttcctagtctcgatggtctttacattttggcatgat

SEQ ID NO: 45953 - DNA, 120 bp, synthetic construct; identical to SEQ ID NO: 45940
  source 1..120: mol_type = other DNA

SEQ ID NO: 45954 - DNA, 120 bp, synthetic construct
  source 1..120: mol_type = other DNA
gggtatccaattaggaaaagaggaagtcaaattgtccgtgtttgcagatgacatgattgtatatctagaaaaccccattgtctcagcccaaaatctccttaagctgataagcaacttcag

SEQ ID NO: 45955 - DNA, 120 bp, synthetic construct
  source 1..120: mol_type = other DNA
atgggcaaagacttcatgtccaaaacaccaaaagcaatggcaacaaaagacaaaattgacaaatggaatctaattaaactaaagagcttctgcacagcaaaagaaactaccatcagagtc

SEQ ID NO: 45956 - DNA, 120 bp, synthetic construct
  source 1..120: mol_type = other DNA
ccgcatattctcactcataggtgggaattgaacaatgagatcacatggacacaggaaggggaatatcacactctggggactgtggtagggtagggggaggggggagggatagcattggga

SEQ ID NO: 45957 - DNA, 120 bp, synthetic construct; identical to SEQ ID NO: 22560
  source 1..120: mol_type = other DNA

SEQ ID NO: 45958 - DNA, 120 bp, synthetic construct
  source 1..120: mol_type = other DNA
ccgccccgtctgagaagtgaggagcccctccacccggcagccgccccatctgagaagtaaagagcccctccgcccagcagccaccccgtctgggaagttgggggcagcccccgcctggcc

SEQ ID NO: 45959 - DNA, 120 bp, synthetic construct
  source 1..120: mol_type = other DNA
agaatcacttgaacccaggagatggaggcagcaatgagacgagattgtgccactgtactccagcctgggtgacaaagtgagactctgtctcgaaaaaaaaagaaaagaaaagaaaagaaa

SEQ ID NO: 45960 - DNA, 120 bp, synthetic construct; identical to SEQ ID NO: 19875
  source 1..120: mol_type = other DNA

SEQ ID NO: 45961 - DNA, 120 bp, synthetic construct; identical to SEQ ID NO: 19876
  source 1..120: mol_type = other DNA

SEQ ID NO: 45962 - DNA, 120 bp, synthetic construct
  source 1..120: mol_type = other DNA
tagagacccacacaactttctttcttgctagtgtaatcgttaaattgatttttccagtccatcatgtaattgttccagcgatggaatcctgctttccactcccattctgcttcatcaata

SEQ ID NO: 45963 - DNA, 120 bp, synthetic construct
  source 1..120: mol_type = other DNA
tcctgggttcaagagattctccctcctcagactcccgagtagctgggattacaggcgcgtgcaccaccatgtttggctaatttttgtacttttggtagagatggggtttcaccatgttgg

SEQ ID NO: 45964 - DNA, 120 bp, synthetic construct
  source 1..120: mol_type = other DNA
ttgcagacattacaatatcccttgtaatttaggatatatttaggtttgaaatgttcacaatgcttggacattggaaaaatatttgaaagtttacataaagtgtttcactttcatgtaaaa

SEQ ID NO: 45965 - DNA, 120 bp, synthetic construct
  source 1..120: mol_type = other DNA
aggcttctaactcaatgtacttattgtgaaggggatcaatatatattttgtatgaattcagagatacaaagaaagaataatgctgccaccaatgtttcttttcatgcctcatggtgtctg

SEQ ID NO: 45966 - DNA, 120 bp, synthetic construct
  source 1..120: mol_type = other DNA
acattattggtaaggtccagtcaagtaggcttaattagtcaacttaatcagtagttaaattttgggggattcaagagttacaggcagattttcaactgtgcaggggttggtgcccctaac

SEQ ID NO: 45967 - DNA, 120 bp, synthetic construct
  source 1..120: mol_type = other DNA
aaaccagtcaccctccccacccacaaaatacttatgttggctttaacaaaaatgttaagtggtgttttggagaggggattataccagcattactcatactgattgtaattttgacaacat

SEQ ID NO: 45968 - DNA, 120 bp, synthetic construct
  source 1..120: mol_type = other DNA
tatgtaaccaaaaaagagcctgcatagcaaaaacaatcttaagcaaaaagaagaaagctgtaggtatcatgctacctgacttcaaactatactacaaggctatagtaaccaaaacagcat

SEQ ID NO: 45969 - DNA, 120 bp, synthetic construct
  source 1..120: mol_type = other DNA
tcatttgacccagcaatcccattactgggtgtatacccaaaggaatataaattatgcaactataaaaacccatgcacaactaggtgcagtggctcacacatttaatccctgcactttggg

SEQ ID NO: 45970 - DNA, 120 bp, synthetic construct
  source 1..120: mol_type = other DNA
cacacacagaaaatgtgaatttgtatgatacaatatgcataagtaaatgtaacaactcatattgttgacctgagtattccttggaaaaatgatagtactttatacctaggctagcaattt

SEQ ID NO: 45971 - DNA, 120 bp, synthetic construct
  source 1..120: mol_type = other DNA
aagcattaatcccttttaaacaggctttttctccatgaactcatcacctcccgcaacgattcaccttctaataccagcaccttagtggttaggatgtcaacatatgaattttagggggac

SEQ ID NO: 45972 - DNA, 120 bp, synthetic construct
  source 1..120: mol_type = other DNA
tttgagaacatttattgctcaaacgtaaactattgctgaggtggtacttacaaagcttattgggcttccatcttgagtaaggtaaacatttttccttttaagaaagccagctagtagtta

SEQ ID NO: 45973 - DNA, 120 bp, synthetic construct
  source 1..120: mol_type = other DNA
caaaaggatggcactgttgctctgccaagagaagcagaatcccatccctggttatatattatgtcacagaacatttggtaatacacagagcactggtatatcagaaacatttcccaagca

SEQ ID NO: 45974 - DNA, 120 bp, synthetic construct
  source 1..120: mol_type = other DNA
tctgaataacaagtagggctctattttagtttcctttttctattttatatttccacagggtgaaatctatattttagttttctttatttaactactaaagtactggtcatatagtaagag

SEQ ID NO: 45975 - DNA, 120 bp, synthetic construct
  source 1..120: mol_type = other DNA
atacacccagccaataggagttagggaattagatagagttccccagtaaatccctccttttttcatttcttctctttgctctagctgttacttttgcttggaattcttttattttccaat

SEQ ID NO: 45976 - DNA, 120 bp, synthetic construct
  source 1..120: mol_type = other DNA
agaaattttggagtagtatgagccgatctaagtttgttttgttttgttttgttttgtttggccaaagtctctaagtccagtagaatttggaagaagtaaacattcatccagtatggttat

SEQ ID NO: 45977 - DNA, 120 bp, synthetic construct
  source 1..120: mol_type = other DNA
tccatgaagttgtatgtgttctattcttagtatcaggttctttttctactttgtggtataccaaaatgctctacagatcacccattagaattttcttcatatgtaggtttgaaaggtttt

SEQ ID NO: 45978 - DNA, 120 bp, synthetic construct
  source 1..120: mol_type = other DNA
tccataagtacaccggcacaatagatgtcctgaagataatagatctctgaggacagagaagttttgcatttggaacattctaagtccaagatgctctatgtgtctcattcctcagctggt

SEQ ID NO: 45979 - DNA, 120 bp, synthetic construct
  source 1..120: mol_type = other DNA
aagatcatctgtctgtagtgctgggaataactacagatggttcaaggtgaccaattaggaggctactaaaataatttaggtgagaagtgttggttgcttgaactagagacgtagtggcag

SEQ ID NO: 45980 - DNA, 120 bp, synthetic construct
  source 1..120: mol_type = other DNA
aaagtgcttccatgagaaatacttgagggctgaattgcgacatcataaaactcaaatactagaaaacatgaatgggatatttttacttagtaatgattagtaaaataattgggagaaaag

SEQ ID NO: 45981 - DNA, 120 bp, synthetic construct
  source 1..120: mol_type = other DNA
tcataggatatacaatgcctatatttccccaaagcatagctccttgtcctattctcctcctaccatctcttcagacagatcttccttgggaaccaaactgaagtagtcagtgtttatcac

SEQ ID NO: 45982 - DNA, 120 bp, synthetic construct
  source 1..120: mol_type = other DNA
taatccgtgaatgcattactagtaatttaatcacactggctccattttaatccacaaggcaatgtcctaggtaatttgttagttttataaaaccttttctttcatggttttctacaagct

SEQ ID NO: 45983 - DNA, 120 bp, synthetic construct
  source 1..120: mol_type = other DNA
ctcacattgaaaactcacactgattcttcaagtgtcgtgacatagcaaaacgtttgacttcaatgtccttcatctgctgatgaggagtcattatatagacgactttctcttaagcctgtt

SEQ ID NO: 45984 - DNA, 120 bp, synthetic construct; identical to SEQ ID NO: 24852
  source 1..120: mol_type = other DNA

SEQ ID NO: 45985 - DNA, 120 bp, synthetic construct
  source 1..120: mol_type = other DNA
cttccttccttccttcctccctccctccctccagtctctcctttcttccttccttccttcctttattcttccctttttccctttattcattagctgggcaagtgcatccagatgtcttcc

SEQ ID NO: 45986 - DNA, 120 bp, synthetic construct; identical to SEQ ID NO: 24853
  source 1..120: mol_type = other DNA

SEQ ID NO: 45987 - DNA, 120 bp, synthetic construct
  source 1..120: mol_type = other DNA
acagatttcaacttggaatcatgagaatataattgccttacatattcttcctgctttagaaaagctgtatgttattttagtttaacttccttttatgaacctacactcctgcctagcagt

SEQ ID NO: 45988 - DNA, 120 bp, synthetic construct
  source 1..120: mol_type = other DNA
ttccattcagtgttttattctctttagtatatctgcacaaagctattctaacttctgttttttcacttttaataatggaatatgtgtcacaatctggacaaggtcattccaatccctgac

SEQ ID NO: 45989 - DNA, 120 bp, synthetic construct
  source 1..120: mol_type = other DNA
tagactcttctgaaatgacagtgatgaatgtgatttctgaatgacttgctaattgcagctaagtcagtcacaggattttgtttcttctgtccaaggcggatgtgccataatgaaaaccgc

SEQ ID NO: 45990 - DNA, 120 bp, synthetic construct
  source 1..120: mol_type = other DNA
agaactgtatgctgcatggtttggaatcaccagctttgcaaccagagtctgctactaaaagctggttgaatttgcatgaagttattcaaattatcagagcgtatttatccattaatttgc

SEQ ID NO: 45991 - DNA, 120 bp, synthetic construct
  source 1..120: mol_type = other DNA
gccaccgctccggccaatagatgatattttttaaaggaagagtacaggaaaagagaagaaaagagaaataagaactgagctctgggaagatttaggaggttgggaaggtgggaagaatct

SEQ ID NO: 45992 - DNA, 120 bp, synthetic construct
  source 1..120: mol_type = other DNA
gatgatttctgggtttccatgactccactgaaagagatgcttcaaggaggagagagactacacacacatcaaatactgatgattcagaaataattaagtgacttcgcaacatggaaatac

SEQ ID NO: 45993 - DNA, 120 bp, synthetic construct
  source 1..120: mol_type = other DNA
ggatgagtaagattcagcaggctttaagcagttgaatgcagcaagaataaaatgtaaatagtatactctgatgtaatctagtagaatctactttaagagagtttattctgtggaagaagg

SEQ ID NO: 45994 - DNA, 120 bp, synthetic construct
  source 1..120: mol_type = other DNA
gctgccctggaacacgaccatgtgtctcctctcattctccctgtcagctttcttactctcttctatgccattctctcttctgcacacaaaatgatttttctaaaattcaaatttgatagc

SEQ ID NO: 45995 - DNA, 120 bp, synthetic construct
  source 1..120: mol_type = other DNA
gacaccgtgtctttaggaggttatgttaaataaatacaatcaaaatctctaactttaaaacaactatgatcgatcatattttccttaagaaattattacttttttggggggttggtggag

SEQ ID NO: 45996 - DNA, 120 bp, synthetic construct
  source 1..120: mol_type = other DNA
tgaactcctgacctcaagtggcccaccgaactgatcctcccataatgttgagattacaggcatgagccactacacctggctgatgtattttaatgcaaaaattatttactcatagtgaaa

SEQ ID NO: 45997 - DNA, 120 bp, synthetic construct
  source 1..120: mol_type = other DNA
gccatgattgcaccactgcaccccagcctgggagacagagcaagatcctgtcttttcaaaaaaaaggctgtgactatactgtggttactttatttctgacaaccaaaaagactaattttg

SEQ ID NO: 45998 - DNA, 120 bp, synthetic construct
  source 1..120: mol_type = other DNA
tagtactccccaatgataatgtacacaaatcctctaagagaagtgtcatggcttttataatgattaaacttacagtaatagcagcagctcactttaaggatgtctagtacatcattgtct

SEQ ID NO: 45999 - DNA, 120 bp, synthetic construct
  source 1..120: mol_type = other DNA
tgctgggagtggggatgcattgtgttcgttagctctgttttggggctatctggagaattaagttcctccatttgaaatgaatggtaagtttttcaacattggcttccttagcagtgtttg

SEQ ID NO: 46000 - DNA, 120 bp, synthetic construct
  source 1..120: mol_type = other DNA
agtactgagcccagtgaggattaagaaataataatcaaaacagtaaatttagagtgacaaggtagctaggtggtctagtaaaaagaaatgggctttggtgtcagaaagacttggatacag

SEQ ID NO: 46001 - DNA, 120 bp, synthetic construct
  source 1..120: mol_type = other DNA
tgaatatgcatatactctaatcgtgtgtgagtattggagaggtgcttccttaaatgccccctcagatatgaaagtatagtctggtcattaaaggactggggtccatagcagtttacacca

SEQ ID NO: 46002 - DNA, 120 bp, synthetic construct
  source 1..120: mol_type = other DNA
tctgagtaactaacagaatatctgacgccaaagttgatggagaaagcaagattaggatttgtacatcccagaaatacagtaatttttcgtaagtgttaggtttctttgacttccacaatg

SEQ ID NO: 46003 - DNA, 120 bp, synthetic construct
  source 1..120: mol_type = other DNA
gctgtggaattttgagtagcttcagctctgtaagcctcaatatccttatcaacacctgttgaggatgatgatacttctttagagaattgctacaaccatgaaagtgaagtcctgagcagg

SEQ ID NO: 46004 - DNA, 120 bp, synthetic construct
  source 1..120: mol_type = other DNA
cagattaatcattataatcactgtaccattcccatcagttcacaatcatgttgcaatattccccatgaaaaagcaaggccaatcgaaaacacctctaccctctcttgtccagccatcccc

SEQ ID NO: 46005 - DNA, 120 bp, synthetic construct
  source 1..120: mol_type = other DNA
atttctcaactggattgctgtaataacctcctagttcttctgtacacttcatgcttgtgtacctaccagtcagagatttctttataatgtttgagccaaaatatgctactcaaattcctg

SEQ ID NO: 46006 - DNA, 120 bp, synthetic construct
  source 1..120: mol_type = other DNA
gataaagtttacctagtacactgagaatggtaacttcataaggaggatgagacatatttctgccaacaatatattcttatatttaactactgtttttctgattttaggactactaaagca

SEQ ID NO: 46007 - DNA, 120 bp, synthetic construct
  source 1..120: mol_type = other DNA
attctcctgccttagcttccagagttgctgggattaaaagcgtgcaccaccacacccagctaatttttgtattcttagtagagatggggtttaccatattagccaggcagatctcgaact

SEQ ID NO: 46008 - DNA, 120 bp, synthetic construct
  source 1..120: mol_type = other DNA
ctgcactgcgagagagtattctgaaatacttgatcaaacatatctcagttttatagctctctttgtagatttgcccctttgggggacatcggatttctctatctcattccactgtcattc

SEQ ID NO: 46009 - DNA, 120 bp, synthetic construct
  source 1..120: mol_type = other DNA
taatagaatgcatatacctcacaccttgtcattgtgatagtacactgttcatgttaagagtatctttaactgatattattttgatatattgaagagacctctaagaattgtattgtggta

SEQ ID NO: 46010 - DNA, 120 bp, synthetic construct
  source 1..120: mol_type = other DNA
gcagcatgtgtgctgtgatgttacttccaaattactttgttaagtagcttgtgattttatgatatcaaaacaggacaaaataaaagtgacatgtcagaacatttattcctggcaaaaaag

SEQ ID NO: 46011 - DNA, 120 bp, synthetic construct
  source 1..120: mol_type = other DNA
tgtataggtagcaattccagttagcaaaggcctaaattatattatgacttctattctgtaagaaatcttaaaacactgaaaccaaagacatcaaatttgcatgtcctttagtgctagctc

SEQ ID NO: 46012 - DNA, 120 bp, synthetic construct
  source 1..120: mol_type = other DNA
tgggcttcaagcagtcctcctgccttggcttcccaaagtggtgggattacaggcatgaaccaccatgttcagcctaagattattcttacatgaaagctttacaaagaaattaaaataaac

SEQ ID NO: 46013 - DNA, 120 bp, synthetic construct
  source 1..120: mol_type = other DNA
aaatcaaaagttttgtttgtgaaaacatagtgtactcctttaaactctccaattaaaaaaatactgtgtagacatactatataagacactccagtactggcataagaatagacatgagac

SEQ ID NO: 46014 - DNA, 120 bp, synthetic construct
  source 1..120: mol_type = other DNA
aaaagcacaatgagatgtcattacaaagccagaagaacagctaaaattgaagattgattagttgcaagtgatgctgaagatgtgaaacaagtggggctctggtacatcactgcttttggg

SEQ ID NO: 46015 - DNA, 120 bp, synthetic construct
  source 1..120: mol_type = other DNA
tagaaagaaaggggcctaggaggaaagtctttgcccttggaaattacagatttgggacatcaagtctgtggtcagaaagatgtggatagatttccagacctaacagttatcaactttgtt

SEQ ID NO: 46016 - DNA, 120 bp, synthetic construct
  source 1..120: mol_type = other DNA
caggttctgtttcaagaacgtagtttagtatggttgaggaagaacagcttacaatgaaagaggaaatagacaagttacagtcaacttctgtgagagtgaacaagaagtctgaagcaattg

SEQ ID NO: 46017 - DNA, 120 bp, synthetic construct
  source 1..120: mol_type = other DNA
atggccccagtcaaacacaggctgcctcaaatctgatcaggcctattaggaaaaaaagaaaaaccaaacaatacaatggcaaatgtatattttgggtaaactgagggccaactgcatcac

SEQ ID NO: 46018 - DNA, 120 bp, synthetic construct
  source 1..120: mol_type = other DNA
aagttcaagtaatatgtctggcatgtcagtgagaaaatcaccatccacggtcggaccaaagtttactgacaaaggagtcccataggggacaacaaatgcttcattcagaagaatttcttg

SEQ ID NO: 46019 - DNA, 120 bp, synthetic construct
  source 1..120: mol_type = other DNA
gttaccgtgccaccaaaaactgtcaagttcatccctctgacttttccattctttgttgcaattatgatgtcatcttcagtatgtgacttcccaataagcatgcagagcaaaagaaaccaa

SEQ ID NO: 46020 - DNA, 120 bp, synthetic construct
  source 1..120: mol_type = other DNA
ataaacatgagggactctttaccagatttataatgtcaatagagagaaccaggggctagcattataatgtctgggagaagattgtggcttaagaggaattttatactcagtattactcaa

SEQ ID NO: 46021 - DNA, 120 bp, synthetic construct
  source 1..120: mol_type = other DNA
ttctcaaagaaagagaataaataactattctaatgcctatgtcccagacgtagggtatcatatttcaaatcagcctaattcaccaatggtcataggatatctagtgacctacaagtattt

SEQ ID NO: 46022 - DNA, 120 bp, synthetic construct
  source 1..120: mol_type = other DNA
aataaggtgcaaagctgattgggcggttcgttctaagctgcaatttaataaattaattgcatcatccctggttgtacccattctccctcttgcctagctcagtcaatgttcttctaagtc

SEQ ID NO: 46023 - DNA, 120 bp, synthetic construct
  source 1..120: mol_type = other DNA
acatgtgcacaacgtgcaggtttgatcgtttttcttttaataaattctggtgcaattggatactgtctcacatgattctgagagaacatagtagcataaacattatcataaaaatggggc

SEQ ID NO: 46024 - DNA, 120 bp, synthetic construct
  source 1..120: mol_type = other DNA
tgagtcttctctgaaaattaaatctcctcttaggttgctatctattcaattacaattctcttaacatctgggaccgtctaattttggtaagaatgagcagatgctggcaagaaaccatcg

SEQ ID NO: 46025 - DNA, 120 bp, synthetic construct
  source 1..120: mol_type = other DNA
aaagtgaacacaaagggcaaaggggacacgctcataaatcactgtaaatcaaattagaaaacaggttttgtttttatttacataaaataaacagacctctcatttgccagttgttactgt

SEQ ID NO: 46026 - DNA, 120 bp, synthetic construct
  source 1..120: mol_type = other DNA
gggctgagacgatggggttttctaaatatacaataatctcatctgcaaacagggacaattttacttcctcttttcctaattgaaaaccctttatttgtttctcttgcctgattgcggcta

SEQ ID NO: 46027 - DNA, 120 bp, synthetic construct
  source 1..120: mol_type = other DNA
tctgatggccggtgatggtgagcattttttcatgtggtttttggctgcataaatgtcttcttctgagaagtgtctgttcatgtccttcgcccactttttgatggggttgtttgtcttttt

SEQ ID NO: 46028 - DNA, 120 bp, synthetic construct
  source 1..120: mol_type = other DNA
agcaattgtgaatgggagttcactcatgatttggctctctgtttgtcttttattggtgtataagaatgcttgtgatttttgtacattgattttgtatcctgagactttgctgaagttgct

SEQ ID NO: 46029 - DNA, 120 bp, synthetic construct
  source 1..120: mol_type = other DNA
aataaagctctgatcataacacttctttgcttaaaatcttctcagtgtttaatagtaaagtccaaataagcaatggggaaacaattccctatttaataaatggtgctgggaaaactggct

SEQ ID NO: 46030 - DNA, 120 bp, synthetic construct
  source 1..120: mol_type = other DNA
ttcttgtgatagtttactgagaatgatgatttccaatttcatccatgtccctacaaaggacatgaactcatcattttttatggctgcatagtattccatggtgtatatgtgccacatttt

SEQ ID NO: 46031 - DNA, 120 bp, synthetic construct; identical to SEQ ID NO: 28109
  source 1..120: mol_type = other DNA

SEQ ID NO: 46032 - DNA, 120 bp, synthetic construct; identical to SEQ ID NO: 20554
  source 1..120: mol_type = other DNA

SEQ ID NO: 46033 - DNA, 120 bp, synthetic construct
  source 1..120: mol_type = other DNA
tggtgatggtgatggtactggtgatggtggtggtggtagtgatggtggtggtaatggtggtggtggtgatggtggtggtaatggtggtggtggtgatggtggtgatgatggtgatggtac

SEQ ID NO: 46034 - DNA, 120 bp, synthetic construct
  source 1..120: mol_type = other DNA
actattaaaaaaacataatatcccaacagacagagggccaaggattaaatgctcttctagctctgcagaatgcaaagcaagacaaggaagaaaggaaggaaggaaggaaggaaggaaggg

SEQ ID NO: 46035 - DNA, 120 bp, synthetic construct; identical to SEQ ID NO: 14639
  source 1..120: mol_type = other DNA

SEQ ID NO: 46036 - DNA, 120 bp, synthetic construct; identical to SEQ ID NO: 19104
  source 1..120: mol_type = other DNA

SEQ ID NO: 46037 - DNA, 120 bp, synthetic construct; identical to SEQ ID NO: 19105
  source 1..120: mol_type = other DNA

SEQ ID NO: 46038 - DNA, 120 bp, synthetic construct; identical to SEQ ID NO: 19106
  source 1..120: mol_type = other DNA

SEQ ID NO: 46039 - DNA, 120 bp, synthetic construct
  source 1..120: mol_type = other DNA
tatgagttgaaggaagacggttttgcatgactatgctatgcccctgtatacgcaaagatgtagagacacacacacacagacatacacacacacacacacacagagacacacacagacaca

SEQ ID NO: 46040 - DNA, 120 bp, synthetic construct; identical to SEQ ID NO: 19107
  source 1..120: mol_type = other DNA

SEQ ID NO: 46041 - DNA, 120 bp, synthetic construct; identical to SEQ ID NO: 19108
  source 1..120: mol_type = other DNA

SEQ ID NO: 46042 - DNA, 120 bp, synthetic construct; identical to SEQ ID NO: 19109
  source 1..120: mol_type = other DNA

SEQ ID NO: 46043 - DNA, 120 bp, synthetic construct; identical to SEQ ID NO: 19110
  source 1..120: mol_type = other DNA

SEQ ID NO: 46044 - DNA, 120 bp, synthetic construct; identical to SEQ ID NO: 19111
  source 1..120: mol_type = other DNA

SEQ ID NO: 46045 - DNA, 120 bp, synthetic construct
  source 1..120: mol_type = other DNA
tgatatttgcatcctatgacaacaaaataacaccactactgtgtaatcaaccacactagggttgctaccatctctgaccctttgtctttggatgctgttaagctaaaagcggaccaggat

SEQ ID NO: 46046 - DNA, 120 bp, synthetic construct
  source 1..120: mol_type = other DNA
ctgttgatatggtacgttccattgatttgcaatgttaagtctctcttggatgtctgagacaaatcctgcgtgggtagggtctgtaattctttttgtgcactgctggattgaatttgtcga

SEQ ID NO: 46047 - DNA, 120 bp, synthetic construct; identical to SEQ ID NO: 21226
  source 1..120: mol_type = other DNA

SEQ ID NO: 46048 - DNA, 120 bp, synthetic construct
  source 1..120: mol_type = other DNA
caggttcacgcgattctcctgcctcagcctcctgagtagctgggattacaagcaggtgccaccatgcctggtgaatttttgtatttttttagtagagacaggttttcaccatgttggcca

SEQ ID NO: 46049 - DNA, 120 bp, synthetic construct; identical to SEQ ID NO: 23428
  source 1..120: mol_type = other DNA

SEQ ID NO: 46050 - DNA, 120 bp, synthetic construct; identical to SEQ ID NO: 23429
  source 1..120: mol_type = other DNA

SEQ ID NO: 46051 - DNA, 120 bp, synthetic construct; identical to SEQ ID NO: 8484
  source 1..120: mol_type = other DNA

SEQ ID NO: 46052 - DNA, 120 bp, synthetic construct
  source 1..120: mol_type = other DNA
ccacgaacacaccacagaaacatgtacacacagtccacacagcctgcagctccaggaagtctctgagctactcaattgccaccccccacccccaccaggacttctgtggattggctggga

SEQ ID NO: 46053 - DNA, 120 bp, synthetic construct; identical to SEQ ID NO: 28344
  source 1..120: mol_type = other DNA

SEQ ID NO: 46054 - DNA, 120 bp, synthetic construct; identical to SEQ ID NO: 28345
  source 1..120: mol_type = other DNA

SEQ ID NO: 46055 - DNA, 120 bp, synthetic construct
  source 1..120: mol_type = other DNA
gagcaagatgaactctgactaggtggtgtagcaataggtgaaggactatggggtgatctaggactattatcataagctgaaaggccaggccaaatatcaccggatgtggctgatgactta

SEQ ID NO: 46056 - DNA, 120 bp, synthetic construct; identical to SEQ ID NO: 33565
  source 1..120: mol_type = other DNA

SEQ ID NO: 46057 - DNA, 120 bp, synthetic construct
  source 1..120: mol_type = other DNA
tgaactagtttacagtcccaccaacagtgtaaaagtgttcctatttctccacatcctctccagcacctgttgtttcctgactttttaatgattgccattctaactggtgtgatatgatat

SEQ ID NO: 46058 - DNA, 120 bp, synthetic construct
  source 1..120: mol_type = other DNA
cttttagcttaggattgacttggccatgcgggctcttttttggttccatatgaactttaaagtagttttttccaattctgtgaagaaagtcattggtagcttgatggggatggcattgaa

SEQ ID NO: 46059 - DNA, 120 bp, synthetic construct
  source 1..120: mol_type = other DNA
gtgctgctggattcggtttgccagtattttattgaggatttttgcatcaatgttcatcaaggatattggtctaaaattctcttttttggttgtgtctctgcccggctttggtatcagaat

SEQ ID NO: 46060 - DNA, 120 bp, synthetic construct
  source 1..120: mol_type = other DNA
ttgagcggctttgagtgagattcttaatcctgagttctagtttgattgcactgtggtctgagagagagtttgttataatttctgttcttttacatttgctgaggagagctttacttccaa

SEQ ID NO: 46061 - DNA, 120 bp, synthetic construct
  source 1..120: mol_type = other DNA
ctggtttgtagggtttctgctgagagatccgctgttagtctgatgggcttccctttgtgggtaacccgacctttctctctggctgcccttaacattttttccttcatttcaactttggtg

SEQ ID NO: 46062 - DNA, 120 bp, synthetic construct
  source 1..120: mol_type = other DNA
cagctgcaggtctgttggaataccctgccgtgtgaggtgtcagtgtgcccctgctggggggtgcctctcagttaggctgctcgggggtcaggggtcagggacccacttgaggaggcagtc

SEQ ID NO: 46063 - DNA, 120 bp, synthetic construct; identical to SEQ ID NO: 33566
  source 1..120: mol_type = other DNA

SEQ ID NO: 46064 - DNA, 120 bp, synthetic construct
  source 1..120: mol_type = other DNA
gggaggcggtggttgcagtgagttgagattgagccactgcactccagcccaggcgacagagctagactccatctcaaaacaacaacaacaaacaaactatatatatatatatttttatat

SEQ ID NO: 46065 - DNA, 120 bp, synthetic construct; identical to SEQ ID NO: 12357
  source 1..120: mol_type = other DNA

SEQ ID NO: 46066 - DNA, 120 bp, synthetic construct; identical to SEQ ID NO: 12358
  source 1..120: mol_type = other DNA

SEQ ID NO: 46067 - DNA, 120 bp, synthetic construct; identical to SEQ ID NO: 12359
  source 1..120: mol_type = other DNA

SEQ ID NO: 46068 - DNA, 120 bp, synthetic construct
  source 1..120: mol_type = other DNA
agcaattctcctgcctcagcctctcgagtagctgggactacaggcacctgtcaccacgcccggctaatgtatttgtatttttagttgagatggggttttgccatgttggccaggctagtc

SEQ ID NO: 46069 - DNA, 120 bp, synthetic construct; identical to SEQ ID NO: 33752
  source 1..120: mol_type = other DNA

SEQ ID NO: 46070 - DNA, 120 bp, synthetic construct
  source 1..120: mol_type = other DNA
gggggcttaaattgaaggaagatgagatcgggggcaattcatactagcaccggcaagccagaggggagatccggcgtgcaagccctccacccgcttcgcgccaggcctggaggcaagggg

SEQ ID NO: 46071 - DNA, 120 bp, synthetic construct
  source 1..120: mol_type = other DNA
gatctgcccatcttggcctcccaaagtgctgggattacaggcgtgagccaccgcacccgtctttttttttttttttttttttttttttttttttttttaaccggagacagtctagctctg

SEQ ID NO: 46072 - DNA, 120 bp, synthetic construct; identical to SEQ ID NO: 35277
  source 1..120: mol_type = other DNA

SEQ ID NO: 46073 - DNA, 120 bp, synthetic construct
  source 1..120: mol_type = other DNA
ggttgcagtgagccgagatcgagatcgtgccactgcactccagcctgggtgacagagcgagattcaatctaaaaaaaaaaaaaaaaaaaaaaaaaaaaaaaaagagggaaaaaaggaaag

SEQ ID NO: 46074 - DNA, 120 bp, synthetic construct
  source 1..120: mol_type = other DNA
actgcaggcacatgccaccatgcttggctaatgcttttgaaaattttttttttatagagacagggtctcactatattgcccaggctggtcttaaactcatgggctcaagtgatcctcctg

SEQ ID NO: 46075 - DNA, 120 bp, synthetic construct
  source 1..120: mol_type = other DNA
ctgtgtaaatcccaggtcccactcagattatgagtcagttctctgcaggtggaacccagggaggtgttttttttgtttttgcttttatttttgagacgaagtcttgctgtgtcgcccagg

SEQ ID NO: 46076 - DNA, 120 bp, synthetic construct
  source 1..120: mol_type = other DNA
ggagcagtggggccctgggttccaggggtgtctggcaggcccctccttactctacctctgttggcctctggatggaggtgctggccgcagtcgggctctgcctctgactaagggttgggg

SEQ ID NO: 46077 - DNA, 120 bp, synthetic construct
  source 1..120: mol_type = other DNA
caacaatcctggctcttgctgaagtagactaggggcttccccgaggggcggctccacctcatgctgagacctctgcatgccttgggggtggaaatatttgatgagactcccaggggtcct

SEQ ID NO: 46078 - DNA, 120 bp, synthetic construct
  source 1..120: mol_type = other DNA
gttaaggcccaggcccagggcaggggtcagggattctcctctcacacagcacgtgggtggcaggaccaacaccgggtctgacctcccagccgggggtacaggctgctaaccccaggcctg

SEQ ID NO: 46079 - DNA, 120 bp, synthetic construct
  source 1..120: mol_type = other DNA
cccctgccatgtgtgaggatgcggcaggcagagggcactgatgaaattcagcccaggctggggctgcagcatctctgcctccatctcaccaaccctcacaggctatgaaggacctggaac

SEQ ID NO: 46080 - DNA, 120 bp, synthetic construct
  source 1..120: mol_type = other DNA
tcaaggagaccaagaggctgaaatagtcagcactgctgtgctgtggggtcctaaagtctgctgtcctccttcctgcagaccagggctgaaggagggtgcctgggtgctcttgccatgggt

SEQ ID NO: 46081 - DNA, 120 bp, synthetic construct
  source 1..120: mol_type = other DNA
tggaaacctctggctaatcgggccatccgtagagcgggaaccttcctgaggtgtccttgggccacccccaagtgttgggccatctgccaagagacagcgacccaaagccgaaggacaggt

SEQ ID NO: 46082 - DNA, 120 bp, synthetic construct
  source 1..120: mol_type = other DNA
taaataaccttttgatacttgaatatttgtaagttttatacatagtttctaatttttttccgaacagatccagatacctaataagatgctggaatgtaatccctggacaatccgtgtcct

SEQ ID NO: 46083 - DNA, 120 bp, synthetic construct
  source 1..120: mol_type = other DNA
caattttttattccctccccaacctccttccccatacgactttttatttatgtaggatgtgtgctgtctaatgatgggatgaccacacttttccatgttctaaaagtgctcctctcccgc

SEQ ID NO: 46084 - DNA, 120 bp, synthetic construct
  source 1..120: mol_type = other DNA
ggcacgagcccctcagtcttgggtggtttctgcctggtccgggatttggtgttgctgctgagtccagcctttccaccacctccgcatgggccgtgggtgttgtcagctgcctcccgcctt

SEQ ID NO: 46085 - DNA, 120 bp, synthetic construct
  source 1..120: mol_type = other DNA
acccatgctcacaggccgatatttttttcttttagagacagggtctcactttgtcacccaagctggagtgcagtggtgcgattatagctcaatgcagcctccaattcccggacacaaggg

SEQ ID NO: 46086 - DNA, 120 bp, synthetic construct
  source 1..120: mol_type = other DNA
cggggtttcctcatgttggccaggctcgtgtcgaactcctgacctcaggtgatccacctgccttggcctcccaaagtgctaggattacaggcatgagccatggcatcacttaaacgtagt

SEQ ID NO: 46087 - DNA, 120 bp, synthetic construct
  source 1..120: mol_type = other DNA
gtgtgtgtgtgtgtgtgtgtgtgtgtgtgtgtgtgtgtgtgtacatgtgtgtaaggtgtgtgtgtgtgtgtgtgtgtgtgtgtgtgtgtacatgtgtgtaagcaccacgtgaggcaagca

SEQ ID NO: 46088 - DNA, 120 bp, synthetic construct; identical to SEQ ID NO: 25050
  source 1..120: mol_type = other DNA

SEQ ID NO: 46089 - DNA, 120 bp, synthetic construct; identical to SEQ ID NO: 25051
  source 1..120: mol_type = other DNA

SEQ ID NO: 46090 - DNA, 120 bp, synthetic construct; identical to SEQ ID NO: 25052
  source 1..120: mol_type = other DNA

SEQ ID NO: 46091 - DNA, 120 bp, synthetic construct
  source 1..120: mol_type = other DNA
acattaagtgcagcgagagagaaagggcaggttacccacaaagggaagtccatcagactaacagcatctttcggcagaaactctacaagccagaagagagtgggggccaatattcaacat

SEQ ID NO: 46092 - DNA, 120 bp, synthetic construct; identical to SEQ ID NO: 26800
  source 1..120: mol_type = other DNA

SEQ ID NO: 46093 - DNA, 120 bp, synthetic construct
  source 1..120: mol_type = other DNA
gcagaggctgcaatctcggcactttggggggccaaggcaggcagctgggaggtgggggttgtagcgagccgagatcacgccactgcactccagcctgggcaccattgagcactgagtgaa

SEQ ID NO: 46094 - DNA, 120 bp, synthetic construct
  source 1..120: mol_type = other DNA
aatacacctgcctcggtctcccaaagtgttgggattacagacgtgagccactgcgcctggactagaagggacattttaggttaaacgtttaactttacaattagggaaaatactattaaa

SEQ ID NO: 46095 - DNA, 120 bp, synthetic construct
  source 1..120: mol_type = other DNA
cttctcagatggggcagccgggcagagacgctcctcacctcccagacagggtcgcggccgggcagaggcgctcctcacatcccagacggggcggcggggcagaggcgccccccacatctc

SEQ ID NO: 46096 - DNA, 120 bp, synthetic construct
  source 1..120: mol_type = other DNA
tctaaattgattgagatctgcctccgacacttttcaatttacaaaaacatacctaagaattggccacccaggggcaggaagctggggtttctatccagtaactctcaccccgctggccct

SEQ ID NO: 46097 - DNA, 120 bp, synthetic construct
  source 1..120: mol_type = other DNA
catgcccatcatatccattgacttcagtcccatttcagtttaagaaattgagggctaaagagacagatgcaacttatccatggtcaacagctagcaagtggtacaactgctcctaaccac

SEQ ID NO: 46098 - DNA, 120 bp, synthetic construct
  source 1..120: mol_type = other DNA
cctagagccttaccccagctcagtcactctctttttgcgtttttttgtttttttgagatggagtctcgctgtgtggcccaggctggagagcagtggtgcaatctgtcctcactgcaacct

SEQ ID NO: 46099 - DNA, 120 bp, synthetic construct
  source 1..120: mol_type = other DNA
catggcagcacatgcctggacagtgaggaggtcctgccttgcttcagtgaccctgtcttacactggatgccctggtttcccaaggacattttcctgagaagcctgaagggaaaccaactc

SEQ ID NO: 46100 - DNA, 120 bp, synthetic construct
  source 1..120: mol_type = other DNA
ccatttcacctatcacagtgcaaataaagagggcatagatgtgtagacaactggatgtgtagtacacccttaatccatctaggatccactactggcctcccttttctttcggctaatttg

SEQ ID NO: 46101 - DNA, 120 bp, synthetic construct
  source 1..120: mol_type = other DNA
tctttccttccttccctccatccaaccatccatccatccatccatccttccatccatccatccccacctcccaccttcctcccttccttccttctatccatccagccattcatccatcca

SEQ ID NO: 46102 - DNA, 120 bp, synthetic construct
  source 1..120: mol_type = other DNA
tgacccctgagtagcctaactgggaggcatcccccagtaggggcagactgacacctcacacagctgggtactcctctgagacaaaacttccagaggaacgatcaggcagcaacatttgct

SEQ ID NO: 46103 - DNA, 120 bp, synthetic construct
  source 1..120: mol_type = other DNA
aaatgaaggaaaaaatgttaaaggcagccagagagaaaggtcgggttacccacaaagggaagcccatcagactaacagctgatctctcggcagaaactctacaagccagaagagagtggg

SEQ ID NO: 46104 - DNA, 120 bp, synthetic construct
  source 1..120: mol_type = other DNA
ataatgggagactttaacaacccactgtcaacattagacagatcaacgaaacagaaagttaacaaggatatccaggaattgaactcagctctgcaccaagcggacctaatagacatctac

SEQ ID NO: 46105 - DNA, 120 bp, synthetic construct
  source 1..120: mol_type = other DNA
ccctgaatagaccaataataggctctgaaattgaggcaataattaatagtttaccaaccaaaaaaagtcaaggaccagatggattcacagccgaattctaccagaggtacaaggaggagc

SEQ ID NO: 46106 - DNA, 120 bp, synthetic construct
  source 1..120: mol_type = other DNA
aaatggccatactgcccaaggtaatttatagattcaatgccatccccatcaagctaccaatgactttcttcacagaattggaaaaaactactttaaagttcatatggaaccaaaaaagag

SEQ ID NO: 46107 - DNA, 120 bp, synthetic construct; identical to SEQ ID NO: 14651
  source 1..120: mol_type = other DNA

SEQ ID NO: 46108 - DNA, 120 bp, synthetic construct; identical to SEQ ID NO: 33524
  source 1..120: mol_type = other DNA

SEQ ID NO: 46109 - DNA, 120 bp, synthetic construct
  source 1..120: mol_type = other DNA
agaaataaacacttttacactggtggtgggactggaaactagttcaacccttgtggaagtcagggtggcgattcctcagggatttagaactagaaataccatttgacccagccatcccat

SEQ ID NO: 46110 - DNA, 120 bp, synthetic construct
  source 1..120: mol_type = other DNA
gaatctaaaattatctcaaaccgaaaagtttagtttgaaaagagtcacactagctgacattaaaaatactggtgaatcaggctgggcgcagtggctcacgcctataatcccagcactttg

SEQ ID NO: 46111 - DNA, 120 bp, synthetic construct; identical to SEQ ID NO: 28172
  source 1..120: mol_type = other DNA

SEQ ID NO: 46112 - DNA, 120 bp, synthetic construct
  source 1..120: mol_type = other DNA
tcgcgccactgcactccagcctgggcaccagagtgagactccgtttcaaaaaaaaaaaaaaaaaaaaaaaaattaagcaccaggaaaaaaacactacatcccagcctcccatatacaaac

SEQ ID NO: 46113 - DNA, 120 bp, synthetic construct
  source 1..120: mol_type = other DNA
tggctaatttttaagatttttttctttttttttggtgtgtgtgtgtgtgtttgtgtgtgtgtagatagggtctccacaaaacatctggagatgttgcccaggctggtctcgatctcctgg

SEQ ID NO: 46114 - DNA, 120 bp, synthetic construct
  source 1..120: mol_type = other DNA
tgtcattgtttgctaatttcctgagctgccctccgacttgtttacgttaaataacatccctgctccccccgcacaactttccccgccgcccggcgtgtgcggccgcggccctgcctgcca

SEQ ID NO: 46115 - DNA, 120 bp, synthetic construct
  source 1..120: mol_type = other DNA
tttctccacaccccaacatgcttgggaacacagaggcccccagggatggggaagcaggggcggctgggtttccaggggcggcagagccaccaagagcgatggaaacccacccccgagtcc

SEQ ID NO: 46116 - DNA, 120 bp, synthetic construct; identical to SEQ ID NO: 16028
  source 1..120: mol_type = other DNA

SEQ ID NO: 46117 - DNA, 120 bp, synthetic construct; identical to SEQ ID NO: 22389
  source 1..120: mol_type = other DNA

SEQ ID NO: 46118 - DNA, 120 bp, synthetic construct; identical to SEQ ID NO: 24723
  source 1..120: mol_type = other DNA

SEQ ID NO: 46119 - DNA, 120 bp, synthetic construct; identical to SEQ ID NO: 24724
  source 1..120: mol_type = other DNA

SEQ ID NO: 46120 - DNA, 120 bp, synthetic construct; identical to SEQ ID NO: 24725
  source 1..120: mol_type = other DNA

SEQ ID NO: 46121 - DNA, 120 bp, synthetic construct; identical to SEQ ID NO: 24726
  source 1..120: mol_type = other DNA

SEQ ID NO: 46122 - DNA, 120 bp, synthetic construct; identical to SEQ ID NO: 24727
  source 1..120: mol_type = other DNA

SEQ ID NO: 46123 - DNA, 120 bp, synthetic construct
  source 1..120: mol_type = other DNA
acattcttcccagcccctgggcgaaaacatggagggtcccatgatttttctgatcacttgcaggaaactaaaaacatcacactcgttttaagccacaaaacagtatcaactcaggaaata

SEQ ID NO: 46124 - DNA, 120 bp, synthetic construct
  source 1..120: mol_type = other DNA
aatgagtttcctgtctttagcaacattccagagtcactcaaacaaagctatagcgtgtcccttccagtgacagcgccaagtccccagaggaggggtttgtaatgagttcacacttgacag

SEQ ID NO: 46125 - DNA, 120 bp, synthetic construct
  source 1..120: mol_type = other DNA
ggccagaagatcccctccaccacttgaatcccacagccagaagccccttctgggactctagactcctgggaaccatcccagctgcccccttcgctgtttcgctgtttgccttcttcccct

SEQ ID NO: 46126 - DNA, 120 bp, synthetic construct
  source 1..120: mol_type = other DNA
ttcaagtgattctcgtgccttagcctcctgagcagctgggactacaggtgcatgccaccacatccgactaatttttttttttattttttgtatttttagtagagacagggtttcaccatg

SEQ ID NO: 46127 - DNA, 120 bp, synthetic construct; identical to SEQ ID NO: 26849
  source 1..120: mol_type = other DNA

SEQ ID NO: 46128 - DNA, 120 bp, synthetic construct; identical to SEQ ID NO: 26850
  source 1..120: mol_type = other DNA

SEQ ID NO: 46129 - DNA, 120 bp, synthetic construct
  source 1..120: mol_type = other DNA
ttagcattaggtgtatctcctaatgctatccctccccactctgcccaccccacaacattcccgaagtgtgatgttccccttcctctatctatgtgttctcattgttcaattcccacctat

SEQ ID NO: 46130 - DNA, 120 bp, synthetic construct; identical to SEQ ID NO: 10767
  source 1..120: mol_type = other DNA

SEQ ID NO: 46131 - DNA, 120 bp, synthetic construct
  source 1..120: mol_type = other DNA
atcttgaattgatttttgtataagatgtaaggaagggatccagtttcagctttctccataaggctagccagttttcccagcaccatttattaaatagggaacctttccccatttcttgtt

SEQ ID NO: 46132 - DNA, 120 bp, synthetic construct
  source 1..120: mol_type = other DNA
aatgcttccagttttccattcaatatgatattggctgtgggtttgtcatagatagctcttattattttgagatgcgtcccatcaatacctaatttattgagagtttttatcatgaagggc

SEQ ID NO: 46133 - DNA, 120 bp, synthetic construct; identical to SEQ ID NO: 10768
  source 1..120: mol_type = other DNA

SEQ ID NO: 46134 - DNA, 120 bp, synthetic construct; identical to SEQ ID NO: 10757
  source 1..120: mol_type = other DNA

SEQ ID NO: 46135 - DNA, 120 bp, synthetic construct
  source 1..120: mol_type = other DNA
tcttaggatacaaaatgaatgtgcaaaaatcacaagcattcttatacaccaataacagacaaacagccacatcatgagtgaactcccattcacaattgcttcaaagagaatgaaatacct

SEQ ID NO: 46136 - DNA, 120 bp, synthetic construct
  source 1..120: mol_type = other DNA
aaacctaggcattaccattcaggacatatgcatgggcaaggacttcatgtctaaaacaccaaaagcaatggcaacaaaagccaaaattgacaaatgggatctaattaaactaaagagctt

SEQ ID NO: 46137 - DNA, 120 bp, synthetic construct; identical to SEQ ID NO: 10758
  source 1..120: mol_type = other DNA

SEQ ID NO: 46138 - DNA, 120 bp, synthetic construct; identical to SEQ ID NO: 10759
  source 1..120: mol_type = other DNA

SEQ ID NO: 46139 - DNA, 120 bp, synthetic construct
  source 1..120: mol_type = other DNA
gaagagatggggtttcaccgtgttagccaggatggtctccatctcctgaccttgtgatccacccgcctcggcgtcccaaagttctgggattacaggttattcttatttcttaaacacacc

SEQ ID NO: 46140 - DNA, 120 bp, synthetic construct; identical to SEQ ID NO: 10760
  source 1..120: mol_type = other DNA

SEQ ID NO: 46141 - DNA, 120 bp, synthetic construct; identical to SEQ ID NO: 10761
  source 1..120: mol_type = other DNA

SEQ ID NO: 46142 - DNA, 120 bp, synthetic construct; identical to SEQ ID NO: 10762
  source 1..120: mol_type = other DNA

SEQ ID NO: 46143 - DNA, 120 bp, synthetic construct; identical to SEQ ID NO: 10763
  source 1..120: mol_type = other DNA

SEQ ID NO: 46144 - DNA, 120 bp, synthetic construct
  source 1..120: mol_type = other DNA
aactagtttacagtaccaccaacagtgtgaaagtgttcctgtttctccacatcctctccagcacctgttgtttcctgactttttaatgattgccattctaactggtgtgagatggtatct

SEQ ID NO: 46145 - DNA, 120 bp, synthetic construct
  source 1..120: mol_type = other DNA
aagaaagtcattcgtagctttgtggggatggcattgaatctgtaaattaccttgggcagtttggccattttcacgatattgattcttcctacccatgagcatggaatgttcttcaatttg

SEQ ID NO: 46146 - DNA, 120 bp, synthetic construct
  source 1..120: mol_type = other DNA
ccaggcagagacacaaccaaaaaagagatttttagaccaatatccttgatgaacattgatgcaaaattcctcaataaaatactggcaaaatgaatccagcagcacatcaaaaagcttatc

SEQ ID NO: 46147 - DNA, 120 bp, synthetic construct; identical to SEQ ID NO: 10764
  source 1..120: mol_type = other DNA

SEQ ID NO: 46148 - DNA, 120 bp, synthetic construct; identical to SEQ ID NO: 10765
  source 1..120: mol_type = other DNA

SEQ ID NO: 46149 - DNA, 120 bp, synthetic construct; identical to SEQ ID NO: 10766
  source 1..120: mol_type = other DNA

SEQ ID NO: 46150 - DNA, 120 bp, synthetic construct; identical to SEQ ID NO: 12830
  source 1..120: mol_type = other DNA

SEQ ID NO: 46151 - DNA, 120 bp, synthetic construct; identical to SEQ ID NO: 12831
  source 1..120: mol_type = other DNA

SEQ ID NO: 46152 - DNA, 120 bp, synthetic construct; identical to SEQ ID NO: 12832
  source 1..120: mol_type = other DNA

SEQ ID NO: 46153 - DNA, 120 bp, synthetic construct
  source 1..120: mol_type = other DNA
gtgggactgtaaactagttcaacccttgtggaagtcagtgtggcgattcctcagggatctagaactagaaataccatttgacccagccatcccattactgggtatatacccaaaggatta

SEQ ID NO: 46154 - DNA, 120 bp, synthetic construct; identical to SEQ ID NO: 12833
  source 1..120: mol_type = other DNA

SEQ ID NO: 46155 - DNA, 120 bp, synthetic construct
  source 1..120: mol_type = other DNA
cgcaataaacatacgtgtgcatgtgtctttatagcagcctgatttatagtcctttgggtatatacccagtaatgggatggctgggtcaaatggtatttctagttctagatccctgaggaa

SEQ ID NO: 46156 - DNA, 120 bp, synthetic construct
  source 1..120: mol_type = other DNA
ttatgttttaaaagtaatcttgctgggaggccaaggcgggcatatcacttgaggtcaagaattcgagaccagcctggccaatatggtgaaaccccatcgctactaaaaatacaaaagtta

SEQ ID NO: 46157 - DNA, 120 bp, synthetic construct
  source 1..120: mol_type = other DNA
tttgatggggttgtttgtttttttcttgtaaatttgtatgagttcattgtagatcctggatattagatccagatttgtcagatgagtaggttgcaaaaattttctctcattctgtaggtt

SEQ ID NO: 46158 - DNA, 120 bp, synthetic construct
  source 1..120: mol_type = other DNA
tttggttccatatgaactttaaagtagttttttccaattctgtgaagaaagtcattggtagcttgatggggatggcattgaatctataaattaccttgggcagtatggccattttaacga

SEQ ID NO: 46159 - DNA, 120 bp, synthetic construct
  source 1..120: mol_type = other DNA
gcttgagcccaggaagcagaggttgcagtgagccaggattgtgctagttctttccagcctgggtgacagagtgagaccctgtcaaaaaaaatatatatatacgtgtatatatatatatat

SEQ ID NO: 46160 - DNA, 120 bp, synthetic construct; identical to SEQ ID NO: 13278
  source 1..120: mol_type = other DNA

SEQ ID NO: 46161 - DNA, 120 bp, synthetic construct
  source 1..120: mol_type = other DNA
cccagccatcccattactgggtatatacccaaaggactataaatcatgctgctttaaagacacatgcacacgtatgtttattgtggcattattcacaagagcgaagatttggaaccaacc

SEQ ID NO: 46162 - DNA, 120 bp, synthetic construct
  source 1..120: mol_type = other DNA
ttgagtatatagaattgagcatatgctcaattttttaaattaaatcatacaaaagaatacaaaggtaaaagttagtttccccgctacccacccccacccccacccccacccccattccca

SEQ ID NO: 46163 - DNA, 120 bp, synthetic construct; identical to SEQ ID NO: 19849
  source 1..120: mol_type = other DNA

SEQ ID NO: 46164 - DNA, 120 bp, synthetic construct; identical to SEQ ID NO: 19850
  source 1..120: mol_type = other DNA

SEQ ID NO: 46165 - DNA, 120 bp, synthetic construct; identical to SEQ ID NO: 19851
  source 1..120: mol_type = other DNA

SEQ ID NO: 46166 - DNA, 120 bp, synthetic construct
  source 1..120: mol_type = other DNA
cttcctctgctgctgccaccccaaccctgcagggctcgcctttgtctggggaactgcgaggggtggggggaatggggcagaagtggggttgagatcggaggccagagaaatgtggaggag

SEQ ID NO: 46167 - DNA, 120 bp, synthetic construct
  source 1..120: mol_type = other DNA
ctttttttgtagagatgagatttcactatgttgcccagactggtttcaaactcctgatctcaagtaattctcctgcctcagcctcccaaagtactgggattataggcatgagccaccatt

SEQ ID NO: 46168 - DNA, 120 bp, synthetic construct; identical to SEQ ID NO: 31404
  source 1..120: mol_type = other DNA

SEQ ID NO: 46169 - DNA, 120 bp, synthetic construct; identical to SEQ ID NO: 12311
  source 1..120: mol_type = other DNA

SEQ ID NO: 46170 - DNA, 120 bp, synthetic construct
  source 1..120: mol_type = other DNA
ttttgagaagtgcctgttcatgtcctttgcccactttttgatggggttgtttgtttttgtcttgtaaatttgtttgagttcattgtagattctggttattagccctttgtcagatgagta

SEQ ID NO: 46171 - DNA, 120 bp, synthetic construct
  source 1..120: mol_type = other DNA
tgtgatttttgtacattgattttgtatcctgagactttgctgaagttgcttatcagcttaaggagattttgggctgagacaatggggttttctagatatacaatcatgtcgtctgcaaac

SEQ ID NO: 46172 - DNA, 120 bp, synthetic construct
  source 1..120: mol_type = other DNA
tgcgtctatttgattcttctctcttttcttctttattagtcttgctagcggtctatctattttgttgatcttttcaaaaaaccagctcccggattcattgattttttgaagggttttttt

SEQ ID NO: 46173 - DNA, 120 bp, synthetic construct
  source 1..120: mol_type = other DNA
tctttgttggtttaaagtccgttttatcagagactaggattgcaacccctgcctctttttgttttccatttgcttggtagatcttcctccatccttttattttgagcctatgtgtgtctc

SEQ ID NO: 46174 - DNA, 120 bp, synthetic construct
  source 1..120: mol_type = other DNA
ttcttctaaatttttttcaaagttttcaacttctttgcctttggtttgaatgtcctcctgtagctcagagtaatttgatcgtctgaagccttcttctctcagctcatcaaagtcattctc

SEQ ID NO: 46175 - DNA, 120 bp, synthetic construct
  source 1..120: mol_type = other DNA
tctggcactccctagtgagatgaacccggtacctcagatggaaatgcagaaatcacccgtcttgtgcgtcgctcacgctgggagctgtacaccggagctgttcctattcggccatcttgg

SEQ ID NO: 46176 - DNA, 120 bp, synthetic construct; identical to SEQ ID NO: 20453
  source 1..120: mol_type = other DNA

SEQ ID NO: 46177 - DNA, 120 bp, synthetic construct
  source 1..120: mol_type = other DNA
tgggatggcggcggggaataggcgctcctcgcttcctagatgggatggcggccgggcaaaaacgctcctcactttccagactgggcagccaggcagaggggctcctcatatcccagacga

SEQ ID NO: 46178 - DNA, 120 bp, synthetic construct
  source 1..120: mol_type = other DNA
cagccgtgaagggaggcccggaagctgatggagggggaccttaggacttggctttttcagcggctgcagttgggaggaaagaccggcgagtcagggagtggtgggaggggagttgccttt

SEQ ID NO: 46179 - DNA, 120 bp, synthetic construct
  source 1..120: mol_type = other DNA
gtcttggtctcccaaagtgctgggattgcaggcatcaggcaccatgcctggcccagccctatatttttttataactagagtttttgaggccctttgtagtataaaaatagaaaaagatat

SEQ ID NO: 46180 - DNA, 120 bp, synthetic construct; identical to SEQ ID NO: 20454
  source 1..120: mol_type = other DNA

SEQ ID NO: 46181 - DNA, 120 bp, synthetic construct
  source 1..120: mol_type = other DNA
taaatgttaatcaattttaaatctcattttccttcttaaagtggtgctgtgttttgttttgagagagtctcactctcacctaggctggagtgcagtggcacagtgtctcccgggttcagg

SEQ ID NO: 46182 - DNA, 120 bp, synthetic construct; identical to SEQ ID NO: 11100
  source 1..120: mol_type = other DNA

SEQ ID NO: 46183 - DNA, 120 bp, synthetic construct
  source 1..120: mol_type = other DNA
agtgcggagattgcagcctctgcctggccgccaccccgtctgggaagtgaggagtgtctctgcctggctgcccatcgtctgggatgtgaggagcccctctgcctggctgcccagtctgga

SEQ ID NO: 46184 - DNA, 120 bp, synthetic construct
  source 1..120: mol_type = other DNA
gatgacgatggcggttttctggaatagaaaagggggcaaggtggggaaaagattgagaaatcggatggttgccgtgtctgtgtagaaagaagtagacatgggagacttttcattttgttc

SEQ ID NO: 46185 - DNA, 120 bp, synthetic construct; identical to SEQ ID NO: 11101
  source 1..120: mol_type = other DNA

SEQ ID NO: 46186 - DNA, 120 bp, synthetic construct
  source 1..120: mol_type = other DNA
ttccccatctgtacgctgaagagcctggggtccagtaacccccatcatcacccagtttacagaagaggaaactgaggcccagacggggagcagctgacaccaagtcgttaagagaatcag

SEQ ID NO: 46187 - DNA, 120 bp, synthetic construct
  source 1..120: mol_type = other DNA
gcctttgttacatagttgctccttaatctgtttccaccctgggggctcaccaattttttttttttttttttttttttggagacagggtgtttatctgtcacccaggctagagtgcagtgg

SEQ ID NO: 46188 - DNA, 120 bp, synthetic construct
  source 1..120: mol_type = other DNA
tcccctttgagcttagccccgccctctcagcctgatttctgtttcccaagtccagcagtgtcgtgggataggttttgctttcttttactgtctccatcctacttacacctccctgatcct

SEQ ID NO: 46189 - DNA, 120 bp, synthetic construct
  source 1..120: mol_type = other DNA
cggctaggggtatagcacccagtccctgccctcacagaggtcgcagtccagtgggagaaacagtaataagatgttctcatagatagttctagtaatcataatttatagtttaatttttaa

SEQ ID NO: 46190 - DNA, 120 bp, synthetic construct
  source 1..120: mol_type = other DNA
ttataatttagatacaattttcttggcaccatgattagagccatgaagaagtaaaggagctttatgaaggtggagcgggatccacctgacctaatctgggcgggagagaggaagtgatga

SEQ ID NO: 46191 - DNA, 120 bp, synthetic construct
  source 1..120: mol_type = other DNA
ttagtggtctcatggtggacttccagccctggagcacagagcttccctcactccttaaactccagctcactagccaggcctggctttcagcccctttctttctttttccctccctccttc

SEQ ID NO: 46192 - DNA, 120 bp, synthetic construct
  source 1..120: mol_type = other DNA
ctgtctcaaacaaaaaaaaaaaaaaaaaaaaaaaaaaaaggaaggaagggagggagggaaggagggaccgactggggaagtacctagatggggaagatgggaggggtcatggcatgtttg

SEQ ID NO: 46193 - DNA, 120 bp, synthetic construct
  source 1..120: mol_type = other DNA
gatggatcacctgaggtcagaagttcgaaaccagcctggccaacatggtgaaacccccgtctctactgacaatacaaaaatcattctgggcgtggtggtgtgcacctgtaattccagcta

SEQ ID NO: 46194 - DNA, 120 bp, synthetic construct
  source 1..120: mol_type = other DNA
gacagagcctttgcaattttgtttttctctggcactcagctctgtatgggcagtgcctatagcaacattgtataacaggcagtcagcaggcagtcactatttgttgacttaatgaatgaa

SEQ ID NO: 46195 - DNA, 120 bp, synthetic construct
  source 1..120: mol_type = other DNA
tccttccaggacccccactgatgccccagaccctaatacaaaatggcctagtatgtgcacataacctatgcataccctcccgtgcactttatttttttttaattttttaattttttgtgg

SEQ ID NO: 46196 - DNA, 120 bp, synthetic construct
  source 1..120: mol_type = other DNA
attattattattactattttgaggcagagtcttgctctgttgcccaggctggggtgcagtggcgtgatctctgctcactgcaacctctgcctctgcccagctaatttttgtatttgtagt

SEQ ID NO: 46197 - DNA, 120 bp, synthetic construct
  source 1..120: mol_type = other DNA
gcctttcttcaagttcactaattatttctttttttttctttttctaagatagagaaaggggtcttgctatgtaacctggcctcgtctcaagctcctaggctccagtgaccctcctgcctt

SEQ ID NO: 46198 - DNA, 120 bp, synthetic construct
  source 1..120: mol_type = other DNA
agcctcctgagtagctgggaccacaggcacccgacaccacgcccggctaattttttgtttttttagtagagacggggtttcaccatgttagtcaggatggtctcgatctcctgacctcac

SEQ ID NO: 46199 - DNA, 120 bp, synthetic construct
  source 1..120: mol_type = other DNA
ttgtgttcatcctttcagtgtggtgtgagccccccatcacaggtgcgcccagagatgccatctgggagccagggcctggagttggaaaccttagggactctacctggtactctgttctac

SEQ ID NO: 46200 - DNA, 120 bp, synthetic construct
  source 1..120: mol_type = other DNA
agaccagcctgaccaacacggtgaaaccccgtgtctactaaacatacaaaattagccgggtgttgtggcacacgcgtgtaatcccagctactcaggaggctgaggcaggagaatacttga

SEQ ID NO: 46201 - DNA, 120 bp, synthetic construct
  source 1..120: mol_type = other DNA
ctgcctcagcctcctgagtagccgggactacaggcacccaccaccacgcccagctaatttttttgtatttttagtagagaaggggtttcaccgtgttagccaggatggtctcgatctcct

SEQ ID NO: 46202 - DNA, 120 bp, synthetic construct
  source 1..120: mol_type = other DNA
acagcagttaattggggaggaggcaaggggtaatgactgcatgaagggttgcatctgagccactgtcaatattgtatttcttcataggggtggaaattaaagatttgtgttcacactaaa

SEQ ID NO: 46203 - DNA, 120 bp, synthetic construct
  source 1..120: mol_type = other DNA
atatgtcttggagagcattctaatcagaatgaaaaacagctgagccattctgtttacttatacggtgaccaagccatctgctagtcattcccctattgatgatcattcagggtgttccct

SEQ ID NO: 46204 - DNA, 120 bp, synthetic construct
  source 1..120: mol_type = other DNA
tgtctcaaaaaaaaaaaaaatcaattttaggaaagtgtctgagagagatcagtgactcagaagagtttgagtggggaagtgctcagaagccatggcttcttgcagggggtatggtcccac

SEQ ID NO: 46205 - DNA, 120 bp, synthetic construct
  source 1..120: mol_type = other DNA
aaaaaaaaaaaaaaaaagatctagaaaggagagttagggagtccatgaaaaatctctagccagccctcctgaagcactagacaggggaacaagtcagagtttgcaggaaaatctgggaag

SEQ ID NO: 46206 - DNA, 120 bp, synthetic construct
  source 1..120: mol_type = other DNA
tttccactgaagtctgctgccagacgtattggagctccattgtatgtttgtttttgtttttgtttttgagacagagtctcactcagtcacccaggctggagtacagtgacgaaatctcgg

SEQ ID NO: 46207 - DNA, 120 bp, synthetic construct
  source 1..120: mol_type = other DNA
tgtgagccactgcgcctggcctttattcttttttattttttcttttgtctcctctggctgtgtcttgtcctgtctcatctcttttctcttctcttctgttctcttctgttctcttctctt

SEQ ID NO: 46208 - DNA, 120 bp, synthetic construct
  source 1..120: mol_type = other DNA
cgataggattctgaatcccttctctgtgttatcttgaatttcattgagcttcctcaaaacagctgttttgaattctccgtctgaaaggtcacatagctctgtcacaatggggttggtcac

SEQ ID NO: 46209 - DNA, 120 bp, synthetic construct
  source 1..120: mol_type = other DNA
agaaatgccatctgggagccagggcctggagacagaaaccttaggaatctacctggtgctctattctactgtggctgagctggcacccaagccacaagaaaaagtctttcctacttgata

SEQ ID NO: 46210 - DNA, 120 bp, synthetic construct
  source 1..120: mol_type = other DNA
ctgtgcaagagccaagacctcaattggggatgccagcagctgctgggtgctctaccctactgtggccaagctggtgtccaagatgcaagacaaagtctcctttactctttcctctccttt

SEQ ID NO: 46211 - DNA, 120 bp, synthetic construct; identical to SEQ ID NO: 15280
  source 1..120: mol_type = other DNA

SEQ ID NO: 46212 - DNA, 120 bp, synthetic construct
  source 1..120: mol_type = other DNA
ggtaatttacagattcaatgccatccccatcaagctaccaatgactttcttcacagaattggaaaaaactactttaaagttcatatggaaccaaaaaagagcctgcatcgccaagtcaat

SEQ ID NO: 46213 - DNA, 120 bp, synthetic construct
  source 1..120: mol_type = other DNA
agtcagtgtggcgattcctcagggatctagaactagaaataccatttgacccagccatcccattactgggtatatacccaaatgactataaatcatgctgctataaagacacatgcacat

SEQ ID NO: 46214 - DNA, 120 bp, synthetic construct
  source 1..120: mol_type = other DNA
agcactttttcatgtgttttttggctacataaatgtcttcttttgagaagtgtctattcatatccttcgcccactttttgatggggttgtttgtttttttcttgtaaatttgtttgagtt

SEQ ID NO: 46215 - DNA, 120 bp, synthetic construct
  source 1..120: mol_type = other DNA
ttgtagttctctttgaagaggtccttcacgtcccttgtaagttggattcctacccattttattctctttgaagcaattgtgaatgggagttcactcatgatttgactctctgtttgtctg

SEQ ID NO: 46216 - DNA, 120 bp, synthetic construct
  source 1..120: mol_type = other DNA
cctctttttctgttgattgtaatagtttcagaaggaatggtaccagctcctccttgtacctctggtagaatttggctgtgaatccatctcgtcctggactctttttggttgataagctat

SEQ ID NO: 46217 - DNA, 120 bp, synthetic construct
  source 1..120: mol_type = other DNA
tgtctattaggtctgcttggtgcagagctgagttcaattcctgggtatccttgttaactttctgtctcgttgatttgtctaatgttgacagtggggtgttaaagtctcccattattattg

SEQ ID NO: 46218 - DNA, 120 bp, synthetic construct
  source 1..120: mol_type = other DNA
tgacaattatatgtcttggagttgcttttctcgaggagtatctttgtggtgttctctgtatttcctgaatctgaatgttggcctgccttgctagattggggaagttctcctggataatat

SEQ ID NO: 46219 - DNA, 120 bp, synthetic construct
  source 1..120: mol_type = other DNA
gtcacattagagaaggaagttttaaagaggttcggttcaataaacatctctgcaatttgagccctgacggtttcgggctaagtgcacagttggcaattctcaaaaaatcccttcgtgaaa

SEQ ID NO: 46220 - DNA, 120 bp, synthetic construct
  source 1..120: mol_type = other DNA
acaatgaactctaacaaatttccaagaaaaaaacaaacaaccccatcaaaaagtgggcaaaggacatgaacagacacttctcaaaagaagacatttatgcagccaaaaaacacatgaaaa

SEQ ID NO: 46221 - DNA, 120 bp, synthetic construct; identical to SEQ ID NO: 27842
  source 1..120: mol_type = other DNA

SEQ ID NO: 46222 - DNA, 120 bp, synthetic construct; identical to SEQ ID NO: 27843
  source 1..120: mol_type = other DNA

SEQ ID NO: 46223 - DNA, 120 bp, synthetic construct; identical to SEQ ID NO: 27476
  source 1..120: mol_type = other DNA

SEQ ID NO: 46224 - DNA, 120 bp, synthetic construct; identical to SEQ ID NO: 7460
  source 1..120: mol_type = other DNA

SEQ ID NO: 46225 - DNA, 120 bp, synthetic construct; identical to SEQ ID NO: 7461
  source 1..120: mol_type = other DNA

SEQ ID NO: 46226 - DNA, 120 bp, synthetic construct; identical to SEQ ID NO: 7490
  source 1..120: mol_type = other DNA

SEQ ID NO: 46227 - DNA, 120 bp, synthetic construct; identical to SEQ ID NO: 7462
  source 1..120: mol_type = other DNA

SEQ ID NO: 46228 - DNA, 120 bp, synthetic construct; identical to SEQ ID NO: 7463
  source 1..120: mol_type = other DNA

SEQ ID NO: 46229 - DNA, 120 bp, synthetic construct; identical to SEQ ID NO: 7464
  source 1..120: mol_type = other DNA

SEQ ID NO: 46230 - DNA, 120 bp, synthetic construct; identical to SEQ ID NO: 7465
  source 1..120: mol_type = other DNA

SEQ ID NO: 46231 - DNA, 120 bp, synthetic construct; identical to SEQ ID NO: 7466
  source 1..120: mol_type = other DNA

SEQ ID NO: 46232 - DNA, 120 bp, synthetic construct; identical to SEQ ID NO: 7467
  source 1..120: mol_type = other DNA

SEQ ID NO: 46233 - DNA, 120 bp, synthetic construct; identical to SEQ ID NO: 7468
  source 1..120: mol_type = other DNA

SEQ ID NO: 46234 - DNA, 120 bp, synthetic construct; identical to SEQ ID NO: 7469
  source 1..120: mol_type = other DNA

SEQ ID NO: 46235 - DNA, 120 bp, synthetic construct; identical to SEQ ID NO: 7470
  source 1..120: mol_type = other DNA

SEQ ID NO: 46236 - DNA, 120 bp, synthetic construct; identical to SEQ ID NO: 7471
  source 1..120: mol_type = other DNA

SEQ ID NO: 46237 - DNA, 120 bp, synthetic construct; identical to SEQ ID NO: 7472
  source 1..120: mol_type = other DNA

SEQ ID NO: 46238 - DNA, 120 bp, synthetic construct; identical to SEQ ID NO: 7473
  source 1..120: mol_type = other DNA

SEQ ID NO: 46239 - DNA, 120 bp, synthetic construct
  source 1..120: mol_type = other DNA
cggcctcccaaagtgctgggattacaagcgtgagccaccttgcctggcctcaaaagtttctttacttaattgcttttacaatagaaaggttattgaaatccaaacaagtacaggatgata

SEQ ID NO: 46240 - DNA, 120 bp, synthetic construct; identical to SEQ ID NO: 7474
  source 1..120: mol_type = other DNA

SEQ ID NO: 46241 - DNA, 120 bp, synthetic construct; identical to SEQ ID NO: 7475
  source 1..120: mol_type = other DNA

SEQ ID NO: 46242 - DNA, 120 bp, synthetic construct; identical to SEQ ID NO: 7489
  source 1..120: mol_type = other DNA

SEQ ID NO: 46243 - DNA, 120 bp, synthetic construct; identical to SEQ ID NO: 7490
  source 1..120: mol_type = other DNA

SEQ ID NO: 46244 - DNA, 120 bp, synthetic construct
  source 1..120: mol_type = other DNA
gagctatgaccatgccactgcattccagtctgggtgaaagagcaagaccctgtctctgaaaataaaaacatattttttaagcagtagtctcagtttacatcacacgttcccattcaacac

SEQ ID NO: 46245 - DNA, 120 bp, synthetic construct
  source 1..120: mol_type = other DNA
gcttatgcctcagtttctcaatctggaacatgggcacctgcctctctgctgagatgggtggagaaggattcagaaggagtgtgcagaggtggtccttcctgccatccttcctccctcagg

SEQ ID NO: 46246 - DNA, 120 bp, synthetic construct; identical to SEQ ID NO: 29040
  source 1..120: mol_type = other DNA

SEQ ID NO: 46247 - DNA, 120 bp, synthetic construct; identical to SEQ ID NO: 29041
  source 1..120: mol_type = other DNA

SEQ ID NO: 46248 - DNA, 120 bp, synthetic construct
  source 1..120: mol_type = other DNA
atgatttatagtcctttgggtatatacccagtaatgggatggctgggtcaaatggtatttctagttctagatccctgaggaatcgccacactgacttccacaatagttgaactagtttac

SEQ ID NO: 46249 - DNA, 120 bp, synthetic construct
  source 1..120: mol_type = other DNA
tgcctccagctttgttcttttggcttaggattgacttggcgatgcaggctcttttttggtgccatatgaactttaaagtagttttttccaattctgtgaagaaagtcattggtagcttga

SEQ ID NO: 46250 - DNA, 120 bp, synthetic construct
  source 1..120: mol_type = other DNA
gctggattcggtttgccagtattttattgaggatttttgcatcaatgctcatcaaggatattggtctaaaattctcttttttggttgtgtctctgcctggctttggtatcagaatgatgc

SEQ ID NO: 46251 - DNA, 120 bp, synthetic construct
  source 1..120: mol_type = other DNA
aagtatattctgttgatttggggtggagagttctgtagatgcctattaggtccacttggtgcagagctgagttcaattcctgggtatccttgttgactttctgtctcgttgatctgtcta

SEQ ID NO: 46252 - DNA, 120 bp, synthetic construct
  source 1..120: mol_type = other DNA
caccaatcagacatagatttggtcttttcacatagtcccatatttcttggaggctttgctgatttctttttattcttttttctctaaacttcccttctcgcttcatttcattcatttcat

SEQ ID NO: 46253 - DNA, 120 bp, synthetic construct
  source 1..120: mol_type = other DNA
ctccacccagttcgagcttccaggctgctttgtttacctaagcaagcctgggcaatggtgggcgcccctcccccagcctcgctgccgccttgcagtgtgatctcagactgctgtgctagc

SEQ ID NO: 46254 - DNA, 120 bp, synthetic construct
  source 1..120: mol_type = other DNA
agaaacaaatgcaatgtgacttatatttttctttgtcgcaactaccacgacctggccatcccccaccttggtgacttggtgccttcccagcgaccttatttcacgccagctgactggcgt

SEQ ID NO: 46255 - DNA, 120 bp, synthetic construct
  source 1..120: mol_type = other DNA
attccgtacttcagttttggaaaactttctgctggattgcctggacccttttttctctttccagactcctagtggaaagatttggcaaggaaaaaaaaatgagcttgcgtcagggaagaa

SEQ ID NO: 46256 - DNA, 120 bp, synthetic construct
  source 1..120: mol_type = other DNA
cacatggttgttaattgcgaactagcgcaacattgaaattaaaatttagtcattcacaatccatctctagagattgccaagtgtagtctgcttttcctgcctttgcctggttggtggcta

SEQ ID NO: 46257 - DNA, 120 bp, synthetic construct
  source 1..120: mol_type = other DNA
atgtcataccaaacccaaaccttttcccatttcatcatatcttgtctgtagccaacatctgttgattctgctttatgatattgtaactcttctgctctctattcttgctaactgtggggc

SEQ ID NO: 46258 - DNA, 120 bp, synthetic construct
  source 1..120: mol_type = other DNA
ttcactactagtttgcagggtgggtctgtaacggacttttcttgcatattaaaaggaataaatggggaaaggctcctgtctagcctaacagtagctgttgaactgtcctgatctgactat

SEQ ID NO: 46259 - DNA, 120 bp, synthetic construct
  source 1..120: mol_type = other DNA
aaaatcattttgaagaaaggaagactgaagatgttcaaacttgtaggaaggtctttctggcctagcccggattaaacccatttatgcctagtgttccactattggaacgctaagcacgtg

SEQ ID NO: 46260 - DNA, 120 bp, synthetic construct
  source 1..120: mol_type = other DNA
ctgacctcaggtgatccttccgccttggcctcccaaagttctgggattacaggtgtgagccactgcgcctggccagtcttgagaaatttcaacttaaggcctgggtagagaagatagaca

SEQ ID NO: 46261 - DNA, 120 bp, synthetic construct
  source 1..120: mol_type = other DNA
gccataaagaagcagcggaatgattaagtttcagcttctaattttttataaataatgtctgatactggttttactactgagtacctattcaatcacggatgccacactaacccaatccga

SEQ ID NO: 46262 - DNA, 120 bp, synthetic construct
  source 1..120: mol_type = other DNA
atttcaagagtatagggtcttgagtgttttaaatttgtatataagaatgttttagattcctggctaaaagaagctcttgttagaaaatattaaagtaaaggctgttaaattttggtgagg

SEQ ID NO: 46263 - DNA, 120 bp, synthetic construct
  source 1..120: mol_type = other DNA
tgactttcctttccctggttctttgcccatcagaatgctttaaaatctagtataaatccttggccaggtgctgtggctcacgcctgtaatcccagcactttgggaggccgaggcgggagg

SEQ ID NO: 46264 - DNA, 120 bp, synthetic construct
  source 1..120: mol_type = other DNA
atagggggattctttttatgtcagtaaatttcaatttcctcattcttttttttttttttgagggaaggtcttgttctgttgcccaggctgcagtggtgctgtggtgcaaacagctcactg

SEQ ID NO: 46265 - DNA, 120 bp, synthetic construct
  source 1..120: mol_type = other DNA
gtgctgggattacaggcgtgaggcaccacgcccggccatatcagtctgtttttatctttgccagtttgccagctgaaaaaacattcatgatataaggtttctttgctgttgtatgaatat

SEQ ID NO: 46266 - DNA, 120 bp, synthetic construct
  source 1..120: mol_type = other DNA
gttcccctagtaagatggtacacatgccccaaattcggacagcccccttgggtcacatttttctgtgaattattctacatatgtgaatcaaatctgtcatttctcttgcagatgtgttct

SEQ ID NO: 46267 - DNA, 120 bp, synthetic construct
  source 1..120: mol_type = other DNA
ctctctctcagggctactgtgaggactaaatgaatgatgagtgcagttcagtgcttaacactgtgcttgccactgtagtagcttaatgaatgttagtgaagatgagtatttctgagagaa

SEQ ID NO: 46268 - DNA, 120 bp, synthetic construct
  source 1..120: mol_type = other DNA
agaaacttagtgtggagaggtctaagagaaccattcctggaggttaagaatactagcagaagatggaatggagtatctgattacctaggcagtattaattacgcagcaggctggtttatc

SEQ ID NO: 46269 - DNA, 120 bp, synthetic construct
  source 1..120: mol_type = other DNA
attaccttaagttcccattaaggcctttggacacattaagttcccattaagttcccaccaaggcctttggacaccaaatcccattctctttttctccgtatgaggctgtcacagtactat

SEQ ID NO: 46270 - DNA, 120 bp, synthetic construct
  source 1..120: mol_type = other DNA
ttagatcctcccgccttgacctcccaaagtgctgggattacagctgtgagccactgtgcctggctccaatttatacttttttactttactgattttgtttttcctttgcatcttaaacaa

SEQ ID NO: 46271 - DNA, 120 bp, synthetic construct
  source 1..120: mol_type = other DNA
aaataagttgagtaaagctaagttcatcctgagcgtctgaacctggaatataaggaacttgaaatttgtaggggtgggggtatctgaatagaaatagaaagttctgaaaatttggctgtc

SEQ ID NO: 46272 - DNA, 120 bp, synthetic construct
  source 1..120: mol_type = other DNA
ccgcctcggcctccgaaagtgctgggattacaagcgtgagccaccgcgcccagcctttaattcatctttaaatgaattgtccccattttctaggagttattatcttttctaaaaataaca

SEQ ID NO: 46273 - DNA, 120 bp, synthetic construct
  source 1..120: mol_type = other DNA
ctgagaaaactaataaatgagttcagtaagttggctctacacgtggtaaacgaggaaatccatacataggttcctgtacaccagcaatagccgtgtgagaagtactgtcactgtctgtta

SEQ ID NO: 46274 - DNA, 120 bp, synthetic construct
  source 1..120: mol_type = other DNA
gatgctgatgagcataaataatgctttgagttgcctgcagcaagtagtttgatgagaatatctgatttgtttttattacaaagtcacaggtgttgctaatactactgtgtatcctgccta

SEQ ID NO: 46275 - DNA, 120 bp, synthetic construct
  source 1..120: mol_type = other DNA
taagaaccgcagttggttaaatccaactgtgcctactctacacttgtactttttaaaaatgtggtttagaaaaatggatatcaactgggcacggtggctcatgcctgtaatcccagcact

SEQ ID NO: 46276 - DNA, 120 bp, synthetic construct
  source 1..120: mol_type = other DNA
tacatatttatggggtatgtagtgatgttttgatacatataatgcatgacaggcttgtccaactcatggctcatgggctacatgtggcccaggatagcttcgaatacagaccaacacaaa

SEQ ID NO: 46277 - DNA, 120 bp, synthetic construct
  source 1..120: mol_type = other DNA
tttatccattcctctgttattagatgtcccgtttgtctaacccatatctaggctgtttgaatagcagtaaacatggggatgcagatgtgccttcaacagaatgatttcctttcctctgga

SEQ ID NO: 46278 - DNA, 120 bp, synthetic construct
  source 1..120: mol_type = other DNA
gctgggattacaggcatgagcccctggtaatagcacctggcctatttcatttgttttttggccatttttcttcttttgagaaatgtgtctgttcagatcatttgcccattttttaattgg

SEQ ID NO: 46279 - DNA, 120 bp, synthetic construct
  source 1..120: mol_type = other DNA
attacaggcgtgagacaccatgcccggctctcatttcgaatcttacacttaggtctttgatttcttttgagttgatttttgtatagggtgagtgttgggcgtctgcttttattcttctgc

SEQ ID NO: 46280 - DNA, 120 bp, synthetic construct
  source 1..120: mol_type = other DNA
agtgctgggattacaggtgtgagccatcatgccaggtccaggatttctttagggctgaataatatccagttgtgtatatgtaccacatttgttgatccatttatctgttgagagacacaa

SEQ ID NO: 46281 - DNA, 120 bp, synthetic construct
  source 1..120: mol_type = other DNA
ttgaagagattattctttccccattgcgtagtcttggctcatcatttgaccacatacacaggggtttatatctgggctgtctgttctgttccattggtttacatgtctgtatgctagtac

SEQ ID NO: 46282 - DNA, 120 bp, synthetic construct
  source 1..120: mol_type = other DNA
ctcctttttctgattgtactgtgttgagtagaagtggtgagagtggacttcctagtcttgttcctgatcttagagggaaagctttcagtttttcaccattgtaatgtttgctgtggactt

SEQ ID NO: 46283 - DNA, 120 bp, synthetic construct
  source 1..120: mol_type = other DNA
tcctactgcttttgatttcccattgtggtcagaaaagatacttgctatgatttcagtcttcttaaatttgctaagacttgttctgtggcctaacatgtgatctgtcttggagaatgttgc

SEQ ID NO: 46284 - DNA, 120 bp, synthetic construct
  source 1..120: mol_type = other DNA
ccactaagttcaggagagtccttaaaactgcacagcagtagttcctagttcatttattctcccagtgtgacctaaatgatcatttagacctgctccttctcaatccttcaacgtcacttt

SEQ ID NO: 46285 - DNA, 120 bp, synthetic construct
  source 1..120: mol_type = other DNA
tgggccatgcttagaatggctctttttgtccaagaaaattcaaaaccaaaaccaaatctattttcttctgctttaacatcagtctacagattatttttggtctaaagcatgagatagggc

SEQ ID NO: 46286 - DNA, 120 bp, synthetic construct
  source 1..120: mol_type = other DNA
tttgggtgggaacacagagccaagccatgtcagtcagtatcataaattggttcaaccatagaggaagagaatttgactaaatacatattttagggaaaagggaagtactgtgggctcagc

SEQ ID NO: 46287 - DNA, 120 bp, synthetic construct
  source 1..120: mol_type = other DNA
taccatgatgcacttgccttgtagtgggaaaacctcagggatgaaaagggtgtcaggacaattctaagacaccaatggaatagtgctggaagaattagatattcagttgcaaaagaatgc

SEQ ID NO: 46288 - DNA, 120 bp, synthetic construct
  source 1..120: mol_type = other DNA
aagaagatgtacaaatggctacataagctcatgaaaataatgtcgttagtcattagaaatataaatcaaaggctgggcacggtggctcacgcctgtaatcctagcactttgggaggccga

SEQ ID NO: 46289 - DNA, 120 bp, synthetic construct; identical to SEQ ID NO: 10938
  source 1..120: mol_type = other DNA

SEQ ID NO: 46290 - DNA, 120 bp, synthetic construct
  source 1..120: mol_type = other DNA
taatgaagaaaaaaaaaaagccctgtccatctcattaagagacgtacatttccagtaatttttctttccttctttacttccttcctccctccctccctccctccctcccttccttccttc

SEQ ID NO: 46291 - DNA, 120 bp, synthetic construct
  source 1..120: mol_type = other DNA
acttagaagcttctttatggtcaggaaatttaaaatgtttttcatttaaacatcagacaggctgggtgcagtggctcaaacctgtaatcccatcactttgggaggccaaggcaggaggat

SEQ ID NO: 46292 - DNA, 120 bp, synthetic construct
  source 1..120: mol_type = other DNA
agctaatttttgtatttttagtagagacagggtttcatcatattgatcaggctggtctcaggtgatctgcctgcctcggcctcccaaagtgctgggattacaggtgagccactgcgccag

SEQ ID NO: 46293 - DNA, 120 bp, synthetic construct
  source 1..120: mol_type = other DNA
tttagaatggcttttaagatttttgtcaaaggtgagaacgttcagtacattctttgatacctgcctagcaactatttttaggtttctattcctttccagattttcagattcacatatttc

SEQ ID NO: 46294 - DNA, 120 bp, synthetic construct
  source 1..120: mol_type = other DNA
tttgggaggttaaattactttctaaaagttgctgtgaaggagagaaggaaaagagatcaggttacacattctttgttcctgagcctaccactgcacacgttcagagaagcaatagtgagg

SEQ ID NO: 46295 - DNA, 120 bp, synthetic construct
  source 1..120: mol_type = other DNA
tattttgagagtaggtgctgtattttcttttctttccttgtttcttcttttttgttttttgagacagaatctctctctgttgcccaggctggagtacagtggcatgatctcagttcactg

SEQ ID NO: 46296 - DNA, 120 bp, synthetic construct
  source 1..120: mol_type = other DNA
taattttttgtatttttagtagagatggggtttcgcagtgttggttgggctggtcttggaactcctggcctcgtgattcgcccacttcggcctccctgagtgttgggattacaggcatga

SEQ ID NO: 46297 - DNA, 120 bp, synthetic construct
  source 1..120: mol_type = other DNA
tagggaattatgactcattttggcacttagcttttgtagcttactaccgtatgacattttatatctttgcaaaaaccaagtaattagaccattcatcacaatttccatacttaaaaaact

SEQ ID NO: 46298 - DNA, 120 bp, synthetic construct
  source 1..120: mol_type = other DNA
gtaatgtgctgggcacactgcaggtgctctacaaataactactgataactactttttttcatgagtaattgtacattttctttcttccttcctttcttccttccttccttccttccttcc

SEQ ID NO: 46299 - DNA, 120 bp, synthetic construct
  source 1..120: mol_type = other DNA
taaaaattgggagagttttcaaaagaaaatgcagatttctgactcatcttgaaaaatggtaagatgggcagcacagggcctgtattcccaattgcagccctcagtggagctaagtaggct

SEQ ID NO: 46300 - DNA, 120 bp, synthetic construct
  source 1..120: mol_type = other DNA
cttattttttaaattctttaatttttgtttttatatattttttgagacagggtctcattctgtcacccaggctggagtgcagtggtgctatcacgggctcactggagccttgacctcccc

SEQ ID NO: 46301 - DNA, 120 bp, synthetic construct
  source 1..120: mol_type = other DNA
ttgcctgattcttattctcttgtccaccacagtttgcattcctcaggccatttttgtctgcgtcgttgagggcctccattgtccagccccatctcctttactctctcagtagcatttggc

SEQ ID NO: 46302 - DNA, 120 bp, synthetic construct
  source 1..120: mol_type = other DNA
gtgatacatggctgtggccctatctagggatctgcactctagcctgggcgacagagcaagacccggtctcaaaaaaaaaaaaaaaaaaaagaccctaagcctttttttactgcatatatt

SEQ ID NO: 46303 - DNA, 120 bp, synthetic construct
  source 1..120: mol_type = other DNA
ctgattctactgaaaagtctgctaatattcattgactgattgatttgatttggagaggactaccatctttacagtatatagtttactaattaataaattcgcgtttcatctttcacaagt

SEQ ID NO: 46304 - DNA, 120 bp, synthetic construct
  source 1..120: mol_type = other DNA
aagtgcaagattggtgcaaggttggtgtttgatgatttcctcagtctttattttgtgaccaccagtgaataacccaagtatttgtgtttttaaacacctttatttggtcaagtatgtctc

SEQ ID NO: 46305 - DNA, 120 bp, synthetic construct
  source 1..120: mol_type = other DNA
cagttcaagcaattctcctgcctcagcctcccgagtagctaggactacaggcgcgtgccaccacgctgggctaattttttgtatttttagtagagacggggttttgccatgttagccagg

SEQ ID NO: 46306 - DNA, 120 bp, synthetic construct
  source 1..120: mol_type = other DNA
tctatttagttgtcatcactatggagtgatagactccatttcgttcaatgagttatagtccttatggatttttttcatcagggtctcactcctgttgcccagactacagtgtggtggtgc

SEQ ID NO: 46307 - DNA, 120 bp, synthetic construct
  source 1..120: mol_type = other DNA
agagctgggattacaggcatatgccaccatgcccagtccccatctttcttatgtattccgtttaatctgttttgacagtgcatacgcttctgtaatctctatcaagatactgttctatag

SEQ ID NO: 46308 - DNA, 120 bp, synthetic construct
  source 1..120: mol_type = other DNA
cgtcaattcaccgaaagagttaagagatttgaagcaatggcctgagtttgaatcctagttctccactcattgacaaaccacttgtcctgtctgaaccctatctcccataaaatggaagaa

SEQ ID NO: 46309 - DNA, 120 bp, synthetic construct
  source 1..120: mol_type = other DNA
tctggtcttgaattcctgggctcaagtgatcctcctgcctcagtcttccaaagtccggggattacaggagtaaggcaccacacccgacctctttttttttttttttttctcttttttctt

SEQ ID NO: 46310 - DNA, 120 bp, synthetic construct
  source 1..120: mol_type = other DNA
tctgtgcttaaccatttgaagaactggttttcttttccaaaatggctgcaccatttacagccctgccagcaggttataaaagttccagcttctctgcatccttggcaacatttgttatta

SEQ ID NO: 46311 - DNA, 120 bp, synthetic construct
  source 1..120: mol_type = other DNA
cccttcctgcctctcatttatctgttgaagaattttgcctatttgacctgtagagtttcctatggtctggatttttctaattatgttcccatggtacagttcagcttctctctgtctctg

SEQ ID NO: 46312 - DNA, 120 bp, synthetic construct
  source 1..120: mol_type = other DNA
tctggaaaccagcaacctgtttcctgtcactctagttttgtctttttgaagtaccctcttgagactgtgttatttagcattatgccttttgagggtcatccaggttgttgcatgtgtgaa

SEQ ID NO: 46313 - DNA, 120 bp, synthetic construct
  source 1..120: mol_type = other DNA
ctggtaggcttctgagtccttctaaagtgactcatagtctgtgatttgtcccctcactaccttataaaatgagactttccgggaacatcttttacaatttctgcctcacacctggaatat

SEQ ID NO: 46314 - DNA, 120 bp, synthetic construct
  source 1..120: mol_type = other DNA
gtattgattattttggcccagtattttccagtatgcaatgtgtgccttaaatatgtagtttctaatttttttctggtgtcctggcatgtcatccaggctggcctctaattcctgggctca

SEQ ID NO: 46315 - DNA, 120 bp, synthetic construct
  source 1..120: mol_type = other DNA
ctcaggatagcatttctaatttcacagagttatttttccgttatgaaacacagattgcctttgaggtctcctgtttctactactgcccctcacttttatgtgggcctcctctttcctttg

SEQ ID NO: 46316 - DNA, 120 bp, synthetic construct
  source 1..120: mol_type = other DNA
tgaataactggaaatggcccctgcatacccgtgttggacatattacatgaggcagaaataaatttctgttgtgctaagccattgaaatgttggggttgttaccacagcatcacttagacc

SEQ ID NO: 46317 - DNA, 120 bp, synthetic construct
  source 1..120: mol_type = other DNA
tatgagtctatgtgcatattatcagtgatctgtttgcatattaaataattcagataatgaaagtacaagtgaaaaaatgagtctttgcgataaagctcttctccagccatccccatttct

SEQ ID NO: 46318 - DNA, 120 bp, synthetic construct
  source 1..120: mol_type = other DNA
gaaagagaaccctttccaactcattctatgaggccaacatcacactgacaccaaagttagacaaagatactacaaggaaactacagataatacttcttaggaacgttgatgccaaaatct

SEQ ID NO: 46319 - DNA, 120 bp, synthetic construct
  source 1..120: mol_type = other DNA
gagcagcagttacatatgctagaatcatagtttgaatgattcagactgtgtacctgtgatctgacatacctggattggagttccatctctgccacccactttatttgactccatagagaa

SEQ ID NO: 46320 - DNA, 120 bp, synthetic construct
  source 1..120: mol_type = other DNA
ttatgtctgtaatgtgaattgtccagaggagaagttgtggtcaattgatgattaggctgatggtttctgctagctctggcaaaaggtgaatccagttgctttctagcacttttcctacta

SEQ ID NO: 46321 - DNA, 120 bp, synthetic construct
  source 1..120: mol_type = other DNA
ggccactgcctggttggcatctaccacttctctggaatcagcaaccccaatagcagatttaactgctggttccatggtttttgttacttgtccttttttgcagtgttttaaataataatc

SEQ ID NO: 46322 - DNA, 120 bp, synthetic construct
  source 1..120: mol_type = other DNA
aataacaatatgatcatgttgttacctctctcttgccaaaacgttgacttgatgataaggggatcactgtgacatcatcattacccacagatgtttcttttttctcccccctccccctct

SEQ ID NO: 46323 - DNA, 120 bp, synthetic construct
  source 1..120: mol_type = other DNA
actatgagcttcagttttctttttttttcccgtttttatttttatttttatttttattttgaggcagagtcttactctgtcacccaggctggagtgcagtggcgcgatctcggctcactg

SEQ ID NO: 46324 - DNA, 120 bp, synthetic construct
  source 1..120: mol_type = other DNA
agtagcttacacttagtgcttactgtctgcctggcactgttctaagtgccatacctatattaactcctttgatcctcattttacagattgggtacggaggaggttaaacaacttggtcaa

SEQ ID NO: 46325 - DNA, 120 bp, synthetic construct
  source 1..120: mol_type = other DNA
acggatttaaaagacagtgctgtacggtaattaactacctgcctctcatcacacagagatgagaacttaaatgtaggcttcccatctaaaactttcttccctgtgtgtttatccacccac

SEQ ID NO: 46326 - DNA, 120 bp, synthetic construct
  source 1..120: mol_type = other DNA
gcgatcctcccacctcagcctctgaaagtgctaggattacagggttagccaccagcacccagccaagaaatcccattctaatgtattagtatggttttatctattttagcagtgtaaaat

SEQ ID NO: 46327 - DNA, 120 bp, synthetic construct
  source 1..120: mol_type = other DNA
tttattcccctgagccatttgaaagtaagctgcaaacatcttgacatttaacttctaaacattttagcacgtgtatcctaagagcaaggttgtcttcctgaagagttacattatcatact

SEQ ID NO: 46328 - DNA, 120 bp, synthetic construct
  source 1..120: mol_type = other DNA
tctggtccaaacttctatcttgagaaatgtaacagcaattttgaactccttcatccctcaagacaattattcctcccttcccagaggtaaccatcctcctaaatttgatgtcattccctt

SEQ ID NO: 46329 - DNA, 120 bp, synthetic construct
  source 1..120: mol_type = other DNA
tgagccgaaatcgtgccactgcactctaccctgggtgacagagtgagactctgtctcaaggaaaaaattgcagtatcatggtacaacaattacttgatcgtaatagaagatgtgttcagt

SEQ ID NO: 46330 - DNA, 120 bp, synthetic construct
  source 1..120: mol_type = other DNA
gaaagggccctttcccaacttcagactgagcacccagaagttgacctgggactgctgttttgtttctaggaaactagaaaccttggcagaattgaaatttcgtagtgattttttcttctt

SEQ ID NO: 46331 - DNA, 120 bp, synthetic construct
  source 1..120: mol_type = other DNA
aaaaaaaaattattcagtgacacttgttaaagcatgggaaggaagacattattcaggatcatccctgtaagtgtagggaccactacaatagtgtcttacagtgggtggggagagagcgtg

SEQ ID NO: 46332 - DNA, 120 bp, synthetic construct
  source 1..120: mol_type = other DNA
agacggccacgaatctactctcggtctctgtgaaattgcctattctgaatatttcctataagtggaatcatatgtctggcttctttcacttagcatatattcaggcctcatccctgttgt

SEQ ID NO: 46333 - DNA, 120 bp, synthetic construct
  source 1..120: mol_type = other DNA
ttctcttcaatgccatttgtcattaacttatttagaagtgtattgattacctcctataggccaggcactgtactgtgtatcagacactagggacacaagcactagtaaaatgctatggct

SEQ ID NO: 46334 - DNA, 120 bp, synthetic construct
  source 1..120: mol_type = other DNA
agcgtgtctttgaggctcatgtatgctgtaatgtgtatcagtattttgtgcctttttactgcctaatgatattccattctgtggtgatgacaatttatgtgctcagcaattgatggatgt

SEQ ID NO: 46335 - DNA, 120 bp, synthetic construct
  source 1..120: mol_type = other DNA
tcggcaattgggcactttttggctaacggtgctgccattagccaaaaagtgactgccggtacataaacagattttgtgctggtggttgatggcttttatattgatcttattctcttgatg

SEQ ID NO: 46336 - DNA, 120 bp, synthetic construct
  source 1..120: mol_type = other DNA
gttttggaaatttagaacgcaacccattcatgagttgaccctccctttctagttaggtggttacatgtttattataggggtgcatggtatactatcctaaagtaactgttcatttgagtt

SEQ ID NO: 46337 - DNA, 120 bp, synthetic construct
  source 1..120: mol_type = other DNA
caggaggcagaggttgcagtgagctgagatcgtgccactgtactccagcctgggtgacaagcaagactctgtatcaaaaaaaaaaaaaaaaaaaaaaaaaaaaaaaaaaaaaaaggtgtt

SEQ ID NO: 46338 - DNA, 120 bp, synthetic construct
  source 1..120: mol_type = other DNA
atcacttgaggtcaggagttcgaaatcaggctggccgacatgacgagaccctgtctctacaaaaaatataaaaattaacctggcatggtagtgttcgcctgtagtcccagctactcagga

SEQ ID NO: 46339 - DNA, 120 bp, synthetic construct
  source 1..120: mol_type = other DNA
gtcatatgaggactctgaaaaatgttagagacctggctaagttgtaggtaactagtgcattgagaagactgaaaggctcctgaatgcagacaaagcattactaattgcattcagggtcag

SEQ ID NO: 46340 - DNA, 120 bp, synthetic construct
  source 1..120: mol_type = other DNA
ttccatcaaagcttaagataacataggaattttatatggaagtactgttcccacagaactaactttacaaatgtaaagcttgggcagaggttgaggaaaatggtaaagtgatagatttcg

SEQ ID NO: 46341 - DNA, 120 bp, synthetic construct
  source 1..120: mol_type = other DNA
attgcttgaacccagaatgcagaggttgtagtgagctgagatcatgccgctgtactccattctgggcaacagagtgagactctgtctcaaaaaaaaaaaaaaaaaaaaagattatattga

SEQ ID NO: 46342 - DNA, 120 bp, synthetic construct
  source 1..120: mol_type = other DNA
cttccccaaggttttatcttagaaattatcctgtttttttcttatgtctttcctagtctcatgatttccgcaattatctctaaaatgatctctctcaacttcctatctcagttgtggcat

SEQ ID NO: 46343 - DNA, 120 bp, synthetic construct
  source 1..120: mol_type = other DNA
aattttcaaaagaatttgaaaatacaggtgaccatgtcagaaaacaaaggtgtattggcatcacctggaaagactacaccaatgttatgagaggagagaattgtcaggcaggcttcacag

SEQ ID NO: 46344 - DNA, 120 bp, synthetic construct
  source 1..120: mol_type = other DNA
gttttccatactcacagaaggcaagggaattaatttcatgcagagcccagagcggggtggaggcagagcttgaaagtgtatagaatgtacagaagatagaataatttttgtatggcttga

SEQ ID NO: 46345 - DNA, 120 bp, synthetic construct
  source 1..120: mol_type = other DNA
ttattctacaggatattacttttttggtccctattaaactatgtggcagcaagtcacaaaggaggaatcagaaagtaacctgctccccacccttggtgtgtagtccagttagcaaggtat

SEQ ID NO: 46346 - DNA, 120 bp, synthetic construct
  source 1..120: mol_type = other DNA
tcagacaccattaccaaaggatggtatcttgttttaatagaattaccgcttaaggaatggggacctgtgaaaaattcattcagtagaattcgatggttccatattaacagataggcatta

SEQ ID NO: 46347 - DNA, 120 bp, synthetic construct
  source 1..120: mol_type = other DNA
ttctgaatgtacctcactgttgtcccaccaaaggacagggagcctgagacatgcatgcaccaactttcacctgttgttaattgaaggttgctccgtgagctttaactccggcaggtctgt

SEQ ID NO: 46348 - DNA, 120 bp, synthetic construct
  source 1..120: mol_type = other DNA
ctggagtgttggttctgcaccctccttgttagctggcatttggcagtggcagtagttaggtcacccttcataagaaggagcccatgctgttgggcctatgtagagccttcctctctgtca

SEQ ID NO: 46349 - DNA, 120 bp, synthetic construct
  source 1..120: mol_type = other DNA
gtttgggaacttgcagctccatatggtatagtggggagagcatgccacaaggttttcaggtaatatgaggttttctcctcatattctcttactacacttcaattcctaactttatcttcc

SEQ ID NO: 46350 - DNA, 120 bp, synthetic construct
  source 1..120: mol_type = other DNA
actgccttggcctcccaaagtgctgggattacaggcgtgagccaccacgcctggtccatacagttattcttgattttcagatttattcttataaaattatgcctaatgagaatatccctc

SEQ ID NO: 46351 - DNA, 120 bp, synthetic construct
  source 1..120: mol_type = other DNA
actttgtgcttttgcctctggatttcccagtctggaatgcctctctcacatcctagtatgttgaaatctgtccattattcaagtgtgagcttagatgccaacactttgatgaaggcttat

SEQ ID NO: 46352 - DNA, 120 bp, synthetic construct
  source 1..120: mol_type = other DNA
agcgccaccgcactccagcctgggtgacagagcggactccatttcaaaaaaaaaaaaacagttcattgctcaataagtgaatatttccaggatgcttaaattaaacagggtagactaagc

SEQ ID NO: 46353 - DNA, 120 bp, synthetic construct
  source 1..120: mol_type = other DNA
cgaagttcttgagctagcactgtcagtagtaactggccgttactgtaagatctagagatatatttttagatgccattatacttacaaagaactgttagagtgcattttatggttttatgg

SEQ ID NO: 46354 - DNA, 120 bp, synthetic construct
  source 1..120: mol_type = other DNA
tggaagctgcagtgagcagtgatcacatcactgcagtccagcctgggcaacagagcaagaccttgcctttaaaaaagaaaagtctgaaatacccctcacaactgttaaaaaaaaaaaaaa

SEQ ID NO: 46355 - DNA, 120 bp, synthetic construct
  source 1..120: mol_type = other DNA
aaacttatccaagcctctagctaataaatgtgatagaattggggcttgaaatgatgaattttttaaaaaaagatacattgaagaggattaacagagctgaaagttgttttttatgaaagg

SEQ ID NO: 46356 - DNA, 120 bp, synthetic construct
  source 1..120: mol_type = other DNA
cacccaaggggaccatttcagaggcccaccctcaggggcacattctctttcccagggatgttccttgctgagaaaaagaattcagcaatatttctcctatttgcttttgaaagaagagca

SEQ ID NO: 46357 - DNA, 120 bp, synthetic construct
  source 1..120: mol_type = other DNA
gctaattattgtatttttagtagagacagggtttcacatcaggtctcgaactcctgacatcaggtgatcaacctgctgggattacaggcgtgagccaccacaccctgcgtcgctaagttt

SEQ ID NO: 46358 - DNA, 120 bp, synthetic construct
  source 1..120: mol_type = other DNA
tgcataactatttcttttccagaatggccactttgcccttcctttagcagttgaaaatctggatgcctctcaccgtactggagttttgggaatttgtgcttcaaaaaactcagatgcttc

SEQ ID NO: 46359 - DNA, 120 bp, synthetic construct
  source 1..120: mol_type = other DNA
ttgggaaagtggtatacttaagttacactttaattatgaagaatacagatcaggaccagccaaatgagatacagggtactgggagggttcctaacatggagcttctgtgctctcttctcc

SEQ ID NO: 46360 - DNA, 120 bp, synthetic construct
  source 1..120: mol_type = other DNA
ttactttattcgtttctttttttttttaaattaaattgagatggggtcttgctatgttgaccaggctggtctcaaactcctggtctcaagcagtcctcctgcctgttcctcccaaagtgc

SEQ ID NO: 46361 - DNA, 120 bp, synthetic construct
  source 1..120: mol_type = other DNA
agccaaaaggacaaagctagaggcatcacactaccagacttcaagatatactgcaaagctgtagtaactgaaacagcatggtactagcataaaaccagacagtagaccaattgaacagaa

SEQ ID NO: 46362 - DNA, 120 bp, synthetic construct
  source 1..120: mol_type = other DNA
ctcttcaagtttatttattgccgcattgcttatactaaattattggaaatgatctaaaatgtccatcaacatggttgtgcactgtggcatgcacctgtagttgggactgctcgggaggcc

SEQ ID NO: 46363 - DNA, 120 bp, synthetic construct
  source 1..120: mol_type = other DNA
gatgctaaaaggaaagcagggacaagtaaatgtcaaatccatttcatgccatagaacttttttttttttttttttgaggcggagtctcgctctgccgcccaggctggagtgcagtggcat

SEQ ID NO: 46364 - DNA, 120 bp, synthetic construct
  source 1..120: mol_type = other DNA
caccggatcttgacacaagtcagggatggaagtgagcaaaaggaagtggtgtggtttttatatcatttcagttgtgttgagatagggaaatgggatagtttatccactgtactgctcttt

SEQ ID NO: 46365 - DNA, 120 bp, synthetic construct
  source 1..120: mol_type = other DNA
agattctgcaggtacaaccagtggatttgatgacaggaaatggaatgcaagaaggaaagagggagttgtcaagaatgacttgagattttaggcctggttacatcagtgtagcgatattct

SEQ ID NO: 46366 - DNA, 120 bp, synthetic construct
  source 1..120: mol_type = other DNA
tcctgagactattagaccagctcgcccctgaactttttgtggcagggaagatagaatatgcttagtgtaagagcctctactcctgagatcttaggggaaatctttgtaccctgaattaaa

SEQ ID NO: 46367 - DNA, 120 bp, synthetic construct
  source 1..120: mol_type = other DNA
ctctaattggatgtcctgggtctcccaattctgtcctttaatacccatttttctacttcttttattgggaccttgtagtttctcaattcatccaaaaccgtatccaggccatcaccagtc

SEQ ID NO: 46368 - DNA, 120 bp, synthetic construct
  source 1..120: mol_type = other DNA
gattgtccctgcacattgcattttctatcctggtccctggtcaaactgtatgtcctgtcatatcccagacattattccaaccaaaaagtcacctacatatttttagatcctcttaggagg

SEQ ID NO: 46369 - DNA, 120 bp, synthetic construct
  source 1..120: mol_type = other DNA
tgagccaccatgcccggccaactcaggcaagtttctttgcgcttcatttttttttttttcagagttatgaagatgaaaaaagatcttacagggttcagtaaaaaataacttccagtttcc

SEQ ID NO: 46370 - DNA, 120 bp, synthetic construct
  source 1..120: mol_type = other DNA
cagaaacctggaagcatttcttctgcatctaatgttgaggtcctggtgaagggtataaaacacacagcatcaactatatataatgctatactagattgtcttgattctgtggtcctggaa

SEQ ID NO: 46371 - DNA, 120 bp, synthetic construct
  source 1..120: mol_type = other DNA
aacggtggggggcttaacaggaagaggaaggaatgactttactctgtagtctgttttttcaactgacttcagccttttcctgtgtttttttttttttaagttccaattgaactgttggtt

SEQ ID NO: 46372 - DNA, 120 bp, synthetic construct
  source 1..120: mol_type = other DNA
tgaccaacatggagaaactccatctctactaataatacaaaaattagctgggcgtgatggcgcatgcctgtaatctcagctactcgggatgctgaggcgggagaatcgcttgaaccctgg

SEQ ID NO: 46373 - DNA, 120 bp, synthetic construct
  source 1..120: mol_type = other DNA
cagccttccaaagtgctgagattacaggtgtgagccacgtacccagccaaaaattatttttgaagtatagcatgagtccatccactataccactgccaccctattctttttttttttaat

SEQ ID NO: 46374 - DNA, 120 bp, synthetic construct
  source 1..120: mol_type = other DNA
ttgtaccactgcacttcagcctgggcaacagagtgagactctgcctccaaaaaaaaaaaaaaaatttagtccagtctccctttctatcatgttggtcatgtctttgacaaagatgctctc

SEQ ID NO: 46375 - DNA, 120 bp, synthetic construct
  source 1..120: mol_type = other DNA
cagttaataaatatcattccagatttgtttgtttgttaagatggggtcttgctgtgttgccaaggctggagtgcagtggctcttaactgttgtgatcacagtgcattgtagcctggaatt

SEQ ID NO: 46376 - DNA, 120 bp, synthetic construct
  source 1..120: mol_type = other DNA
ttctggcatggtatccactggagagtggtagccagtggaggagcaagaaagaaaggtgtgggtttgatttagacaggtggagtgtgattctagtagaaatatttagtgggaaaattgaaa

SEQ ID NO: 46377 - DNA, 120 bp, synthetic construct
  source 1..120: mol_type = other DNA
ctgacctcatgatctgcccacctcagcctctcaaagtgctgggattacaggcgtgagtcactgcacccgaccttcttttttttttttttttttttttttttgagatggagtctcgctctg

SEQ ID NO: 46378 - DNA, 120 bp, synthetic construct
  source 1..120: mol_type = other DNA
acagccagaaaggactattgagattgtttaatatacttcccttgttgtacatatggctaatctgaggtcaggagaggttgcagcctattaactaaattatttgaagtttgaaattatagt

SEQ ID NO: 46379 - DNA, 120 bp, synthetic construct
  source 1..120: mol_type = other DNA
tgagctgagatcgcaccaatgcactctagcctgggcgacagagcaagactcttgtccctgccccaaccaaaaaatttcattttattgttgttaaaagactttagaaagataactgacact

SEQ ID NO: 46380 - DNA, 120 bp, synthetic construct
  source 1..120: mol_type = other DNA
accatgctaagaatacagagccttcagcaaaagccacttttacttgtgaaacaccaaattatttagtacaatacctttacttcaatatctgttacatgccttgttgatcagcatcaacca

SEQ ID NO: 46381 - DNA, 120 bp, synthetic construct
  source 1..120: mol_type = other DNA
tggttactattatctgcatttgaggcaggtaaaacggggaaagggtcagcactggcctcaactagacctgataccaggaaagcaaaagtgtcacagattttgtcttaagtcttaatcatt

SEQ ID NO: 46382 - DNA, 120 bp, synthetic construct
  source 1..120: mol_type = other DNA
atgctaaaatgctcatgttgctatgaaattttcagttccttttcaaagggttctataccccagagttgcatccatttagtacatgcagctactaatccaggacttctggctggtgggaag

SEQ ID NO: 46383 - DNA, 120 bp, synthetic construct
  source 1..120: mol_type = other DNA
taacaacaagcacctgtaacaacccagttgtagtatctgattgtcttttttcactaaggatctagaactccttggagaaatcactgagttcaagttcggcagggaaagagcaaggtgatc

SEQ ID NO: 46384 - DNA, 120 bp, synthetic construct
  source 1..120: mol_type = other DNA
gtgacttgtggctaccatattggacagcacagctctcgagctaattaccatttacaaaatccatagagaacaagaggacatgttaaatgatgccaggaggatgtgatcagaaattccaga

SEQ ID NO: 46385 - DNA, 120 bp, synthetic construct
  source 1..120: mol_type = other DNA
tttgagtattttaaaaactacttttaggaaaaaaaaaaaaaaagacccaacacggtggctcatgtcatgtctataatcccagcacattgggaggctgagacgggcggatcacctgaggtc

SEQ ID NO: 46386 - DNA, 120 bp, synthetic construct
  source 1..120: mol_type = other DNA
tactaaaaatacaaaaattagccgggcgtggtggcaggcgcctgtatcccagctacttgggaggctgaggcaggataactgcttcaacccaggaggcagaggttgcagcgagtggagatc

SEQ ID NO: 46387 - DNA, 120 bp, synthetic construct
  source 1..120: mol_type = other DNA
gactacaggcgtgagccaccgcgcctggccaagcatatgatttttaatgcaataactatattcatgtttctagaagcttttttttgccattcagtgacattatggatgacactgcatgtc

SEQ ID NO: 46388 - DNA, 120 bp, synthetic construct
  source 1..120: mol_type = other DNA
cattttaattcgtctacattttaagtcacatgtggctagtggctaccatatgggacagcacagttgtagacatgccaccttttccctagttcttgcttccttgtacttgactttccttct

SEQ ID NO: 46389 - DNA, 120 bp, synthetic construct
  source 1..120: mol_type = other DNA
catcaacagagtgggcgctgtcccctagggagagcacagagaggctctttcctgttacttttctttgtattcaatatctgcttggtgaaatcttgcaagtttttaagatgtagcttagat

SEQ ID NO: 46390 - DNA, 120 bp, synthetic construct
  source 1..120: mol_type = other DNA
gttttccagagctgaattgatacgtgtcttctgttaatgtaataggattttaaagctggtcaggttccctcacctgtcctctagtcctgtagccttatagagtaaatgaagcctggaaag

SEQ ID NO: 46391 - DNA, 120 bp, synthetic construct
  source 1..120: mol_type = other DNA
aatgttctctatactcattcagtagcaaattcttttactaaatattcggtataagaaagtgaaggttattggccaggcatagtggctcacggctatattcccagcacttcgggaggctga

SEQ ID NO: 46392 - DNA, 120 bp, synthetic construct
  source 1..120: mol_type = other DNA
tgtctctatttaatgattggaaactctcacagacttctgtgaagtctctcccccttttgtacctttcttacaagtgatgactatatacttttacctggcaggggagagaccacggtcacg

SEQ ID NO: 46393 - DNA, 120 bp, synthetic construct
  source 1..120: mol_type = other DNA
tcctacttctttttaatttaaaaaaaaattttttttttaactatagacaggatcttgctatgttgcccaggctggtctcaaactcctgggctcaagcagtccttccacctcagcctccca

SEQ ID NO: 46394 - DNA, 120 bp, synthetic construct
  source 1..120: mol_type = other DNA
tcaaaagtcctctccctgttttcccatcatattcagtaaaaggtgccttttagtccccttttttttggtcattaagcctatttgtatgtttcagagaaaagtttgtttttatctattatc

SEQ ID NO: 46395 - DNA, 120 bp, synthetic construct
  source 1..120: mol_type = other DNA
ccggggaggccaaggttgcagttagccgagatcgttccacggtactgcagcctgggccacagagcaagaccctgtctcaaaaaaaaaaaaaaaaaaattcttttttctttttttaaattt

SEQ ID NO: 46396 - DNA, 120 bp, synthetic construct
  source 1..120: mol_type = other DNA
caacctctcagctaatgtttggaatcacccttgttgcaaatgactgcaaatctatcttcctttctgactctttggaccatagagaacaaacctaatctctctttaagatgacagcccttt

SEQ ID NO: 46397 - DNA, 120 bp, synthetic construct
  source 1..120: mol_type = other DNA
gatgttagctttgaccatattgattctttaatagagcagtcttcatgctgttacccatatccctgggtacactcagactgtgttatacaagggtaacgggcacgttgatagttttaaggg

SEQ ID NO: 46398 - DNA, 120 bp, synthetic construct
  source 1..120: mol_type = other DNA
agtaatttttattcatgaattcgtgaactgatttgtttcaaaagtcccatccatatcattaagaaatgcctggccaggtgcagtggctcatgcctgtaatcccagcacttttggaggccg

SEQ ID NO: 46399 - DNA, 120 bp, synthetic construct
  source 1..120: mol_type = other DNA
taagtgtcacctgaaaaatacgtgaaggatacgttgcttttaagaattgggttacgccagcaagcattttgaccagcacttatctaactttctgtatttcttggtaaacgtcacccaagc

SEQ ID NO: 46400 - DNA, 120 bp, synthetic construct
  source 1..120: mol_type = other DNA
cgctcaagccattctgccacttcagcttcccaaagtgctaggattacaggtgtgagccactgttcccagttcatctttttttaacctgtattttttagcacactaaagcctagagataaa

SEQ ID NO: 46401 - DNA, 120 bp, synthetic construct
  source 1..120: mol_type = other DNA
ctgattatactgaggcttttccttaatttccgcttacattcttgttacttgtgtagtgacaaacagttctttgctattcacatgttggtcagaatggcagttctccccaggctgcagcat

SEQ ID NO: 46402 - DNA, 120 bp, synthetic construct
  source 1..120: mol_type = other DNA
ccccctgttgtcataggtaggttagccgagaaaagtcggagcatgcttctcaaatatcttctctggttttacagtaaccaggctacctagaattgaacacgtcagattattttttcattt

SEQ ID NO: 46403 - DNA, 120 bp, synthetic construct
  source 1..120: mol_type = other DNA
caccctcaacaatggggtaccacagttgagaaatcgtgttttgggtctttctagataatagacttggaatcttctgttagggaggtgatgcgaaagtcatatgattattcagagtaggag

SEQ ID NO: 46404 - DNA, 120 bp, synthetic construct
  source 1..120: mol_type = other DNA
cacaagggcactgtaatgtatatattattttatttatttatttatttagaaatagagtctcactctgtctcccaggtggagtgcagtgatctcggctcactgcaatctctgcctcccagg

SEQ ID NO: 46405 - DNA, 120 bp, synthetic construct
  source 1..120: mol_type = other DNA
taggatctgttcacaccagctgtgagagttgaaaaccccataattcataggttttggttgaaggactcaggaggattttgcctcagtggtggggaataattagccctagactaaacatgg

SEQ ID NO: 46406 - DNA, 120 bp, synthetic construct
  source 1..120: mol_type = other DNA
ctctctgcatactccacctgctgggttcaagcgattctcgtgcttcagcttcccaagtagctgggattacaggcgtgtaccaccaagcctggctaatttttgtatttttagtagagatgg

SEQ ID NO: 46407 - DNA, 120 bp, synthetic construct
  source 1..120: mol_type = other DNA
caatcagacatcaggaactggtcatgtaggcttttttatagttctaaactaaatactacatagaactttgtgactgccctgtttatttagctttagaacttcatgtgctagttcagtctg

SEQ ID NO: 46408 - DNA, 120 bp, synthetic construct; identical to SEQ ID NO: 10939
  source 1..120: mol_type = other DNA

SEQ ID NO: 46409 - DNA, 120 bp, synthetic construct
  source 1..120: mol_type = other DNA
cgagaccatactggctaacatggtgaaactccgtctctaccaaaaatacaaaaaaagaaattagccaggcgtggtggcgggcgcctgtagtcccagctactcgggaggctgaggcaggag

SEQ ID NO: 46410 - DNA, 120 bp, synthetic construct; identical to SEQ ID NO: 10940
  source 1..120: mol_type = other DNA

SEQ ID NO: 46411 - DNA, 120 bp, synthetic construct
  source 1..120: mol_type = other DNA
agaacaacagacattgaaataaagacatactcctgaaaatgggcatacctcctcttaggctgttgataggcaggaggtgttcagtctagtacgagtcgatttgggttagggttttgttca

SEQ ID NO: 46412 - DNA, 120 bp, synthetic construct
  source 1..120: mol_type = other DNA
aaaccaggaaggcgggggttgcagtgagctgagatcacaccactgtactctagcctgggcgacaagagtgagaccctatctcaaaaaaaaaaaagaaaaaaaagaaaaaagaattaggta

SEQ ID NO: 46413 - DNA, 120 bp, synthetic construct
  source 1..120: mol_type = other DNA
atacagtggaatactatctagccattaaagaaaaaggtgacactttgtgtacttacgtggaatgataccccaggtaagaagcaagatgcagaacggcatcagtgtctctccagattacca

SEQ ID NO: 46414 - DNA, 120 bp, synthetic construct
  source 1..120: mol_type = other DNA
tacaaatcaatgaggagaagagttcagggaacacttcaattgaataatgtgcaataaacacaaatagattgatcaggcatagtgtctcacgcctgtaatcccagcactttgggaggccaa

SEQ ID NO: 46415 - DNA, 120 bp, synthetic construct
  source 1..120: mol_type = other DNA
tctggtagtgggtctggactacctttattggtaagttaaacgttcctatagacatgaatggtgtgttgatttagaatgtgtcctcatgatggtggacagtataattattgcagatcaggg

SEQ ID NO: 46416 - DNA, 120 bp, synthetic construct
  source 1..120: mol_type = other DNA
ctggcctcaactgatccttccaccttggctcctaaagtgctgggattacaggtgtgaaccaccgcacccaccctgatctctaattttgaaattcatcttattaaataactctaattgaat

SEQ ID NO: 46417 - DNA, 120 bp, synthetic construct
  source 1..120: mol_type = other DNA
ataataagataacccaatttttttaaaaaatggacaaaagatttgaacagacacttccccaaagaagatataagaatggcaaacaagcacatgaaaagatgctcagcatcagcagggata

SEQ ID NO: 46418 - DNA, 120 bp, synthetic construct
  source 1..120: mol_type = other DNA
aattatacctcaataatcttgacttaaaaacttacaggctgaggcaggcagatcacttgaggtcaggtgttcgagaccagtctggccaacatggtgaaaccctgtctctactaaaaatac

SEQ ID NO: 46419 - DNA, 120 bp, synthetic construct
  source 1..120: mol_type = other DNA
tctgtggaccaagactacccacgactgtgtgcactgggagggtaattattatgaccatttttgcaaacagccagccacttgaataacctgtttatgatttcagaatacattgtacattgt

SEQ ID NO: 46420 - DNA, 120 bp, synthetic construct
  source 1..120: mol_type = other DNA
ggtacaggtggaagcctccatatgtgctttgaaaatgtgtgagttcaactatatacatttggctaaaggaaacctagtagaatacacggtttgaataaaacatagtccggaatgccaacc

SEQ ID NO: 46421 - DNA, 120 bp, synthetic construct
  source 1..120: mol_type = other DNA
tggcagtcaacgagccagactgaaaaggcagctgtgatgagtcactgatgggcaaatgggagttggcttaattaggagctaactcttagttgaacattcttaattttataaaagtgtcca

SEQ ID NO: 46422 - DNA, 120 bp, synthetic construct
  source 1..120: mol_type = other DNA
agaaaaatgggagttgctgcattgctgacctgggccttgctgttaaattcaacaggtgagtggttctttgccccactgttttgaaattattttaatttccaaaagatatttccctatttg

SEQ ID NO: 46423 - DNA, 120 bp, synthetic construct
  source 1..120: mol_type = other DNA
ttctagaatggagtggctgctttacatttcagaattcattttaggctgtaatataaaagtaccagtctttaaaacaactgtaagagacatttaaatctgttacagtgttctgagtcagtg

SEQ ID NO: 46424 - DNA, 120 bp, synthetic construct
  source 1..120: mol_type = other DNA
aaaatacaagataaactattttatttttggccctcaacttggaccttggctttcttttgtttcagtgacacaaatgaagttgatgtgcccttgaataccagggtgggcaccaaacgctac

SEQ ID NO: 46425 - DNA, 120 bp, synthetic construct
  source 1..120: mol_type = other DNA
tatctcttcggttagctgatttcctttcttttgggtatacacctaggagtgcaattgctggcagttacgtaatttagatgtcacatacgtcagagtccccaagaccacccccaggttgtg

SEQ ID NO: 46426 - DNA, 120 bp, synthetic construct
  source 1..120: mol_type = other DNA
cctgaagaagtgattcgtaaatgccaccaaatatattctctgctcactgaacatctctttacttttcagtgtctacgagcagttttgaagctaatgtcagaatgctgggcccacaatcca

SEQ ID NO: 46427 - DNA, 120 bp, synthetic construct
  source 1..120: mol_type = other DNA
cttttaaaagggaagttatttatattttgtgtataatgtgctttatttgcaaatcacccactcctttacaaccatactttatatatgtacatacattcatactgtagaaaccagctcatg

SEQ ID NO: 46428 - DNA, 120 bp, synthetic construct
  source 1..120: mol_type = other DNA
acccaatttacttaaatcttggtttacttttgacttgataccataatctttaaaatcatttgtcatctttttttttttttttttgagacggagtctcgctctgtcgcccaggctggactg

SEQ ID NO: 46429 - DNA, 120 bp, synthetic construct
  source 1..120: mol_type = other DNA
ataggccagcaagaagaagtattatgtagtaccatagttagtaaattcgtaaaaccttggaagccattatttggtcccacttgcaatttagtgtttttgaagtgtgtagcttcattcaga

SEQ ID NO: 46430 - DNA, 120 bp, synthetic construct
  source 1..120: mol_type = other DNA
gaaagtatgtgaatatggctcttgtaaaggattaactattgtaattttagcttatgctctgtattctgttttctatggaattatttaagcccttttagtgacctttgtcctggcccattt

SEQ ID NO: 46431 - DNA, 120 bp, synthetic construct; identical to SEQ ID NO: 25651
  source 1..120: mol_type = other DNA

SEQ ID NO: 46432 - DNA, 120 bp, synthetic construct
  source 1..120: mol_type = other DNA
gtgtctgttcatgtcctttgcccactttttgatgggattgtttgtttttttcttgtaaatttgtttgagttcattgtagattctggatattagccctttgtcagatgagtaggttgcgaa

SEQ ID NO: 46433 - DNA, 120 bp, synthetic construct
  source 1..120: mol_type = other DNA
gagcagtggtttgtagttctccttgaagaggtccttcacatcccttgtaaattggattcctaggtattttattgtctttgaagcaattgtgaatgggagttcactcatgatttggctctc

SEQ ID NO: 46434 - DNA, 120 bp, synthetic construct
  source 1..120: mol_type = other DNA
cctctgccttcgggttcaagcgattctcctgcctcagcctcctgagtggctgggattataggtgtgtaccaccacatctggctaatttttgtatttttagtagagacggggtttcaccat

SEQ ID NO: 46435 - DNA, 120 bp, synthetic construct; identical to SEQ ID NO: 25652
  source 1..120: mol_type = other DNA

SEQ ID NO: 46436 - DNA, 120 bp, synthetic construct
  source 1..120: mol_type = other DNA
ccacaatggttgaactagtttacagtcccaccaacagtgtaaaagtgttctatttctccacatcctctccagcacctgttgtttcctgactttttaatgattgccattctaactggtgtg

SEQ ID NO: 46437 - DNA, 120 bp, synthetic construct
  source 1..120: mol_type = other DNA
tagtttgaagtcaggtagcgtgatgcctccagctttgttcttttggcttaggattgacttggcgatgtgggctcttttttggttccatatgaactttaaagtagtttttttccatttctg

SEQ ID NO: 46438 - DNA, 120 bp, synthetic construct
  source 1..120: mol_type = other DNA
aatattctcttttttggttgtgtctctgccaggctttggtatcagaatgatgctggactcataaaatgagttagggaggattccctctttttctattgattggaatagtttcagaaggaa

SEQ ID NO: 46439 - DNA, 120 bp, synthetic construct
  source 1..120: mol_type = other DNA
gagcggttttgagtgagattcttaatcctgagttctagtttgattgcactgtggtctgagagatagtttgttataatttgtgttcttttacatttgctgaggagagctttacttccaagt

SEQ ID NO: 46440 - DNA, 120 bp, synthetic construct
  source 1..120: mol_type = other DNA
ttgaacattcttttctttaagaatgttgaatattggcccccactcccttctggcttgtagagtttctgctgagagatcaggtgttagtctgatgggcttccctttgtgggtaacccgacc

SEQ ID NO: 46441 - DNA, 120 bp, synthetic construct
  source 1..120: mol_type = other DNA
tcagctgcaggtctgttggagtaccctgccgtgtgaggtgtcagtgtgcccctgctagggggtgcctcccagttaggctgttcgggtgtcaggggtcagggacccacttgaggaggcagt

SEQ ID NO: 46442 - DNA, 120 bp, synthetic construct
  source 1..120: mol_type = other DNA
ttctgggatacatgtgcagaacatgcaggtttgttacatagatatatgtgtgccatggtgatttgctgcacccatcaacccgccatctacattaggtatttcttctaatgctattgcttc

SEQ ID NO: 46443 - DNA, 120 bp, synthetic construct
  source 1..120: mol_type = other DNA
ggcctagtgatgatgagcattttttcatgtgtcttttggctgcataaatgtcttcttttgagaagtgtctgttcatatcctttgcccactttttgatggggttgtttgtttttttcttgt

SEQ ID NO: 46444 - DNA, 120 bp, synthetic construct
  source 1..120: mol_type = other DNA
ttcaaggagaactacaaaccactgctcaacgaaataaaagaggatacaaagaaatggaagaacattccatgctcatgggtaggaagaatcagtatcgtgaaaatggccatactgcccaag

SEQ ID NO: 46445 - DNA, 120 bp, synthetic construct; identical to SEQ ID NO: 25653
  source 1..120: mol_type = other DNA

SEQ ID NO: 46446 - DNA, 120 bp, synthetic construct
  source 1..120: mol_type = other DNA
cttcctagacgggatggctgccgggaagaggcgctcctcacttcccagactgggcggccaggcagaggggctcctcacatcccagatgatgggcggccaggcagagacgctcctcacttc

SEQ ID NO: 46447 - DNA, 120 bp, synthetic construct
  source 1..120: mol_type = other DNA
gtggtgatgactcttaacgagcatgctgccttcaagcatctgtttaacaaagcacatcttgcaccgcccttaatccatttaaccctgagtgggacacagcacatgtttcagagagcacag

SEQ ID NO: 46448 - DNA, 120 bp, synthetic construct
  source 1..120: mol_type = other DNA
gatcactcgcggttaggggctggagaccggcctggccaacacagcgaaaccccgtctccaccaaaaccagtcaggcgtggcggcgcgtgcctgcaatcgcaggcactcggcaggctgagg

SEQ ID NO: 46449 - DNA, 120 bp, synthetic construct
  source 1..120: mol_type = other DNA
tcccaggctggtctcaaactcctgaattcaagcagtcctcctacctcagcttctcaaagtactgagatcataagcatgagccatcatgcctggcctggtatttttttttaattatttctt

SEQ ID NO: 46450 - DNA, 120 bp, synthetic construct; identical to SEQ ID NO: 10242
  source 1..120: mol_type = other DNA

SEQ ID NO: 46451 - DNA, 120 bp, synthetic construct; identical to SEQ ID NO: 10243
  source 1..120: mol_type = other DNA

SEQ ID NO: 46452 - DNA, 120 bp, synthetic construct; identical to SEQ ID NO: 10244
  source 1..120: mol_type = other DNA

SEQ ID NO: 46453 - DNA, 120 bp, synthetic construct
  source 1..120: mol_type = other DNA
cctctgtaggctccacctctgggggcagggcacagacaaacaaaaagacagcagtaacctctgcagacttaaatgtccctgtctgacggctttgaagaagagagcagtggttctcccagc

SEQ ID NO: 46454 - DNA, 120 bp, synthetic construct
  source 1..120: mol_type = other DNA
gactaacagcggatctctcggcagaaactctacaagccagaagagagtgggggcctatattcaacattcttaaagaaaagaattttcaacccagaatttcatatgcagccaaactaagct

SEQ ID NO: 46455 - DNA, 120 bp, synthetic construct
  source 1..120: mol_type = other DNA
aattacaacaaactgtctctcagagcacagtgcaatcaaactagaactcaggattaagaaactcactcaaaaccactcaactacatggaaactgaacaacctgctcctgaatgactactg

SEQ ID NO: 46456 - DNA, 120 bp, synthetic construct
  source 1..120: mol_type = other DNA
ttatccgccatgatcaagtgggcttcatccctgggatgcaaggctggttcaatacacgcaaatcaataaatgtaatccagcatataaacagagccaaagacaaaaaccacatgattatct

SEQ ID NO: 46457 - DNA, 120 bp, synthetic construct
  source 1..120: mol_type = other DNA
gacgcctcagaaataacgccgcatatctacaactatctgatctttgacaaacctgacaaaaacaagcaatggggaaaggattccctatttaataaatggtgctgggaaaactggctagcc

SEQ ID NO: 46458 - DNA, 120 bp, synthetic construct
  source 1..120: mol_type = other DNA
attacaggcgcgcgccgccacgcctgactggttttcgtatttttttggtggagacggggtttcgctgtgttggccgggctggtctccagctcctaaccgcgagtgatccgtcagcctcgg

SEQ ID NO: 46459 - DNA, 120 bp, synthetic construct
  source 1..120: mol_type = other DNA
cttgggatcctgttgatctatgaccttacccctaaccctgtgctctctgaaacatgtgctgtgtccactcagggttaaatggattaagggcggtgcaagatgtgctttgttaaacagatg

SEQ ID NO: 46460 - DNA, 120 bp, synthetic construct
  source 1..120: mol_type = other DNA
cactcataggtgggaattgaataatgagaacacttggacacaggaaggggaagatcacactctggggtctgttgtggggtggcgggaggggggagggatagcattaggagatatacctaa

SEQ ID NO: 46461 - DNA, 120 bp, synthetic construct
  source 1..120: mol_type = other DNA
ccataatccatgatgtgattattatgcattgcatgtctgtatcaaaatatttcatgtaccccataaatatatatacctgctatggtgagccgagatggcgccactgcactccagcctggg

SEQ ID NO: 46462 - DNA, 120 bp, synthetic construct
  source 1..120: mol_type = other DNA
gaaagatagcattaggagaaatacctaatgaagatgacgggtgcagcaaaccaccatggcacatgtatatatatgtaacaaacctgcacgttctgcacatgtatcccagaactcaaagta

SEQ ID NO: 46463 - DNA, 120 bp, synthetic construct; identical to SEQ ID NO: 32106
  source 1..120: mol_type = other DNA

SEQ ID NO: 46464 - DNA, 120 bp, synthetic construct
  source 1..120: mol_type = other DNA
tcccttccttataccttatacaaaaatcaattcaagatggattaaagatttaaacgttagacctaaaaccataaaaaccctagaagaaaacctaggcattaccattcaggacataggcgt

SEQ ID NO: 46465 - DNA, 120 bp, synthetic construct
  source 1..120: mol_type = other DNA
agaacaaaaaaccaaacaccgcatattctcactcataggtgggaactgaacaatgagatcacatggacacaggaaggggaatatcacactctggggactgtggtggggtcgtgggagggg

SEQ ID NO: 46466 - DNA, 120 bp, synthetic construct
  source 1..120: mol_type = other DNA
gagggaagggggggtacgtggatggggggtggggaaaggtgagaaaaaggaaagcattttaaaattgattcagctttcactaggtatcaaataagcacattcacttctaattacaccatt

SEQ ID NO: 46467 - DNA, 120 bp, synthetic construct; identical to SEQ ID NO: 32107
  source 1..120: mol_type = other DNA

SEQ ID NO: 46468 - DNA, 120 bp, synthetic construct; identical to SEQ ID NO: 32108
  source 1..120: mol_type = other DNA

SEQ ID NO: 46469 - DNA, 120 bp, synthetic construct; identical to SEQ ID NO: 32109
  source 1..120: mol_type = other DNA

SEQ ID NO: 46470 - DNA, 120 bp, synthetic construct
  source 1..120: mol_type = other DNA
ggctgggcaaagagttgtgcaccactgtatagatcatgttattctgttgctttcatttttaaaaatgaaaatgaggccagtagtttgagaacagcctggccaacatggcaaaaccctgtc

SEQ ID NO: 46471 - DNA, 120 bp, synthetic construct; identical to SEQ ID NO: 31418
  source 1..120: mol_type = other DNA

SEQ ID NO: 46472 - DNA, 120 bp, synthetic construct
  source 1..120: mol_type = other DNA
attgctagcacagcagtctgagatcaaactgcaaggcggcagcgaggctgggggaggggcgcccgccattgcccaggcttgcttaggtaaacagagcagccgggaagctcgaactgggtg

SEQ ID NO: 46473 - DNA, 120 bp, synthetic construct
  source 1..120: mol_type = other DNA
gatgcggagaatggaaccaagttggaaaacactctgcaggatattatccaggagaacttccccaatctagcaaggcaggccaacgttcagattcaggaaatacagagaacgccacaaaga

SEQ ID NO: 46474 - DNA, 120 bp, synthetic construct
  source 1..120: mol_type = other DNA
ccaagcagacctaatagacgtctacagaactctccaccccaaatcaacagaatatacatttttttcagcaccacaccacacctattccaaaattgaccacatagttggaagtaaagctct

SEQ ID NO: 46475 - DNA, 120 bp, synthetic construct
  source 1..120: mol_type = other DNA
accgaatccagcagcacatcaaaaagcttatccaccatgatcaagtgggcttcatccctgggatgcaaggctggttcaatatacacaaatcaataaatgtaatccagcatataaacagag

SEQ ID NO: 46476 - DNA, 120 bp, synthetic construct
  source 1..120: mol_type = other DNA
gacttcaaactataccacaaggctacagtaaccaaaacagcatggtactggtaccaaaacatagatatagatcaatggaacagaacagagccctcagaaataacgccgcttacctacaac

SEQ ID NO: 46477 - DNA, 120 bp, synthetic construct
  source 1..120: mol_type = other DNA
tgtggcgattcctcaggtatctagaactagaaataccatttgacccagccatcccattactgggtatatacccaaatgactataaatcatgctgctataaagacacatgcacacgtatgt

SEQ ID NO: 46478 - DNA, 120 bp, synthetic construct; identical to SEQ ID NO: 24533
  source 1..120: mol_type = other DNA

SEQ ID NO: 46479 - DNA, 120 bp, synthetic construct; identical to SEQ ID NO: 27204
  source 1..120: mol_type = other DNA

SEQ ID NO: 46480 - DNA, 120 bp, synthetic construct; identical to SEQ ID NO: 27205
  source 1..120: mol_type = other DNA

SEQ ID NO: 46481 - DNA, 120 bp, synthetic construct; identical to SEQ ID NO: 22260
  source 1..120: mol_type = other DNA

SEQ ID NO: 46482 - DNA, 120 bp, synthetic construct; identical to SEQ ID NO: 22261
  source 1..120: mol_type = other DNA

SEQ ID NO: 46483 - DNA, 120 bp, synthetic construct; identical to SEQ ID NO: 22262
  source 1..120: mol_type = other DNA

SEQ ID NO: 46484 - DNA, 120 bp, synthetic construct; identical to SEQ ID NO: 22263
  source 1..120: mol_type = other DNA

SEQ ID NO: 46485 - DNA, 120 bp, synthetic construct; identical to SEQ ID NO: 22264
  source 1..120: mol_type = other DNA

SEQ ID NO: 46486 - DNA, 120 bp, synthetic construct; identical to SEQ ID NO: 22265
  source 1..120: mol_type = other DNA

SEQ ID NO: 46487 - DNA, 120 bp, synthetic construct
  source 1..120: mol_type = other DNA
aaaggggtgatggacggcacctggaaaatcgggtcactactgcgcttttccgacgggcttaaaaaacggcgcaccacgagattatatctcgcacctggctcggagggtcctacgcccacg

SEQ ID NO: 46488 - DNA, 120 bp, synthetic construct
  source 1..120: mol_type = other DNA
tataactagaataaccaatacagagaagtgcttaaaggagctgatggagctgaaaaccaaggctcgagaactacgtgaagaatgaagaagcctcaggagccaatgcgatcaactggaaga

SEQ ID NO: 46489 - DNA, 120 bp, synthetic construct
  source 1..120: mol_type = other DNA
cacttgcagagacacacataggctcaaaataaaaggatggaggaagacctaccaagccaatggaaaacaaaaaaaggcaggggttgcaatcctggtcttggataaaacagactttaaacc

SEQ ID NO: 46490 - DNA, 120 bp, synthetic construct
  source 1..120: mol_type = other DNA
taaactagaaaatctagaagaaatggataaatttctcgacacatacactctcccaagactaaaccaggaagaagttgaatctctgaatagaccaataacaggagctgaaattgtggcaat

SEQ ID NO: 46491 - DNA, 120 bp, synthetic construct
  source 1..120: mol_type = other DNA
cattgtctcagcccaaaatctccttaggctgataagcaacttcagcaaagtctcaggatacaaaatcaatgtacaaaaatcacaagcattcttatacaccaacaacagacaaacagagag

SEQ ID NO: 46492 - DNA, 120 bp, synthetic construct
  source 1..120: mol_type = other DNA
catggcaacaaaagccaaaattgacaaatgggatctaattaaactcaagagcttctgcacagcaaaagaaactaccatcagagtgaacaggcaacctacaaaatgggagaaaatttttgc

SEQ ID NO: 46493 - DNA, 120 bp, synthetic construct
  source 1..120: mol_type = other DNA
gctgagacaatggggttttctagatatacaatactacaaggctacagtaaccaaaacagcatggtactggtaccaaaacagagatagagaccaatggaacagaacagagccctcagaaat

SEQ ID NO: 46494 - DNA, 120 bp, synthetic construct
  source 1..120: mol_type = other DNA
acccaaatgtccaacaacgatagactggattaagaaaatgtggcagatatacacctcggaatactatgcagccataaaaaatgatgagttcatgtcctttgtagggacatggatgaagct

SEQ ID NO: 46495 - DNA, 120 bp, synthetic construct
  source 1..120: mol_type = other DNA
tggaatactatgcagccataaaaaggatgagttcgtgtgctttgcagggatatggatgaagctggaaaccatcattctgagcaagctattgcaaggacagaaaaccaaacaccatatggt

SEQ ID NO: 46496 - DNA, 120 bp, synthetic construct
  source 1..120: mol_type = other DNA
gctgagatcaggctattgcactccagcccgggtgacagacagactcttgtctcagaaaaaaaaaaaaatctggaatcatcactttaataccaggtcttcggccttctctcactttcatac

SEQ ID NO: 46497 - DNA, 120 bp, synthetic construct
  source 1..120: mol_type = other DNA
ccttggcctcccaaagtgctgggattacaggtttggctcaccgcatccagtcttttctcacattcttgactgtgacaagcagattaactgataaaaacagaaacttctgcacaaaataat

SEQ ID NO: 46498 - DNA, 120 bp, synthetic construct; identical to SEQ ID NO: 6308
  source 1..120: mol_type = other DNA

SEQ ID NO: 46499 - DNA, 120 bp, synthetic construct
  source 1..120: mol_type = other DNA
aatcacattggtaggtggtaaagtgttggacagaatatctgacacaatggatgacagaatcaagggtcaaaatgacctttttttttgagacagagtctagctctgtcacctaggctggag

SEQ ID NO: 46500 - DNA, 120 bp, synthetic construct; identical to SEQ ID NO: 12698
  source 1..120: mol_type = other DNA

SEQ ID NO: 46501 - DNA, 120 bp, synthetic construct
  source 1..120: mol_type = other DNA
tgcccgccttggccttccaaagtgctgggattataggtgtgagccatcgcgcccggcctttgtctctatttttgaacattagaattacattatctctcatataatacatgctaatatacc

SEQ ID NO: 46502 - DNA, 120 bp, synthetic construct
  source 1..120: mol_type = other DNA
ccggtgtgtgatgtttcccttcctgtgtccatgaacacatggacacttattgttcaattcccacctgtgagtgagaacatatggtgtttggttttttgtccttgcaatagtttgctgaga

SEQ ID NO: 46503 - DNA, 120 bp, synthetic construct
  source 1..120: mol_type = other DNA
agtttttgtataaggtgtaaggaagggatccagtttcagctttctacatatggctagctagttttcccagcaccatttattaaatagggaatcctttccccattgcttgtttttctcagg

SEQ ID NO: 46504 - DNA, 120 bp, synthetic construct
  source 1..120: mol_type = other DNA
cttgacagaacttccattattatgttgaatagaagtggtgaaaacaggcatccttgctttattcctgatcttagagggaaagctttcaggtcatcaccattgaatatgaagtttgcttgc

SEQ ID NO: 46505 - DNA, 120 bp, synthetic construct
  source 1..120: mol_type = other DNA
acccggcaaccatctgatttctcagttttttccccacccttcctgcctttctattccacaaaaccgccattgtcatcatggcccatccccaatgagccgctgggcacacctcccagacgg

SEQ ID NO: 46506 - DNA, 120 bp, synthetic construct
  source 1..120: mol_type = other DNA
agagacgctcctcacttcctagatgggatgggggtggggaagaggcgctcctcgcttcctagatgggatggcggccgggcggagacgctcctcactttccagactgggcagccaggcaga

SEQ ID NO: 46507 - DNA, 120 bp, synthetic construct
  source 1..120: mol_type = other DNA
aggtctattcagagtttctatgtggcttagccttggtaggttctagttctgtgtttctaggaatttgtccatttcacctaggttatctaatttattgctgtacaattactcatagtacct

SEQ ID NO: 46508 - DNA, 120 bp, synthetic construct
  source 1..120: mol_type = other DNA
ctccagcctgggcaacagagcgagaccctgtctccaaataacaaaccacagtgacatctttcataggatgacccatctgcctcaaaccagcatcaaagcttattttatgaggaaaattta

SEQ ID NO: 46509 - DNA, 120 bp, synthetic construct; identical to SEQ ID NO: 30073
  source 1..120: mol_type = other DNA

SEQ ID NO: 46510 - DNA, 120 bp, synthetic construct; identical to SEQ ID NO: 27446
  source 1..120: mol_type = other DNA

SEQ ID NO: 46511 - DNA, 120 bp, synthetic construct
  source 1..120: mol_type = other DNA
gctggtttgggtcggagtgctggtttgggtcggagtgctggtttgggcgagtgctggttcgggttggagtgctcctttggtcaccatgtgctggatgtaatatttctgtactactgttac

SEQ ID NO: 46512 - DNA, 120 bp, synthetic construct; identical to SEQ ID NO: 27447
  source 1..120: mol_type = other DNA

SEQ ID NO: 46513 - DNA, 120 bp, synthetic construct; identical to SEQ ID NO: 22492
  source 1..120: mol_type = other DNA

SEQ ID NO: 46514 - DNA, 120 bp, synthetic construct; identical to SEQ ID NO: 22493
  source 1..120: mol_type = other DNA

SEQ ID NO: 46515 - DNA, 120 bp, synthetic construct
  source 1..120: mol_type = other DNA
gactattttgttcactaccacatgtgcagcacctagaccaatgcttggcacatactaggtgctcaataaattatttgttggatgggtggatggatggatggattagtggatggatatatg

SEQ ID NO: 46516 - DNA, 120 bp, synthetic construct; identical to SEQ ID NO: 22495
  source 1..120: mol_type = other DNA

SEQ ID NO: 46517 - DNA, 120 bp, synthetic construct; identical to SEQ ID NO: 22496
  source 1..120: mol_type = other DNA

SEQ ID NO: 46518 - DNA, 120 bp, synthetic construct; identical to SEQ ID NO: 22452
  source 1..120: mol_type = other DNA

SEQ ID NO: 46519 - DNA, 120 bp, synthetic construct
  source 1..120: mol_type = other DNA
tgggtcccctgctcccaaatcgtaggctcctaagaagggtaagaacccctgctctgtttctgccatttgtattagtaccaactttatgtttttctttaaattagcgtgaaatgaaaattg

SEQ ID NO: 46520 - DNA, 120 bp, synthetic construct; identical to SEQ ID NO: 22451
  source 1..120: mol_type = other DNA

SEQ ID NO: 46521 - DNA, 120 bp, synthetic construct; identical to SEQ ID NO: 23758
  source 1..120: mol_type = other DNA

SEQ ID NO: 46522 - DNA, 120 bp, synthetic construct; identical to SEQ ID NO: 23759
  source 1..120: mol_type = other DNA

SEQ ID NO: 46523 - DNA, 120 bp, synthetic construct
  source 1..120: mol_type = other DNA
taacattatgtgaatttctgagtgagggcatgtttctgatggagaacaccatgtctcactttcttttcttttttgctttttttgagacagagtctcactctgtcacccaggctggagtgc

SEQ ID NO: 46524 - DNA, 120 bp, synthetic construct
  source 1..120: mol_type = other DNA
cattatggtggctatctgaagtcacaggtttaacttaagcaactataaaaagcaagcaggatgacatttatgttcttctaaaaatataaggtagcaacctgtttcatagccttctatccc

SEQ ID NO: 46525 - DNA, 120 bp, synthetic construct
  source 1..120: mol_type = other DNA
aaaaataatctctttaagagatggtgctggggccaggtaaggtggctcaagcctgtaatcccagcactttgggaggctgaggtaggcggatcacgaggtcaagagatcaagaccattctg

SEQ ID NO: 46526 - DNA, 120 bp, synthetic construct
  source 1..120: mol_type = other DNA
gacgaggaggatgagatggaagaggacgacgatgactccgattatccggaggagatggaagacgacgacgacgacgccagttactgcacggaaagcagcttcaggagccatagtacctac

SEQ ID NO: 46527 - DNA, 120 bp, synthetic construct
  source 1..120: mol_type = other DNA
ataacctatatgatgtgactctcttattctgtctgcgctttgacaataagaagactgtgaaatgttaatgagcccagcacttaggtaacgtaagtcttgtctggttgctgaacaaccccc

SEQ ID NO: 46528 - DNA, 120 bp, synthetic construct
  source 1..120: mol_type = other DNA
atatctggtcccaggtcacaggcttaaaaacagtctcatctctgaagccagcctagagaagagatgttgagagtcataccttggtttagggcaatatgtaagatcatgagttcatataag

SEQ ID NO: 46529 - DNA, 120 bp, synthetic construct
  source 1..120: mol_type = other DNA
tcttcttcagtctggtctttgcagtgacggcattgtgacatattgctgagcccagcactcagatttattgacagctatttctcttgaaccatgcaaacaaacagaaatgttgacctattg

SEQ ID NO: 46530 - DNA, 120 bp, synthetic construct
  source 1..120: mol_type = other DNA
acatgtaggcctcagagtggtttgcaactctcacgcatgctgtataaagccttcaaatgtcacagagtgtcaatcaacagcccaggaaacacatgaaattgttatattcatgtagacagt

SEQ ID NO: 46531 - DNA, 120 bp, synthetic construct
  source 1..120: mol_type = other DNA
aatgagtgtcataagagaggccagaaatgaagtgagaatgggacttttaaatgcacacccagctgacatgattgtcattctcacacatgaacagggcgtaggaatgagatactaatctca

SEQ ID NO: 46532 - DNA, 120 bp, synthetic construct
  source 1..120: mol_type = other DNA
cagccttggtaatgcacataagaagcattgtgacaaatagctaggccaattgcccaagtgaagtgagtgtcctctctagcaaaaatcctgcccagagaagaggttttgatatttcactga

SEQ ID NO: 46533 - DNA, 120 bp, synthetic construct
  source 1..120: mol_type = other DNA
aagttgtcaccatcctacatatacaatgcccactgtggaatacggcacaaagttgcaattgtgaatttatatgtggatctgtctggaggtgggataataatgggtcttctcctttaaccc

SEQ ID NO: 46534 - DNA, 120 bp, synthetic construct
  source 1..120: mol_type = other DNA
gcacaataataactctcatacctagacctagccagtgggagatatttgactttcacaggcagtcttaaggccatgggtaaagtcctagatctcccacctgtaataatttacgggaaatta

SEQ ID NO: 46535 - DNA, 120 bp, synthetic construct
  source 1..120: mol_type = other DNA
gacacgtaactaggtactgcacccaggtgatgtgacttttttggagaatgaagtttctgccagtaggaagctttgtaacgtattacttggctcagcgactaggtgatatttcttttctct

SEQ ID NO: 46536 - DNA, 120 bp, synthetic construct
  source 1..120: mol_type = other DNA
tggcttaggatttaggtgatgtcgttttctgcctgtttaattaccacagatgagatggcgccgtatctgtagacacatctaaaatacatgataaggactctcatatgtgaacccagccaa

SEQ ID NO: 46537 - DNA, 120 bp, synthetic construct
  source 1..120: mol_type = other DNA
caattgaatagtgacatactgctaggccaggcacaatggtgatggaactcttttgccagggccatgctttcaaaaatgccttgtcatatatacctggtcctatcaccaaggtgatgtgac

SEQ ID NO: 46538 - DNA, 120 bp, synthetic construct
  source 1..120: mol_type = other DNA
cctgagtctaagcaaatacaccacaaagatggagttgtgactttcataaatgaatatggccgcaggtgggatggtgactcatttttggagccaactctcagtcataataatgatctcatc

SEQ ID NO: 46539 - DNA, 120 bp, synthetic construct
  source 1..120: mol_type = other DNA
gttcactgggtacactggactatatctctgagcccatgaactaagggaagtgactctctttttctgctgggtctttacaatggagagattgtgaaatattgctcaacctagcaatcaggt

SEQ ID NO: 46540 - DNA, 120 bp, synthetic construct
  source 1..120: mol_type = other DNA
caaaggccattgttaagaacctgagttttacaaatgaatgcagtgcaaagttggaattgtgactttcgtatgtggatctggcacaggtgggattgtgacttatttctagatccagctcac

SEQ ID NO: 46541 - DNA, 120 bp, synthetic construct
  source 1..120: mol_type = other DNA
gggcccagcctgtaggaatattttgactctcatagccagtctcacggccatgggtaaagccctgtgtttttcacttgtataaaagtcacgaaggattataatactcaggtatatcatata

SEQ ID NO: 46542 - DNA, 120 bp, synthetic construct
  source 1..120: mol_type = other DNA
acaaagaactgggtactgcattcaagtgatgtgattcttctttttgggttctgccaacaggaagcattgaacatatcacttggctcagtacctaggtgatgtttcttcactttcgccttg

SEQ ID NO: 46543 - DNA, 120 bp, synthetic construct
  source 1..120: mol_type = other DNA
ggcctccttcttaaccacagagtgaattgtaacatatacctatgcatggctcacagccatgataatgactctcatgtgtggactcagccaatagaggatattttgcatcttataactcag

SEQ ID NO: 46544 - DNA, 120 bp, synthetic construct
  source 1..120: mol_type = other DNA
acagtacattgtgacatatctctgggcctatcacctaaatgaagtgactctctccctgggtcctaaccagatgaagcattgtgtcataagcagagacccttcacctagtatgatgtattt

SEQ ID NO: 46545 - DNA, 120 bp, synthetic construct
  source 1..120: mol_type = other DNA
agctcacagccatgatgatcaaacttatactgggattcagccaatagaaaatatttgcctttcattgttaggcttggggcaatagataaggtcctgggctgcatatttgtaccaagctca

SEQ ID NO: 46546 - DNA, 120 bp, synthetic construct
  source 1..120: mol_type = other DNA
ttttacagagtctttggtttatacagaaagagtcaaagcagggttcaactcaggtgaaattgtgagtcttgtatgcacacccgcctgacagtaaggactgtcatcatctctcatggatga

SEQ ID NO: 46547 - DNA, 120 bp, synthetic construct
  source 1..120: mol_type = other DNA
ctactggggacattgggacatgtttctaagcccatgacctaagtgatatgactctcttcccttgcctcagcctttaaaatgctgaaattgtgatgtatttctgagaccaggatttaggtt

SEQ ID NO: 46548 - DNA, 120 bp, synthetic construct
  source 1..120: mol_type = other DNA
atttgtggattttgccacaggtgcaaccatcactcatttttagacccagctcacaggcataaaaataagcctcattcctgaactaagcataaatgagagatactgactctcatatctggg

SEQ ID NO: 46549 - DNA, 120 bp, synthetic construct
  source 1..120: mol_type = other DNA
gacactcccagcgtatcatagaaaatgtgagtagtacaatgagtgttataacagggaacagcaaaccaatgctattgtgattattggattcacacccagctgacgcgactatcattctct

SEQ ID NO: 46550 - DNA, 120 bp, synthetic construct
  source 1..120: mol_type = other DNA
aaaagaagacatttatgcagccaaaaaacacatgaaaaaatgctcaccatcactggccatcagagaaatgcaaatcaaaaccataacgacatatcatctcacaccagttagaatcacaat

SEQ ID NO: 46551 - DNA, 120 bp, synthetic construct; identical to SEQ ID NO: 30116
  source 1..120: mol_type = other DNA

SEQ ID NO: 46552 - DNA, 120 bp, synthetic construct
  source 1..120: mol_type = other DNA
tgagagattttgccacccccaggcctgccctaaaagaactcctgaaggaagcactaaacatggaaaggaacaagtggtaccagccactgcaaaatcatgccaaaatgtaaagaccatcga

SEQ ID NO: 46553 - DNA, 120 bp, synthetic construct
  source 1..120: mol_type = other DNA
agggacacttatagcactaaatgcccacaagagaaagcaggaaagatccaaaattgccaccctaacatcacaattaaaagaactagaaaagcaagagcaaacacattcaaaagctagcag

SEQ ID NO: 46554 - DNA, 120 bp, synthetic construct
  source 1..120: mol_type = other DNA
ggccgggcagaggcgcccctcacctcccggacgaggcagctggctgggcggggggctgacccccccacctccttcccggacggggcggctggcccaggagctggttttttgaaaggatca

SEQ ID NO: 46555 - DNA, 120 bp, synthetic construct
  source 1..120: mol_type = other DNA
caggagaaggaaataaagggtattcaattaggaaaagaggaagtcaaattgtccctgtttgcagacgacatgattgtatatctagaaaaccccactgtctcagcccaaaatctccttaag

SEQ ID NO: 46556 - DNA, 120 bp, synthetic construct
  source 1..120: mol_type = other DNA
caaaagccaaaatggacaaatgggatctaactaaactaaagagcttctgcacagcaaaagaaactaccatcagagtgaacaggcaacctacaaaatgggagaaaattttcgcaacctact

SEQ ID NO: 46557 - DNA, 120 bp, synthetic construct
  source 1..120: mol_type = other DNA
cctgcacattgtgcacatgtaccctaaaactgaaagtataataataaaaaaaacaaaacaacaacaaaaaagaaaataaacatacagaaaaatggaaagaatacccacacaccttccaca

SEQ ID NO: 46558 - DNA, 120 bp, synthetic construct; identical to SEQ ID NO: 30117
  source 1..120: mol_type = other DNA

SEQ ID NO: 46559 - DNA, 120 bp, synthetic construct
  source 1..120: mol_type = other DNA
aacaagagcgaaactccgtctcaaaaaaaaaaagaaaaaaagaaaaaaaaattagccaggggtggtggtgcacagctgtagtccagttacttgggaggctgaggtgggaggatcacctga

SEQ ID NO: 46560 - DNA, 120 bp, synthetic construct
  source 1..120: mol_type = other DNA
ccagcctgggtgacagggaaagaccctgtctccaaaacaacaacaacaacaacaaaaaaaacccgtccggtttttactttgtattctttaacacagttgttcaatttgttagggtgctga

SEQ ID NO: 46561 - DNA, 120 bp, synthetic construct; identical to SEQ ID NO: 28790
  source 1..120: mol_type = other DNA

SEQ ID NO: 46562 - DNA, 120 bp, synthetic construct; identical to SEQ ID NO: 28791
  source 1..120: mol_type = other DNA

SEQ ID NO: 46563 - DNA, 120 bp, synthetic construct
  source 1..120: mol_type = other DNA
gcacactgggggggctagggaagacctagtccttccaacagctataaacagtcctggataatgggtttatgaaaaacactttttcttccttcagcaagcaaaattatttatgaagctgta

SEQ ID NO: 46564 - DNA, 120 bp, synthetic construct
  source 1..120: mol_type = other DNA
ggttgtatgagttcttaggattaatgaggtagaagctaattttttttttttttttttgagacggagtcttgctctgtcgccgaggctagagtgtgatggcgcaatctcggctcattcaac

SEQ ID NO: 46565 - DNA, 120 bp, synthetic construct
  source 1..120: mol_type = other DNA
ctcctggtgacagtgaaagcccacagcctctggcaactgtattaacatgaacttcaatctgttaaaggaaagccaccaggaaaacagcactgtaatttaacgatgtggaaaaatgtatgt

SEQ ID NO: 46566 - DNA, 120 bp, synthetic construct
  source 1..120: mol_type = other DNA
accacaattgggtggacaccctggatccccaggaaggaaagagcattcaaagtgtcaaagtaggactactggaactgtcacttcatcattttttttgtttgtttttgagacagggtcttg

SEQ ID NO: 46567 - DNA, 120 bp, synthetic construct
  source 1..120: mol_type = other DNA
tcccacgttcaagcgatgctcacacctcaacttcccaaatagctggcattacaggcatgctccaccaggcctggctactttttgtttttttttttttagtacagatggggtttcaccatg

SEQ ID NO: 46568 - DNA, 120 bp, synthetic construct
  source 1..120: mol_type = other DNA
gtcaaaaaaatacatgttatcctggttagagactcagcagggaaaggctacatgctgagctggaatccatatactcaggggaataaaaatcagaagagactgtggagatgctgtgtacct

SEQ ID NO: 46569 - DNA, 120 bp, synthetic construct
  source 1..120: mol_type = other DNA
acctcaaaaaaaaagaaaaaaaaaaagaaatgttcaccgagaatcttcccctgctctgggcccgtccgtggtgggccagctgctgtgctttcttctatgtaagtaaattaagatggttta

SEQ ID NO: 46570 - DNA, 120 bp, synthetic construct
  source 1..120: mol_type = other DNA
gatggctagaaactcaaagttattggctgaagtttgatgtttatccagacttggtacctcaagtactcactatgaccccatcaacagaggggtctatgttgattttaggtgtacatgctc

SEQ ID NO: 46571 - DNA, 120 bp, synthetic construct
  source 1..120: mol_type = other DNA
aaaagaaaattgccaaggcctaaaattcacctggcttcaaagagactgcgatagagaaaaaaatcaggaagctaaaaatacacggatggccttttagaaagtggtcaccctcccccttga

SEQ ID NO: 46572 - DNA, 120 bp, synthetic construct
  source 1..120: mol_type = other DNA
tccagcctgggtgacatagcgagactctgtctcaaaaaaaaaaagaaatttgaagtttcaggccgggcgcggtggcctgtaatcctagcactttgggaggccgaggtgggtggatcactt

SEQ ID NO: 46573 - DNA, 120 bp, synthetic construct
  source 1..120: mol_type = other DNA
ttcttctcacctcagcctcctgagtagctgggaatacaagagtgtgctacgacacccaattaatttttaaatttttttgtagagacagggtcttactatgttgcccaggctagtcttgaa

SEQ ID NO: 46574 - DNA, 120 bp, synthetic construct
  source 1..120: mol_type = other DNA
gatctgaggtctggaatttgagaccagcctggccaacatgttgaaaccttgtttctattaaaaatacaaaaaactatctcggtgtggtggcacgtgcctgtaatcccagctatttgggag

SEQ ID NO: 46575 - DNA, 120 bp, synthetic construct
  source 1..120: mol_type = other DNA
tggagtgagactccgtcttgggaaaaaaaaaaagagagagagagagcaagagagagagagagaaagacaccccagtgaagtgaaaagagcaaagtctttagattctcatctgcttaaagt

SEQ ID NO: 46576 - DNA, 120 bp, synthetic construct
  source 1..120: mol_type = other DNA
gagcgagactccatctcgcatctcaaaaaattaaaaataaaattaaaaaaaaaaaaattaggccgggtgtggtggctcacgcctgtaatcccaggactttgggaggccgagacaggcgga

SEQ ID NO: 46577 - DNA, 120 bp, synthetic construct
  source 1..120: mol_type = other DNA
atcattctttttggtagaccaggtgaaatgactaggatctcagctgttgaaatcaattcactgaagcaaatcttttgtgtgcagaacttaacaatcggcttttcacctcactgggactta

SEQ ID NO: 46578 - DNA, 120 bp, synthetic construct
  source 1..120: mol_type = other DNA
ttccattcctgcttcctgcctttcccactcccccatattccctaccatgccttcttcatctaatttaatattactaacaagatctattgttcaagccaaaacccaagtgtcactccttca

SEQ ID NO: 46579 - DNA, 120 bp, synthetic construct
  source 1..120: mol_type = other DNA
ctggaattacaggtgtgagccactgtgcccgaaccttttatcattattatttcttgagacaggagtcttgctctgtcgttcaggctggagtgcagtgatgcgatcttggctcactgtaac

SEQ ID NO: 46580 - DNA, 120 bp, synthetic construct
  source 1..120: mol_type = other DNA
ccctcgacagaacctgaatcctaccagggacttagttagtcttatttactgttgcattcctagtgcccagaacacagtaggctcccaataaatagccactgaataaaagttaaaaccaac

SEQ ID NO: 46581 - DNA, 120 bp, synthetic construct
  source 1..120: mol_type = other DNA
ctcagcctcccaaagggctgagattataagtgtgagccactgcatctggactgcatattaatatgaagagcttttcttcaacaacagtgaacagttttctacaaaggtatatgcaagtgg

SEQ ID NO: 46582 - DNA, 120 bp, synthetic construct
  source 1..120: mol_type = other DNA
tttaatagactgggtcacccctaaagagatcatagaaaagacaggttacatacagcagaagaacgtgctcttttcacggagatagagaggtcagcgattcacaaaagagcacaggaagaa

SEQ ID NO: 46583 - DNA, 120 bp, synthetic construct
  source 1..120: mol_type = other DNA
gtaatgacaaattttcacccctagaatgtctacctggggagtcctaaccctctaatattcccctgagagggatgggagaatacagtgcagagcttttatataagtatttcagaaagcagt

SEQ ID NO: 46584 - DNA, 120 bp, synthetic construct
  source 1..120: mol_type = other DNA
tttgtaataacttgttctggcacctggctccaatgaacactaccctctgaccctgtggtataattttcatgagtaagtggaaacctaagatcttagaagttcaacggcaatgtgtccaag

SEQ ID NO: 46585 - DNA, 120 bp, synthetic construct
  source 1..120: mol_type = other DNA
tcacttgctccagagcctctgcttgtgttaatacggcccagtttcaaataagcatttttagcagccctgaaatgtgtactcagatttagtttatagtcaactaaaaacacccagaggtct

SEQ ID NO: 46586 - DNA, 120 bp, synthetic construct
  source 1..120: mol_type = other DNA
tcccaaagtgctgagattacaggtgtgagccaccgtgcctggcccacactccaaatcttaacccaaaacaaaaggaggtaaggaagcagcaaaactattatttgtctttcataaagtaat

SEQ ID NO: 46587 - DNA, 120 bp, synthetic construct
  source 1..120: mol_type = other DNA
ttatcctagctttaagtctctgtttttctcagaaagggtacatttaaaaaattctaagacacctgaagtctcggctgggcgcggtggctcacgcctgtaatctcagcactttgggaggct

SEQ ID NO: 46588 - DNA, 120 bp, synthetic construct
  source 1..120: mol_type = other DNA
attgtctgataaataactttgtttaccaagggccatcatttactagccatagccacagccactcacaccagtatttacgtgttgcacaatactgccatgaaggtcaggccatctttcttt

SEQ ID NO: 46589 - DNA, 120 bp, synthetic construct
  source 1..120: mol_type = other DNA
gataatctggtatgttatctcatcatagttttaaagaaatattcacgcaattcttcttcttattattgagacagagtttcgctcttgttgcccaggctggagtgcaatggtgcaatctcg

SEQ ID NO: 46590 - DNA, 120 bp, synthetic construct
  source 1..120: mol_type = other DNA
tgttaagtcttagtcattagggagatacatatggatacactcacaaattcttctggggtcaggccagacaccaccatggacattcttttgttgaccctttctgttgaagctgtcaattct

SEQ ID NO: 46591 - DNA, 120 bp, synthetic construct
  source 1..120: mol_type = other DNA
aggctgaggcaggggaatggcgtgtacccgggaggcagagcttgcagtgagctgagattgagccattgcattccagcctgggcaacagagcgagactccgtctcaaaaaaataaataaat

SEQ ID NO: 46592 - DNA, 120 bp, synthetic construct
  source 1..120: mol_type = other DNA
cccaaagtactgagattacaggcatgagcagtggctgtaatctgtccttattttatcttttaagaggtggcatctcagcttggtgaagtggctcacacctataatcccagcactttggga

SEQ ID NO: 46593 - DNA, 120 bp, synthetic construct
  source 1..120: mol_type = other DNA
tcccgggttcaagtgattctgctgcctcagcctccagagtagctaggattacgggcatgcactagcacacccagttaatttttttgtatttttagtagagacagggtttcaccatgttgg

SEQ ID NO: 46594 - DNA, 120 bp, synthetic construct
  source 1..120: mol_type = other DNA
gcactccagcctgagtgacagagcaagactctgtcaagaaagaaaggaaaggaaagaaaggaaagaaaaggaaaggaaagaaagaaaagaaaaggaagggaggaaggaaagaaaggaaga

SEQ ID NO: 46595 - DNA, 120 bp, synthetic construct
  source 1..120: mol_type = other DNA
aaggtgggaggattgcttgagcctgaaaaacggaggatgcagtgagccatgactgcaccactgcaatctaggtgacacagggcgaccctgtctcaaaaaataataataatagtaattatt

SEQ ID NO: 46596 - DNA, 120 bp, synthetic construct
  source 1..120: mol_type = other DNA
attttctccatccctactgcctccacattgaagactgtatgaaatggggatttcagcttctgcatgtcgggggtaaacaagacatgagtgtcagacatgaaagaaaaaacaggtgacatt

SEQ ID NO: 46597 - DNA, 120 bp, synthetic construct
  source 1..120: mol_type = other DNA
cgttatttttcaacgagatgggtgtcttgctgtgttgaccaggctggtttcaaacttttttttttttttgagacagagtcttgctctgttacccaggctggaatacagtggcatgatctc

SEQ ID NO: 46598 - DNA, 120 bp, synthetic construct
  source 1..120: mol_type = other DNA
agggtgataattgataaagggtaatgtgcaagttccaaggaaccatatcaaacggaattaaccattggaaagagttaaaaaagtggccaggtgatgtggctcacgcctacaatcccagca

SEQ ID NO: 46599 - DNA, 120 bp, synthetic construct
  source 1..120: mol_type = other DNA
tcattctatcaccagaacatttagcatataaattcctcttcttactacaatgggcctcatgcaatgaagcaaataagataacttgttagaagttaacaactcaatagaacctgaaaaaca

SEQ ID NO: 46600 - DNA, 120 bp, synthetic construct
  source 1..120: mol_type = other DNA
agaccctctctataaggtgaggctcaggtcggggaggatggctcaagatcaggagttcaagaccagcctagttaacagtgcgtccctgtctctacttaaaaaaaaaattaaagaaaagaa

SEQ ID NO: 46601 - DNA, 120 bp, synthetic construct
  source 1..120: mol_type = other DNA
ctcacttcttataggaagtcagctctgatcaactgcatctgcctggttactccaatggcatcctctcagaggtccatctggattttttttgataactgtaacattgctataaagcacttg

SEQ ID NO: 46602 - DNA, 120 bp, synthetic construct
  source 1..120: mol_type = other DNA
aaccacattcatgcaattaatgcccatgaaattatttccaaatgatgttagtgagggaaaaaatcctcaaattcccccaaatagacttgatgttattgtgatgtccttttgaagttggtt

SEQ ID NO: 46603 - DNA, 120 bp, synthetic construct
  source 1..120: mol_type = other DNA
cctagagatcattagcaaggacctgtgagagggaaggatccaacagaaagagccctgagaaagcctgtaaggatagttactgtttttaaaataatgagttctttttgcttatgggctcct

SEQ ID NO: 46604 - DNA, 120 bp, synthetic construct
  source 1..120: mol_type = other DNA
ttagaaggaacagcaatggttgccaaaaagtccagtgggggagtagggcaggaacacattgtttcactctccgtttcttcttctgatccttaaaaatgactttgccctttactaaaaaca

SEQ ID NO: 46605 - DNA, 120 bp, synthetic construct
  source 1..120: mol_type = other DNA
tacctttaccttacttgctgccactcctctttttccacttggaaaaattctcatctttcaaggcctagtttgaatgtctccttaagtccccaccaggaggagttgtgaaatatgagaagt

SEQ ID NO: 46606 - DNA, 120 bp, synthetic construct
  source 1..120: mol_type = other DNA
cctgcctgtgctactttagacgtaagacagcctgaaatctgacttcaacggttttgggtagatgcttagtaaaaacacgttgcaaaatgaatcctgaacaaatagacacatctctgggaa

SEQ ID NO: 46607 - DNA, 120 bp, synthetic construct
  source 1..120: mol_type = other DNA
taaatcatgatacactggaaagatagaatcccatatagtaattaaaaatgaagtcacttaagaattttaacgacccaggctgagtgcggtggctcacgcctgtaaccccagcactttggg

SEQ ID NO: 46608 - DNA, 120 bp, synthetic construct
  source 1..120: mol_type = other DNA
agtggcattattttcacactgttgtgttaccattgccactatctatctccagaactttttcatcatcccaaactgaaatctgcactcatcaaacagtaactccccatttccccctcccca

SEQ ID NO: 46609 - DNA, 120 bp, synthetic construct
  source 1..120: mol_type = other DNA
agtgagccaaaattgtgccactgcattccagcctgggtgacagagcaaaactccatctcaaaaaaaaaaattaggagaaagagcctggttctatgatgaagatgatattcatttttagac

SEQ ID NO: 46610 - DNA, 120 bp, synthetic construct
  source 1..120: mol_type = other DNA
aaggctagatggtctctattaggaagagaaccctatagtctccaacttggtaccaagaataaacaccaaaattgcgattgctggcaataatattggtgagagttctgtacctggctgtgt

SEQ ID NO: 46611 - DNA, 120 bp, synthetic construct
  source 1..120: mol_type = other DNA
ttcactctcacacccagatgctgcttcaccttaaataacaaaaacagaggttcagatgtaaaagcagactataaacgctgcaacttgctgtgtctttttcttctcattggcaggactgga

SEQ ID NO: 46612 - DNA, 120 bp, synthetic construct
  source 1..120: mol_type = other DNA
agccaaatgtgtatgggtgaaagggctaggactcctgctaagctctcctttctggacgcttttgctaaaaacagcagaactttccttaatgtcattttcagcaaaactagtatcttcctt

SEQ ID NO: 46613 - DNA, 120 bp, synthetic construct
  source 1..120: mol_type = other DNA
attcaaaagtgacttttggactttgtttctttaaggacccagagtgggcagagaatgttgcacattcctcttctgcatttcctggatttgaaaacggagcaaatgactggcgctttgaaa

SEQ ID NO: 46614 - DNA, 120 bp, synthetic construct
  source 1..120: mol_type = other DNA
atcacttgaccattctgctccgtttggttagttccctgatttatcatttcaggagtcttttgaactgccaaatctgctttcttgataaaatcctcaggatgaaggcctgatgtaggtctc

SEQ ID NO: 46615 - DNA, 120 bp, synthetic construct
  source 1..120: mol_type = other DNA
tcatacaccttggaggtggaaatcaaccaactggctatattagagaaactaacctcataaactaccaagtatactgaagatgtagctcatactctttcatttaattcctatttacctaga

SEQ ID NO: 46616 - DNA, 120 bp, synthetic construct
  source 1..120: mol_type = other DNA
agttggcaaactttgccattacccttttttgcagaatccaaactgatttcatccctggttccttgaggggtgatttgtaacaattcttgatctcccacactatagggaaaagacagagtc

SEQ ID NO: 46617 - DNA, 120 bp, synthetic construct
  source 1..120: mol_type = other DNA
aagggtatttcctccactataaaatgagagaactaaactagatgatctctaaggtttcttccaataccatgattctagtctggagaaacaccagcctacttgagggaggaaggtgggaag

SEQ ID NO: 46618 - DNA, 120 bp, synthetic construct
  source 1..120: mol_type = other DNA
tatcaactactataactatttttacaatgcctgttgtctaggaatttatgatcataaggggggaaaacagtaagtgttatgataaatagatggtggtgcctgggagctcaaaagatggct

SEQ ID NO: 46619 - DNA, 120 bp, synthetic construct
  source 1..120: mol_type = other DNA
ccaaaaatgtattattattttaaaaatagagacagggttcccctatgttggccaggctggtcttaaactcgtggactcaaccaatccttctgcctcggtcttccaaagcgttaggattac

SEQ ID NO: 46620 - DNA, 120 bp, synthetic construct; identical to SEQ ID NO: 18020
  source 1..120: mol_type = other DNA

SEQ ID NO: 46621 - DNA, 120 bp, synthetic construct
  source 1..120: mol_type = other DNA
taagttcaagagattctcctgcctcagcctcctgagtagctgggtctacaagcgtgtgcaactatgcctggctaatttgtgtgtgtgtgtgtatatatatatacatatatatgtgtgtgt

SEQ ID NO: 46622 - DNA, 120 bp, synthetic construct
  source 1..120: mol_type = other DNA
tagaacaattacttttttttcttttttgagacagagtctcactctacggcccaggctggagtgcagtggcgcgatcttggctcgctgcaacctccgcgtcctaggttcaagcaattcttg

SEQ ID NO: 46623 - DNA, 120 bp, synthetic construct
  source 1..120: mol_type = other DNA
tgtgagccaggatagtcttgatctccacacctcgtgatccacttgactcggcctcccaaagtgctgggattacaggcgtgaagcttttttttttttttttttgagacggagtctcgctct

SEQ ID NO: 46624 - DNA, 120 bp, synthetic construct
  source 1..120: mol_type = other DNA
ttgcagtgagctgacatcgtgtcactgcgctccagcctgggcgacagagcgagactctgtctcaaaaaaaaaaaaaaaaaagaaatctgtctttttggtgtatctgatggggatcttgct

SEQ ID NO: 46625 - DNA, 120 bp, synthetic construct
  source 1..120: mol_type = other DNA
ctctgtagaagtcttttggcacggtttctgtagcccatactttggatgatagaaacttcatcttttagatgttcaggagagttattttccttttttgcaaaattatagctgtttgcatct

SEQ ID NO: 46626 - DNA, 120 bp, synthetic construct
  source 1..120: mol_type = other DNA
cagacttctgtactcaagctatcctcccactatagcctcccaagtagctaggactatgggcatatgccaccatgtacatttatttatttattttgttggtagtgatggggtctcactatg

SEQ ID NO: 46627 - DNA, 120 bp, synthetic construct
  source 1..120: mol_type = other DNA
ctttttcctactgtggttgcttccaacctagcatcattaccaaattatataccttttggttatatcattcttacataaaggacactgtgaaggccctttcttctggttgagaagtttcag

SEQ ID NO: 46628 - DNA, 120 bp, synthetic construct
  source 1..120: mol_type = other DNA
ttttcttaattttttttttttttttttgagacagactcactctatcacccaggctggagggtagtgacacaatctcagctcactacaacctccacctcctaggctcaagcaattctcgtg

SEQ ID NO: 46629 - DNA, 120 bp, synthetic construct
  source 1..120: mol_type = other DNA
aaaaaaggcattgggaattgtgagaaaagacacttagagaatattttttactagccaggtaatttaacatttattaccctctcttggccgggtgcagtggctcatgtctgcaatcccagg

SEQ ID NO: 46630 - DNA, 120 bp, synthetic construct
  source 1..120: mol_type = other DNA
ggcatgagccatcaagcctggccttatcttcatttttatagagtagaggcttgtcccagatcacacagtaattaagcaatgaaggttatattggatccagaattggattgtagcaaagcc

SEQ ID NO: 46631 - DNA, 120 bp, synthetic construct
  source 1..120: mol_type = other DNA
tcagcctcccaaagtgctgggattacaggcgtgagccaccgcacccggcctcgaatctttctttatgctagaaaaagaatacatgtataaaggttgttaactaaacttaaaagaaaatga

SEQ ID NO: 46632 - DNA, 120 bp, synthetic construct
  source 1..120: mol_type = other DNA
agaaatattttctagattggtattattatctttttttataggcttcataaaagatttcagaactggctgggcaaggtggctcatgcctgtaatcctggcactgtgggaggccaaggcgag

SEQ ID NO: 46633 - DNA, 120 bp, synthetic construct
  source 1..120: mol_type = other DNA
agaagagatttcatgaaaaagtcgatctatcacatgggcattatactggactttttttttttttgagacggaatcttgctctgtcgcccaggctagagtacagtggcacgatctcaactc

SEQ ID NO: 46634 - DNA, 120 bp, synthetic construct
  source 1..120: mol_type = other DNA
ccacctgccttgggctccaaaagtgctaggattagaggcgtgagccaccgtgcccggcctcaacagctgtctttacctccaacttcactgggctcaaagcacctcagcatcttcctgtag

SEQ ID NO: 46635 - DNA, 120 bp, synthetic construct
  source 1..120: mol_type = other DNA
gttatgggcaggagctaccacactgggcccttgagtccctgtaataatagtatagtatgttcagcatttgttactcaagctgacaagaaaacatacagttcattccagaaagattctcat

SEQ ID NO: 46636 - DNA, 120 bp, synthetic construct
  source 1..120: mol_type = other DNA
actgatggacacaaaaaatacaaaacactgttcaaaatgatgttacatcctaatagataatatatgtcagtcgggtgtggtggctcacgcctgtaatcccagaactttgggaggccgagg

SEQ ID NO: 46637 - DNA, 120 bp, synthetic construct
  source 1..120: mol_type = other DNA
caactttgagctgttatgactgagtcaacataaggcctcaagttcgttcaatatttattaaatgtctgctgtgtcaggaactgagaatacagcagagaatacgatccttaccttcagtga

SEQ ID NO: 46638 - DNA, 120 bp, synthetic construct
  source 1..120: mol_type = other DNA
ccaccatgcccagccccaagtgtcttctgatctataggtgtctcttactttttctcccttgtcatttatttttaaaattaggtcatttgacctgtggagtttcccccattctggattttg

SEQ ID NO: 46639 - DNA, 120 bp, synthetic construct
  source 1..120: mol_type = other DNA
gcgccactgtactccaacctgggcgacagagctggactccatctcaaaataataataagcttaaaaataaaaacttcagaaaatacatcacccaagttcccatccctacctgtctatcca

SEQ ID NO: 46640 - DNA, 120 bp, synthetic construct
  source 1..120: mol_type = other DNA
tggcatcaagcaatcttcctgcttcggcttcccaaagtgctgggattacaggtgtgagctactatacccggcctttagctttcttctgaatgtgaacctttttttttttttttggagatg

SEQ ID NO: 46641 - DNA, 120 bp, synthetic construct
  source 1..120: mol_type = other DNA
gggctattgcaagaataaaattaaatgctacttgggaaaatgcttcacaacctgagatgacttgggaaaaatgcttcacaacctgagataacttgtaccaacattggtattattactggg

SEQ ID NO: 46642 - DNA, 120 bp, synthetic construct
  source 1..120: mol_type = other DNA
gcctgtaatcccagcactttgggaggccgaggtgggcggatcacgaggtcaggaagtggagaccatcctggctaacacggtgaaaccccgtctctactaaaaatacaaaaaattagccgg

SEQ ID NO: 46643 - DNA, 120 bp, synthetic construct
  source 1..120: mol_type = other DNA
gaccaatatggagaaaccctgtctctactaaaaatacaaaattagctggtgtgatggcacatgcctgcaatcccaggtactccggaggctgaggcagcagaattgcttgaacccgggagg

SEQ ID NO: 46644 - DNA, 120 bp, synthetic construct
  source 1..120: mol_type = other DNA
agtttacattctgtgggactagagataaaaaatggatacattacatagaatgtcagctagtaatcagtgttatggagaagcagcaggaatagaagataaagtgtgtgctgggggtgtggt

SEQ ID NO: 46645 - DNA, 120 bp, synthetic construct
  source 1..120: mol_type = other DNA
cctctcaacgacaccgatcatccatgtttttttttttttttttttttttttgagatggagtttagctctgtcgctggagttcagtggtgccatattggctcacagcaacatctgcctcct

SEQ ID NO: 46646 - DNA, 120 bp, synthetic construct
  source 1..120: mol_type = other DNA
cctttcccagtgacctgctctcatctctggatcctcctcaagcacatccctgccggcagcatctgttactactgacgctcctctacttccctcttgcgctttctcaatggcgcaaatgga

SEQ ID NO: 46647 - DNA, 120 bp, synthetic construct
  source 1..120: mol_type = other DNA
catctgaaatttcttggaaacacgatcactttaacggaatattgctgttttggggaagtgttttacagctgctgggcacgctgtatttgccttacttaagcccctggtaattgctgtatt

SEQ ID NO: 46648 - DNA, 120 bp, synthetic construct
  source 1..120: mol_type = other DNA
cttaaaaatgatctaggacccccggagtgcttttgtttatgtagcttaccatattagaaatttaaaactaagaatttaaggctgggcgtggtggctcacgcctgtaatcccagcactttg

SEQ ID NO: 46649 - DNA, 120 bp, synthetic construct
  source 1..120: mol_type = other DNA
agctcaacatgagtgcttttctaggcagtattgtacttcagtatgcagaagtgctttatgtatgcttcctattttgtcagagattattaaaagaagtgctaaagcattgagcttcgaaat

SEQ ID NO: 46650 - DNA, 120 bp, synthetic construct
  source 1..120: mol_type = other DNA
ctgggtcacaaatttgtctgtcactggttaaaactaaggtgggattttttttttaaatagatttaggaccaataagtcttaattggtttgaagaactttcttcagaagctccaccctata

SEQ ID NO: 46651 - DNA, 120 bp, synthetic construct
  source 1..120: mol_type = other DNA
aaagagcaaatagtattgggcaaagttaggcaattattcctttgagctaaaccttgaaggataggtgagagattaagaaatttgaagatgtggtagagtgataatgttctaggcagaggg

SEQ ID NO: 46652 - DNA, 120 bp, synthetic construct
  source 1..120: mol_type = other DNA
gcctaatgatcaaacagcagtctttggagataacgtttttcaaaatgtcatgtctgtgccattagaatcttctagactgctcattgaaaggacagattccaggccccactctgaatctct

SEQ ID NO: 46653 - DNA, 120 bp, synthetic construct
  source 1..120: mol_type = other DNA
ctatgaggaattgtgctgtttctgcctctcagcagtccttccttttgcattaaatcataggcatttctgttaccattcttcagcttattaatgagatcctcaggttatttgggaaatgtt

SEQ ID NO: 46654 - DNA, 120 bp, synthetic construct
  source 1..120: mol_type = other DNA
atcacgaacatgtcacagtgctgcagagattttgtttatggccagttttggggccagttcccaacagcaatatgtgtttaaggttcttccatgtcttttaatgatttcatgctgaataat

SEQ ID NO: 46655 - DNA, 120 bp, synthetic construct
  source 1..120: mol_type = other DNA
agcttatttttcccaaaagctaagttagagattataggaccaaccgaagcaactattttctaagagtaataataagtgactcaggtgccaaatttgtagttaccatcaactattggaacc

SEQ ID NO: 46656 - DNA, 120 bp, synthetic construct
  source 1..120: mol_type = other DNA
ggttttcagtaaatgtcttcccttactccttttttctctttccttctgcttttgtttaaagcgacaagatgttgctcttttcccaggctggaatacagtggcatgatcatagctcaagct

SEQ ID NO: 46657 - DNA, 120 bp, synthetic construct
  source 1..120: mol_type = other DNA
gaatatgatttactttacaaattttttttttgttttttttttttttgagatggagtctctgtcacccaggctgtagtgcagtggtgcgatctcagctcactgcaagctccgcctcccggg

SEQ ID NO: 46658 - DNA, 120 bp, synthetic construct
  source 1..120: mol_type = other DNA
agctgaggtggatcctgatatgtcttggtcaagttctttagctacaccacccacccttagttctactgtgctcataggtaataatagcaaatgtgtatttacaagaaagagcagatgagg

SEQ ID NO: 46659 - DNA, 120 bp, synthetic construct
  source 1..120: mol_type = other DNA
cactccagcctgggcaacagagcaagactctgtctcaaaaaaaaaaaaaaatcctgttataaaactacttaaaaatctctgagtagctgagatttggctaatcatgacttagtatttgaa

SEQ ID NO: 46660 - DNA, 120 bp, synthetic construct
  source 1..120: mol_type = other DNA
ttaatgaggtgtcctgtattttatccagaagtcctacacacagtaaagtttgttttgtaaaacttttttacttaacctttgtgtgcccatgtgtgtgtgcagtcataaagtgtgtgtgtg

SEQ ID NO: 46661 - DNA, 120 bp, synthetic construct
  source 1..120: mol_type = other DNA
actctgctgtctctctgttaaagttgcatatatacaatatataccgtagtcccctattcatggggtatacattccaatatcccccagtgaatgcttgaaaccttagatagtaccgaaccc

SEQ ID NO: 46662 - DNA, 120 bp, synthetic construct
  source 1..120: mol_type = other DNA
cccaagtgggatggagcaagatggtgcaagtttttttttctccatttccattttcctttcctaagatttccacatcctagtggtgcaagatttcatcacactactcaggatgacacacaa

SEQ ID NO: 46663 - DNA, 120 bp, synthetic construct
  source 1..120: mol_type = other DNA
gagctgtgtgtgtgccactgcactcccacctgggcaacagagtgagaccgtgtctcaatggaaaaaaagagaaactaatttgatttcgatgacagtatttaaatactgtgtaagacagta

SEQ ID NO: 46664 - DNA, 120 bp, synthetic construct
  source 1..120: mol_type = other DNA
caaatgatactgatccattagattcaaatgtagcaaatcagaagccctttgagagtggaagtgacaaaatctccaaggaagttgtaccgtctttggcctgtgaatggtctcaactaaccc

SEQ ID NO: 46665 - DNA, 120 bp, synthetic construct
  source 1..120: mol_type = other DNA
ttgtgtatatccatcactcttgagacagttttattttaagttccggggtacatgtgcaggatgtgcaggtttgttacataagtaaacgtatgccatgttggtttgctgcacctgtcaacc

SEQ ID NO: 46666 - DNA, 120 bp, synthetic construct
  source 1..120: mol_type = other DNA
tcacttgagcccaagtgactgaggctgcagtgaaccaaaattgtaccagtgcactccagcctgggccacaaaatgagaccttgtccctgaaaaaaaaaaaagaaaaaaaaaatttaaata

SEQ ID NO: 46667 - DNA, 120 bp, synthetic construct
  source 1..120: mol_type = other DNA
aagaactggttagtagaaaattcagagggtcaagaaatttaacagagcagttgaactcatttgcctttatcgttgagattagatcatctttcaggctgttagtatatggaccctgttttt

SEQ ID NO: 46668 - DNA, 120 bp, synthetic construct
  source 1..120: mol_type = other DNA
agaagctgattctctgtcatgcctgcaggaaggacagtgtgaaaatgatccaaaaagcaaaaaagtttcagatataaaagaagaggtcttggctgcagcatgtcacccagtacaacattc

SEQ ID NO: 46669 - DNA, 120 bp, synthetic construct
  source 1..120: mol_type = other DNA
aaactgagcaagcctcagtcaattaatactgtatctgcacatttacagagtagtgtagttgtttctgattgtaaaaatagtcatataacccctcagatgttattttccaagcaggatttt

SEQ ID NO: 46670 - DNA, 120 bp, synthetic construct
  source 1..120: mol_type = other DNA
agcacaacatatgtcttaaattatctggccagtttatgaaggagggaaacactcagattaaagaagatttgtcagatttaacttttttggaagttgcgaaagctcaagaagcatgtcatg

SEQ ID NO: 46671 - DNA, 120 bp, synthetic construct
  source 1..120: mol_type = other DNA
gcaaaaagtcctgcaacttgttacacaaatcagtccccttattcagtcattgaaaattcagccttagctttttacacaagttgtagtagaaaaacttctgtgagtcagacttcattactt

SEQ ID NO: 46672 - DNA, 120 bp, synthetic construct
  source 1..120: mol_type = other DNA
gtatagggaagcttcataagtcagtctcatctgcaaatacttgtgggatttttagcacagcaagtggaaaatctgtccaggtatcagatgcttcattacaaaacgcaagacaagtgtttt

SEQ ID NO: 46673 - DNA, 120 bp, synthetic construct
  source 1..120: mol_type = other DNA
gggggagtatggtttgatatacagatacacagattcagtattcgtatacagatttgatatcttggtatacagattcgatatctctgaatctgtataccaagaaatcatgttttaagggtc

SEQ ID NO: 46674 - DNA, 120 bp, synthetic construct
  source 1..120: mol_type = other DNA
cacaccactgctctccagcctgggcaacagagcgagactgtctcaaaaaaaaaaaaaaaaaagtgtatttaaagcacttagcagtgaacttgacatatagtaggcagagagcattcagta

SEQ ID NO: 46675 - DNA, 120 bp, synthetic construct
  source 1..120: mol_type = other DNA
atgggaccactattaaagtcttataggatgaccattgcatatgtggtctattgttgaccaaaatgtcattatgtggcaaatgactgcattaggttaaccttatacatacctatattaggt

SEQ ID NO: 46676 - DNA, 120 bp, synthetic construct
  source 1..120: mol_type = other DNA
aaatttattccctgtaataaagcatcaaaaagcaaagtacctgttatatattatctcagcatgacatggaaatgcctaccttgaattatggtttaatcttaccctcttagcctctgtaga

SEQ ID NO: 46677 - DNA, 120 bp, synthetic construct
  source 1..120: mol_type = other DNA
ctcaggtgatccacctgcctctcaaagtgctgggattacagacatgagccactgtgcctaatcaaggacctctttatactcttaaaaattactgaggacctaaaagagcatttgtttatg

SEQ ID NO: 46678 - DNA, 120 bp, synthetic construct
  source 1..120: mol_type = other DNA
attgtgatccatcacatgaggtcagatgtggaattttctactggcctcatgttggcactcaaaaagtttcaggtttgtgaccattttggattttcagattagggatactcaacccatata

SEQ ID NO: 46679 - DNA, 120 bp, synthetic construct
  source 1..120: mol_type = other DNA
gcacaataaaagatcgaagattgtttatgcatcatgtttctttagagccgattacctgtgtaccctttcggtaagacatgtttaaatttttctaaattctaatacagtatgagaaaagtc

SEQ ID NO: 46680 - DNA, 120 bp, synthetic construct
  source 1..120: mol_type = other DNA
tagaaaagaccaaaaaatactgacagttgaggatactcagatgaaacagtatagccagtcaccagaccaggaagttaactgttgacatgcacagagcttccaggaagctacttagtgctt

SEQ ID NO: 46681 - DNA, 120 bp, synthetic construct
  source 1..120: mol_type = other DNA
agaaataagaattcaacatagaagagaggcaaagggagctttcaggatgatattgaagggagatcccagagtagctgtgttgctaagtctagaaaggcagctagactactttggaactga

SEQ ID NO: 46682 - DNA, 120 bp, synthetic construct
  source 1..120: mol_type = other DNA
cgctctatgaaaagaaccagaggcttattctccagagaggatacagtagaaggtgaacacactaggcacagttgaaggcagaagcaactacttgaaagcaagaagaagttaatatatgca

SEQ ID NO: 46683 - DNA, 120 bp, synthetic construct
  source 1..120: mol_type = other DNA
ctattaatactacatatactttatactgacttagccgtaatgtaaatgttgaacattgatagtgagaggtgaagctggctgggcttctgggtcgtgtggggacttggagaacttttctgt

SEQ ID NO: 46684 - DNA, 120 bp, synthetic construct
  source 1..120: mol_type = other DNA
tcttggctcactgcaacctctgcctcctaggttcaagcgactctcctgcttcagcctcccaagtagccgggattacaggcgcgtgccaccatgcccggctaattttttgtatttttacta

SEQ ID NO: 46685 - DNA, 120 bp, synthetic construct
  source 1..120: mol_type = other DNA
gaagtataccaaagcaaaactgttgcaaggagattagtaaatacaggtcttaacctagcagaggaggtagagggtagagaatgattgagatagaaattcagtagatttggccagatagtg

SEQ ID NO: 46686 - DNA, 120 bp, synthetic construct
  source 1..120: mol_type = other DNA
caacttcaagttccaggtatccagggtttggtaaaaggaaatctggggttttcaacaagatatcaagtattaggaagaccacgtatgctgagaaagatgatcacttttggacatgttgag

SEQ ID NO: 46687 - DNA, 120 bp, synthetic construct
  source 1..120: mol_type = other DNA
gtaaggagtactatgatggaattagaggggacacactgagagggtccacacttgacagactctcttctattatgtgttatgtgaggtagattgtaaagtcaaaggctagccttgaaaaat

SEQ ID NO: 46688 - DNA, 120 bp, synthetic construct
  source 1..120: mol_type = other DNA
ctgttactggaatatattttctatcatgctactaattttctttttaaaatgtgataaaaatagggccgggcgtggtggctcatgcctgtaatcccagaactttgggagactaaggcgggc

SEQ ID NO: 46689 - DNA, 120 bp, synthetic construct
  source 1..120: mol_type = other DNA
cctcgaatctctctgaaagcagcagtaggaggccaagttccctctgcgtgttctcataaacaggtatgtgtttgtctacaatactgatggcttttatgacagagtgtaattttatttcat

SEQ ID NO: 46690 - DNA, 120 bp, synthetic construct
  source 1..120: mol_type = other DNA
acttaagagattttgtaaaacatcacatttttttatcctcacagtaccttcctatggcagatttagcaggaggcgtataaacggggtggaaaaggtacagcagactgtggaatgtatgga

SEQ ID NO: 46691 - DNA, 120 bp, synthetic construct
  source 1..120: mol_type = other DNA
agtgagccaagattgagccactgcactccaggctgggcgataagagtgagactccatctcaaaaaaaaaaaaaagaaaaaagttaaatttgagggccagacatggtggctcatgcctgta

SEQ ID NO: 46692 - DNA, 120 bp, synthetic construct
  source 1..120: mol_type = other DNA
ttttgttatcagagatatattacattatgccagtggcaaaagatgggatttatttcctcagcatccttatctttaaatttctgtacatctttccaaaatttatagctttggaaaagtgat

SEQ ID NO: 46693 - DNA, 120 bp, synthetic construct
  source 1..120: mol_type = other DNA
tgtgagccactgtgtccagcctgatctgacttatttttgaaaaaataattctggctgtttgttgaggagaggggcaaagatggacacacagagaccacttaagctattgcagaaatacat

SEQ ID NO: 46694 - DNA, 120 bp, synthetic construct
  source 1..120: mol_type = other DNA
cttggaagagggcaaagtgtagggatacagatgctgtgagtggatagatatgagggtgggagcttatggaagttctcttttgattacttctgttgtcttagtgctaagagtatgaatgag

SEQ ID NO: 46695 - DNA, 120 bp, synthetic construct
  source 1..120: mol_type = other DNA
attacattacgtaatcatatacggcagtatggttaaggtttctgtgtagtctgtgacttccatgtcaaaatgttgcacaagccagttgtcagtgacagttgccatcccacactgctgttc

SEQ ID NO: 46696 - DNA, 120 bp, synthetic construct
  source 1..120: mol_type = other DNA
gcaaaataaatttgcaccatttgattttggtatctgtagcttgctgccctcttgttctcatagctttgctttgatcagatccctattccactctggattagagaattacattttagtact

SEQ ID NO: 46697 - DNA, 120 bp, synthetic construct
  source 1..120: mol_type = other DNA
ctgcccaatatgttaaaatttctccattggttccatttctgtttcttggagaacccctggacctcttcatatgcttactccattctgaagtgctcattttctatgtgtgccatacagctc

SEQ ID NO: 46698 - DNA, 120 bp, synthetic construct
  source 1..120: mol_type = other DNA
gaaacacatagtccttcattgagttctggaaaattttctttaagtggttcttttataatttccctccatttttttctctagttttttctggaactcctgatgtttggacactaggcctcc

SEQ ID NO: 46699 - DNA, 120 bp, synthetic construct
  source 1..120: mol_type = other DNA
agccaaggtcgcaccactgcactccagcctgggcgacaaagtgagaccctgtctcaaagaaaaaaaaaaatatgcttattggtttcatctatcaaaaagaacaaaaaaaaaaaaaaaagg

SEQ ID NO: 46700 - DNA, 120 bp, synthetic construct
  source 1..120: mol_type = other DNA
atcgtgctactgcacttcagcctgggtgacagagccagagccagacccagcctcagaaaaacaacaaaaactaggtaaaaggagaaaaaaatcaagcatttatctttcttctcttatatg

SEQ ID NO: 46701 - DNA, 120 bp, synthetic construct
  source 1..120: mol_type = other DNA
aactaggagaccctcaaatatcagtgactgttctgagagctgagcagagtaaggaaattaatagggagactcattgtcagtgtaagaattttatttcagtttgttgtttgttgtttgttt

SEQ ID NO: 46702 - DNA, 120 bp, synthetic construct
  source 1..120: mol_type = other DNA
gcctcccaaagtgttgggattacaggcatgagccaccttgcctggccaaagattaattgttaatatacataaagcgcttaacaccatgccaggtaccttagtaagtgttcgatgaatatt

SEQ ID NO: 46703 - DNA, 120 bp, synthetic construct
  source 1..120: mol_type = other DNA
aggtgatccactaatctcagcctcccaaagttctgggattacagatgtgagccactgtgcctggcctgatacaattaacttgaatgttatatatgtgacttttttggtgtgtgtaacaca

SEQ ID NO: 46704 - DNA, 120 bp, synthetic construct
  source 1..120: mol_type = other DNA
caggcatacctcagagatactgtggatttgattctagaccaccgcaataaagcaaatattacagtagagcaaatcacacgaatattttggtttcccagagcatacaaaagtaatgtttac

SEQ ID NO: 46705 - DNA, 120 bp, synthetic construct
  source 1..120: mol_type = other DNA
caagacaaatctcttccacctatgagcctgtaaaatcaaaagcaaattctttacttccaagatacaatgggggtacaggcattgggtaaatgttcccatctcaagtgggagaaattggcc

SEQ ID NO: 46706 - DNA, 120 bp, synthetic construct
  source 1..120: mol_type = other DNA
tcacagtttccctcccggtttccctcctgtactgcactaacagaggttctctatgagggctctgcccccacagcagacttgtgtgtggacatcctggcacttccatacatcctctgaaat

SEQ ID NO: 46707 - DNA, 120 bp, synthetic construct
  source 1..120: mol_type = other DNA
cttccaatctctgcctgttgtctagttccaaagtcacttccacattttcaggttatcggtatagcagtcccccactcctggtaacaattatctgtattagttcatcctcatactgctata

SEQ ID NO: 46708 - DNA, 120 bp, synthetic construct
  source 1..120: mol_type = other DNA
attttgtatttttagtagagacggggtttcaccatgttggtcaggctggtcacgaactccggacctcaggtgatccacccgcctcggcctcccaaagtgctgggattacaggtgtaagcc

SEQ ID NO: 46709 - DNA, 120 bp, synthetic construct
  source 1..120: mol_type = other DNA
ccagcttaccttgaggtgagagagtaagaggacatataatgaggcttgatgattattcaaggtgagaagctgttttagactctctggccatcacaggaaggagtatgttgaaatgctgca

SEQ ID NO: 46710 - DNA, 120 bp, synthetic construct
  source 1..120: mol_type = other DNA
tccagcctaggcaacaagagcaaaactccgtctcaaaaaaaaaaaaaaaaagctattaaatgggcgtaaaatgttgttttaggatcaaataaataatctatataaaagttccatataaat

SEQ ID NO: 46711 - DNA, 120 bp, synthetic construct
  source 1..120: mol_type = other DNA
atacagagattggatagtctcccttttcagtatagataatctcccttcccggtagagattaggatattaagatgtataatatcctaaagtgtagcagcagtctggtatgttacatgtcta

SEQ ID NO: 46712 - DNA, 120 bp, synthetic construct
  source 1..120: mol_type = other DNA
tttaaatgataatcacttcttccattgcatctttctcatctttctccaaacagttatactgagtatttggcgtccatcatcagatttatattctctgttaacagaaggaaagagatacag

SEQ ID NO: 46713 - DNA, 120 bp, synthetic construct
  source 1..120: mol_type = other DNA
cccaaagtgctgggattacaggcgtgagccaccgtgcctggccagagtcaagcttttattttattgaatatatggtcttactaagttcaatagcatgaatctgttgtgaagaattcaaga

SEQ ID NO: 46714 - DNA, 120 bp, synthetic construct
  source 1..120: mol_type = other DNA
tagggggcacaagagtacaaacaagccatttggaggctctttcaagcacttaggcaaaagatgatgaaccaaacaaaagcaatggaagtggtgagaagcagtcagattcttgttgtattt

SEQ ID NO: 46715 - DNA, 120 bp, synthetic construct
  source 1..120: mol_type = other DNA
ctgatgagatactgtatgctgatgagaaagatccaataaagaaggtaaaatgcaagatggaagcaaaacaggaacagctgtggggcactgttctcagatactgtgtggtatggtatctag

SEQ ID NO: 46716 - DNA, 120 bp, synthetic construct
  source 1..120: mol_type = other DNA
aaaagtcttgggtatgtccattgcagtgagttaccagtggaaaatagaggacatgatcatttaggaagaaaacaaggaacttgggagcaacagagtattggaaggattgcctgtgaggat

SEQ ID NO: 46717 - DNA, 120 bp, synthetic construct
  source 1..120: mol_type = other DNA
agactaaatacagtgtgggaatacacaatacacaacctactagcctatgtgaaacacccgaaaggccagaatgaggaagtgctggagaacttgaaagaagctgaagacttaatccagaaa

SEQ ID NO: 46718 - DNA, 120 bp, synthetic construct
  source 1..120: mol_type = other DNA
tggttttaaggaaacttcagagaaatgcgttagacctggaaagcttaagcctccttaggtttctgtacaaattgaaaggaaacatgaatgaagctctagagtactgtgagtgggccctga

SEQ ID NO: 46719 - DNA, 120 bp, synthetic construct
  source 1..120: mol_type = other DNA
aacaaagaaccatagactgggggcttaaacaacagaaatttgttttctcacagttctggaggctggaaatccaagatcaaagtgttggcagggttaattccttctgaggctgtgagaatc

SEQ ID NO: 46720 - DNA, 120 bp, synthetic construct
  source 1..120: mol_type = other DNA
taaaaggaaagggccccctatcctgtaatcacgtgaattgcttcaccttttcaatcacttagaagattcaccctccttaccatgcccccttgtcttgtatgcaataaatatcagcaagcc

SEQ ID NO: 46721 - DNA, 120 bp, synthetic construct
  source 1..120: mol_type = other DNA
tgtttcgatccttttgtttttaatctacctttgtcgaatttaaagtgagtttcctataaggaacaaatagtcgggttataaatttttatccactctttcaatctctgtccattgattgga

SEQ ID NO: 46722 - DNA, 120 bp, synthetic construct
  source 1..120: mol_type = other DNA
tcaactaacaacgggtttattgtgacataaccccatcataagttgtcctcgactgtgtttccagataaggctgcattcacaggtactgggaattagtcacaatgtatcctgtaacatcct

SEQ ID NO: 46723 - DNA, 120 bp, synthetic construct
  source 1..120: mol_type = other DNA
ttttgaagcattttgttggtttggctgtttcagcacttgtcacatggtccatgatcctacctgtacacttctgaataagccacctactagcctcagtaatacaatgatctcttcaaggac

SEQ ID NO: 46724 - DNA, 120 bp, synthetic construct
  source 1..120: mol_type = other DNA
cgcaccatggcatccactccaggtggaatcggtgacagtggttttataaattgctaagtcctttattgtttcagtgacattttctaaaaggaattaaaagctttgaagaattctatgcaa

SEQ ID NO: 46725 - DNA, 120 bp, synthetic construct
  source 1..120: mol_type = other DNA
gaggcgggggctgcggtgacccaagattgcaccactgcaccctagcctaggccacagagtgagactgcgtctcaaaaaaaaaaaaaaaaaattataactctttattttgaactaatttca

SEQ ID NO: 46726 - DNA, 120 bp, synthetic construct
  source 1..120: mol_type = other DNA
gacatcacaagatgttccaagttcatcttatatgttccctgccctagtcttggaatcagccatttctcttggcttcttttttttagtagaaaatggtgtttagatccaagatctggttgc

SEQ ID NO: 46727 - DNA, 120 bp, synthetic construct
  source 1..120: mol_type = other DNA
tttccattctaggacttgcccctttcgtctatttgtcagacgaatgttacaatttactggcaataaagttttggatagaccttaatgaggacattattaagcctcatatgttaattgctg

SEQ ID NO: 46728 - DNA, 120 bp, synthetic construct
  source 1..120: mol_type = other DNA
tgccttaggtcaaatgccaagttagtaaaactaggattcatacttaggccatcgaatgcagaacccagactaggaactgctatgcaatgctgcttcccagtaaaatttgagatttcatga

SEQ ID NO: 46729 - DNA, 120 bp, synthetic construct
  source 1..120: mol_type = other DNA
ttcccagctattaagtagtaaatagagctaggacttgagccccaatcttccagcttcaatccagatcatatgacagcttgctgattaaactagatgacagagaagatctctttccttcag

SEQ ID NO: 46730 - DNA, 120 bp, synthetic construct
  source 1..120: mol_type = other DNA
cttgctaagggtatctatattaactcatttaatcctcataacaaccctatgagataaaacctaagtcctcacttaacattgtcaataggtttttggaaactgattttaagggaagtgatg

SEQ ID NO: 46731 - DNA, 120 bp, synthetic construct
  source 1..120: mol_type = other DNA
ccatttgtacatttgtttctccggctgcacagaaggcatttcagccaccaaggagttgtggcaccaaatacgaaacacccataaagaaaaaagaactgaattctcctcagatgactccat

SEQ ID NO: 46732 - DNA, 120 bp, synthetic construct
  source 1..120: mol_type = other DNA
tggttctgctatagttccatcctgttcaaaagtcaggatgaatatgaagagtggtgtttccttttgagcaattcttcatccttaagtcagcatgattataagaaaaatagaaccctcagt

SEQ ID NO: 46733 - DNA, 120 bp, synthetic construct; identical to SEQ ID NO: 23978
  source 1..120: mol_type = other DNA

SEQ ID NO: 46734 - DNA, 120 bp, synthetic construct; identical to SEQ ID NO: 23979
  source 1..120: mol_type = other DNA

SEQ ID NO: 46735 - DNA, 120 bp, synthetic construct; identical to SEQ ID NO: 23980
  source 1..120: mol_type = other DNA

SEQ ID NO: 46736 - DNA, 120 bp, synthetic construct; identical to SEQ ID NO: 23981
  source 1..120: mol_type = other DNA

SEQ ID NO: 46737 - DNA, 120 bp, synthetic construct; identical to SEQ ID NO: 23982
  source 1..120: mol_type = other DNA

SEQ ID NO: 46738 - DNA, 120 bp, synthetic construct
  source 1..120: mol_type = other DNA
caaaaaccaaaaccaaaaaaaccaactcaacagatctgacattaaaaaacaaaaaagccaacaaatgggtggggggggggggggtggaggggaaagaaaagaaattgtagctttctggtt

SEQ ID NO: 46739 - DNA, 120 bp, synthetic construct
  source 1..120: mol_type = other DNA
gcaccttcacggaagggagtagcggcgtagggggctgcaccttctgcagctgctgcaggtacagctgcatctgcatggaggtgaggggtggggcaggtggctcttcatcctccagcagca

SEQ ID NO: 46740 - DNA, 120 bp, synthetic construct
  source 1..120: mol_type = other DNA
aacaaggcaaaaccccaactatattaaaatacaaacattaactgggcatggtggcgggcatctgtaatctcagctactcaggaggctgtggcacaagaactgcttgaacccgggaaacag

SEQ ID NO: 46741 - DNA, 120 bp, synthetic construct; identical to SEQ ID NO: 19600
  source 1..120: mol_type = other DNA

SEQ ID NO: 46742 - DNA, 120 bp, synthetic construct; identical to SEQ ID NO: 19601
  source 1..120: mol_type = other DNA

SEQ ID NO: 46743 - DNA, 120 bp, synthetic construct
  source 1..120: mol_type = other DNA
aaaatcttttacagacaaacaaatgctgacagattttgtcatcaccaggcctgtcttacaagagcttctgaaggaagcactaaacgtggaaaggaataaccagtaccagccactgcaaaa

SEQ ID NO: 46744 - DNA, 120 bp, synthetic construct
  source 1..120: mol_type = other DNA
aagcactcctcagtaaatgtaaaagaacagaaattataacaaactgtctctcagaccacagtgcaatcaaactagaactcaggattaagaaactcactcaaaaccgctcaactacatgga

SEQ ID NO: 46745 - DNA, 120 bp, synthetic construct
  source 1..120: mol_type = other DNA
tggcacaagacagggatgacctctctcaccactcctatttaacatagtgttggaagttctggccagggcaatcaggcaggagaaagaaataaagggtattcaattaggaaaagaggaagt

SEQ ID NO: 46746 - DNA, 120 bp, synthetic construct
  source 1..120: mol_type = other DNA
cagtaaccaaaacagcatggtactggtaccaaaacagagacagagaacaatggaacagaacagagcactcagaaataataacacacatctacaaccatctgatctttgacaaacctgaca

SEQ ID NO: 46747 - DNA, 120 bp, synthetic construct; identical to SEQ ID NO: 26211
  source 1..120: mol_type = other DNA

SEQ ID NO: 46748 - DNA, 120 bp, synthetic construct; identical to SEQ ID NO: 26212
  source 1..120: mol_type = other DNA

SEQ ID NO: 46749 - DNA, 120 bp, synthetic construct; identical to SEQ ID NO: 26213
  source 1..120: mol_type = other DNA

SEQ ID NO: 46750 - DNA, 120 bp, synthetic construct; identical to SEQ ID NO: 26214
  source 1..120: mol_type = other DNA

SEQ ID NO: 46751 - DNA, 120 bp, synthetic construct; identical to SEQ ID NO: 7797
  source 1..120: mol_type = other DNA

SEQ ID NO: 46752 - DNA, 120 bp, synthetic construct; identical to SEQ ID NO: 14693
  source 1..120: mol_type = other DNA

SEQ ID NO: 46753 - DNA, 120 bp, synthetic construct
  source 1..120: mol_type = other DNA
gacagccccgtggcaccctcaggagcaacaacctagcatctcaggagagagaggccacaccactgtccgcgtagtcgcccagctgggggcgggggacagcctggcagccctgtggcaccc

SEQ ID NO: 46754 - DNA, 120 bp, synthetic construct
  source 1..120: mol_type = other DNA
cccgtggcaccctcaggagcaacaacctagcatctcaggagagagaggccacaccactgtccgcgtagtcgcccagctgggggcgggggacagcctggcagccccgtggcaccctcagga

SEQ ID NO: 46755 - DNA, 120 bp, synthetic construct
  source 1..120: mol_type = other DNA
caacctagcatctcaggagagagaggccacaccactgtccgcgtagtcgcccagctgggggcgggggacagcctgacagccctgtggcaccctcaggagcaacaacctagcatctcagga

SEQ ID NO: 46756 - DNA, 120 bp, synthetic construct
  source 1..120: mol_type = other DNA
gtagtcgcccagctgggggcgggggacagcctgacagccctgtggcaccctcaggagcaacaacctagcatctcaggagagagaggccacaccactgtccgcgtagtcgcccagctgggg

SEQ ID NO: 46757 - DNA, 120 bp, synthetic construct; identical to SEQ ID NO: 46754
  source 1..120: mol_type = other DNA

SEQ ID NO: 46758 - DNA, 120 bp, synthetic construct
  source 1..120: mol_type = other DNA
caccactatccgcgtagtcgcccagctgggggcgggggacagcctggcagccctgtggcaccctcaggagcaacaacctagcatctcaggagagagaggccacaccactgtccgcgtcag

SEQ ID NO: 46759 - DNA, 120 bp, synthetic construct
  source 1..120: mol_type = other DNA
gcgggggacagcctggcagccctgtggcaccctcaggagcaacaacctagcatctcaggagagagaggccacaccactgtccgcgtagtcgcccagctgggggcgggggacagcctgaca

SEQ ID NO: 46760 - DNA, 120 bp, synthetic construct
  source 1..120: mol_type = other DNA
acagcctggcagccctgtggcaccctcaggagcaacaacctagcatctcaggagagagaggccacaccactgtccgcgtagtcgcccagctgggggcgggggacagcctggcagccctgt

SEQ ID NO: 46761 - DNA, 120 bp, synthetic construct
  source 1..120: mol_type = other DNA
cctgtggcaccctcaggagcaacaacctagcatctcaggagagagaggccacaccactgtccgcgtagtcgcccagctgggggcgggggacagcctggcagccccgtggcaccctcagga

SEQ ID NO: 46762 - DNA, 120 bp, synthetic construct; identical to SEQ ID NO: 46753
  source 1..120: mol_type = other DNA

SEQ ID NO: 46763 - DNA, 120 bp, synthetic construct; identical to SEQ ID NO: 46760
  source 1..120: mol_type = other DNA

SEQ ID NO: 46764 - DNA, 120 bp, synthetic construct; identical to SEQ ID NO: 14694
  source 1..120: mol_type = other DNA

SEQ ID NO: 46765 - DNA, 120 bp, synthetic construct; identical to SEQ ID NO: 14696
  source 1..120: mol_type = other DNA

SEQ ID NO: 46766 - DNA, 120 bp, synthetic construct; identical to SEQ ID NO: 14697
  source 1..120: mol_type = other DNA

SEQ ID NO: 46767 - DNA, 120 bp, synthetic construct; identical to SEQ ID NO: 14698
  source 1..120: mol_type = other DNA

SEQ ID NO: 46768 - DNA, 120 bp, synthetic construct; identical to SEQ ID NO: 14695
  source 1..120: mol_type = other DNA

SEQ ID NO: 46769 - DNA, 120 bp, synthetic construct; identical to SEQ ID NO: 14699
  source 1..120: mol_type = other DNA

SEQ ID NO: 46770 - DNA, 120 bp, synthetic construct; identical to SEQ ID NO: 14700
  source 1..120: mol_type = other DNA

SEQ ID NO: 46771 - DNA, 120 bp, synthetic construct; identical to SEQ ID NO: 13341
  source 1..120: mol_type = other DNA

SEQ ID NO: 46772 - DNA, 120 bp, synthetic construct; identical to SEQ ID NO: 13342
  source 1..120: mol_type = other DNA

SEQ ID NO: 46773 - DNA, 120 bp, synthetic construct
  source 1..120: mol_type = other DNA
actaggtaatgcataaataaaagaggtttaattgactcacagttctgcgtggctcaggaaacttataatcatggcagaaggcaaaggagaagcaagcaccttcttcacaaggcagcagga

SEQ ID NO: 46774 - DNA, 120 bp, synthetic construct
  source 1..120: mol_type = other DNA
gaaaggggtgactgacggcacctggaaaatcgggtcactcccccaccgaatactgtgcttttccggcgggcttaaaaaacggcgcaccgcgagattatattaccgcacctggctcggagg

SEQ ID NO: 46775 - DNA, 120 bp, synthetic construct
  source 1..120: mol_type = other DNA
actttaaaaaaaatttagaagaatgcataactagaataaccaatacagagaagtgcttaaaggagctgatggagctgaaaaccaaggctcgagaactacgtgtagaatgcagaagcctca

SEQ ID NO: 46776 - DNA, 120 bp, synthetic construct
  source 1..120: mol_type = other DNA
ggccattacataatggtaaagggatcaattcaacaagaagagctaactatcctaaatatatatgcacccaatacaggagcacccagattcataaagcaagtcccgagtgacttacaaaga

SEQ ID NO: 46777 - DNA, 120 bp, synthetic construct
  source 1..120: mol_type = other DNA
tcctccacacatacgctctcccaagactaaaccaggaagaagttgaatctctgaatagaccaataacaggatctgaaattgtggcaataatcaatagcttaccaaccaaaaagagtccag

SEQ ID NO: 46778 - DNA, 120 bp, synthetic construct
  source 1..120: mol_type = other DNA
caaaccactgctcaatgaaataaaagaggatacaaacaaatggaagaacattccatgctcatgggtaggaagaatcaatatcatgaaaatggccatactggccatactgcccaaggtaat

SEQ ID NO: 46779 - DNA, 120 bp, synthetic construct
  source 1..120: mol_type = other DNA
catttatgcagccaaaaaacacatgaaaaaatgctcatcatcactggccatcagagaaatgcaaatcaaaaccacaatgagataccatctcacaccagttagaatggcaaacattaaaaa

SEQ ID NO: 46780 - DNA, 120 bp, synthetic construct
  source 1..120: mol_type = other DNA
actcagcaaactaacaaacataagaacagaaaacaaaacactgtatgttctcactagtaagtgggagttgaacaatgagaacacatggacacagggaggggaacactacacactggggtt

SEQ ID NO: 46781 - DNA, 120 bp, synthetic construct; identical to SEQ ID NO: 9059
  source 1..120: mol_type = other DNA

SEQ ID NO: 46782 - DNA, 120 bp, synthetic construct
  source 1..120: mol_type = other DNA
cccaatagtcatttaggagcaggttgttcagtttccatgtagttgagtggttttgagtgagtttcttaatcctgagttctagtttgattgcactgtggtctgagagacagtttgttataa

SEQ ID NO: 46783 - DNA, 120 bp, synthetic construct; identical to SEQ ID NO: 9115
  source 1..120: mol_type = other DNA

SEQ ID NO: 46784 - DNA, 120 bp, synthetic construct; identical to SEQ ID NO: 9116
  source 1..120: mol_type = other DNA

SEQ ID NO: 46785 - DNA, 120 bp, synthetic construct; identical to SEQ ID NO: 9117
  source 1..120: mol_type = other DNA

SEQ ID NO: 46786 - DNA, 120 bp, synthetic construct
  source 1..120: mol_type = other DNA
cccatatttcttggaggctttgcttgtttctttttattcttttttctctaaactacccttctcacttcctttcattcatttcatcttccatcgctgataccctttcttccagttgatcgc

SEQ ID NO: 46787 - DNA, 120 bp, synthetic construct
  source 1..120: mol_type = other DNA
aagaaactaccatcagagtgaacagacagcctacaaaatgggagaaaattttcgcaacctactcatctgacaaagggctaatatccagaatctacaatgaactcaaacaaatttacaaga

SEQ ID NO: 46788 - DNA, 120 bp, synthetic construct; identical to SEQ ID NO: 9118
  source 1..120: mol_type = other DNA

SEQ ID NO: 46789 - DNA, 120 bp, synthetic construct; identical to SEQ ID NO: 18369
  source 1..120: mol_type = other DNA

SEQ ID NO: 46790 - DNA, 120 bp, synthetic construct; identical to SEQ ID NO: 18370
  source 1..120: mol_type = other DNA

SEQ ID NO: 46791 - DNA, 120 bp, synthetic construct
  source 1..120: mol_type = other DNA
ttcctcctttaagcaacaaaaccaagatgtctttttcttttttttattttattttatttcttttttgagacagagtctcgctctgtcgcccaggctggactgcagtggcgcgatttcggc

SEQ ID NO: 46792 - DNA, 120 bp, synthetic construct; identical to SEQ ID NO: 9381
  source 1..120: mol_type = other DNA

SEQ ID NO: 46793 - DNA, 120 bp, synthetic construct; identical to SEQ ID NO: 9382
  source 1..120: mol_type = other DNA

SEQ ID NO: 46794 - DNA, 120 bp, synthetic construct; identical to SEQ ID NO: 35371
  source 1..120: mol_type = other DNA

SEQ ID NO: 46795 - DNA, 120 bp, synthetic construct; identical to SEQ ID NO: 11609
  source 1..120: mol_type = other DNA

SEQ ID NO: 46796 - DNA, 120 bp, synthetic construct
  source 1..120: mol_type = other DNA
actgtgcccagcagtgagcgtcttctgcggtctggtcaggttttgccactgtgcccagcagtgagcgtcttctgcggtctggtcaggttttgccactgtgcccagcagtgagcgtcttct

SEQ ID NO: 46797 - DNA, 120 bp, synthetic construct; identical to SEQ ID NO: 46796
  source 1..120: mol_type = other DNA

SEQ ID NO: 46798 - DNA, 120 bp, synthetic construct; identical to SEQ ID NO: 46796
  source 1..120: mol_type = other DNA

SEQ ID NO: 46799 - DNA, 120 bp, synthetic construct; identical to SEQ ID NO: 11610
  source 1..120: mol_type = other DNA

SEQ ID NO: 46800 - DNA, 120 bp, synthetic construct; identical to SEQ ID NO: 11611
  source 1..120: mol_type = other DNA

SEQ ID NO: 46801 - DNA, 120 bp, synthetic construct; identical to SEQ ID NO: 11601
  source 1..120: mol_type = other DNA

SEQ ID NO: 46802 - DNA, 120 bp, synthetic construct; identical to SEQ ID NO: 11602
  source 1..120: mol_type = other DNA

SEQ ID NO: 46803 - DNA, 120 bp, synthetic construct; identical to SEQ ID NO: 11603
  source 1..120: mol_type = other DNA

SEQ ID NO: 46804 - DNA, 120 bp, synthetic construct; identical to SEQ ID NO: 11604
  source 1..120: mol_type = other DNA

SEQ ID NO: 46805 - DNA, 120 bp, synthetic construct; identical to SEQ ID NO: 11605
  source 1..120: mol_type = other DNA

SEQ ID NO: 46806 - DNA, 120 bp, synthetic construct; identical to SEQ ID NO: 11606
  source 1..120: mol_type = other DNA

SEQ ID NO: 46807 - DNA, 120 bp, synthetic construct; identical to SEQ ID NO: 11607
  source 1..120: mol_type = other DNA

SEQ ID NO: 46808 - DNA, 120 bp, synthetic construct; identical to SEQ ID NO: 11608
  source 1..120: mol_type = other DNA

SEQ ID NO: 46809 - DNA, 120 bp, synthetic construct; identical to SEQ ID NO: 11612
  source 1..120: mol_type = other DNA

SEQ ID NO: 46810 - DNA, 120 bp, synthetic construct; identical to SEQ ID NO: 11613
  source 1..120: mol_type = other DNA

SEQ ID NO: 46811 - DNA, 120 bp, synthetic construct
  source 1..120: mol_type = other DNA
aattttaaatgccgttaataatcaagggagagaacaaaagtaaatataaggctgggcacagtggcttatgcatgtaatcccagcactttggaagcccgaggcaggtgggttatttgaggt

SEQ ID NO: 46812 - DNA, 120 bp, synthetic construct; identical to SEQ ID NO: 23087
  source 1..120: mol_type = other DNA

SEQ ID NO: 46813 - DNA, 120 bp, synthetic construct
  source 1..120: mol_type = other DNA
gtacaggattgttacacagggaaacttgtgccacaggggttggctatacagattatttcatcacccacgtattaagcctagtacccattagttgtttttcttgattctctccttcctgtc

SEQ ID NO: 46814 - DNA, 120 bp, synthetic construct
  source 1..120: mol_type = other DNA
ccagccagagaacccttcttccttcactgtctcacttattcccaatgtttcaggcataagtctctttttttatttttattttttgaggcagtctcactttgtcacccaggctggaatgca

SEQ ID NO: 46815 - DNA, 120 bp, synthetic construct
  source 1..120: mol_type = other DNA
ggggagcaaacgtgcccaatgctcaccaactcctcgtagctcctgttgtgctcgttgccctcccagtccaatctcttcggcaacaactggaaagacacgaaacgcacacgagtgaccacc

SEQ ID NO: 46816 - DNA, 120 bp, synthetic construct; identical to SEQ ID NO: 6661
  source 1..120: mol_type = other DNA

SEQ ID NO: 46817 - DNA, 120 bp, synthetic construct; identical to SEQ ID NO: 34256
  source 1..120: mol_type = other DNA

SEQ ID NO: 46818 - DNA, 120 bp, synthetic construct
  source 1..120: mol_type = other DNA
ccctgcccggccagccgccccgtccgggaggtgaggggcacctctgcccggccgcccctactgggaagtgaggagcccctctgcccggccaccaccccgtctgggaggtgtacccaacag

SEQ ID NO: 46819 - DNA, 120 bp, synthetic construct; identical to SEQ ID NO: 34257
  source 1..120: mol_type = other DNA

SEQ ID NO: 46820 - DNA, 120 bp, synthetic construct; identical to SEQ ID NO: 34258
  source 1..120: mol_type = other DNA

SEQ ID NO: 46821 - DNA, 120 bp, synthetic construct; identical to SEQ ID NO: 34259
  source 1..120: mol_type = other DNA

SEQ ID NO: 46822 - DNA, 120 bp, synthetic construct
  source 1..120: mol_type = other DNA
ttctcaggtttgccaaagatcagatggttgtagatatgtggcattatgtctgagtgctctgttctgttccattggtctatatttctgttttagtaccagtaccatgctgttttggttact

SEQ ID NO: 46823 - DNA, 120 bp, synthetic construct
  source 1..120: mol_type = other DNA
cacttgaacccaggaggtggaggttgcagtgagccaagattgtgccactgtactcccgtctgggcaacacagcgagactctgactcaaaaaaagaaataaaaaaaataaaaataaataaa

SEQ ID NO: 46824 - DNA, 120 bp, synthetic construct
  source 1..120: mol_type = other DNA
tttttatagtactgttttatatgccccttactttataaaaatattaagggccaggaatggtggctcacgcctgtaatcccaacactttaggaggttgaggtgggcggatcactggaggtc

SEQ ID NO: 46825 - DNA, 120 bp, synthetic construct; identical to SEQ ID NO: 34260
  source 1..120: mol_type = other DNA

SEQ ID NO: 46826 - DNA, 120 bp, synthetic construct; identical to SEQ ID NO: 34261
  source 1..120: mol_type = other DNA

SEQ ID NO: 46827 - DNA, 120 bp, synthetic construct; identical to SEQ ID NO: 19319
  source 1..120: mol_type = other DNA

SEQ ID NO: 46828 - DNA, 120 bp, synthetic construct
  source 1..120: mol_type = other DNA
gagaccatgccattgcactccagcctgggcaacaagagcgaaactctgtctcaaaaaaatatatatatacatatatatacatatatattttatatattatatattatattatatatatat

SEQ ID NO: 46829 - DNA, 120 bp, synthetic construct; identical to SEQ ID NO: 7642
  source 1..120: mol_type = other DNA

SEQ ID NO: 46830 - DNA, 120 bp, synthetic construct
  source 1..120: mol_type = other DNA
cttccttgtccctctcctttttcaccttctcctcctcctcattctttttctcccttctccttctcctctcctcctcctccttcctttcctcctccttcttcttctcttccttctcctcct

SEQ ID NO: 46831 - DNA, 120 bp, synthetic construct; identical to SEQ ID NO: 25319
  source 1..120: mol_type = other DNA

SEQ ID NO: 46832 - DNA, 120 bp, synthetic construct
  source 1..120: mol_type = other DNA
atctctaaaattaaaaattaaaaaaaaattagccaggaatggtgacacatgcatatggtcctagctactcagaaggctgaggcaggaggactccttaagtccaggagtttgaggctgcag

SEQ ID NO: 46833 - DNA, 120 bp, synthetic construct
  source 1..120: mol_type = other DNA
agaaattatcttgtcctccagaagaattggttgcaaatgttcacatctagcttggatagcaaactttggtgggaagaccttgaatcattctcagtagagaagtagacaccgtgtgacctc

SEQ ID NO: 46834 - DNA, 120 bp, synthetic construct
  source 1..120: mol_type = other DNA
cgcacgcctgtactcccagctactcaggaggctgaggcaagagaatcacttgaacccgtgaggtggaggttgcagtgagccatgatcgtgccattgcactgcagcctgggtgacagagtg

SEQ ID NO: 46835 - DNA, 120 bp, synthetic construct; identical to SEQ ID NO: 15591
  source 1..120: mol_type = other DNA

SEQ ID NO: 46836 - DNA, 120 bp, synthetic construct
  source 1..120: mol_type = other DNA
tgtccttgcgatagtttgctgagaatgatggtttccagcctcatccgtgtccctacaaaggacatgaactcatcattttttatggctgcatagtattccatggtgtgtatgtgccacatt

SEQ ID NO: 46837 - DNA, 120 bp, synthetic construct
  source 1..120: mol_type = other DNA
agttgtagatatgcggcgttatttctgagggctctgttctgttccattggtctgtatctctgttttggtaccagtaccatgctgtttttgttactgcagccttgtagtatagtttgaagt

SEQ ID NO: 46838 - DNA, 120 bp, synthetic construct
  source 1..120: mol_type = other DNA
ctaatttattgagagtttttagcatgaagtgttgttgaattttatcaaaggccttttctgcatctattgagataatcatgtgttttttgtctttggttctgtttatatgctggattacgt

SEQ ID NO: 46839 - DNA, 120 bp, synthetic construct
  source 1..120: mol_type = other DNA
ttggattgcactgtggtctaagagacagtttgttataatttctgttcttttacatttgctgaggagtgctttacttccaactatgtggtcaattttggaataggtgtggtgtggtgctga

SEQ ID NO: 46840 - DNA, 120 bp, synthetic construct
  source 1..120: mol_type = other DNA
ccttcatttcaactttggtgaatctgacaattacgtgtcttggagttagttgctcttctcgaggagtatctttgtggcgttctctgtatttcctgaatttgaatgttggccttccttgct

SEQ ID NO: 46841 - DNA, 120 bp, synthetic construct; identical to SEQ ID NO: 11697
  source 1..120: mol_type = other DNA

SEQ ID NO: 46842 - DNA, 120 bp, synthetic construct; identical to SEQ ID NO: 13206
  source 1..120: mol_type = other DNA

SEQ ID NO: 46843 - DNA, 120 bp, synthetic construct
  source 1..120: mol_type = other DNA
gcgctgcgagctgagccccttgcccaccaggaagtgcacgtcgcacagcacctcgttgttgaagaggaaggcgaagcgctcctgcacggtgggcttgctggcctgccagttgtacgcggc

SEQ ID NO: 46844 - DNA, 120 bp, synthetic construct
  source 1..120: mol_type = other DNA
aatcctaaaccctggagcacagacctcagtccgggatcccaggcctcagaccttgaatcctagatcccagactctgaaccccagacttcagactccggattccagatcccatacctcaga

SEQ ID NO: 46845 - DNA, 120 bp, synthetic construct; identical to SEQ ID NO: 3802
  source 1..120: mol_type = other DNA

SEQ ID NO: 46846 - DNA, 120 bp, synthetic construct; identical to SEQ ID NO: 27732
  source 1..120: mol_type = other DNA

SEQ ID NO: 46847 - DNA, 120 bp, synthetic construct; identical to SEQ ID NO: 27733
  source 1..120: mol_type = other DNA

SEQ ID NO: 46848 - DNA, 120 bp, synthetic construct
  source 1..120: mol_type = other DNA
cttcaaactatactacaaggctacagtaaccaaaacagcatggtactggttccaaaacagagatatagatcaatggaacagaacagagccctcagatataacgccacatatctacaacta

SEQ ID NO: 46849 - DNA, 120 bp, synthetic construct
  source 1..120: mol_type = other DNA
ccacaatgagataccaactcacaccagttagaatggcgatcattaaaaagccaggaaacaacaggtgctggagaggatgtggagaaataggaacacttttacactgttggtgggactgta

SEQ ID NO: 46850 - DNA, 120 bp, synthetic construct
  source 1..120: mol_type = other DNA
tcaacagtgtaaaagtgttcctatttctccacatcctctccagcacctgttgttgcctgactttttaatgatcgccattctaactggtgtgagatggtatctcattgtggttttgatttg

SEQ ID NO: 46851 - DNA, 120 bp, synthetic construct
  source 1..120: mol_type = other DNA
gtgaagaaagtcattggaagcttgatggggatggcactgaatctataaattaccttgggcagtgtgaccattttcacgatattgattcttcctacccatgagcatggaatgttcttccat

SEQ ID NO: 46852 - DNA, 120 bp, synthetic construct
  source 1..120: mol_type = other DNA
ttttgcatcaatgttcatcaaggatattggtctaaaattctcgttttttgttgtgtctctgccaggctttggtatcaggatgatgctggcctcataaaatgagttagggaggattccctc

SEQ ID NO: 46853 - DNA, 120 bp, synthetic construct
  source 1..120: mol_type = other DNA
cagctgctcaggaggctaaggcagagaatcgcttgaacctgggaggcacaggttgcagtgaaaaaaagaaaaagaaaagcatggttaaagttttgttcttaaaaaaagtctagaacacac

SEQ ID NO: 46854 - DNA, 120 bp, synthetic construct
  source 1..120: mol_type = other DNA
gcctgcttccccttctgtcatgactgtatgtttcctgaggcctccctagccatgcagaactatgagtcaattaaacctctttcctttataaattacccagtcttggatagtatctttaca

SEQ ID NO: 46855 - DNA, 120 bp, synthetic construct; identical to SEQ ID NO: 25521
  source 1..120: mol_type = other DNA

SEQ ID NO: 46856 - DNA, 120 bp, synthetic construct; identical to SEQ ID NO: 25522
  source 1..120: mol_type = other DNA

SEQ ID NO: 46857 - DNA, 120 bp, synthetic construct
  source 1..120: mol_type = other DNA
ctgccttaaacaacgggaaggaagaggcggtctaaattcgtccacttcccgggagaggtgagaatgtaaacacgcgcgttctccaatcagaactgcgctctcttctcggctcctccattc

SEQ ID NO: 46858 - DNA, 120 bp, synthetic construct
  source 1..120: mol_type = other DNA
aagcaaaaagaacagtgataagtggacagtaaagagatgagaggggagtgggtcatgggtagtgaaatgagtgagaagcactggaagtgaaacgatttctaaacccagacattttcaaac

SEQ ID NO: 46859 - DNA, 120 bp, synthetic construct
  source 1..120: mol_type = other DNA
agcttgcagtgagctgagattgggccactgcactccagcctgggggacagatcgagactccgtctcaaaaaaaataataaaattaaatttaaaaataaataaataaaagcaagatagtta

SEQ ID NO: 46860 - DNA, 120 bp, synthetic construct
  source 1..120: mol_type = other DNA
aggtctctgacatgccctggagacattttccccattgtcttggtgattaatagttagcttcttattacctatgcaaatttctgctgccagcttgaatttctccctagaaaatgggttttt

SEQ ID NO: 46861 - DNA, 120 bp, synthetic construct
  source 1..120: mol_type = other DNA
gggattatgggagctataattcaagatgagatttgagtggggacataaccaaaccatatcagggacccatctcagagggtgacttctttcaagtctcagagtgtatctaaaaagaaaatg

SEQ ID NO: 46862 - DNA, 120 bp, synthetic construct
  source 1..120: mol_type = other DNA
gttcaagactgatttgacattgacagaacaagctgtatcgatggtagtcagttcactgggcctacttctgtgtcaaaagaaacagtgacagaaccactcagtatgaagtgcaatgaaaac

SEQ ID NO: 46863 - DNA, 120 bp, synthetic construct
  source 1..120: mol_type = other DNA
ttcttctctctgggccagggagatatccaggcaaccaggtaatttagtaagaattgcaaatatagtgcctggagacaatttattctctaaagactgcagcttctacaggcagtaactctt

SEQ ID NO: 46864 - DNA, 120 bp, synthetic construct
  source 1..120: mol_type = other DNA
ggaaatagtgacaactgtatgttgtgctatgaggatgtaagagatttatctcaaatggcttagaaatcaaaatataggtcagtgcggtggctcacacctgtaatcccaacactttgggag

SEQ ID NO: 46865 - DNA, 120 bp, synthetic construct
  source 1..120: mol_type = other DNA
tggcttaagaaatacatcacaaatataatgaaacccccgtgtgtcctttccccattacacctcctttcctgtcctacagaggtaaccactatcttgaatttggtgtttgtagttcccaca

SEQ ID NO: 46866 - DNA, 120 bp, synthetic construct
  source 1..120: mol_type = other DNA
gtgtaattaaccaccccaaaacttagtggcttaaaagaaccaccatttatttaacatatattcctatgaggctggtctcaactgggctcacccatgtatctgttagtcagttgccagtga

SEQ ID NO: 46867 - DNA, 120 bp, synthetic construct
  source 1..120: mol_type = other DNA
aaagttaaatttaactgggccacctgtattttacctggaaaaatcctgattttattcaaggtgataatgcagtttacattgcccagccttccttgtagctaggagtggtcacgcgtccac

SEQ ID NO: 46868 - DNA, 120 bp, synthetic construct
  source 1..120: mol_type = other DNA
gtttattttacattcaaggctcttgccagtttttccattcacctcttaattggccgaagattaccctctatgcattttttcaaagaaggctgatgagactgatgagaataatagtccctg

SEQ ID NO: 46869 - DNA, 120 bp, synthetic construct
  source 1..120: mol_type = other DNA
ggagtcaccttagggtgtgtccaccacacattatttttttcttttatgcattttccaattatgcatatgatggatctcgttcactgttctccctgtctatcattttctgtggactccttt

SEQ ID NO: 46870 - DNA, 120 bp, synthetic construct
  source 1..120: mol_type = other DNA
tcattttatgtattttctccctctttctttctttcttttttttttttttttaagtcaaggtcttgctctgtcgcccaagctggagtacagtggcacagccgtagcccactgcagccttaa

SEQ ID NO: 46871 - DNA, 120 bp, synthetic construct
  source 1..120: mol_type = other DNA
ctcagtcttcaagaagagagtatgtggataggcttttccaggcatcttaggactgataacatctcaaaatcactttgtgctcatttcttggcatagagttacctgggtcatgtatgttgt

SEQ ID NO: 46872 - DNA, 120 bp, synthetic construct
  source 1..120: mol_type = other DNA
ccaagctgtcttccaaagtggttggatcattttgtgttcccatcagcaatgaatcagacttcctgttgctctatattctcaacagcatttggtctttttaaaaattgttttgggccgggc

SEQ ID NO: 46873 - DNA, 120 bp, synthetic construct
  source 1..120: mol_type = other DNA
ctgtagcttatcttcttctgttcttgatagtttcatttgcagatcaaaagttttacatttagtgaagtgcagtgtatcaattctttcttttttgtccaacacaagatcatctagctattc

SEQ ID NO: 46874 - DNA, 120 bp, synthetic construct
  source 1..120: mol_type = other DNA
gatcaagtgatcttcccacttccatctgctgaatagccaggactataggcacacaccgccttgcccagctaacttaattttatttttaattttgtagagaatggggtctctctattttgc

SEQ ID NO: 46875 - DNA, 120 bp, synthetic construct
  source 1..120: mol_type = other DNA
agctaggacttacggtatgatgttgaaaagcagtggtgagaagggacatcattaccttgctcccgatctttgtataaagtctctagtttctcaccactaactgtgatgttagctgtaggt

SEQ ID NO: 46876 - DNA, 120 bp, synthetic construct
  source 1..120: mol_type = other DNA
aaacatcttaaacaacagaaaacagggttcaagagcagagaaccagtctgaccacggatttaccagggctgagttttcccaaccctagcaagcctgagggttctgcaggagactaggact

SEQ ID NO: 46877 - DNA, 120 bp, synthetic construct
  source 1..120: mol_type = other DNA
attgtgagggtggctcatctttacctagtgcacttagactcacacactcatctcctcatgctgatcacaagcacatccaaaagtaacattttaccaggtttctacagtgttccttaatcc

SEQ ID NO: 46878 - DNA, 120 bp, synthetic construct
  source 1..120: mol_type = other DNA
ttcctttattattctttcggtgtccatgggatctgtagttatgtgccctctttcattgctcatgtcagtaatatgtgtcttctctatttttttttcttagcctggctagaggcttattga

SEQ ID NO: 46879 - DNA, 120 bp, synthetic construct
  source 1..120: mol_type = other DNA
atggcagaaggcaaatgaggagcaaaggcatgtcttacatggtagcagacaagagtttgtgcagaggagcttccatttataaaaccatcagatttcatgagacttattcactaccatgag

SEQ ID NO: 46880 - DNA, 120 bp, synthetic construct
  source 1..120: mol_type = other DNA
tgtgagaatggactaatacagacgcacaatgctaggctggtacttttttcctctcaacactttaaatatttcacatcactgtcttattgtttacatgatttctgagaagtcagatatctt

SEQ ID NO: 46881 - DNA, 120 bp, synthetic construct
  source 1..120: mol_type = other DNA
tgggattacagccatgagccaccgcacctggcctaactctggttctgatgcctgctctgttttcaaactcaattttttaccttttagtataccttgtaattttttgttggaagttggact

SEQ ID NO: 46882 - DNA, 120 bp, synthetic construct
  source 1..120: mol_type = other DNA
caccacgcctggcccagttttaattttttattttgcatataagttcaaagccttccaaagtgtttgtttatgatttattttcttgttaaaatctgttcttgttcattgcctgtttataag

SEQ ID NO: 46883 - DNA, 120 bp, synthetic construct
  source 1..120: mol_type = other DNA
aaaaagaaaagaaaagaaaaagaagctataggacataggggagctagtcatatgtctgtcctactgagactctagatggcacaaggcaatggcacttgtgttagaaccagaatgcagcta

SEQ ID NO: 46884 - DNA, 120 bp, synthetic construct
  source 1..120: mol_type = other DNA
tccgaggttcaagctattctcttgcttcagcctcccaagtagctgggattacagtgcctgccaccacgcctggctaattttttgtgcttttagtagagttggggtttcaccatgttggct

SEQ ID NO: 46885 - DNA, 120 bp, synthetic construct
  source 1..120: mol_type = other DNA
ccaccattcatgtgtcccaggactgactgacagtggaaaagctttatgtgtgtgtattttccttgctgcctggtcaaggtctccaatcaatagtttaagactttttcacagttcattttc

SEQ ID NO: 46886 - DNA, 120 bp, synthetic construct
  source 1..120: mol_type = other DNA
ctggctcccagtctcattatcattactaaccagtcctggagttttccctcaccatgaagatggaatttttaccatctgctttctctgctttgtgtggcaggaagataaaaaaataataat

SEQ ID NO: 46887 - DNA, 120 bp, synthetic construct
  source 1..120: mol_type = other DNA
ttgataacttattcacagttgctggtgagttcaggcttaaatcatcagctgtcactcacaagtgtttacccttgaactttccgaatgagacatcaaacgtcttggtagtgggtgggttta

SEQ ID NO: 46888 - DNA, 120 bp, synthetic construct
  source 1..120: mol_type = other DNA
tagatttccatgtaattgagactgatttttcctattagatggaaagaaccttcctgatcaggactggtgttgggggaatgttttccttatgaaatcagaagcagagcttctgtagggccg

SEQ ID NO: 46889 - DNA, 120 bp, synthetic construct
  source 1..120: mol_type = other DNA
tacattgccaccttgtcacacctctagttaccattttctttatggtccaggtcctgaccagctctaaagatgggtcagctgctgtatttccaagaaccccatgacttccagggccccttg

SEQ ID NO: 46890 - DNA, 120 bp, synthetic construct
  source 1..120: mol_type = other DNA
gattttgcggtttccttgttttgctggattgcaagtcctttagacataaacaaatgttctgtaccccgacatcggtggtacccagctctcagttgagaaagagatgtaatgtgaatgcca

SEQ ID NO: 46891 - DNA, 120 bp, synthetic construct
  source 1..120: mol_type = other DNA
acactacccagtaaatctctgcctgagaggacgctttagctgggaggccaggctgatttttaaaggcagaattggactatttactctaaaacagtaatgcacactgtttagaaagaaaca

SEQ ID NO: 46892 - DNA, 120 bp, synthetic construct
  source 1..120: mol_type = other DNA
ttgagccgcagtatcactgcgagtgagtttaattgctgggattaataaatcacagctgcaaacgttaaattcttggcaggattctttattcagctgttttccccttgccccattacattc

SEQ ID NO: 46893 - DNA, 120 bp, synthetic construct
  source 1..120: mol_type = other DNA
ttttaaggctccccagtgcagtctaatgtgcagaaaaatttgaagatgactgggcgtgatgacctctctgagtcattcgaagcttcactgaagtagtaagcatctgcaagaatgccgttt

SEQ ID NO: 46894 - DNA, 120 bp, synthetic construct
  source 1..120: mol_type = other DNA
tgtatcctcagtcccttccacagttccttaggagactcagtttccaaaccttctactgaagacttccatgttttctctgtgctcagaactgtatgcagctatcccgattctgtctaataa

SEQ ID NO: 46895 - DNA, 120 bp, synthetic construct
  source 1..120: mol_type = other DNA
cagatatctcagctcccatacgtggttatatgttttttgtttgtttgttttccagcagcacttttatttttccttacacgatgacatgttgctggggcctattgttctcacataacagta

SEQ ID NO: 46896 - DNA, 120 bp, synthetic construct
  source 1..120: mol_type = other DNA
atgattaggctgggcagtcacttgggattgtaaccttcattcctcagaaggaaggggttcttgatctcattgagatctaccagaaaattgctgaagccatttatcaagaatgcaacttac

SEQ ID NO: 46897 - DNA, 120 bp, synthetic construct
  source 1..120: mol_type = other DNA
ttgcagtgagccgagatcacaacactgcactccagcctgggcgacagaccaagactctctctcaaaaaacaaaacaaaacttaaaactctaatttttataccctttgatccagtaatttc

SEQ ID NO: 46898 - DNA, 120 bp, synthetic construct
  source 1..120: mol_type = other DNA
gagcctcctaattcccagttggggaatggagatttcaagcgagttcttgtttccaggctgagatgagcacacttgcctcttacccactggcccagtggatcctaaccttggctacaaatg

SEQ ID NO: 46899 - DNA, 120 bp, synthetic construct
  source 1..120: mol_type = other DNA
ttttcaggatgtacagattatagtgtttccagaagatggcattcatggattcaactttacaagaacatccatttatccatttttggacttcatgccgtctccccaggtggtcaggtggaa

SEQ ID NO: 46900 - DNA, 120 bp, synthetic construct
  source 1..120: mol_type = other DNA
tcacttgaacctgggaggcaggagttgcggtgagaaagatcgcgccactgcattccagcctggacaacaggagcaaaactctgcctcaaaaaaaaaaaaaaaaataaaataaaataaaga

SEQ ID NO: 46901 - DNA, 120 bp, synthetic construct
  source 1..120: mol_type = other DNA
gtttgagtccagcctgggcaatgtaacaagaccctgtctctgaaaaaaaaaaaaaagaaaagaaagaaaaaaaaaagaagaggaagcaaaaggaaggattttaaaaactcatttatttaa

SEQ ID NO: 46902 - DNA, 120 bp, synthetic construct
  source 1..120: mol_type = other DNA
ggaaaatcccaaaagtcaccttataattgcccaggtggccaaaaatccagtgggtctcattggtgcagagaatgcaacaggtgaaacggacccatcccatagtaagtttttaaaaatttt

SEQ ID NO: 46903 - DNA, 120 bp, synthetic construct
  source 1..120: mol_type = other DNA
acacccaggacatgtaaatatttcataagccttaaacatttcctgaggtaagaaacaagctctcaaagcaaaagctcaattagaaatggcccttgtggggaaccttcccattctggtcga

SEQ ID NO: 46904 - DNA, 120 bp, synthetic construct
  source 1..120: mol_type = other DNA
aacaatgtggattctgcagtcagactgatggggtttccatgcatggcctcaccattaactcctcactggggagaccttgggcctcggttttttattcatagaatgcatgttgaataaacc

SEQ ID NO: 46905 - DNA, 120 bp, synthetic construct
  source 1..120: mol_type = other DNA
tgtgcttttctgtggtttttctcacacgggaagtgagaggcacagtgagctgtattcacactggatttaaaagccctgttcttagagaggaaaaaaccaggcctcctcacagactgccaa

SEQ ID NO: 46906 - DNA, 120 bp, synthetic construct
  source 1..120: mol_type = other DNA
tgcagatgcaatgaagatataagttaaaatgagatcacactagagtaactgggcccttaatccaatatgacatgtccttatcagaagaggagaagacacacacacagggagaagatgacc

SEQ ID NO: 46907 - DNA, 120 bp, synthetic construct
  source 1..120: mol_type = other DNA
gaacactcatccatccttcaaggtctactctctcatcacagcttgtgactcttccactttttgaactggtgtttcccattcccagttcacagagccctttctcattgaactatttatctg

SEQ ID NO: 46908 - DNA, 120 bp, synthetic construct
  source 1..120: mol_type = other DNA
ttttacacagtccctaattaaagtctcagagatgaacaacctgggctcttgcttagggcacgtgcccatcctgaatcaatgatcggccagagagctgtgatattcttttgtttttttgag

SEQ ID NO: 46909 - DNA, 120 bp, synthetic construct
  source 1..120: mol_type = other DNA
agaacattctgcaagctcatggaccagttcatttgagaagaaatagaggagttaggggagagagaagcttcttaatgaaaataaccttggtagctagtctcaagattagcccccagtgct

SEQ ID NO: 46910 - DNA, 120 bp, synthetic construct
  source 1..120: mol_type = other DNA
aaaactaatacaatagtcttgctaccagcaccttaatctcccacatccaagttaaaattcatccaacactcaatctcccagctatcctgactgctcctatacaggtatctctcccactat

SEQ ID NO: 46911 - DNA, 120 bp, synthetic construct
  source 1..120: mol_type = other DNA
aggtataactttgggggtgttctaattctttaaaaattgttgatccgactatggatgtcttgcaactctcaaaaaatcacgtgtgaaagttaagcattagttccgtgtaaaatactgtgc

SEQ ID NO: 46912 - DNA, 120 bp, synthetic construct
  source 1..120: mol_type = other DNA
tgttaagcttaacattttctaatatagtcctgcatccttttttttgtttttgagatgaagtctcactctgtggcaatcttggctcactgcaccctctgcctcccgggttcaagcgattct

SEQ ID NO: 46913 - DNA, 120 bp, synthetic construct
  source 1..120: mol_type = other DNA
tttacataaaaaataagaagtgaaaaaataaacccagattttgaatgcgctggcttgggagcccagagaccaggcctggcttgcttttaaattgttgtgtgacctcagccatgtacctgt

SEQ ID NO: 46914 - DNA, 120 bp, synthetic construct
  source 1..120: mol_type = other DNA
tcaagtggcacccttctgcagaagtaaattgccttgctgagaaaacttttgcctgggtgctggttttactttgcggcactgagcacttattcctagagcatttttatatccaacatagaa

SEQ ID NO: 46915 - DNA, 120 bp, synthetic construct
  source 1..120: mol_type = other DNA
aaactgagacacagagaggctgaacaactggctcaatgccccccagagctgtatgtgagctaggttttgaacataagcagtttgtacatgggaaattaatgagctaattaggctatttat

SEQ ID NO: 46916 - DNA, 120 bp, synthetic construct
  source 1..120: mol_type = other DNA
gtgccatggaaattagtaccaaggcaatcttgccaggcactcgggtatagcctttgtacatgtagcccacttttatcttgcccaaacttcagaccgatttttttttttaaaccggatatt

SEQ ID NO: 46917 - DNA, 120 bp, synthetic construct
  source 1..120: mol_type = other DNA
tcacttcagttcaaagactcccaagtgctttgccaaatgttcattagacacacatggcaggtaggatgttcccactcaacctttgatcttaatctccttcactggggttagacttgcatt

SEQ ID NO: 46918 - DNA, 120 bp, synthetic construct
  source 1..120: mol_type = other DNA
ttgctacccatgaagggaattacaactcaggaaaactgaccttttccacttctgattcgactccagacacaggtctagtcttgtttcagaaccctctgcttttcatttcatttgaatcca

SEQ ID NO: 46919 - DNA, 120 bp, synthetic construct
  source 1..120: mol_type = other DNA
aaaaagagctcctccacatccacactagcatttggtgttgtcagtgttctgaatttccaccattctaattggtgtgttgtggcatctcattttgtttccctgatgagatgtgtggaacat

SEQ ID NO: 46920 - DNA, 120 bp, synthetic construct
  source 1..120: mol_type = other DNA
actttgtatgttgggtacaaatgtaaatagtattgtgttttaaatgtcaaattcactgttcactgctggcatatgagaaagtaattgatttttgtatatgaaccttgtatcttgcaatac

SEQ ID NO: 46921 - DNA, 120 bp, synthetic construct
  source 1..120: mol_type = other DNA
gccgcgcctggcctacagtcttcttataatctttggttttgaaattgaggtaatgctggcctccttgaccaagttaggatatattttttctgcttctatctctggaaaacactgtataga

SEQ ID NO: 46922 - DNA, 120 bp, synthetic construct
  source 1..120: mol_type = other DNA
cctcacatactttgatactctgttgttaagtgcattggtcaaataatggagaatgaggttttgaaagagctctagctttgttttgttccttctggtggctgctaggctgcaacaggaatg

SEQ ID NO: 46923 - DNA, 120 bp, synthetic construct
  source 1..120: mol_type = other DNA
ggaagaggttggttttctacctttgaaaaagggcagatccaccaaccaaccaatcagtagcactgccaagcaagaactttccaactcaaaatacatgtttgttgcccagttttatatctg

SEQ ID NO: 46924 - DNA, 120 bp, synthetic construct
  source 1..120: mol_type = other DNA
acaaattaccagccaggtgaccttgggcaaacactacttcatctccccctttcctcatctgttaaatggtgctataaatagtacctaccacgtagaacagttgtgtgggttaagagataa

SEQ ID NO: 46925 - DNA, 120 bp, synthetic construct
  source 1..120: mol_type = other DNA
ttacagctacacttagagatctcctgaactaaatggcattgtttgagatgagtgtcttgttaaaggaggtcatttgctattaccaccatttcacccaaagtagttctagagcagaagctg

SEQ ID NO: 46926 - DNA, 120 bp, synthetic construct
  source 1..120: mol_type = other DNA
cctcagggaattcagaagagaattcctaaaaggaaagagaaagcacacatatgtatacttttagaatctgcttgatttttttttttttcaaaaggtacaatagaaaatgtagtccactgt

SEQ ID NO: 46927 - DNA, 120 bp, synthetic construct
  source 1..120: mol_type = other DNA
caaacaaaaatagtactattttaaacccaaaccattcaaaacagggcaacagcctgaccccaatccatctcaatgtctatgtcacaagtattttcacccgtattgcacccagtcagctgg

SEQ ID NO: 46928 - DNA, 120 bp, synthetic construct
  source 1..120: mol_type = other DNA
gagctaggttcattcctcatgatgggcaaagcttcaaagctgactgtttttgaggtgttggtataacggttaatggcattgaatgttaaggatgataaaggactacttgatgagacaggc

SEQ ID NO: 46929 - DNA, 120 bp, synthetic construct
  source 1..120: mol_type = other DNA
caaggaggaaacatttggtacctcagttggtacaagactcagtcttgaggacggagcgggagagaagtgataatagtgtgatgccaagcttcaattataccatatggaactttaatagtt

SEQ ID NO: 46930 - DNA, 120 bp, synthetic construct
  source 1..120: mol_type = other DNA
ctatattggccttgataaaaaaaggatttttttttttttttttgagacagggtcttgttctgtcacccaggctggagtgcagtataatgatcatgctcactgcaccctcaacctctgggc

SEQ ID NO: 46931 - DNA, 120 bp, synthetic construct
  source 1..120: mol_type = other DNA
tcccccactttctccttatcctttggattttggcttagcagttgcattttttgggatgccttctctgatcctgcaagaaaggatttgaagaccctcttaagtactctcatagcattctat

SEQ ID NO: 46932 - DNA, 120 bp, synthetic construct
  source 1..120: mol_type = other DNA
gagcccaggagttcaaggttacaatcagctatgatctcaccactgtactctagtctgggcaacagagtgagaccctgcctcttcaaaaaaaaaaaaaaaaaaaaaaaagaagaagaaccg

SEQ ID NO: 46933 - DNA, 120 bp, synthetic construct
  source 1..120: mol_type = other DNA
ggttttgatgggaacagttttgctatgtgtaggggtgagggggagaaggcctgactatacggaaattaagagagaatggaagaatgaggctggacgctgtggctcacacctgtaatccca

SEQ ID NO: 46934 - DNA, 120 bp, synthetic construct
  source 1..120: mol_type = other DNA
ctctaggttaagggaagagaatatagaaccaacttaccattttcatctactgcaagcacacttgctccttttcccaaaagttcctgaaccaccattgttagcccatttcgggcagcaaca

SEQ ID NO: 46935 - DNA, 120 bp, synthetic construct
  source 1..120: mol_type = other DNA
tactagatactgacagtactcacgtttgcaaggctgcgttggttgcattgatgaggtttctatctgttatcttttccagtattaacaaggcactagtttcatgaccctataattgtggca

SEQ ID NO: 46936 - DNA, 120 bp, synthetic construct
  source 1..120: mol_type = other DNA
aaactgaggcataaggtcatttagctgaaagatctaggactcacattcaggcaatccaactccacagccagtgttcttaaccactatgttataaggccatggtaaagtagactcctcaat

SEQ ID NO: 46937 - DNA, 120 bp, synthetic construct
  source 1..120: mol_type = other DNA
gttttctgtaaattctctcacaccagccagtagttaaaatttatttcttattgaaaataaaacctttttggggggtagggcccagacgggatctcactctgtcacccaggctggaatgca

SEQ ID NO: 46938 - DNA, 120 bp, synthetic construct
  source 1..120: mol_type = other DNA
accattggtagctgttaagccaccagtagttcctgaaaatttctaggcatatacaactgcacgcacaaaatacatacagttggctctctgtatccgtgggttctgcatccatcaattcaa

SEQ ID NO: 46939 - DNA, 120 bp, synthetic construct
  source 1..120: mol_type = other DNA
tggtatttttttattttattaaaacaattttttgagacagggtcttgctctgttgcccaagttgaagtgcagtggcatgatcatgactctctgcagtctcaacctcctgggctcaagtga

SEQ ID NO: 46940 - DNA, 120 bp, synthetic construct
  source 1..120: mol_type = other DNA
ttgtggaaaagtaatttttagaaaaacctgtaattgtgttccatcttttgtcagttcttttctctaatctagtagttttcaagtggattttgcccatcagcagatattgtatgtggcaat

SEQ ID NO: 46941 - DNA, 120 bp, synthetic construct
  source 1..120: mol_type = other DNA
gtgaacttttagtatctacagccagtgtttttctaaaacttggccatcatttcattttaattttaagaggttgttttctgttctgttggcatgcttccacttttctttccagctgtacaa

SEQ ID NO: 46942 - DNA, 120 bp, synthetic construct
  source 1..120: mol_type = other DNA
catcaatggcaaaatacagtatcttctttgttctagtatgagtactagtctctggccacttcactacactcatttctacttgccttagcgagtagaaatgggaaaaagagaagttaaacc

SEQ ID NO: 46943 - DNA, 120 bp, synthetic construct
  source 1..120: mol_type = other DNA
ctttatgcttccctacgtgaccttttatgagtctacctataaaagcgatgactgtgactgtgagcctgtaggaggccaaagaaaatctcttttaaccatgtagcagagttaacccatcaa

SEQ ID NO: 46944 - DNA, 120 bp, synthetic construct
  source 1..120: mol_type = other DNA
tctgttcactacacaatgatatgcatttgtgtttgtatacttaaccattgtagcaagcccagtgaagtgccgtatatccatgattgtctgctgtggctggatttgcatccatagatgctg

SEQ ID NO: 46945 - DNA, 120 bp, synthetic construct
  source 1..120: mol_type = other DNA
agatagcatcagaggcgtcctgagcaacaacaggaataggttcagtgctgtcacttaagactgtactctggttttcgaaatacgcccttctgtgatgcaacaattatttatcgaaactta

SEQ ID NO: 46946 - DNA, 120 bp, synthetic construct
  source 1..120: mol_type = other DNA
tagctgggattacaggcgcctgccaccacacccggcgattttttttgtatttttaggagagatgaggtttcaccatctaggcatggctggtcttgaactcctgacctcatgatccaccca

SEQ ID NO: 46947 - DNA, 120 bp, synthetic construct
  source 1..120: mol_type = other DNA
gtggttctttttgtgggtaggatttatgctgaactatatggcattggttaactacttctaagggactggctaatgtctcagttcaatatttacctattgagagtgcaaccactccatgca

SEQ ID NO: 46948 - DNA, 120 bp, synthetic construct
  source 1..120: mol_type = other DNA
cattttaccacttaaagtcaaaaatttccccagacagttgtagctcttggtaatctccttgggtctggaaacttttgaagagccaagctgacatttttcagctctttgggccactgggtt

SEQ ID NO: 46949 - DNA, 120 bp, synthetic construct
  source 1..120: mol_type = other DNA
cccttaaaagctgcaagatctaggggtgttcttccactactatttctgacatcaagatctaacaaagactgtaccaacacttccagtgcttgatggtgaccatgataggcctagaaataa

SEQ ID NO: 46950 - DNA, 120 bp, synthetic construct
  source 1..120: mol_type = other DNA
gaccatacccaccccataatgtgccatagctaaaaaagaagtaattcttttagcaaagaaatgcataaccgagccctgcttgaatatcaccacataccaggcattgtcctagctgtacaa

SEQ ID NO: 46951 - DNA, 120 bp, synthetic construct
  source 1..120: mol_type = other DNA
cattaaatataaaagacaatataaaaagaagagtttagccagttgtggtggctcacacctataatcccagcactttggggaggctgaggtggaaggatcatttgaacaggagtttggggc

SEQ ID NO: 46952 - DNA, 120 bp, synthetic construct
  source 1..120: mol_type = other DNA
gcctcagatcagtatgttttcactgtaccaagttgtcccgaatgggagagtttcgtgtaagaaattaaagtaacttctgaaaacctcctagagatagatatgaaatgcaaaagtggtggt

SEQ ID NO: 46953 - DNA, 120 bp, synthetic construct
  source 1..120: mol_type = other DNA
ctgataactaagtcctaaagactgcagggcttttgggagtctttaatatgctactagttgaatctccacaaggcggaaatagtctggcacctagaaagtgctcaagaaatgacagtgaaa

SEQ ID NO: 46954 - DNA, 120 bp, synthetic construct
  source 1..120: mol_type = other DNA
actagggcagcacattttaaaattcaccatcacaggcatattctccatattttctccctttctctccccagaaggccctgggggaagcctaaggatcactgtctgtcttttttttttttt

SEQ ID NO: 46955 - DNA, 120 bp, synthetic construct
  source 1..120: mol_type = other DNA
taacgtaggaaaatagttatttttgtagcagggctctaagtgctatattaaattgtcaacctcccttttcttgttttatatctacgctcgttgaattttatttccccttgaagggaagca

SEQ ID NO: 46956 - DNA, 120 bp, synthetic construct
  source 1..120: mol_type = other DNA
gtatcataaaaatgcaaatgaaacattcatgagaatcttcttgattcaaagtggatacctcaaaagtctgtcagacagctttttttttcatatgtgaaggctatcttttacacagtctct

SEQ ID NO: 46957 - DNA, 120 bp, synthetic construct
  source 1..120: mol_type = other DNA
tggggactcagggggaagttcccaaattgtacccaatatgtagtcttttatccatcatattttactccatgtgagggataaaagactacacattggatacagtgtacattgctcagggga

SEQ ID NO: 46958 - DNA, 120 bp, synthetic construct
  source 1..120: mol_type = other DNA
gggctagttatgacaaacccacagccaatatcatactgaatgggcaaaaactggaagcattccctttgaaaactggcacaagacagggatgccctctctcaccactcctattcaacatag

SEQ ID NO: 46959 - DNA, 120 bp, synthetic construct
  source 1..120: mol_type = other DNA
caagatggattaaatacttaaatattagacctaaaaccataaaaaaccctattagaaaacctagggcataccattcagggcataggcatgggcaaagacttcatgactaaaacaccaaaa

SEQ ID NO: 46960 - DNA, 120 bp, synthetic construct
  source 1..120: mol_type = other DNA
aaactatcacaagatcagaaaaccaaacactgcatgttctcactcatacgtgggagctgaacaaggagaacacatggaggggaacattacacacacaactctcactcttaagtggaagtt

SEQ ID NO: 46961 - DNA, 120 bp, synthetic construct
  source 1..120: mol_type = other DNA
ttttgatatttatgtacagctaaaattctttggagtcaagcataataaaaaaaagaagattaagctgggtgcagtggctcatgcctgtaatcccagcactttgggaagcggaggtgggcg

SEQ ID NO: 46962 - DNA, 120 bp, synthetic construct
  source 1..120: mol_type = other DNA
gctagaatatggcaaaccaaggactaaaccacctcaggtcttccctttatccattgttctatgttcccacaaagctttagaacagtggttaatcacttacagtggtaagttaactagggt

SEQ ID NO: 46963 - DNA, 120 bp, synthetic construct
  source 1..120: mol_type = other DNA
ataggcacagagaggttaagtaatttgctgaaggtccccatagtaaaaggcagagctagtatcaaacactgctcttacatatatatacacaataagcttaacaaggttgttgaatgtaag

SEQ ID NO: 46964 - DNA, 120 bp, synthetic construct
  source 1..120: mol_type = other DNA
ctgttgatgatggttatctcaggagagctggtatgaggggaatttcttccttataatcaggaaaaacagccctcaacctttccttctcttatatacatactacacacaggtgtggagaag

SEQ ID NO: 46965 - DNA, 120 bp, synthetic construct
  source 1..120: mol_type = other DNA
tgatggcactcgacaggctctctgggattttgatacttaataaagataggaaacagaggctcccattaacagtgctagattatgcacagtctcatttagttttcccagcaactctaacag

SEQ ID NO: 46966 - DNA, 120 bp, synthetic construct
  source 1..120: mol_type = other DNA
attgcttgtgaacctgggaggtggaagctgcagtaaactgagactgcagcactgcactccaccctgggcgacaaagcaagattccatctcaaaacgaaacaaaacaacaaacaacaaaaa

SEQ ID NO: 46967 - DNA, 120 bp, synthetic construct
  source 1..120: mol_type = other DNA
caccaacagtataaaagtgttcctatttctccacatcctctccagcacctgttgtttcctgactttttaatgattgccattctaactggtgtgagatggtatctcactgtggtttttatt

SEQ ID NO: 46968 - DNA, 120 bp, synthetic construct
  source 1..120: mol_type = other DNA
aaggatacttgtattccaacctctacccaatcttctgatgacattactcatatatctcctctctccctttccccatgatatagtcacggctgtagcctctaagaagtcaggtggaaaaaa

SEQ ID NO: 46969 - DNA, 120 bp, synthetic construct
  source 1..120: mol_type = other DNA
ccacagtacagaggtagcaatttctattcatgtctcagaagaagaacaaaaggtaagagaaaaaaatagaagaaacattaaaaaaaatgtaattaaccctgaattactttcaaccctctc

SEQ ID NO: 46970 - DNA, 120 bp, synthetic construct
  source 1..120: mol_type = other DNA
aggctagggctgtggtagggactcaagaagaaaactgtgggtgagaacgaatatttggaagttactgacttcagctgggactctcaatgaatcatgatcagtgtacaagatgctaaattg

SEQ ID NO: 46971 - DNA, 120 bp, synthetic construct
  source 1..120: mol_type = other DNA
gcgaccttggaagaacaagaaaaccagtcacatgctcacaatccatctctacaacttagactgtgctggtgtactcttggttcaacgtactcgtcctctgaaatcactgaaaatttttaa

SEQ ID NO: 46972 - DNA, 120 bp, synthetic construct
  source 1..120: mol_type = other DNA
tgaaacaagccagtcacagaagatcacatgttgggtgagtccatttataggaactgttcagaacaggcaaattttatagagatgaaaagtagattagtggttgcctagggctgagggaag

SEQ ID NO: 46973 - DNA, 120 bp, synthetic construct
  source 1..120: mol_type = other DNA
cattaacaccttcctccccaaattgtgacaaccaaaaatgtatctggacatttgcttagggagcaaaattcactaccctgtcaccccaccattgaaacatttccataatgcaacatgttc

SEQ ID NO: 46974 - DNA, 120 bp, synthetic construct
  source 1..120: mol_type = other DNA
aaatgtctagaaaactgcagttcacttccctttgtgcttgcctgtatcagttatcaacacctcggtaagtacttactttgcagtgtcagcaccacttgtaataagagtgttgatcagcag

SEQ ID NO: 46975 - DNA, 120 bp, synthetic construct
  source 1..120: mol_type = other DNA
cagctacgtggtattttatactctttaatattttattttcatgagctctgaaatcatgtattaaaaatacacaaaatgcgatgacaattcctcaataccattcatttggtggatgttttt

SEQ ID NO: 46976 - DNA, 120 bp, synthetic construct
  source 1..120: mol_type = other DNA
gtttgattccataatatgaatttttcaagtaaacaagccatccaattgacaagtaattttacagaagttctaatcttttggaggcagtacgagaaaggaaggggaggaggagagaggatg

SEQ ID NO: 46977 - DNA, 120 bp, synthetic construct
  source 1..120: mol_type = other DNA
ctttttttttttttttttttcccttaaagagatgggggtcttggtctgtcagccaggctggaatgcagtggtgtaatcatagttcactgcaaccttgaactctagggttcaagtgatctt

SEQ ID NO: 46978 - DNA, 120 bp, synthetic construct
  source 1..120: mol_type = other DNA
ccttccgaaggtagctgggactaaaggcacacacaactgggcctggttagaatcctttattataagcctatatgtggcactggatcaacatttttactttctacatactgataataaaac

SEQ ID NO: 46979 - DNA, 120 bp, synthetic construct
  source 1..120: mol_type = other DNA
atacagttgtcaggaatgaatatatattcttgctggatgaaaactcacagctatcaacatattgtgtgtaagagctggaagggatctgagaaatcaacatgggaaatgtgtttcaacaaa

SEQ ID NO: 46980 - DNA, 120 bp, synthetic construct
  source 1..120: mol_type = other DNA
ttgtcctgtagttgagagggcaatttaaagcaatggcctaattacagatggatttgttgctgttacagctgtcagaattgacccgtggcatcattaaaggcttcactgaagttaggtgag

SEQ ID NO: 46981 - DNA, 120 bp, synthetic construct
  source 1..120: mol_type = other DNA
accctggcctcccaaagtggtgggattacaggtaggagccactatgccagcccagaattttcacataattctaaaatccaaatgcttactcttgaaagtgattctaacaaaaaaaaacca

SEQ ID NO: 46982 - DNA, 120 bp, synthetic construct
  source 1..120: mol_type = other DNA
agcagcaaagtgcaaaggagtaaatcctttttcattcttttgattcacaatagcaccacagtctataagttcattcactacaacatcttgtccattatagcaggctacatgaagaggtgt

SEQ ID NO: 46983 - DNA, 120 bp, synthetic construct
  source 1..120: mol_type = other DNA
aggcgtgagaccctgtgcccagccttgtttttctatttctaataaataagggaatagtttatatgattagtgtgtagtaaagaatctgacctctcccaaagagaggtctgtcctttgccc

SEQ ID NO: 46984 - DNA, 120 bp, synthetic construct; identical to SEQ ID NO: 34950
  source 1..120: mol_type = other DNA

SEQ ID NO: 46985 - DNA, 120 bp, synthetic construct
  source 1..120: mol_type = other DNA
cttgcagaatcagtaaactaaaccatcttgggctcttatcttcgctcataagataaaatactattaagaataataagtccaggcgcagtggctcatgcccgtaatcccagcactttggga

SEQ ID NO: 46986 - DNA, 120 bp, synthetic construct; identical to SEQ ID NO: 34951
  source 1..120: mol_type = other DNA

SEQ ID NO: 46987 - DNA, 120 bp, synthetic construct; identical to SEQ ID NO: 27538
  source 1..120: mol_type = other DNA

SEQ ID NO: 46988 - DNA, 120 bp, synthetic construct; identical to SEQ ID NO: 27539
  source 1..120: mol_type = other DNA

SEQ ID NO: 46989 - DNA, 120 bp, synthetic construct; identical to SEQ ID NO: 27535
  source 1..120: mol_type = other DNA

SEQ ID NO: 46990 - DNA, 120 bp, synthetic construct; identical to SEQ ID NO: 27536
  source 1..120: mol_type = other DNA

SEQ ID NO: 46991 - DNA, 120 bp, synthetic construct; identical to SEQ ID NO: 27537
  source 1..120: mol_type = other DNA

SEQ ID NO: 46992 - DNA, 120 bp, synthetic construct; identical to SEQ ID NO: 27540
  source 1..120: mol_type = other DNA

SEQ ID NO: 46993 - DNA, 120 bp, synthetic construct; identical to SEQ ID NO: 27536
  source 1..120: mol_type = other DNA

SEQ ID NO: 46994 - DNA, 120 bp, synthetic construct; identical to SEQ ID NO: 27541
  source 1..120: mol_type = other DNA

SEQ ID NO: 46995 - DNA, 120 bp, synthetic construct; identical to SEQ ID NO: 27395
  source 1..120: mol_type = other DNA

SEQ ID NO: 46996 - DNA, 120 bp, synthetic construct; identical to SEQ ID NO: 27396
  source 1..120: mol_type = other DNA

SEQ ID NO: 46997 - DNA, 120 bp, synthetic construct
  source 1..120: mol_type = other DNA
ccctgatgcacatctccagcccagcccaatggagccctgagtaggtcacactataaagggtttttttttttgtttttgcttttatactttaagttttagggtacatgtgcacattgtgca

SEQ ID NO: 46998 - DNA, 120 bp, synthetic construct
  source 1..120: mol_type = other DNA
ctcccattttgtaggttgcctgttcactctgatggtagtttcttttgctgtgcagaagctctttagtttaattagatcccatttgtcaattttgtcttctgttgccattgcttttggtgt

SEQ ID NO: 46999 - DNA, 120 bp, synthetic construct
  source 1..120: mol_type = other DNA
accctttatttccttctcctgcctaattgccctggccagaacttccagcactatgttgaataggagtggtgagagagggcatccctgtcttgtgccagttttcaaagggaatgcttccag

SEQ ID NO: 47000 - DNA, 120 bp, synthetic construct
  source 1..120: mol_type = other DNA
tttattgcatctatttgattcttctctctttttttctttattagtcttgctagcggtctatcaattttgttgatcctttcaaaaaaccagctcctggattcattaattttttgaagggtt

SEQ ID NO: 47001 - DNA, 120 bp, synthetic construct
  source 1..120: mol_type = other DNA
gtttaaagtctgttttatcagagactaggattgcaacccctgcctttttttgttttccattggcttggtagatcttcctccatccttttattttgagcctatgtgtgcctctgcacgtga

SEQ ID NO: 47002 - DNA, 120 bp, synthetic construct
  source 1..120: mol_type = other DNA
ggttccattctccccatcactttcaggtacaccaatcagacgtagatttggtcttttcacatagtcccatatttcttggaggctttgctcatttctttttattcttttttttctagactt

SEQ ID NO: 47003 - DNA, 120 bp, synthetic construct
  source 1..120: mol_type = other DNA
tgccttgcagtttgatctcagactgctgtgctagcaatcagcgagactctgtggtcataggaccctctgagccaggtgtgggatataatctcgtggtgcgccgtttcttaagcccatcgg

SEQ ID NO: 47004 - DNA, 120 bp, synthetic construct; identical to SEQ ID NO: 27391
  source 1..120: mol_type = other DNA

SEQ ID NO: 47005 - DNA, 120 bp, synthetic construct
  source 1..120: mol_type = other DNA
ccaacaaagaaaattccatgaccagatggctctgctggtgaattctgcaaaatatttaaagaaaaattaacacaaaaaattagctgggcgtggtggcgggtgcctgtaatcccagcactc

SEQ ID NO: 47006 - DNA, 120 bp, synthetic construct
  source 1..120: mol_type = other DNA
cccaaaagtcattcaggagtaggttattcaatttccatgtaattgtattgttttgagtgattttgttagccttgatctgtaatcgtattgagctgtggtctgagagagcggttgttatga

SEQ ID NO: 47007 - DNA, 120 bp, synthetic construct
  source 1..120: mol_type = other DNA
catcatacagaatggggaaaagttgaaagcttttcaataagaactggaacaagacaaggatgcccacttttactactcttattcaacaaagtactggaagtcctagccggagcaatcagg

SEQ ID NO: 47008 - DNA, 120 bp, synthetic construct; identical to SEQ ID NO: 27395
  source 1..120: mol_type = other DNA

SEQ ID NO: 47009 - DNA, 120 bp, synthetic construct; identical to SEQ ID NO: 27394
  source 1..120: mol_type = other DNA

SEQ ID NO: 47010 - DNA, 120 bp, synthetic construct; identical to SEQ ID NO: 27397
  source 1..120: mol_type = other DNA

SEQ ID NO: 47011 - DNA, 120 bp, synthetic construct; identical to SEQ ID NO: 27398
  source 1..120: mol_type = other DNA

SEQ ID NO: 47012 - DNA, 120 bp, synthetic construct
  source 1..120: mol_type = other DNA
gtaacttgggtaaaggccaggagatcagaagttgggcaggtgcagtgagttataggtgggtagatagatataatttgagtatagcagataaggaaaatataaattggaggcccagggagt

SEQ ID NO: 47013 - DNA, 120 bp, synthetic construct
  source 1..120: mol_type = other DNA
cagcacttgttgtttcctgactttttaatgattgccattctgactggtgtgagatggtatctcatagtggttttgatttgcatttctctgatggccagtgatgatgagcattttttcatg

SEQ ID NO: 47014 - DNA, 120 bp, synthetic construct
  source 1..120: mol_type = other DNA
ccagagcaacttgcaatcctgcaacctccattcatggttaagtgccctatataggtgtaccattttttatctttttgtctttttttttgagacaaggtcttctgttgcctgggctggagt

SEQ ID NO: 47015 - DNA, 120 bp, synthetic construct; identical to SEQ ID NO: 11108
  source 1..120: mol_type = other DNA

SEQ ID NO: 47016 - DNA, 120 bp, synthetic construct
  source 1..120: mol_type = other DNA
atatatatgtacattcttaggtatttttgtttgtttgtttagaaggttttaataccaacagctttctaggtgtcgtcttcttcctcttcctctcccctccccccctcccctccctccctt

SEQ ID NO: 47017 - DNA, 120 bp, synthetic construct; identical to SEQ ID NO: 11110
  source 1..120: mol_type = other DNA

SEQ ID NO: 47018 - DNA, 120 bp, synthetic construct; identical to SEQ ID NO: 29746
  source 1..120: mol_type = other DNA

SEQ ID NO: 47019 - DNA, 120 bp, synthetic construct; identical to SEQ ID NO: 28160
  source 1..120: mol_type = other DNA

SEQ ID NO: 47020 - DNA, 120 bp, synthetic construct
  source 1..120: mol_type = other DNA
aatgcttttgaatatctgcctcatgtaaataggttattaataaaattcgttaacagcttcaaagttacatggaggctgggtgtggtggctcacgcctgtaatcctagcactttgggaggc

SEQ ID NO: 47021 - DNA, 120 bp, synthetic construct; identical to SEQ ID NO: 21903
  source 1..120: mol_type = other DNA

SEQ ID NO: 47022 - DNA, 120 bp, synthetic construct; identical to SEQ ID NO: 21904
  source 1..120: mol_type = other DNA

SEQ ID NO: 47023 - DNA, 120 bp, synthetic construct; identical to SEQ ID NO: 11338
  source 1..120: mol_type = other DNA

SEQ ID NO: 47024 - DNA, 120 bp, synthetic construct
  source 1..120: mol_type = other DNA
acaacttggagccatttggagaaaagaaatttagatctgcacctcacaccatgacatggtttggctgtgtccctaccaatctcatcttgaattgtagctcctataattcccacatgttgt

SEQ ID NO: 47025 - DNA, 120 bp, synthetic construct
  source 1..120: mol_type = other DNA
aataaacaaccccatcagaaagtgggtaaaggacatgaacagacacctctgaaaagaagacatttatgaggccaacgaacatgaaaaaatgctcatcatcactggtcattagagagatgc

SEQ ID NO: 47026 - DNA, 120 bp, synthetic construct; identical to SEQ ID NO: 10561
  source 1..120: mol_type = other DNA

SEQ ID NO: 47027 - DNA, 120 bp, synthetic construct
  source 1..120: mol_type = other DNA
aatgaagcgagaagtttagagaaaaaagagtaaaaagaaacaaagcctccaagaaatatgggactatgtgaaaagaccaaatctatgtctgattggtgtacctgaaagtgatggggagaa

SEQ ID NO: 47028 - DNA, 120 bp, synthetic construct
  source 1..120: mol_type = other DNA
gagacagaaagttaacaaggatatccaggaattgaactcagctctgcaccaagcagacctaatagacatctacagaactctccaccccaaatcaacagaatatacattcttctcagcacc

SEQ ID NO: 47029 - DNA, 120 bp, synthetic construct
  source 1..120: mol_type = other DNA
tagcattaggagatatacctaatgtaaatgatgagttaacgggtgcagcacatcaacatggcacatgtatacatatgttacaaacctgcacattatgcacatgttccctagaacttaaag

SEQ ID NO: 47030 - DNA, 120 bp, synthetic construct; identical to SEQ ID NO: 10148
  source 1..120: mol_type = other DNA

SEQ ID NO: 47031 - DNA, 120 bp, synthetic construct; identical to SEQ ID NO: 10149
  source 1..120: mol_type = other DNA

SEQ ID NO: 47032 - DNA, 120 bp, synthetic construct; identical to SEQ ID NO: 10150
  source 1..120: mol_type = other DNA

SEQ ID NO: 47033 - DNA, 120 bp, synthetic construct; identical to SEQ ID NO: 10151
  source 1..120: mol_type = other DNA

SEQ ID NO: 47034 - DNA, 120 bp, synthetic construct; identical to SEQ ID NO: 11255
  source 1..120: mol_type = other DNA

SEQ ID NO: 47035 - DNA, 120 bp, synthetic construct
  source 1..120: mol_type = other DNA
ggtaggaagaatcaatatcgtgaaaatggccatactgcccaaggtaatttacagattcaatgccatccccatcaagctaccaatgactttcttcacagaattggaaaaactattttaaag

SEQ ID NO: 47036 - DNA, 120 bp, synthetic construct
  source 1..120: mol_type = other DNA
aacagcaggtgctggagagaatgtggagaaataggaacacttttacactgttggtgggactgtaaactagttcaaccattgtggaagtcagtgtggcgattcctcagggatctagaacta

SEQ ID NO: 47037 - DNA, 120 bp, synthetic construct; identical to SEQ ID NO: 11303
  source 1..120: mol_type = other DNA

SEQ ID NO: 47038 - DNA, 120 bp, synthetic construct; identical to SEQ ID NO: 11304
  source 1..120: mol_type = other DNA

SEQ ID NO: 47039 - DNA, 120 bp, synthetic construct
  source 1..120: mol_type = other DNA
tgactactgagtgtccttcactcatccccaccctcctgaaggcgtccaattaaagactgaaatgaagacctctttgcatgactcaattacaagtttaggaataagactctctctctctat

SEQ ID NO: 47040 - DNA, 120 bp, synthetic construct; identical to SEQ ID NO: 10913
  source 1..120: mol_type = other DNA

SEQ ID NO: 47041 - DNA, 120 bp, synthetic construct
  source 1..120: mol_type = other DNA
ctgggcagccgggcagaggggctcctcacatcccagacgatgggtggccaggcagagacgttcctcacttcctagacggggtggcggccgggcagaggctgcaatctcagcactttggga

SEQ ID NO: 47042 - DNA, 120 bp, synthetic construct
  source 1..120: mol_type = other DNA
catggtatagtaatgaactgccctgtgctttgcatctgatcacttcttgacccgatttcactatgaatctcaacctgcaaaagttcccattctcccatcctagagttcagagtttaaagg

SEQ ID NO: 47043 - DNA, 120 bp, synthetic construct
  source 1..120: mol_type = other DNA
aagcgatgcctgggccgcattctgaaagctgggtgggggtgggcaggcaggtggagagggagcagcagatgacaacagcagggtcagaggcaaggaagagcgtggtgaggcgggaattag

SEQ ID NO: 47044 - DNA, 120 bp, synthetic construct
  source 1..120: mol_type = other DNA
ccgccttggcatcccaaagtgttgggattataggtgtgagccatttgtgcccggcctcatttattcttcatctttgcattcctggtacttggcatgatgctttgcatataatagatgtta

SEQ ID NO: 47045 - DNA, 120 bp, synthetic construct
  source 1..120: mol_type = other DNA
gacccacacagttcaaatccatgctgttcaaaggtcaactgtatatacatgtatctgctcatctgagaaaaaaatatgcacacaggaagaataaaccagagatgaatgagattcattatc

SEQ ID NO: 47046 - DNA, 120 bp, synthetic construct
  source 1..120: mol_type = other DNA
agtgagccaccacgcccagcctattctttactaaaaacaactgggcttcttggataaatggctggctccagggtgaagtagggaaagaacaagatgatcctggaacatcttattctatca

SEQ ID NO: 47047 - DNA, 120 bp, synthetic construct
  source 1..120: mol_type = other DNA
tcctcacttcccagtaggggcggccgggcagagggctgaccccccccacctccctcctggacggggcggctggccgggcagaggggctcctcacttcccagtaggggcggccgggcagag

SEQ ID NO: 47048 - DNA, 120 bp, synthetic construct
  source 1..120: mol_type = other DNA
gcgcgcgcccaggcagttggcaggctgaggcaggagaatcaggcagcagtaccgtccagcttcagctccgcatcagagggagaccgtggagagagggagagggagaccgtggggagaggg

SEQ ID NO: 47049 - DNA, 120 bp, synthetic construct; identical to SEQ ID NO: 11876
  source 1..120: mol_type = other DNA

SEQ ID NO: 47050 - DNA, 120 bp, synthetic construct; identical to SEQ ID NO: 11877
  source 1..120: mol_type = other DNA

SEQ ID NO: 47051 - DNA, 120 bp, synthetic construct
  source 1..120: mol_type = other DNA
aaaattagacgaatggataactagaataatcaatgcagagaagtgcttaaaggagctgatggagctgaaagccgaggctcgagaactacgtgaagaatgcagaagcctcaggagccgacg

SEQ ID NO: 47052 - DNA, 120 bp, synthetic construct
  source 1..120: mol_type = other DNA
aacatggaaaggaacaaccggtaccagccactgcaaaatcatgccaaaatgtaaagaccatcaaggctaggaagaaactgcatcaactaacgagcaaaataaccagctaacatcataatg

SEQ ID NO: 47053 - DNA, 120 bp, synthetic construct
  source 1..120: mol_type = other DNA
cagaaataaagacgttctttgaaaccaacgagaacaaaggcacaacataccagaatctctgggacacattcaaagcagtgtgtagagggaaatttatagcactaaatgcccacaagagaa

SEQ ID NO: 47054 - DNA, 120 bp, synthetic construct
  source 1..120: mol_type = other DNA
aaaatgatgagttcatgacctttgtaggaacatggataaaactggaaaccgtcattcttagcaagctatggcaagaacaaaaaaccaaacaccacatgttgtcactcataggtgggaatt

SEQ ID NO: 47055 - DNA, 120 bp, synthetic construct
  source 1..120: mol_type = other DNA
ggaattaaacaatgagaacacttggacacagggtggggaacatcacacaccagggcctgtcgtggggtggggggaggggggagggatagcattaggagatatacctaatgtaaacgatga

SEQ ID NO: 47056 - DNA, 120 bp, synthetic construct
  source 1..120: mol_type = other DNA
gcacatataccatggaatactatgcagccataaaaaatgatgagttcatgtcgtttgtagggacatggatgaagctggaaaccatcattctcagcatacttttacaaggacaaaaaacca

SEQ ID NO: 47057 - DNA, 120 bp, synthetic construct
  source 1..120: mol_type = other DNA
aggcctttgagaggtgatttaggtcattaggccttcatgaatgggattagtgcctttatttttattttattattattttttgagtcggagtttcgctcttgttgcccaggctggagtgca

SEQ ID NO: 47058 - DNA, 120 bp, synthetic construct
  source 1..120: mol_type = other DNA
taatgtcaacactttgggaggccaaggtgggtggatcacctgaggtcaggagttccagatcagcctgaccaacatggtgaaactctgtcactactaaaaaaaaaaaaaatacaaaaaaaa

SEQ ID NO: 47059 - DNA, 120 bp, synthetic construct
  source 1..120: mol_type = other DNA
ttgcagggactgagatcgtgccactgcattccagcctagatgacagagtgagactctgtctcaaaaaaaaaaaggagaaataataaaatactgtgtatgcattcaagccagacaagagga

SEQ ID NO: 47060 - DNA, 120 bp, synthetic construct
  source 1..120: mol_type = other DNA
tggagatctgagaacgggcagactgcctcctcaagtgggtccctgacccctgacccccgagcagcctaactgggaggcaccccccggcaggggtacactgacacctcacacggcagggta

SEQ ID NO: 47061 - DNA, 120 bp, synthetic construct
  source 1..120: mol_type = other DNA
agaaaccctacaagccagaagagagtgggggccaatattcaacattcttaaagaaaagaatcttcaacccagaatttcatatccagccaaactaagcttcgtaagtgaaggagaaataaa

SEQ ID NO: 47062 - DNA, 120 bp, synthetic construct
  source 1..120: mol_type = other DNA
tatacatttttttagcaccacaccacacctattccaaaattgaccacatagttggaagtaaagctctcctcagcaaatgtaaaagaacagaaattataacaaactatctctcagaccaca

SEQ ID NO: 47063 - DNA, 120 bp, synthetic construct
  source 1..120: mol_type = other DNA
aaggctgattcaatatacgcaaatcaataaatgtaatccagcatataaacaaagccaaagacaaaaaccacatgattatctcaatagatgcagaaaaagcctttgacaaaattcaacaac

SEQ ID NO: 47064 - DNA, 120 bp, synthetic construct
  source 1..120: mol_type = other DNA
catggtactggtaccaaaacagagatatagatcaatggaacagaacagagccctcagaaataacgccacatatctacaattatctgatctttgacaaacctgagaaaaacaagcaatggg

SEQ ID NO: 47065 - DNA, 120 bp, synthetic construct
  source 1..120: mol_type = other DNA
aatacgaagacttggaaccaacccaaatgtccaacagtgatagactagattaagaaaatgtggcacatatacaccatggaatactatgcagccataaaaaatgatgagttcatgtccttt

SEQ ID NO: 47066 - DNA, 120 bp, synthetic construct; identical to SEQ ID NO: 3475
  source 1..120: mol_type = other DNA

SEQ ID NO: 47067 - DNA, 120 bp, synthetic construct
  source 1..120: mol_type = other DNA
atcctttgccccctttttgatgcggttgtttttttcttgtaaattttttggagttcattgtagattctggatattagccatttgtcagatggatagattgcaaaaattttctcccattct

SEQ ID NO: 47068 - DNA, 120 bp, synthetic construct
  source 1..120: mol_type = other DNA
atgatttggctctgtttgtctgttattggtgtataagaatgcttgtgatttttgcacattgattttgtatcctgagactttgctgaagttgcctatcagcttaaggagattttgagctga

SEQ ID NO: 47069 - DNA, 120 bp, synthetic construct
  source 1..120: mol_type = other DNA
agcagcctaactgggaggcacccccaagcagtggtagactgacacctcacacagccgggtatgccaacagatccgcagctgagggtcctgtctgttagaaggaaaactaacagaaaggac

SEQ ID NO: 47070 - DNA, 120 bp, synthetic construct
  source 1..120: mol_type = other DNA
agtgaaggagaaatcaaatcctttacagacaagcaaatgctgagagattttgtcaccaccaggcctgccctaaaggagctcctgaaggaagcactaaacatggaaaggaacaaccggtac

SEQ ID NO: 47071 - DNA, 120 bp, synthetic construct
  source 1..120: mol_type = other DNA
gaagtaaagcactcctcagcaaatgtaaaagaacagaaactataacaaatggtctctcagaccacagtgcaatcaaactagaactcaggattaagaatctcactcaaaaccgctcaacta

SEQ ID NO: 47072 - DNA, 120 bp, synthetic construct
  source 1..120: mol_type = other DNA
attgatgcaaaaatcctcaataaaatactggcaaaccaaatccagcagcacatgaaaaagcttatccaccatgatgaagtggacttcatccctgggatgcaaggctggttcaatatacgc

SEQ ID NO: 47073 - DNA, 120 bp, synthetic construct
  source 1..120: mol_type = other DNA
tgtagaaggcagtgtggcgattcctcagggatctagaactagaaataccatttgacccagccatcccattactgggtatatacccaaaggactataaatcatgctgctataaagacacat

SEQ ID NO: 47074 - DNA, 120 bp, synthetic construct
  source 1..120: mol_type = other DNA
catgcatgtgtatgcacatgcatgtgtgtatgtgtgtatacacatgcatgtgtatgtgtgtgtgcacatgcatgtgtatgtgtgtgtacacatgcatgtgtatgtgtgtacacatgcatg

SEQ ID NO: 47075 - DNA, 120 bp, synthetic construct
  source 1..120: mol_type = other DNA
tacacatatacgtgtatatatgtgtacacacacatacgtgtatatatgtgtacacacacatacgtgtatatatgtgtacacacacatacgtgtatatatgtgtatacacatatacgtgta

SEQ ID NO: 47076 - DNA, 120 bp, synthetic construct; identical to SEQ ID NO: 13169
  source 1..120: mol_type = other DNA

SEQ ID NO: 47077 - DNA, 120 bp, synthetic construct
  source 1..120: mol_type = other DNA
ctagatgaggagttagtgggtgcagcacaccagcgtggcacatgtatacatatgtaactaacctgcacaatgtgcacatgtaccctaaaacttaaagtataataataaaagaaaaaaaaa

SEQ ID NO: 47078 - DNA, 120 bp, synthetic construct; identical to SEQ ID NO: 13170
  source 1..120: mol_type = other DNA

SEQ ID NO: 47079 - DNA, 120 bp, synthetic construct; identical to SEQ ID NO: 13171
  source 1..120: mol_type = other DNA

SEQ ID NO: 47080 - DNA, 120 bp, synthetic construct; identical to SEQ ID NO: 13172
  source 1..120: mol_type = other DNA

SEQ ID NO: 47081 - DNA, 120 bp, synthetic construct
  source 1..120: mol_type = other DNA
gttgtggggtggggggagggagagggatggcattaggagatatacctaatgctaaatgacgagttaatgggtgcagcacaccagcatggcacatgtgtacatatgtaactaaactgcaca

SEQ ID NO: 47082 - DNA, 120 bp, synthetic construct
  source 1..120: mol_type = other DNA
cttaaaaaacaccgcaccacgagattatatgccgcacctggcttggagggtcctacgcccacggactcttgctgattgctagcacagcagtctgagatcaaactgcaaggcggcagcgag

SEQ ID NO: 47083 - DNA, 120 bp, synthetic construct
  source 1..120: mol_type = other DNA
taatgtataactagaataaccaatacagagaagtgcttaaaggaggtgatggagctgaaaaccaaggctcgagaactacatgaagaatgcaaaagcctcaggagccgatgcgatcaactg

SEQ ID NO: 47084 - DNA, 120 bp, synthetic construct
  source 1..120: mol_type = other DNA
caaattggataaagagtcaagacccatcaatgtgctgtattcaggaaacccatctcacgtgcagagacacacataggctcaaaataaaaggatggaggaagatctaccaagcaaatggaa

SEQ ID NO: 47085 - DNA, 120 bp, synthetic construct
  source 1..120: mol_type = other DNA
taaaaaagcaagcgcaaacacattcaaaagctagcagaaggcaagaaataactaaaatcagagcagaactgaaggaaatagagacacaaaaaacccttcaaaaaattaatgaatccagga

SEQ ID NO: 47086 - DNA, 120 bp, synthetic construct
  source 1..120: mol_type = other DNA
tcaataaattagatattgataggacatatctcaaaataataagagctatttatgacaaacccacagccaatatcatactgaatgggcaaaaactggaagcattccctttgaaaactggca

SEQ ID NO: 47087 - DNA, 120 bp, synthetic construct
  source 1..120: mol_type = other DNA
cacactacctgacttcaaactatactacaaggctacagtaaccaaaacagcatggtactggtaccaaaacagagatatagatcaatggaacagaacagagccctcagaaataatgcagca

SEQ ID NO: 47088 - DNA, 120 bp, synthetic construct
  source 1..120: mol_type = other DNA
aggaacacttttacactgttggtgggactgtaaactagttcaaccattgtggaagtcagtgtggcgattcctcagggatctaaaactagaaataccatttgacccagccatcccattact

SEQ ID NO: 47089 - DNA, 120 bp, synthetic construct; identical to SEQ ID NO: 13114
  source 1..120: mol_type = other DNA

SEQ ID NO: 47090 - DNA, 120 bp, synthetic construct
  source 1..120: mol_type = other DNA
agctgggattgcgccactgcactccagactgggcaagagtgagtgagactccatcaaaaaaaaaaaaaaaaaaaagaagaagaagaagaagaagaagaagaagaagtgcttgggtttacc

SEQ ID NO: 47091 - DNA, 120 bp, synthetic construct
  source 1..120: mol_type = other DNA
atatgccgtgtttggttttttgttcttgtgatagtttactgagaatgatgatttccaatttcatccatgtccctacaaaggacacaaactcatcattttttatggctgcatagtattcca

SEQ ID NO: 47092 - DNA, 120 bp, synthetic construct
  source 1..120: mol_type = other DNA
cctttccccattgcttgtttttctcaggtttgtcaaagatcagatagttgtagatatgcagcattatttctgagggctctgttctgttccattgatctatatctctgttttggtaccagt

SEQ ID NO: 47093 - DNA, 120 bp, synthetic construct
  source 1..120: mol_type = other DNA
tacctaatttattgagagtttttagcatgaagggttgttgaattttgtcaaaggctttttctgcatctattgagataatcatgtggtttttgtctttgcctctgtttatatgctggatta

SEQ ID NO: 47094 - DNA, 120 bp, synthetic construct
  source 1..120: mol_type = other DNA
ccctctacacactgctttgaatgtgtcccagagattctggtatgttgtgtctttgttctcgttggtttcaaagaacatctttatttctgccttcatttcgttatgtacccagtagtcatt

SEQ ID NO: 47095 - DNA, 120 bp, synthetic construct
  source 1..120: mol_type = other DNA
ttggagaatttagtccatttacatttaaagttaatattgttatgtgtgcatttgatcctgtcattatgatgttagctggtgattttgctcgttagttgatgcagtttcttcctagtctcg

SEQ ID NO: 47096 - DNA, 120 bp, synthetic construct
  source 1..120: mol_type = other DNA
tggtttgaatgtcctcccatagctcagagtaatttgatcgtctgaagccttcttctctcagctcgtcaaagtcattctccacccagctttgttccgttgctggtgaggaactgcgttcct

SEQ ID NO: 47097 - DNA, 120 bp, synthetic construct
  source 1..120: mol_type = other DNA
tttgactcggaaagggaactccctgacccctcgcgcttcccaagtgaggcaatccctcgccctgcttctgctcgcgcacggtgcgcgcacccactggcctgcgcccactgtctggcactc

SEQ ID NO: 47098 - DNA, 120 bp, synthetic construct; identical to SEQ ID NO: 13029
  source 1..120: mol_type = other DNA

SEQ ID NO: 47099 - DNA, 120 bp, synthetic construct
  source 1..120: mol_type = other DNA
acaatgttacaacaaagtagatttttctattctcactatgagacaacgtttaaggagagatactcttttttttttttgagacagagccttgctctgtcgcccaggctagagtgcagtggc

SEQ ID NO: 47100 - DNA, 120 bp, synthetic construct; identical to SEQ ID NO: 14111
  source 1..120: mol_type = other DNA

SEQ ID NO: 47101 - DNA, 120 bp, synthetic construct; identical to SEQ ID NO: 14112
  source 1..120: mol_type = other DNA

SEQ ID NO: 47102 - DNA, 120 bp, synthetic construct; identical to SEQ ID NO: 14113
  source 1..120: mol_type = other DNA

SEQ ID NO: 47103 - DNA, 120 bp, synthetic construct; identical to SEQ ID NO: 14114
  source 1..120: mol_type = other DNA

SEQ ID NO: 47104 - DNA, 120 bp, synthetic construct; identical to SEQ ID NO: 14115
  source 1..120: mol_type = other DNA

SEQ ID NO: 47105 - DNA, 120 bp, synthetic construct; identical to SEQ ID NO: 14116
  source 1..120: mol_type = other DNA

SEQ ID NO: 47106 - DNA, 120 bp, synthetic construct; identical to SEQ ID NO: 14117
  source 1..120: mol_type = other DNA

SEQ ID NO: 47107 - DNA, 120 bp, synthetic construct
  source 1..120: mol_type = other DNA
gtttgtcctgttttgctttgtgtagagtctgatggagccaccagtgcccagcgcggccagaacccccccacccccctccccgacacaaacaggctcccagtggccggaaaaacaaatctc

SEQ ID NO: 47108 - DNA, 120 bp, synthetic construct
  source 1..120: mol_type = other DNA
gtgatttttgcacattgattttgtatcctgagactttgctgaagttgtctaccagcttaaggagagtttgggctgagacaatggtgttttctagatatacaatcatgtcatctgcaaaca

SEQ ID NO: 47109 - DNA, 120 bp, synthetic construct
  source 1..120: mol_type = other DNA
cttgaacctgggaggcggaggttgcagtgagccaagattgaaccactgcactccagcctaggcaacaagagcgaaacttcgtctcaaataataataataataataataattattattatt

SEQ ID NO: 47110 - DNA, 120 bp, synthetic construct
  source 1..120: mol_type = other DNA
tcccagacggggtctcggccgggcagaggcgctcctcacatcccagatggggcggcggggcagaggcgctccccacatctcagatgatgggcggccgggcagagacgctcctcacttcct

SEQ ID NO: 47111 - DNA, 120 bp, synthetic construct; identical to SEQ ID NO: 15590
  source 1..120: mol_type = other DNA

SEQ ID NO: 47112 - DNA, 120 bp, synthetic construct; identical to SEQ ID NO: 17041
  source 1..120: mol_type = other DNA

SEQ ID NO: 47113 - DNA, 120 bp, synthetic construct; identical to SEQ ID NO: 16454
  source 1..120: mol_type = other DNA

SEQ ID NO: 47114 - DNA, 120 bp, synthetic construct
  source 1..120: mol_type = other DNA
aaactaccatcagagtgaacaggcaacctacaaaatggaagaaaattttcgcaacctactcatctgacaaagggctaatatccagaatctacaatgaactcaaacaaatttacaagaaaa

SEQ ID NO: 47115 - DNA, 120 bp, synthetic construct
  source 1..120: mol_type = other DNA
ccatttaagcaaacattcctggtgtcatttatcttgggtcacccacccaggacatttagggtgcccagggcccaggtgaggtatggtgcccagccggccatggcctgtacagcacttcta

SEQ ID NO: 47116 - DNA, 120 bp, synthetic construct
  source 1..120: mol_type = other DNA
aagccaatttaattccttgatccattttcaatacaacaccaagtggtttgaaaaacacttttccagccgggcacagtggctcacgcctataatctcaacactctgggaggccgaggtggg

SEQ ID NO: 47117 - DNA, 120 bp, synthetic construct; identical to SEQ ID NO: 18306
  source 1..120: mol_type = other DNA

SEQ ID NO: 47118 - DNA, 120 bp, synthetic construct; identical to SEQ ID NO: 18307
  source 1..120: mol_type = other DNA

SEQ ID NO: 47119 - DNA, 120 bp, synthetic construct; identical to SEQ ID NO: 18308
  source 1..120: mol_type = other DNA

SEQ ID NO: 47120 - DNA, 120 bp, synthetic construct; identical to SEQ ID NO: 17236
  source 1..120: mol_type = other DNA

SEQ ID NO: 47121 - DNA, 120 bp, synthetic construct; identical to SEQ ID NO: 17237
  source 1..120: mol_type = other DNA

SEQ ID NO: 47122 - DNA, 120 bp, synthetic construct
  source 1..120: mol_type = other DNA
gaaacacatttaaaccttgccctgccacagaattattttgcgggggggggggggggggggaagatgtactttttgaatatgtgtacatcaaaaccaaaaagttaacttttactttttcct

SEQ ID NO: 47123 - DNA, 120 bp, synthetic construct
  source 1..120: mol_type = other DNA
tgggaagggttccaacaaggtcttgtatcttaatcgtgagagattccttctcaacttccactagctcagctttagttctgaccagtggtccccttcttcgaagagaatgctcagcctgac

SEQ ID NO: 47124 - DNA, 120 bp, synthetic construct
  source 1..120: mol_type = other DNA
gggcggctgacctttcagcagctcctgaaactcgtgaagcagagtctccgcggtcacttctgcacctggaggtcctgggggaccgaagagatcccgctggggggagagagaagcaggtga

SEQ ID NO: 47125 - DNA, 120 bp, synthetic construct
  source 1..120: mol_type = other DNA
atccgctatccgcttgctgtcctgttgaccaccaccgcaatgtgctgaagggacccggcgccctggaggggcctgtacctcagcctatctgggggctgagagccagaggcaacagagagc

SEQ ID NO: 47126 - DNA, 120 bp, synthetic construct; identical to SEQ ID NO: 15785
  source 1..120: mol_type = other DNA

SEQ ID NO: 47127 - DNA, 120 bp, synthetic construct; identical to SEQ ID NO: 15786
  source 1..120: mol_type = other DNA

SEQ ID NO: 47128 - DNA, 120 bp, synthetic construct; identical to SEQ ID NO: 15787
  source 1..120: mol_type = other DNA

SEQ ID NO: 47129 - DNA, 120 bp, synthetic construct; identical to SEQ ID NO: 13565
  source 1..120: mol_type = other DNA

SEQ ID NO: 47130 - DNA, 120 bp, synthetic construct
  source 1..120: mol_type = other DNA
aattttattttcttatttttctttttcttttttttttttagagtcagggtattgctatgttggccaggttggtcttgaactcttggcctcaggcagtcctcctgccgcggtctcccaagg

SEQ ID NO: 47131 - DNA, 120 bp, synthetic construct; identical to SEQ ID NO: 13563
  source 1..120: mol_type = other DNA

SEQ ID NO: 47132 - DNA, 120 bp, synthetic construct; identical to SEQ ID NO: 13563
  source 1..120: mol_type = other DNA

SEQ ID NO: 47133 - DNA, 120 bp, synthetic construct; identical to SEQ ID NO: 13564
  source 1..120: mol_type = other DNA

SEQ ID NO: 47134 - DNA, 120 bp, synthetic construct; identical to SEQ ID NO: 3599
  source 1..120: mol_type = other DNA

SEQ ID NO: 47135 - DNA, 120 bp, synthetic construct
  source 1..120: mol_type = other DNA
cttcaacctgctgacggatagcacgccgacctggagctcaggggggcctgttctgagcacaaggacttgagtgtagtcagcagagccccactcacctgatgttctctgccagcttgattg

SEQ ID NO: 47136 - DNA, 120 bp, synthetic construct; identical to SEQ ID NO: 12643
  source 1..120: mol_type = other DNA

SEQ ID NO: 47137 - DNA, 120 bp, synthetic construct; identical to SEQ ID NO: 12644
  source 1..120: mol_type = other DNA

SEQ ID NO: 47138 - DNA, 120 bp, synthetic construct; identical to SEQ ID NO: 12645
  source 1..120: mol_type = other DNA

SEQ ID NO: 47139 - DNA, 120 bp, synthetic construct; identical to SEQ ID NO: 12646
  source 1..120: mol_type = other DNA

SEQ ID NO: 47140 - DNA, 120 bp, synthetic construct
  source 1..120: mol_type = other DNA
ctttgcagggacacggataaagctggaaaccatcattctcagcaagctatcacaaggacagaaaaccgaacaccacatgttctcactcataggtgggattgaacaatgagaacactttga

SEQ ID NO: 47141 - DNA, 120 bp, synthetic construct; identical to SEQ ID NO: 7451
  source 1..120: mol_type = other DNA

SEQ ID NO: 47142 - DNA, 120 bp, synthetic construct
  source 1..120: mol_type = other DNA
ttttgtattttttgtagagacggcgtttcaccatgttgcccaggctggtctcaaactctcgggctcaagcagtcctcccacctcagcttcccaaagggctgggattacaggtgtgagcca

SEQ ID NO: 47143 - DNA, 120 bp, synthetic construct; identical to SEQ ID NO: 7057
  source 1..120: mol_type = other DNA

SEQ ID NO: 47144 - DNA, 120 bp, synthetic construct; identical to SEQ ID NO: 7058
  source 1..120: mol_type = other DNA

SEQ ID NO: 47145 - DNA, 120 bp, synthetic construct; identical to SEQ ID NO: 7798
  source 1..120: mol_type = other DNA

SEQ ID NO: 47146 - DNA, 120 bp, synthetic construct
  source 1..120: mol_type = other DNA
gtattacccagtaatgggatggctgggtcaaatggtatttctagttctagatccctgaggaatcaccacactgtcttccacaatggttgaactagtttacagtcccaccaacagtgtaaa

SEQ ID NO: 47147 - DNA, 120 bp, synthetic construct
  source 1..120: mol_type = other DNA
ttggcttaggattgacttggcaatgagggctcttttttggttccatgtgaactttaaagtagttttttccaattctgtgaagaaagtcattggtagcttgatggggatggcattgaatct

SEQ ID NO: 47148 - DNA, 120 bp, synthetic construct
  source 1..120: mol_type = other DNA
cggtttgccagtattttattgaggatttttgcatcaatgttcatcaaggatattggtctaaaattctctttttttgttgtttctctgccaggctttggtatcaggatgatgctggcctca

SEQ ID NO: 47149 - DNA, 120 bp, synthetic construct
  source 1..120: mol_type = other DNA
tggaataggtgtggtgtggtgctgaagaaaatgtatattctgttgatttggggtggagagttctgtagatgtctgttatgtctgcttggtgtagagctgagttcaattcctgggtatcct

SEQ ID NO: 47150 - DNA, 120 bp, synthetic construct
  source 1..120: mol_type = other DNA
cgaatattggcccccactctcttctggcttgtagagtttctgcctagagatctgctgttagtctgatgggcttccctttgtgggtaacccgacctttctctctggctgcccttaacattt

SEQ ID NO: 47151 - DNA, 120 bp, synthetic construct; identical to SEQ ID NO: 6796
  source 1..120: mol_type = other DNA

SEQ ID NO: 47152 - DNA, 120 bp, synthetic construct; identical to SEQ ID NO: 6797
  source 1..120: mol_type = other DNA

SEQ ID NO: 47153 - DNA, 120 bp, synthetic construct
  source 1..120: mol_type = other DNA
taagggaataaaagcaggctgccggagccagcagcagcaacccactcgggtccccttccacactatggaagctttgttctttcgctctttgcaataaatcttgctgctgctcactctttg

SEQ ID NO: 47154 - DNA, 120 bp, synthetic construct; identical to SEQ ID NO: 2707
  source 1..120: mol_type = other DNA

SEQ ID NO: 47155 - DNA, 120 bp, synthetic construct; identical to SEQ ID NO: 6992
  source 1..120: mol_type = other DNA

SEQ ID NO: 47156 - DNA, 120 bp, synthetic construct; identical to SEQ ID NO: 6993
  source 1..120: mol_type = other DNA

SEQ ID NO: 47157 - DNA, 120 bp, synthetic construct
  source 1..120: mol_type = other DNA
tcctaacttttgaagacgttgaatgattttcaccaaattcacaatagcgcaatgaacattttagattcagtctcgatttagtgtgcaaaacgagagtcaatttgtttccaggtggacata

SEQ ID NO: 47158 - DNA, 120 bp, synthetic construct; identical to SEQ ID NO: 7520
  source 1..120: mol_type = other DNA

SEQ ID NO: 47159 - DNA, 120 bp, synthetic construct; identical to SEQ ID NO: 7659
  source 1..120: mol_type = other DNA

SEQ ID NO: 47160 - DNA, 120 bp, synthetic construct
  source 1..120: mol_type = other DNA
ggaattgaacaatgagatcacatggacacaggaaggggaatatcacactctggggacttttgtggggtggggggaggggggagggatagcatcaggagatatacctaatgatagataacg

SEQ ID NO: 47161 - DNA, 120 bp, synthetic construct; identical to SEQ ID NO: 7437
  source 1..120: mol_type = other DNA

SEQ ID NO: 47162 - DNA, 120 bp, synthetic construct
  source 1..120: mol_type = other DNA
cccagaaacctgaccagaggctaatcgggacagtaacagtgtccacccatagggttgttgtaaggactatataaagacatacagatcgcttgctattacacgtagaggtgtttgcaaatg

SEQ ID NO: 47163 - DNA, 120 bp, synthetic construct
  source 1..120: mol_type = other DNA
tctcatttcacacaacagcccccagtggaacaaggagggtctgagggttaagtgactcgcctaaggttacacccagcaggtgcataaaacctacagtaacaacaacaacaacaattgtac

SEQ ID NO: 47164 - DNA, 120 bp, synthetic construct; identical to SEQ ID NO: 22947
  source 1..120: mol_type = other DNA

SEQ ID NO: 47165 - DNA, 120 bp, synthetic construct; identical to SEQ ID NO: 22948
  source 1..120: mol_type = other DNA

SEQ ID NO: 47166 - DNA, 120 bp, synthetic construct; identical to SEQ ID NO: 22949
  source 1..120: mol_type = other DNA

SEQ ID NO: 47167 - DNA, 120 bp, synthetic construct
  source 1..120: mol_type = other DNA
ttctctctttctttcttctttctttctctctctctctcccctccctctcctccttagcccccctcctttctcccttctctctctttctttttgagacagggtctcactctatcacccagg

SEQ ID NO: 47168 - DNA, 120 bp, synthetic construct
  source 1..120: mol_type = other DNA
ctaccaacatcccatgtaagtgtacaaaattttttttttcttttacaggcagggtttcactttgtcacccaggctggagtgtagtggacaaccatagctcactgtagtctcaaacttctg

SEQ ID NO: 47169 - DNA, 120 bp, synthetic construct; identical to SEQ ID NO: 22950
  source 1..120: mol_type = other DNA

SEQ ID NO: 47170 - DNA, 120 bp, synthetic construct; identical to SEQ ID NO: 22951
  source 1..120: mol_type = other DNA

SEQ ID NO: 47171 - DNA, 120 bp, synthetic construct
  source 1..120: mol_type = other DNA
agcttccactggcgcttgcaggtctttttttttttttttttttttttttttttctgagagggagtctctctctgttgcccaggctggagtgcagtggcacgatctcggctcactgcaact

SEQ ID NO: 47172 - DNA, 120 bp, synthetic construct; identical to SEQ ID NO: 22952
  source 1..120: mol_type = other DNA

SEQ ID NO: 47173 - DNA, 120 bp, synthetic construct; identical to SEQ ID NO: 22953
  source 1..120: mol_type = other DNA

SEQ ID NO: 47174 - DNA, 120 bp, synthetic construct; identical to SEQ ID NO: 22954
  source 1..120: mol_type = other DNA

SEQ ID NO: 47175 - DNA, 120 bp, synthetic construct; identical to SEQ ID NO: 22955
  source 1..120: mol_type = other DNA

SEQ ID NO: 47176 - DNA, 120 bp, synthetic construct
  source 1..120: mol_type = other DNA
cctcaggtttttggcctggcatcttgaatctcctcccaggcaacaaaccacagagggcctggcattctcctgtgaaaagcagggcggaaaggaaacacagagaacaaacccacagacaac

SEQ ID NO: 47177 - DNA, 120 bp, synthetic construct
  source 1..120: mol_type = other DNA
tccaccatgtctgcagggaagaagcagggggaccctgaataaagtttccgtttttcctatttgttaaagtgatagagcattataggaccagagaacaggtgtgtctgtacactgtgcagg

SEQ ID NO: 47178 - DNA, 120 bp, synthetic construct
  source 1..120: mol_type = other DNA
gattagctatctgcatatgtccttgaagaaagtgtctccagtatctaccacccatccatccacccacccatccaaccaaccaaccaaccaaccatccacccatccatccaaccaaccaac

SEQ ID NO: 47179 - DNA, 120 bp, synthetic construct
  source 1..120: mol_type = other DNA
ggagttgggaaagacagaggagtgactactagtggggtttctttgagggggaataaagaggttctaagattagattgtaaaatggttgcacaaccctgtgaatatagtaaaaacgctgaa

SEQ ID NO: 47180 - DNA, 120 bp, synthetic construct; identical to SEQ ID NO: 23751
  source 1..120: mol_type = other DNA

SEQ ID NO: 47181 - DNA, 120 bp, synthetic construct; identical to SEQ ID NO: 23752
  source 1..120: mol_type = other DNA

SEQ ID NO: 47182 - DNA, 120 bp, synthetic construct; identical to SEQ ID NO: 23753
  source 1..120: mol_type = other DNA

SEQ ID NO: 47183 - DNA, 120 bp, synthetic construct; identical to SEQ ID NO: 23754
  source 1..120: mol_type = other DNA

SEQ ID NO: 47184 - DNA, 120 bp, synthetic construct; identical to SEQ ID NO: 23755
  source 1..120: mol_type = other DNA

SEQ ID NO: 47185 - DNA, 120 bp, synthetic construct; identical to SEQ ID NO: 23756
  source 1..120: mol_type = other DNA

SEQ ID NO: 47186 - DNA, 120 bp, synthetic construct; identical to SEQ ID NO: 23757
  source 1..120: mol_type = other DNA

SEQ ID NO: 47187 - DNA, 120 bp, synthetic construct
  source 1..120: mol_type = other DNA
agcaattcccctgcctcagcctcccaagcagctgggactacaggcgcgtgccaccacgcccagctaattttttgtatgttagtagagacggggtttcaccatgttggccaggatggtctt

SEQ ID NO: 47188 - DNA, 120 bp, synthetic construct
  source 1..120: mol_type = other DNA
aactagaaataccatttgacccagccatcctattactgggtatatacccaaagaattataaatcatgctgctataaagacacatgcacacgtatgtttattgtggcactattcacaatag

SEQ ID NO: 47189 - DNA, 120 bp, synthetic construct
  source 1..120: mol_type = other DNA
ggtgggaatgtaaactagtacaactaccatggaaaacagtgtggacattccttaaagaactaaaagtagaactaccatttgacccagcaatcctacttctaggtatctacccagaggaaa

SEQ ID NO: 47190 - DNA, 120 bp, synthetic construct
  source 1..120: mol_type = other DNA
ctcactcataagtggaagcaaagctatgaggatgcaaaggcataagaatgatacaatggactttggaaactgagggcaagagtgggaagaaggtgagggataaaagactactaattggag

SEQ ID NO: 47191 - DNA, 120 bp, synthetic construct; identical to SEQ ID NO: 12099
  source 1..120: mol_type = other DNA

SEQ ID NO: 47192 - DNA, 120 bp, synthetic construct
  source 1..120: mol_type = other DNA
gcccgttctcaatgagctgttgggtacacctcccagacagggtggtggccgggcagaggggctcctcacttcccagtaggggcggccgggcagaggcgcccctcacctcccggacggggc

SEQ ID NO: 47193 - DNA, 120 bp, synthetic construct
  source 1..120: mol_type = other DNA
cctcgtgaggccgaggctggcggatcactcgcggttaggagctgcagaccagccggccaacacagagaaaccccatctccaccaaaaaaatacgaaaaccagtcaggcgtggcggcgcgc

SEQ ID NO: 47194 - DNA, 120 bp, synthetic construct; identical to SEQ ID NO: 12100
  source 1..120: mol_type = other DNA

SEQ ID NO: 47195 - DNA, 120 bp, synthetic construct
  source 1..120: mol_type = other DNA
atgcaaatcaaaaccacgatgagataccataccacaccagttagaatggtgatcattaaaaagtcaggaaacaacaggtgctggagaggatgtggagaaataggaacacttttacactgt

SEQ ID NO: 47196 - DNA, 120 bp, synthetic construct
  source 1..120: mol_type = other DNA
acccgcctcagcctcccaaagtgctgggactacaggcgtgagccaccacgcccggccccttctctaataattctttatttatttatttatttatttattttttttattgatcattcttgg

SEQ ID NO: 47197 - DNA, 120 bp, synthetic construct; identical to SEQ ID NO: 21912
  source 1..120: mol_type = other DNA

SEQ ID NO: 47198 - DNA, 120 bp, synthetic construct; identical to SEQ ID NO: 21913
  source 1..120: mol_type = other DNA

SEQ ID NO: 47199 - DNA, 120 bp, synthetic construct
  source 1..120: mol_type = other DNA
atgggatctaattaaactaaagagcttctgcacagcaaaataatcaacagagtaaacagacaacctaaagaatgggggaaaatttttgcaaactatgcatctaacaaaggtctaatatcc

SEQ ID NO: 47200 - DNA, 120 bp, synthetic construct
  source 1..120: mol_type = other DNA
tgagatggtatctcattgtggttttgatttgcatttctctgatggccagtgatggagagcattttttcaagtgttttttggctgcataaatgtcttcttttgagaagtgtctgttcatgt

SEQ ID NO: 47201 - DNA, 120 bp, synthetic construct
  source 1..120: mol_type = other DNA
ccaattctgtgaagaaagtcattggtagcttgatggggatggcattgaatctgtaaattaccttgggcagtatggccattttcacgatattgattcttcctacccatgagcatggaatat

SEQ ID NO: 47202 - DNA, 120 bp, synthetic construct
  source 1..120: mol_type = other DNA
ctctttttctatttattggaatagtttcagaaggaatggtaccagttcctccttgtacctctggtagaattcggctgtgaatccatctggtcctggactctttttggttggtaagctatt

SEQ ID NO: 47203 - DNA, 120 bp, synthetic construct
  source 1..120: mol_type = other DNA
tgctgaggagagctttacttccaactatgtggtcaattttggaataggtgtgttacggtgctgaaaaaaatgtatattctgttgatttggggtggagagttctgtagatgtctattaggt

SEQ ID NO: 47204 - DNA, 120 bp, synthetic construct
  source 1..120: mol_type = other DNA
ccctttgagggtaacccgacctttctctctggctgcccttaacattttttccttcatttcaactttggtgaatctgaccattatgtgtcttggagttgctcttctcaaggagtatctttg

SEQ ID NO: 47205 - DNA, 120 bp, synthetic construct
  source 1..120: mol_type = other DNA
gagacctatctcacgtacagagatacacacaggctcaaaataaagggatagaggaggatctaccaagccaatggaaaacaagaaaaagcaggggttgcaatgctagtctctgataaaaca

SEQ ID NO: 47206 - DNA, 120 bp, synthetic construct
  source 1..120: mol_type = other DNA
ttaaaagaactagagaagcaagagcaaatgctttcaaaagctagcagaaggcaagaaataactaagatcagagcagaacggaaggagatagagacacaaaaaaaccttcaaaaaatcaat

SEQ ID NO: 47207 - DNA, 120 bp, synthetic construct; identical to SEQ ID NO: 20407
  source 1..120: mol_type = other DNA

SEQ ID NO: 47208 - DNA, 120 bp, synthetic construct
  source 1..120: mol_type = other DNA
ggctgacccccccaccaccctcccggacggggcggctggccaggcagaggggctcctcacttcccagtagggacggccgggcagacgcgcccctcacctcctggatagggcggctggctg

SEQ ID NO: 47209 - DNA, 120 bp, synthetic construct; identical to SEQ ID NO: 20408
  source 1..120: mol_type = other DNA

SEQ ID NO: 47210 - DNA, 120 bp, synthetic construct
  source 1..120: mol_type = other DNA
ggaggtattggggtgaatgtttggatgtggaaggtgttgcaagactcccttgcaaaggagggagaagggactgagtctatttttcctgatgcaaagagttaattataaacattatcatca

SEQ ID NO: 47211 - DNA, 120 bp, synthetic construct
  source 1..120: mol_type = other DNA
cgctcctcacttcctagatgggatggcggcggggaagaggcgctcctcgcttcctagatgggatggcggccgggcagagacgctcctcactttccagactgggcagccaggcagagaggc

SEQ ID NO: 47212 - DNA, 120 bp, synthetic construct
  source 1..120: mol_type = other DNA
ctgtgatgttcaatatggtatctgctaatcatatgtgaccatttaaattttttatttttgagacaggttctccctctgtcacccaggctggagtgcaacacatggctcactgcaacctca

SEQ ID NO: 47213 - DNA, 120 bp, synthetic construct
  source 1..120: mol_type = other DNA
taaaaattatgttgctaatgatgatttaacatatcaaagtggaaaaaaacctttctgtcatatcattaaaaagtcaggaaacaacatgtgctggagaggatgtggagaaataggaagact

SEQ ID NO: 47214 - DNA, 120 bp, synthetic construct; identical to SEQ ID NO: 20652
  source 1..120: mol_type = other DNA

SEQ ID NO: 47215 - DNA, 120 bp, synthetic construct
  source 1..120: mol_type = other DNA
ctggctaacagggtgaaaccccgtctctaccaaaaatacaaaaaattagccaggcgaagtggcaggactcaggaggctgagtcaggagaatggcatgaacctgggaggtggagcttgcag

SEQ ID NO: 47216 - DNA, 120 bp, synthetic construct
  source 1..120: mol_type = other DNA
ttgacattaactagctgtgtgactttagataacttttattctctcacaaaatctgtttcctcatctattacactaggataatagactggttattccccctggcctttttcttttctaata

SEQ ID NO: 47217 - DNA, 120 bp, synthetic construct; identical to SEQ ID NO: 1034
  source 1..120: mol_type = other DNA

SEQ ID NO: 47218 - DNA, 120 bp, synthetic construct; identical to SEQ ID NO: 20610
  source 1..120: mol_type = other DNA

SEQ ID NO: 47219 - DNA, 120 bp, synthetic construct
  source 1..120: mol_type = other DNA
gaggctgaggcacgagaatggtgtgaacctgggaggcagagcttgaagctagcagagatcggccactgccctccagcctgggtgacagagagagactctgtctcaaaaaaaaaaaaaaaa

SEQ ID NO: 47220 - DNA, 120 bp, synthetic construct
  source 1..120: mol_type = other DNA
actaaaaatacaaaaaattagccggctgaagtggcaggcgcctgtagtcccagctactaaggagtctgaggcaggagaatggcgtgaacctgggaggtggtgcttgcagtgagccaagat

SEQ ID NO: 47221 - DNA, 120 bp, synthetic construct; identical to SEQ ID NO: 1033
  source 1..120: mol_type = other DNA

SEQ ID NO: 47222 - DNA, 120 bp, synthetic construct; identical to SEQ ID NO: 1034
  source 1..120: mol_type = other DNA

SEQ ID NO: 47223 - DNA, 120 bp, synthetic construct
  source 1..120: mol_type = other DNA
aatcttgtattccttaaaaatatgacaaggaaaaaacatgtagaaaaaccagaggatttaaaagcaatctacaggccacgcacggtggctcacacctgtaatcccagcactttgcgaggc

SEQ ID NO: 47224 - DNA, 120 bp, synthetic construct; identical to SEQ ID NO: 20611
  source 1..120: mol_type = other DNA

SEQ ID NO: 47225 - DNA, 120 bp, synthetic construct
  source 1..120: mol_type = other DNA
caacttagacatccccttcctttctccccaaggatattgtgtatgtactgtataattataaatgcatagtattatataatatgaaatgtaacacattaaatataaatgttaattatatta

SEQ ID NO: 47226 - DNA, 120 bp, synthetic construct; identical to SEQ ID NO: 20612
  source 1..120: mol_type = other DNA

SEQ ID NO: 47227 - DNA, 120 bp, synthetic construct
  source 1..120: mol_type = other DNA
agaggcaaaggttgtggtgagccaagatcgcgccattgcactccagtctgggcaataagagcgaaactccgcttcaaaagaaaaaaaaaagaaaccaacatgttttagaaatgaggcttc

SEQ ID NO: 47228 - DNA, 120 bp, synthetic construct
  source 1..120: mol_type = other DNA
accaaggaggcagaggttgcagtgagccaagaccgtgccactgcactccagcctgggcaaaagagtgaaattctgtctcactcttataaataaaataaagttaataaaacaaaagcaatt

SEQ ID NO: 47229 - DNA, 120 bp, synthetic construct; identical to SEQ ID NO: 1029
  source 1..120: mol_type = other DNA

SEQ ID NO: 47230 - DNA, 120 bp, synthetic construct; identical to SEQ ID NO: 1030
  source 1..120: mol_type = other DNA

SEQ ID NO: 47231 - DNA, 120 bp, synthetic construct
  source 1..120: mol_type = other DNA
aaaaactttttaagactcagccagggttgggtgtatgccagctacgcaggaggctgaggtgggaggatcagaggactgcttgagcccaggaggctgagactgcagtgagccatgttcata

SEQ ID NO: 47232 - DNA, 120 bp, synthetic construct
  source 1..120: mol_type = other DNA
caaaccccatctctactaagaatacaaaaattagctgggtgtggtggtgtgcacctttaatcctacgtacttgggaggctcaggcatcagaattgcttgaaccagggaggcgcatgatgc

SEQ ID NO: 47233 - DNA, 120 bp, synthetic construct
  source 1..120: mol_type = other DNA
aaatacattatgattattttcttcagtgtacagaagtcatggaagttctggactatctagctacataaaaaatattgggccaggcgcagtggcacacgcctgtaatcccagcactttggg

SEQ ID NO: 47234 - DNA, 120 bp, synthetic construct
  source 1..120: mol_type = other DNA
gttctttaatcccttcctctggccattaaaagcggcagtggggccaggcgcggtggctcccgcctgtaatcccagcactctgggaggcagatgcgggcggatcacgaggtcaggtgatcg

SEQ ID NO: 47235 - DNA, 120 bp, synthetic construct; identical to SEQ ID NO: 20613
  source 1..120: mol_type = other DNA

SEQ ID NO: 47236 - DNA, 120 bp, synthetic construct
  source 1..120: mol_type = other DNA
acaaacaaaagtaatattcatgttttggacattcctatctaaactaggtggaaagagaaaatggagagtactgggttataaggaggcaggtattctagagtaaggaatttggtattttaa

SEQ ID NO: 47237 - DNA, 120 bp, synthetic construct; identical to SEQ ID NO: 1032
  source 1..120: mol_type = other DNA

SEQ ID NO: 47238 - DNA, 120 bp, synthetic construct
  source 1..120: mol_type = other DNA
gaggcagagcttgaagctagcagagatcggccactgccctccagcctgggtgacagagagagactctgtctcaaaaaaaaaaaaaaagaattgtctattttgttaatacaaaataggtat

SEQ ID NO: 47239 - DNA, 120 bp, synthetic construct
  source 1..120: mol_type = other DNA
aagttacaaaagagggttctttaatctcttcctttggcccttaaaatcggcagtagggccgggtgcggtggctcccgcctgtaatcccagcactttgggaggctgaggcgagcagatcac

SEQ ID NO: 47240 - DNA, 120 bp, synthetic construct; identical to SEQ ID NO: 20614
  source 1..120: mol_type = other DNA

SEQ ID NO: 47241 - DNA, 120 bp, synthetic construct; identical to SEQ ID NO: 20615
  source 1..120: mol_type = other DNA

SEQ ID NO: 47242 - DNA, 120 bp, synthetic construct
  source 1..120: mol_type = other DNA
gaaaattttacttataagtgtgtacactattaaaatttttaaaactagtttaaaagatacattacccaagagttgggccgggcgcggtggctcaagcctgtaatcccagcgctttgggag

SEQ ID NO: 47243 - DNA, 120 bp, synthetic construct; identical to SEQ ID NO: 4735
  source 1..120: mol_type = other DNA

SEQ ID NO: 47244 - DNA, 120 bp, synthetic construct; identical to SEQ ID NO: 21945
  source 1..120: mol_type = other DNA

SEQ ID NO: 47245 - DNA, 120 bp, synthetic construct; identical to SEQ ID NO: 20625
  source 1..120: mol_type = other DNA

SEQ ID NO: 47246 - DNA, 120 bp, synthetic construct; identical to SEQ ID NO: 20955
  source 1..120: mol_type = other DNA

SEQ ID NO: 47247 - DNA, 120 bp, synthetic construct; identical to SEQ ID NO: 20956
  source 1..120: mol_type = other DNA

SEQ ID NO: 47248 - DNA, 120 bp, synthetic construct
  source 1..120: mol_type = other DNA
acactgtgaatgttttgaatacccttaattgtacacttaaatagagtaaaaatgggccaggcatggtggctcatgcctgtaatttcaacactttgcaaggctgaggtgggaggatcactt

SEQ ID NO: 47249 - DNA, 120 bp, synthetic construct
  source 1..120: mol_type = other DNA
gtctaggaggcagaagccttgttctcggccttgcaggtgaccccagtgtctctgaattcggccccatatgtgtaggaggggagtgattgcatctgaagatgggagtctggttgggggttt

SEQ ID NO: 47250 - DNA, 120 bp, synthetic construct; identical to SEQ ID NO: 19475
  source 1..120: mol_type = other DNA

SEQ ID NO: 47251 - DNA, 120 bp, synthetic construct; identical to SEQ ID NO: 19476
  source 1..120: mol_type = other DNA

SEQ ID NO: 47252 - DNA, 120 bp, synthetic construct
  source 1..120: mol_type = other DNA
tatggctggatgaccgagtgagactccttctcaaaaacaaaagaaagaaagaaaagcatcaattttagagactgtacccccaccctgtctagcttttgacactgttagagtaggcagata

SEQ ID NO: 47253 - DNA, 120 bp, synthetic construct
  source 1..120: mol_type = other DNA
tccgtctatggtaccggaatgcgcttgagggattcaggcagggaaatcctctgttcgccatcctggatcccgaagatgacaaaggcagttccctccactttcttcccgtagaggaaccta

SEQ ID NO: 47254 - DNA, 120 bp, synthetic construct
  source 1..120: mol_type = other DNA
gagggactcaggtgagggaacttagaaagtgatggagactaagaggggaggagttcagaagaggagacttcgagggggaggggcttggaaaaggaattcagtgggagggacttagagggg

SEQ ID NO: 47255 - DNA, 120 bp, synthetic construct
  source 1..120: mol_type = other DNA
ctgagctagtacataaggtgcaagacgaagtcctctttacttttccctctgcttttctcaagcagaaggagtccctcactgtgaccatcacatctgagaatgtgctgagtctctcctgaa

SEQ ID NO: 47256 - DNA, 120 bp, synthetic construct; identical to SEQ ID NO: 24114
  source 1..120: mol_type = other DNA

SEQ ID NO: 47257 - DNA, 120 bp, synthetic construct
  source 1..120: mol_type = other DNA
caacctccgcctcccaggttcaagcaattctcctgcctcagcgtctcaagtagctgggattacaggcacttgccaccacacccagctatatatgtattatattatatatatatatataat

SEQ ID NO: 47258 - DNA, 120 bp, synthetic construct; identical to SEQ ID NO: 9282
  source 1..120: mol_type = other DNA

SEQ ID NO: 47259 - DNA, 120 bp, synthetic construct; identical to SEQ ID NO: 5369
  source 1..120: mol_type = other DNA

SEQ ID NO: 47260 - DNA, 120 bp, synthetic construct
  source 1..120: mol_type = other DNA
tattatccctttgaataactcttctcccctatctctttctctacctcctctttaggaccaataacttttagatttgcccttttgaggctattttctagatctcgtaggtatgcttcattc

SEQ ID NO: 47261 - DNA, 120 bp, synthetic construct
  source 1..120: mol_type = other DNA
cagaggggctcctcacttcccagaaggggtggccaggcagaggcgccccccacctcccagacagggcggctgctgggcggaggggctcctcacttctcagacagggcggccgggcagaga

SEQ ID NO: 47262 - DNA, 120 bp, synthetic construct
  source 1..120: mol_type = other DNA
taattattttaatctctttgttaaatttatctgatagaattctgaattccttctctgcattatcttgaatttctttgagtttccttaaaacagctatttttaattctctgtgtgaatggc

SEQ ID NO: 47263 - DNA, 120 bp, synthetic construct; identical to SEQ ID NO: 25372
  source 1..120: mol_type = other DNA

SEQ ID NO: 47264 - DNA, 120 bp, synthetic construct; identical to SEQ ID NO: 25373
  source 1..120: mol_type = other DNA

SEQ ID NO: 47265 - DNA, 120 bp, synthetic construct
  source 1..120: mol_type = other DNA
ggaatgcttccagtttttgcccattcagtatgatattggctgtgggtttgtcataaatagctcttattattttgagatacgtcccatcaatacctaatttattgacagtttttagcgtga

SEQ ID NO: 47266 - DNA, 120 bp, synthetic construct
  source 1..120: mol_type = other DNA
gtgtttagagggaaatttatagagtaaatgtccacaggagaaagcaggagagatccaaattgacaccctagaacaaagctggacggagaatgactttgacaagttgagagaagaaggctt

SEQ ID NO: 47267 - DNA, 120 bp, synthetic construct
  source 1..120: mol_type = other DNA
agaaataaaatcctttacagacaagcaaatgctgagcaccaggcctgccctaaaagagctcctgaagaaagcactaaacatggaaatgaacaactggtaccagccactgcaaaatcatgc

SEQ ID NO: 47268 - DNA, 120 bp, synthetic construct
  source 1..120: mol_type = other DNA
tgggtacataacgaaaccaaggcagaaataaagatgttctttgaaaccaacgagaacaaagacacaacataccagaatctctgggacacattcaaagcagtgtgtagagggaaatttata

SEQ ID NO: 47269 - DNA, 120 bp, synthetic construct
  source 1..120: mol_type = other DNA
ccctgggatgcaaggctggttcaatatacacaaatcaatcagtgtaatccagcatataaacagaaccaaagacaaaaaccagatgattatctcaatagatgcagaaaaggcctttgaaaa

SEQ ID NO: 47270 - DNA, 120 bp, synthetic construct
  source 1..120: mol_type = other DNA
cctcagaaataacaccgcatatctacagctatctgatctttgacaaacttgagaaaagcaatggagaaaggattccctatttaataaatggtgctgggaaaactagctagccatatgtag

SEQ ID NO: 47271 - DNA, 120 bp, synthetic construct
  source 1..120: mol_type = other DNA
gagttcatgtcctttgtagggacatggatgaaattggaaatcatcattttcagtcaactatcgcaaggacaaaccaaacaccgcatgttctcactcataggtgggaattgaacaatgaga

SEQ ID NO: 47272 - DNA, 120 bp, synthetic construct; identical to SEQ ID NO: 26010
  source 1..120: mol_type = other DNA

SEQ ID NO: 47273 - DNA, 120 bp, synthetic construct
  source 1..120: mol_type = other DNA
ctcctgcatcagcctccagagtagctgagattacaggcatgtgctaccatgcctggtgaattcataatgaatttttgaagtgcttctctagaccctaggtctagtttttcttaaaaccat

SEQ ID NO: 47274 - DNA, 120 bp, synthetic construct
  source 1..120: mol_type = other DNA
gtgatccacctgattcggcctcccaaagtgctgggattacaggcgtgagccacagtgcctggcctattttatatttttgatattaaatataggtatagactttcctcacttctttttcat

SEQ ID NO: 47275 - DNA, 120 bp, synthetic construct; identical to SEQ ID NO: 25225
  source 1..120: mol_type = other DNA

SEQ ID NO: 47276 - DNA, 120 bp, synthetic construct
  source 1..120: mol_type = other DNA
gtgatgatgtgatggtgatgatgatggtgatgatggtgatggtgatggtggtgatggtgatggtgatgttggtgatgatggtgatggtggtgatgatgtgatcgtaatggtgatgatggt

SEQ ID NO: 47277 - DNA, 120 bp, synthetic construct; identical to SEQ ID NO: 25226
  source 1..120: mol_type = other DNA

SEQ ID NO: 47278 - DNA, 120 bp, synthetic construct
  source 1..120: mol_type = other DNA
tgccccaaatctactgaagaataattactggggattgagctaaaaaacctgcacttttaaattcatacgcccaggtgattcaactgctgctgtcattaggagaagaaagatgcagggtag

SEQ ID NO: 47279 - DNA, 120 bp, synthetic construct
  source 1..120: mol_type = other DNA
tctacttccttccacacagacacggcaaccatccgatttctcaatcttttccccacctttcccgcccttccattccacaaagccgccattgtcatcctggcccgttctcaatgagctgtt

SEQ ID NO: 47280 - DNA, 120 bp, synthetic construct
  source 1..120: mol_type = other DNA
ccagacgatgggcagccaggcagagacactcctcactgccccgtccgggagggaggtgggggggtcagccctccacccggccagccgccccgtctgggaggtgaggggcgcctctgcccg

SEQ ID NO: 47281 - DNA, 120 bp, synthetic construct
  source 1..120: mol_type = other DNA
acggtagttctatttttagctttttgaggaattgtcatactgctttccacagtggttgaactaatataccctcctaccaacagtgtaaaagtgttctcttttctctgcaaccttgccagc

SEQ ID NO: 47282 - DNA, 120 bp, synthetic construct
  source 1..120: mol_type = other DNA
tataggacatctctactccttccctggcaaccaatcacatgcccattaccatcccattaaaacctaatcacccataccccactcaacgccaatatcccatcccacagcacgctttaaaag

SEQ ID NO: 47283 - DNA, 120 bp, synthetic construct
  source 1..120: mol_type = other DNA
aatcccgcttgaagcagccctgagaaacatcgcccattctctctccataccacccccccaaaattttcgccaccccaacacttcaacactattttgttttatttttcttattaatataag

SEQ ID NO: 47284 - DNA, 120 bp, synthetic construct
  source 1..120: mol_type = other DNA
catagatacatagagagaaatcagaaaaagggagcttgatatagaaagaaccctgaaagggagttcgagaccagccgggccaacatggtgaaacctcatccctactaaaactaaaaaacg

SEQ ID NO: 47285 - DNA, 120 bp, synthetic construct
  source 1..120: mol_type = other DNA
agagctcatatggaattctttcttgcaacagttctttcttcacctgtcttatacctgatgctaatttgtaagccactttagtgctggcatcatacatcattaatgtttgcaagcctgtct

SEQ ID NO: 47286 - DNA, 120 bp, synthetic construct
  source 1..120: mol_type = other DNA
tacaaaaattaattcaagatggattaaagacttacatggtagacctaaaaccataaaaacgctagaagaaaacctaggcaataccattcaggacataggcatgggcaaggatttcatgac

SEQ ID NO: 47287 - DNA, 120 bp, synthetic construct; identical to SEQ ID NO: 19844
  source 1..120: mol_type = other DNA

SEQ ID NO: 47288 - DNA, 120 bp, synthetic construct
  source 1..120: mol_type = other DNA
gctaactgcagcctcaaactcctgggctcatgtgatcttccaccccagtcttagaaaaggttgggattgcaggcacgaaccactatgcctggctaatttttaaattttttgtagagacag

SEQ ID NO: 47289 - DNA, 120 bp, synthetic construct
  source 1..120: mol_type = other DNA
ctgggattgtaggcgtgagccatcgtggccatcctggttgtctttactaattctggcatttgcttttcttccatttggaaaccaaatctatttgactttgcagtaagaaagaatttgtgg

SEQ ID NO: 47290 - DNA, 120 bp, synthetic construct
  source 1..120: mol_type = other DNA
gcaacctccctgtctgattctcctgcctcagcctgcccagtgcctgtgattgcaggcgcgcgctgccacgcctgactggttttcatatttttttggtggagacggggtttcgctgtgttg

SEQ ID NO: 47291 - DNA, 120 bp, synthetic construct
  source 1..120: mol_type = other DNA
ggtggggggcgcctctgcctggccgccccttctgggaagtgaggagcccctctgcccggccgccaccccgtctgggaggtgtacccaacagctcattaagaacgggccatgatgacgatg

SEQ ID NO: 47292 - DNA, 120 bp, synthetic construct; identical to SEQ ID NO: 27191
  source 1..120: mol_type = other DNA

SEQ ID NO: 47293 - DNA, 120 bp, synthetic construct
  source 1..120: mol_type = other DNA
ctatttctccacatcctctccagcacctgttgtttcctgactttttaatgattgcctttctaactggtgtgagatggtatctcattgtggttttgatttgcatttctctgatggccagtg

SEQ ID NO: 47294 - DNA, 120 bp, synthetic construct
  source 1..120: mol_type = other DNA
gtggtttgtagttctccttgaagaggtccttcacatcccttgtaagttggatccctaggtattttattctctttgaagcaattgtgaatgggagttcactcatgatttggctctctgttt

SEQ ID NO: 47295 - DNA, 120 bp, synthetic construct
  source 1..120: mol_type = other DNA
atctggtcctggactctttttggttggtaaactattgattattgccccaatttcagctcctgttattggtctattcagagattcaacttcttcctggtttagtcttgggagagtgtatgt

SEQ ID NO: 47296 - DNA, 120 bp, synthetic construct
  source 1..120: mol_type = other DNA
atatttaggatagttagctcttcttgttgaatacatccctttaccattatgtaatggccttctttgtctcttttgatctttgttggtttaaagtctgttttatcagagactaggatcgca

SEQ ID NO: 47297 - DNA, 120 bp, synthetic construct
  source 1..120: mol_type = other DNA
agttgatctcatcggctcctgagacttctgcattcttcacgtagttctcgagccttggttttcagctccatcagctcctttaagcacttctctgtattggttattctagttatacattct

SEQ ID NO: 47298 - DNA, 120 bp, synthetic construct
  source 1..120: mol_type = other DNA
gtttgatctcagactgctgtgctagcaatcagcgagactccgtgggcgtaggaccttccaagccaggtgcgggatataatctcgtggtgcgccgttttttaagccggtctgaaaagcgca
